(19) United States
(12) Patent Application Publication
(10) Pub. No.: US 2003/0165831 A1
(43) Pub. Date: Sep. 4, 2003

(54) Novel genes, compositions, kits, and methods for identification, assessment, prevention, and therapy of ovarian cancer

(76) Inventors: John Lee, Somerville, MA (US); Pamela Thompson, Stow, MA (US); James Lillie, Natick, MA (US)

Correspondence Address: LAHIVE & COCKFIELD, 28 STATE STREET, BOSTON, MA, 02109, US

(21) Appl. No.: 09/814,353

(22) Filed: Mar. 21, 2001

Related U.S. Application Data
(60) Provisional application No. 60/191,031, filed on Mar. 21, 2000.
(60) Provisional application No. 60/207,124, filed on May 25, 2000.
(60) Provisional application No. 60/211,940, filed on Jun. 15, 2000.
(60) Provisional application No. 60/216,820, filed on Jul. 7, 2000.
(60) Provisional application No. 60/220,661, filed on Jul. 25, 2000.
(60) Provisional application No. 60/257,672, filed on Dec. 21, 2000.

(51) Int. Cl. C12Q 1/68; G01N 33/574; C07H 21/04; C12N 9/00; C12P 21/02; C12N 5/06; C07K 16/40

(52) U.S. Cl. 435/6; 435/7.23; 435/69.1; 435/320.1; 435/325; 435/183; 530/388.26; 536/23.2

(57) ABSTRACT

The invention relates to compositions, kits, and methods for detecting, characterizing, preventing, and treating human ovarian cancers. A variety of novel markers are provided, wherein changes in the levels of expression of one or more of the markers is correlated with the presence of ovarian cancer.

### RELATED APPLICATIONS

[0001] The present application claims priority to U.S. provisional patent application serial No. 60/191,031 filed on Mar. 21, 2000, U.S. provisional patent application serial No. 60/207,124, filed on May 25, 2000, U.S. provisional patent application serial no. 60/211,940, filed on Jun. 15, 2000, U.S. provisional patent application serial No. 60/216,820, filed on Jul. 7, 2000, U.S. provisional patent application serial No. 60/220,661, filed on Jul. 25, 2000, and U.S. provisional patent application serial No. 60/257,672, filed on Dec. 21, 2000, all of which are expressly incorporated by reference.

### FIELD OF THE INVENTION

[0002] The field of the invention is ovarian cancer, including diagnosis, characterization, management, and therapy of ovarian cancer.

### BACKGROUND OF THE INVENTION

[0003] Ovarian cancer is responsible for significant morbidity and mortality in populations around the world. Ovarian cancer is classified, on the basis of clinical and pathological features, in three groups, namely elpithelial ovarian cancer (EOC; >90% of ovarian cancer in Western countries), germ cell tumors (circa 2-3% of ovarian cancer), and stromal ovarian cancer (circa 5% of ovarian cancer; Ozols et al., 1997, Cancer Principles and Practice of Oncology, 5th ed., DeVita et al., Eds. pp. 1502). Relative to EOC, germ cell tumors and stromal ovarian cancers are more easily detected and treated at an early stage, translating into higher/better survival rates for patients afflicted with these two types of ovarian cancer.

[0004] There are numerous types of ovarian tumors, some of which are benign, and others of which are malignant. Treatment (including non-treatment) options and predictions of patient outcome depend on accurate classification of the ovarian cancer. Ovarian cancers are named according to the type of cells from which the cancer is derived and whether the ovarian cancer is benign or malignant. Recognized histological tumor types include, for example, serous, mucinous, endometrioid, and clear cell tumors. In addition, ovarian cancers are classified according to recognized grade and stage scales.

[0005] In grade I, the tumor tissue is well differentiated from normal ovarian tissue. In grade II, tumor tissue is moderately well differentiated. In grade III, the tumor tissue is poorly differentiated from normal tissue, and this grade correlates with a less favorable prognosis than grades I and II. Stage I is generally confined within the capsule surrounding one (stage IA) or both (stage IB) ovaries, although in some stage I (i.e. stage IC) cancers, malignant cells may be detected in ascites, in peritoneal rinse fluid, or on the surface of the ovaries. Stage II involves extension or metastasis of the tumor from one or both ovaries to other pelvic structures. In stage IIA, the tumor extends or has metastasized to the uterus, the fallopian tubes, or both. Stage IIB involves extension of the tumor to the pelvis. Stage IIC is stage IIA or IIB in which malignant cells may be detected in ascites, in peritoneal rinse fluid, or on the surface of the ovaries. In stage III, the tumor comprises at least one malignant extension to the small bowel or the omentum, has formed extrapelvic peritoneal implants of microscopic (stage IIIA) or macroscopic (<2 centimeter diameter, stage IIIB; >2 centimeter diameter, stage IIIC) size, or has metastasized to a retroperitoneal or inguinal lymph node (an alternate indicator of stage IIIC). In stage IV, distant (i.e. non-peritoneal) metastases of the tumor can be detected.

[0006] The durations of the various stages of ovarian cancer are not presently known, but are believed to be at least about a year each (Richart et al., 1969, Am. J Obstet. Gynecol. 105:386). Prognosis declines with increasing stage designation. For example, 5-year survival rates for patients diagnosed with stage I, II, III, and IV ovarian cancer are 80%, 57%, 25%, and 8%, respectively.

[0007] Despite being the third most prevalent gynecological cancer, ovarian cancer is the leading cause of death among those afflicted with gynecological cancers. The disproportionate mortality of ovarian cancer is attributable to a substantial absence of symptoms among those afflicted with early-stage ovarian cancer and to difficulty diagnosing ovarian cancer at an early stage. Patients afflicted with ovarian cancer most often present with non-specific complaints, such as abnormal vaginal bleeding, gastrointestinal symptoms, urinary tract symptoms, lower abdominal pain, and generalized abdominal distension. These patients rarely present with paraneoplastic symptoms or with symptoms which clearly indicate their affliction. Presently, less than about 40% of patients afflicted with ovarian cancer present with stage I or stage II. Management of ovarian cancer would be significantly enhanced if the disease could be detected at an earlier stage, when treatments are much more generally efficacious.

[0008] Ovarian cancer may be diagnosed, in part, by collecting a routine medical history from a patient and by performing physical examination, x-ray examination, and chemical and hematological studies on the patient. Hematological tests which may be indicative of ovarian cancer in a patient include analyses of serum levels of proteins designated CA125 and DF3 and plasma levels of lysophosphatidic acid (LPA). Palpation of the ovaries and ultrasound techniques (particularly including endovaginal ultrasound and color Doppler flow ultrasound techniques) can aid detection of ovarian tumors and differentiation of ovarian cancer from benign ovarian cysts. However, a definitive diagnosis of ovarian cancer typically requires performing exploratory laparotomy of the patient.

[0009] Potential tests for the detection of ovarian cancer (e.g., screening, reflex or monitoring) may be characterized by a number of factors. The “sensitivity” of an assay refers to the probability that the test will yield a positive result in an individual afflicted with ovarian cancer. The “specificity” of an assay refers to the probability that the test will yield a negative result in an individual not afflicted with ovarian cancer. The “positive predictive value” (PPV) of an assay is the ratio of true positive results (i.e. positive assay results for patients afflicted with ovarian cancer) to all positive results (i.e. positive assay results for patients afflicted with ovarian cancer +positive assay results for patients not afflicted with ovarian cancer). It has been estimated that in order for an assay to be an appropriate population-wide screening tool for ovarian cancer the assay must have a PPV of at least about 10% (Rosenthal et al., 1998, Sem. Oncol. 25:315-325). It would thus be desirable for a screening assay for detecting ovarian cancer in patients to have a high sensitivity and a high PPV. Monitoring and reflex tests would also require appropriate specifications.

[0010] Owing to the cost, limited sensitivity, and limited specificity of known methods of detecting ovarian cancer, screening, is not presently performed for the general population. In addition, the need to perform laparotomy in order to diagnose ovarian cancer in patients who screen positive for indications of ovarian cancer limits the desirability of population-wide screening, such that a PPV even greater than 10% would be desirable.

[0011] Prior use of serum CA125 level as a diagnostic marker for ovarian cancer indicated that this method exhibited insufficient specificity for use as a general screening method. Use of a refined algorithm for interpreting CA125 levels in serial retrospective samples obtained from patients improved the specificity of the method without shifting detection of ovarian cancer to an earlier stage (Skakes, 1995, Cancer 76:2004). Screening for LPA to detect gynecological cancers including ovarian cancer exhibited a sensitivity of about 96% and a specificity of about 89%. However, CA125based screening methods and LPA-based screening methods are hampered by the presence of CA125 and LPA, respectively, in the serum of patients afflicted with conditions other than ovarian cancer. For example, serum CA125 levels are known to be associated with menstruation, pregnancy, gastrointestinal and hepatic conditions such as colitis and cirrhosis, pericarditis, renal disease, and various non-ovarian malignancies. Serum LPA is known, for example, to be affected by the presence of non-ovarian gynecological malignancies. A screening method having a greater specificity for ovarian cancer than the current screening methods for CA125 and LPA could provide a population-wide screening for early stage ovarian cancer.

[0012] Presently greater than about 60%, of ovarian cancers diagnosed in patients are stage III or stage IV cancers. Treatment at these stages is largely limited to cytoreductive surgery (when feasible) and chemotherapy, both of which aim to slow the spread and development of metastasized tumor. Substantially all late stage ovarian cancer patients currently undergo combination chemotherapy as primary treatment, usually a combination of a platinum compound and a taxane. Median survival for responding patients is about one year. Combination chemotherapy involving agents such as doxorubicin, cyclophosphamide, cisplatin, hexamethylmelamine, paclitaxel, and methotrexate may improve survival rates in these groups, relative to single-agent therapies. Various recently-developed chemotherapeutic agents and treatment regimens have also demonstrated usefulness for treatment of advanced ovarian cancer. For example, use of the topoisomerase I inhibitor topectan, use of amifostine to minimize chemotherapeutic side effects, and use of intraperitoneal chemotherapy for patients having peritoneally implanted tumors have demonstrated at least limited utility. Presently, however, the 5-year survival rate for patients afflicted with stage III ovarian cancer is 25%, and the survival rate for patients afflicted with stage 1V ovarian cancer is 8%.

[0013] In summary, the earlier ovarian cancer is detected, the aggressiveness of therapeutic intervention and the side effects associated with therapeutic intervention are minimized. More importantly, the earlier the cancer is detected, the survival rate and quality of life of ovarian cancer patients is enhanced. Thus, a pressing need exists for methods of detecting ovarian cancer as early as possible. There also exists a need for methods of detecting recurrence of ovarian cancer as well as methods for predicting and monitoring the efficacy of treatment. The present invention satisfies these needs.

### SUMMARY OF THE INVENTION

[0014] The invention relates to novel genes associated with ovarian cancer as well as methods of assessing whether a patient i's afflicted with ovarian cancer. This method comprises the step of comparing the level of expression of a marker in a patient sample, wherein the marker is listed in Tables 1-2, and the normal level of expression of the marker in a control, e.g., a sample from a patient without ovarian cancer. A significant difference between the level of expression of the marker in the patient sample and the normal level is an indication that the patient is afflicted with ovarian cancer. Preferably, a protein corresponding to the marker is a secreted protein. Alternatively, the marker can correspond to a protein having an extracellular portion, to one which is normally expressed in ovarian tissue at a detectable level, or both.

[0015] In one method, the marker(s) are preferably selected such that the positive predictive value of the method is at least about 10%. Also preferred are embodiments of the method wherein the marker is over- or under-expressed by at least two-fold in at least about 20% of stage I ovarian cancer patients, stage 1I ovarian cancer patients, stage III ovarian cancer patients, stage IV ovarian cancer patients, grade I ovarian cancer patients, grade II ovarian cancer patients, grade III ovarian cancer patients, epithelial ovarian cancer patients, stromal ovarian cancer patients, germ cell ovarian cancer patients, malignant ovarian cancer patients, benign ovarian patients, serous neoplasm ovarian cancer patients, mucinous neoplasm ovarian cancer patients, endometrioid neoplasm ovarian cancer patients and/or clear cell neoplasm ovarian cancer patients.

[0016] In one embodiment of the methods of the present invention, the patient sample is an ovary-associated body fluid. Such fluids include, for example, blood fluids, lymph, ascitic fluids, gynecological fluids, cystic fluids, urine, and fluids collected by peritoneal rinsing. In another embodiment, the sample comprises cells obtained from the patient. In this embodiment, the cells may be found in a fluid selected from the group consisting of a fluid collected by peritoneal rinsing, a fluid collected by uterine rinsing, a uterine fluid, a uterine exudate, a pleural fluid, and an ovarian exudate. In another embodiment, the patient sample is in vivo.

[0017] In accordance with the methods of the present invention, the level of expression of the marker in a sample can be assessed, for example, by detecting the presence in the sample of:

[0018] a protein corresponding to the marker or fragment of the protein (e.g. using a reagent, such as an antibody, an antibody derivative, or an antibody fragment, which binds specifically with the protein)

[0019] a transcribed polynucleotide (e.g. an mRNA or a cDNA), or fragment thereof, having at least a portion with which the marker is substantially homologous (e.g. by contacting a mixture of transcribed polynucleotides obtained from the sample with a substrate having one or more of the markers listed in Tables 1-2 fixed thereto at selected positions)

[0020] a transcribed polynucleotide or fragment thereof, wherein the polynucleotide anneals with the marker under stringent hybridization conditions.

[0021] a metabolite which is produced directly (i.e., catalyzed) or indirectly by a protein corresponding to the marker

[0022] The methods of the present invention are particularly useful for patients with an identified pelvic mass or symptoms associated with ovarian cancer. The methods of the present invention can also be of particular use with patients having an enhanced risk of developing ovarian cancer (e.g, patients having a familial history of ovarian cancer, patients identified as having a mutant oncogene, and patients at least about 50 years of age). The methods of the present invention may further be of particular use in monitoring the efficacy of treatment of an ovarian cancer patient (e.g. the efficacy of chemotherapy).

[0023] The methods of the present invention may be performed using a plurality (e.g. 2, 3, 5, or 10 or more) of markers. According to a method involving a plurality of markers, the level of expression in the sample of each of a plurality of markers independently selected from the markers listed in Tables 1-2 is compared with the normal level of expression of each of the plurality of markers in samples of the same type obtained from control humans not afflicted, with ovarian cancer. The markers of Tables 1-2 may also be used in combination with known ovarian cancer markers in the methods of the present invention.

[0024] In a preferred method of assessing whether a patient is afflicted with ovarian cancer (e.g., new detection (“screening”), detection of recurrence, reflex testing), the method comprises comparing:

[0025] a) the level of expression of a marker in a patient sample, wherein at least one marker is selected from the markers of Tables 1-2, and

[0026] b) the normal level of expression of the marker in a control non-ovarian cancer sample.

[0027] A significant difference between the level of expression of the marker in the patient sample and the normal level is an indication that the patient is afflicted with ovarian cancer.

[0028] The methods of the present invention further include a method of assessing the efficacy of a test compound for inhibiting ovarian cancer in a patient. This method comprises comparing:

[0029] a) expression of a marker in a first sample obtained from the patient and maintained in the presence of the test compound, wherein the marker is selected from the group consisting of the markers listed in Tables 1-2, and

[0030] b) expression of the marker in a second sample obtained from the patient and maintained in the absence of the test compound.

[0031] A significant difference between the level of expression of the marker in the first sample, relative to the second sample, is an indication that the test compound is efficacious for inhibiting ovarian cancer in the patient. For example, the first and second samples can be portions of a single sample obtained from the patient or portions of pooled samples obtained from the patient.

[0032] The invention further relates to a method of assessing the efficacy of a therapy for inhibiting ovarian cancer in a patient. This method comprises comparing:

[0033] a) expression of a marker in a first sample obtained from the patient prior to providing at least a portion of the therapy to the patient, wherein the marker is selected from the group consisting of the markers listed in Tables 1-2, and

[0034] b) expression of the marker in a second sample obtained from the patient following provision of the portion of the therapy.

[0035] A significant difference between the level of expression of the marker in the second sample, relative to the first sample, is an indication that the therapy is efficacious for inhibiting ovarian cancer in the patient.

[0036] It will be appreciated that in these methods the “therapy” may be any traditional therapy for treating ovarian cancer including, but not limited to, chemotherapy, radiation therapy and surgical removal of tissue, e.g., an ovarian tumor. Thus, the methods of the invention may be used to evaluate a patient before, during and after thereapy, for example, to evaluate the reduction in tumor burden.

[0037] The present invention therefore further comprises a method for monitoring the progression of ovarian cancer in a patient, the method comprising:

[0038] a) detecting in a patient sample at a first time point, the expression of a marker, wherein the marker is selected from the group consisting of the markers listed in Tables 1-2;

[0039] b) repeating step a) at a subsequent time point in time; and

[0040] c) comparing the level of expression detected in steps a) and b), and therefrom monitoring the progression of ovarian cancer in the patient.

[0041] The invention also includes a method of selecting a composition for inhibiting ovarian cancer in a patient. This method comprises the steps of:

[0042] a) obtaining a sample comprising cancer cells from the patient;

[0043] b) separately maintaining aliquots of the sample in the presence of a plurality of test compositions;

[0044] c) comparing expression of a marker listed in Tables 1-2 in each of the aliquots; and

[0045] d) selecting one of the test compositions which alters the level of expression of the marker in the aliquot containing that test composition, relative to other test compositions.

[0046] In addition, the invention includes a method of inhibiting ovarian cancer in a patient. This method comprises the steps of:

[0047] a) obtaining a sample comprising cancer cells from the patient;

[0048] b) separately maintaining aliquots of the sample in the presence of a plurality of test compositions;

[0049] c) comparing expression of a marker listed in Tables 1-2 in each of the aliquots; and

[0050] d) administering to the patient al least one of the test compositions which alters the level of expression of the marker in the aliquot containing that test composition, relative to other test compositions.

[0051] The invention also includes a kit for assessing whether a patient is afflicted with ovarian cancer. This kit comprises reagents for assessing expression of a marker listed in Tables 1-2.

[0052] In another aspect, the invention relates to a kit for assessing the suitability of each of a plurality of compounds for inhibiting an ovarian cancer in a patient. The kit comprises a reagent for assessing expression of a marker listed in Tables 1-2, and may also comprise a plurality of compounds.

[0053] In another aspect, the invention relates to a kit for assessing the presence of ovarian cancer cells. This kit comprises an antibody, wherein the antibody binds specifically with a protein corresponding to a marker listed in Tables 1-2. The kit may also comprise a plurality of antibodies, wherein the plurality binds specifically with a protein corresponding to a different marker listed in Tables 1-2.

[0054] The invention also includes a kit for assessing the presence of ovarian cancer cells, wherein the kit comprises a nude ic acid probe. The probe binds specifically with a transcribed polynucleotide corresponding to a marker listed in Tables 1-2. The kit may also comprise a plurality of probes, wherein each of the probes binds specifically with a transcribed polynucleotide corresponding to a different marker listed in Tables 1-2.

[0055] The invention further relates to a method of making an isolated hybridoma which produces an antibody useful for assessing whether a patient is afflicted with ovarian cancer. The method comprises isolating a protein corresponding to a marker listed in Tables 1-2, immunizing a mammal using the isolated protein, isolating splenocytes from the immunized mammal, fusing the isolated splenocytes with an immortalized cell line to form hybridomas, and screening individual hybridomas for production of an antibody which specifically binds with the protein to isolate the hybridoma. The invention also includes an antibody produced by this method.

[0056] The invention further includes a method of assessing the ovarian carcinogenic potential of a test compound. This method comprises the steps of:

[0057] a) maintaining separate aliquots of ovarian cells in the presence and absence of the test compound; and

[0058] b) comparing expression of a marker in each of the aliquots.

[0059] The marker is selected from those listed in Tables 1-2. A significantly altered level of expression of the marker in the aliquot maintained in the presence of (or exposed to) the test compound, relative to the aliquot maintained in the absence of the test compound, is an indication that the test compound possesses ovarian carcinogenic potential.

[0060] Additionally, the invention includes a kit for assessing the ovarian carcinogenic potential of a test compound. The kit comprises ovarian cells and a reagent for assessing expression of a marker in each of the aliquots. The marker is selected from those listed in Tables 1-2.

[0061] The invention further relates to a method of treating a patient afflicted with ovarian cancer or at risk of developing ovarian cancer. This method comprises enhancing expression of a marker listed in Tables 1-2 or providing to cells of the patient a protein corresponding to a marker listed in Tables 1-2, wherein the marker is underexpressed in patients afflicted with ovarian cancer. The protein can be provided to the cells, for example, by providing a vector comprising a polynucleotide encoding the protein to the cells.

[0062] The invention includes another method of treating a patient afflicted with ovarian cancer or at risk of developing ovarian cancer. This method comprises inhibiting expression or overexpression of a marker listed in Tables 1-2 by, e.g., providing to cells of the patient an antisense oligonucleotide complementary to a polynucleotide corresponding to a marker listed in Tables 1-2, wherein the marker is overexpressed in patients afflicted with ovarian cancer.

[0063] It will be appreciated that the methods and kits of the present invention may also include known cancer markers including known ovarian cancer markers. It will further be appreciated that the methods and kits may be used to identify cancers other than ovarian cancer.

### DETAILED DESCRIPTION OF THE INVENTION

[0064] The invention relates to newly discovered genes associated with the cancerous state of ovarian cells. It has been discovered that the level of expression of individual genes, also referred to as markers, and combinations of these genes, correlates with the presence of ovarian cancer in a patient. Methods are provided for detecting the presence of ovarian cancer in a sample, the absence of ovarian cancer in a sample, the stage of an ovarian cancer, and with other characteristics of ovarian cancer that are relevant to prevention, diagnosis, characterization, and therapy of ovarian cancer in a patient.

[0065] Definitions

[0066] As used herein, each of the following terms has the meaning associated with it in this section.

[0067] The articles “a” and “an” are used herein to refer to one or to more than one (i.e. to at least one) of the grammatical object of the article. By way of example, “an element” means one element or more than one element.

[0068] A “marker” is a naturally-occurring polymer corresponding to at least one of the novel nucleic acids listed in Tables 1-2. For example, markers include, without limitation, sense and anti-sense strands of genomic DNA (i.e. including any introns occurring therein), RNA generated by transcription of genomic DNA (i.e. prior to splicing), RNA generated by splicing of RNA transcribed from genomic DNA, and proteins generated by translation of spliced RNA (i.e. including proteins both before and after cleavage of normally cleaved regions such as transmembrane signal sequences). As used herein, “marker” may also include a cDNA made by reverse transcription of an RNA generated by transcription of genomic DNA (including spliced RNA).

[0069] The term “probe” refers to any molecule which is capable of selectively binding to a specifically intended target molecule, for example a marker of the invention. Probes can be either synthesized by one skilled in the art, or derived from appropriate biological preparations. For purposes of detection of the target molecule, probes may be specifically designed to be labeled, as described herein. Examples of molecules that can be utilized as probes include, but are not limited to, RNA, DNA, proteins, antibodies, and organic monomers.

[0070] An “ovary-associated” body fluid is a fluid which, when in the body of a patient, contacts or passes through ovarian cells or into which cells or proteins shed from ovarian cells e.g., ovarian epithelium, are capable of passing. Exemplary ovary-associated body fluids include blood fluids, lymph, ascites, gynecological fluids, cystic fluid, urine, and fluids collected by peritoneal rinsing.

[0071] The “normal” level of expression of a marker is the level of expression of the marker in ovarian cells of a patient, e.g. a human, not afflicted with ovarian cancer.

[0072] “Over-expression” and “under-expression” of a marker refer to expression of the marker of a patient at a greater or lesser level, respectively, than normal level of expression of the marker (e.g. at least two-fold greater or lesser level).

[0073] As used herein, the term “promoter/regulatory sequence” means a nucleic acid sequence which is required for expression of a gene product operably linked to the promoter/regulatory sequence. In some instances, this sequence may be the core promoter sequence and in other instances, this sequence may also include an enhancer sequence and other regulatory elements which are required for expression of the gene product. The promoter/regulatory sequence may, for example, be one which expresses the gene product in a tissue-specific manner.

[0074] A “constitutive” promoter is a nucleotide sequence which, when operably linked with a polynucleotide which encodes or specifies a gene product, causes the gene product to be produced in a living human cell under most or all physiological conditions of the cell.

[0075] An “inducible” promoter is a nucleotide sequence which, when operably linked with a polynucleotide which encodes or specifies a gene product, causes the gene product to be produced in a living human cell substantially only when an inducer which corresponds to the promoter is present in the cell.

[0076] A “tissue-specific” promoter is a nucleotide sequence which, when operably linked with a polynucleotide which encodes or specifies a gene product, causes the gene product to be produced in a living human cell substantially only if the cell is a cell of the tissue type corresponding to the promoter.

[0077] A “transcribed polynucleotide” is a polynucleotide (e.g. an RNA, a cDNA, or an analog of one of an RNA or cDNA) which is complementary to or homologous with all or a portion of a mature cDNA made by transcription of a genomic DNA corresponding to a marker of the invention and normal post-transcriptional processing (e.g. splicing), if any, of the transcript.

[0078] “Complementary” refers to the broad concept of sequence complementarity between regions of two nucleic acid strands or between two regions of the same nucleic acid strand. It is known that an adenine residue of a first nucleic acid region is capable of forming specific hydrogen bonds (“base pairing”) with a residue of a second nucleic acid region which is antiparallel to the first region if the residue is thymine or uracil. Similarly, it is known that a cytosine residue of a first nucleic acid strand is capable of base pairing with a residue of a second nucleic acid strand which is antiparallel to the first strand if the residue is guanine. A first region of a nucleic acid is complementary to a second region of the same or a different nucleic acid if, when the two regions are arranged in an antiparallel fashion, at least one nucleotide residue of the first region is capable of base pairing with a residue of the second region. Preferably, the first region comprises a first portion and the second region comprises a second portion, whereby, when the first and second portions are arranged in an antiparallel fashion, at least about 50%, and preferably at least about 75%, at least about 90%, or at least about 95% of the nucleotide residues of the first portion are capable of base pairing with nucleotide residues in the second portion. More preferably, all nucleotide residues of the first portion are capable of base pairing with nucleotide residues in the second portion.

[0079] “Homologous” as used herein, refers to nucleotide sequence similarity between two regions of the same nucleic acid strand or between regions of two different nucleic acid strands. When a nucleotide residue position in both regions is occupied by the same nucleotide residue, then the regions are homologous at that position. A first region is homologous to a second region if at least one nucleotide residue position of each region is occupied by the same residue. Homology between two regions is expressed in terms of the proportion of nucleotide residue positions of the two regions that are occupied by the same nucleotide residue. By way of example, a region having the nucleotide sequence 5′-ATTGCC-3′ and a region having the nucleotide sequence 5′-TATGGC-3′ share 50% homology. Preferably, the first region comprises a first portion and the second region comprises a second portion, whereby, at least about 50%, and preferably at least about 75%, at least about 90%, or at least about 95% of the nucleotide residue positions of each of the portions are occupied by the same nucleotide residue. More preferably, all nucleotide residue positions of each of the portions are occupied by the same nucleotide residue.

[0080] A marker is “fixed” to a substrate if it is covalently or non-covalently associated with the substrate such the substrate can be rinsed with a fluid (e.g. standard saline citrate, pH 7.4) without a substantial fraction of the marker dissociating from the substrate.

[0081] As used herein, a “naturally-occurring” nucleic acid molecule refers to an RNA or DNA molecule having a nucleotide sequence that occurs in nature (e.g. encodes a natural protein).

[0082] Expression of a marker in a patient is “significantly” higher or lower than the normal level of expression of a marker if the level of expression of the marker is greater or less, respectively, than the normal level by an amount greater than the standard error of the assay employed to assess expression, and preferably at least twice, and more preferably three, four, five or ten times that amount. Alternately, expression of the marker in the patient can be considered “significantly” higher or lower than the normal level of expression if the level of expression is at least about two, and preferably at least about three, four, or five times, higher or lower, respectively, than the normal level of expression of the marker.

[0083] Ovarian cancer is “inhibited” if at least one symptom of the cancer is alleviated, terminated, slowed, or prevented. As used herein, ovarian cancer is also “inhibited” if recurrence or metastasis of the cancer is reduced, slowed, delayed, or prevented.

[0084] A kit is any manufacture (e.g. a package or container) comprising at least one reagent, e.g. a probe, for specifically detecting a marker of the invention, the manufacture being promoted, distributed, or sold as a unit for performing the methods of the present invention.

[0085] Description

[0086] The present invention is based, in part, on identification of novel markers which are over-expressed in ovarian cancer cells as compared to their expression in normal (i.e. non-cancerous) ovarian cells. The markers of the invention correspond to DNA, RNA, and polypeptide molecules which can be detected in one or both of normal and cancerous ovarian cells. The enhanced expression of one or more of these markers in ovarian cells is herein correlated with the cancerous state of the tissue. The invention thus includes compositions, kits, and methods for assessing the cancerous state of ovarian cells (e.g. cells obtained from a human, cultured human cells, archived or preserved human cells and in vivo cells).

[0087] The compositions, kits, and methods of the invention have the following uses, among others:

[0088] 1) assessing whether a patient is afflicted with ovarian cancer;

[0089] 2) assessing the stage of ovarian cancer in a human patient;

[0090] 3) assessing the grade of ovarian cancer in a patient;

[0091] 4) assessing the benign or malignant nature of ovarian cancer in a patient;

[0092] 5) assessing the histological type of neoplasm (e.g. serous, mucinous, endometroid, or clear cell neoplasm) associated with ovarian cancer in a patient;

[0093] 6) making an isolated hybridoma which produces an antibody useful for assessing whether a patient is afflicted with ovarian cancer;

[0094] 7) assessing the presence of ovarian cancer cells;

[0095] 8) assessing the efficacy of one or more test compounds for inhibiting ovarian cancer in a patient;

[0096] 9) assessing the efficacy of a therapy for inhibiting ovarian cancer in a patient;

[0097] 10) monitoring the progression of ovarian cancer in a patient;

[0098] 11) selecting a composition or therapy for inhibiting ovarian cancer in a patient;

[0099] 12) treating a patient afflicted with ovarian cancer;

[0100] 13) inhibiting ovarian cancer in a patient;

[0101] 14) assessing the ovarian carcinogenic potential of a test compound; and

[0102] 15) inhibiting an ovarian cancer in a patient at risk for developing ovarian cancer.

[0103] The invention thus includes a method of assessing whether a patient is afflicted with ovarian cancer. This method comprises comparing the level of expression of a marker in a patient sample and the normal level of expression of the marker in a control, e.g., a non-ovarian cancer sample. A significant difference between the level of expression of the marker in the patient sample and the normal level is an indication that the patient is afflicted with ovarian cancer. The marker is selected from the group consisting of the markers listed in Tables 1-2.

[0104] The polynucleotides set forth in Tables 1-2 represent previously unidentified nucleotide sequences. These nucleotide sequences were identified through subtracted library experiments described herein. Also provided by this invention are polynucleotides that correspond to the polynucleotides of Tables 1-2. In one embodiment, these polynucleotides are obtained by identification of a larger fragment or full-length coding sequence of these polynucleotides. Gene delivery vehicles, host cells, compositions and databases (all described herein) containing these polynucleotides are also provided by this invention.

[0105] Any marker or combination of markers listed in Tables 1-2, as well as any known markers in combination with the markers set forth in Tables 1-2, may be used in the compositions, kits, and methods of the present invention. In general, it is preferable to use markers for which the difference between the level of expression of the marker in ovarian cancer cells and the level of expression of the same marker in normal ovarian cells is as great as possible. Although this difference can be as small as the limit of detection of the method for assessing expression of the marker, it is preferred that the difference be at least greater than the standard error of the assessment method, and preferably a difference of at least 2-, 3-, 4-, 5-, 6-, 7-, 8-, 9-, 10-, 15-, 20-, 25-, 100-, 500-, 1000-fold or greater.

[0106] It is recognized that certain markers correspond to proteins which are secreted from ovarian cells (i.e. one or both of normal and cancerous cells) to the extracellular space surrounding the cells. These markers are preferably used in certain embodiments of the compositions, kits, and methods of the invention, owing to the fact that the protein corresponding to each of these markers can be detected in an ovary-associated body fluid sample, which may be more easily collected from a human patient than a tissue biopsy sample. In addition, preferred in vivo techniques for detection of a protein corresponding to a marker of the invention include introducing into a subject a labeled antibody directed against the protein. F or example, the antibody can be labeled with a radioactive marker whose presence and location in a subject can be detected by standard imaging techniques.

[0107] It is a simple matter for the skilled artisan to determine whether any particular marker corresponds to a secreted protein. In order to make this determination, the protein corresponding to a marker is expressed in a test cell (e.g. a cell of an ovarian cell line), extracellular fluid is collected, and the presence or absence of the protein in the extracellular fluid is assessed (e.g. using a labeled antibody which binds specifically with the protein).

[0108] The following is an example of a method which can be used to detect secretion of a protein corresponding to a marker of the invention. About 8×10⁵ 293T cells are incubated at 37° C. in wells containing growth medium (Dulbecco's modified Eagle's medium {DMEM} supplemented with 10% fetal bovine serum) under a 5% (v/v) CO₂, 95% air atmosphere to about 60-70% confluence. The cells are then transfected using a standard transfection mixture comprising 2 micrograms of DNA comprising an expression vector encoding the protein and 10 microliters of LipofectAMINE™ (GIBCO/BRL Catalog no. 18342-012) per well. The transfection mixture is maintained for about 5 hours, and then replaced with fresh growth medium and maintained in an air atmosphere. Each well is gently rinsed twice with DMEM which does not contain methionine or cysteine (DMEM-MC; ICN Catalog no. 16-42454). About 1 milliliter of DMEM-MC and about 50 microcuries of Trans-³⁵S™ reagent (ICN Catalog no. 51006) are added to each well. The wells are maintained under the 5% CO₂ atmosphere described above and incubated at 37° C. for a selected period. Following incubation, 150 microliters of conditioned medium is removed and centrifuged to remove floating cells and debris. The presence of the protein in the supernatant is an indication that the protein is secreted.

[0109] Examples of ovary-associated body fluids include blood fluids (e.g. whole blood, blood serum, blood having platelets removed therefrom, etc.), lymph, ascitic fluids, gynecological fluids (e.g. ovarian, fallopian, and uterine secretions, menses, vaginal douching fluids, fluids used to rinse cervical cell samples, etc.), cystic fluid, urine, and fluids collected by peritoneal rinsing (e.g. fluids applied and collected during laparoscopy or fluids instilled into and withdrawn from the peritoneal cavity of a human patient). In these embodiments, the level of expression of the marker can be assessed by assessing the amount (e.g. absolute amount or concentration) of the marker in an ovary-associated body fluid obtained from a patient. The fluid can, of course, be subjected to a variety of well-known post-collection preparative and storage techniques (e.g. storage, freezing, ultrafiltration, concentration, evaporation, centrifugation, etc.) prior to assessing the amount of the marker in the fluid.

[0110] Many ovary-associated body fluids (i.e. usually excluding urine) can have ovarian cells, e.g. ovarian epithelium, therein, particularly when the ovarian cells are cancerous, and, more particularly, when the ovarian cancer is metastasizing. Cell-containing fluids which can contain ovarian cancer cells include, but are not limited to, peritoneal ascites, fluids collected by peritoneal rinsing, fluids collected by uterine rinsing, uterine fluids such as uterine exudate and menses, pleural fluid, and ovarian exudates. Thus, the compositions, kits, and methods of the invention can be used to detect expression of markers corresponding to proteins having at least one portion which is displayed on the surface of cells which express it. Examples of such proteins are indicated in the Tables herein. Although not every protein having at least one cell-surface portion is indicated in the Tables, it is a simple matter for the skilled artisan to determine whether the protein corresponding to any particular marker comprises a cell-surface protein. For example, immunological methods may be used to detect such proteins on whole cells, or well known computer-based sequence analysis methods (e.g. the SIGNALP program; Nielsen et al., 1997, Protein Engineering 10:1-6) may be used to predict the presence of at least one extracellular domain (i.e. including both secreted proteins and proteins having at least one cell-surface domain). Expression of a marker corresponding to a protein having at least one portion which is displayed on the surface of a cell which expresses it may be detected without necessarily lysing the cell (e.g. using a labeled antibody which binds specifically with a cell-surface domain of the protein).

[0111] Expression of a marker of the invention may be assessed by any of a wide variety of well known methods for detecting expression of a transcribed molecule or protein. Non-limiting examples of such methods include immunological methods for detection of secreted, cell-surface, cytoplasmic, or nuclear proteins, protein purification methods, protein function or activity assays, nucleic acid hybridization methods, nucleic acid reverse transcription methods, and nucleic acid amplification methods.

[0112] In a preferred embodiment, expression of a marker is assessed using an antibody (e.g. a radio-labeled, chromophore-labeled, fluorophore-labeled, or enzyme-labeled antibody), an antibody derivative (e.g. an antibody conjugated with a substrate or with the protein or ligand of a protein-ligand pair {e.g. biotin-streptavidin}), or an antibody fragment (e.g. a single-chain antibody, an isolated antibody hypervariable domain, etc.) which binds specifically with a protein corresponding to the marker, such as the protein encoded by the open reading frame corresponding to the marker or such a protein which has undergone all or a portion of its normal post-translational modification.

[0113] In another preferred embodiment, expression of a marker is assessed by preparing mRNA/cDNA (i.e. a transcribed polynucleotide) from cells in a patient sample, and by hybridizing the mRNA/cDNA with a reference polynucleotide which is a complement of a polynucleotide comprising the marker, and fragments thereof. cDNA can, optionally, be amplified using any of a variety of polymerase chain reaction methods prior to hybridization with the reference polynucleotide; preferably, it is not amplified. Expression of one or more markers can likewise be detected using quantitative PCR to assess the level of expression of the marker(s). Alternatively, any of the many known methods of detecting mutations or variants (e.g. single nucleotide polymorphisms, deletions, etc.) of a marker of the invention may be used to detect occurrence of a marker in a patient.

[0114] In a related embodiment, a mixture of transcribed polynucleotides obtained from the sample is contacted with a substrate having fixed thereto a polynucleotide complementary to or homologous with at least a portion (e.g. at least 7, 10, 15, 20, 25, 30, 40, 50, 100, 500, or more nucleotide residues) of a marker of the invention. If polynucleotides complementary to or homologous with are differentially detectable on the substrate (e.g. detectable using different chromophores or fluorophores, or fixed to different selected positions), then the levels of expression of a plurality of markers can be assessed simultaneously using a single substrate (e.g. a “gene chip” microarray of polynucleotides fixed at selected positions). When a method of assessing marker expression is used which involves hybridization of one nucleic acid with another, it is preferred that the hybridization be performed under stringent hybridization conditions.

[0115] Because the compositions, kits, and methods of the invention rely on detection of a difference in expression levels of one or more markers of the invention, it is preferable that the level of expression of the marker is significantly greater than the minimum detection limit of the method used to assess expression in at least one of normal ovarian cells and cancerous ovarian cells.

[0116] It is understood that by routine screening of additional patient samples using one or more of the markers of the invention, it will be realized that certain of the markers are over- or under-expressed in cancers of various types, including specific ovarian cancers, as well as other cancers such as breast cancer, cervical cancer, etc. For example, it will be confirmed that some of the markers of the invention are over- or under-expressed in most (i.e. 50% or more) or substantially all (i.e. 80% or more) of ovarian cancer. Furthermore, it will be confirmed that certain of the markers of the invention are associated with ovarian cancer of various stages (i.e. stage I, II, III, and IV ovarian cancers, as well as subclassifications IA, IB, IC, IIA, IIB, IIC, IIIA, IIIB, and IIIC, using the FIGO Stage Grouping system for primary carcinoma of the ovary; 1987, Am. J. Obstet. Gynecol. 156:236), of various histologic subtypes (e.g. serous, mucinous, endometroid, and clear cell subtypes, as well as subclassifications and alternate classifications adenocarcinoma, papillary adenocarcinoma, papillary cystadenocarcinoma, surface papillary carcinoma, malignant adenofibroma, cystadenofibroma, adenocarcinoma, cystadenocarcinoma, adenoacanthoma, endometrioid stromal sarcoma, mesodermal (Müllerian) mixed tumor, mesonephroid tumor, malignant carcinoma, Brenner tumor, mixed epithelial tumor, and undifferentiated carcinoma, using the WHO/FIGO system for classification of malignant ovarian tumors; Scully, Atlas of Tumor Pathology, 3d series, Washington D.C.), and various grades (i.e. grade I {well differentiated}, grade II {moderately well differentiated}, and grade III {poorly differentiated from surrounding normal tissue}). In addition, as a greater number of patient samples are assessed for expression of the markers of the invention and the outcomes of the individual patients from whom the samples were obtained are correlated, it will also be confirmed that altered expression of certain of the markers of the invention are strongly correlated with malignant cancers and that altered expression of other markers of the invention are strongly correlated with benign tumors. The compositions, kits, and methods of the invention are thus useful for characterizing one or more of the stage, grade, histological type, and benign/malignant nature of ovarian cancer in patients. In addition, these compositions, kits, and methods can be used to detect and differentiate epithelial, stromal, and germ cell ovarian cancers.

[0117] When the compositions, kits, and methods of the invention are used for characterizing one or more of the stage, grade, histological type, and benign/malignant nature of ovarian cancer in a patient, it is preferred that the marker or panel of markers of the invention is selected such that a positive result is obtained in at least about 20%, and preferably at least about 40%, 60%, or 80%, and more preferably in substantially all patients afflicted with an ovarian cancer of the corresponding stage, grade, histological type, or benign/malignant nature. Preferably, the marker or panel of markers of the invention is selected such that a PPV of greater than about 10% is obtained for the general population (more preferably coupled with an assay specificity greater than 99.5%).

[0118] When a plurality of markers of the invention are used in the compositions, kits, and methods of the invention, the level of expression of each marker in a patient sample can be compared with the normal level of expression of each of the plurality of markers in non-cancerous samples of the same type, either in a single reaction mixture (i.e. using reagents, such as different fluorescent probes, for each marker) or in individual reaction mixtures corresponding to one or more of the markers. In one embodiment, a significantly enhanced level of expression of more than one of the plurality of markers in the sample, relative to the corresponding normal levels, is an indication that the patient is afflicted with ovarian cancer. In another embodiment, a significantly lower level of expression in the sample of each of the plurality of markers, relative to the corresponding normal levels, is an indication that the patient is afflicted with ovarian cancer. In yet another embodiment, a significantly enhanced level of expression of one or more marks and a significantly lower level of expression of one or more markers in a sample relative to the corresponding normal levels, is an indication that the patient is afflicted with ovarian cancer. When a plurality of markers is used, it is preferred that 2, 3, 4, 5, 8, 10, 12, 15, 20, 30, or 50 or more individual markers be used, wherein fewer markers are preferred.

[0119] In order to maximize the sensitivity of the compositions, kits, and methods of the invention (i.e. by interference attributable to cells of non-ovarian origin in a patient sample), it is preferable that the marker of the invention used therein be a marker which has a restricted tissue distribution, e.g., normally not expressed in a non-epithelial tissue, and more preferably a marker which is normally not expressed in a non-ovarian tissue.

[0120] Only a small number of markers are known to be associated with ovarian cancers (e.g. AKT2, Ki-RAS, ERBB2, c-MYC, RB1, and TP53; Lynch, supra). These markers are not, of course, included among the markers of the invention, although they may be used together with one or more markers of the invention in a panel of markers, for example. It is well known that certain types of genes, such as oncogenes, tumor suppressor genes, growth factor-like genes, protease-like genes, and protein kinase-like genes are often involved with development of cancers of various types. Thus, among the markers of the invention, use of those which correspond to proteins which resemble known proteins encoded by known oncogenes and tumor suppressor genes, and those which correspond to proteins which resemble growth factors, proteases, and protein kinases are preferred.

[0121] Known oncogenes and tumor suppressor genes include, for example, abl, abr, akt2, apc, bcl2a, bcl2, bcl2B, bcl3, bcr, brca1, brca2, cbl, ccnd1, cdc42, cdk4, crk-II, csflr/fins, dbl, dcc, dpc4/smad4, e-cad, e2fl/rbap, egf/erbb-1, elk1, elk3, eph, erg, ets1, ets2, fer, fgr/src2,fli1/ergb2, fos, fps/fes, fra1, fra2, fyn, hck, hek, her2/erbb-2/neu, her3/erbb-3, her4/erbb-4, hras1, hst2, hst1, igfbp2, ink4a, ink4b, int2/fgf3, jun, junb, jund, kip2, kit, kras2a, kras2b, lck, lyn, mas, max, mcc, mdm2, met, mlh1, mmp10, mos, msh2, msh3, msh6, myb, myba, mybb, myc, mycl1, mycn, nf1, nf2, nme2, nras, p53, pdgfb, phb, pim1, pms1, pms2, ptc, pten, raf1, rap1a, rbl, rel, ret, ros1, ski, src1, tal1, tgfbr2, tgfb3, tgfbr3, thra1, thrb, tiam1, timp3, tjp1, tp53, trk, vav, vhl, vil2, waf1, wnt1, wnt2, wt1, and yes1 (Hesketh, 1997, In: The Oncogene and Tumour Suppressor Gene Facts Book, 2nd Ed., Academic Press; Fishel et al., 1994, Science 266:1403-1405).

[0122] Known growth factors include platelet-derived growth factor alpha, platelet-derived growth factor beta (simian sarcoma viral {v-sis} oncogene homolog), thrombopoietin (myeloproliferative leukemia virus oncogene ligand, megakaryocyte growth and development factor), erythropoietin, B cell growth factor, macrophage stimulating factor 1 (hepatocyte growth factor-like protein), hepatocyte growth factor (hepapoietin A), insulin-like growth factor 1 (somatomedia C), hepatoma-derived growth factor, amphiregulin (schwannoma-derived growth factor), bone morphogenetic proteins 1, 2, 3, 3 beta, and 4, bone morphogenetic protein 7 (osteogenic protein 1), bone morphogenetic protein 8 (osteogenic protein 2), connective tissue growth factor, connective tissue activation peptide 3, epidermal growth factor (EGF), teratocarcinomaderived growth factor 1, endothelin, endothelin 2, endothelin 3, stromal cell-derived factor 1, vascular endothelial growth factor (VEGF), VEGF-B, VEGF-C, placental growth factor (vascular endothelial growth factor-related protein), transforming growth factor alpha, transforming growth factor beta | and its precursors, transforming growth factor beta 2 and its precursors, fibroblast growth factor 1 (acidic), fibroblast growth factor 2 (basic), fibroblast growth factor 5 and its precursors, fibroblast growth factor 6 and its precursors, fibroblast growth factor 7 (keratinocyte growth factor), fibroblast growth factor 8 (androgen-induced), fibroblast growth factor 9 (glia-activating factor), pleiotrophin (heparin binding growth factor 8, neurite growth-promoting factor 1), brain-derived neurotrophic factor, and recombinant glial growth factor 2.

[0123] Known proteases include interleukin-1 beta convertase and its precursors, Mch6 and its precursors, Mch2 isoform alpha, Mch4, Cpp32 isoform alpha, Lice2 gamma cysteine protease, Ich-1S, Ich-1L, Ich-2 and its precursors, TY protease, matrix metalloproteinase 1 (interstitial collagenase), matrix metalloproteinase 2 (gelatinase A, 72 kD gelatinase, 72 kD type IV collagenase), matrix metalloproteinase 7 (matrilysin), matrix metalloproteinase 8 (neutrophil collagenase), matrix metalloproteinase 12 (macrophage elastase), matrix metalloproteinase 13 (collagenase 3), metallopeptidase 1, cysteine-rich metalloprotease (disintegrin) and its precursors, subtilisin-like protease Pc8 and its precursors, chymotrypsin, snake venom-like protease, cathepsin 1, cathepsin D (lysosomal aspartyl protease), stromelysin, aminopeptidase N, plasminogen, tissue plasminogen activator, plasminogen activator inhibitor type II, and urokinase-type plasminogen activator.

[0124] Known protein kinases include DAP kinase, serine/threonine protein kinases NIK, PK428, Krs-2, SAK, and EMK, interferon-inducible double stranded RNA dependent protein kinase, FAST kinase, AIM1, IPL1-like midbody-associated protein kinase-1, NIMA-like protein kinase 1 (NLK1), the cyclin-dependent kinases (cdk1-10), checkpoint kinase Chk1, Nek3 protein kinase, BMK1 beta kinase, Clk1, Clk2, Clk3, extracellular signal-regulated kinases 1, 3, and 6, cdc28 protein kinase 1, cdc28 protein kinase 2, pLK, Myt1, c-Jun N-terminal kinase 2, Cam kinase 1, the MAP kinases, insulin-stimulated protein kinase 1, beta-adrenergic receptor kinase 2, ribosomal protein S6 kinase, kinase suppressor of ras-1 (KSR1), putative serine/threonine protein kinase Prk, PkB kinase, cAMP-dependent protein kinase, cGMP-dependent protein kinase, type II cGMP-dependent protein kinase, protein kinases Dyrk2, Dyrk3, and Dyrk4, Rho-associated coiled-coil containing protein kinase p160ROCK, protein tyrosine kinase t-Ror1, Ste20-related kinases, cell adhesion kinase beta, protein kinase 3, stress-activated protein kinase 4, protein kinase Zpk, serine kinase hPAK65, dual specificity mitogen-activated protein kinases 1 and 2, casein kinase 1 gamma 2, p21-activated protein kinase Pak1, lipid-activated protein kinase PRK2, focal adhesion kinase, dual-specificity tyrosine-phosphorylation regulated kinase, myosin light chain kinase, serine kinases SRPK2, TESK1, and VRK2, B lymphocyte serine/threonine protein kinase, stress-activated protein kinases JNK1 and JNK2, phosphorylase kinase, protein tyrosine kinase Tec, Jak2 kinase, protein kinase Ndr, MEK kinase 3, SHB adaptor protein (a Src homology 2 protein), agammaglobulinaemia protein-tyrosine kinase (Atk), protein kinase ATR, guanylate kinase 1, thrombopoeitin receptor and its precursors, DAG kinase epsilon, and kinases encoded by oncogenes or viral oncogenes such as v-fgr (Gardner-Rasheed), v-abl (Abelson murine leukemia viral oncogene homolog 1), v-arg (Abelson murine leukemia viral oncogene homolog, Abelson-related gene), v-fes and v-fps (feline sarcoma viral oncogene and Fujinami avian sarcoma viral oncogene homologs), proto-oncogene c-cot, oncogene pim-1, and oncogene mas1.

[0125] It is recognized that the compositions, kits, and methods of the invention will be of particular utility to patients having an enhanced risk of developing ovarian cancer and their medical advisors. Patients recognized as having an enhanced risk of developing ovarian-cancer include, for example, patients having a familial history of ovarian cancer, patients identified as having a mutant oncogene (i.e. at least one allele), and patients of advancing age (i.e. women older than about 50 or 60 years).

[0126] The level of expression of a marker in normal (i.e. non-cancerous) human ovarian tissue can be assessed in a variety of ways. In one embodiment, this normal level of expression is assessed by assessing the level of expression of the marker in a portion of ovarian cells which appears to be non-cancerous and by comparing this normal level of expression with the level of expression in a portion of the ovarian cells which is suspected of being cancerous. For example, when laparoscopy or other medical procedure, reveals the presence of a lump on one portion of a patient's ovary, but not on another portion of the same ovary or on the other ovary, the normal level of expression of a marker may be assessed using one or both or the non-affected ovary and a non-affected portion of the affected ovary, and this normal level of expression may be compared with the level of expression of the same marker in an affected portion (i.e. the lump) of the affected ovary. Alternately, and particularly as further information becomes available as a result of routine performance of the methods described herein, population-average values for normal expression of the markers of the invention may be used. In other embodiments, the ‘normal’ level of expression of a marker may be determined by assessing expression of the marker in a patient sample obtained from a non-cancer-afflicted patient, from a patient sample obtained from a patient before the suspected onset of ovarian cancer in the patient, from archived patient samples, and the like.

[0127] The invention includes compositions, kits, and methods for assessing the presence of ovarian cancer cells in a sample (e.g. an archived tissue sample or a sample obtained from a patient). These compositions, kits, and methods are substantially the same as those described above, except that, where necessary, the compositions, kits, and methods are adapted for use with samples other than patient samples. For example, when the sample to be used is a parafinized, archived human tissue sample, it can be necessary to adjust the ratio of compounds in the compositions of the invention, in the kits of the invention, or the methods used to assess levels of marker expression in the sample. Such methods are well known in the art and within the skill of the ordinary artisan.

[0128] The invention includes a kit for assessing the presence of ovarian cancer cells (e.g. in a sample such as a patient sample). The kit comprises a plurality of reagents, each of which is capable of binding specifically with a nucleic acid or polypeptide corresponding to a marker of the invention. Suitable reagents for binding with a polypeptide corresponding to a marker of the invention include antibodies, antibody derivatives, antibody fragments, and the like. Suitable reagents for binding with a nucleic acid (e.g. a genomic DNA, an mRNA, a spliced mRNA, a cDNA, or the like) include complementary nucleic acids. For example, the nucleic acid reagents may include oligonucleotides (labeled or non-labeled) fixed to a substrate, labeled oligonucleotides not bound with a substrate, pairs of PCR primers, molecular beacon probes, and the like.

[0129] The kit of the invention may optionally comprise additional components useful for performing the methods of the invention. By way of example, the kit may comprise fluids (e.g. SSC buffer) suitable for annealing complementary nucleic acids or for binding an antibody with a protein with which it specifically binds, one or more sample compartments, an instructional material which describes performance of a method of the invention, a sample of normal ovarian cells, a sample of ovarian cancer cells, and the like.

[0130] The invention also includes a method of making an isolated hybridoma which produces an antibody useful for assessing whether patient is afflicted with an ovarian cancer. In this method, a protein corresponding to a marker of the invention is isolated (e.g. by purification from a cell in which it is expressed or by transcription and translation of a nucleic acid encoding the protein in vivo or in vitro using known methods). A vertebrate, preferably a mammal such as a mouse, rat, rabbit, or sheep, is immunized using the isolated protein. The vertebrate may optionally (and preferably) be immunized at least one additional time with the isolated protein, so that the vertebrate exhibits a robust immune response to the protein. Splenocytes are isolated from the immunized vertebrate and fused with an immortalized cell line to form hybridomas, using any of a variety of methods well known in the art. Hybridomas formed in this manner are then screened using standard methods to identify one or more hybridomas which produce an antibody which specifically binds with the protein. The invention also includes hybridomas made by this method and antibodies made using such hybridomas.

[0131] The invention also includes a method of assessing the efficacy of a test compound for inhibiting ovarian cancer cells. As described above, differences in the level of expression of the markers of the invention correlate with the cancerous state of ovarian cells. Although it is recognized that changes in the levels of expression of certain of the markers of the invention likely result from the cancerous state of ovarian cells, it is likewise recognized that changes in the levels of expression of other of the markers of the invention induce, maintain, and promote the cancerous state of those cells. Thus, compounds which inhibit an ovarian cancer in a patient will cause the level of expression of one or more of the markers of the invention to change to a level nearer the normal level of expression for that marker (i.e. the level of expression for the marker in non-cancerous ovarian cells).

[0132] This method thus comprises comparing expression of a marker in a first ovarian cell sample and maintained in the presence of the test compound and expression of the marker in a second ovarian cell sample and maintained in the absence of the test compound. A significant alteration in the level of expression of a marker listed in Tables 1-2 is an indication that the test compound inhibits ovarian cancer. The ovarian cell samples may, for example, be aliquots of a single sample of normal ovarian cells obtained from a patient, pooled samples of normal ovarian cells obtained from a patient, cells of a normal ovarian cell line, aliquots of a single sample of ovarian cancer cells obtained from a patient, pooled samples of ovarian cancer cells obtained from a patient, cells of an ovarian cancer cell line, or the like. In one embodiment, the samples are ovarian cancer cells obtained from a patient and a plurality of compounds known to be effective for inhibiting various ovarian cancers are tested in order to identify the compound which is likely to best inhibit the ovarian cancer in the patient.

[0133] This method may likewise be used to assess the efficacy of a therapy for inhibiting ovarian cancer in a patient. In this method, the level of expression of one or more markers of the invention in a pair of samples (one subjected to the therapy, the other not subjected to the therapy) is assessed. As with the method of assessing the efficacy of test compounds, if the therapy induces a significant alteration in the level of expression of a marker listed in Tables 1-2 then the therapy is efficacious for inhibiting ovarian cancer. As above, if samples from a selected patient are used in this method, then alternative therapies can be assessed in vitro in order to select a therapy most likely to be efficacious for inhibiting ovarian cancer in the patient.

[0134] As described herein, ovarian cancer in patients is associated with an altereration in the level of expression of one or more markers listed in Tables 1-2. While, as discussed above, some of these changes in expression level result from occurrence of the ovarian cancer, others of these changes induce, maintain, and promote the cancerous state of ovarian cancer cells. Thus, ovarian cancer characterized by an increase in the level of expression of one or more markers listed in either or both of Tables 1-2 can be inhibited by inhibiting expression of those markers.

[0135] Expression of a marker listed in Tables 1-2 can be inhibited in a number of ways generally known in the art. For example, an antisense oligonucleotide can be provided to the ovarian cancer cells in order to inhibit transcription, translation, or both, of the marker(s). Alternately, a polynucleotide encoding an antibody, an antibody derivative, or an antibody fragment, and operably linked with an appropriate promoter/regulator region, can be provided to the cell in order to generate intracellular antibodies which will inhibit the function or activity of the protein corresponding to the marker(s). Using the methods described herein., a variety of molecules, particularly including molecules sufficiently small that they are able to cross the cell membrane, can be screened in order to identify molecules which inhibit expression of the marker(s). The compound so identified can be provided to the patient in order to inhibit expression of the marker(s) in the ovarian cancer cells of the patient.

[0136] Expression of a marker listed in Tables 1-2 can be enhanced in a number of ways generally known in the art. For example, a polynucleotide encoding the marker and operably linked with-an appropriate promoter/regulator region can be provided to ovarian cancer cells of the patient in order to induce enhanced expression of the protein (and mRNA) corresponding to the marker therein. Alternatively, if the protein is capable of crossing the cell membrane, inserting itself in the cell membrane, or is normally a secreted protein, then expression of the protein can be enhanced by providing the protein (e.g. directly or by way of the bloodstream or another ovary-associated fluid) to ovarian cancer cells in the patient.

[0137] As described above, the cancerous state of human ovarian cells is correlated with changes in the levels of expression of the markers of the invention. The invention includes a method for assessing the human ovarian cell carcinogenic potential of a test compound. This method comprises maintaining separate aliquots of human ovarian cells in the presence and absence of the test compound. Expression of a marker of the invention in each of the aliquots is compared. A significant alteration in the level of expression of a marker listed in Tables 1-2 in the aliquot maintained in the presence of the test compound (relative to the aliquot maintained in the absence of the test compound) is an indication that the test compound possesses human ovarian cell carcinogenic potential. The relative carcinogenic potentials of various test compounds can be assessed by comparing the degree of enhancement or inhibition of the level of expression of the relevant markers, by comparing the number of markers for which the level of expression is enhanced or inhibited, or by comparing both.

[0138] Various aspects of the invention are described in further detail in the following subsections.

[0139] I. Isolated Nucleic Acid Molecules

[0140] One aspect of the invention pertains to novel isolated nucleic acid molecules that correspond to a marker of the invention, including nucleic acids which encode a polypeptide corresponding to a marker of the invention or a portion of such a polypeptide. Isolated nucleic acids of the invention also include nucleic acid molecules sufficient for use as hybridization probes to identify nucleic acid molecules that correspond to a marker of the invention, including nucleic acids which encode a polypeptide corresponding to a marker of the invention, and fragments of such nucleic acid molecules, e.g., those suitable for use as PCR primers for the amplification or mutation of nucleic acid molecules. As used herein, the term “nucleic acid molecule” is intended to include DNA molecules (e.g., cDNA or genomic DNA) and RNA molecules (e.g., mRNA) and analogs of the DNA or RNA generated using nucleotide analogs. The nucleic acid molecule can be single-stranded or double-stranded, but preferably is double-stranded DNA.

[0141] An “isolated” nucleic acid molecule is one which is separated from other nucleic acid molecules which are present in the natural source of the nucleic acid molecule. Preferably, an “isolated” nucleic acid molecule is free of sequences (preferably protein-encoding sequences) which naturally flank the nucleic acid (i.e., sequences located at the 5′ and 3′ ends of the nucleic acid) in the genomic DNA of the organism from which the nucleic acid is derived. For example, in various embodiments, the isolated nucleic acid molecule can contain less than about 5 kB, 4 kB, 3 kB, 2 kB, 1 kB, 0.5 kB or 0.1 kB of nucleotide sequences which naturally flank the nucleic acid molecule in genomic DNA of the cell from which the nucleic acid is derived. Moreover, an “isolated” nucleic acid molecule, such as a cDNA molecule, can be substantially free of other cellular material, or culture medium when produced by recombinant techniques, or substantially free of chemical precursors or other chemicals when chemically synthesized.

[0142] A nucleic acid molecule of the present invention can be isolated using standard molecular biology techniques and the sequence information in the database records described herein. Using all or a portion of such nucleic acid sequences, nucleic acid molecules of the invention can be isolated using standard hybridization and cloning techniques (e.g., as described in Sambrook et al., ed., Molecular Cloning: A Laboratory Manual, 2nd ed., Cold Spring Harbor Laboratory Press, Cold Spring Harbor, N.Y., 1989).

[0143] A nucleic acid molecule of the invention can be amplified using cDNA, mRNA, or genomic DNA as a template and appropriate oligonucleotide primers according to standard PCR amplification techniques. The nucleic acid so amplified can be cloned into an appropriate vector and characterized by DNA sequence analysis. Furthermore, oligonucleotides corresponding to all or a portion of a nucleic acid molecule of the invention can be prepared by standard synthetic techniques, e.g., using an automated DNA synthesizer.

[0144] In another preferred embodiment, an isolated nucleic acid molecule of the invention comprises a nucleic acid molecule which has a nucleotide sequence complementary to the nucleotide sequence of a nucleic acid corresponding to a marker of the invention or to the nucleotide sequence of a nucleic acid encoding a protein which corresponds to a marker of the invention. A nucleic acid molecule which is complementary to a given nucleotide sequence is one which is sufficiently complementary to the given nucleotide sequence that it can hybridize to the given nucleotide sequence thereby forming a stable duplex.

[0145] Moreover, a nucleic acid molecule of the invention can comprise only a portion of a nucleic acid sequence, wherein the full length nucleic acid sequence comprises a marker of the invention or which encodes a polypeptide corresponding to a marker of the invention. Such nucleic acids can be used, for example, as a probe or primer. The probe/primer typically is used as one or more substantially purified oligonucleotides. The oligonucleotide typically comprises a region of nucleotide sequence that hybridizes under stringent conditions to at least about 7, preferably about 15, more preferably about 25, 50, 75, 100, 125, 150, 175, 200, 250, 300, 350, or 400 or more consecutive nucleotides of a nucleic acid of the invention.

[0146] Probes based on the sequence of [a nucleic acid molecule of the invention can be used to detect transcripts or genomic sequences corresponding to one or more markers of the invention. The probe comprises a label group attached thereto, e.g., a radioisotope, a fluorescent compound, an enzyme, or an enzyme co-factor. Such probes can be used as part of a diagnostic test kit for identifying cells or tissues which misexpress the protein, such as by measuring levels of a nucleic acid molecule encoding the protein in a sample of cells from a subject, e.g., detecting mRNA levels or determining whether a gene encoding the protein has been mrnutated or deleted.

[0147] The invention further encompasses nucleic acid molecules that differ, due to degeneracy of the genetic code, from the nucleotide sequence of nucleic acids encoding a protein which corresponds to a marker of the invention, and thus encode the same protein.

[0148] It will be appreciated by those skilled in the art that DNA sequence polymorphisms that lead to changes in the amino acid sequence can exist within a population (e.g., the human population). Such genetic polymorphisms can exist among individuals within a population due to natural allelic variation. An allele is one of a group of genes which occur alternatively at a given genetic locus. In addition, it will be appreciated that DNA polymorphisms that affect RNA expression levels can also exist that may affect the overall expression level of that gene (e.g., by affecting regulation or degradation).

[0149] As used herein, the phrase “allelic variant” refers to a nucleotide sequence which occurs at a given locus or to a polypeptide encoded by the nucleotide sequence.

[0150] As used herein, the terms “gene” and “recombinant gene” refer to nucleic acid molecules comprising an open reading frame encoding a polypeptide corresponding to a marker of the invention. Such natural allelic variations can typically result in 1-5% variance in the nucleotide sequence of a given gene. Alternative alleles can be identified by sequencing the gene of interest in a number of different individuals. This can be readily carried out by using hybridization probes to identify the same genetic locus in a variety of individuals. Any and all such nucleotide variations and resulting amino acid polymorphisms or variations that are the result of natural allelic variation and that do not alter the functional activity are intended to be within the scope of the invention.

[0151] In another embodiment, an isolated nucleic acid molecule of the invention is at least 7, 15, 20, 25, 30, 40, 60, 80, 100, 150, 200, 250, 300, 350, 400, 450, 550, 650, 700, 800, 900, 1000, 1200, 1400, 1600, 1800, 2000, 2200, 2400, 2600, 2800, 3000, 3500, 4000, 4500, or more nucleotides in length and hybridizes under stringent conditions to a nucleic acid corresponding to a marker of the invention or to a nucleic acid encoding a protein corresponding to a marker of the invention. As used herein, the term “hybridizes under stringent conditions” is intended to describe conditions for hybridization and washing under which nucleotide sequences at least 75% (80%, 85%, preferably 90%) identical to each other typically remain hybridized to each other. Such stringent conditions are known to those skilled in the art and can be found in sections 6.3.1-6.3.6 of Current Protocols in Molecular Biology, John Wiley & Sons, N.Y. (1989). A preferred, non-limiting example of stringent hybridization conditions for annealing two single-stranded DNA each of which is at least about 100 bases in length and/or for annealing a single-stranded DNA and a single-stranded RNA each of which is at least about 100 bases in length, are hybridization in 6×sodium chloride/sodium citrate (SSC) at about 45° C., followed by one or more washes in 0.2×SSC, 0.1% SDS at 50-65° C. Further preferred hybridization conditions are taught in Lockhart, et al., Nature Biotechnology, Volume 14, 1996 August: 1675-1680; Breslauer, et al., Proc. Natl. Acad. Sci. USA, Volume 83, 1986 June: 3746-3750; Van Ness, et al, Nucleic Acids Research, Volume 19, No. 19, 1991 September: 5143-5151; McGraw, et al., BioTechniques, Volume 8, No. 6 1990: 674-678; and Milner, et al., Nature Biotechnology, Volume 15, 1997 June: 537-541, all expressly incorporated by reference.

[0152] In addition to naturally-occurring allelic variants of a nucleic acid molecule of the invention that can exist in the population, the skilled artisan will further appreciate that sequence changes can be introduced by mutation thereby leading to changes in the amino acid sequence of the encoded protein, without altering the biological activity of the protein encoded thereby. For example, one can make nucleotide substitutions leading to amino acid substitutions at “non-essential” amino acid residues. A “non-essential” amino acid residue is a residue that can be altered from the wild-type sequence without altering the biological activity, whereas an “essential” amino acid residue is required for biological activity. For example, amino acid residues that are not conserved or only semi-conserved among homologs of various species may be non-essential for activity and thus would be Likely targets for alteration. Alternatively, amino acid residues that are conserved among the homologs of various species (e.g., murine and human) may be essential for activity and thus would not be likely targets for alteration.

[0153] Accordingly, another aspect of the invention pertains to nucleic acid molecules encoding a polypeptide of the invention that contain changes in amino acid residues that are not essential for activity. Such polypeptides differ in amino acid sequence from the naturally-occurring proteins which correspond to the markers of the invention, yet retain biological activity. In one embodiment, such a protein has an amino acid sequence that is at least about 40% identical, 50%, 60%, 70%, 80%, 90%, 95%, or 98% identical to the amino acid sequence of one of the proteins which correspond to the markers of the invention.

[0154] An isolated nucleic acid molecule encoding a variant protein can be created by introducing one or more nucleotide substitutions, additions or deletions into the nucleotide sequence of nucleic acids of the invention, such that one or more amino acid residue substitutions, additions, or deletions are introduced into the encoded protein. Mutations can be introduced by standard techniques, such as site-directed mutagenesis and PCR-mediated mutagenesis. Preferably, conservative amino acid substitutions are made at one or more predicted non-essential amino acid residues. A “conservative amino acid substitution” is one in which the amino acid residue is replaced with an amino acid residue having a similar side chain. Families of amino acid residues having similar side chains have been defined in the art. These families include amino acids with basic side chains (e.g., lysine, arginine, histidine), acidic side chains (e.g., aspartic acid, glutamic acid), uncharged polar side chains (e.g., glycine, asparagine, glutamine, serine, threonine, tyrosine, cysteine), non-polar side chains (e.g., alanine, valine, leucine, isoleucine, proline, phenylalanine, methionine, tryptophan), beta-branched side chains (e.g., threonine, valine, isoleucine) and aromatic side chains (e.g., tyrosine, phenylalanine, tryptophan, histidine). Alternatively, mutations can be introduced randomly along all or part of the coding sequence, such as by saturation mutagenesis, and the resultant mutants can be screened for biological activity to identify mutants that retain activity. Following mutagenesis, the encoded protein can be expressed recombinantly and the activity of the protein can be determined.

[0155] The present invention encompasses antisense nucleic acid molecules, i.e., molecules which are complementary to a sense nucleic acid of the invention, e.g., complementary to the coding strand of a double-stranded cDNA molecule corresponding to a marker of the invention or complementary to an mRNA sequence corresponding to a marker of the invention. Accordingly, an antisense nucleic acid of the invention can hydrogen bond to (i.e. anneal with) a sense nucleic acid of the invention. The antisense nucleic acid can be complementary to an entire coding strand, or to only a portion thereof, e.g., all or part of the protein coding region (or open reading frame). An antisense nucleic acid molecule can also be antisense to all or part of a noncoding region of the coding strand of a nucleotide sequence encoding a polypeptide of the invention. The non-coding regions (“5′ and 3′ untranslated regions”) are the 5′ and 3′ sequences which flank the coding region and are not translated into amino acids.

[0156] An antisense oligonucleotide can be, for example, about 5, 10, 15, 20, 25, 30, 35, 40, 45, or 50 or more nucleotides in length. An antisense nucleic acid of the invention can be constructed using chemical synthesis and enzymatic ligation reactions using procedures known in the art. For example, an antisense nucleic acid (e.g., an antisense oligonucleotide) can be chemically synthesized using naturally occurring nucleotides or variously modified nucleotides designed to increase the biological stability of the molecules or to increase the physical stability of the duplex formed between the antisense and sense nucleic acids, e.g., phosphorothioate derivatives and acridine substituted nucleotides can be used. Examples of modified nucleotides which can be used to generate the antisense nucleic acid include 5-fluorouracil, 5-bromouracil, 5-chlorouracil, 5-iodouracil, hypoxanthine, xanthine, 4-acetylcytosine, 5(carboxyhydroxylmethyl) uracil, 5-carboxymethylaminomethyl-2-thiouridine, 5-carboxymethylaminomethyluracil, dihydrouracil, beta-D-galactosylqueosine, inosine, N6-isopentenyladenine, 1-methylguanine, 1-methylinosine, 2,2-dimethylguanine, 2-methyladenine, 2-methylguanine, 3-methylcytosine, 5-methylcytosine, N6-adenine, 7-methylguanine, 5-methylaminomethyluracil, 5-methoxyaminomethyl-2-thiouracil, beta-D-mannosylqueosine, 5′-methoxycarboxymethyluracil, 5-methoxyuracil, 2-methylthio-N6-isopentenyladenine, uracil-5-oxyacetic acid (v), wybutoxosine, pseudouracil, queosine, 2-thiocytosine, 5-methyl-2-thiouracil, 2-thiouracil, 4-thiouracil, 5-methyluracil, uracil-5-oxyacetic acid methylester, uracil-5-oxyacetic acid (v), 5-methyl-2-thiouracil, 3-(3-amino-3-N-2-carboxypropyl) uracil, (acp3)w, and 2,6-diaminopurine. Alternatively, the antisense nucleic acid can be produced biologically using an expression vector into which a nucleic acid has been sub-cloned in an antisense orientation (i.e., RNA transcribed from the inserted nucleic acid will be of an antisense orientation to a target nucleic acid of interest, described further in the following subsection).

[0157] The antisense nucleic acid molecules of the invention are typically administered to a subject or generated in situ such that they hybridize with or bind to cellular mRNA and/or genomic DNA encoding a polypeptide corresponding to a selected marker of the invention to thereby inhibit expression of the marker, e.g., by inhibiting transcription and/or translation. The hybridization can be by conventional nucleotide complementarity to form a stable duplex, or, for example, in the case of an antisense nucleic acid molecule which binds to DNA duplexes, through specific interactions in the major groove of the double helix. Examples of a route of administration of antisense nucleic acid molecules of the invention includes direct injection at a tissue site or infusion of the antisense nucleic acid into an ovary-associated body fluid. Alternatively, antisense nucleic acid molecules can be modified to target selected cells and then administered systemically. For example, for systemic administration, antisense molecules can be modified such that they specifically bind to receptors or antigens expressed on a selected cell surface, e.g., by linking the antisense nucleic acid molecules to peptides or antibodies which bind to cell surface receptors or antigens. The antisense nucleic acid molecules can also be delivered to cells using the vectors described herein. To achieve sufficient intracellular concentrations of the antisense molecules, vector constructs in which the antisense nucleic acid molecule is placed under the control of a strong pol II or pol III promoter are preferred.

[0158] An antisense nucleic acid molecule of the invention can be an α-anomeric nucleic acid molecule. An α-anomeric nucleic acid molecule forms specific double-stranded hybrids with complementary RNA in which, contrary to the usual α-units, the strands run parallel to each other (Gaultier et al., 1987, Nucleic Acids Res. 15:6625-6641). The antisense nucleic acid molecule can also comprise a 2′-o-methylribonucleotide (Inoue et al., 1987, Nucleic Acids Res. 15:6131-6148) or a chimeric RNA-DNA analogue (Inoue et al., 1987, FEBS Lett. 215:327-330).

[0159] The invention also encompasses ribozymes. Ribozymes are catalytic RNA molecules with ribonuclease activity which are capable of cleaving a single-stranded nucleic acid, such as an mRNA, to which they have a complementary region. Thus, ribozymes (e.g., hammerhead ribozymes as described in Haselhoff and Gerlach, 1988, Nature 334:585-591) can be used to catalytically cleave mRNA transcripts to thereby inhibit translation of the protein encoded by the mRNA. A ribozyme having specificity for a nucleic acid molecule encoding a polypeptide corresponding to a marker of the invention can be designed based upon the nucleotide sequence of a cDNA corresponding to the marker. For example, a derivative of a Tetrahymena L-19 IVS RNA can be constructed in which the nucleotide sequence of the active site is complementary to the nucleotide sequence to be cleaved (see Cech et al U.S. Pat. No. 4,987,071; and Cech et al. U.S. Pat. No. 5,116,742). Alternatively, an mRNA encoding a polypeptide of the invention can be used to select a catalytic RNA having a specific ribonuclease activity from a pool of RNA molecules (see, e.g., Bartel and Szostak, 1993, Science 261:1411-1418).

[0160] The invention also encompasses nucleic acid molecules which form triple helical structures. For example, expression of a polypeptide of the invention can be inhibited by targeting nucleotide sequences complementary to the regulatory region of the gene encoding the polypeptide (e.g., the promoter and/or enhancer) to form triple helical structures that prevent transcription of the gene in target cells. See generally Helene (1991) Anticancer Drug Des. 6(6):569-84; Helene (1992) Ann. N.Y. Acad. Sci. 660:27-36; and Maher (1992) Bioassays 14(12):807-15.

[0161] In various embodiments, the nucleic acid molecules of the invention can be modified at the base moiety, sugar moiety or phosphate backbone to improve, e.g., the stability, hybridization, or solubility of the molecule. For example, the deoxyribose phosphate backbone of the nucleic acids can be modified to generate peptide nucleic acids (see Hyrup et al., 1996, Bioorganic & Medicinal Chemistry 4(1): 5-23). As used herein, the terms “peptide nucleic acids” or “PNAs” refer to nucleic acid mimics, e.g., DNA mimics, in which the deoxyribose phosphate backbone is replaced by a pseudopeptide backbone and only the four natural nucleobases are retained. The neutral backbone of PNAs has been shown to allow for specific hybridization to DNA and RNA under conditions of low ionic strength. The synthesis of PNA oligomers can be performed using standard solid phase peptide synthesis protocols as described in Hyrup et al. (1996), supra; Perry-O'Keefe et al. (1996) Proc. Natl. Acad. Sci. USA 93:14670-675.

[0162] PNAs can be used in therapeutic and diagnostic applications. For example, PNAs can be used as antisense or antigene agents for sequence-specific modulation of gene expression by, e.g., inducing transcription or translation arrest or inhibiting replication. PNAs can also be used, e.g., in the analysis of single base pair mutations in a gene by, e.g., PNA directed PCR clamping; as artificial restriction enzymes when used in combination with other enzymes, e.g., S1 nucleases (Hyrup (1996), supra; or as probes or primers for DNA sequence and hybridization (Hyrup, 1996, supra; Perry-O'Keefe et al., 1996, Proc. Natl. Acad. Sci. USA 93:14670-675).

[0163] In another embodiment, PNAs can be modified, e.g., to enhance their stability or cellular uptake, by attaching lipophilic or other helper groups to PNA, by the formation of PNA-DNA chimeras, or by the use of liposomes or other techniques of drug delivery known in the art. For example, PNA-DNA chimeras can be generated which can combine the advantageous properties of PNA and DNA. Such chimeras allow DNA recognition enzymes, e.g., RNASE H and DNA polymerases, to interact with the DNA portion while the PNA portion would provide high binding affinity and specificity. PNA-DNA chimeras can be linked using linkers of appropriate lengths selected in terms of base stacking, number of bonds between the nucleobases, and orientation (Hyrup, 1996, supra). The synthesis of PNA-DNA chimeras can be performed as described in Hyrup (1996), supra, and Finn et al. (1996) Nucleic Acids Res. 24(17):3357-63. For example, a DNA chain can be synthesized on a solid support using standard phosphoramidite coupling chemistry and modified nucleoside analogs. Compounds such as 5′-(4-methoxytrityl)amino-5′-deoxy-thymidine phosphoramidite can be used as a link between the PNA and the 5′ end of DNA (Mag et al., 1989, Nucleic Acids Res. 17:5973-88). PNA monomers are then coupled in a step-wise manner to produce a chimeric molecule with a 5′ PNA segment and a 3′ DNA segment (Finn et al., 1996, Nucleic Acids Res. 24(17):3357-63). Alternatively, chimeric molecules can be synthesized with a 5′ DNA segment and a 3′ PNA segment (Peterser et al., 1975, Bioorganic Med. Chem. Lett. 5:1119-11124).

[0164] In other embodiments, the oligonucleotide can include other appended groups such as peptides (e.g., for targeting host cell receptors in vivo), or agents facilitating transport across the cell membrane (see, e.g., Letsinger et al., 1989, Proc. Natl. Acad. Sci. USA 86:6553-6556; Lemaitre et al., 1987, Proc. Natl. Acad. Sci. USA 84:648-652; PCT Publication No. WO 88/09810) or the blood-brain barrier (see, e.g., PCT Publication No. WO 89/10134). In addition, oligonucleotides can be modified with hybridization-triggered cleavage agents (see, e.g., Krol et al., 1988, Bio/Techniques 6:958-976) or intercalating agents (see, e.g., Zon, 1988, Pharm. Res. 5:539-549). To this end, the oligonucleotide can be conjugated to another molecule, e.g., a peptide, hybridization triggered cross-linking agent, transport agent, hybridization-triggered cleavage agent, etc.

[0165] The invention also includes molecular beacon nucleic acids having at least one region which is complementary to a nucleic acid of the invention, such that the molecular beacon is useful for quantitating the presence of the nucleic acid of the invention in a sample. A “molecular beacon” nucleic acid is a nucleic acid comprising a pair of complementary regions and having a fluorophore and a fluorescent quencher associated therewith. The fluorophore and quencher are associated with different portions of the nucleic acid in such an orientation that when the complementary regions are annealed with one another, fluorescence of the fluorophore is quenched by the quencher. When the complementary regions of the nucleic acid are not annealed with one another, fluorescence of the fluorophore is quenched to a lesser degree. Molecular beacon nucleic acids are described, for example, in U.S. Pat. No. 5,876,930.

[0166] II. Isolated Proteins and Antibodies

[0167] One aspect of the invention pertains to isolated proteins which correspond to individual markers of the invention, and biologically active portions thereof, as well as polypeptide fragments suitable for use as immunogens to raise antibodies directed against a polypeptide corresponding to a marker of the invention. In one embodiment, the native polypeptide corresponding to a marker can be isolated from cells or tissue sources by an appropriate purification scheme using standard protein purification techniques. In another embodiment, polypeptides corresponding to a marker of the invention are produced by recombinant DNA techniques. Alternative to recombinant expression, a polypeptide corresponding to a marker of the invention can be synthesized chemically using standard pepti de synthesis techniques.

[0168] An “isolated” or “purified” protein or biologically active portion thereof is substantially free of cellular material or other contaminating proteins from the cell or tissue source from which the protein is derived, or substantially free of chemical precursors or other chemicals when chemically synthesized. The language “substantially free of cellular material” includes preparations of protein in which the protein is separated from cellular components of the cells from which it is isolated or recombinantly produced. Thus, protein that is substantially free of cellular material includes preparations of protein having less than about 30%, 20%, 10%, or 5% (by dry weight) of heterologous protein (also referred to herein as a “contaminating protein”). When the protein or biologically active portion thereof is recombinantly produced, it is also preferably substantially free of culture medium, i.e., culture medium represents less than about 20%, 10%, or 5% of the volume of the protein preparation. When the protein is produced by chemical synthesis, it is preferably substantially free of chemical precursors or other chemicals, i.e. it is separated from chemical precursors or other chemicals which are involved in the synthesis of the protein. Accordingly such preparations of the protein have less than about 30%, 20%, 10%, 5% (by dry weight) of chemical precursors or compounds other than the polypeptide of interest.

[0169] Biologically active portions of a polypeptide corresponding to a marker of the invention include polypeptides comprising amino acid sequences sufficiently identical to or derived from the amino acid sequence of the protein corresponding to the marker, which include fewer amino acids than the full length protein, and exhibit at least one activity of the corresponding full-length protein. Typically, biologically active portions comprise a domain or motif with at least one activity of the corresponding protein. A biologically active portion of a protein of the invention can be a polypeptide which is, for example, 10, 25, 50, 100 or more canino acids in length. Moreover, other biologically active portions, in which other regions of the protein are deleted, can be prepared by recombinant techniques and evaluated for one or more of the functional activities of the native form of a polypeptide of the invention.

[0170] Preferred polypeptides are encoded by the nucleotide sequences of Tables 1-2. Other useful proteins are substantially identical (e.g., at least about 40%, preferably 50%, 60%, 70%, 80%, 90%, 95%, or 99%) to one of these sequences and retain the functional activity of the protein of the corresponding naturally-occurring protein yet differ in amino acid sequence due to natural allelic variation or mutagenesis.

[0171] To determine the percent identity of two amino acid sequences or of two nucleic acids, the sequences are aligned for optimal comparison purposes (e.g., gaps can be introduced in the sequence of a first amino acid or nucleic acid sequence for optimal alignment with a second amino or nucleic acid sequence). The amino acid residues or nucleotides at corresponding amino acid positions or nucleotide positions are then compared. When a position in the first sequence is occupied by the same amino acid residue or nucleotide as the corresponding position in the second sequence, then the molecules are identical at that position. The percent identity between the two sequences is a function of the number of identical positions shared by the sequences (i.e., % identity=# of identical positions/total # of positions (e.g., overlapping positions)×100). In one embodiment the two sequences are the same length.

[0172] The determination of percent identity between two sequences can be accomplished using a mathematical algorithm. A preferred, non-limiting example of a mathematical algorithm utilized for the comparison of two sequences is the algorithm of Karlin and Altschul (1990) Proc. Natl. Acad. Sci. USA 87:2264-2268, modified as in Karlin and Altschul (1993) Proc. Natl. Acad. Sci. USA 90:5873-5877. Such an algorithm is incorporated into the NBLAST and XBLAST programs of Altschul, et al. (1990) J. Mol. Biol. 215:403-410. BLAST nucleotide searches can be performed with the NBLAST program, score=100, wordlength=12 to obtain nucleotide sequences homologous to a nucleic acid molecules of the invention. BLAST protein searches can be performed with the XBLAST program, score=50, wordlength=3 to obtain amino acid sequences homologous to a protein molecules of the invention. To obtain gapped alignments for comparison purposes, Gapped BLAST can be utilized as described in Altschul et al. (1997) Nucleic Acids Res. 25:3389-3402. Alternatively, PSI-Blast can be used to perform an iterated search which detects distant relationships between molecules. When utilizing BLAST, Gapped BLAST, and PSI-Blast programs, the default parameters of the respective programs (e.g., XBLAST and NBLAST) can be used. See http://www.ncbi.nlm.nih.gov. Another preferred, non-limiting example of a mathematical algorithm utilized for the comparison of sequences is the algorithm of Myers and Miller, (1988) CABIOS 4:11-17. Such an algorithm is incorporated into the ALIGN program (version 2.0) which is part of the GCG sequence alignment software package. When utilizing the ALIGN program for comparing amino acid sequences, a PAM120 weight residue table, a gap length penalty of 12, and a gap penalty of 4 can be used. Yet another useful algorithm for identifying regions of local sequence similarity and alignment is the FASTA algorithm as described in Pearson and Lipman (1988) Proc. Natl. Acad. Sci. USA 85:2444-2448. When using the FASTA algorithm for comparing nucleotide or amino acid sequences, a PAM120 weight residue table can, for example, be used with a k-tuple value of 2.

[0173] The percent identity between two sequences can be determined using techniques similar to those described above, with or without allowing gaps. In calculating percent identity, only exact matches are counted.

[0174] The invention also provides chimeric or fusion proteins corresponding to a marker of the invention. As used herein, a “chimeric protein” or “fusion protein” comprises all or part (preferably a biologically active part) of a polypeptide corresponding to a marker of the invention operably linked to a heterologous polypeptide (i.e., a polypeptide other than the polypeptide corresponding to the marker). Within the fusion protein, the term “operably linked” is intended to indicate that the polypeptide of the invention and the heterologous polypeptide are fused in-frame to each other. The heterologous polypeptide can be fused to the amino-terminus or the carboxyl-terminus of the polypeptide of the invention.

[0175] One useful fusion protein is a GST fusion protein in which a polypeptide corresponding to a marker of the invention is fused to the carboxyl terminus of GST sequences. Such fusion proteins can facilitate the purification of a recombinant polypeptide of the invention.

[0176] In another embodiment, the fusion protein contains a heterologous signal sequence at its amino terminus. For example, the native signal sequence of a polypeptide corresponding to a marker of the invention can be removed and replaced with a signal sequence from another protein. For example, the gp67 secretory sequence of the baculovirus envelope protein can be used as a heterologous signal sequence (Ausubel et al., ed., Current Protocols in Molecular Biology, John Wiley & Sons, NY, 1992). Other examples of eukaryotic heterologous signal sequences include the secretory sequences of melittin and human placental alkaline phosphatase (Stratagene; La Jolla, Calif.). In yet another example, useful prokaryotic heterologous signal sequences include the phoA secretory signal (Sambrook et al., supra) and the protein A secretory signal (Pharmacia Biotech; Piscataway, N.J.).

[0177] In yet another embodiment, the fusion protein is an immunoglobulin fusion protein in which all or part of a polypeptide corresponding to a marker of the invention is fused to sequences derived from a member of the immunoglobulin protein family. The immunoglobulin fusion proteins oil the invention can be incorporated into pharmaceutical compositions and administered to a subject to inhibit an interaction between a ligand (soluble or membrane-bound) and a protein on the surface of a cell (receptor), to thereby suppress signal transduction in vivo. The immunoglobulin fusion protein can be used to affect the bioavailability of a cognate ligand of a polypeptide of the invention. Inhibition of ligand/receptor interaction can be useful therapeutically, both for treating proliferative and differentiative disorders and for modulating (e.g. promoting or inhibiting) cell survival. Moreover, the immunoglobulin fusion proteins of the invention can be used as immunogens to produce antibodies directed against a polypeptide of the invention in a subject, to purify ligands and in screening assays to identify molecules which inhibit the interaction of receptors with ligands.

[0178] Chimeric and fusion proteins of the invention can be produced by standard recombinant DNA techniques. In another embodiment, the fusion gene can be synthesized by conventional techniques including automated DNA synthesizers. Alternatively, PCR amplification of gene fragments can be carried out using anchor primers which give rise to complementary overhangs between two consecutive gene fragments which can subsequently be annealed and re-amplified to generate a chimeric gene sequence (see, e.g., Ausubel et al., supra). Moreover, many expression vectors are commercially available that already encode a fusion moiety (e.g., a GST polypeptide). A nucleic acid encoding a polypeptide of the invention can be cloned into such an expression vector such that the fusion moiety is linked in-frame to the polypeptide of the invention.

[0179] A signal sequence can be used to facilitate secretion and isolation of the secreted protein or other proteins of interest. Signal sequences are typically characterized by a core of hydrophobic amino acids which are generally cleaved from the mature protein during secretion in one or more cleavage events. Such signal peptides contain processing sites that allow cleavage of the signal sequence from the mature proteins as they pass through the secretory pathway. Thus, the invention pertains to the described polypeptides having a signal sequence, as well as to polypeptides from which the signal sequence has been proteolytically cleaved (i.e., the cleavage products). In one embodiment, a nucleic acid sequence encoding a signal sequence can be operably linked in an expression vector to a protein of interest, such as a protein which is ordinarily not secreted or is otherwise difficult to isolate. The signal sequence directs secretion of the protein, such as from a eukaryotic host into which the expression vector is transformed, and the signal sequence is subsequently or concurrently cleaved. The protein can then be readily purified from the extracellular medium by art recognized methods. Alternatively, the signal sequence can be linked to the protein of interest using a sequence which facilitates purification, such as with a GST domain.

[0180] The present invention also pertains to variants of the polypeptides corresponding to individual markers of the invention. Such variants have an altered amino acid sequence which can function as either agonists (mimetics) or as antagonists. Variants can be generated by mutagenesis, e.g., discrete point mutation or truncation. An agonist can retain substantially the same, or a subset, of the biological activities of the naturally occurring form of the protein. An antagonist of a protein can inhibit one or more of the activities of the naturally occurring form of the protein by, for example, competitively binding to a downstream or upstream member of a cellular signaling cascade which includes the protein of interest. Thus, specific biological effects can be elicited by treatment with a variant of limited function. Treatment of a subject with a variant having a subset of the biological activities of the naturally occurring form of the protein can have fewer side effects in a subject relative to treatment with the naturally occurring form of the protein.

[0181] Variants of a protein of the invention which function as either agonists (mimetics) or as antagonists can be identified by screening combinatorial libraries of mutants, e.g., truncation mutants, of the protein of the invention for agonist or antagonist activity. In one embodiment, a variegated library of variants is generated by combinatorial mutagenesis at the nucleic acid level and is encoded by a variegated gene library. A variegated library of variants can be produced by, for example, enzymatically ligating a mixture of synthetic oligonucleotides into gene sequences such that a degenerate set of potential protein sequences is expressible as individual polypeptides, or alternatively, as a set of larger fusion proteins (e.g., for phage display). There are a variety of methods which can be used to produce libraries of potential variants of the polypeptides of the invention from a degenerate oligonucleotide sequence. Methods for synthesizing degenerate oligonucleotides are known in the art (see, e.g., Narang, 1983, Tetrahedron 39:3; Itakura et al., 1984, Annu. Rev. Biochem. 53:323; Itakura et al., 1984, Science 198:1056; Ike et al., 1983 Nucleic Acid Res. 11:477).

[0182] In addition, libraries of fragments of the coding sequence of a polypeptide corresponding to a marker of the invention can be used to generate a variegated population of polypeptides for screening and subsequent selection of variants. For example, a library of coding sequence fragments can be generated by treating a double stranded PCR fragment of the coding sequence of interest with a nuclease under conditions wherein nicking occurs only about once per molecule, denaturing the double stranded DNA, renaturing the DNA to form double stranded DNA which can include sense/antisense pairs from different nicked products, removing single stranded portions from reformed duplexes by treatment with S1 nuclease, and ligating the resulting fragment library into an expression vector. By this method, an expression library can be derived which encodes amino terminal and internal fragments of various sizes of the protein of interest.

[0183] Several techniques are known in the art for screening gene products of combinatorial libraries made by point mutations or truncation, and for screening cDNA libraries for gene products having a selected property. The most widely used techniques, which are amenable to high through-put analysis, for screening large gene libraries typically include cloning the gene library into replicable expression vectors, transforming appropriate cells with the resulting library of vectors, and expressing the combinatorial genes under conditions in which detection of a desired activity facilitates isolation of the vector encoding the gene whose product was detected. Recursive ensemble mutagenesis (REM), a technique which enhances the frequency of functional mutants in the libraries, can be used in combination with the screening assays to identify variants of a protein of the invention (Arkin and Yourvan, 1992, Proc. Natl. Acad. Sci. USA 89:7811-7815; Delgrave et al., 1993, Protein Engineering 6(3):327-331).

[0184] An isolated polypeptide corresponding to a marker of the invention, or a fragment thereof, can be used as an immunogen to generate antibodies using standard techniques for polyclonal and monoclonal antibody preparation. The full-length polypeptide or protein can be used or, alternatively, the invention provides antigenic peptide fragments for use as immunogens. The antigenic peptide of a protein of the invention comprises at least 8 (preferably 10, 15, 20, or 30 or more) amino acid residues of the amino acid sequence of one of the polypeptides of the invention, and encompasses an epitope of the protein such that an antibody raised against the peptide forms a specific immune complex with a marker of the invention to which the protein corresponds.

[0185] Preferred epitopes encompassed by the antigenic peptide are regions that are located on the surface of the protein, e.g., hydrophilic regions. Hydrophobicity sequence analysis, hydrophilicity sequence analysis, or similar analyses can be used to identify hydrophilic regions.

[0186] An immunogen typically is used to prepare antibodies by immunizing a suitable (i.e. immunocompetent) subject such as a rabbit, goat, mouse, or other mammal or vertebrate. An appropriate immunogenic preparation can contain, for example, recombinantly-expressed or chemically-synthesized polypeptide. The preparation can further include an adjuvant, such as Freund's complete or incomplete adjuvant, or a similar immunostimulatory agent.

[0187] Accordingly, another aspect of the invention pertains to antibodies directed against a polypeptide of the invention. The terms “antibody” and “antibody substance” as used interchangeably herein refer to immunoglobulin molecules and immunologically active portions of immunoglobulin molecules, i.e., molecules that contain an antigen binding site which specifically binds an antigen, such as a polypeptide of the invention, e.g., an epitope of a polypeptide of the invention. A molecule which specifically binds to a given polypeptide of the invention is a molecule which binds the polypeptide, but does not substantially bind other molecules in a sample, e.g., a biological sample, which naturally contains the polypeptide. Examples of immunologically active portions of immunoglobulin molecules include F(ab) and F(ab′)₂ fragments which can be generated by treating the antibody with an enzyme such as pepsin. The invention provides polyclonal and monoclonal antibodies. The term “monoclonal antibody” or “monoclonal antibody composition”, as used herein, refers to a population of antibody molecules that contain only one species of an antigen binding site capable of immunoreacting with a particular epitope.

[0188] Polyclonal antibodies can be prepared as described above by immunizing a suitable subject with a polypeptide of the invention as an immunogen. Preferred polyclonal antibody compositions are ones that have been selected for antibodies directed against a polypeptide or polypeptides of the invention. Particularly preferred polyclonal antibody preparations are ones that contain only antibodies directed against a polypeptide or polypeptides of the invention. Particularly preferred immunogen compositions are those that contain no other human proteins such as, for example, immunogen compositions made using a non-human host cell for recombinant expression of a polypeptide of the invention. In such a manner, the only human epitope or epitopes recognized by the resulting antibody compositions raised against this immunogen will be present as part of a polypeptide or polypeptides of the invention.

[0189] The antibody titer in the immunized subject can be monitored over time by standard techniques, such as with an enzyme linked immunosorbent assay (ELISA) using immobilized polypeptide. If desired, the antibody molecules can be harvested or isolated from the subject (e.g., from the blood or serum of the subject) and further purified by well-known techniques, such as protein A chromatography to obtain the IgG fraction. Alternatively, antibodies specific for a protein or polypeptide of the invention can be selected or (e.g., partially purified) or purified by, e.g., affinity chromatography. For example, a recombinantly expressed and purified (or partially purified) protein of the invention is produced as described herein, and covalently or non-covalently coupled to a solid support such as, for example, a chromatography column. The column can then be used to affinity purify antibodies specific for the proteins of the invention from a sample containing antibodies directed against a large number of different epitopes, thereby generating a substantially purified antibody composition, i.e., one that is substantially free of contaminating antibodies. By a substantially purified antibody composition is meant, in this context, that the antibody sample contains at most only 30% (by dry weight) of contaminating antibodies directed against epitopes other than those of the desired protein or polypeptide of the invention, and preferably at most 20%, yet more preferably at most 10%, and most preferably at most 5% (by dry weight) of the sample is contaminating antibodies. A purified antibody composition means that at least 99% of the antibodies in the composition are directed against the desired protein or polypeptide of the invention.

[0190] At an appropriate time after immunization, e.g., when the specific antibody titers are highest, antibody-producing cells can be obtained from the subject and used to prepare monoclonal antibodies by standard techniques, such as the hybridoma technique originally described by Kohler and Milstein (1975) Nature 256:495-497, the human B cell hybridoma technique (see Kozbor et al., 1983, Immunol. Today 4:72), the EBV-hybridoma technique (see Cole et al., pp. 77-96 In Monoclonal Antibodies and Cancer Therapy, Alan R. Liss, Inc., 1985) or trioma techniques. The technology for producing hybridomas is well known (see generally Current Protocols in Immunology, Coligan et al. ed., John Wiley & Sons, New York, 1994). Hybridoma cells producing a monoclonal antibody of the invention are detected by screening the hybridoma culture supernatants for antibodies that bind the polypeptide of interest, e.g., using a standard ELISA assay.

[0191] Alternative to preparing monoclonal antibody-secreting hybridomas, a monoclonal antibody directed against a polypeptide of the invention can be identified and isolated by screening a recombinant combinatorial immunoglobulin library (e.g., an antibody phage display library) with the polypeptide of interest. Kits for generating and screening phage display libraries are commercially available (e.g., the Pharmacia Recombinant Phage Antibody System, Catalog No. 27-9400-01; and the Stratagene SurfZAP Phage Display Kit, Catalog No. 240612). Additionally, examples of methods and reagents particularly amenable for use in generating and screening antibody display library can be found in, for example, U.S. Pat. No. 5,223,409; PCT Publication No. WO 92/18619; PCT Publication No. WO 91/17271; PCT Publication No. WO 92/20791; PCT Publication No. WO 92/15679;]?CT Publication No. WO 93/01288; PCT Publication No. WO 92/01047; PCT Publication No. WO 92/09690; PCT Publication No. WO 90/02809; Fuchs et al. (1991) Bio/Technology 9:1370-1372; Hay et al. (1992) Hum. Antibod. Hybridomas 3:81-85; Huse et al. (1989) Science 246:12751281; Griffiths et al. (1993) EMBO J. 12:725-734.

[0192] Additionally, recombinant antibodies, such as chimeric and humanized monoclonal antibodies, comprising both human and non-human portions, which can be made using standard recombinant DNA techniques, are within the scope of the invention. A chimeric antibody is a molecule in which different portions are derived from different animal species, such as those having a variable region derived from a murine mAb and a human immunoglobulin constant region. (See, e.g., Cabilly et al., U.S. Pat. No. 4,816,567; and Boss et al., U.S. Pat. No. 4,816,397, which are incorporated herein by reference in their entirety.) Humanized antibodies are antibody molecules from non-human species having one or more complementarily determining regions (CDRs) from the non-human species and a framework region from a human immunoglobulin molecule. (See, e.g., Queen, U.S. Pat. No. 5,585,089, which is incorporated herein by reference in its entirety.) Such chimeric and humanized monoclonal antibodies can be produced by recombinant DNA techniques known in the art, for example using methods described in PCT Publication No. WO 87/02671; European Patent Application 184,187; European Patent Application 171,496; European Patent Application 173,494; PCT Publication No. WO 86/01533; U.S. Pat. No. 4,816,567; European Patent Application 125,023; Better et al. (1988) Science 240:1041 1043; Liu et al. (1987) Proc. Natl. Acad. Sci. USA 84:3439-3443; Liu et al. (1987) J. Immunol. 139:3521-3526; Sun et al. (1987) Proc. Natl. Acad. Sci. USA 84:214-218; Nishimura et al. (1987) Cancer Res. 47:999-1005; Wood et al. (1985) Nature 314:446449; and Shaw et al. (1988) J. Natl. Cancer Inst. 80:1553-1559); Morrison (1985) Science 229:1202-1207; Oi et al. (1986) Bio/Techniques 4:214; U.S. Pat. No. 5,225,539; Jones et al. (1986) Nature 321:552-525; Verhoeyan et al. (1988) Science 239:1534; and Beidler et al. (1988) J. Immunol. 141:4053-4060.

[0193] Antibodies of the invention may be used as therapeutic agents in treating cancers. In a preferred embodiment, completely human antibodies of the invention are used for therapeutic treatment of human cancer patients, particularly those having an ovarian cancer. Such antibodies can be produced, for example, using transgenic mice which are incapable of expressing endogenous immunoglobulin heavy and light chains genes, but which can express human heavy and light chain genes. The transgenic mice are immunized in the normal fashion with a selected antigen, e.g., all or a portion of a polypeptide corresponding to a marker of the invention. Monoclonal antibodies directed against the antigen can be obtained using conventional hybridoma technology. The human immunoglobulin transgenes harbored by the transgenic mice rearrange during B cell differentiation, and subsequently undergo class switching and somatic mutation. Thus, using such a technique, it is possible to produce therapeutically useful IgG, IgA and IgE antibodies. For an overview of this technology for producing human antibodies, see Lonberg and Huszar (1995) Int. Rev. Immunol. 13:65-93). For a detailed discussion of this technology for producing human antibodies and human monoclonal antibodies and protocols for producing such antibodies, see, e.g., U.S. Pat. No. 5,625,126; U.S. Pat. No. 5,633,425; U.S. Pat. No. 5,569,825; U.S. Pat. No. 5,661,016; and U.S. Pat. No. 5,545,806. In addition, companies such as Abgenix, Inc. (Freemont, Calif.), can be engaged to provide human antibodies directed against a selected antigen using technology similar to that described above.

[0194] Completely human antibodies which recognize a selected epitope can be generated using a technique referred to as “guided selection.” In this approach a selected non-human monoclonal antibody, e.g., a murine antibody, is used to guide the selection of a completely human antibody recognizing the same epitope (Jespers et al., 1994, Bio/technology 12:899-903).

[0195] An antibody directed against a polypeptide corresponding to a marker of the invention (e.g., a monoclonal antibody) can be used to isolate the polypeptide by standard techniques, such as affinity chromatography or immunoprecipitation. Moreover, such an antibody can be used to detect the marker (e.g., in a cellular lysate or cell supernatant) in order to evaluate the level and pattern of expression of the marker. The antibodies can also be used diagnostically to monitor protein levels in tissues or body fluids (e.g. in an ovary-associated body fluid) as part of a clinical testing procedure, e.g., to, for example, determine the efficacy of a given treatment regimen. Detection can be facilitated by coupling the antibody to a detectable substance. Examples of detectable substances include various enzymes, prosthetic groups, fluorescent materials, luminescent materials, bioluminescent materials, and radioactive materials. Examples of suitable enzymes include horseradish peroxidase, alkaline phosphatase, β-galactosidase, or acetylcholinesterase; examples of suitable prosthetic group complexes include streptavidin/biotin and avidin/biotin; examples of suitable fluorescent materials include umbelliferone, fluorescein, fluorescein isothiocyanate, rhodamine, dichlorotriazinylamine fluorescein, dansyl chloride or phycoerythrin; an example of a luminescent material includes luminol; examples of bioluminescent materials include luciferase, luciferin, and aequorin, and examples of suitable radioactive material include ¹²⁵I, ¹³¹I, ³⁵S or ³H.

[0196] Further, an antibody (or fragment thereof) can be conjugated to a therapeutic moiety such as a cytotoxin, a therapeutic agent or a radioactive metal ion. A cytotoxin or cytotoxic agent includes any agent that is detrimental to cells. Examples include taxol, cytochalasin B, gramicidin D, ethidium bromide, emetine, mitomycin, etoposide, tenoposide, vincristine, vinblastine, colchicin, doxorubicin, daunorubicin, dihydroxy anthracin dione, mitoxantrone, mithramycin, actinomycin D, 1-dehydrotestosterone, glucocorticoids, procaine, tetracaine, lidocaine, propranolol, and puromycin and analogs or homologs thereof. Therapeutic agents include, but are not limited to, antimetabolites (e.g., methotrexate, 6-mercaptopurine, 6-thioguanine, cytarabine, 5-fluorouracil decarbazine), alkylating agents (e.g., mechlorethamine, thioepa chlorambucil, melphalan, carmustine (BSNU) and lomustine (CCNU), cyclothosphamide, busulfan, dibromomannitol, streptozotocin, mitomycin C, and cis-dichlorodiamine platinum (II) (DDP) cisplatin), anthracyclines (e.g., daunorubicin (formerly daunomycin) and doxorubicin), antibiotics (e.g., dactinomycin (formerly actinomycin), bleomycin, mithramycin, and anthramycin (AMC)), and anti-mitotic agents (e.g., vincristine and vinblastine).

[0197] The conjugates of the invention can be used for modifying a given biological response, the drug moiety is not to be construed as limited to classical chemical therapeutic agents. For example, the drug moiety may be a protein or polypeptide possessing a desired biological activity. Such proteins may include, for example, a toxin such as abrin, ricin A, pseudomonas exotoxin, or diphtheria toxin; a protein such as tumor necrosis factor, .alpha.-interferon, .beta.-interferon, nerve growth factor, platelet derived growth factor, tissue plasminogen activator; or, biological response modifiers such as, for example, lymphokines, interleukin-1 (“IL-1”), interleukin-2 (“IL-2”), interleukin-6 (“IL-6”), granulocyte macrophase colony stimulating factor (“GM-CSF”), granulocyte colony stimulating factor (“G-CSF”), or other growth factors.

[0198] Techniques for conjugating such therapeutic moiety to antibodies are well known, see, e.g., Arnon et al., “Monoclonal Antibodies For Immunotargeting Of Drugs In Cancer Therapy”, in Monoclonal Antibodies And Cancer Therapy, Reisfeld et al. (eds.), pp. 243-56 (Alan R. Liss, Inc. 1985); Hellstrom et al., “Antibodies For Drug Delivery”, in Controlled Drug Delivery (2nd Ed.), Robinson et al. (eds.), pp. 623-53 (Marcel Dekker, Inc. 1987); Thorpe, “Antibody Carriers Of Cytotoxic Agents In Cancer Therapy: A Review”, in Monoclonal Antibodies 84: Biological And Clinical Applications, Pinchera et al. (eds.), pp. 475-506 (1985); “Analysis, Results, And Future Prospective Of The Therapeutic Use Of Radiolabeled Antibody In Cancer Therapy”, in Monoclonal Antibodies For Cancer Detection And Therapy, Baldwin et al. (eds.), pp. 303-16 (Academic Press 1985), and Thorpe et al., “The Preparation And Cytotoxic Properties Of Antibody-Toxin Conjugates”, Immunol. Rev., 62:119-58 (1982).

[0199] Alternatively, an antibody can be conjugated to a second antibody to form an antibody heteroconjugate as described by Segal in U.S. Pat. No. 4,676,980.

[0200] Accordingly, in one aspect, the invention provides substantially purified antibodies or fragments thereof, and non-human antibodies or fragments thereof, which antibodies or fragments specifically bind to a polypeptide comprising an amino acid sequence selected from the group consisting of the amino acid sequences of the present invention, an amino acid sequence encoded by the cDNA of the present invention, a fragment of at least 15 amino acid residues of an amino acid sequence of the present invention, an amino acid sequence which is at least 95% identical to the amino acid sequence of the present invention (wherein the percent identity is determined using the ALIGN program of the. GCG software package with a PAM120 weight residue table, a gap length penalty of 12, and a gap penalty of 4) and an amino acid sequence which is encoded by a nucleic acid molecule which hybridizes to a nucleic acid molecule consisting of the nucleic acid molecules of the present invention, or a complement thereof, under conditions of hybridization of 6×SSC at 45° C. and washing in 0.2×SSC, 0.1% SDS at 65° C. In various embodiments, the substantially purified antibodies of the invention, or fragments thereof, can be human, non-human, chimeric and/or humanized antibodies.

[0201] In another aspect, the invention provides non-human antibodies or fragments thereof, which antibodies or fragments specifically bind to a polypeptide comprising an amino acid sequence selected from the group consisting of: the amino acid sequence of the present invention, an amino acid sequence encoded by the cDNA of the present invention, a fragment of at least 15 amino acid residues of the amino acid sequence of the present invention, an amino acid sequence which is at least 95% identical to the amino acid sequence of the present invention (wherein the percent identity is determined using the ALIGN program of the GCG software package with a PAM120 weight residue table, a gap length penalty of 12, and a gap penalty of 4) and an amino acid sequence which is encoded by a nucleic acid molecule which hybridizes to a nucleic acid molecule consisting of the nucleic acid molecules of the present invention, or a complement thereof, under conditions of hybridization of 6×SSC at 45° C. and washing in 0.2×SSC, 0.1% SDS at 65° C. Such non-human antibodies can be goat, mouse, sheep, horse, chicken, rabbit, or rat antibodies. Alternatively, the non-human antibodies of the invention can be chimeric and/or humanized antibodies. In addition, the non-human antibodies of the invention can be polyclonal antibodies or monoclonal antibodies.

[0202] In still a further aspect, the invention provides monoclonal antibodies or fragments thereof, which antibodies or fragments specifically bind to a polypeptide comprising an amino acid sequence selected from the group consisting of the amino acid sequences of the present invention, an amino ac id sequence encoded by the cDNA of the present invention, a fragment of at least 15 amino acid residues of an amino acid sequence of the present invention, an amino acid sequence which is at least 95% identical to an amino acid sequence of the present invention (wherein the percent identity is determined using the ALIGN program of the GCG software package with a PAM120 weight residue table, a gap length penalty of 12, and a gap penalty of 4) and an amino acid sequence which is encoded by a nucleic acid molecule which hybridizes to a nucleic acid molecule consisting of the nucleic acid molecules of the present invention, or a complement thereof, under conditions of hybridization of 6×SSC at 45° C. and washing in 0.2×SSC, 0.1% SDS at 65° C. The monoclonal antibodies can be human, humanized, chimeric and/or non-human antibodies.

[0203] The substantially purified antibodies or fragments thereof may specifically bind to a signal peptide, a secreted sequence, an extracellular domain, a transmembrane or a cytoplasmic domain or cytoplasmic membrane of a polypeptide of the invention. In a particularly preferred embodiment, the substantially purified antibodies or fragments thereof, the non-human antibodies or fragments thereof, and/or the monoclonal antibodies or fragments thereof, of the invention specifically bind to a secreted sequence or an extracellular domain of the amino acid sequences of the present invention.

[0204] Any of the antibodies of the invention can be conjugated to a therapeutic moiety or to a detectable substance. Non-limiting examples of detectable substances that can be conjugated to the antibodies of the invention are an enzyme, a prosthetic group, a fluorescent material, a luminescent material, a bioluminescent material, and a radioactive material.

[0205] The invention also provides a kit containing an antibody of the invention conjugated to a detectable substance, and instructions for use. Still another aspect of the invention is a pharmaceutical composition comprising an antibody of the invention and a pharmaceutically acceptable carrier. In preferred embodiments, the pharmaceutical composition contains an antibody of the invention, a therapeutic moiety, and a pharmaceutically acceptable carrier.

[0206] Still another aspect of the invention is a method of making an antibody that specifically recognizes a polypeptide of the present invention, the method comprising immunizing a mammal with a polypeptide. The polypeptide used as an immungen comprises an amino acid sequence selected from the group consisting of the amino acid sequence of the present invention, an amino acid sequence encoded by the cDNA of the nucleic acid molecules of the present invention, a fragment of at least 15 amino acid residues of the amino acid sequence of the present invention, an amino acid sequence which is at least 95% identical to the amino acid sequence of the present invention (wherein the percent identity is determined using the ALIGN program of the GCG software package with a PAM120 weight residue table, a gap length penalty of 12, and a gap penalty of 4) and an amino acid sequence which is encoded by a nucleic acid molecule which hybridizes to a nucleic acid molecule consisting of the nucleic acid molecules of the present invention, or a complement thereof, under conditions of hybridization of 6×SSC at 45° C. and washing in 0.2×SSC, 0.1% SDS at 65° C.

[0207] After immunization, a sample is collected from the mammal that contains an antibody that specifically recognizes the polypeptide. Preferably, the polypeptide is recombinantly produced using a non-human host cell. Optionally, the antibodies can be further purified from the sample using techniques well known to those of skill in the art. The method can further comprise producing a monoclonal antibody-producing cell from the cells of the mammal. Optionally, antibodies are collected from the antibody-producing cell.

[0208] III. Recombinant Expression Vectors and Host Cells

[0209] Another aspect of the invention pertains to vectors, preferably expression vectors, containing a nucleic acid encoding a polypeptide corresponding to a marker of the invention (or a portion of such a polypeptide). As used herein, the term “vector” refers to a nucleic acid molecule capable of transporting another nucleic acid to which it has been linked. One type of vector is a “plasmid”, which refers to a circular double stranded DNA loop into which additional DNA segments can be ligated. Another type of vector is a viral vector, wherein additional DNA segments can be ligated into the viral genome. Certain vectors are capable of autonomous replication in a host cell into which they are introduced (e.g., bacterial vectors having a bacterial origin of replication and episomal mammalian vectors). Other vectors (e.g., non-episomal mammalian vectors) are integrated into the genome of a host cell upon introduction into the host cell, and thereby are replicated along with the host genome. Moreover, certain vectors, namely expression vectors, are capable of directing the expression of genes to which they are operably linked. In general, expression vector of utility in recombinant DNA techniques are often in the form of plasmids (vectors). However, the invention is intended to include such other forms of expression vectors, such as viral vectors (e.g., replication defective retroviruses, adenoviruses and adeno-associated viruses), which serve equivalent functions.

[0210] The recombinant expression vectors of the invention comprise a nucleic acid of the invention in a form suitable for expression of the nucleic acid in a host cell. This means that the recombinant expression vectors include one or more regulatory sequences, selected on the basis of the host cells to be used for expression, which is operably linked to the nucleic acid sequence to be expressed. Within a recombinant expression vector, “operably linked” is intended to mean that the nucleotide sequence of interest is linked to the regulatory sequence(s) in a manner which allows for expression of the nucleotide sequence (e.g., in an in vitro transcription/translation system or in a host cell when the vector is introduced into the host cell). The term “regulatory sequence” is intended to include promoters, enhancers and other expression control elements (e.g., polyadenylation signals). Such regulatory sequences are described, for example, in Goeddel, Methods in Enzymology: Gene Expression Technology vol.185, Academic Press, San Diego, Calif. (1991). Regulatory sequences include those which direct constitutive expression of a nucleotide sequence in many types of host cell and those which direct expression of the nucleotide sequence only in certain host cells (e.g., tissue-specific regulatory sequences). It will be appreciated by those skilled in the art that the design of the expression vector can depend on such factors as the choice of the host cell to be transformed, the level of expression of protein desired, and the like. The expression vectors of the invention can be introduced into host cells to thereby produce proteins or peptides, including fusion proteins or peptides, encoded by nucleic acids as described herein.

[0211] The recombinant expression vectors of the invention can be designed for expression of a polypeptide corresponding to a marker of the invention in prokaryotic (e.g., E. coli) or eukaryotic cells (e.g., insect cells {using baculovirus expression vectors}, yeast cells or mammalian cells). Suitable host cells are discussed further in Goeddel, supra. Alternatively, the recombinant expression vector can be transcribed and translated in vitro, for example using T7 promoter regulatory sequences and T7 polymerase.

[0212] Expression of proteins in prokaryotes is most often carried out in E. coli with vectors containing constitutive or inducible promoters directing the expression of either fusion or non-fusion proteins. Fusion vectors add a number of amino acids to a protein encoded therein, usually to the amino terminus of the recombinant protein. Such fusion vectors typically serve three purposes: 1) to increase expression of recombinant protein; 2) to increase the solubility of the recombinant protein; and 3) to aid in the purification of the recombinant protein by acting as a ligand in affinity purification. Often, in fusion expression vectors, a proteolytic cleavage site is introduced at the junction of the fusion moiety and the recombinant protein to enable separation of the recombinant protein from the fusion moiety subsequent to purification of the fusion protein. Such enzymes, and their cognate recognition sequences, include Factor Xa, thrombin and enterokinase. Typical fusion expression vectors include pGEX (Pharmacia Biotech Inc; Smith and Johnson, 1988, Gene 67:31-40), pMAL (New England Biolabs, Beverly, Mass.) and pRIT5 (Pharmacia, Piscataway, N.J.) which fuse glutathione S-transferase (GST), maltose E binding protein, or protein A, respectively, to the target recombinant protein.

[0213] Examples of suitable inducible non-fusion E. coli expression vectors include pTrc (Amann et al., 1988, Gene 69:301-315) and pET 11d (Studier et al., p. 6089, In Gene Expression Technology: Methods in Enzymology vol.185, Academic Press, San Diego, Calif., 1991). Target gene expression from the pTrc vector relies on host RNA polymerase transcription from a hybrid trp-lac fusion promoter. Target gene expression from the pET11d vector relies on transcription from a T7 gn10-lac fusion promoter mediated by a co-expressed viral RNA polymerase (T7 gn1). This viral polymerase is supplied by host strains BL21(DE3) or HMS174(DE3) from a resident prophage harboring a T7 gn1 gene under the transcriptional control of the lacUV 5 promoter.

[0214] One strategy to maximize recombinant protein expression in E. coli is to express the protein in a host bacteria with an impaired capacity to proteolytically cleave the recombinant protein (Gottesman, p. 119-128, In Gene Expression Technology: Methods in Enzymology vol. 185, Academic Press, San Diego, Calif., 1990. Another strategy is to alter the nucleic acid sequence of the nucleic acid to be inserted into an expression vector so that the individual codons for each amino acid are those preferentially utilized in E. coli (Wada et al., 1992, Nucleic Acids Res. 20:2111-2118). Such alteration of nucleic acid sequences of the invention can be carried out by standard DNA synthesis techniques.

[0215] In another embodiment, the expression vector is a yeast expression vector. Examples of vectors for expression in yeast S. cerevisiae include pYepSec1 (Baldari et al., 1987, EMBO J. 6:229-234), pMFa (Kurjan and Herskowitz, 1982, Cell 30:933-943), pJRY88 (Schultz et al., 1987, Gene 54:113-123), pYES2 (Invitrogen Corporation, San Diego, Calif.), and pPicZ (Invitrogen Corp, San Diego, Calif.).

[0216] Alternatively, the expression vector is a baculovirus expression vector. Baculovirus vectors available for expression of proteins in cultured insect cells (e.g., Sf 9 cells) include the pAc series (Smith et al., 1983, Mol. Cell Biol. 3:2156-2165) and the pVL series (Lucklow and Summers, 1989, Virology 170:31-39).

[0217] In yet another embodiment, a nucleic acid of the invention is expressed in mammalian cells using a mammalian expression vector. Examples of mammalian expression vectors include pCDM8 (Seed, 1987. Nature 329:840) and pMT2PC (Kaufman et al., 1987, EMBO J. 6:187-195). When used in mammalian cells, the expression vector's control functions are often provided by viral regulatory elements. For example, commonly used promoters are derived from polyoma, Adenovirus 2, cytomegalovirus and Simian Virus 40. For other suitable expression systems for both prokaryotic and eukaryotic cells see chapters 16 and 17 of Sambrook et al., supra.

[0218] In another embodiment, the recombinant mammalian expression vector is capable of directing expression of the nucleic acid preferentially in a particular cell type (e.g., tissue-specific regulatory elements are used to express the nucleic acid). Tissue-specific regulatory elements are known in the art. Non-limiting examples of suitable tissue-specific promoters include the albumin promoter (liver-specific; Pinkert et al., 1987, Genes Dev. 1:268-277), lymphoid-specific promoters (Calame and Eaton, 1988, Adv. Immunol. 43:235-275), in particular promoters of T cell receptors (Winoto and Baltimore, 1989, EMBO J. 8:729-733) and immunoglobulins (Banerji et al., 1983, Cell 33:729-740; Queen and Baltimore, 1983, Cell 33:741-748), neuron-specific promoters (e.g., the neurofilament promoter; Byrne and Ruddle, 1989, Proc. Natl. Acad. Sci USA 86:5473-5477), pancreas-specific promoters (Edlund et al., 1985, Science 230:912-916), and mammary gland-specific promoters (e.g., milk whey promoter; U.S. Pat. No. 4,873,316 and European Application Publication No. 264,166). Developmentally-regulated promoters are also encompassed, for example the murine hox promoters (Kessel and Gruss, 1990, Science 249:374-379) and the α-fetoprotein promoter (Camper and Tilghman, 1989, Genes Dev. 3:537-546).

[0219] The invention further provides a recombinant expression vector comprising a DNA molecule of the invention cloned into the expression vector in an antisense orientation. That is, the DNA molecule is operably linked to a regulatory sequence in a manner which allows for expression (by transcription of the DNA molecule) of an RNA molecule which is antisense to the mRNA encoding a polypeptide of the invention. Regulatory sequences operably linked to a nucleic acid cloned in the antisense orientation can be chosen which direct the continuous expression of the antisense RNA molecule in a variety of cell types, for instance viral promoters and/or enhancers, or regulatory sequences can be chosen which direct constitutive, tissue-specific or cell type specific expression of antisense RNA. The antisense expression vector can be in the form of a recombinant plasmid, phagemid, or attenuated virus in which antisense nucleic acids are produced under the control of a high efficiency regulatory region, the activity of which can be determined by the cell type into which the vector is introduced. For a discussion of the regulation of gene expression using antisense genes see Weintraub et al., 1986, Trends in Genetics, Vol. 1(1).

[0220] Another aspect of the invention pertains to host cells into which a recombinant expression vector of the invention has been introduced. The terms “host cell” and “recombinant host cell” are used interchangeably herein. It is understood that such terms refer not only to the particular subject cell but to the progeny or potential progeny of such a cell. Because certain modifications may occur in succeeding generations due to either mutation or environmental influences, such progeny may not, in fact, be identical to the parent cell, but are still included within the scope of the term as used herein.

[0221] A host cell can be any prokaryotic (e.g., E. coli) or eukaryotic cell (e.g., insect cells, yeast or mammalian cells).

[0222] Vector DNA can be introduced into prokaryotic or eukaryotic cells via conventional transformation or transfection techniques. As used herein, the terms “transformation” and “transfection” are intended LO refer to a variety of art-recognized techniques for introducing foreign nucleic acid into a host cell, including calcium phosphate or calcium chloride co-precipitation, DEAE-dextran-mediated transfection, lipofection, or electroporation. Suitable methods for transforming or transfecting host cells can be found in Sambrook, et al. (supra), and other laboratory manuals.

[0223] For stable transfection of mammalian cells, it is known that, depending upon the expression vector and transfection technique used, only a small fraction of cells may integrate the foreign DNA into their genome. In order to identify and select these integrants, a gene that encodes a selectable marker (e.g., for resistance to antibiotics) is generally introduced into the host cells along with the gene of interest. Preferred selectable markers include those which confer resistance to drugs, such as G418, hygromycin and methotrexate. Cells stably transfected with the introduced nucleic acid can be identified by drug selection (e.g., cells that have incorporated the selectable marker gene will survive, while the other cells die).

[0224] A host cell of the invention, such as a prokaryotic or eukaryotic host cell in culture, can be used to produce a polypeptide corresponding to a marker of the invention. Accordingly, the invention further provides methods for producing a polypeptide corresponding to a marker of the invention using the host cells of the invention. In one embodiment, the method comprises culturing the host cell of invention (into which a recombinant expression vector encoding a polypeptide of the invention has been introduced) in a suitable medium such that the marker is produced. In another embodiment, the method further comprises isolating the marker polypeptide from the medium or the host cell.

[0225] The host cells of the invention can also be used to produce nonhuman transgenic animals. For example, in one embodiment, a host cell of the invention is a fertilized oocyte or an embryonic stem cell into which a sequences encoding a polypeptide corresponding to a marker of the invention have been introduced. Such host cells can then be used to create non-human transgenic animals in which exogenous sequences encoding a marker protein of the invention have been introduced into their genome or homologous recombinant animals in which endogenous gene(s) encoding a polypeptide corresponding to a marker of the invention sequences have been altered. Such animals are useful for studying the function and/or activity of the polypeptide corresponding to the marker and for identifying and/or evaluating modulators of polypeptide activity. As used herein, a “transgenic animal” is a non-human animal, preferably a mammal, more preferably a rodent such as a rat or mouse, in which one or more of the cells of the animal includes a transgene. Other examples of transgenic animals include non-human primates, sheep, dogs, cows, goats, chickens, amphibians, etc. A transgene is exogenous DNA which is integrated into the genome of a cell from which a transgenic animal develops and which remains in the genome of the mature animal, thereby directing the expression of an encoded gene product in one or more cell types or tissues of the transgenic animal. As used herein, an “homologous recombinant animal” is a non-human animal, preferably a mammal, more preferably a mouse, in which an endogenous gene has been altered by homologous recombination between the endogenous gene and an exogenous DNA molecule introduced into a cell of the animal, e.g., an embryonic cell of the animal, prior to development of the animal.

[0226] A transgenic animal of the invention can be created by introducing a nucleic acid encoding a polypeptide corresponding to a marker of the invention into the male pronuclei of a fertilized oocyte, e.g., by microinjection, retroviral infection, and allowing the oocyte to develop in a pseudopregnant female foster animal. Intronic sequences and polyadenylation signals can also be included in the transgene to increase the efficiency of expression of the transgene. A tissue-specific regulatory sequence(s) can be operably linked to the transgene to direct expression of the polypeptide of the invention to particular cells. Methods for generating transgenic animals via embryo manipulation and microinjection, particularly animals such as mice, have become conventional in the art and are described, for example, in U.S. Pat. Nos. 4,736,866 and 4,870,009, U.S. Pat. No. 4,873,191 and in Hogan, Manipulating the Mouse Embryo, Cold Spring Harbor Laboratory Press, Cold Spring Harbor, N.Y., 1986. Similar methods are used for production of other transgenic animals. A transgenic founder animal can be identified based upon the presence of the transgene in its genome and/or expression of mRNA encoding the transgene in tissues or cells of the animals. A transgenic founder animal can then be used to breed additional animals carrying the transgene. Moreover, transgenic animals carrying the transgene can further be bred to other transgenic animals carrying other transgenes.

[0227] To create an homologous recombinant animal, a vector is prepared which contains at least a portion of a gene encoding a polypeptide corresponding to a marker of the invention into which a deletion, addition or substitution has been introduced to thereby alter, e.g., functionally disrupt, the gene. In a preferred embodiment, the vector is designed such that, upon homologous recombination, the endogenous gene is functionally disrupted (i.e., no longer encodes a functional protein; also referred to as a “knock out” vector). Alternatively, the vector can be designed such that, upon homologous recombination, the endogenous gene is mutated or otherwise altered but still encodes functional protein (e.g., the upstream regulatory region can be altered to thereby alter the expression of the endogenous protein). In the homologous recombination vector, the altered portion of the gene is flanked at its 5′ and 3′ ends by additional nucleic acid of the gene to allow for homologous recombination to occur between the exogenous gene carried by the vector and an endogenous gene in an embryonic stem cell. The additional flanking nucleic acid sequences are of sufficient length for successful homologous recombination with the endogenous gene. Typically, several kilobases of flanking DNA (both at the 5′ and 3′ ends) are included in the vector (see, e.g., Thomas and Capecchi, 1987, Cell 51:503 for a description of homologous recombination vectors). The vector is introduced into an embryonic stem cell line (e.g., by electroporation) and cells in which the introduced gene has homologously recombined with the endogenous gene are selected (see, e.g., Li et al., 1992, Cell 69:915). The selected cells are then injected into a blastocyst of an animal (e.g., a mouse) to form aggregation chimeras (see, e.g., Bradley, Teratocarcinomas and Embryonic Stem Cells: A Practical Approach, Robertson, Ed., IRL, Oxford, 1987, pp. 113-152). A chimeric embryo can then be implanted into a suitable pseudopregnant female foster animal and the embryo brought to term. Progeny harboring the homologously recombined DNA in their germ cells can be used to breed animals in which all cells of the animal contain the homologously recombined DNA by germline transmission of the transgene. Methods for constructing homologous recombination vectors and homologous recombinant animals are described further in Bradley (1991) Current Opinion in Bio/Technology 2:823-829 and in PCT Publication NOS. WO 90/11354, WO 91/01140, WO 92/0968, and WO 93/04169.

[0228] In another embodiment, transgenic non-human animals can be produced which contain selected systems which allow for regulated expression of the transgene. One example of such a system is the cre/loxP recombinase system of bacteriophage P1. For a description of the cre/loxP recombinase system, see, e.g., Lakso et al. (1992) Proc. Natl. Acad. Sci. USA 89:6232-6236. Another example of a recombinase system is the FLP recombinase system of Saccharomyces cerevisiae (O'Gorman et al., 1991, Science 251:1351-1355). If a cre/loxP recombinase system is used to regulate expression of the transgene, animals containing transgenes encoding both the Cre recombinase and a selected protein are required. Such animals can be provided through the construction of “double” transgenic animals, e.g., by mating two transgenic animals, one containing a transgene encoding a selected protein and the other containing a transgene encoding a recombinase.

[0229] Clones of the non-human transgenic animals described herein can also be produced according to the methods described in Wilmut et al. (1997) Nature 385:810813 and PCT Publication NOS. WO 97/07668 and WO 97/07669.

[0230] IV. Pharmaceutical Compositions

[0231] The nucleic acid molecules, polypeptides, and antibodies (also referred to herein as “active compounds”) corresponding to a marker of the invention can be incorporated into pharmaceutical compositions suitable for administration. Such compositions typically comprise the nucleic acid molecule, protein, or antibody and a pharmaceutically acceptable carrier. As used herein the language “pharmaceutically acceptable carrier” is intended to include any and all solvents, dispersion media, coatings, antibacterial and antifungal agents, isotonic and absorption delaying agents, and the like, compatible with pharmaceutical administration. The use of such media and agents for pharmaceutically active substances is well known in the art. Except insofar as any conventional media or agent is incompatible with the active compound, use thereof in the compositions is contemplated. Supplementary active compounds can also be incorporated into the compositions.

[0232] The invention includes methods for preparing pharmaceutical compositions for modulating the expression or activity of a polypeptide or nucleic acid corresponding to a marker of the invention. Such methods comprise formulating a pharmaceutically acceptable carrier with an agent which modulates expression or activity of a polypeptide or nucleic acid corresponding to a marker of the invention. Such compositions can further include additional active agents. Thus, the invention further includes methods for preparing a pharmaceutical composition by formulating a pharmaceutically acceptable carrier with an agent which modulates expression or activity of a polypeptide or nucleic acid corresponding to a marker of the invention and one or more additional active compounds.

[0233] The invention also provides methods (also referred to herein as “screening assays”) for identifying modulators, i.e., candidate or test compounds or agents (e.g., peptides, peptidomimetics, peptoids, small molecules or other drugs) which (a) bind to the marker, or (b) have a modulatory (e.g., stimulatory or inhibitory) effect on the activity of the marker or, more specifically, (c) have a modulatory effect on the interactions of the marker with one or more of its natural substrates (e.g., peptide, protein, hormone, co-factor, or nucleic acid), or (d) have a modulatory effect on the expression of the marker. Such assays typically comprise a reaction between the marker and one or more assay components. The other components may be either the test compound itself, or a combination of test compound and a natural binding partner of the marker.

[0234] The test compounds of the present invention may be obtained from any available source, including systematic libraries of natural and/or synthetic compounds. Test compounds may also be obtained by any other numerous approaches in combinatorial library methods known in the art, including: biological libraries; peptoid libraries (libraries of molecules having the functionalities of peptides, but with a novel, non-peptide backbone which are resistant to enzymatic degradation but which nevertheless remain bioactive; see, e.g., Zuckermann et al., 1994, J. Med. Chem. 37:2678-85); spatially addressable parallel solid phase or solution phase libraries; synthetic library methods requiring deconvolution; the ‘one-bead one-compound’ library method; and synthetic library methods using affinity chromatography selection. The biological library and peptoid library approaches are limited to peptide libraries, while the other four approaches are applicable to peptide, non-peptide oligomer or small molecule libraries of compounds (Lam, 1997, Anticancer Drug Des. 12:145).

[0235] Examples of methods for the synthesis of molecular libraries can be found in the art, for example in: DeWitt et al. (1993) Proc. Natl. Acad. Sci. U.S.A. 90:6909; Erb et al. (1994) Proc. Natl. Acad. Sci. USA 91:11422; Zuckermann et al. (1994). J. Med. Chem. 37:2678; Cho et al. (1993) Science 261:1303; Carrell et al. (1994) Angew. Chem. Int. Ed. Engl. 33:2059; Carell et al. (1994) Angew. Chem. Int. Ed. Engl. 33:2061; and in Gallop et al. (1994) J. Med. Chem. 37:1233.

[0236] Libraries of compounds may be presented in solution (e.g., Houghten, 1992, Biotechniques 13:412-421), or on beads (Lam, 1991, Nature 354:82-84), chips (Fodor, 1993, Nature 364:555-556), bacteria and/or spores, (Ladner, U.S. Pat. No. 5,223,409), plasmids (Cull et al, 1992, Proc Natl Acad Sci USA 89:1865-1869) or on phage (Scott and Smith, 1990, Science 249:386-390; Devlin, 1990, Science 249:404-406; Cwirla et al, 1990, Proc. Natl. Acad. Sci. 87:6378-6382; Felici, 1991, J. Mol. Biol. 222:301-310; Ladner, supra.).

[0237] In one embodiment, the invention provides assays for screening candidate or test compounds which are substrates of a marker or biologically active portion thereof. In another embodiment, the invention provides assays for screening candidate or test compounds which bind to a marker or biologically active portion thereof. Determining the ability of the test compound to directly bind to a marker can be accomplished, for example, by coupling the compound with a radioisotope or enzymatic label such that binding of the compound to the marker can be determined by detecting the labeled marker compound in a complex. For example, compounds (e.g., marker substrates) can be labeled with ¹²⁵I, ³⁵S, ¹⁴C, or ³H, either directly or indirectly, and the radioisotope detected by direct counting of radioemission or by scintillation counting. Alternatively, assay components can be enzymatically labeled with, for example, horseradish peroxidase, alkaline phosphatase, or luciferase, and the enzymatic label detected by determination of conversion of an appropriate substrate to product.

[0238] In another embodiment, the invention provides assays for screening candidate or test compounds which modulate the activity of a marker or a biologically active portion thereof. In all likelihood, the marker can, in vivo, interact with one or more molecules, such as but not limited to, peptides, proteins, hormones, cofactors and nucleic acids. For the purposes of this discussion, such cellular and extracellular molecules are referred to herein as “binding partners” or marker “substrate”.

[0239] One necessary embodiment of the invention in order to facilitate such screening is the use of the marker to identify its natural in vivo binding partners. There are many ways to accomplish this which are known to one skilled in the art. One example is the use of the marker protein as “bait protein” in a two-hybrid assay or three-hybrid assay (see, e.g., U.S. Pat. No. 5,283,317; Zervos et al, 1993, Cell 72:223-232; Madura et al, 1993, J. Biol. Chem. 268:12046-12054; Bartel et al, 1993, Biotechniques 14:920-924; Iwabuchi et al, 1993 Oncogene 8:1693-1696; Brent WO94/10300) in order to identify other proteins which bind to or interact with the marker (binding partners) and, therefore, are possibly involved in the natural function of the marker. Such marker binding partners are also likely to be involved in the propagation of signals by the marker or downstream elements of a marker-mediated signaling pathway. Alternatively, such marker binding partners may also be found to be inhibitors of the marker.

[0240] The two-hybrid system is based on the modular nature of most transcription factors, which consist of separable DNA-binding and activation domains. Briefly, the assay utilizes two different DNA constructs. In one construct, the gene that encodes a marker protein fused to a gene encoding the DNA binding domain of a known transcription factor (e.g., GAL-4). In the other construct, a DNA sequence, from a library of DNA sequences, that encodes an unidentified protein (“prey” or “sample”) is fused to a gene that codes for the activation domain of the known transcription factor. If the “bait” and the “prey” proteins are able to interact, in vivo, forming a marker-dependent complex, the DNA-binding and activation domains of the transcription factor are brought into close proximity. This proximity allows transcription of a reporter gene (e.g., LacZ) which is operably linked to a transcriptional regulatory site responsive to the transcription factor. Expression of the reporter gene can be readily detected and cell colonies containing the functional transcription factor can be isolated and used to obtain the cloned gene which encodes the protein which interacts with the marker protein.

[0241] In a further embodiment, assays may be devised through the use of the invention for the purpose of identifying compounds which modulate (e.g., affect either positively or negatively) interactions between a marker and its substrates and/or binding partners. Such compounds can include, but are not limited to, molecules such as antibodies, peptides, hormones, oligonucleotides, nucleic acids, and analogs thereof. Such compounds may also be obtained from any available source, including systematic libraries of natural and/or synthetic compounds. The preferred assay components for use in this embodiment is an ovarian cancer marker identified herein, the known binding partner and/or substrate of same, and the test compound. Test compounds can be supplied from any source.

[0242] The basic principle of the assay systems used to identify compounds that interfere with the interaction between the marker and its binding partner involves preparing a reaction mixture containing the marker and its binding partner under conditions and for a time sufficient to allow the two products to interact and bind, thus forming a complex. In order to test an agent for inhibitory activity, the reaction mixture is prepared in the presence and absence of the test compound. The test compound can be initially included in the reaction mixture, or can be added at a time subsequent to the addition of the marker and its binding partner. Control reaction mixtures are incubated without the test compound or with a placebo. The formation of any complexes between the marker and its binding partner is then detected. The formation of a complex in the control reaction, but less or no such formation in the reaction mixture containing the test compound, indicates that the compound interferes with the interaction of the marker and its binding partner. Conversely, the formation of more complex in the presence of compound than in the control reaction indicates that the compound may enhance interaction of the marker and its binding partner.

[0243] The assay for compounds that interfere with the interaction of the marker with its binding partner may be conducted in a heterogeneous or homogeneous format. Heterogeneous assays involve anchoring either the marker or its binding partner onto a solid phase and detecting complexes anchored to the solid phase at the end of the reaction. In homogeneous assays, the entire reaction is carried out in a liquid phase. In either approach, the order of addition of reactants can be varied to obtain different information about the compounds being tested or example, test compounds that interfere with the interaction between the markers and the binding partners (e.g., by competition) can be identified by conducting the reaction in the presence of the test substance, i.e., by adding the test substance to the reaction mixture prior to or simultaneously with the marker and its interactive binding partner. Alternatively, test compounds that disrupt preformed complexes, e.g., compounds with higher binding constants that displace one of the components from the complex, can be tested by adding the test compound to the reaction mixture after complexes have been formed. The various formats are briefly described below.

[0244] In a heterogeneous assay system, either the marker or its binding partner is anchored onto a solid surface or matrix, while the other corresponding non-anchored component may be labeled, either directly or indirectly. In practice, microtitre plates are often utilized for this approach. The anchored species can be immobilized by a number of methods, either non-covalent or covalent, that are typically well known to one who practices the art. Non-covalent attachment can often be accomplished simply by coating the solid surface with a solution of the marker or its binding partner and drying. Alternatively, an immobilized antibody specific for the assay component to be anchored can be used for this purpose. Such surfaces can often be prepared in advance and stored.

[0245] In related embodiments, a fusion protein can be provided which adds a domain that allows one or both of the assay components to be anchored to a matrix. For example, glutathione-S-transferase/marker fusion proteins or glutathione-S-transferase/binding partner can be adsorbed onto glutathione sepharose beads (Sigma Chemical, St. Louis, Mo.) or glutathione derivatized microtiter plates, which are then combined with the test compound or the test compound and either the non-adsorbed marker or its binding partner, and the mixture incubated under conditions conducive to complex formation (e.g., physiological conditions). Following incubation, the beads or microtiter plate wells are washed to remove any unbound assay components, the immobilized complex assessed either directly or indirectly, for example, as described above. Alternatively, the complexes can be dissociated from the matrix, and the level of marker binding or activity determined using standard techniques.

[0246] Other techniques for immobilizing proteins on matrices can also be used in the screening assays of the invention. For example, either a marker or a marker binding partner can be immobilized utilizing conjugation of biotin and streptavidin. Biotinylated marker protein or target molecules can be prepared from biotin-NHS (Nhydroxy-succinimide) using techniques known in the art (e.g., biotinylation kit, Pierce Chemicals, Rockford, Ill.), and immobilized in the wells of streptavidin-coated 96 well plates (Pierce Chemical). In certain embodiments, the protein-immobilized surfaces can be prepared in advance and stored.

[0247] In order to conduct the assay, the corresponding partner of the immobilized assay component is exposed to the coated surface with or without the test compound. After the reaction is complete, unreacted assay components are removed (e.g., by washing) and any complexes formed will remain immobilized on the solid surface. The detection of complexes anchored on the solid surface can be accomplished in a number of ways. Where the non-immobilized component is pre-labeled, the detection of label immobilized on the surface indicates that complexes were formed. Where the non-immobilized component is not pre-labeled, an indirect label can be used to detect complexes anchored on the surface; e.g., using a labeled antibody specific for the initially non-immobilized species (the antibody, in turn, can be directly labeled or indirectly labeled with, e.g., a labeled anti-Ig antibody). Depending upon the order of addition of reaction components, test compounds which modulate (inhibit or enhance) complex formation or which disrupt preformed complexes can be detected.

[0248] In an alternate embodiment of the invention, a homogeneous assay may be used. This is typically a reaction, analogous to those mentioned above, which is conducted in a liquid phase in the presence or absence of the test compound. The formed complexes are then separated from unreacted components, and the amount of complex formed is determined. As mentioned for heterogeneous assay systems, the order of addition of reactants to the liquid phase can yield information about which test compounds modulate (inhibit or enhance) complex formation and which disrupt preformed complexes.

[0249] In such a homogeneous assay, the reaction products may be separated from unreacted assay components by any of a number of standard techniques, including but not limited to: differential centrifugation, chromatography, electrophoresis and immunoprecipitation. In differential centrifugation, complexes of molecules may be separated from uncomplexed molecules through a series of centrifugal steps, due to the different sedimentation equilibria of complexes based on their different sizes and densities (see, for example, Rivas, G., and Minton, A. P., Trends Biochem Sci 1993 Aug; 18(8):284-7). Standard chromatographic techniques may also be utilized to separate complexed molecules from uncomplexed ones. For example, gel filtration chromatography separates molecules based on size, and through the utilization of an appropriate gel filtration resin in a column format, for example, the relatively larger complex may be separated from the relatively smaller uncomplexed components. Similarly, the relatively different charge properties of the complex as compared to the uncomplexed molecules may be exploited to differentially separate the complex from the remaining individual reactants, for example through the use of ion-exchange chromatography resins. Such resins and chromatographic techniques are well known to one skilled in the art (see, e.g., Heegaard, 1998, J. Mol. Recognit. 11: 141-148; Hage and Tweed, 1997, J. Chromatogr. B. Biomed. Sci. Appl., 699:499-525). Gel electrophoresis may also be employed to separate complexed molecules from unbound species (see, e.g., Ausubel et al (eds.), In: Current Protocols in Molecular Biology, J. Wiley & Sons, New York. 1999). In this technique, protein or nucleic acid complexes are separated based on size or charge, for example. In order to maintain the binding interaction during the electrophoretic process, nondenaturing gels in the absence of reducing agent are typically preferred, but conditions appropriate to the particular interactants will be well known to one skilled in the art. Immunoprecipitation is another common technique utilized for the isolation of a protein-protein complex from solution (see, e.g., Ausubel et al (eds.), In: Current Protocols in Molecular Biology, J. Wiley & Sons, New York. 1999). In this technique, all proteins binding to an antibody specific to one of the binding molecules are precipitated from solution by conjugating the antibody to a polymer bead that may be readily collected by centrifugation. The bound assay components are released from the beads (through a specific proteolysis event or other technique well known in the art which will not disturb the protein-protein interaction in the complex), and a second immunoprecipitation step is performed, this time utilizing antibodies specific for the correspondingly different interacting assay component. In this manner, only formed complexes should remain attached to the beads. Variations in complex formation in both the presence and the absence of a test compound can be compared, thus offering information about the ability of the compound to modulate interactions between the marker and its binding partner.

[0250] Also within the scope of the present invention are methods for direct detection of interactions between the marker and its natural binding partner and/or a test compound in a homogeneous or heterogeneous assay system without further sample manipulation. For example, the technique of fluorescence energy transfer may be utilized (see, e.g., Lakowicz et al, U.S. Pat. No. 5,631,169; Stavrianopoulos et al, U.S. Pat. No. 4,868,103). Generally, this technique involves the addition of a fluorophore label on a first ‘donor’ molecule (e.g., marker or test compound) such that its emitted fluorescent energy will be absorbed by a fluorescent label on a second, ‘acceptor’ molecule (e.g., marker or test compound), which in turn is able to fluoresce due to the absorbed energy. Alternately, the ‘donor’ protein molecule may simply utilize the natural fluorescent energy of tryptophan residues. Labels are chosen that emit different wavelengths of light, such that the ‘acceptor’ molecule label may be differentiated from that of the ‘donor’. Since the efficiency of energy transfer between the labels is related to the distance separating the molecules, spatial relationships between the molecules can be assessed. In a situation in which binding occurs between the molecules, the fluorescent emission of the ‘acceptor’ molecule label in the assay should be maximal. An FET binding event can be conveniently measured through standard fluorometric detection means well known in the art (e.g., using a fluorimeter). A test substance which either enhances or hinders participation of one of the species in the preformed complex will result in the generation of a signal variant to that of background. In this way, test substances that modulate interactions between a marker and its binding partner can be identified in controlled assays.

[0251] In another embodiment, modulators of marker expression are identified in a method wherein a cell is contacted with a candidate compound and the expression of mRNA or protein, corresponding to a marker in the cell, is determined. The level of expression of mRNA or protein in the presence of the candidate compound is compared to the level of expression of mRNA or protein irt the absence of the candidate compound. The candidate compound can then be identified as a modulator of marker expression based on this comparison. For example, when expression of marker mRNA or protein is greater (statistically significantly greater) in the presence of the candidate compound than in its absence, the candidate compound is identified as a stimulator of marker mRNA or protein expression. Conversely, when expression of marker mRNA or protein is less (statistically significantly less) in the presence of the candidate compound than in its absence, the candidate compound is identified as an inhibitor of marker mRNA or protein expression. The level of marker mRNA or protein expression in the cells can be determined by methods described herein for detecting marker mRNA or protein.

[0252] In another aspect, the invention pertains to a combination of two or more of the assays described herein. For example, a modulating agent can be identified using a cell-based or a cell free assay, and the ability of the agent to modulate the activity of a marker protein can be further confirmed in vivo, e.g., in a whole animal model for cellular transformation and/or tumorigenesis.

[0253] This invention further pertains to novel agents identified by the above-described screening assays. Accordingly, it is within the scope of this invention to further use an agent identified as described herein in an appropriate animal model. For example, an agent identified as described herein (e.g., an marker modulating agent, an antisense marker nucleic acid molecule, an marker-specific antibody, or an marker-binding partner) can be used in an animal model to determine the efficacy, toxicity, or side effects of treatment with such an agent. Alternatively, an agent identified as described herein can be used in an animal model to determine the mechanism of action of such an agent. Furthermore, this invention pertains to uses of novel agents identified by the above-described screening assays for treatments as described herein.

[0254] It is understood that appropriate doses of small molecule agents and protein or polypeptide agents depends upon a number of factors within the knowledge of the ordinarily skilled physician, veterinarian, or researcher. The dose(s) of these agents will vary, for example, depending upon the identity, size, and condition of the subject or sample being treated, further depending upon the route by which the composition is to be administered, if applicable, and the effect which the practitioner desires the agent to have upon the nucleic acid or polypeptide of the invention. Exemplary doses of a small molecule include milligram or microgram amounts per kilogram of subject or sample weight (e.g. about 1 microgram per kilogram to about 500 milligrams per kilogram, about 100 micrograms per kilogram to about 5 milligrams per kilogram, or about 1 microgram per kilogram to about 50 micrograms, per kilogram). Exemplary doses of a protein or polypeptide include gram, milligram or microgram amounts per kilogram of subject or sample weight (e.g. about 1 microgram per kilogram to about 5 grams per kilogram, about 100 micrograms per kilogram to about 500 milligrams per kilogram, or about 1 milligram per kilogram to about 50 milligrams per kilogram). It is furthermore understood that appropriate doses of one of these agents depend upon the potency of the agent with respect to the expression or activity to be modulated. Such appropriate doses can be determined using the assays described herein. When one or more of these agents is to be administered to an animal (e.g. a human) in order to modulate expression or activity of a polypeptide or nucleic acid of the invention, a physician, veterinarian, or researcher can, for example, prescribe a relatively low dose at first, subsequently increasing the dose until an appropriate response is obtained. In addition, it is understood that the specific dose level for any particular animal subject will depend upon a variety of factors including the activity of the specific agent employed, the age, body weight, general health, gender, and diet of the subject, the time of administration, the route of administration, the rate of excretion, any drug combination, and the degree of expression or activity to be modulated.

[0255] A pharmaceutical composition of the invention is formulated to be compatible with its intended route of administration. Examples of routes of administration include parenteral, e.g., intravenous, intradermal, subcutaneous, oral (e.g., inhalation), transdermal (topical), transmucosal, and rectal administration. Solutions or suspensions used for parenteral, intradermal, or subcutaneous application can include the following components: a sterile diluent such as water for injection, saline solution, fixed oils, polyethylene glycols, glycerine, propylene glycol or other synthetic solvents; antibacterial agents such as benzyl alcohol or methyl parabens; antioxidants such as ascorbic acid or sodium bisusulfite; chelating agents such as ethylenediamine-tetraacetic acid; buffers such as acetates, citrates or phosphates and agents for the adjustment of tonicity such as sodium chloride or dextrose. pH can be adjusted with acids or bases, such as hydrochloric acid or sodium hydroxide. The parenteral preparation can be enclosed in ampules, disposable syringes or multiple dose vials made of glass or plastic.

[0256] Pharmaceutical compositions suitable for injectable use include sterile aqueous solutions (where water soluble) or dispersions and sterile powders for the extemporaneous preparation of sterile injectable solutions or dispersions. For intravenous administration, suitable carriers include physiological saline, bacteriostatic water, Cremophor EL (BASF; Parsippany, N.J.) or phosphate buffered saline (PBS). In all cases, the composition must be sterile and should be fluid to the extent that easy syringability exists. It must be stable under the conditions of manufacture and storage and must be preserved against the contaminating action of microorganisms such as bacteria and fungi. The carrier can be a solvent or dispersion medium containing, for example, water, ethanol, polyol (for example, glycerol, propylene glycol, and liquid polyethylene glycol, and the like), and suitable mixtures thereof. The proper fluidity can be maintained, for example, by the use of a coating such as lecithin, by the maintenance of the required particle size in the case of dispersion and by the use of surfactants. Prevention of the action of microorganisms can be achieved by various antibacterial and antifungal agents, for example, parabens, chloro butanol, phenol, ascorbic acid, thimerosal, and the like. In many cases, it will be preferable to include isotonic agents, for example, sugars, polyalcohols such as mannitol, sorbitol, or sodium chloride in the composition. Prolonged absorption of the injectable compositions can be brought about by including in the composition an agent which delays absorption, for example, aluminum monostearate and gelatin.

[0257] Sterile injectable solutions can be prepared by incorporating the active compound (e.g., a polypeptide or antibody) in the required amount in an appropriate solvent with one or a combination of ingredients enumerated above, as required, followed by filtered sterilization. Generally, dispersions are prepared by incorporating the active compound into a sterile vehicle which contains a basic dispersion medium, and then incorporating the required other ingredients from those enumerated above. In the case of sterile powders for the preparation of sterile injectable solutions, the preferred methods of preparation are vacuum during and freeze-drying which yields a powder of the active ingredient plus any additional desired ingredient from a previously sterile-filtered solution thereof.

[0258] Oral compositions generally include an inert diluent or an edible carrier. They can be enclosed in gelatin capsules or compressed into tablets. For the purpose of oral therapeutic administration, the active compound can be incorporated with excipients and used in the form of tablets, troches, or capsules. Oral compositions can also be prepared using a fluid carrier for use as a mouthwash, wherein the compound in the fluid carrier is applied orally and swished and expectorated or swallowed.

[0259] Pharmaceutically compatible binding agents, and/or adjuvant materials can be included as part of the composition. The tablets, pills, capsules, troches, and the like can contain any of the following ingredients, or compounds of a similar nature: a binder such as microcrystalline cellulose, gum tragacanth or gelatin; an excipient such as starch or lactose, a disintegrating agent such as alginic acid, Primogel, or corn starch; a lubricant such as magnesium stearate or Sterotes; a glidant such as colloidal silicon dioxide; a sweetening agent such as sucrose or saccharin; or a flavoring agent such as peppermint, methyl salicylate, or orange flavoring.

[0260] For administration by inhalation, the compounds are delivered in the form of an aerosol spray from a pressurized container or dispenser which contains a suitable propellant, e.g., a gas such as carbon dioxide, or a nebulizer.

[0261] Systemic administration can also be by transmucosal or transdermal means. For transmucosal or transdermal administration, penetrants appropriate to the barrier to be permeated are used in the formulation. Such penetrants are generally known in the art, and include, for example, for transmucosal administration, detergents, bile salts, and fusidic acid derivatives. Transmucosal administration can be accomplished through the use of nasal sprays or suppositories. For transdermal administration, the active compounds are formulated into ointments, salves, gels, or creams as generally known in the art.

[0262] The compounds can also be prepared in the form of suppositories (e.g., with conventional suppository bases such as cocoa butter and other glycerides) or retention enemas for rectal delivery.

[0263] In one embodiment, the active compounds are prepared with carriers that will protect the compound against rapid elimination from the body, such as a controlled release formulation, including implants and microencapsulated delivery systems. Biodegradable, biocompatible polymers can be used, such as ethylene vinyl acetate, polyanhydrides, polyglycolic acid, collagen, polyorthoesters, and polylactic acid. Methods for preparation of such formulations will be apparent to those skilled in the art. The materials can also be obtained commercially from Alza Corporation and Nova Pharmaceuticals, Inc. Liposomal suspensions (including liposomes having monoclonal antibodies incorporated therein or thereon) can also be used as pharmaceutically acceptable carriers. These can be prepared according to methods known to those skilled in the art, for example, as described in U.S. Pat. No. 4,522,811.

[0264] It is especially advantageous to formulate oral or parenteral compositions in dosage unit form for ease of administration and uniformity of dosage. Dosage unit form as used herein refers to physically discrete units suited as unitary dosages for the subject to be treated; each unit containing a predetermined quantity of active compound calculated to produce the desired therapeutic effect in association with the required pharmaceutical carrier. The specification for the dosage unit forms of the invention are dictated by and directly dependent on the unique characteristics of the active compound and the particular therapeutic effect to be achieved, and the limitations inherent in the art of compounding such an active compound for the treatment of individuals.

[0265] For antibodies, the preferred dosage is 0.1 mg/kg to 100 mg/kg of body weight (generally 10 mg/kg to 20 mg/kg). If the antibody is to act in the brain, a dosage of 50 mg/kg to 100 mg/kg is usually appropriate. Generally, partially human antibodies and fully human antibodies have a longer half-life within the human body than other antibodies. Accordingly, lower dosages and less frequent administration is often possible. Modifications such as lipidation can be used to stabilize antibodies and to enhance uptake and tissue penetration (e.g., into the ovarian epithelium). A method for lipidation of antibodies is described by Cruikshank et al. (1997) J. Acquired Immune Deficiency Syndromes and Human Retrovirology 14:193.

[0266] The nucleic acid molecules corresponding to a marker of the invention can be inserted into vectors and used as gene therapy vectors. Gene therapy vectors can be delivered to a subject by, for example, intravenous injection, local administration (U.S. Pat. No. 5,328,470), or by stereotactic injection (see, e.g., Chen et al., 1994, Proc. Natl. Acad. Sci. USA 91:3054-3057). The pharmaceutical preparation of the gene therapy vector can include the gene therapy vector in an acceptable diluent, or can comprise a slow release matrix in which the gene delivery vehicle is imbedded. Alternatively, where the complete gene delivery vector can be produced intact from recombinant cells, e.g. retroviral vectors, the pharmaceutical preparation can include one or more cells which produce the gene delivery system.

[0267] The pharmaceutical compositions can be included in a container, pack, or dispenser together with instructions for administration.

[0268] V. Predictive Medicine

[0269] The present invention pertains to the field of predictive medicine in which diagnostic assays, prognostic assays, pharmacogenomics, and monitoring clinical trails are used for prognostic (predictive) purposes to thereby treat an individual prophylactically. Accordingly, one aspect of the present invention relates to diagnostic assays for determining the level of expression of polypeptides or nucleic acids corresponding to one or more markers of the invention, in order to determine whether an individual is at risk of developing ovarian cancer. Such assays can be used for prognostic or predictive purposes to thereby prophylactically treat an individual prior to the onset of the cancer.

[0270] Yet another aspect of the invention pertains to monitoring the influence of agents (e.g., drugs or other compounds administered either to inhibit ovarian cancer or to treat or prevent any other disorder {i.e. in order to understand any ovarian carcinogenic effects that such treatment may have}) on the expression or activity of a marker of the invention in clinical trials. These and other agents are described in further detail in the following sections.

[0271] A. Diagnostic Assays

[0272] An exemplary method for detecting the presence or absence of a polypeptide or nucleic acid corresponding to a marker of the invention in a biological sample involves obtaining a biological sample (e.g. an ovary-associated body fluid) from a test subject and contacting the biological sample with a compound or an agent capable of detecting the polypeptide or nucleic acid (e.g., mRNA, genomic DNA, or cDNA). The detection methods of the invention can thus be used to detect mRNA, protein, cDNA, or genomic DNA, for example, in a biological sample in vitro as well as in vivo. For example, in vitro techniques for detection of mRNA include Northern hybridizations and in situ hybridizations. In vitro techniques for detection of a polypeptide corresponding to a marker of the invention include enzyme linked immunosorbent assays (ELISAs), Western blots., immunoprecipitations and immunofluorescence. In vitro techniques for detection of genomic DNA include Southern hybridizations. Furthermore, in vivo techniques for detection of a polypeptide corresponding to a marker of the invention include introducing into a subject a labeled antibody directed against the polypeptide. For example, the antibody can be labeled with a radioactive marker whose presence and location in a subject can be detected by standard imaging techniques.

[0273] A general principle of such diagnostic and prognostic assays involves preparing a sample or reaction mixture that may contain a marker, and a probe, under appropriate conditions and for a time sufficient to allow the marker and probe to interact and bind, thus forming a complex that can be removed and/or detected in the reaction mixture. These assays can be conducted in a variety of ways.

[0274] For example, one method to conduct such an assay would involve anchoring the marker or probe onto a solid phase support, also referred to as a substrate, and detecting target marker/probe complexes anchored on the solid phase at the end of the reaction. In one embodiment of such a method, a sample from a subject, which is to be assayed for presence and/or concentration of marker, can be anchored onto a carrier or solid phase support. In another embodiment, the reverse situation is possible, in which the probe can be anchored to a solid phase and a sample from a subject can be allowed to react as an unanchored component of the assay.

[0275] There are many established methods for anchoring assay components to a solid phase. These include, without limitation, marker or probe molecules which are immobilized through conjugation of biotin and streptavidin. Such biotinylated assay components can be prepared from biotin-NHS (N-hydroxy-succinimide) using techniques known in the art (e.g., biotinylation kit, Pierce Chemicals, Rockford, Ill.), and immobilized in the wells of streptavidin-coated 96 well plates (Pierce Chemical). In certain embodiments, the surfaces with immobilized assay components can be prepared in advance and stored.

[0276] Other suitable carriers or solid phase supports for such assays include any material capable of binding the class of molecule to which the marker or probe belongs. Well-known supports or carriers include, but are not limited to, glass, polystyrene, nylon, polypropylene, nylon, polyethylene, dextran, amylases, natural and modified celluloses, polyacrylamides, gabbros, and magnetite.

[0277] In order to conduct assays with the above mentioned approaches, the non-immobilized component is added to the solid phase upon which the second component is anchored. After the reaction is complete, uncomplexed components may be removed (e.g., by washing) under conditions such that any complexes formed will remain immobilized upon the solid phase. The detection of marker/probe complexes anchored to the solid phase can be accomplished in a number of methods outlined herein.

[0278] In a preferred embodiment, the probe, when it is the unanchored assay component, can be labeled for the purpose of detection and readout of the assay, either directly or indirectly, with detectable labels discussed herein and which are well-known to one skilled in the art.

[0279] It is also possible to directly detect marker/probe complex formation without further manipulation or labeling of either component (marker or probe), for example by utilizing the technique of fluorescence energy transfer (see, for example, Lakowicz et al., U.S. Pat. No. 5,631,169; Stavrianopoulos, et al, U.S. Pat. No. 4,868,103). A fluorophore label on the first, ‘donor’ molecule is selected such that, upon excitation with incident light of appropriate wavelength, its emitted fluorescent energy will be absorbed by a fluorescent label on a second ‘acceptor’ molecule, which in turn is able to fluoresce due to the absorbed energy. Alternately, the ‘donor’ protein molecule may simply utilize the natural fluorescent energy of tryptophan residues. Labels are chosen that emit different wavelengths of light, such that the ‘acceptor’ molecule label may be differentiated from that of the ‘donor’, since the efficiency of energy transfer between the labels is related to the distance separating the molecules, spatial relationships between the molecules can be assessed. In a situation in which binding occurs between the molecules, the fluorescent emission of the ‘acceptor’ molecule label in the assay should be maximal. An FET binding event can be conveniently measured through standard fluorometric detection means well known in the art (e.g., using a fluorimeter).

[0280] In another embodiment, determination of the ability of a probe to recognize a marker can be accomplished without labeling either assay component (probe or marker) by utilizing a technology such as real-time Biomolecular Interaction Analysis (BIA) (see, e.g., Sjolander, S. and Urbaniczky, C., 1991, Anal. Chem. 63:2338-2345 and Szabo et al., 1995, Curr. Opin. Struct. Biol. 5:699-705). As used herein, “BIA” or “surface plasmon resonance” is a technology for studying biospecific interactions in real time, without labeling any of the interactants (e.g., BIAcore). Changes in the mass at the binding surface (indicative of a binding event) result in alterations of the refractive index of light near the surface (the optical phenomenon of surface plasmon resonance (SPR)), resulting in a detectable signal which can be used as an indication of real-time reactions between biological molecules.

[0281] Alternatively, in another embodiment, analogous diagnostic and prognostic assays can be conducted with marker and probe as solutes in a liquid phase. In such an assay, the complexed marker and probe are separated from uncomplexed components by any of a number of standard techniques, including but not limited to: differential centrifrugation, chromatography, electrophoresis and immunoprecipitation. In differential centrifugation, marker/probe complexes may be separated from uncomplexed assay components through a series of centrifugal steps, due to the different sedimentation equilibria of complexes based on their different sizes and densities (see, for example, Rivas, G., and Minton, A. P., 1993, Trends Biochem Sci. 18(8):284-7). Standard chromatographic techniques may also be utilized to separate complexed molecules from uncomplexed ones. For example, gel filtration chromatography separates molecules based on size, and through the utilization of an appropriate gel filtration resin in a column format, for example, the relatively larger complex may be separated from the relatively smaller uncomplexed components. Similarly, the relatively different charge properties of the marker/probe complex as compared to the uncomplexed components may be exploited to differentiate the complex from uncomplexed components, for example through the utilization of ion-exchange chromatography resins. Such resins and chromatographic techniques are well known to one skilled in the art (see, e.g., Heegaard, N. H., 1998, J. Mol. Recognit. Winter 11(16):141-8; Hage, D. S., and Tweed, S. A. J Chromatogr B Biomed Sci Appl 1997 Oct 10;699(1-2):499-525). Gel electrophoresis may also be employed to separate complexed assay components from unbound components (see, e.g., Ausubel et al., ed., Current Protocols in Molecular Biology, John Wiley & Sons, New York, 1987-1999). In this technique, protein or nucleic acid complexes are separated based on size or charge, for example. In order to maintain the binding interaction during the electrophoretic process, non-denaturing gel matrix materials and conditions in the absence of reducing agent are typically preferred. Appropriate conditions to the particular assay and components thereof will be well known to one skilled in the art.

[0282] In a particular embodiment, the level of mRNA corresponding to the marker can be determined both by in situ and by in vitro formats in a biological sample using methods known in the art. The term “biological sample” is intended to include tissues, cells, biological fluids and isolates thereof, isolated from a subject, as well as tissues, cells and fluids present within a subject. Many expression detection methods use isolated RNA. For in vitro methods, any RNA isolation technique that does not select against the isolation of mRNA can be utilized for the purification of RNA from ovarian cells (see, e.g., Ausubel et al., ed., Current Protocols in Molecular Biology, John Wiley & Sons, New York 1987-1999). Additionally, large numbers of tissue samples can readily be processed using techniques well known to those of skill in the art, such as, for example, the single-step RNA isolation process of Chomczynski (1989, U.S. Pat. No. 4,843,155).

[0283] The isolated mRNA can be used in hybridization or amplification assays that include, but are not limited to, Southern or Northern analyses, polymerase chain reaction analyses and probe arrays. One preferred diagnostic method for the detection of mRNA levels involves contacting the isolated mRNA with a nucleic acid molecule (probe) that can hybridize to the mRNA encoded by the gene being detected. The nucleic acid probe can be, for example, a full-length cDNA, or a portion thereof, such as an oligonucleotide of at least 7, 15, 30, 50, 100, 250 or 500 nucleotides in length and sufficient to specifically hybridize under stringent conditions to a mRNA or genomic DNA encoding a marker of the present invention. Other suitable probes for use in the diagnostic assays of the invention are described herein. Hybridization of an mRNA with the probe indicates that the marker in question is being expressed.

[0284] In one format, the mRNA is immobilized on a solid surface and contacted with a probe, for example by running the isolated mRNA on an agarose gel and transferring the mRNA from the gel to a membrane, such as nitrocellulose. In an alternative format, the probe(s) are immobilized on a solid surface and the mRNA is contacted with the probe(s), for example, in an Affymetrix gene chip array. A skilled artisan can readily adapt known mRNA detection methods for use in detecting the level of mRNA encoded by the markers of the present invention.

[0285] An alternative method for determining the level of mRNA corresponding to a marker of the present invention in a sample involves the process of nucleic acid amplification, e.g., by rtPCR (the experimental embodiment set forth in Mullis, 1987, U.S. Pat. No. 4,683,202), ligase chain reaction (Barany, 1991, Proc. Natl. Acad. Sci. USA, 88:189-193), self sustained sequence replication (Guatelli et al., 1990, Proc. Natl. Acad. Sci. USA 87:1874-1878), transcriptional amplification system (Kwoh et al., 1989, Proc. Natl. Acad. Sci. USA 86:1173-1177), Q-Beta Replicase (Lizardi et al., 1988, Bio/Technology 6:1197), rolling circle replication (Lizardi et al., U.S. Pat. No. 5,854,033) or any other nucleic acid amplification method, followed by the detection of the amplified molecules using techniques well known to those of skill in the art. These detection schemes are especially useful for the detection of nucleic acid molecules if such molecules are present in very low numbers. As used herein, amplification primers are defined as being a pair of nucleic acid molecules that can anneal to 5′ or 3′ regions of a gene (plus and minus strands, respectively, or vice-versa) and contain a short region in between. In general, amplification primers are from about 10 to 30 nucleotides in length and flank a region from about 50 to 200 nucleotides in length. Under appropriate conditions and with appropriate reagents, such primers permit the amplification of a nucleic acid molecule comprising the nucleotide sequence flanked by the primers.

[0286] For in situ methods, mRNA does not need to be isolated from the ovarian cells prior to detection. In such methods, a cell or tissue sample is prepared/processed using known histological methods. The sample is then immobilized on a support, typically a glass slide, and then contacted with a probe that can hybridize to mRNA that encodes the marker.

[0287] As an alternative to making determinations based on the absolute expression level of the marker, determinations may be based on the normalized expression level of the marker. Expression levels are normalized by correcting the absolute expression level of a marker by comparing its expression to the expression of a gene that is not a marker, e.g., a housekeeping gene that is constitutively expressed. Suitable genes for normalization include housekeeping genes such as the actin gene, or epithelial cell-specific genes. This normalization allows the comparison of the expression level in one sample, e.g., a patient sample, to another sample, e.g., a non-ovarian cancer sample, or between samples from different sources.

[0288] Alternatively, the expression level can be provided as a relative expression level. To determine a relative expression level of a marker, the level of expression of the marker is determined for 10 or more samples of normal versus cancer cell isolates, preferably 50 or more samples, prior to the determination of the expression level for the sample in question. The mean expression level of each of the genes assayed in the larger number of samples is determined and this is used as a baseline expression level for the marker. The expression level of the marker determined for the test sample (absolute level of expression) is then divided by the mean expression value obtained for that marker. This provides a relative expression level.

[0289] Preferably, the samples used in the baseline determination will be from ovarian cancer or from non-ovarian cancer cells of ovarian tissue. The choice of the cell source is dependent on the use of the relative expression level. Using expression found in normal tissues as a mean expression score aids in validating whether the marker assayed is ovarian specific (versus normal cells). In addition, as more data is accumulated, the mean expression value can be revised, providing improved relative expression values based on accumulated data. Expression data from ovarian cells provides a means for grading the severity of the ovarian cancer state.

[0290] In another embodiment of the present invention, a polypeptide corresponding to a marker is detected. A preferred agent for detecting a polypeptide of the invention is an antibody capable of binding to a polypeptide corresponding to a marker of the invention, preferably an antibody with a detectable label. Antibodies can be polyclonal, or more preferably, monoclonal. An intact antibody, or a fragment thereof (e.g., Fab or F(ab′)₂) can be used. The term “labeled”, with regard to the probe or antibody, is intended to encompass direct labeling of the probe or antibody by coupling (i.e., physically linking) a detectable substance to the probe or antibody, as well as indirect labeling of the probe or antibody by reactivity with another reagent that is directly labeled. Examples of indirect labeling include detection of a primary antibody using a fluorescently labeled secondary antibody and end-labeling of a DNA probe with biotin such that it can be detected with fluorescently labeled streptavidin.

[0291] Proteins from ovarian cells can be isolated using techniques that are well known to those of skill in the art. The protein isolation methods employed can, for example, be such as those described in Harlow and Lane (Harlow and Lane, 1988, Antibodies: A Laboratory Manual, Cold Spring Harbor Laboratory Press, Cold Spring Harbor, N.Y.).

[0292] A variety of formats can be employed to determine whether a sample contains a protein that binds to a given antibody. Examples of such formats include, but are not limited to, enzyme immunoassay (EIA), radioimmunoassay (RIA), Western blot analysis and enzyme linked immunoabsorbant assay (ELISA). A skilled artisan can readily adapt known protein/antibody detection methods for use in determining whether ovarian cells express a marker of the present invention.

[0293] In one format, antibodies, or antibody fragments, can be used in methods such as Western blots or immunofluorescence techniques to detect the expressed proteins. In such uses, it is generally preferable to immobilize either the antibody or proteins on a solid support. Suitable solid phase supports or carriers include any support capable of binding an antigen or an antibody. Well-known supports or carriers include glass, polystyrene, polypropylene, polyethylene, dextran, nylon, amylases, natural and modified celluloses, polyacrylamides, gabbros, and magnetite.

[0294] One skilled in the art will know many other suitable carriers for binding antibody or antigen, and will be able to adapt such support for use with the present invention. For example, protein isolated from ovarian cells can be run on a polyacrylamide gel electrophoresis and immobilized onto a solid phase support such as nitrocellulose. The support can then be washed with suitable buffers followed by treatment with the detectably labeled antibody. The solid phase support can then be washed with the buffer a second time to remove unbound antibody. The amount of bound label on the solid support can then be detected by conventional means.

[0295] The invention also encompasses kits for detecting the presence of a polypeptide or nucleic acid corresponding to a marker of the invention in a biological sample (e.g. an ovary-associated body fluid such as a urine sample). Such kits can be used to determine if a subject is suffering from or is at increased risk of developing ovarian cancer. For example, the kit can comprise a labeled compound or agent capable of detecting a polypeptide or an mRNA encoding a polypeptide corresponding to a marker of the invention in a biological sample and means for determining the amount of the polypeptide or mRNA in the sample (e.g., an antibody which binds the polypeptide or an oligonucleotide probe which binds to DNA or mRNA encoding the polypeptide). Kits can also include instructions for interpreting the results obtained using the kit.

[0296] For antibody-based kits, the kit can comprise, for example: (1) a first antibody (e.g., attached to a solid support) which binds to a polypeptide corresponding to a marker of the invention; and, optionally, (2) a second, different antibody which binds to either the polypeptide or the first antibody and is conjugated to a detectable label.

[0297] For oligonucleotide-based kits, the kit can comprise, for example: (1) an oligonucleotide, e.g., a detectably labeled oligonucleotide, which hybridizes to a nucleic acid sequence encoding a polypeptide corresponding to a marker of the invention or (2) a pair of primers useful for amplifying a nucleic acid molecule corresponding to a 5 marker of the invention. The kit can also comprise, e.g., a buffering agent, a preservative, or a protein stabilizing agent. The kit can further comprise components necessary for detecting the detectable label (e.g. an enzyme or a substrate). The kit can also contain a control sample or a series of control samples which can be assayed and compared to the test sample. Each component of the kit can be enclosed within an individual container and all of the various containers can be within a single package, along with instructions for interpreting the results of the assays performed using the kit.

[0298] B. Pharmacogenomics

[0299] Agents or modulators which have a stimulatory or inhibitory effect on expression of a marker of the invention can be administered to individuals to treat (prophylactically or therapeutically) ovarian cancer in the patient. In conjunction with such treatment, the pharmacogenomics (i.e., the study of the relationship between an individual's genotype and that individual's response to a foreign compound or drug) of the individual may be considered. Differences in metabolism of therapeutics can lead to severe toxicity or therapeutic failure by altering the relation between dose and blood concentration of the pharmacologically active drug. Thus, the pharmacogenomics of the individual permits the selection of effective agents (e.g., drugs) for prophylactic or therapeutic treatments based on a consideration of the individual's genotype. Such pharmacogenomics can further be used to determine appropriate dosages and therapeutic regimens. Accordingly, the level of expression of a marker of the invention in an individual can be determined to thereby select appropriate agent(s) for therapeutic or prophylactic treatment of the individual.

[0300] Pharmacogenomics deals with clinically significant variations in the response to drugs due to altered drug disposition and abnormal action in affected persons. See, e.g., Linder (1997) Clin. Chem. 43(2):254-266. In general, two types of pharmacogenetic conditions can be differentiated. Genetic conditions transmitted as a single factor altering the way drugs act on the bcdy are referred to as “altered drug action.” Genetic conditions transmitted as single factors altering the way the body acts on drugs are referred to as “altered drug metabolism”. These pharmacogenetic conditions can occur either as rare defects or as polymorphisms. For example, glucose-phosphate dehydrogenase (G6PD) deficiency is a common inherited enzymopathy in which the main clinical complication is hemolysis after ingestion of oxidant drugs (anti-malarials, sulfonamides, analgesics, nitrofurans) and consumption of fava beans.

[0301] As an illustrative embodiment, the activity of drug metabolizing enzymes is a major determinant of both the intensity and duration of drug action. The discovery of genetic polymorphisms of drug metabolizing enzymes (e.g., N-acetyltransferase 2 (NAT 2) and cytochrome P450 enzymes CYP2D6 and CYP2C19) has provided an explanation as to why some patients do not obtain the expected drug effects or show exaggerated drug response and serious toxicity after taking the standard and safe dose of a drug. These polymorphisms are expressed in two phenotypes in the population, the extensive metabolizer (EM) and poor metabolizer (PM). The prevalence of PM is different among different populations. For example, the gene coding for CYP2D6 is highly polymorphic and several mutations have been identified in PM, which all lead to the absence of functional CYP2D6. Poor metabolizers of CYP2D6 and CYP2C19 quite frequently experience exaggerated drug response and side effects when they receive standard doses. If a metabolite is-the active therapeutic moiety, a PM will show no therapeutic response, as demonstrated for the analgesic effect of codeine mediated by its CYP2D6-formed metabolite morphine. The other extreme are the so called ultra-rapid metabolizers who do not respond to standard doses. Recently, the molecular basis of ultra-rapid metabolism has been identified to be due to CYP2D6 gene amplification.

[0302] Thus, the level of expression of a marker of the invention in an individual can be determined to thereby select appropriate agent(s) for therapeutic or prophylactic treatment of the individual. In addition, pharmacogenetic studies can be used to apply genotyping of polymorphic alleles encoding drug-metabolizing enzymes to the identification of an individual's drug responsiveness phenotype. This knowledge, when applied to dosing or drug selection, can avoid adverse reactions or therapeutic failure and thus enhance therapeutic or prophylactic efficiency when treating a subject with a modulator of expression of a marker of the invention.

[0303] C. Monitoring Clinical Trials

[0304] Monitoring the influence of agents (e.g., drug compounds) on the level of expression of a marker of the invention can be applied not only in basic drug screening, but also in clinical trials. For example, the effectiveness of an agent to affect marker expression can be monitored in clinical trials of subjects receiving treatment for ovarian cancer. In a preferred embodiment, the present invention provides a method for monitoring the effectiveness of treatment of a subject with an agent (e.g., an agonist, antagonist, peptidomimetic, protein, peptide, nucleic acid, small molecule, or other drug candidate) comprising the steps of (i) obtaining a pre-administration sample from a subject prior to administration of the agent; (ii) detecting the level of expression of one or more selected markers of the invention in the pre-administration sample; (iii) obtaining one or more post-administration samples from the subject; (iv) detecting the level of expression of the marker(s) in the post-administration samples; (v) comparing the level of expression of the marker(s) in the pre-administration sample with the level of expression of the marker(s) in the post-administration sample or samples; and (vi) altering the administration of the agent to the subject accordingly. For example, increased administration of the agent can be desirable to increase expression of the marker(s) to higher levels than detected, i.e., to increase the effectiveness of the agent. Alternatively, decreased administration of the agent can be desirable to decrease expression of the marker(s) to lower levels than detected, i.e., to decrease the effectiveness of the agent.

[0305] D. Electronic Apparatus Readable Media and Arrays

[0306] Electronic apparatus readable media comprising a marker of the present invention is also provided. As used herein, “electronic apparatus readable media” refers to any suitable medium for storing, holding or containing data or information that can be read and accessed directly by an electronic apparatus. Such media can include, but are not limited to: magnetic storage media, such as floppy discs, hard disc storage medium, and magnetic tape; optical storage media such as compact disc; electronic storage media such as RAM, ROM, EPROM, EEPROM and the like; general hard disks and hybrids of these categories such as magnetic/optical storage media. The medium is adapted or configured for having recorded thereon a marker of the present invention.

[0307] As used herein, the term “electronic apparatus” is intended to include any suitable computing or processing apparatus or other device configured or adapted for storing data or information. Examples of electronic apparatus suitable for use with the present invention include stand-alone computing apparatus; networks, including a local area network (LAN), a wide area network (WAN) Internet, Intranet, and Extranet; electronic appliances such as a personal digital assistants (PDAs), cellular phone, pager and the like; and local and distributed processing systems.

[0308] As used herein, “recorded” refers to a process for storing or encoding information on the electronic apparatus readable medium. Those skilled in the art can readily adopt any of the presently known methods for recording information on known media to generate manufactures comprising the markers of the present invention.

[0309] A variety of software programs and formats can be used to store the marker information of the present invention on the electronic apparatus readable medium. For example, the nucleic acid sequence corresponding to the markers can be represented in a word processing text file, formatted in commercially-available software such as WordPerfect and MicroSoft Word, or represented in the form of an ASCII file, stored in a database application, such as DB2, Sybase, Oracle, or the like, as well as in other forms. Any number of dataprocessor structuring formats (e.g., text file or database) may be employed in order to obtain or create a medium having recorded thereon the the markers of the present invention.

[0310] By providing the markers of the invention in readable form, one can routinely access the marker sequence information for a variety of purposes. For example, one skilled in the art can use the nucleotide or amino acid sequences of the present invention in readable form to compare a target sequence or target structural motif with the sequence information stored within the data storage means. Search means are used to identify fragments or regions of the sequences of the invention which match a particular target sequence or target motif.

[0311] The present invention therefore provides a medium for holding instructions for performing a method for determining whether a subject has ovarian cancer or a pre-disposition to ovarian cancer, wherein the method comprises the steps of determining the presence or absence of a marker and based on the presence or absence of the marker, determining whether the subject has ovarian cancer or a pre-disposition to ovarian cancer and/or recommending a particular treatment for ovarian cancer or pre-ovarian cancer condition.

[0312] The present invention further provides in an electronic system and/or in a network, a method for determining whether a subject has ovarian cancer or a predisposition to ovarian cancer associated with a marker wherein the method comprises the steps of determining the presence or absence of the marker, and based on the presence or absence of the marker, determining whether the subject has ovarian cancer or a pre-disposition to ovarian cancer, and/or recommending a particular treatment for the ovarian cancer or pre-ovarian cancer condition. The method may further comprise the step of receiving phenotypic information associated with the subject and/or acquiring from a network phenotypic information associated with the subject.

[0313] The present invention also provides in a network, a method for determining whether a subject has ovarian cancer or a pre-disposition to ovarian cancer associated with a marker, said method comprising the steps of receiving information associated with the marker receiving phenotypic information associated with the subject, acquiring information from the network corresponding to the marker and/or ovarian cancer, and based on one or more of the phenotypic information, the marker, and the acquired information, determining whether the subject has a ovarian cancer or a predisposition to ovarian cancer. The method may further comprise the step of recommending a particular treatment for the ovarian cancer or pre-ovarian cancer condition.

[0314] The present invention also provides a business method for determining whether a subject has ovarian cancer or a pre-disposition to ovarian cancer, said method comprising the steps of receiving information associated with the marker, receiving phenotypic information associated with the subject, acquiring information from the network corresponding to the marker and/or ovarian cancer, and based on one or more of the phenotypic information, the marker, and the acquired information, determining whether the subject has ovarian cancer or a predisposition to ovarian cancer. The method may further comprise the step of recommending a particular treatment for the ovarian cancer or pre-ovarian cancer condition.

[0315] The invention also includes an array comprising a marker of the present invention. The array can be used to assay expression of one or more genes in the array. In one embodiment, the array can be used to assay gene expression in a tissue to ascertain tissue specificity of genes in the array. In this manner, up to about 7600 genes can be simultaneously assayed for expression. This allows a profile to be developed showing a battery of genes specifically expressed in one or more tissues.

[0316] In addition to such qualitative determination, the invention allows the quantitation of gene expression. Thus, not only tissue specificity, but also the level of expression of a battery of genes in the tissue is ascertainable. Thus, genes can be grouped on the basis of their tissue expression per se and level of expression in that tissue. This is useful, for example, in ascertaining the relationship of gene expression between or among tissues. Thus, one tissue can be perturbed and the effect on gene expression in a second tissue can be determined. In this context, the effect of one cell type on another cell type in response to a biological stimulus can be determined. Such a determination is useful, for example, to know the effect of cell-cell interaction at the level of gene expression. If an agent is administered therapeutically to treat one cell type but has an undesirable effect on another cell type, the invention provides an assay to determine the molecular basis of the undesirable effect and thus provides the opportunity to co-administer a counteracting agent or otherwise treat the undesired effect. Similarly, even within a single cell type, undesirable biological effects can be determined at the molecular level. Thus, the effects of an agent on expression of other than the target gene can be ascertained and counteracted.

[0317] In another embodiment, the array can be used to monitor the time course of expression of one or more genes in the array. This can occur in various biological contexts, as disclosed herein, for example development of ovarian cancer, progression of ovarian cancer, and processes, such a cellular transformation associated with ovarian cancer.

[0318] The array is also useful for ascertaining the effect of the expression of a gene on the expression of other genes in the same cell or in different cells. This provides, for example, for a selection of alternate molecular targets for therapeutic intervention if the ultimate or downstream target cannot be regulated.

[0319] The array is also useful for ascertaining differential expression patterns of one or more genes in normal and abnormal cells. This provides a battery of genes that could serve as a molecular target for diagnosis or therapeutic intervention.

[0320] E. Surrogate Markers

[0321] The markers of the invention may serve as surrogate markers for one or more disorders or disease states or for conditions, leading up to disease states, and in particular, ovarian cancer. As used herein, a “surrogate marker” is an objective biochemical marker which correlates with the absence or presence of a disease or disorder, or with the progression of a disease or disorder (e.g., with the presence or absence of a tumor). The presence or quantity of such markers is independent of the disease. Therefore, these markers may serve to indicate whether a particular course of treatment is effective in lessening a disease state or disorder. Surrogate markers are of particular use when the presence or extent of a disease state or disorder is difficult to assess through standard methodologies (e.g., early stage tumors), or when an assessment of disease progression is desired before a potentially dangerous clinical endpoint is reached (e.g., an assessment of cardiovascular disease may be made using cholesterol levels as a surrogate marker, and an analysis of HIV infection may be made using HIV RNA levels as a surrogate marker, well in advance of the undesirable clinical outcomes of myocardial infarction or fully-developed AIDS). Examples of the use of surrogate markers in the art include: Koomen et al. (2000) J. Mass. Spectrom. 35: 258-264; and James (1994) AIDS Treatment News Archive 209.

[0322] The markers of the invention are also useful as pharmacodynamic markers. As used herein, a “pharmacodynamic marker” is an objective biochemical marker which correlates specifically with drug effects. The presence or quantity of a pharmacodynamic marker is not related to the disease state or disorder for which the drug is being administered; therefore, the presence or quantity of the marker is indicative of the presence or activity of the drug in a subject. For example, a pharmacodynamic marker may be indicative of the concentration of the drug in a biological tissue, in that the marker is either expressed or transcribed or not expressed or transcribed in that tissue in relationship to the level of the drug. In this fashion, the distribution or uptake of the drug may be monitored by the pharmacodynamic marker. Similarly, the presence or quantity of the pharmacodynamic marker may be related to the presence or quantity of the metabolic product of a drug, such that the presence or quantity of the marker is indicative of the relative breakdown rate of the drug in vivo. Pharmacodynamic markers are of particular use in increasing the sensitivity of detection of drug effects, particularly when the drug is administered in low doses. Since even a small amount of a drug may be sufficient to activate multiple rounds of marker transcription or expression, the amplified marker may be in a quantity which is more readily detectable than the drug itself. Also, the marker may be more easily detected due to the nature of the marker itself, for example, using the methods described herein, antibodies may be employed in an immune-based detection system for a protein marker, or marker-specific radiolabeled probes may be used to detect a mRNA marker. Furthermore, the use of a pharmacodynamic marker may offer mechanism-based prediction of risk due to drug treatment beyond the range of possible direct observations. Examples of the use of pharmacodynamic markers in the art include: Matsuda et al. U.S. Pat. No. 6,033,862; Hattis et al. (1991) Env. Health Perspect. 90: 229-238; Schentag (1999) Am. J. Health-Syst. Pharm. 56 Suppl. 3: S21-S24; and Nicolau (1999) Am, J. Health-Syst. Pharm. 56 Suppl. 3: S16-S20.

[0323] The markers of the invention are also useful as pharmacogenomic markers. As used herein, a “pharmacogenomic marker” is an objective biochemical marker which correlates with a specific clinical drug response or susceptibility in a subject (see, e.g., McLeod et al. (1999) Eur. J. Cancer 35(12): 1650-1652). The presence or quantity of the pharmacogenomic marker is related to the predicted response of the subject to a specific drug or class of drugs prior to administration of the drug. By assessing the presence or quantity of one or more pharmacogenomic markers in a subject, a drug therapy which is most appropriate for the subject, or which is predicted to have a greater degree of success, may be selected. For example, based on the presence or quantity of RNA or protein for specific tumor markers in a subject, a drug or course of treatment may be selected that is optimized for the treatment of the specific tumor likely to be present in the subject. Similarly, the presence or absence of a specific sequence mutation in marker DNA may correlate with drug response. The use of pharmacogenomic markers therefore permits the application of the most appropriate treatment for each subject without having to administer the therapy.

[0324] VI. Experimental Protocol

[0325] A. Subtracted Libraries

[0326] Subtracted libraries are generated using a PCR based method that allows the isolation of clones expressed at higher levels in one population of mRNA (tester) compared to another population (driver). Both tester and driver mRNA populations are converted into cDNA by reverse transcription, and then PCR amplified using the SMART PCR kit from Clontech. Tester and driver cDNAs are then hybridized using the PCR-Select cDNA subtraction kit from Clontech. This technique results in both subtraction and normalization, which is an equalization of copy number of low-abundance and high-abundance sequences. After generation of the subtractive libraries, a group of 96 or more clones from each library is tested to confirm differential expression by reverse Southern hybridization.

[0327] To create the subtracted libraries, a first group of regular cDNA libraries was constructed. Library johOa was constructed from a pool of 5 normal ovarian epithelial cell cultures. Library johOb was constructed from a pool of 5 ascites short cultured samples from ovarian cancer patients. Library johOc was constructed from a pool of 6 serous late stage (III/IV) tumor samples. Three subtracted libraries were generated from tumor samples. Library johOd vas a subtracted ascites library, where the tester was johOb, and the driver was johOa. The johOe and the johOf library were both subtracted stage III/IV serous tumor libraries. The tester for both of these libraries was johOc, and the driver was a pooled RNA from normal tissues. The tissues used for this driver pool were: kidney, small intestine, prostate, lung, heart, muscle, spleen, pancreas, liver, and lymphocyte. Library cMhOg was the same as the johOc and johOf libraries, with the exception that normal ovary was added to the driver. cMhOh, i, j, and k are all stage I/II subtracted libraries made from pooled tumor RNAs of different histological types (h=serous, I-endometriod, j=clear cell, k=mucinous). The driver was the same for these 4 libraries. It consisted of normal ovarian epithelial RNA and PBML RNA. Of the markers listed in Table 1, SEQ ID NOS: 1-129, 916-1029, 1566-1571 and 1607-1865 were identified in library johOa. Markers identified in johOb include SEQ ID NOS: 130-177, 1030-1081, 1572-1574, and 1866-1974. Markers identified in johOc include SEQ ID NOS: 178-269, 1082-1120, 1575-1577, and 1975-2060. Markers identified in johOd include SEQ ID NOS: 270-370, 1121-1304, 1578-1592, and 2061-2244. Markers identified in johOe include SEQ ID NOS: 371-611, 1305-1416, 15931596 and 2245-2487. Markers identified in johOf include SEQ ID NOS: 612-915, 1417-1565, 1597-1606, and 2488-2871. Of the markers listed in Table 1A, SEQ ID NOS: 2872-2976, 3817-3898, 4438-4443 and 4474-4675 were identified in library cMhOg. Markers identified in cMhOh include SEQ ID NOS: 2977-3376, 3899-4072, 4444-4455, and 4676-5303. Markers identified in cMhOi include SEQ ID NOS: 3377-3495, 4073-4158, 4456-4460, and 5304-5637. Markers identified in cMhOj include SEQ ID NOS: 3496-3742, 4195-4390, 4461-4468, and 5638-6197. Markers identified in cMhOk include SEQ ID NOS: 3743-3816, 4391-4437, 4469-4473 and 6198-6398.

[0328] VII. Summary of the Data Provided in the Tables

[0329] Tables 1, 1A, 2 and 3 are being filed concurrently herewith on a compact disc in lieu of paper copies. The compact disc submitted is formatted from an IBM-PC and is compatible with MS-Windows. The disc contains the following four (4) files: Table1.text, containing 1,223 kb, Table1A.text, containing 1,582 kb, Table2.text, containing 10,600 kb, and Table3.text, containing 568 kb. The material on the compact disc, namely Tables 1, 1A, 2 and 3, is expressly incorporated by reference. Tables 1 and 1A show 6398 novel nucleotide sequences. These 6398 novel sequences were determined to be novel through various BLAST searches of available databases. Of these novel markers, SEQ ID NOS: 1566-1606 and 4438-4473 are preferred, SEQ ID NOS: 916-1565 and 3817-4437 are more preferred, and SEQ ID NOS: 1-915 and 2872-3816 are most preferred.

[0330] The sequences of Tables 1 and 1A were re-interpreted and vector sequences removed and those sequences are set forth in Table 2.

[0331] Table 3 correlates the SEQ ID NOS. from Tables 1 and 1A with those of Table 2.

[0332] The contents of all references, patents, published patent applications, and databases cited throughout this application are hereby incorporated by reference.

[0333] Other Embodiments

[0334] Those skilled in the art will recognize, or be able to ascertain using no more than routine experimentation, many equivalents to the specific embodiments of the invention described herein. Such equivalents are intended to be encompassed by the following claims.

What is claimed is:

1. An isolated nucleic acid molecule comprising a nucleotide sequence of Tables 1-2, or a complement thereof.

2. A vector which contains the nucleic acid molecule of claim 1.

3. A host cell which contains the nucleic acid molecule of claim 1.

4. An isolated polypeptide which is encoded by a nucleic acid molecule comprising a nucleotide sequence of Tables 1-2.

5. An antibody which selectively binds to a polypeptide of claim 4.

6. A method for producing a polypeptide comprising culturing the host cell of claim 3 under conditions in which the nucleic acid molecule is expressed.

7. A method for detecting the presence of a polypeptide of claim 4 in a sample comprising:
a) contacting the sample with a compound which selectively binds to the polypeptide; and
b) determining whether the compound binds to the polypeptide in the sample to thereby detect the presence of a polypeptide of claim 4 in the sample.

8. A kit comprising a compound which selectively binds to the polypeptide of claim 4.

9. A method for detecting the presence of a nucleic acid molecule of claim 1 in a sample comprising:
a) contacting the sample with a nucleic acid probe or primer which selectively hybridizes to the nucleic acid molecule; and
b) determining whether the nucleic acid probe or primer binds to a nucleic acid molecule in the sample to thereby detect the presence of a nucleic acid molecule of claim 1 in the sample.

10. The method of claim 9, wherein the sample comprises mRNA molecules and is contacted with a nucleic acid probe.

11. The method of claim 9, wherein the sample is isolated from ovarian tissue.

12. The method of claim 9, wherein the sample is a tumor sample.

13. A kit comprising a compound which selectively hybridizes to a nucleic acid molecule of claim 1.

14. A method of assessing whether a patient is afflicted with ovarian cancer, the method comprising comparing:
a) the level of expression of a marker in a patient sample, wherein the marker is selected from the group consisting of the markers listed in Tables 1-2, and
b) the normal level of expression of the marker in a control non-ovarian cancer sample,
wherein a significant difference between the level of expression of the marker in the patient sample and the normal level is an indication that the patient is afflicted with ovarian cancer.

15. The method of claim 14, wherein the marker corresponds to a secreted protein.

16. The method of claim 14, wherein the marker corresponds to a transcribed polynucleotide or portion thereof, wherein the polynucleotide comprises the marker.

17. The method of claim 14, wherein the sample comprises cells obtained from the patient.

18. The method of claim 17, wherein the sample is an ovarian tissue sample.

19. The method of claim 14, wherein the sample is an ovary-associated body fluid.

20. The method of claim 14, wherein the level of expression of the marker in the sample is assessed by detecting the presence in the sample of a protein or protein fragment corresponding to the marker.

21. The method of claim 20, wherein the presence of the protein or protein fragment is detected using a reagent which specifically binds with the protein or protein fragment.

22. The method of claim 21, wherein the reagent is selected from the group consisting of an antibody, an antibody derivative, and an antibody fragment.

23. The method of claim 14, wherein the level of expression of the marker in the sample is assessed by detecting the presence in the sample of a transcribed polynucleotide or portion thereof, wherein the transcribed polynucleotide comprises the marker.

24. The method of claim 23, wherein the transcribed polynucleotide is an mRNA.

25. The method of claim 23, wherein the transcribed polynucleotide is a cDNA.

26. The method of claim 23, wherein the step of detecting further comprises amplifying the transcribed polynucleotide.

27. The method of claim 14, wherein the level of expression of the marker in the sample is assessed by detecting the presence in the sample of a transcribed polynucleotide which anneals with the marker or anneals with a portion of a polynucleotide wherein the polynucleotide comprises the marker, under stringent hybridization conditions.

28. The method of claim 14, wherein the level of expression of the marker in the sample differs from the normal level of expression of the marker in a patient not afflicted with ovarian cancer by a factor of at least about 2.

29. The method of claim 14, wherein the level of expression of the marker in the sample differs from the normal level of expression of the marker in a patient not afflicted with ovarian cancer by a factor of at least about 5.

30. The method of claim 14, comprising comparing:
a) the level of expression in the sample of each of a plurality of markers independently selected from the markers listed in Tables 1-2, and
b) the normal level of expression of each of the plurality of markers in samples of the same type obtained from control humans not afflicted with ovarian cancer,
wherein the level of expression of more than one of the markers is significantly altered, relative to the corresponding normal levels of expression of the markers, is an indication that the patient is afflicted with ovarian cancer.

31. The method of claim 30, wherein the level of expression of each of the markers is significantly altered, relative to the corresponding normal levels of expression of the markers, is an indication that the patient is afflicted with ovarian cancer.

32. The method of claim 30, wherein the plurality comprises at least three of the markers.

33. The method of claim 30, wherein the plurality comprises at least five of the markers.

34. A method for monitoring the progression of ovarian cancer in a patient, the method comprising:
a) detecting in a patient sample at a first point in time, the expression of a marker, wherein the marker is selected from the group consisting of the markers listed in Tables 1-2;
b) repeating step a) at a subsequent point in time; and
c) comparing the level of expression detected in steps a) and b), and therefrom monitoring the progression of ovarian cancer.

35. The method of claim 34, wherein the marker corresponds to a secreted protein.

36. The method of claim 34, wherein the marker corresponds to a transcribed polynucleotide or portion thereof, wherein the polynucleotide comprises the marker.

37. The method of claim 34, wherein the sample comprises cells obtained from the patient.

38. The method of claim 37, wherein the patient sample is an ovarian tissue sample.

39. The method of claim 34, wherein between the first point in time and the subsequent point in time, the patient has undergone surgery to remove ovarian tissue.

40. A method of assessing the efficacy of a test compound for inhibiting ovarian cancer in a patient, the method comprising comparing:
a) expression of a marker in a first sample obtained from the patient and exposed to the test compound, wherein the marker is selected from the group consisting of the markers listed in Tables 1-2, and
b) expression of the marker in a second sample obtained from the patient, wherein the sample is not exposed to the test compound,
wherein a significantly lower level of expression of the marker in the first sample, relative to the second sample, is an indication that the test compound is efficacious for inhibiting ovarian cancer in the patient.

41. The method of claim 40, wherein the first and second samples are portions of a single sample obtained from the patient.

42. The method of claim 40, wherein the first and second samples are portions of pooled samples obtained from the patient.

43. A method of assessing the efficacy of a therapy for inhibiting ovarian cancer in a patient, the method comprising comparing:
a) expression of a marker in the first sample obtained from the patient prior to providing at least a portion of the therapy to the patient, wherein the marker is selected from the group consisting of the markers listed in Tables 1-2, and
b) expression of the marker in a second sample obtained from the patient following provision of the portion of the therapy,
wherein a significantly lower level of expression of the marker in the second sample, relative to the first sample, is an indication that the therapy is efficacious for inhibiting ovarian cancer in the patient.

44. A method of selecting a composition for inhibiting ovarian cancer in a patient, the method comprising:
a) obtaining a sample comprising cancer cells from the patient;
b) separately exposing aliquots of the sample in the presence of a plurality of test compositions;
c) comparing expression of a marker in each of the aliquots, wherein the marker is selected from the group consisting of the markers listed in Tables 1-2; and
d) selecting one of the test compositions which alters the level of expression of the marker in the aliquot containing that test composition, relative to other test compositions.

45. A method of inhibiting ovarian cancer in a patient, the method comprising:
a) obtaining a sample comprising cancer cells from the patient;
b) separately maintaining aliquots of the sample in the presence of a plurality of test compositions;
c) comparing expression of a marker in each of the aliquots, wherein the marker is selected from the group consisting of the markers listed in Tables 1-2; and
d) administering to the patient at least one of the test compositions which alters the level of expression of the marker in the aliquot containing that test composition, relative to other test compositions.

46. A kit for assessing whether a patient is afflicted with ovarian cancer, the kit comprising reagents for assessing expression of a marker selected from the group consisting of the markers listed in Tables 1-2.

47. A kit for assessing the presence of ovarian cancer cells, the kit comprising a nucleic acid probe wherein the probe specifically binds with a transcribed polynucleotide corresponding to a marker selected from the group consisting of the markers listed in Tables 1-2.

48. A kit for assessing the suitability of each of a plurality of compounds for inhibiting ovarian cancer in a patient, the kit comprising:
a) the plurality of compounds; and
b) a reagent for assessing expression of a marker selected from the 5 group consisting of the markers listed in Tables 1-2.

49. A method of making an isolated hybridoma which produces an antibody useful for assessing whether a patient is afflicted with ovarian cancer, the method comprising:
isolating a protein or protein fragment corresponding to a marker selected from the group consisting of the markers listed in Tables 1-2;
immunizing a mammal using the isolated protein or protein fragment;
isolating splenocytes from the immunized mammal;
fusing the isolated splenocytes with an immortalized cell line to form hybridomas; and
screening individual hybridomas for production of an antibody which specifically binds with the protein or protein fragment to isolate the hybridoma.

50. An antibody produced by a hybridoma made by the method of claim 42.

51. A kit for assessing the presence of human ovarian cancer cells, the kit comprising an antibody, wherein the antibody specifically binds with a protein or protein fragment corresponding to a marker selected from the group consisting of the markers listed in Tables 1-2.

52. A method of assessing the ovarian cell carcinogenic potential of a test compound, the method comprising:
a) maintaining separate aliquots of ovarian cells in the presence and absence of the test compound; and
b) comparing expression of a marker in each of the aliquots, wherein the marker is selected from the group consisting of the markers listed in Tables 1-2,
wherein a significantly altered level of expression of the marker in the aliquot maintained in the presence of the test compound, relative to the aliquot maintained in the absence of the test compound, is an indication that the test compound possesses human ovarian cell carcinogenic potential.

53. A kit for assessing the ovarian cell carcinogenic potential of a test compound, the kit comprising ovarian cells and a reagent for assessing expression of a marker, wherein the marker is selected from the group consisting of the markers listed in Tables 1-2.

54. A method of inhibiting ovarian cancer in a patient at risk for developing ovarian cancer, the method comprising inhibiting expression of a gene corresponding to a marker selected from the markers listed in Tables 1-2.

55. A method of treating a patient afflicted with ovarian cancer, the method comprising providing to cells of the patient an antisense oligonucleotide complementary to a polynucleotide corresponding to a marker selected from the markers listed in Tables 1-2.

56. A method of inhibiting ovarian cancer in a patient at risk for developing ovarian cancer, the method comprising decreasing expression of a gene corresponding to a marker selected from the markers listed in Tables 1-2.

57. A method for determining whether ovarian cancer has metastasized in a patient, the method comprising comparing:
a) the level of expression of a marker in a patient smaple, wherein the marker is selected from the group consisting of the markers listed in Tables 1-2, and
b) the normal level or non-metastatic level of expression of the marker in a control sample wherein a significant difference betweent he level of expression in the patient sample and the normal level or non-metastatic level is an indication that the ovarian cancer has mestastasized.

58. The method of claim 57, wherein the marker corresponds to a secreted protein.

59. The method of claim 57, wherein the marker corresponds to a transcribed polynucleotide or portion thereof, wherein the polynucleotide comprises the marker.

60. The method of claim 57, wherein the sample comprises cells obtained from the patient.

61. The method of claim 60, wherein the patient sample is an ovarian tissue sample.

62. A method for assessing the aggressiveness or indolence of ovarian cancer comprising comparing:
a) the level of expression of a marker in a sample, wherein at least one marker is selected from the markers of Tables 1-2, and
b) the normal level of expression of the marker in a control sample, wherein a significant difference between the level of expression in the sample and the normal level is an indication that the cancer is aggressive or indolent.

63. The method of claim 62, wherein the marker corresponds to a secreted protein.

64. The method of claim 62, wherein marker corresponds to a transcribed polynucleotide or portion thereof, wherein the polynucleotide comprises the marker.

65. The method of claim 62, wherein the sample comprises cells obtained from the patient.

66. The method of claim 65, wherein the patient sample is an ovarian tissue sample.

The application's sequence listing, which the Patent Office published only in electronic form, follows.

SEQUENCE LISTING (22037 sequences)

SEQ ID NO: 1 - DNA, 546 bp, Homo sapiens
  misc_feature 502, 531, 535: n = A,T,C or G
acgcgtccgggagacacaaagcaggaagcctccgggagaccagagctgggtgcagacatacacacacacatacacacagacacacagagtcacacacactcacacacactctctctctctctccctctgtctttctctctctctctctctctctgtcctttcctcctggacagatccacagttatacacagaaacaaacacacacgcacgtagagaagtgattcacaaacacttaaagacataaatcacaggtgcaaagccatacctgggctcaaaaacctccaagagaacgcagcctcagacccacccaggggccaggggccaggctgtttgcgagaccagcccaggcgggacccaggcttgcacgggcaggtacacgacattcttgggcatacgcagcccgcctggccggagctgtgggagtcctcagccccaagacccagcaggcgtctgaggcctgcccactaaggaggaggagtcattgctgccatcatttatcatnccctccccagccacagtctgaggagcccntgtncacccttccca

SEQ ID NO: 2 - DNA, 416 bp, Homo sapiens
  misc_feature 194, 201, 261, 361: n = A,T,C or G
cgtccggaaagctggtgggaatgctaagttccgagagttcctggagtctcaggaggattacgatccttgctggtccttgcaggagaagtacaacagcagagccgcggccctctttagggataaggtggtcgctctggccgaaggcagagagtggtctttggagtcatcacctgcccagaactggaccctacctnagcccangacgctgccgtccatggtgcaccgagtctctggccagccgcagagtgtgaccgcctcctnggacaaggcttttgaagactggctgaatgatgacctcggctcctatcaaggggcccaggggaatcgctacgtggggtttgggaacacgccaccgcctcanaagaaagaagatgactttctcaacaacgccatgtcctccctgtactcgggctgga

SEQ ID NO: 3 - DNA, 526 bp, Homo sapiens
  misc_feature 1: n = A,T,C or G
nccacgcgtccgggacgcgggcgccaggtgcacagccccagtccgctgcgggcgggcgtcgacatctgccgcgtgagcgcgagctggagctacaccgctttcgtgacccgtggaggccgcttggagctgtcgggctcagccagcggcgcggcgggccgctgcaaggacgcgtgggcctcggaggggctcctcgcggtgctgcgcgccgggccggggccggaggcgttactgcaggtctgggcggccgaatcggcgctgcgtggggagccattgtgggcccagaatggtggtgcccgaggccgaagggggaaggacgatccggccgggtgaaggcccaagcttggggaggctaccccttgcttgccctgcggccccgtgcccctacgtgagcccccgcgggccgcccttctaccggccttttggcttccgggagcttgcggggcaacgccaacttgggagctggggccgccagcaaccccgttgcttgttggacgctgtgcccaaaggtggtttctggggggcgggg

SEQ ID NO: 4 - DNA, 347 bp, Homo sapiens
  misc_feature 5, 25: n = A,T,C or G
agtcnccacgcgtccgggaattgangccgcggggcgggcggcggcggcggctgggcggcggccgggacccagcgggccaggtggggacggcgcggagcgggtgcgggagatgccgtgcgggactggggccacctgagccgcccgcctcgtccccgccttctgtgggaaggatgtgcgcgcggatggccggtcgcacaacagcggcccctcgggggccctacggcccctggctctgcctcctggtggccctcgccctgggaccgtcgtgagagtggactgtggccaggctcccctggaccctgtctacctgccggcagccctggagctcctagacgcccctgaacact

SEQ ID NO: 5 - DNA, 455 bp, Homo sapiens
  misc_feature 3, 448: n = A,T,C or G
tcnccacgcgtccgactgtatgtattctggatacaggggatactgggctcgctatgtgtgtggagccatcccttccttgccccagccccacctccctctcaaaccctctctggctctttctgagcttcctttcctgctccccagcttgcccagtgctcagtgccccacttggctcttttgctacttcgggtcaggtggagcctcttgggaatgtgaagtgccttacagaaagattgcacttcaagaggagaggctgcagggagccatcctaaacccagaggcctggagcttacccgtgtcactttacttttgtacacaagggggtctccttagtgccctcgagaagggattcttgggccctgagcttctactcctgaggccaccttctgtgcaagccccaagctccctcaactctaggcttggagtcctcagtggggaaaagccctgntttgggg

SEQ ID NO: 6 - DNA, 490 bp, Homo sapiens
  misc_feature 333, 419, 420, 464, 482: n = A,T,C or G
cgtccgcgtcctcgctgcggaaagttggggcaacctgttgctagtctggtcgttggtgacagcgaggcttccgcgctcgctgctggtgagcagccccggcgtgccccgcgggctggaagaggcggcggcgtgatgcggcccgtggacgcgccccgcgccggcccgcgagaacctggcctccctggagcgcgagcgcgcccgggcgcactggcgggcccgcaggaagctgctggagatccagagcctgctcgacgccatcaagagtgaggtggaggcagaggagcggggcgcccgggccccagcaccccgccccgcgtgcggaggctgaggagncgggtggctcggctgtgcgcccgaagcagagaggaaggctgcggaagcggcgcggatggggcaggcgggatcgtgggagctgcacnnaccggatcgccggcttgcgagtgctgctgagccggcgaggcccncgggtctggaagcggaancgcgcggg

SEQ ID NO: 7 - DNA, 504 bp, Homo sapiens
  misc_feature 1, 401, 487: n = A,T,C or G
nttcgggagtcgaccacgcgtccgcgcgctggaggagtggagcaagcacccggcccggccctgggggctgacagtcggcaaagtttggcccgaagaggaagtggtctcaaaccccggcaggtggcgaccaggccagaccaggggcgctcgctgcctgcgggcgggctgtaggcgagggcgcgccccagtgccgagacccggggcttcaggagccggccccgggagagaagagtgcggcggcggacggagaaaacaactccaaagttggcgaaaggcaccgcccctactcccgggcttgccgccgcctccccgcccccagccctggcatccagagtacgggtcgagcccgggccatggagcccccctggggaaggcggcaccaggggagccttgggcgcccngggcttcggccgcgaccccatttggggtagaccacaagaaagcttcgggaccctttcggcacctttggacagccaagaatggctgntgggcaccctttcttct

SEQ ID NO: 8 - DNA, 458 bp, Homo sapiens
ccccgcgtccggagcacgcaaagggaataaattgtaattaggtggtgggtggctaaaaatgacaatgcaaaggtgttggattaaaaaaaaaatctggtagtagagggaaattatggaggatttttaaaaaggttaatgataatatccatctacttatgtaactttttttggagatacctgataatagtgtagagtgcattggagaggaaaagtaggagttgtaaagaccattttggataaactttgaagcaagggataatggcctcaaccaaggtagtggtgctgaagattgtttacataaataagcagatacaaatagaagggatttttcaagtggcattgtaactgcacttttcaaaggttatttgccaaaaatcaaattaacggtatcttcaaaaatcatgtttgatggatgtatcatcaagggctttcttaaaattttgttgaaagccaaggaa

SEQ ID NO: 9 - DNA, 801 bp, Homo sapiens
  misc_feature 30, 47, 52, 60, 62, 79, 102, 104, 108, 110, 118, 144, 149,151, 155, 158, 256, 268, 280, 294, 302, 306, 316, 320, 321,334, 335, 341, 356, 366, 374, 387, 408, 410, 417, 420, 435,436, 440, 451, 452, 485, 497, 503, 505, 507, 560, 574: n = A,T,C or G
  misc_feature 583, 599, 600, 601, 627, 639, 644, 654, 663, 668, 669, 678,685, 697, 698, 704, 715, 718, 732, 770, 771, 772, 774: n = A,T,C or G
cgccttcccgggaagtttggagggccccgnaggggaagcccccgcgncttcngggggccngncgggcttggaaggcaanccccaccccaagtttccccgccnanggantncaatgaancttgaccggggccccccggaaccccncgctngncttnttngggggtggttccttgggttccggtgggggggaaccccaagtgctttttcaaggccccggccgggcccggggccccggaaagggcctttcaagttcttncctttccccggnttgaaagaaggnaaaaggccgggaanggaaaccngggnaaaacccgcngggnnggggcggccttcnnccgccngggcgccccttgccngggggggggnaaaggggncaaagttttcccnggggcccccggggccccggcngnccctttnaantcaagggggccgggnncggnctttccccaanncggccaagttccttcaaaggggcccccccgggntttgggcccggnccgggncngnaaccttggggaaggaaaaaattcaaaaagttttgttggcccggtttccgggtnggaattgccccccnaaaatttgnaagccggggggggggnnnccttgggggccccttctttgcccccntttaaagggaangggcnaaaacctttncccaaccgnccaanngcccccgtnaaaaaangggccggccttnnttttgnccggggccccnaanaagggccttttcgnttttttcgggttttttcccccgggccgggcggggcggnnncntttttttttttggcttttaaagggggg

SEQ ID NO: 10 - DNA, 415 bp, Homo sapiens
  misc_feature 1, 122, 312, 369: n = A,T,C or G
ncgcgtccgccgcattgtggccaagtgccatgaggagcagctggatcattctgtccagtcatatattaagttcgtgttcaagaccagggcatgcaaggagaggactgtacatgaggaactgnctaaaaatgtgactggtcttttgaaatcaaatgactcaacaacagtaaagcatgtcctaaagcattcctggttcttctttgcaattatcctaaaatcgatggcacagcacttgattgacacaaataaaatccagcttccccggcctcagagatttcctgaatcttaccaaaatgaattggacaatcttgncatggtcctatccgaccatgtgatttgggaaatacaaggatgcacttgaagaaacangaagggcaaaccacagcgttgccagatttctcaagcgctgctttac

SEQ ID NO: 11 - DNA, 570 bp, Homo sapiens
  misc_feature 5, 368, 383, 423, 445, 485, 500, 538, 542, 549, 558: n = A,T,C or G
cgccncgcgtccggcttcctagaagagcacagtcccttaaagcaccctctattgctacaattaaaagtctagcagattgtaactttagttacacaagttctagagatgcttttggctatgctacactgaaaagactacagcaacaaagaatgcatccatccttatctcactctgaagctttggcatctccagcaaaagatgtgctatttactgataccatcaccatgaaggccaacagttttgagtccagattaacaccaagcaggttcatgaaagccttaagttatgcatcattagataaagaagatttattgagtcctattaatcaaaataccctgcaaccgatcttcctcagtgcgggccatggngtccagtgccacatngggggggtcagaatgattacattgggcttgctctcccggnggatataaatgatatatttcanggtaagggtatttcttatttttagacaaaaaacatccccncatgatgatccaggngccagagcatttgccctgaatgcaggagggctttcatntggnactgggngggctttgnaaaaaatttttt

SEQ ID NO: 12 - DNA, 447 bp, Homo sapiens
ttcgggagtcgaccacgcgtccgccaagtcctgcgatgatggactcaacaccttccgcgacgagggccgggttctgcggcgcctgccaaaccgcatacccagcctgcggatgctccggagcttcttcaccgacgggtccttggatagctggggcacctctgaagatgctgacgctccttctaagcgacactcaacctctgacctctcagatgcgaccttcagcgatatcaggagagaaggctggttgtattataagcagattctcaccaagaaggggaaggctgaggaccgggatgacatgctgggctggatcagagcgatccgggagaacagcagggccgagggcgaggacccccggctgtgccaaccaagctcttgatcagcaagaagcttaatgattatcgcaaagtgagccatagctctgggcccaaagcttgatttcttccc

SEQ ID NO: 13 - DNA, 485 bp, Homo sapiens
  misc_feature 144, 290, 374, 377, 379, 394, 434: n = A,T,C or G
gtattaatgttctcaggcatgaagcagaattttacgggatcactccattagtaagaaggcttctcttatgtgaagaattggagcgttcctcttgtggcagtgtcctttttcatggttacttgcccccaccaggtattcctagtncgtaaaataaacaacacagtcagatctgctgattctaggaatggtctaaattctacagaaggtgaagcccggggaaatggtacacagcctgttctctctggaacgggagaagaaactgttaggctaggatttcctgtggatccacnaaaggtgctaatagtagctggccatcacaactggattgtagctgcatatgcccattttgctgtgtgttacagaatcaaagaatnttnangatggcagcaagtgnttacgagcccatatttggattggactatcgaacgagtagntttaaatgcaaaggtggatggagggccacatggagacaaaagacaaaaatg

SEQ ID NO: 14 - DNA, 527 bp, Homo sapiens
  misc_feature 4: n = A,T,C or G
gccncgcgtccgaaaaaattaagagaaggcctggcggccggtctgaagtcatctataattatgtacaacgccccttcatccagatgtcatgggaaaaggaagaagggaagagtcgccatgtggatttctagtgtgttcgaagcaaatccctcacgaatctggtagctgctggagatgatgtcttggaggaccaggagatattaatgcatcacccaccccaagtggatgaacttgaccggctaaatgccccactttctcagatggcttctaacgactttcaggattagggccagctgtgggtctactccttgttggagcccatctcacctgggatgcctgcagccagccctccctcgtgatttgtctcaccttgagtaggagacatgcttctcccctaaccttttcctttctgccataattaacatatgtccttttcagtaagtccatgcctctggcaggggatgaaagaagtactcactgggtaattagctaccatctttgcagcaccctggtaacttgaaaaattt

SEQ ID NO: 15 - DNA, 504 bp, Homo sapiens
  misc_feature 116, 129, 217, 257, 275, 372, 404, 439, 447: n = A,T,C or G
tcgggagtcgaccccgcgtccgccgagcggggcggcgcggctggcggggccggcggccggctgaagcgagagcgcgacgcgacgcgaccgcggcttcccgagctgcgcctggccgnccagcgccgcggnccgcccgaggcctggaggggtccgggccgccgtccatggtcgcggcgtcctgaggcgggggacgcgcccggcgcccccggccctcctncgcctcctcccgcggggcgggcggcctcctccggcgcctncccgcgcccgcccgccgntcgccgccgcctccctccctccttccctgcggctcccccggctttcggagcccgggggcggcctgtggcgcgcggagcccgcgccggactgcgcctntttggaccttgaggggaaacatgcgtttgccntggatcgtttgaaattctgagtttgggatccccgnccggccgnctggctttttcgcccgcgggttttttccttttttccttttgcttttttttccttctt

SEQ ID NO: 16 - DNA, 513 bp, Homo sapiens
  misc_feature 1, 31, 41, 47, 51, 332, 407, 475: n = A,T,C or G
ngcccccgcgtccgttttaattattttgttngagcctgcanagtaangttnttaaaaatataacgttcatacgcattttaattaactttgaaagttcatatgcatcagaaaatttatgaaaatttgaatgaaaaaaatttcatctatttatttttctaattttaatggcaaatttacactattatggctgataattctgtgaacttaccttcttgttgactgattctttttcccttaatcccagctttaaggagataggtgaagttattgtacaaagttaagtgataccataaagtatatattataaagtcatacatggcttttggacagtnttatatttcagttgcagtgctgcattccattaaatttcataaaatgctagggaaaatgtgtttgataaaattttntgcagtgagaaatgacagactgagtgcctgacaatttaagccacatatgaaagtatgcaagtaaaganttcaggtccttaatgtcatctatatcatggtataaaag

SEQ ID NO: 17 - DNA, 319 bp, Homo sapiens
  misc_feature 149, 216, 271, 276, 307: n = A,T,C or G
ccacgcgtccggacgagacgagcccactagtgtcccccgagcgggcccaacccccggactacaccttcccgtcgggctcgggcgctcactttccgcaggtgcccgggggcgcggtccgagtggctggcggcggccggctcgggcccctntccgccgggctcgccgggccacgaccgctgagcggcagccactgttggatcgggcccggggcgcggnggcccagggccagacccaaaccgtggcggcgcaggcccaggctctggccgttcangccgnggcggcagtccacgccgatcaggcccaccgngagcggaacgag

SEQ ID NO: 18 - DNA, 505 bp, Homo sapiens
  misc_feature 12: n = A,T,C or G
gggagtcgaccncgcgtccgggcggtgggtgtccgcttctctctgctcttcgactgcaccgcactcgcgcgtgaccctgactccccctagtcagctcagcggtgctgccatggcgtggcggcggcgcgaagccggcgtcggggctcgcggcgtgttggctctggcgttgctcgccctggccctgtgcgtgcccggggcccggggccgggctctcgagtggttctcggccgtggtaaacatcgagtacgtggacccgcagaccaacctgacggtgtggagcgtctcggagagtggccgcttcggcgacagctcgcccaaggagggcgcgcatggcttggtggggcgtcccgtgggcgcccggcggagacctcgagggctgcgcgcccgacacgcgcttttttcgtgcccgagccccgcggccgaggggcccgcgcccttgggtcgccctggtggctcgtgggggcttgcacctttaaggacaaggtgcttgtggcgggcgccgagg

SEQ ID NO: 19 - DNA, 420 bp, Homo sapiens
  misc_feature 1, 6, 8, 9, 11, 21, 24, 28, 41, 54, 88, 99, 122, 164, 168,171, 179, 185, 217, 222, 223, 251, 255, 264, 274, 290, 301,314, 336, 340, 355, 359, 364, 388, 399: n = A,T,C or G
natgtngnncnaaaaaggccngcnttanaggccaggaaacncgtaaaaagggcncgcgttgctgtgcgtcttttccataggctcgcgnccccctgaccnagtcatcatcaaaaaatccgacngctcaagtcatgaggttggccgaaaactccgacagggacttntaanagnatacccangggcgntttccccctgggaaggctcccttcgtggcgcntctcnntgtttccagacccctgccccgctttacncggnattaccctngtccccgccnttttcttccctttcgnggaaagcggtngggcgccttctcntcaattaggcttcaccgcctgntaanggtattctcaagttncggntgtangggtgccgttttcgcttccaaagnctggggccttntgtgccaccggaaaccccccc

SEQ ID NO: 20 - DNA, 514 bp, Homo sapiens
  misc_feature 15: n = A,T,C or G
ttcgggagtcgaccncgcgtccgcctggagccgccagagtttccgcacccgggagggagatgcggccggggctcaggctccttgcagttgtaatttagattcgagaagtggtttatcctttgactggaaaagaaaagtagctgcagtattcccccagcacttgctgagagcatgccgtatgccaggctgtgaggctcgagagacaagcagtggaagagttgcggcctgtttcatctctggattgtaaatctgagcctccttctggcccctggaaggggacagcatcacgatggaatgattcctaaccagcataatgctggagccgggagccaccaacctgcagttttcagaatggccgtgttggacactgatttggatcacattcttccatcttctgttcttcctccattctgggctaagttagtagtgggatcggttgccattgtgtgttttgcacgcagctatgatggagactttgtctttgatgactcagaagctattgttaacaataagg

SEQ ID NO: 21 - DNA, 458 bp, Homo sapiens
cgaccacgcgtccggcagccgcggggcgggcggcggcggcggcggcggcggccgggacccagcgggccaggtggggacggcgcggagcgggtgcgggagatgccgtgcgggactggggccacctgagccgcccgcctcgtccccgccttctgtgggaaggatgtgcgcgcggatggccggtcgcacaacagcggcccctcgggggccctacggcccctggctctgcctcctggtggccctcgccctggacgtcgtgagagtggactgtggccaggctcccctggaccctgtctacctgccggcagccctggagctcctagacgcccctgaacacttccgtgtgcagcaggtgggccactacccacctgccaactcctctctgagctcccgatctgagacctttctgctcctacagccctggcccaaggcccagccacttcttcgggccttctacccaa

SEQ ID NO: 22 - DNA, 502 bp, Homo sapiens
cgcgtccgcccggtgcctccgcccatggaacgcgcggagtggcgccgccgcggctacgcgccgctgctctatctgcagtcacactgcgacgtgccagcggaccgggaccgctacgtgcgcgagctcatgcgccacatcccggtagactcctacgggaaatgcctgcagaatcgggagctgcctaccgcgcggctacaggacacagccacggccaccaccgaggatccagagctcttggctttcttgtcccgctataagttccacttggccctggaaaatgccatctgtaacgactacatgacagaaaaactgtggcgtcccatgcacctgggccgctgtgcccgtgtaccgcggttctccctctgtgagggactggatgccgaacaatcactccgtcatcctgattgatgattttgagtctcctcagaagctggcagagtttattgactttctggacaagaatgatgaggagtatatgaaatacctggcatacaagcaacct

SEQ ID NO: 23 - DNA, 502 bp, Homo sapiens
  misc_feature 20: n = A,T,C or G
cgcgtccggctgggcgaatnagggattccggttcacaatggatgctgataaagagaaagatttgcagaaatttcttaaaaatgtggatgaaatctccaatttaattcaggagatgaattctgatgacccagttgtgcaacagaaagctgtcctggagacagaaaagagactactgcttatggaggaagaccaggaggaggatgaatgcaggaccaccttgaacaagactatgatcagtcctccacaaactgctctgaagagtgcagaagaaataaactcagaggccttcttggcatctgtggagaaggatgcaaaggaacgagccaagagaagaagggaaaacaaagtcttggcggatgccctaaaagaaaaagggaatgaagcatttgctgaaggcaattatgaaacagctatcctgcgctacagtgaggggtttggagaagctgaaggacatgaaagtgctgtacaccaaccgagcccaggcttatatgaaacttgagga

SEQ ID NO: 24 - DNA, 489 bp, Homo sapiens
  misc_feature 12: n = A,T,C or G
gggagtcgaccncgcgtccgctccctctgagttgcgctgggcttggctgctgcaccatgaccctggaggcgatccgctactcgcggggctccctgcagatcctagaccagctgctgctgcccaagcagagccgctacgaggcggtgggctcggtgcaccaggcctgggaggccatccgcgccatgaaggtgcggggcgccccggccatagccctggtgggctgtctcagcctcgccgtggagctgcaggcgggcgccgggggaccgggactcgccgcgctcgtggccttcgtgcgcgacaagctgagcttcctcgtcaccgcccggcccaccgctgtcaacatggcccgcgccgcccgcgacctggcttgatgttgcagcccgggaggccgaacgggaggggcgctacggaagaggccggtccgggagagagtgatctgctgcaccgaggacatgctggagaaagacctcagagacaaccgaagcattg

SEQ ID NO: 25 - DNA, 435 bp, Homo sapiens
  misc_feature 11: n = A,T,C or G
ggagtcgaccncgcgtccgggataacgaagctgctaccatgatgatggctgatctcatgttcagaaaacaagactatgaacaagcagtgtttcatttacagcagcttttagaacgtaagccagactcctcgagttcagggatcacaccatattcccaatatcagacaaaatgccacacacatggatgtggcaacatagatgtttattggttgaatggatcagtgaatgactgtaaaacaccaagtcaattaaaaacacagcaggagaatcgcttgaacctgggaggtggaggttgccgtgagccaagatcacaccactgcactccagcctcggtgacagagtgagacttggtctcaaaaacaaccacaaaattttaaataattatatgacattatctcgtttgattgatctcctaagaagatgtggaaaactcga

SEQ ID NO: 26 - DNA, 392 bp, Homo sapiens
accgtccggggccatccaggagagcctcctaccagcacagaaggcctgtgccccagcgccctgagcgagacaagccgttttgataatgacttgcagctagccatggagctctctgccaaagagctggaggaatgggagctccggctccaggaggaagaggctgagctccagcaagtcttacagctgtcactcactgacaaatagacctttcagcctgtgagcctctgcacaaagcagaggctgtgggctgtcacagatgctgtgtcaaccagggccctagggctaagggcctgcaccttgcgtgcatgcagcaggcaacaactgccccttctttatgcagaggtgcagaaccagggactcctgggcccatccaggctgcttccttggggtgg

SEQ ID NO: 27 - DNA, 341 bp, Homo sapiens
  misc_feature 1, 4, 292: n = A,T,C or G
nccncgcgtccggccggcgatgccgcgcccccgggccgggctgtagcggggccgcggctggacgtgtgcgccgggcaggcgggacatggaggtggtggacgagacggaggcgctgcagcgcttcttcgaaggccacgacatcaacggtgccctggagccctccaacatagacaccagcatcctggaggagtacatcagcaaggaggatgcctccgacctcacactgccggactctcccccagactcgggctccgaggcctactccccccagcaggtgaatgagccccacctnctgcgcacgataacccctgagacactgtgccacgtggggagtgcccttc

SEQ ID NO: 28 - DNA, 264 bp, Homo sapiens
  misc_feature 10, 122, 128, 242: n = A,T,C or G
cgcgtccgcnagggagggccgagcgaggcgcaggcaaccgggcagcaggcatgatgccctcgcctagtgactccagccgctcgctgaccagccggcccagcaccaggggccttacccacctncgcctncaccgaccctggctgcaggccctgcttacgctggggctggtccaagtgctcctgggcatactggtggtcaccttcagcatggtggcctcttccgtcaccaccaccgagagcatnaagaggtcctgcccgtcttggg

SEQ ID NO: 29 - DNA, 395 bp, Homo sapiens
  misc_feature 18, 369: n = A,T,C or G
acgcgtccgattttagtngcaaggagtccatgtgttcaactccagcatttcctgtgtctccagagacaccgtatgtgaaaacagcgctgcgccatcctccgttcagcccacctgagcccccgctgagcagcccagccagtcagcacaaaggaggacgtgaaccacgaagctgccctgagacgctcactcacgctgtggggatgtcagagagccccatcggacccaaatccacgatgctccgggctgatgcgtcctcgacgccctcctttcagcaggcttttgcttcttcctgcaccatttccagcaacggccctgggcagaggagagagagctccttcttctgcagaacgccagtgggtggagagcagncccaagcccatgggtttccctgctgg

SEQ ID NO: 30 - DNA, 479 bp, Homo sapiens
  misc_feature 7, 13, 14, 18: n = A,T,C or G
ccggttncttgtnngttnattgatttaaaatagaatatcaattgaatttagaaaattctcaaaagccagtttaatgctgttcatcttttaaggccaaaaaaagtttaatccagaggcagtctttcattctgcactaatttataatttagatcaaagaactaattatatatctcaaatttaataataaaaaggtatagtaatgagaattaaatttatggtaaattatataactcagaatgttaaagtaacttggaaattcttaatctaagttaagtatctttttatttcttacttgtcctgtttgatttattaagggaaaagaaaattttaaggagttgccagtatttctttgtctattgaaagtggaatgtttattcacccttatttatatacttaaaagacattgtattggcctggtctcgaactcctgacctcaaaggtggatccacccacctcggcttcccaaagtgctgggatta

SEQ ID NO: 31 - DNA, 508 bp, Homo sapiens
gccggtgattttgaacaattctgaaatatttcaggtaagattaataacatccaattacaaatatatgtttcaatattttatacgtatgtctactttgaaagttaaaccaatagtatagaaagcctaagaatgaacactgattggacatactcacagaaattaagggaaaaacacatattgtaaaattcctgtcaatgtttgagtagaatacagaagtacatagcagtcttcaatttttaaacacaattatgggcttataactggacgtgacatgcatcatttattagaacaatattatttatttatactaagtaaggatataagatcacagaagcttagtgttataacggagacttcacagacattcataactaatgttttctaaggcaaataaggggcataaaccagaactcatgggtcagtgccagaggtaagtataaaaaggttatgtatgaaagacatttatttataggagaatttctgagggattctatgccttttcaactta

SEQ ID NO: 32 - DNA, 491 bp, Homo sapiens
  misc_feature 1, 20, 324, 407, 450, 454: n = A,T,C or G
ncgtccgggaaactggttcngatggtgtctgcccaggagcgcctgacacgcaccttcacacgcagcagccacacctacacccgcacggagcgcacggagatcagcaagacgcggggcggggagacaaagcgcgaggtgcgggtggaggagtccacccaggtcggcggggaccccttccctgctgtgtttggggacttcctgggccgggagcgcctgggatccttcggcagcatcacccggcagcaggagggtgaggccagctctcaggacatgactgcacaggtgaccagcccatcgggcaaggtggaagccgcagagatcgtngagggcgaggacagcgcctacagcgtgcgctttgtgccccaggaaatggggccccatacggtcgctgtcaagtaccgtggccngcacgtgcccggcagcccctttcagtttactgtggggccgctnggtngaaaggtggtgcccacaaggtgcgggcccggaggcac

SEQ ID NO: 33 - DNA, 510 bp, Homo sapiens
  misc_feature 442: n = A,T,C or G
ccgcgtccgcaggaaattgttaaaaataatttgggggtgtttattggggaaggaaacagggccttgacagtggaggacttggaagacatgtaatttaagatatagagtatgattgttggaaaataagcatggagatccagaaggaatcttaagagtttttctatgcaagtgaagatggaagaaaatatgtattttacaaaagataaattacaagtaccttatttgctttgcaaaataacttatcatgttcttccactatttttattatattttaattttaatgaaacttatataacatttacactaaattttaaatacatggctcaagacaaaaaaatggggaaaatattttttaaaaaatcaccccaaatcctggtactcagacataaccactattcaaacttggcagagtaatatttttcctgtctgcatgtgtgccacnatgtgtgcatgcataccacaaagtagatgttttactatatctcctgggttattatctgcttttttccc

SEQ ID NO: 34 - DNA, 480 bp, Homo sapiens
  misc_feature 29, 397: n = A,T,C or G
acgcgtccgggacaagagaaacataagcnggaaaaaaggaggaggaataaacacacgcctgtccataataaaactcgctcttgaagactcagcggcagccctgcaccggagactgacgacttgcgcggctgtgacctccgccctgcagcggaccctcgactgccctgcactgcggctctggaggccccgactcagtgcatgggaaagaaatcctcactatcagaaaacagaggggcaatctgctgctctccctttccggccaaacacgtcacccatcaaccggatacctaccaagaggctttcagaggaggcgcccaaggtctcccaggcccgcccctccccaatcacgctccgctcagccccctcaacttttggcctccgggaagttcgcagcgtntctcacgcttggcaggaagttcccgccaaggctttcggaaaatcctttaaaaagcaacgcttgcgctgggcggggctttggtg

SEQ ID NO: 35 - DNA, 535 bp, Homo sapiens
  misc_feature 489: n = A,T,C or G
ccccgcgtccggtagattgcttgtggctggcagtgaagatggtggagttcaactttttgatataagtgggagggctcccctcaggcagtttgaaggccatacaaagtaagagacagttggtttctgtgtgttctggttttattttgttgtaagctctttttttctctggactttggttaaaaagatagagatcagttttatggagattatttgcctataggtactatatttcctgattgttctaagagtgcttaacttgggttccgtggtccagtttcatggggcttatgaattccctagaattgtatgtgatattttaggaaatacacgtttatctagggagctactctgtagcttttggttaactttagtggggtctgtggcccagctgagattatgaattactgacctgaagacaaccttacagctggtaatgacagctctataggcctgtactgtcttagaggctcttatgttgaagtcaagtangaaggtggattttcttcttgaattatagtgttttgccccttaataa

SEQ ID NO: 36 - DNA, 443 bp, Homo sapiens
  misc_feature 2: n = A,T,C or G
cncgcgtccgcggacgcgtgggggcgagggccgctggggccgcgaagtggggcggccgggtgggctacgagccgggtctgggctgaggggcgcggcttcgcggtggaccccagcccggcaacgggaaggcgagctctcctccaccgtccaaagtaaactttgccgctccttccgcggcgctcccgagtcctcgccgccgccgggccgccgcagtccgcgaagagccgtcctgcgtcagggcctccttccctgccccggcgcggggccactgcgccatggacgccacagcactggagcgggacgctgtgcagttcgcccgtctggcggttcagcgcgaccacgaaggccgctactccgaggcggtgttttattacaaggaagctgcacaagccttaatttatgctgagatggcaggatcaagcctagaaaatattcaagaaaaa

SEQ ID NO: 37 - DNA, 652 bp, Homo sapiens
  misc_feature 77, 96, 102, 170, 179, 197, 232, 244, 245, 256, 261, 265,266, 283, 303, 305, 309, 323, 327, 330, 336, 343, 356, 359,364, 373, 378, 383, 393, 400, 402, 416, 423, 425, 427, 432,434, 440, 443, 452, 458, 467, 471, 474, 477, 479, 486: n = A,T,C or G
  misc_feature 505, 506, 508, 510, 518, 534, 541, 564, 567, 569, 571, 583,586, 596, 601, 602, 606, 613, 620, 626, 637, 645: n = A,T,C or G
gcgtccgcggacgcgtgggccgccgccgccgccgccgccgcgatgtgaccttcagggccgccaggacgggatgaccnggagcctccgccccgcggngcccgnggctcgcctcggcctcccgggcgctctgaccgcgcgttacccggcccgccatggcccccttctctctngcccgggcncacgctcgaccctgcgcncgtatcgccagcaagtctgctgcctgcatgctgcntggctcgcgagnngttggcgcgcnttgcnctgnngcctgtttgcacgagcngccgccgaggcccactgcangnttanctcgacggtctccnaagncanaccgcnccgccgnccctttccaaggntcntttcncgaggggangggcncaaanggccaggggnccccacncntggggaagaagggnggagttngncngatgngnatgagnaanccttgtagncaagancccgtcccnaagnggnagngncagcccnggggaagggttggttttcnnangntaaaccgnaacccccccggaagtnaaccggngattttaatttatttttaccccncanangnaaataacctttnaanaaccatgggncattnnaaancaaaagntaaattngggggnaacttaaccgntaaaccancccaaaa

SEQ ID NO: 38 - DNA, 408 bp, Homo sapiens
  misc_feature 2: n = A,T,C or G
cncgcgtccggcgggtcccgccggcgggtacctgggcactgcgccccatctggactgaaatggggacaccccttcgggggtcccaggctcctggccgtattgttctccttctcctcgtgataactccgcagtggaggtggattccgtccaagacgcccaacgtggctccgcgtagcaatcagcgctgcaatcctggcggttacctcagcggcggcgtctctctctgcgcctcacactcgcagcccgcggccctccccaacttagggcgtttacaaaagaaactactccagacgcgctgcaaagggaggcgcatgtgcccgaaagctggcgatcagacgggggggggcattctgcatgtgtgatgtttctgggggcggtggggagtgtgtgtcggggtcggggggcggg

SEQ ID NO: 39 - DNA, 517 bp, Homo sapiens
  misc_feature 1, 489: n = A,T,C or G
ntggtctttcttcctaagaaggagatggagccaatttctcacagctcgtgcctcagtactgagggtatggaggaaaaggcagtcagtcagtgtctaaaaatgacgcacgcaagagacgctcggggaagatgtagctggacctctgagatttacttttctcaaggtggacaagctgtagccatcgggcaatttaaagatcgaattacagggtccaacgatccaggtaatgcatctatcactatctcgcatatgcagccagcagacagtggaatttacatctgcgatgttaacaaccccccagactttctcggccaaaaccaaggcatcctcaacgtcagtgtgttagtgaaaccttctaagcccctttgtagcgttcaaggaagaccagaaactggccacactatttccctttcctgtctctctgcgcttggaacaccttccctgtgtactactggcataaacttgagggaagagacatcgtgccagtgnaagaaaacttcaacccaaccaccgggat

SEQ ID NO: 40 - DNA, 356 bp, Homo sapiens
  misc_feature 6, 7, 176, 194, 309: n = A,T,C or G
caccgnncgcgctccttctgccgccagggcgaggctggcacccggccagcgcgggcagggccacgggtgcccggctgtttcccggttgtggaaggcgctcaaggtgcgcggcccggggcgcgctactgggggcgccctccgcggtgggcaagcgcgccagggatcggcctgggcangccgcggggcgcgcgaangctgcgctttccctacgccccccctcgcttcctccggcacggcggcaacggagatttcctctcggggaaactacgcggatccttttcggggatcctcgccccgccccaatttctncgccccctcccctttgctggggcgcctgggctggcccgcgcagggga

SEQ ID NO: 41 - DNA, 438 bp, Homo sapiens
  misc_feature 2, 381, 394: n = A,T,C or G
cncgtccggttcctaacacagacgaactcagcttcctttgccatgcctctgactcgagccagcctttctttttatcctccgtttttctcagattccctccacacagtcttttcccaggtctagatcgcttccctcgccccaatctttccttgaaccccttttccagtgtcccaaagctgtccactcttacgcctcttccagaaacacaggctacctccccccaattccccagtgccactctggattgtaatatcccactcaggagcttctttcttgtaatttccctccccccaccccccaccctccccgggtcgtctgttttcttctatgaagcaaatattactcatcaaatataggaacaaaggcctaagtcctttctgngctttatttcttngggtgactggatcttagatcctatcatttaagtagatgatggtt

SEQ ID NO: 42 - DNA, 521 bp, Homo sapiens
  misc_feature 11, 28, 456, 498: n = A,T,C or G
ggtgtcgaccncgcgtccgcgcttctcncctcggcccgtggagccggggcgtccgggcgtagccctcgctcgcctgggtcagggggtgcgcgtcgggggaggcagaagccatggatcccgggcagcagccgccgcctcaaccggccccccagggccaagggcaggccgccttcgcagcccccgcaggggcagggcccgccgtccggacccgggcaaccggcacccgcggcgacccaggcggcgccgcaggcaccccccgccgggcatcagatcgtgcacgtccgcggggactcggagaccgacctggaggcgctcttcaaccgccgtcatgaaccccaagacggccaacgtgccccagaccgtgcccatgaggctccggaagctgcccgactccttcttcaagccgccggagcccaaatcccactcccgacaggccagtactgatgcaggcactgnaggagccctgactcacaagcatgttcgaggctcattcctctncagctttcttgcagttgggaagc

SEQ ID NO: 43 - DNA, 496 bp, Homo sapiens
  misc_feature 461, 467: n = A,T,C or G
gtcgaccacgcgtccgggagctgcggcgccctcccttatcgccttggcaacgacccagccgcgccgcgaggagaaccgggaatggaggtcgtggcgtgaggggcgccgagcgaggggaggcgcgggccacgggagttccgggagttccggcgttgcccggcagtccgcagtcctcggcgggaaggctgtcccggcgcctcaggcagctctgcgtgggccggggtgacttcctcgcgatcccctgcgcgaggtgaagggcagggacctttgccgcgccttccacgcgccgtgccccaccggcgaagtgggctccatcttccttcaagacttgtcgcttcgcggacagggcgcccgtgggttcttcccggcccttccgtaccgtcctctttccaagcgggcttccggaaagcgggttccttgtctttcggacgcattttcaccccgcgccggggaggagcttnccgggnaagggttccacggcggccgagggttttcc

SEQ ID NO: 44 - DNA, 498 bp, Homo sapiens
  misc_feature 150, 167, 180, 252: n = A,T,C or G
cgtccgcgagactcccgcgcccaccacccccggcggagctgctgctgagccactcaatctgagccctggctactaataaagttcgtttaaaaatcataatcattcttaagagagcgaaagagggtgcgaactagccgctcggccccgcanggagagctggcgcgtcnggaggagacagcngcggcagcggttgcgccgcgaccaggaggagccggtggcgccgggcggcgggtccgcggccggtgggggacngtgagtagcggctcgcgctgcggtgcagcggcgctgcactcactcgccctctccaggggctgggggttcgtccggctccactggggaagactcagcttctccccggggtcccgggttgtgccttactctccggagtgggcaggggtatcgagggcaggggcctcccggcccggctcccccatcccccggttcggaccgacgagccgccggcttcttcccttccctgagcaccgatcccaagttcca

SEQ ID NO: 45 - DNA, 452 bp, Homo sapiens
tcaccacgcgtccgggcgtccgggtacccgagggctctcccgcgttgctggcaccgctggcgccgcggtctcgtagcgcatgggcctcctccgaggcgggctcccatgcgctcgggccatggcgcgcctgggcgctgtgcgctcccactactgcgccctgctgctggccgcggcgctggccgtctgcgccttctactacctcggctcaggccgggagaccttctccagcgccaccaagaggctgaaggaggcccgcgccggggctcccgccgcgccctcgccgcccgcgctggagctagcgcggggctccgtggcgccagcccccggcgcgaaggccaagagcttggagggcggcggtgccgggccggtggactaccacctgctgatgatgttcaccaaggcggagcacaatgccgcgctgcaggccaaggcccgcgtcgcgcttgcgctca

SEQ ID NO: 46 - DNA, 498 bp, Homo sapiens
  misc_feature 39: n = A,T,C or G
ccacgcgtccgtgtcgggccggcgctcccttctctgccnggtggcgagtacacctgctcacgtaggcgtcatgaggtctccggttcgagacctggcccggaacgatggcgaggagagcacggaccgcacgcctcttctaccgggcgccccacgggccgaagccgctccagtgtgctgctctgctcgttacaacttagcaattttggccttttttggtttcttcattgtgtatgcattacgtgtgaatctgagtgttgcgttagtggatatggtagattcaaatacaactttagaagataatagaacttccaaggcgtgtccagagcattctgctcccataaaagttcatcataatcaaacgggtaagaagtaccaatgggatgcagaaactcaaggatggattctcggttcctttttttatggctacatcatcacacagattcctggaggatatgttgccagcaaaataggggggaaaatgctgctaggattttggga

SEQ ID NO: 47 - DNA, 490 bp, Homo sapiens
  misc_feature 60, 71, 155, 246, 306, 315, 365, 395, 435, 453, 466, 468,474: n = A,T,C or G
cgcgtccgcggacgcgtgggcggggccgcggagccgggccggggcatgcgccgtctccgnctcggggccgncgggggcgccctgctgagcgctacccacgtgcgtccgcgccacctcgcgggcgaccccgcggccaaggcccccggcggagcggntcccgggcgccccgaactagcccccaactttgggcgaagtttgcctgcgcctctccccgcccccacgcggcgcgccggggccgcggacggnagcggcccccggggatgcgccttcccggggtacccctggcgcgccctgcgctgctgctgntgctgccgntgctcgcgccgctgatgggaacgggtgcgccggccgagctgcgggtccgngtgcggctgccggacggccaggtgaccgangagagcctgcaggcggacagcgacgcggacagcatcaagnctcgagctgcgcaagccngacggcaccctcntnttcttnaccgccgactttaaga

SEQ ID NO: 48 - DNA, 402 bp, Homo sapiens
gcgtccgctgcattgcgcccaccgactccactatgttgaagaaattcgacaagaaggatgaggagtcaggtggaggctccaacccattccagcaccttgagaagagtgcggtactccaggaggcccgtgtatttaatgaaactcccatcaaccctcggaaatgtgcccacatcctcaccaagattctttatctcataaaccagggggagcacctggggaccacggaagcgaccgaggccttctttgccatgaccaagctctttcagtccaatgatcccacactccgtcggatgtgctacttgaccatcaaggagatgtcttgcattgcagaggatgtcatcattgtcaccagcagcctaacaaaagacatgactgggaaagaagacaactaccggggcccgg

SEQ ID NO: 49 - DNA, 481 bp, Homo sapiens
  misc_feature 15, 469: n = A,T,C or G
acgcgtccgcagaangctctcagatgggacagtcttttactttcattctcacctctgtaaatagcaggacaggttggggtgggcctgacttctattctgctttcagggggtacttactggaaaatcaacttaggaagtgaatttgagggttggtgtaattttaagcccagcctctgatccttggttgcacaaagcctaatttccaaatatttctaacagattcaagactgtattggcaaagaggtagagagctatgataatgacataaattacataaaaatccagttgaatgaataagaaggaatttgggcgtataacccatggaacaccaatggtgctaagaatttgccaaaccctcagcttcgtataagtcccaaagaactcaggcttatagcactaagcaaattaccagtgggaggaggaggacctgccacggagctggataattacatttaaatatttttgccantctgttggagac

SEQ ID NO: 50 - DNA, 428 bp, Homo sapiens
  misc_feature 1, 35, 231, 246, 258: n = A,T,C or G
ncgcgtccggcaggcgggtcgtagagagcgttcangccgtctgtatatctccccagatacctgaaactgaccacctgagtacgttttcccattgctgagctgtttccctgatatctggccatgcaacggagatcaagagggataaatactggacttattctactcctttctcaaatcttccatgttgggatcaacaatattccacctgtcaccctagcaactttggccctnaacatctggttcttnttgaaccctcanaagccactgtatagctcctgccttagtgtggagaagtgttaccagcaaaaagactggcagcgtttactgctctctccccttcaccatgctgatgattggcatttgtatttcaatatggcatccatgctctggaaaggaataaatctagaaagaagactggggaagtagat

SEQ ID NO: 51 - DNA, 245 bp, Homo sapiens
gcgtccggaaggtccttgagccatctggatggcgggcagtctggcacactaatgtgttcaaggtgctggttgagatcacagatgtggactttgcagccttgaaggcagtggtgaggcttgctgaaccatacctctgtgactctcaagtgagcacttttaccatggagtgcatgaaggagctccttgatctgaaggagcatcggttgcccctgcaggagctgtgggtggtgtttgatgattcagga

SEQ ID NO: 52 - DNA, 491 bp, Homo sapiens
  misc_feature 8: n = A,T,C or G
gtcgaccncgcgtccggaaaaaaaaaatgacccagagatattaacaacttgacctggttatacagttagatatttgcacagtctggactcaaactggaggcttctgactcctcatctaggctcctctcactctgccattgcatgggttttctcatataccttctctcataaggttttcacaaatttgtcaccgtcaaataattatcaaaattattcacactattatagatgaaaataatgtgcttataaagattaagtaactttcctgagggcgcaggtatctggttcacataacaactagcctggcttagaataaacacatatttcctggttctgaagttggtgtccttcctaccactttctgctgtctcctaaagataaagaatgttattggctcactgaattaatccattctgttcctggctgaaataaaaattggtatattccttacgtgaagtgtcaacaggaagggggcttttacaacttccttt

SEQ ID NO: 53 - DNA, 533 bp, Homo sapiens
  misc_feature 7, 483: n = A,T,C or G
ggagtcnccacgcgtccgcgcgctggaggagtggagcagcacccggccggccctgggggctgacagtcggcaaagtttggcccgaagaggaagtggtctcaaaccccggcaggtggcgaccaggccagaccaggggcgctcgctgcctgcgggcgggctgtaggcgagggcgcgccccagtgccgagacccggggcttcaggagccggccccgggagagaagagtgcggcggcggacggagaaaacaactccaaagttggcgaaaggcaccgcccctactcccgggctgccgccgcctccccgcccccagccctggcatccagagtacgggtcgagcccgggccatggagcccccctggggaggcggcaccagggagcctgggcgcccggggctccgccgcgaccccatcgggtagaccacagaagctccgggacccttccggcacctctggacagcccaggatgctgttggccaccctcctnctcttctcttggagggcgctctggcccatcagaccggattattttttcaa

SEQ ID NO: 54 - DNA, 509 bp, Homo sapiens
  misc_feature 2, 15, 73, 457: n = A,T,C or G
cncccgtccggaatncccatagttagctgctgtgctttcacaacttctttctctgtaaattcctcgcttggcnctgagaaggaaaaaagatgttcgtaaagggctcagcgaggaatttacagagaaagaagttgtgaaaccaccatagttagttgctgtgctttgaatttcttttgctcaaatggcctcagcgaaatcttatttgcctatagcatatctacaaaaaattttcctagaccgtcttttctacaactggatggtaaagttgattgaagtgtgcctcatgtagctttatgtttggggcatttgaagggctatggctggaccagagtgtaatataaatgcttaatagagaggggaaaagaagagtgtaagaaccattatagggctgggctcacgcctgtaatcccagcattttgggaggctgaggcaggcggatcacgaggtcaggagttcnagaccagcctgaccaacatggtgaaaccccatctctctaaaaatacaaaaat

SEQ ID NO: 55 - DNA, 525 bp, Homo sapiens
  misc_feature 8, 504: n = A,T,C or G
gtcgaccncgcgtccgcagccttcggctgcggagggggctcggcggcggccggcggagaaagttgctccgagaagaggctgggtcgagctgggccgagccgggcgcgcagggcgggcgtcgcgggcgtcccgggcggacgcggcgcggagactgccggcgcgtcccgggggttccgatttgaagaccttgcttctcatcacccactggattatgccccaggctttcctacccaatgatcctcttgcaacacgccgtgcttcctccacctaagcagccctcaccctcgcctcctatgtcagtggccaccaggtctacaggaaccttgcagcttccaccacagaagccttttgggcaggaggcttccttgcctcttgcaggggaagaagagttatcgaagggaggggagcaaggactgtgccctggaggagctatgtaagcccctgtactgcaaactctgcaatgtcaccttgaactctgcacagcaagcccaggctcattatcanggtaaaaatcatggtaagaaa

SEQ ID NO: 56 - DNA, 503 bp, Homo sapiens
  misc_feature 4: n = A,T,C or G
accncgcgtccggacctgttggcgacatggtggcacccgtgctggagacttctcacgtgttttgctgcccaaaccgggtgcggggagtcctgaactggagctctgggcccagaggacttctggcctttggcacgtcctgctccgtggtgctctatgaccccctgaaaagggttgttgttaccaacttgaatggtcacaccgcccgagtcaattgcatacagtggatttgtaaacaggatggctccccttctactgaattagtttctggaggatctgataatcaagtgattcactgggaaatagaggataatcagcttttaaaagcagtgcatcttcaaggccatgaaggacctgtttatgcggtgcatgctgtttaccagaggaggacatcaagatcctgcattatgtacactgatcgtttctgcagctgcagattctgctgttcgactctggtctaaaaagggtccagaaagtaatgtgccttcaaactttaaactttggaa

SEQ ID NO: 57 - DNA, 487 bp, Homo sapiens
gtcgaccacgcgtccgtctcatttgtgaagaggtctgtcttcctgaggaagcaggggaccctcacctgtgaaccaagtgtgccatgggagctgctccatgtccaggtccaggtctcctggtctgcagggaacggcacaagagggctggcctaggccaggaggatgtgatctgtcctagaagggggctgacctgcttgctgaccccgcttgctgctgcctggctgacctgactcagccacggctgttccgagggcccttctgagtacgaacttccagttggaggatctgggtgaagacccagctgcttgagatagcagcctctggctaggcccttggcgtggccaagccaatcaggcaggtttagagcctggtgcccctagacaggtcctgcaaccaagaacagggggtagccttcaaaggccagccctgccttccaaccaccgctccacagcgagggaaaccaaggctcttagggcaggaggcttgt

SEQ ID NO: 58 - DNA, 499 bp, Homo sapiens
  misc_feature 3: n = A,T,C or G
ccncgcgtccggggagcagggatcaacggtggtccccgtaaacctgacagtaaacctgacagaggctgcaggagtgcatttccacccagggtgcactcagcgagtggaactccacacccgtttctttggagtcaaggcgcgacctctcagggaggagactgctcctggttgcccactgccgggtcatcccagcttgcagtggaaccctccgcagcctggcctcttccagggtagcccctcactcccctctctcttgtcctaggataaggccgaggaaggctgacgagttccagctctggggatgccctatcagctgtgtcaccttgaacaaatcatttctcctcttgggtctctgtttcctccagtgtgaaacgtggtgaaggcatgaggggctatgggagccccaaggcctctttcagagatctcctctgggtcccatgtgaccccgtggctatccccaaaggcaagagggtccccagccctgcaccaaggccctggg

SEQ ID NO: 59 - DNA, 401 bp, Homo sapiens
  misc_feature 304, 368: n = A,T,C or G
ccgaggaaaggagttggttcgcgcaggtgcggcgcctgggtccccatggcgctgtggcgcggctccgcgtacgcgggcttcctggcgctggccgtgggctgcgtcttcctgctggagccagagctgccaggctcggcgctgcgctctctctggagctcgctgtgtctggggcccgcgcctgcgcccccgggacccgtctcccccgagggccggttggcggcagcctgggacgcgcttatcgtgcggccagtccggcgctggcgccgcgtggcagtggggtgagtgccaacggggcctgggtctntgagcctccgaggtcggccttggaggtcgggcggagccgcgcagaaacagggcttctcagaggnccccgggaggcgcttgctgtccgcgctggcccc

SEQ ID NO: 60 - DNA, 491 bp, Homo sapiens
cgcgtccggtgggaagccagaagataaaaccaaatggctgggcacgtctttaggttattcctagctaagagttaagagttgtaagctctctcattctttgttcttcagccttaaactatctttccttctattaactttatttgtctcagttacaatgatagaggtaacttcacatactaaaagaaattaggttaccatgtgaaacattcttcttggcttgtgctaatgttatcagatccaaacagcatctgaaagaaaattttccaagtacgatgttgttctcttgttttctgaaatacatatcatatgttaaagtgagagtttttatacatgttgaaagaagttgaatgacataacaaatagttactgaggcctccattttcttacttcacagttaaaattcctgtttctctttgggtataggagggtagaaagaagtgggagagtaatagcattttaaaacacagaatcaaaaatcatattaaaagtag

SEQ ID NO: 61 - DNA, 549 bp, Homo sapiens
  misc_feature 531: n = A,T,C or G
cgtccggagcatcgcgcactgcggccgggtcaccgacgtgggcatccgctacgtggccaagtactgcagcaatgctgcgctacctcaacgcgaggggctgcgagggcatcacggaccacggtgtggagtacctcgccaagaactgcaccaaactcaaatccctggatatcggcaaatgccctttggtatccgacacgggcctggagtgcctggccctgaactgcttcaacctcaagcggctcagcctcaagtcctgcgagagcatcaccggccagggcttgcagatcgtggccgccaactgctttgacctccagacgctgaatgtccaggactgcgaggtctccgtggaggccctgcgctttgtcaaacgccactgcaagcgctgcgtcatcgagcacaccaacccggctttcttctgaagggacagagttcatccggcgttgtattcacacaaacctgaacaaagcaaatttttttaaaagcagcgtatgtaaagcaccgacacccactcaaaacaagctctttctttcnggaagggtattaaggaat

SEQ ID NO: 62 - DNA, 434 bp, Homo sapiens
  misc_feature 1, 17, 392: n = A,T,C or G
nccacgcgtccgccagnctgtgaaggatcccagactggcatatgcaggaggaaatggggcgggcgaggagtaaggaccccaaaaagcaggggtagggaagggccctcccagcgccccactgtaataggggcctcatcaatgccccatgctcactgaataaagcactgccagcgaaaggtgaaaagaggaacaaagaacattctcctggacgccacccacagaaagccacgtgcaggcttggccctcaccttggggaccttggacacggagctggttatgtcacatctggctctcagagctggggcagcgtctaggaggcctgatgtagaaagcactcagctaagccctagttaccggcacacgggcaccagcgccccctctcagcaaacttncacgtcttatgaaattagcactggatttccacttcaattgga

SEQ ID NO: 63 - DNA, 320 bp, Homo sapiens
  misc_feature 88, 116, 267, 284: n = A,T,C or G
cccactgtaataggggcctcatcaatgccccatgctcactgaataaagcactgccagcgaaaggtgaaaagaggaacaaagaacattntcctggacgccacccacagaaagccacntgcaggcttggccctcaccttggggaccttggacacggagctggttatgtcacatctggctctcagagctggggcagctgtctaggaggcctgatgtagaaagcactcagctaagccctatttaccggcacacgggcaccagcgccccctntcagcaaactccacgtnttatgaaattagcactggatttccacttcaattgga

SEQ ID NO: 64 - DNA, 547 bp, Homo sapiens
  misc_feature 1, 444: n = A,T,C or G
ncgcgtccgcttcatcttaggataaagtctaaatctttgttttttgctattgtactaaactcataaatcctaggttataaagataaagccttaaactttatctcatcatccagcccaatttccagccacaatgaagtacttaaaactctgtgtctttgtacttgctgttctcttggcctccaattccttttcatcttttccattcggtaaagtttgtttatcccacaggccctatcttggaagcctccagcaacttctccagacagaggtgttagcagtgtaggatcagatttctcaaccacgtcactcccatgtctgggtagatatctctgcccaagtgttctcatagcacttgagcagtactctctaagcgcccaggatctaccatgttgcttttttaaaatttgattaatttatttttttatactgctccttgtggagcanggagtgttcccagagtagcccaccatgttatattgaatggatctgtgtgcataatgcagctgtccatctacatcgtatatttttgtctcctcaagggtaggga

SEQ ID NO: 65 - DNA, 543 bp, Homo sapiens
  misc_feature 541: n = A,T,C or G
gtttgtattctggatacaggggatactggggctcgctatgtgtgtggagccatcccttccttgccccagccccacctccctctcaaaccctctctggctctttctgagcttcctttcctgctccccagcttgcccagtgctcagtgccccacttggctcttttgctacttcgggtcaggtggagcctcttgggaatgtgaagtgccttacagaaagattgcacttcaagaggagaggctgcagggagccatcctaaacccagaggcctggagcttaccgtgtcactttacttttgtacacaggggtctccttagtgccctcgagaaggattcttggccctgagcttctactcctgaggccacctctgtgcagccccagctccctcaactctaggctgtagtctcagtgggaaagcctggcttgggggtctcctaggaatgtccacctgaaggcacacttgataggggcttgcacaacttatgtctgccaaggccacctgaggaactcctggtgcctataagttccaccttcccttcctttnct

SEQ ID NO: 66 - DNA, 719 bp, Homo sapiens
  misc_feature 159, 622, 643, 692, 699, 701, 714: n = A,T,C or G
cgttcggcagcagcagctggcggccaaccggcacagcctggtggagaagctgggggagctggtggcgggtgcccacgcactgggtgagggccagttccccttccccactgctctgtcggccacccccacggaggagacgcccaccccacccccagccgncaccagcgaccccccggccgaagacatgctggtggccatccggcgtggggtccggctccgcaggaccgtcaccaacgacaggtcggcgccccgcatcttatgatggcgccaccctccccatcctctcaggccccagtgcgagcaggtggcctggtctgtgagccgcaggcactcagagcaaaggcccagccaggagagaggacagagccagggcagaggccatgccactttatggaaagacacctcacttggattccagcatttaaacaggaagtgacttcttagcaagcctggccaggacggagcctgcaggcctgggcctggttcggggtctgttttatgctcttcggtcccttctcttccttctctggggccctgcctcttcctacccataaagcaccaaaaccagggccgctgccatgacagaggggccaggctggccttcctttcacatcccggcctnttccaaggctggtcctgcctnacttcttctggaatgtgggccccctctcccttgctgacccctcttcctnttgcttntntttgcttttccangccct

SEQ ID NO: 67 - DNA, 473 bp, Homo sapiens
cgcgtccggcaacctaaaaataggatgcaccaatagcatgtggttccaagtaagttgtgatttttattttgagacagtgttccactggaagggagggaagggcttacattcacagacagtaaagcagggctgtgtaaggagctacatttacttaacagtctcctttccagctaggtttgttttatttatttgcaagtcagctaagaattaaccttttaaaccatctaaaacaggcaagcaatataaagatttctactagtgcaaggtaagtggtttgaatatacaagtgccctttcctgccacccagtctcactaccgttttagtcctgcagctgggtaaagccactattgtgtggaaactctcccatgtgccctgtctctacctctggacacaccagctccttcttccacctattctattcctcagttaagccaagtgatcagaagtagtattaaatgggtagataatttta

SEQ ID NO: 68 - DNA, 492 bp, Homo sapiens
  misc_feature 481: n = A,T,C or G
gccacgcgtccggcgccgggtgcgccaactacgcaaagaccaagcgggctccgcgcggaccggccgcggggctagggacccggctttggccttcaggctccctagcagcggggaaaaggaattgctgcccggagtttctgcggaggtggagggagatcaggaaacggcttcttcctcacttcgccgcctggtgagtgtcggggagattggcaaacgcctaggaaaggactggggaaaatagccctgggaaagtggagaaggtgatcaggaggccggtccactacggcagtttatctgtctgatcagagccagacgcgacgcgtccacttcgcagttctttccaggtgtggggaccgcaggacagacggccgatcccgccgcctccgtaccagcactcccagggagagtcagcctcgctccccaacgtcgagggcgctctggccacgaaaagttcctgtcactgtgattctcaattcctgcntgggttttttt

SEQ ID NO: 69 - DNA, 535 bp, Homo sapiens
  misc_feature 6, 34, 61, 73, 100, 119, 167, 198, 226, 245, 280, 287, 290,299, 310, 327, 330, 349, 358, 359, 360, 365, 392, 413, 415,420, 429, 445, 461, 469, 471, 488, 490, 491: n = A,T,C or G
acccanacctgggaggaattaatggaatgcttgnccctgggcagccttagaaacagacccnagcttatctaangctgctccgaggcagtgacccaactanggctcaggaagtcaagaanattgaccaagcttatagtgatcacctcttgacctttgtgtcacagtcnttttgctttttaaaacccttttgtgaaccgnttatggcctttgattctgacaggcatcntagttgtgaaggggaacangggcaggatataatgtttcgtttaccaaatacaanaaaatcngangtacccagntagatcacaanattttttgggagaaggnctnttgggtctcttccaggagntcacttcannnttggnaacttgacaggggcttggggaatttantattccccttgggcgcagggncncaaangggtggcantttccctccttggagntttttttttcaagaantccttgcntnggggaaagatggttacnannatcccggaatttccaacccccttccctatttttttggtttaagg

SEQ ID NO: 70 - DNA, 498 bp, Homo sapiens
cgcgtccggcacattaaaaaaaaatacttattttttattatggaaaggtcttggaacattctgatagtgagcttccggcattcatttgctgtatctggcttaggagatgctagggtggcaagaagaggcacaggcttagatgcgctgggtggagagttggctttagtaatgatggttgactctaacgacttgattatcagctgtgccttttttcttcctgccttctgaggtgtgttgcctgcatcctaattcacgtactgagtagcaagctaagcaggttgtagctggagattgtaagaaatcctgaatggaaaccaaagaaagactgtcacatcacatgatgtgcccttttcaatcccatgtctcttcccagtggcatcccagtgctgtctctgccccctgctgcttctgtaaagattttctgacacaagtaactgcctcatagaccttcctttttatgaaatcctgagttttggtttgggtacgtcctttttagat

SEQ ID NO: 71 - DNA, 134 bp, Homo sapiens
  misc_feature 94: n = A,T,C or G
gcgcggctgtcgcgagggcgggggtcggggctgcaggcggggcagggctgggtgggggcgcgcgacgcacctgcctgcttcctgcacgggtggnccccaagcactgcggggccccagcccaaagcggaccttga

SEQ ID NO: 72 - DNA, 427 bp, Homo sapiens
cgccccgcgtccgggcggctggtgggcgaccgggcgcatcctcattgcatgtgcggcggccctacctcggccctggcctgaccccggcggccctgcccgcccctccctccagcatcatggccagcccaagaaccaggaaggttcttaaagaagtcagggtgcaggatgagaacaacgtttgttttgagtgtggcgcgttcaatcctcagtgggtcagtgtgacctacggcatctggatctgcctggagtgctcggggagacaccgcgggcttggggttcacctcagctttgtgcgctctgttactatggacaagtggaaggacattgagcttgagaagatgaaagctggtgggaatgctaagttccgagagttcctggagtctcaggaggattaccgatccttgctggtcctttgcagggagaagta

SEQ ID NO: 73 - DNA, 511 bp, Homo sapiens
  misc_feature 8, 315, 476: n = A,T,C or G
gccccgcntccggaaatgtccgatttttttttaatttaatgaaattgttaatgaggaaaaatttttaatataggtcttatctaccacacatccccatagatttaaggattttaatagaaagtcatgatgtatgtatttaagccacgttaaaagaaaaaatataactatggaccggtattcagtgaatacagtttcatggtttttaattctttcaaagcacattaaaaatggtgtgctgataaaccccaagtaaattaaccctttttccgtataaatccattttttgttttgaagaggggaaattatatttattgntgtttactgaatcctggtgtgaaagcatatcagatatgtatgaactgctactgctgtacttccgatttacggacatcattttattgctatttgtagaccgtgataacatgaacatgagtcctatttatgtgggccttcagtggatgggcagtgccactcangtctctgggggtttcctctcttaattttaaagtaa

SEQ ID NO: 74 - DNA, 481 bp, Homo sapiens
  misc_feature 8, 407, 415, 422: n = A,T,C or G
agtcgccncgcgtccgtgtgtttctcctcggtccccaactctaccttccccaaccacagttcctgtccccagatgtcctgatgcccaccatggcaggggagcccaatagactcccaggaacttcaaggagtgtccagcagtttctggctatgtgtgacaggggtgaaacttcccaaggggccaagtacacaggaaggactttgaactaccagagcctcccccatcgctccagaacagacaactcctgggcaccctggtcagagaccaaccagcatattgggaccagattcctgactactccagggtgcaatcctcaactaacctacactgccacactaccagaaagaagcaagggccttcaggttcctcacactcagtcctggagtggatctttttcattcaccctnccaccctnccattgntcatcctgtgtacccaccatctaagcagtcttcatgtacccctgaggtcaagcttggaa

SEQ ID NO: 75 - DNA, 379 bp, Homo sapiens
  misc_feature 42, 46, 94, 323, 329, 364: n = A,T,C or G
cccgcgtccgggctggcatggctctatataagattgttgcanaaantccctactacttttggtctgtgatgagcttaattatgcaatctatatnggcacaggatgaaaacctctcaaaaacaatgtttctgccccttgctgagagaatggtcgaaaaaatggtgaaagaggacaagatagaagctgaggctgaagttgaactttattatatgatcctggaacgtttgggaaagtaccaggaggccttggatgtcatcagagggaaattaggagagaagttgacaagtgagattcacagtcgggaaaataaatgcatggctatntacaanaagctgagcaggtggccagagtgcaatgccctttnccggcgcctcttact

SEQ ID NO: 76 - DNA, 490 bp, Homo sapiens
  misc_feature 2: n = A,T,C or G
gntggagggagctttgctactctgctcttggcatgactccaggatttttttctggaatccaacctctgtcctcttaggagaaggaacctgtccttggttcagatggctgggcatgaggaggaaaatttccattagtgtagaaaagtgctggacagaatccggtttggaaaattacaaatccagttggtcaaaataggccatttcctatgtgtgacctattcgtggtatgccaactggactgcttcctaaacaggacgaggaaagtgaggaatatttttatatgaaagccttagcctgtctggcacccatgaaaaaaactatttatgcactcctactttcacccgtctttttgcattctctatttgtagcacaacagagttgaatgccacaaaacaccccgtttatagtgagctgttttcagtgaccaatatcagaaggaggcttgcttctggactagcctactaattgccagcagccaccatttttcatg

SEQ ID NO: 77 - DNA, 453 bp, Homo sapiens
  misc_feature 402: n = A,T,C or G
ggagagtgccttgccggaccctcaggacggagctgctgggctgctacagtgaccaggactttctggccaagctgcactgtgtgcggcaggccttcgaggggcttctggaagacaagagtaaccagcttttcttcgggaaagtgggccgacagatggtgacaggcctgatgaccaaggctgagaagagccccaaaggcttcctggagagctacgaggagatgctgagctatgccctgcggcccgagacctgggccacaacacggctggagctggagggccgaggggtggtatgcatgagcttcttcgacatcgtgctggacttcatcctcatggacgccttcgaggacctggagaaccctccggcctcggtgcttgccgtcctgcggaaccgctggctgtcanacagcttcaaggagacggccttggccactgcttgctggtcggtcctgaaag

SEQ ID NO: 78 - DNA, 381 bp, Homo sapiens
cacgcgtccggagaacgtgatttctcagccgaatgagtttgaacataccccacaggaagatgacttggggttcaaggaagaagatttggctccagatcatgaagtaggaaatgcctctctcaaacctgaaggcatccagaactgggatgacttatgggtccagagagagggtctaggaaagcctcagcctcgggacagaggcccccggctcctgggtgaaccacgctggggccaggctagtagtgatcgggccgctgtgtgtggtgagtgtggcaaaagcttcaggcagatgtcagatctggtgaaacaccagcggacccacacaggggagaaaccctacaagtgtggggtctgtggcaagggctttggggatagctctgc

SEQ ID NO: 79 - DNA, 479 bp, Homo sapiens
cgcgtccgcaagaagataaccccaaactcttttctcagagagtttgtagcctagtttgggatagataagatccacatatttagtcatataagactacaggagagtagaatagatgcaccagatggtgtcgaatgaaagtggtactttgtagactataagtgctgtaaattctaaaggacaggttacttttgcctggagtggtcaagaaagattttatttaaaataaggatttgacgggcagacttagcagtcaaaagggagaaagcgggtaaaacaaatgtaagccatcataagagtgcatgtggtttggaagcatcagggaaaagactagccaacctgaagtaaaaggttcgtgcaaattgggcaatcaatagcattaagttggaaacagcttggggacagacacataagagggccagagtgtgaataatttcatctaatactttatagcacttggacatttacagagcacttttctc

SEQ ID NO: 80 - DNA, 504 bp, Homo sapiens
  misc_feature 2, 174, 437, 446: n = A,T,C or G
tnctctctgcccccccacattcgtcctcttgattctctgcttctctagctcagccgctgaccttcgtgcctagccgccactagtccttgaccagcgttctggcaactcttgcctccaagttcttccagctccaggctgagccgatggggattcagttttctgacatcacagctnagttcttgatttctgcagcaaaaccttcaaggcttccatcacctcggctctagagtccatcatgctcctctcctatgacctgctagggctgatcaaacgttctgtctcctgccgtgccctgccctgccctgccctgagcttcgcttagcctgttgcaggctttgtgttttccttcttgtgctgttggaccacgcagctccttctacccataaaacccccttctctaggtcggtggaaatcttggtcatccttccgtgtctagntaaactggncacctcctccacgaaagccttctaaaaactccttctcaggggaactggttttctttct

SEQ ID NO: 81 - DNA, 541 bp, Homo sapiens
  misc_feature 29: n = A,T,C or G
cacgcgtccgcaaaatagccccacatccnggcaaaaggggcctttcccttggcccagaagaaaaaggaacaagtggagtgcagaagaaaatctgtactgagagacttgggcctagcttgtcttccagtgagccaaccaaggctggtgctgtcccatccagtccctcgacgccagcaccacccagcgccaaacttgccgaggactcagctctgcagggtgtgccctctctggtggcaggtggaagtccacagactcttcagccggtatccagcagtcacgtggctaaagctcccagtctgaccttcgcttcccccgccagtcctgtctgcgcatcagacagcactctccatgggttagagagcaactctcccctttcaccactgtccgctaattatagctcacctttatgggctgcagagcacctctgccgcagcccagatatcttttcagagcagcggcagagcaaacataggcgctttcagaataccctagtagtcctacataaaatctgggttgctggagatcacttttgaaaaccaag

SEQ ID NO: 82 - DNA, 409 bp, Homo sapiens
acgcgtccgcacccctgtgtccaatgacatgtgcacccaggtcgccaagcggcctgtggacacccaggcctgtaaccagcagctgtgtgtggagtgggccttctccagctggggccagtgcaatgggccttgcatcgggcctcacctagctgtgcaacacagacaagtcttctgccagacacgggatggcatcaccttaccatcagagcagtgcagtgctcttccgaggcctgtgagcacccagaactgctggtcagaggcctgcagtgtacactggagagtcagcctgtggaccctgtgcacagctacctgtggcaactacggcttccagtcccggcgtgtggagtgtgtgcatgcccgcaccaacaaggcagtgcctgagcacctgtgctcctgggggccccggcct

SEQ ID NO: 83 - DNA, 435 bp, Homo sapiens
ccccgcgtccgctcttacgcattactctatgtctactgttatgggtgtgtaattttataccatagatgtttactctttaaacagacacttctagtctgttttatttcatgtgtctgggagcggataaagtgtgaggttcagggagaaagagaggtctgtctcaatgccttggcacggcatgaagacaatctcccctccttgtcccctttccctgctagctcctgatgactgacagattcacagcagaacagaaaggactgggaagggatggaggtgggacatctggcactgaccttcaggggctgaccctgtgggggaacatctgccctgaagagttggagccttcatgtgatgacacagagctgaagtgtgatattcgggaggggatagagagtgcttggaggttttctgattttgaagaatcccaagtcagtc

SEQ ID NO: 84 - DNA, 425 bp, Homo sapiens
gtccggccgcttccggtctccctcccgggccggcgctggcctgactgcggccccggtccgtagcactccgccctccgcttctcccgccctgtagccgcgaagactgcttcagcctttccctgtgctgcccctgccgcgcgatggagacgagctcgagctgcgagagtcttggctcccagccggcggcggctcggccgcccagcgtggactccttgtccagttaatgtgttaagagccattgacatttgaagatcatcagaagtgaagataaaacatctcaaaaattataattgcctccacttctcattcagagaattcagtgcatacaaaatcagcttctgttgtatcatcagattccatttcaacttctgccgacaacttttctcctgatttgaggcccatgcagtccagttcgggagctaagt

SEQ ID NO: 85 - DNA, 514 bp, Homo sapiens
  misc_feature 302, 318, 331, 348, 354, 356, 362, 373, 374, 385, 400, 404,414, 422, 434, 438, 439, 443, 444, 448, 454, 473, 474, 477,481, 494, 503, 504: n = A,T,C or G
ccgcgtccgcgtgaggtgtgggtgttcgtttctcaggtaaaacatggctaaaagcttacggagtaaggtggaaaagaaagatgcgtgctgaaaagagaaaaaagaatgccccaaaggaggccagcaggcttaaaagtattctcaaactagacggtgatgttttaatgaaagatgttcaagagatagcaactgtggtggtacccaaacccaaacattgccaagagaaaatgcaatgtgaggtaaaagatgaaaaagatgacatgaaaatggagactgatattaagagaacaaaaagactcttntagaccagcatggacngtcccaatttggntgaacccaaaggcaaanaaaaangntttganggcaaaccganngaaaaaaaaanggggaaaaccaaccnaaancccttaaaangggccaanggggtttggccnctgnnaatnntttnaacccntttgaaaaccccccctggnnganaccncccgtaaaaaatnttccccccnntttttttttt

SEQ ID NO: 86 - DNA, 423 bp, Homo sapiens
  misc_feature 92, 126, 144, 152, 162, 192, 299, 329, 378, 387, 403: n = A,T,C or G
ccaccgccgtccgaggagggatcaccaagccgtgggccatgaaagtcgggggggggcaccgcaagcttgaaagcttcatcattgacctttcncaagaaattaccggggccaaggccgcttgtttcnaaaacccccatggaaacnaaaacganggggaggcangggagaaccacccccttggacttttttttnatttcttcttggacctaccgaaggagggcacaaattgccgggaagattgcttgcctttccaccttgggacaaggggatcctgggacttttccggcccggggttcccnttcccgttggcccggcaagggattgggtcnaaacaattgacccaagggaagaatccccggggacggtcacaaccggggnaccaaaggnaaagcttttttgggangggaacccttttttttaatt

SEQ ID NO: 87 - DNA, 419 bp, Homo sapiens
  misc_feature 219, 281, 287, 327, 334, 361, 372, 401: n = A,T,C or G
ccgggtccctccctgcggagccgctggtccggctggcggagatgtgaccgcgggcccggccggcctgcctcaggcgtcgcgtcagctcccgtgtccgtgcccttaacccacaccgatggcgggatccggctgcgcctggggcgcggagccgccgcgttttctggaggccttcgggcggctgtggcaggtacagaacccgctgggtagcggctccttccncttcggggtattcgggtttcgcttgttggggaacccttggttggcccccggggcccttaaancagttnttgccgccagaaaccaccggggttgcggcctttgccgccnagtatgntttccgaaaaaaaagggccgggcttgnacaagttgcangggtcacaaaaacatcgtgaattttgatnggagtggttacaatccac

SEQ ID NO: 88 - DNA, 508 bp, Homo sapiens
cgtccgtttaattataacctagattgtctgggcaacggcaggaacggagtgccactgtggagcagataactgcagtggttttctaggagtgcggccaaagtcggcatgtgcgtcaacaaatgaagagaaggcaaaaaatgctaagttaaaacagaagagacgaaagatcaaaacagaaccaaagcagatgcatgaagattactgttttcaatgtggagatggtggagagctggtcatgtgtgacaaaaaagactgtcccaaagcataccacctcctatgccttaacctgactcagccaccatatggaaagtgggagtgtccgtggcatcagtgcgatgagtgcagcagtgcagctgtttccttctgtgaattctgtccacattcattttgtaaagatcatgaaaagggggccctggttccctctgcactggaaggcccgcctctgctgctcggaacatgaccccatggctcctgtgtcaccagaatactggagcaagataaaatgtaa

SEQ ID NO: 89 - DNA, 496 bp, Homo sapiens
  misc_feature 1: n = A,T,C or G
ngtcgccccgcgtccgtaaaatgttaagtcccctaaaagtgaataaattttaaatacctacttttaaaaatactgtcttctaaattgacataattgcttttcttaccaaaagaaggagaggttcccctaattccttttgggccatagatccgcttttaggatctgattaaagatgtggactttcaccgcaggaagatacccatgggcacaccattcaaaatgtatcagatttcaacggttttacaaactcccccgggattaagtcaaatgggtggatattacagctgttttcatcagatatggttatttgttgacaaccatcaggacaacaatgtttatagatggaaggataacttcctggtttttttccacattgaatgtggctagttacatatctcaatttaaaataaattgtggaaagccaaaaaagtatggtcaagctaaccttggggtggcttttacctgatgcctacaagcacagaaaaatagtttttaa

SEQ ID NO: 90 - DNA, 538 bp, Homo sapiens
  misc_feature 98, 99, 109: n = A,T,C or G
ccgcgtccgattatgccaagagaaggtattactttaagatgtgaaaaatgtaaaatggaaaattacattactaagaaaaacaaaaaaacacaaactgnnaaattagaantgaaaaaacattgccacaaatgcaacgcacatacaagtcataaagaaaaaaaataatttaaaatgaatagaaaatatttaagacttaagctttgaagaacacaatttagatgcaataatttcattttctcaacaaacaagattatgagtttctaatcttcaaacaagtgatggaatagtgtttcttgaaaaagaagaaatccatttatttgttgattcaagatatatagaagctgctcaaaaagatgcaaaaaatgtacaagttcatttattgacagcagctaatttaaaagattttgtaagtagtaaaaattacttaaaaattggtgttgaaaaagaatacttaactttagctgattttaaaaaacttcaagcttgatttccaagtgcagaatttgtcaaatcaatgcgcaaaaattaagacttatta

SEQ ID NO: 91 - DNA, 402 bp, Homo sapiens
  misc_feature 42, 88: n = A,T,C or G
ccgttgtcccatatatcttgttccagcagccatatatcttgnggtctacacgcctaaagcatgatttcccttgaagtcttggggttgnttaaaggagagtcccttcaatataaaacctctgaaatattagtgagaatggctcactaatgtgaacaatgtttaaattatttatttatatatagaattactgaatattagtactgggaaaatttatagaaatcatctagtcttacccttcatcttacatataagaaaaatggtcttttcttctaatcacatttacaaaatatgatataaaccttgaccatgaatgtatgagcctaattagagaaacagaaaatcagcatgtcagttttccttcattcaaaataacatagtctttctaagcagtcattctgggag

SEQ ID NO: 92 - DNA, 480 bp, Homo sapiens
accacgcgtccgcaaggcccgccccttacgtactcggagctcggatcccagtgtggacctggactcgaatcccgttgccgactcgcgctctcggcttctgctccggggcttcttccctgcccgcccggggccctgaccgtggcttcttccccggcctgatctgcgcagcccggcgggcgcccagaaggagcaggcggcgcgggggcgcgctgggcgggggaggcgtggccggagctgcggcggcaagcgggctgggactgctcggccgcctcctgcccggcgagcagctcagaccatgtcgcctgaagaatggacgtatctagtggttcttcttatctccatccccatcggcttcctctttaagaaagccggtcctgggctgaagagatggggagcagcccgctgtgggcctggggctcaccctgttcacctgtggcccccacactttgcattctctggtcaccatcctcgggacctggg

SEQ ID NO: 93 - DNA, 285 bp, Homo sapiens
  misc_feature 1, 24, 268, 282: n = A,T,C or G
ncgcgtccgccaagatggcgtccntcatggaagggccgctgagcaaatggactaacgtgatgaagggctggcagtaccgttggttcgtgctggactacaatgcaggactgctctcctactacacgtccaaggacaaaatgatgagaggctctcgcagaggatgtgttagactcagaggagctgtgattggtatagacgatgaggacgacagcaccttcacaataactgttgatcagaaaaccttccatttccaggcccgtgatgctgntgagcgagagaagngga

SEQ ID NO: 94 - DNA, 342 bp, Homo sapiens
  misc_feature 34: n = A,T,C or G
acgcgtccgcggacgcgtgggtgcgggccggccnccctggacgaaagaagagggcccctccaggccagtctgggcaccctgggatagcggctgcagccaggcatggccgactctgcacaggcccagaagctggtgtacctggtcacagggggctgtggcttcctgggagagcacgtggtgcgaatgctgctgcagcgggagccccggctcggggagctgcgggtctttgaccaacacctgggtccctggctggaggagctgaagacagggcctgtgagggtgactgccatccagggggacgtgacccaggcccatgaggtggcagcagctgtggccggagcc

SEQ ID NO: 95 - DNA, 561 bp, Homo sapiens
ccccgcgtccgaggtgacctccttggcccagatcatcttagagccaagaagcaggaccattcgtggttttgaggccctgattgaaagagagtggctgcaggctggtcacccattccagcagcgctgtgcacagtcagcctactgtaacaccaagcagaagtgggaggctcctgtatttcttctcttcttggactgcgtgtggcagatccttcgtcagtttccctgttcttttgagtttaatgagaatttcctcatcatgctctttgagcatgcttatgcctcacagtttggaacatttctgggcaacaatgaaagtgaaagatgtaagttgaagctacagcagaagacgatgtctttgtggtcctgggttaatcagcccagtgagctgagtaaattcaccaatcccctctttgaagccaacaaccttgtcatctggccttcagttgctccgcagagtcttccactgtgggaaggtattttcctacgttggaatagatcctctaagtatttggatgaagcatatgaagaaatggttaacatcattgaatataataaagaatt

SEQ ID NO: 96 - DNA, 540 bp, Homo sapiens
  misc_feature 14, 526: n = A,T,C or G
ccgcgtccggtttncctgttggttaggctggtcttgaactcctgacctcacgatctacccaccttggcctcccaaagtgctgggattacaggcctgagccactgcaccaggcccaccctgtctctattttctaaaataataaatctgattttaatgtggctggatataaatcatatcacagttggatttggaagtttgggttttattcctaactttgatgggaagccattttaagcagaaagatgattttaaaagaccactatattttctgtgtgaagaatgaactgggagatttcatagtattattaacaaaaatagaatagttggggatctggtttggcttgggaaatggaggaagttcaactttgggcatgctccatttgcattgccaagacattgcagcaattggaagtgcagtcagagagcttaggagaaacacttggcagatggacatagagaagtagtactcaaagcttgtggacattgattaaataatcatacaggagtatgggctgacaaaagattncaaagagaaaacct

SEQ ID NO: 97 - DNA, 411 bp, Homo sapiens
  misc_feature 4, 383: n = A,T,C or G
gtcnccacgcgtccgggactctcggccctggagaaggaggtggactttgactccgaccccatggaggagtgcctgcggatcttcaacgagtccaccagcgtcaagacggaggacagaggccggctggcccggcagccccccaaggaaaagagtgaggagaaggggctttcgggtctgaccactctgttccccgggcagaagaggaggatctcccacctttccaagcaaggccaggaggtggagcccccgaggaggggtcccgcggtgcccccggcccggcccccgacggcgcaggaggtgtgctacctgcgggcccagcaggcgcagagggcatcggcgagcttgctgcaggcccccgccaggctggcagagaagtcgccctncgtccacatttcccgcccctggcgagaa

SEQ ID NO: 98 - DNA, 485 bp, Homo sapiens
  misc_feature 5, 413, 478: n = A,T,C or G
cgccncgcgtccggcaaagcaaaagggaaattatttggtggatggtagctcaaaattggaactcttgttctaattcagttacattggctttaccctccttagatttttcatcaaagggctgtcccattgcaatcttactaaaacattttgttaaaataaactcttttcctttttatattaataattaggcttttaaataaagatgttattcctttaaaatggtgggcttaccatcattgaagatgtcactcaggtggccttgcttgatcaaaacgccttttttaaaaaccaagctttaaaaacatgtttataatttcatgaagtacatatatattgttcccatagtcttcagctttaaaactataaatatgcccaaattttgttatttgccctactttaagtaggtttattgngtttgtttttttcaagtacttgtttttctctgataagactcaggaattctgaaatgtgaaaatgnctcaatt

SEQ ID NO: 99 - DNA, 253 bp, Homo sapiens
  misc_feature 2, 27, 73, 75, 82, 86, 90, 97, 111, 114, 115, 122, 126, 160,197: n = A,T,C or G
cncgcgtccgaaatcgttgctaccaantattcaaaaccctttgagtttacatactagttaccttaaaaattantncctgacnctcntgantttgggnggaaagcccttgtntcnnctctctnatgnactctcatgggtttttttgtatgatttgaatatnaatgtgcctaaagaatttttgctctcttaatctatgnatacatacttgaacaaatcattcttgcttaactgctgatcttttgtaaaactattg

SEQ ID NO: 100 - DNA, 494 bp, Homo sapiens
gccccgcgtccggctggaagcaacagtttggcagcctggggtacactcaggttattcgttacaactattattatttgatgtctttttttaaactcaggtcatccacttttgactgtcatccatggaagagctcttattaaaagcctcagactttcgggacctatgattctttggcacaaccttttggaaaattcttaagcagggatgaagcaaacttgattggagttggggaaaaagaagacagattagtatttttcatgctgacaaaaaatagctgctatgacttttcccgcaacgtggacaggggccaagtgaagctgaactggtcatggtctgtcgcccagtgttcccttgtcgtcggcgattttgcccccgacccttcttggtgggcttagtggtggcaatctgtctcttctaccagactctgaccctccgagggtcgaggaagctcacagccgctgcccctggggctgtcccacacacatccactgaaa

SEQ ID NO: 101 - DNA, 434 bp, Homo sapiens
  misc_feature 325, 381: n = A,T,C or G
ccacgcgtccgggcgtctcggctcttctgtatctccctggcctggtcgctctcggcttctgggcctcgcccttcctgtctgtgaaatggactctgggtgaatccaaatgggatcgtctcgggctacgtcctgtccctccgggactacaagtcccaaggtgctcgaggcgaccttggctccccctccccaccgggacccgcctccctccagcccaagtcacgtcgtctaacctgttcccagctcctgccccgccccgttctccgctccccaagccggagcccgagctggaggaagcccccaggtgccaggatctgctcggatccgngcccgctccggccggcaccatggacagtgaggcattccagagcgcgcgggactttntggacatgaactttcagtcgctggccatgaaacacatggatctgaagcagatg

SEQ ID NO: 102 - DNA, 481 bp, Homo sapiens
  misc_feature 462, 466: n = A,T,C or G
ccacgcgtccggtccggggtggaatcacgtcgctgcggctgccgacgacccacacccggccggccgcctccgcagacccaccttggccgcgcggcagggggcgcgcagagccccgagggagcgagtccccgcgcgtggcagctcggcggcttctcccttcgggaggtccggctcccggctctccggacccgcctggcgtcctcgcctgcggcggggcggacgacagcggcgcccaggaatggcttcggcgggcagcggcatggaggaggtgcgcgtgtcggtgctgacccccttgaagctggtcgggctggtgtgcatcttcctggcgctgtgtctggacctgggggcggtgctgagcccggcctgggtcacagctgaccaccagtactaccttgtcgttgtggggagtcctgccggaaacccgccagcttggacatctggcactgtcgagtccacgctcancaancgattggcagattgc

SEQ ID NO: 103 - DNA, 456 bp, Homo sapiens
  misc_feature 1, 188, 376: n = A,T,C or G
ncgcgtccgagaaattgcaattttttaatttttaattttaagaggaattcgtgccagagagaactattaagaaaggggtatatccagtctaaggattattaggctcaagtccatgaataggctctgggaagtttgtaaacacttggaaattatttgcaaaatgtgtgtgtgaatgtgctttaccttanagagttcatgaatttcattagattgttgaaagagttttagtattaacaaaggaaaaacaaaccaccaccatcacataacaaaaccacaacagtgatttaatcttttcacctaacaataagtaaattgaggctctgatggctaaattaatagcctgaggctacacagtcagtggcagagcccagggtanagagagaaccagcacaagccattgtgggagccgagggtaaagagagagctaggtgttgtaccttagtaaataaatcagaa

SEQ ID NO: 104 - DNA, 483 bp, Homo sapiens
  misc_feature 2, 44: n = A,T,C or G
gngtcgccccgcgtccggaaggtggagaccgcttaccctgatcngggatgtatcggctgcgggtgcgcaaggcagtccaggagtgacctggggctgtggagagcgacccgtggccttgtgtttcagagtttaccacctaggatgacttcagtgactagatcagagatcatagatgaaaaaggaccagtgatgtctaagactcatgatcatcaattggaatcaagtctcagtcctgtggaagtgtttgctaaaacatctgcctccctggagatgaatcaaggcgtttcagaggaaagaattcaccttggctctagccctaaaaaagggggaaattgtgatctcagccaccaggaaagacttcagtccgaagtcccttcatttgtctcctcaagaacaatctgccagttatcaagacaggaggcaatcctggcggcgagcaagtatgaaagaaacgaaccggcggaagtcgctgcatcccattca

SEQ ID NO: 105 - DNA, 525 bp, Homo sapiens
  misc_feature 154, 507, 512: n = A,T,C or G
cgtccgcgcagcgcttgaatcccgtggcctaaccgtccctcggaagaccggtcccgctcgggaggctctgcagtcgcgcctggggtcagggccgggggcgaatgtggctcgcgttctaggcctccctgggttggaaaaagactatgttagcaangtgtcacgccatgcttttgccaactttccaattaaaggttgacattcctgcataagcatttctctgtgaaaatgtccttgcctcttacagaggagcagaggaaaaagattgaagagaatcgacaaaaggctctggcccgcagagctgagaagttattggcagaacagcatcagaggactagctcgggcacctccattgctggcaacccattccaggccaagcaaggcccatcccaaaatttcccaaggggagtcttgtaaggccaagtgagccattggtgtcattttcaagcaacagaatctcagtagctcatctaatgctgaccaaagacctcatgattccacagttttcangcaangggaatatggaaa

SEQ ID NO: 106 - DNA, 441 bp, Homo sapiens
ccggccctatccctatattgtttgcttgtttgggataacctaaaattttttatccagtttactactaatttgttttacctgatgtatcttctctttcaataattttatgttaccttctgtttagaataatatttgccacagatatttaggtttaattctgtgtttgaatgattccaatgcctttctctacccactttgaacacttcatcctggaatggttggctgatgtatgtctctaaacaattttttttttaggagaaggtatgtgggtaatgtaattcctaaacctttgcttttctgaaaaatctttcatttgcctttatacatgaccagatttactgggtatatagatttgttgatgaaaaaaggtaaaaagagcaacttttgacatccagaggtttgtctggcactcacagctagccccgtgttattctccctatt

SEQ ID NO: 107 - DNA, 478 bp, Homo sapiens
  misc_feature 11, 45, 103, 140, 175, 406, 438, 451: n = A,T,C or G
gcgtccgtctnaaccctaaagctaaaaagtcattgtgaacctttnggtctgatgctaaagaagggaaaacaggtacaggaaatcccatgtggatgcttgcttncaggatttcctgccatgattccagaatcccacagctncaacatgattgcaaaaagactccctgctcattttncctcagcatgcacagcgctgtcctgtctcagttgcaactcgacagagccgcatttactccagaacccaatccacacacctgctcatcctgccccgagaggagtgcctgaagccaatagcagggaactagagcagacttgggtggatcttcattggatattaggtatcttgccctagataggcaagcagtggccttacagatgctgacagatgatctgattagatgcacagntgctgggtggcgtctggggccagtctattggncagttctgggagngggaactatttgggctctgcaaagatg

SEQ ID NO: 108 - DNA, 417 bp, Homo sapiens
  misc_feature 387, 391: n = A,T,C or G
cgtccgctccctggccctgctccgggagctgtcgttgtctccgccagcagccctgtggctgcaggagcgccaggcccagcttcgccactcgctgcccctgcagagcttcctgctgaaacctgtccagcgcattctcaagtaccatctgctgctgcaggaactagggaagcactgggcggagggcccaggcactgggggtcgcgagatggtggaggaagctattgtgtccatgacagcggttgcctggtacatcaacgacatgaagcgcaagcaggagcatgcagcgcgcctccaggaagtgcagcggcggctgggtggctggaccggaccagagctcagtgcttttggggaactggtgttggagggccgcgttccgaggaggcggangggngggttggcccccggctacaagggggt

SEQ ID NO: 109 - DNA, 307 bp, Homo sapiens
agaattgtgtatgccttgcctatcacggtacagcacgaagccaggctcctttctccaccaaagaagatggaaccagactggaattctgtctccagagagaaacccagctgtttgggtcaaagacagatgcttcagacttgggtgggaaggtgaaagatggctatttagaaagctggtggcacgttttacataagggaatgtcagatgggagatgctagttgccattttaacaaagcaggtaaatcggtaaattttaaactctgtccatgttctgttagaactcagggacaagggatccatgaaaaag

SEQ ID NO: 110 - DNA, 286 bp, Homo sapiens
  misc_feature 25, 60, 77, 103, 148, 182, 191, 197: n = A,T,C or G
acgcgtccgcacggagagaactggncctggagcgggggcgcggggaggggggcgtcgtcntgggtacaattgcgcangggcaaaggtcgagaggtcgcgctgncgccgttttatttgaagacatcgtccagttctgaccatggactcncagccatcggcccttagtttccattccctctagngggccttcngagggntctactgacgtacctccttcccttggtaccggaccggggaagtgttttcgggcgcgggaggttccgcatgcccaggcctggccagggga

SEQ ID NO: 111 - DNA, 346 bp, Homo sapiens
  misc_feature 75: n = A,T,C or G
cgggcccttagtccaagccttgatcggcgactaagtgacggcagtgactgccgccatgccgagctggacggaagncacttctgagaagggcggaagtgtctcgggctccttagagggaggacaccatattagtgccagtggggaagtcaccgggtggaattacttctttgtggagtttgtgctgtagcgacaatgaaaaacgaagagtcaacttttataaaacaaaataaaaattaagtcaaatcatgccaacctttattagatcggctagcagggttaaacttaattcaaagcccctgatgaatcgggccttcattgcacccccaaaggctccgccaccctgatt

SEQ ID NO: 112 - DNA, 343 bp, Homo sapiens
  misc_feature 88, 108, 138: n = A,T,C or G
cgcgtccgggcgccggtacgcctggtccccgcgtggagtctttactcaaaacagctcccgcctcaggccgagatgaggagcccttcanaatagctgctgtctctgggnggacccgggcgtccttggcagcccagctgntctggacaaagccctgccagtcaggcctccgctggcaggaaccatggcagaggctggggatgctgcgctatcggtggccgagtggctgcgggcattgcacctggagcagtacacggggctctttgagcagcatggcctggtgtgggccactgagtgccaaggcctcagcgacacccgcctgatggacatgggcatgctactccct

SEQ ID NO: 113 - DNA, 437 bp, Homo sapiens
  misc_feature 23, 58, 136, 208, 240, 264, 288, 296, 368: n = A,T,C or G
tgtcgaccccgcgtccgcgggangttcatggaaacgcaggacacgacagaattgtgtntgccttgcctatcacggtacagcacgaagccaggctcctttctccaccaaagaagatggaaccagactggaattctgnctccagagagaaacccagctgtttgggtcaaagacagatgcttcagacttgggtgggaaggtgaaagatggntatttagaaagctggtggcacgttttacatangggaatgtcagatgggagatgctngttgccattttaacaaagcaggtnaatcggtnaattttaaactctgtccatgttctgttagaactcatggacaaggatccatgaaaaagacctgtgatgtttcntctggcgctttactggcctgggcacacctaccaatcttttaggatttgactggttccattacatttcct

SEQ ID NO: 114 - DNA, 457 bp, Homo sapiens
gtcgaccccgcgtccgtatcactgtaatttaaggaaagaaaacttcagttctgcctctggataccaagatgcccattgctcagttcagacaactgatattaaaataaagctatgctccttacttacttcttttattataaacaaattcctttgctttggctgatactagctgagtcattgatcatcattggtaccatgatattgtaatctatgctgctatttggcacaagactgaagttcacactacagtagagaatactataagataatttgcaataaatactgataataataataccagatattttaactaactttttctacctttattaatagcaatcagcacacttgaatgtgtaaatttcacagtaactttaggcagaacttaagctccaggccacatttgtataagaacaccaagtattcaaggcataaagtctgttgtaagccaaaaaaa

SEQ ID NO: 115 - DNA, 419 bp, Homo sapiens
  misc_feature 50, 395: n = A,T,C or G
agttcagtctgcagcagtccctgcacccacttcccagttgctttcatctntggaaaaagatgagccccgtaaaagttttggcatcaaggtccagaatcttccagtacgctctacagatacaagccttaaagatggccttttccatgaatttaagaaatttggaaaagtaacttcagtgcagatacatggaacttcagaagagaggtatggtctggtattctttcggcagcaagaggaccaagaaaaagccttgactgcatcaaaaggaaaacttttctttggcatgcagattgaagtaacagcatggataggtccagaaacaggaaagtgaaaatgaatttcgccccttggatgaaaggatagatgaatttcaccccaaagcaacaagaactctntttattggcaaccttgaaaaaacc

SEQ ID NO: 116 - DNA, 444 bp, Homo sapiens
cccgcgtccgcaccaggcccgagtcttcccttcatggagggtgacgtgagcagcaaggataagatgggcaaaggagtggatgggacatataaaaaagctcttcaggaagctgcagcaaggtttgaggaattaaaggcccaaaaagagctaagacagctgcaggaagaccgaaagaatgacaagaagccaccaccttataaacatataaagggtctccctctgtgacccaggctagagtgcattgctgcaattttggctcactgcaacctccgcttcgtgggcgcaagtgattctcctgcctcctgcctcagtctcctaagtagctgggattacagacatgagccaccaacgcctggctaattttgtgattggcaaaaaagagattttgtgacacataaagatgatatgaaattcaactttcaatcaagtatccagaaaatttta

SEQ ID NO: 117 - DNA, 387 bp, Homo sapiens
  misc_feature 27, 32: n = A,T,C or G
ccacgcgtccggcccttgcccctgtcncacangaatggacccacggccccacccagcgccgtcagcgcccggcactgccacccgggtccgggccgctgcctgcacgtgggatccgtcgggcagccggggacagaagagaccccgccgttgggacgcagggcagagccggccacctagtcccttccagccagcagaggcgagggaaggcgtcactgccccggcggggagacgggcaggacgccctgccccgcaccagcagcctccgccggggcgccctcagctccctgcttggctctgtctctccacacccggcagggcccgcgggctgccccagcctgggggggtcgtgggcagctgctactcagtgccaaccccgtggggcacaga

SEQ ID NO: 118 - DNA, 466 bp, Homo sapiens
  misc_feature 1, 293, 299, 308, 337, 364, 380, 448: n = A,T,C or G
nagggagtcgaccacgcgtccggtgcggagcaagcatcacaccatggcgtatgagtgttcctctgtgtagactcaacctgcgcctcgccgtcccccattcgcacacccgatgcccgggggtcgctacggacttaaaatctccgcaccgcaccctccacctcagaaacgttcctggatccgaacactgccccctgacgacctagagagatcccggctcccagcccactgagtggcttcagcctcgctggtaggtctctcctccaaagctctggaaacagactcctgggagtganggtagngggggagcngcaggcaccgccccctttccccaagtccnccgcccacttcatccctcaggcacctnccaactcctggccttntctgcacgaggcgcctgccccgggccccgcctacaggggacccagctcttcttgcagccattggaagntgatcacctgggaggtga

SEQ ID NO: 119 - DNA, 556 bp, Homo sapiens
  misc_feature 390, 419, 430, 437, 446, 469, 497, 504, 540: n = A,T,C or G
cacgcgtccggttttactgctctttgccatgtggtaaaaagaggctgagacatatttaagaattccaagaggatattatgtgtcagaatttcagacactgatgagaagtttttaattgttcttttttatttgattttggaattcaggtgcactctattcaagtgcaaggatatcagaagtttttttttatttaaaaaatttttttttcgagatggagtttcactctgttgcccaggctggagtgcaatggcagcttactgcaacctccacctcctggttcaagcgattctcctgcctcagcctccccaagtagctggggattacaggcaccgcgccaacacacctgggcttattctaatttaagtaagaaaatgggaagtcttacccatntttggtcaaggcttgggtcttcgaacctnctgaccttaanggtgatnccaccccanctttggcctcccaagccgtgctngggattatagggcatgaagcccacccangcccggncccaggatttttatatttaagcccttcttgctcttnaaaaaaaaaaaaaggt

SEQ ID NO: 120 - DNA, 443 bp, Homo sapiens
  misc_feature 1, 8, 388, 411, 416, 431: n = A,T,C or G
ngtcgccncgcgtccgggaacctaccggtaccggccgcgcgctggtaagtcgccggtgtggctgcacctcaccaatcccgtgcgccgcggctgggccgtcggagagtgcgtgtgcttctctcctgcacgcggtgcttgggctcggccaggcggggtccgccgccagggtttgaggatgggggagtagctacaggaagcgaccccgcgatggcaaggtatatttttgtggaatgaaaaggaagtattagaaatgagctgaagaccattcacagattaatatttttggggacagatttgtgatgcttgattcacccttgaagtaatgtagacagaagttctcaaatttgcatattacatcaactggaaccagccagtgaatcttaaatgntcacttaaatcagaactttgccnttaanaaagaaaattggggngtcctgggttta

SEQ ID NO: 121 - DNA, 537 bp, Homo sapiens
  misc_feature 3, 369: n = A,T,C or G
ccnccccgcgtccgatcaattcctggaatttatggttataacttcgaaacagaagatggactaattttatttttatctaattttattgttggaaatttaggaatttacggaaatactaatttaaattatttaaaaagatcattagaatcaagtaaaccaattttgatggctatgattgactcaacaagagctaattatccaggtaaaacaatagataaaatttttgctaaaaagtttttagaaaaaacatttttaacaacaaaatccacttcaagaataattgtcggagcatacgatgaagagatgctttcaattcaagaaatccttgatttagcttacaaatcaaacgtaaaggttgctgtatatggnagaaattatgacaatcttttagaaatgaatcaacgattagcacaaaaacaaaatcttgaaatacattatccagaattttttgatttcaggcaagctaataaaatcgataattttgtaatcttaattacatcaacacctggagcgaatttaccaaagattttttagaat

SEQ ID NO: 122 - DNA, 373 bp, Homo sapiens
cgcgtccgcgaaactgagaaccagttctcccgaagccgcgggtctccggccggcggcggcggcggcggcgcaggtgagcagggcagggggcagccgagggagcgcggggagcgggggccggggggccacgtacgaggggctgcaggcccagccggggcgggactcgccaatcctgcgtccccagctcaggacgcggacgctgatccgaagcccctggccccggctgggtcagcactgggagagcaggcccaggtccgcagcccgggtgtggggccctccccaaatccagggaaaggatcgtggagcggggtggggactgaaagccatttcctttcccgtgaagaatttttatcagtgcaagtaacaaaatatt

SEQ ID NO: 123 - DNA, 388 bp, Homo sapiens
  misc_feature 11, 155, 262, 288, 333, 359, 381: n = A,T,C or G
cgcgtccgctnaaaaaaataataccaaaaaaagtttttgtaaagacaacgctctcgctgtgttgccccgccactgtggcctccttagcttcttccctggggcctgctggacctttccatactccagaaactaaagggggtccaggaccctgcttnaaccctaggatcccgcatctttttttttttttttttggacgcagggtcttgctgtgtccctcaggctggagtgcagtgattcactgcagcctcaaactcgtgggctnaagtgatttctttagcctcagccttntaagtagctggggactacagtcatacaccaacatgcccagctaantttcctttttttaattcttgtagagnatgtttgagacggcttgggctntgttgcc

SEQ ID NO: 124 - DNA, 471 bp, Homo sapiens
  misc_feature 3, 147, 270, 309, 374, 454, 458: n = A,T,C or G
ccncgcgtccgtgctgataaaactcctttgacctgacgattgctctaagtcctaattgccatatttatattcccatagtaagagtgtttggagatagtgtttgagcttttttgctggtgttaaaaatgcataatgaaagatggcacnagagaggcatattatatccaattcatgaagttgtttgtgttaacagaaagcttattttaatcacttaacattgttgatttgtctaatcacagtagcgctattgattaggagcctgacctttanatggttgacttgtgagtgtattcaatatggtgaaataanggtgtttgatatatggctgcagattttagaaggtgtcattagcaaaggtatacggaataaaatangggttatagtattccttactcaaattctgtatgtgctagagctggctggagtctgttggcatgctcatttggtgtaaggnccgntaaggactatgct

SEQ ID NO: 125 - DNA, 484 bp, Homo sapiens
gccccgcgtccgcactttgtattgataacttaaaatggcatcagtttatcttagacatcagcttgctttttatctccttttttagtgagtgaaatagagcaactagcatgcctgtgttcccagctacttgggaggctaaggtgggaagatcaattgaacctaggaggttgaggctatagtgagctgtgattgcacgactgcactccagcctgggcaatggagtgagactcctgtctctaaaacagcaacaacaaaaataaagcaaccatagtgcataagggaaattaaatgttccctatagaaatatgtgtatgtctgtgataagtggtatgcaaatgctaattattttataaaataaaagttcagaactattcttatcattgccacttgaacaattaaagggtttgctttatttcctaatgtttaataggaaccctttgcttcaaacagcctttgttgaaatcatgtaaaaatttgttaatag

SEQ ID NO: 126 - DNA, 482 bp, Homo sapiens
  misc_feature 2, 440: n = A,T,C or G
cnccacgcgtccggcggcccagccgccgcctcccgttctcccctccgcagcggcggcggtggcggagaaggaactcgacacgcaccgaccgccctcccgccccagccgaagcggaagctgtagcccgctctgggccggggccatgggcgccccgcgccgcccgggtcatgaggacggaggcggaggcagcggggccgccgctcgagcccggggactttgtgcaactgcctgtgcccgtcatccagcagctctaccactgggactgtggcctggcctgctccaggatggtgctgcggtacctgggccagctggacgacagtgagtttgagagagccctgcagaagctgcagctgaccaggagcatctggaccatcgacctggcctacctgatgcaccacttttggcgtgaggcaccgcttctgtcccagacctggggtgtngacaagggctacaagaaccagtccttctacaggaagcacttt

SEQ ID NO: 127 - DNA, 361 bp, Homo sapiens
  misc_feature 2, 31, 94, 95, 100, 102, 117, 236, 337: n = A,T,C or G
cncgcgtccgcggtcgcgtgggcggacgcgngggttcgtcctggacaagtctgggagtgtggcaaataactggattgaaatttataatttcggnnagcancngggcggagagattcngtgagccctgaaatgagattatctttcattgtgttttcttctcaagcaactattattttgccattaactggagacagaggcaaaatcagtcaaggcttggaggatttaaaacgtgttantccagtaggagagacatatatccatgaaggactaaagctagcgaatgaacaaattcagaaagcaggaggcttgaaaacctccagtatcataattgctctgncagattggcaagtttggacggtct

SEQ ID NO: 128 - DNA, 447 bp, Homo sapiens
  misc_feature 10: n = A,T,C or G
ggagtcaccncgcgtccgccccgcgtccgccccgcgtccggttaatcttaggcctgaggtttggggccgggtgacaaggaagttaaactcgtcctccctgccagattctaccccctttcggagctgagctccagccaaacctgtggagttttctttgaccattttaggacatgttactgcttctgagttggctgccccagctgctcaaacaagacctttctcctgggttcctagtagtgaaaaggagcagcagagcaactgaggaggagggcgggtgggaggcatgggactggggcttggggaggtcaggcgagaccggggtgagagctcagagaagctcctgtgacttccatgctaagatcttgccagagaactctggtcagtcctcgggtgtctggatgaagtaaaggagttaggcatttcttcctttgattctctggcttacct

SEQ ID NO: 129 - DNA, 337 bp, Homo sapiens
cgtccggcccgctccgggcgtgggcgtgttctcggcgggcgtgcctggaggaggagctgggtccttgtgcggctgcagagtcagatggggcggggatttcggggcaccgggtcctcaccttcacgagaaaggccccacagcacgtccccactacccgacgactcactcttcgtggcttctctctcctccccaagagcaggggtgggcctgtctcgcgttcccctgcgggagtcaggaagcgtccttcctacctaccagtcctcccctctggtgtctggggacacttcctgggggcctttcaggtggttggcgccggtgcagggcctgagagcctggg

SEQ ID NO: 130 - DNA, 542 bp, Homo sapiens
  misc_feature 338, 380, 464: n = A,T,C or G
gcgtccggtggcatcatgacttctggggcagtagactgagcagcaacaccagccacaagtcctaccggcctctcaccgtcctgactttcaggattaactactacctctcgggaggcttccaccccgtgggctttcacgtggtcaacatcctcctgcacagtggcatctctgtcctcatggtggacgtcttctcggttctgtttggcggcctgcagtacaccagtaaaggccggaggctgcacctcgcccccagggcgtccctgctggccgcgctgctgtttgctgtccatcctgtgcacaccgagtgtgttgctggtgttgtcggccgtgcagacctnctgtgtgccctgttcttcttgttatctttccttggctactgnaaagcatttagagaaagtaacaaggagggagcgcattcttccaccttcttgggtgctgctgagtatctttctgggagcagtggncatgcttgtgcaaaagagcaagggatcacttgtgctgggtttaaaatgccggaatttgacaatctttgggtgataggc

SEQ ID NO: 131 - DNA, 308 bp, Homo sapiens
gtccgctgggggccctggggctctctgcgtcgagagcgctcgaagacccgggattcctggcccgatcgcgggcggggggagaccccagctccaccccagctcccgccggctcggggaaggggcggcccctttaagagcgcgcggccccgcccgccccctccgggcaggatccgaattccagggaggcggggcggagacggcggcgaggaggaggccgcggcgcgggacgcatagagctgcggctcgggcggcgcctcctgcggcggcccggcccggctccggcccccgctggggcaatgctccccggg

SEQ ID NO: 132 - DNA, 538 bp, Homo sapiens
  misc_feature 6, 381, 482, 508, 531: n = A,T,C or G
tcgccncgcgtccgggcacacacatgccaggctattttaagaactactacaactatgataaagctgtgaatatgtagccatgaaccaaaacaaagtctctgtccttgtggaacatttgttctgtcagagaagacagtgtgttggctcacattgtggtcagtgctgttgagcaaaataggtcagagtaagggggatggagactggtgggaggaatgctgctttatccaggatgggcagggaggactcgatggtgtcagcactgaaggatgtaagatctgctgctctggggagaggagcagcatggaaggagtagagtgcagaggccatgaggaaggatcaggcttgactcctttgagcaagggggatgggaagagtgacggnagaaagagggacaggccacatggcctggtggcctgtgctgaggccttgggcttttcttcaagtgagatgagatgccattggccagtttgggcagtgatttnatcagacttggttcagcaggaccatnctgcttggcaatgtggagagcangctgaag

SEQ ID NO: 133 - DNA, 532 bp, Homo sapiens
  misc_feature 5: n = A,T,C or G
cgccncgcgtccgaacaggccgggcaccaaggcgcaggatttctataattggcctgatgaatcctttgatgaaatggacagtacactagctgttcaacagtatattcaacagaacataagagcagattgctccaatattgacaaaattcttgaaccacctgaaggccaagatgaaggtgtgtggaagtatgaacatttaaggcagttctgccttgagctaaatggacttgctgtcaaacttcagagtgaatgccatccagatacttgcactcaaatgacagcaactgaacaatggatttttctttgtgcagctcataaaactccaaaagagtgtcctgctatagactatactagacacacacttgatggtgctgcatgtcttctgaatagcaataaatattttcccagcagggttagcataaaggaatcatctgtagcgaactaggatcagtatgccgtaggatttacagaatatttttcacatgcttattttcatcatcggcagatatttggatgaatatgaaaatgaaac

SEQ ID NO: 134 - DNA, 422 bp, Homo sapiens
gcgtccgcgaaagctgggaagccaggtctacctgccccagacgaattggtgtaccaggtgccacagagcacacaagaagtatcaggagcaggaagggatggggaatgtgatgtttttaaagaaatcctttgaagatgatgctgctttttacaaagcatcgttttaaagcacatggcctttttttttttaattattagtggtagtaatatatagaatgtattacataactgtcactgaagtggttggggaaaatgtggtgactgaggtacaggaaactactaatcttgccatcttgctttaaggtgttatggtggcacagttactgctcgcctgttaaatttcaaatgtcctgtttgatactactggagaacactatttttaatacagaaaaagctccctataatgcacttcagagaaattaa

SEQ ID NO: 135 - DNA, 603 bp, Homo sapiens
  misc_feature 570: n = A,T,C or G
tcgacccacgcgtccgggagtcccccctgccccccatcaaatgcttcctgcaatactttgcacaccagagactgggcctccccagatccagggggacaggggtccctgggggagtccccagggccagcccctccaggccagctgcacacacttgacactgatttgcacagtcttgcacaaatagggggtaagagcccagtggctggggtgggcaatgggggtagcctctggcctagggagtcccctggcactgccaatgggcacagtcccgagcacacaccccctggccctggacccccaggcccctgccccaccaagcgaaggctgcttcctgctggagaagccccagatgtcagctctgaggaagaggggccagcccctcggaggcgccggggatccctgggccaccctactgctgccaacagttctgatgccaaagccacacccttctggagccacctgctgcctgggcccaaagagcctgttttggacccaacagactgcggtcccatggggcggaggctgaaaggagcccgtcgcctgaaagcttgagcccccttcgaaagcctncggaaggggccaggcctgctgagcccccccagt

SEQ ID NO: 136 - DNA, 426 bp, Homo sapiens
cgaccccgcgtccgtgagaattcagctttggagtcccgggtgaggggttttagataaacccatcaatatcacccacattctgtgactctttgcatcactcgtgttatttatttatttatttatattctgccttgttccagaaaagtgtttaaggcaacaacgcttgttttttggtgttttcttttgacatttgaaaatttagtacattgttaaaatgtacttgttaaacaggtaattttaaagagaaggaacaattgtttttagtaagttttctttttcctttttcaatgaattgattcttcaaattaaaagttcttgagagaaggagaggaagatacagcagacataggactgagccaaggaagagtctgcctgagagagacgcttggcctgtgctttgctgccatccgtgcggccttggccaca

SEQ ID NO: 137 - DNA, 413 bp, Homo sapiens
tccgatttttaaatctattggccgtgttgtcctacctgaagttcttcaactgccaaaagcacagccctttttctctgagctggtggttctggctaacactgacaggggtcgcttgttcctgtgcagtgggcatcaagtacatgggtgtgttcacgtacgtgctcgtgctgggtgttgcagctgtccatgcctggcacctgcttggagaccagactttgtccaatgtaggtgctgatgtccagtgctgcatgaggccggcctgtatggggcagatgcggatgtcacagggggtctgtgtgttctgtcacttgctcgcccgagcagtggctttgctggtcatcccggtcgtcctgtacttactgttcttctacgtccacttgattctagtcttccgctctgggccccacgaccaa

SEQ ID NO: 138 - DNA, 454 bp, Homo sapiens
  misc_feature 6, 449: n = A,T,C or G
cgaccncgcgtccggaaggaccctctgagctattttgcggcatacgggagcagcagctcaggctcctcggacgaggaggataacatcgagccggaggagacgagtcgcagaaccccggatccggcgaagtcggcgggcggctgtaggaacaaggcggagaagcggctcccgggacctgacgagctgtttaggagcgtgactcgcccggcctttctctacaatccgctcaacaaacagatagactgggagaggcacgtcgtcaaggcgcctgaggagcctccaaaggaattcaaaatatggaagtcaaattatgtaccacctcctgagacctacaccactgagaagaagcctccgcctccagagctttgacatggcaataaaatggtctaacatatattgaggacaatggtgatgatgctccacagaatgctaaagaaagctaaggcttntacca

SEQ ID NO: 139 - DNA, 153 bp, Homo sapiens
cgaccacgcgtccgggctggcgagcccggctgaggagcctcttgggtcgcacttaccgccgcgtccgctcccggtccctggcccctcagcggcatggcgtgcggggcgacgctgaagcggcccatggagttcgaggcggcgctgctgagcccc

SEQ ID NO: 140 - DNA, 430 bp, Homo sapiens
cgtgtccggtgaatgggagcggaactcacaggacacaatgagccgggtcactgatggccttgctttctaagaatctcacagtgagccctagaactctctacgtggtaacactgtgtgcctttttcagagaagagcctatcttagatcttagcctaacgttgggtctattgtgttgctggagagaccagcactgacattcatctcaaagcacatggtatgtttgactcctatgttgactcaactacccatcttgtactgggacactcgctttttttttttttttttgagacggagtcttgctctgtcaccgggctggagtgcagtggcacgatctcggctcgcggcagcctccgcctcccgggttcaagtgattcttctgcctcagcctcctgagcatgtggagctcaggctgaaggtgatgtggccgccc

SEQ ID NO: 141 - DNA, 562 bp, Homo sapiens
gtccgattgattcttctatgatgcgtgttcattatacaatacacattctcggaaaggcagaattatttgcttttatgattgttttttgtgacctaagaaacggttcttcccccattttcctatcccaggccaaaaaatattctctcacgtttttctgtaagagctttataagttcagcttttatattgaggtctgtgattcatcttggattattatgtgtaggttgtaaaataggaatctaggtccagtttttccatgtggatattcagttattgtggggccaattgttgaaaagtctccccaaagaactgctttcttatcagaaagataagatatattaaaagtgtatatctaagtctgggttctcttttctgttctaatggttgatatttttatccttatgccagaaccacactgtcatgattgctgtagctttataatagtcttgaatcaagttgcttttcagttttgtatttttcaaaattgctttcggtattctaagtcctttgcatttctgctaaaatttagaagcagcatgtctaccaaaaggaaaaaaaaagcc

SEQ ID NO: 142 - DNA, 511 bp, Homo sapiens
tccggcggaagaaggtgcgtccgcggctgatcgcggagctggcccgccgcgtgcgcgccctgcgggagcaactgaacaggccgcgcgactcccagctctacgcggtggactacgagaccttgacgcggccgttctctggacgccggctgccggtccgggcctgggccgacgtgcgccgcgagagccgcctcttgcagctgctcggccgcctcccgctcttcggcctgggccgcctggtcacgcgcaagtcctggctgtggcagcacgacgagccgtgctactggcgcctcacgcgggtgcggcccgactacacggcgcaggtgcgtgcaccccgtccgcaccccgcccctgcagccgcctggtctccccgcctcccctcctccctgcaggtttgcgtggctgaggctcccacctcctgacctcgggggccgagagctttgcgagctgaccccgcttcttctggctttgcagaacttggaccacgggaaggcctggggcatcctgaccttca

SEQ ID NO: 143 - DNA, 489 bp, Homo sapiens
  misc_feature 468: n = A,T,C or G
cccgcgtccgagatcctgtaggtgaagttctcctgtgctccacagccacccagaggaattccaaaaccagcagtggaggacttggggaggacaggagggaaaacatggcgagttcatcagctctgtttcctttattaaaatatttctgtaattggtggtgggaaattgaagaaatcaagtgattgcatcagcgctggaaaaagctgccagcacttggcagtggaagagaatatatgctttatactggactttttgaaaaagaggctgagtttggccagattgccgaccagcaatggaaaaactaattaggtgccttgcctgtgagccagacgcccagcagggctgtggcgcatggctcccgccgcctctgaagaggacactttctagtgaattcagttcgtgctacccttgagcagcctgtgctacagcaggcacatttgtgaatctcccagcctgtgcctggcgtcngaactgtagcttcccaaagac

SEQ ID NO: 144 - DNA, 492 bp, Homo sapiens
cgcgtccgagtaaatctgttctgcactaaattatatcaaaataaatataaataattatttcgtataccattcgttatatacatttcagtgtttttaataatgtcaatttcttatattttaaggagaactctagttatttttataaatctaattgacttaattttgtgggaatataaaagaagtgattaaaaacctttggtttaaagtagttaatcctgaaatcaagctctgtaaatattgtgtagggatatggagaaatcctcaaaaagaaagagctaaagaaaatggcagggatggcatcttgggagtataactgaaagtaggaagatgtggatagaagagtcttatttttaatcacagggcatatgtgctatttgaattattttgacaaaagtataaaaatatggaattatgcattgtgtgtgtgtgtggtttcatctgtttaagaaatatgtgatggagactgtcctatcatcaggaaattattccagt

SEQ ID NO: 145 - DNA, 313 bp, Homo sapiens
  misc_feature 8: n = A,T,C or G
gtcgaccncgcgtccgcggagacaccgaccgcggcggcagcagcagcagcagcagcgagaggcagaggcggcggcggcggggaggacagcacggccgaggctgcccagaggcgcctcctccacaccccccgccgcagcagcaccggcgacagattttttaaaaaatggatttggccaaccatggacttattctactgcaacagttaaacgctcagcgagagtttggtttcctgtgtgactgcacggttgcaatcggcgatgtatacttcaaggcacacaaatcagttcttgcttcattctccaattactttaa

SEQ ID NO: 146 - DNA, 470 bp, Homo sapiens
ccacgcgtccgatcctccccaaggcagaggtgtgcgtgcggaaccatgtccagccctacatcccatccatcctggaggccctgatggtccccaccagccagggcttcactgaggtgcgagatgtcttcttcaaggaggtcacggacatgaacctgaacgtcatcaacgagggcggcattgacaagctgggcgagtacatggagaagctgtcccggctggcgtaccaccccctgaagatgcagagctgctatgagaagatggagtcgctgcgactggacgggctgcagcagcgatttgatgtgtccagcacgtccgtgttcaagcagcgagcccagatccacatgcgggagcaaatggacaatgccgtgtatacgttcgagaccctcctgcaccaggagctggggaaggggcccaccaaggaggagctgtgcaagtccatccagcgggtcctggagcgggtgctgaagaaa

SEQ ID NO: 147 - DNA, 229 bp, Homo sapiens
  misc_feature 1, 16, 129, 132, 135, 144, 147, 148, 178, 195, 215: n = A,T,C or G
naccacgcgtccgccncgcgtccgcttgcacccggtgaagagcgtgcgtgtgctgaggccggagccgcagacggctgtggggccctcgcaccccgcctgggtgcccgcgcctgccccggcccccgcccncgnccncgcccccgnccnngctgcggagggcttggacgccaaggaggancatgccctggcgctggncggcacaggcgccttcccgntggacgtggagtac

SEQ ID NO: 148 - DNA, 550 bp, Homo sapiens
  misc_feature 15, 17, 18, 19, 42, 72, 106, 140, 169, 188, 205, 232, 255,307, 315, 317, 333, 334, 335, 337, 359, 378, 379, 405, 410,419, 423, 434, 448, 473, 474, 486: n = A,T,C or G
tcccaagagctgcangnnncagccgcgacagcaagaaccggnagagccggcagaccgcggcggcggcggcgncggaggcaggagcagcctgggcgggacgcagggnctccgcgggcgcaggaaggcgagcaagagatatnctctgagagccaagcaaaagaacattaanggaaagggaaggaggaaangaaggctggataccggngcagtgaaaaaaggcacttccaagagntgggggcactcaactacgccacnagactctgaccgggtggcccaatcaagccaatgaagaaacctataacccggnttaacctntnattggcctgccttctnnntnggggggtgggggcccaagcccncttaaccccccaaccttcnntttcaaacctatcccaaccttattcnaaaangaaggggancctnaaggatggggntttcccccaaggcnaaaaaggaaaaaaagggggcccccnngggaagccttcnttcttggggaaaaacaaggcaaaaaaaattggaagcctgaaaacccggcttcaaaaaaaagggg

SEQ ID NO: 149 - DNA, 301 bp, Homo sapiens
  misc_feature 287: n = A,T,C or G
ggccgaaaggggggcaggtggtcgggccgcgcaagcggagatggaatggggcccgggctcagactggtcacggggggaggctgccggcgtggaccgcgggaaggcggggctggggctcggcgggaggccacccccacagccgccccgggaggagcgcgcccagcagctgctggacgcggtggagcagcggcagcggcagctcctggacaccatcgcagcctgcgaggagatgttacggcagctgggccgccggcgcccggagccggctggtggcgggaacgtctcanccaaacctggagcg

SEQ ID NO: 150 - DNA, 405 bp, Homo sapiens
  misc_feature 21, 214: n = A,T,C or G
cacgcgtccggcctgctgttnacctgcgggaccccaggaacctggacttgtttctcaaagtggttcatggagatgtcaccccctacgacctggtgcggatgagctcgatgcagctggccccccaggagctggcccgctggcgggaccaggaggagaaaaggggcctgaatatcattgagcagcaacagaaggagccgtgcagacttccagcctncaaaatgacccacaagggcgaagtggagattcagcgggacatggaccagacactgaccctggaggatctggtgggaccgcagatgttcatggactgcagcccacaggccctgcccatcgcatcagaggacaccacggggcaagcatgaccaccacttcttagaccccaactgccacatctgcaaggactgg

SEQ ID NO: 151 - DNA, 421 bp, Homo sapiens
tttttccttagaatcttcgagaaaaagatgaaggtattattctcagtttcgagatcaggactcctcaccaccaggcgggggctttaaggtagacactacagggaatctgatctcagggtgatcctctcccttccacttgcaaaaagagaggagcaggtgggccactgctctctgagatgttaacacccctcacactccacgggcatgctttgtcattctgcacaccggtgtagctgcagctctgtgtgaattcagatctcaagagaaatgtaaatcaaaagtatgagtttctttctttcttgggtgccacagtaggaatgaaatgatggggacttttggaagcccctggacttgtggcccctgtagaagagcagcttgggcagggtgtgatggccatctctgtctctaggggccctgtgga

SEQ ID NO: 152 - DNA, 473 bp, Homo sapiens
  misc_feature 302, 444, 456, 460: n = A,T,C or G
tggcgagagcgctggtgccgagtgaaagataacaagctcattttccacaaggacaggaccgacctgaagacccatattgtgtctattccgctccgtggctgcgaggtgatcccgggtttggattgtaaacatcctctgacgttccggctgctgcgcaacggccaggaggttgcagtattggaggcatcttcttctgaagacatgggcaggtggattggggattttactcgcagagacggggatcgtccacagacccggaggctctgcactatgactacattgatgtggaagatgtctgcaangtgtcattcagacaggccaaacagacctttctgtttttatgaacagggcgtgttatatctgctaacccatatctagggggcaccttcaacgggttattgcccacccagcgggacggcactttaatatgacgatgtttccgtnccataaaccggnttgnttaaagggtaaaa

SEQ ID NO: 153 - DNA, 640 bp, Homo sapiens
  misc_feature 36, 37, 38, 39, 52, 65, 73, 115, 130, 142, 143, 145, 220,274, 278, 332, 380, 388, 399, 467, 510, 545, 581, 632: n = A,T,C or G
gttcgacccacgggcgtccgcgggaccgccgtgggnnnnacatactatgcgnacaggcgcgttgnacacaaanggcccattcctgtagcctcacacttgactacacatgggggantcactcggattcggntctccacgtggnngntctttgttctgtactctacgtagctttggcttttgttttctcgtcgcaacagggcatgagacttcgtcgaccttnggggtctgtatagtctttgacttactacgtgtaggtctcaatacaaagtggganatantcatatccgtccgcgaaaagtaattcttggaaaaatttacccttgtctcccgcnttatgaaacgtgaactaagtaactcactttgcccctggggcgcctctntttaacantgttcttttgncgaaatcatcataaccttcaactgaaaacaatgtggtcaacaaactgactatggaggtcttaggctcngtctctaagatctttaaccttgtttatcggcgcgtgcggcgtngtccgaacgaagagactataacccgcactataacnaaaactcttttttaatcccaccacctcgtgagggangggccctaagactgaaactgtagtaagtcctattgatttgcgtaggagganttaggaaa

SEQ ID NO: 154 - DNA, 491 bp, Homo sapiens
  misc_feature 1, 469, 479: n = A,T,C or G
ncgcgtccgatagtctaccagccttacctggttgattacacttgtaaaagaaagattaaaagcaggccagtgactctggtctgcttgaacatgtgaatgtagtggtttgagcaatctggagtttgccctagtgtcaaattccagactgtccatagtgtccaaaacctgaggcagacactaatgttaacccccagcaccccgtgattggaaacaaacctaaatacgtattgggaacttaatagcaattttaagcattctgatagattttttgtagggatggggtcatgccatgtggcccaggctggtctgaaaactctggcctcaagtgatctcaagctttggccttctaaagtgttgggattacaaggtgtgaggcattgcacctggcttagccgtcttgatttgacattgtaatgaaaaagtgtgagtcttattctaccaggggcccttttttgtcctcttgaaaatngaataaccangggaagggggaa

SEQ ID NO: 155 - DNA, 246 bp, Homo sapiens
  misc_feature 3: n = A,T,C or G
ccncgcgtccgtccatcacagcctccgaaggtgctgggattacacggcataagccactgtgcccagcctgtttttaataatgatattaagtgggtttggttcatgtgttattaatcagtgttaataatcgtactttttttttttttttaaaagaaaccatgggtattctaaaatcaggagtccaaataaaagaaagttctcggctgtgcgtggtggctaacaccttgtagtcccggcactttgggg

SEQ ID NO: 156 - DNA, 501 bp, Homo sapiens
cgcgtccgaaaggagtcgcgccgccgccgccgccccctccctccggtgggcccgggaggtagagaaagtcagtgccacagcccgaccgcgctgctctgagccctgggcacgcggaacgggagggagtctgagggttggggaccgtctgtgagggaggggaacagccgctcgagcctggggcgggcggaccggactggggccggggtaggctctggaaagggcccgggagagaggtggcgttggtcagaacctgagaaacagccgagaggttttccaccgaggcccgcgcttgagggatctgaagaggttcctagaagagggtgttccctctttcgggggtcctcaccagaagaggttcttgggggtcgcccttctgaggaggctgcggctaacagggcccagaactgccattggatgtccagaatcccctgtagttgataatgttgggaataaagctctgcactttcttttggcatttcaagttgttaaaaacaaatagga

SEQ ID NO: 157 - DNA, 439 bp, Homo sapiens
  misc_feature 15, 409, 421: n = A,T,C or G
cgcgtccgggtgtcnaggccatggggcagccctgggcggctgggaagcacggacggggcgcccgcgcagctgcctctcgtgctcaccgcgctgtgggccgcggccgtgggcctggagctggcttacgtgctggtgctcggtcccgggccgccgccgctgggacccctggcccgggccttgcaagctggcgctggccgccttccagctgctcaacctgctgggcaacgtggggctcttcctgcgctcggatcccagcatccgtggcgtgatgctggccggccgcggtctgggccagggctgggcttactgctaccaatgccaaagccaggtgccgccacgcagcggacactgctctgcctgccgcgtctgcatcctgcgtcgggaccaccactgccgcctgctgggccgntgcgtgggcttnggcaactaccggcccttc

SEQ ID NO: 158 - DNA, 489 bp, Homo sapiens
  misc_feature 380: n = A,T,C or G
cgaccacgcgtccggggactcaggcatgcaccaccacgcccagctaatttttgtatttttagtagagacagggtttctccatgttggccaggctggtctcgaactcctgacattcggtgatccacccgcctcggccttccaaagtgctgggattacaggtgtgagccactgtgcccagccccttcctgttgagtaaaaggaagaacttcagggtaagacactgtacagtgcccagcatctggagagccgccagcattacccctgccttaggaggtagtcgtctcctcatcactacaaggtattgaagcctgagggcccctgggcaggacgatagagtgagattgccctggggactcaggaaaggaaacatgccgtatttntagggaaggagctgctgctgcctctcagtgactctggttccaggagggaagagccgagagctagggttccctttcatagggagaaacccagcagggtttggggtgttct

SEQ ID NO: 159 - DNA, 522 bp, Homo sapiens
  misc_feature 389, 407, 425, 502: n = A,T,C or G
accacgcgtccgaaaggagtcgcgccgccgccgccgccccctccctccggtgggcccgggaggtagagaaagtcagtgccacagcccgaccgcgctgctctgagccctgggcacgcggaacgggagggagtctgagggttggggacgtctgtgagggaggggaacagcccgctcgagcctggggcggcggaccggactggggccggggtaggctctggaaagggcccgggagagaggtggcgttggtcagaacctgagaaacagccgagaggttttccacccgaggcccgcgcttgagggatctgaaagaggtttcctagaaaaaggggtgtttcctcttttcggggggtccctcaccaagaagaaggttctttggggggtcgcccttnttgagggaggcttgcggnttaacagggccaaaaaanttgccatgggatgtccaagaatcccctgtaatttgattaaatggtggggaaataaagctttgcaacttttttttgcnatttaatttggttaaaaaca

SEQ ID NO: 160 - DNA, 285 bp, Homo sapiens
  misc_feature 244: n = A,T,C or G
tccgctcccctgttttcttcctttttctttttgcttgtatgcacaacggtaggacttacttcgtaagaaacaaaatgccagtattttcttaagccatgatgtgaaaccaatgaccctgtgaccacatggcacagaacactaaattttggtcccatggctgaaacttgagggtgactaaaagtaatgcctgtgaaacatgatatctatctgggatggccatttgatctctaaaaggaattttgtncactccacagaactcctatctatagtaaaatttgatttttc

SEQ ID NO: 161 - DNA, 508 bp, Homo sapiens
  misc_feature 432, 459, 472: n = A,T,C or G
cgtccggaaaaatattaaacaactcattttaagattcaaattaactaattcctgcatatatgacattccttacataagcgaacactaaacaaaaatggctagaaatgtctttttctttcttttctctctttgttgtttaaggtattaagcaccgaattattacatgagactggcagatagctattaatcctcttacagatttgagaaagttgattctcaaatatttatgcaccttctccttcattgttttctttaaatctgtcctcttaaaaagcttcttaagagctcagttaatgcttttgacttaactaggagaaaaaggcatgataatacaggcaagatggcattgttagcaattctggtaggtggttttggaatgaatcctaagaggcaaggggatcttaaggacaaggaagagaagagagagggggngggatccctttgatctctttctctggnaatcttaaatgcntaattttactaaaacatgttctcaattcattcatat

SEQ ID NO: 162 - DNA, 501 bp, Homo sapiens
ccccgcgtccggattaatgagtgtatgcctagctctttctccagtttacttttagaccatattgttgtttgttttgaatatcattccttaggctatgttgagagtagagtggcttcccattaggagaactaatttagggcatgtcttttgctgaatcccgtcagcatatttaacaaattcccaattctagataatttccttttatttctctagtaccctttgccaggggctctacacatcaaaggtgttcatgaagtatttgtcaaaggaaagaacagtaatgacacctaacacataatgagtgattagtatgttccaggcattgcgtgagctatttactgtgagtgatttaatgttatcttcccagcagacctctgaggtagggtactagtatgatccccatttcgtacatgaggaaactgacactaagggacataaaataagtttttgaagtcacaaagtgaataaaaggaagaccagggttttaattggaagcccata

SEQ ID NO: 163 - DNA, 431 bp, Homo sapiens
  misc_feature 151, 409: n = A,T,C or G
tagacttttgcagtgttaaacacagcttccttaactcttagaactggaagttgtagagctctccttttggtgcctttccagcctttatacacactattgtagctttcttaggtttgataggtagcgtttcaagtagtttagctgagacagngaatgtattaggttcaacatgaccttgtgttttatttgtgtttgccaacaggatgccttatttgtttgagaaaaagatgtactagtgtcattctaaactatctccttttttaggattctaaagaagttaatcatcatccttttgtttattttaccaccatttagtgccttaaatcctatcaagaaagcagtgttactgctcaatgcccaaataagacacgcggatattgctattgcttgcttttgagttaacaggccnactttttatacttaaaacctca

SEQ ID NO: 164 - DNA, 459 bp, Homo sapiens
  misc_feature 420: n = A,T,C or G
gccccgaagtcccactgtccctgccgaggcgccggcgccgtcccctgtgcccttgaccacgccagcctccgccgaggaggcgatacccctccccgcgtcctccgacagcgagcggtcggcgtccagcgtggaggggcccggaggggctctgtacgcgcgcgtggcccgacgcgaggcccggccggcccgggcccggggcgagattgggggcctgtcgctgtcgccatcgcccgagcgcaggaaaccgccgccacctgaccccgccaccaagcctaaggtgtcctggatccacggcaagcacagcgccgctgcagctggccgtgcgccctcaccaccgccgccaggctccgaggccgcgcccagccccagcaagaggaaacggacgcccagcgaacaaatcggcgcatacggtcgaacacnggaagcccccggacccggacccaacgccggggccccccg

SEQ ID NO: 165 - DNA, 369 bp, Homo sapiens
agtccgccccacgcgtccggtgagtttagcgctgctgtccggatgggttggtagcagacagggtggagtagggttaagcacactggtcaccttaggattggtttcctggtgctggagaatggttaggacacaggccttggaaggttttttgagtgtgaaatattactcagcgttttctgcagacctcgcgggcaatgccgcttctaattttatccaggccttcttctgtagggagggcctgttaagagttgagcagcccgatttctgaacccctctaaaaagctgtggctgattggtggcttttttttttcttggagaggggggtgtcaaagatttctttaaaatcgttagtgatgtggtctcgcttta

SEQ ID NO: 166 - DNA, 355 bp, Homo sapiens
  misc_feature 9: n = A,T,C or G
acgcgtccnaaaatgtgtggtacatggaatattttttattatgcttatttcgtattgccaggtagatggccagcctgacattcaaaattattttatcagcccctaaatgttaatatttcccaaactatttaaatcagtagaagacatttttactattaagaataaaaagttataatataaaatggattaaatgccagattatatgctaaacaagtcctttaaatttttaacttaatatttttaacagattttttttttgagatgcagttttactcttgttgcccaggctggagtgcaatggcacaatcttggctcactgcaaccaccacctcccgggttcatgcgattctcctgc

SEQ ID NO: 167 - DNA, 484 bp, Homo sapiens
  misc_feature 440, 463: n = A,T,C or G
ccgtccgcgaggttaggagatcgagaccatcctggctaacacggtgaaaccccatctctactaaaaatacaaaaaaaattagccagacatggtggcagcctcctgtagtcccagctactcgggaggctgaggcaggagaagggcatgaacctggcaggcggagcttgcagtgagcccaagatggcgtcactgcactccagcctgagggacagagcaagactctgtctcaaaaaaaaaagaaaaaaaagtggcacagatcaattataaatcactgcttcaaggccagtgctctcactttgtacattaataatctcaggcccaaataagataagtgatatgtcaacgtatgttcactttggtctttacatggcagctatagtataccggaatattataagctcagatcgtcatagctacataactcctttagttgggaaganacgccgtaaatgcccatcaagantagcaagtcttgcatttgact

SEQ ID NO: 168 - DNA, 358 bp, Homo sapiens
  misc_feature 8: n = A,T,C or G
cgcgtccnggtaacttgaataaggattatgtgccccacccttactctcattcctgcttcctcttgggctcaaacagggtatgagtatgaagattttgcctttagttcctgaactgaacctgcttgctatccctttcctccccaccactaccttattccttctctgcctccaaattgccactttgttttgaggcttccttccctaccttattattctgaaggaagtagagatcttgcttctgaaacccctcctaagaaactgcccagggacaagataaattacaaacaattcatgggagtttactacctaagttgcttctagggcatatgtataccatactagtagtctagatttctgg

SEQ ID NO: 169 - DNA, 371 bp, Homo sapiens
  misc_feature 244, 360, 367: n = A,T,C or G
agggagtcgcccccgcgtccggacaggatctatggatggaagaagatgaaaacaaacacacagccataaaggtaattgtttctggccaacatctttctactgatgctttgttttgattgtatgttgctgtttatattttctcaaacttgaggctctattttatgaaatgttgaatataaatacattgtatttaacttgaaaaattcctggaaatatacctgataattaccacctgaggaatcgntttattttatgaaagtaacagcgtgatgaatactgtaattacaaaagaaaattagtactcactgacttatacccttgttttttttttttttttggtttggttttttttggttttgntttaggngaca

SEQ ID NO: 170 - DNA, 370 bp, Homo sapiens
  misc_feature 8, 79: n = A,T,C or G
ggagtcgncccacgcgtccggctggccagcagaccctgcagcagtcattggtggttctgtctttccctaacccttatgngctggaggacagaggagccacctcttctcactggttgatactctgttcctaagacctcaggttacccagtgtagcctgctgtgacccttctgcttcattttctgccaagtgatacagaaccttcgttctgctgctttggggacaggtgatcctagccccagcttagggccagtgctctgtgccactctggagaaatagggaaaagataggggtggctcagtacagcagccctgtgaaagtcaaggccagagcttttcttttttaatttttttattattattattattattt

SEQ ID NO: 171 - DNA, 375 bp, Homo sapiens
tttagggagccgacccacgcgtccgcttggcaaacctccggggactgtcagaggaggagaggagcgagaaggctatgcttcgctcccgcattgaagagcagtcccagctcatctgcatcctgaagcggaggtcagatgaggccctggagcgctgccagatcctagagctgctcaatgcagagctggaggagaagatgatgcaggaggctgagaagctcaaggcccagggtgagtacagtcggaaactagaggaacgctttatgaccctagcagccaaccacgagttgatgctccgcttcaaggatgaatacaagagtgagaacatcaagctgagggaggagaatgagaagctgaggctggagaatagcagcctct

SEQ ID NO: 172 - DNA, 484 bp, Homo sapiens
  misc_feature 174, 422: n = A,T,C or G
ccacgcgtccgcttagccgctgccagagttccatatgttctggaacccttgactcctagagttcagaacccagccaacttgcagttttcagaatgttcaagaaacttctgacactcagagttgcagaacctcctggtccctgcagattcctggaaatcagaatatggtggttgnaaagaatcttgtggctgggcgtggtggctcacgcctgtaatcccagcactctgggaggccgaggcgggcagatcgcctgaggtcaggagtttgagaccagcctggccaacatggcgaaatcccgtctctactgaagataacaaaaattagccggtcatggtggcgcccgtgcctgtaatcccagctcggcagggccgaggcaggagaatcgcttgaacccgggaggcaagaggtttgcaagtgagccnaaagatcgagccactgcactccaccttgggtgaccagagtcttaaaaaaaaaaaaaaaaagg

SEQ ID NO: 173 - DNA, 171 bp, Homo sapiens
  misc_feature 4, 77, 88, 96, 104, 105, 127, 170: n = A,T,C or G
cgtncggtgaatattcagtaagctaattaaaatttgtaagtaagatttccttattaaaaaaactattaaaataagangaagcccgttnaaataatnattagagnnggaaaaaagaagatgactatcnaattacagcactttttttcagctatacataaaggccttttcant

SEQ ID NO: 174 - DNA, 390 bp, Homo sapiens
  misc_feature 36, 107, 119, 166, 295: n = A,T,C or G
cgtccggtgacccattaagtatatttcgtgacccanagtttgaaagagattataggtgtagctttgctagtttgtaattgatatagaacagtgactatcagggaagntgaagaacggcnaattgaatgtaaatcatgtctggatggtgaagattctaagaatgcanctagggaaagggctgcaaaaagaaggtggcagactaatgtagaatggtgcaaccagatgaagacatgggtggctttaggaattccaaagtggccgtgaaggccaggcacggtggcccacgcctgtaatnctagcactttgggaggccaaggtgggtggattgctgagctcgggagttcgagaccagcctgaccaaccaggtgaaacaccatccctacaaaacat

SEQ ID NO: 175 - DNA, 262 bp, Homo sapiens
  misc_feature 55, 92, 105: n = A,T,C or G
ggcggcggcggcggcggcggccgggacccagcgggccaggtggggacggcgcgtngcgggtgcgggagatgccgtgcgggactggggccacnttgagccgcccgnctcgtccccgccttctgtgggaaggatgtgcgcgcggatggccggtcgcacaacagcggcccctcgggggccctacggcccctggctctgcctcctggtggccctcgccctggacgtcgtgagagtggactgtggccaggctcccctggaccctgtc

SEQ ID NO: 176 - DNA, 429 bp, Homo sapiens
  misc_feature 54, 142, 192, 347, 362, 415: n = A,T,C or G
gagctggctggtgtttgagctgtggcagaagcacctggggctccagggaagcangctgggaactgcaggaccttgctcagccaggagcacttccccctccttgaggcaggaatactgaggtgcctccccacagatggagaangtggagaggaggatgggcctcaggagcatctcaagccccagtagcagganaaagaaagaaagagatgcctggttttcacagactggttcctgtggctgggatgactgcatccttttttttttttttttgagacggagtttttgcctttgtcgcccaggctggagtgcaatggggtgatctcggatcaccggaacctccgcctccnggattcaagcaattntcccgcctcagcctcccgagtagctgggattacaggcacgcacctccaccgtncggctaattttgta

SEQ ID NO: 177 - DNA, 411 bp, Homo sapiens
  misc_feature 7: n = A,T,C or G
ccttgtnaggggacacaaagaaaaattgaataaactgtatgatttaaaagattatcgggagagttacctcccgatataaaaggaaggatttacagaatgtgacctaaggtctggcgtaaatgtgcaccggaaccgagaaggcccggattgtcatggacgatgagatacaccggaatatcatggacatattctttaaagcgccctttatcttcaaatgcggcacggaaaccggaggctttgaagaactcaaggaagcgcggcacgataccgcccgcaataaacacgccgccaaatgtcccgagattgagcgccagattgccgccaaaacggcccataatgacgcaaaacagcgacaatgcgcggcggcaatcggtgcaagctgtcagccagcgccgcgttcggtaatatctt

SEQ ID NO: 178 - DNA, 722 bp, Homo sapiens
  misc_feature 46, 225, 229, 245, 319, 356, 382, 514, 643, 664, 674, 718: n = A,T,C or G
cacgcgtccgaccggaaatgctgacctgacctttgaccaagtacgngcggtgggggggggggacaagtggggtggtggtattaactggctccggtgggtcttcaagccccaggaaccctccaagggggaaacaaatggagggccctaacgcaagaagcttcaatcggtcccttggactgggcttctttcggtgggttggtgggtatggccctgggctggcctttncctnaatctttccttccctncctgggggcaatctggctgggtggccaagtggcttgccccggcaacaactttggctggctggcttacggtcaangggtggcccctggcttgccccaagaacaaaggtggcnttgctttgcccccggaagggcccctngtaattgcccggccccgggccaaaaaagccaagccaccttcaagggtggtttcccaagcatttttaattgcccccccaagcaacccttaattgcccaacccttgttctttccccggcccaaaagaacccccnaacccccccaacccaagcttattggaattttcccaaatgggggccccccttggcccttacaaaaccgggggtttacccctttggggaggggaattaaccccctggggaaggaaaccggttttggaccanggggaaggtaaggctttaaanccttggggtnggggcccaaaagggcttcccctaaattgttaaccccccttggcntttt

SEQ ID NO: 179 - DNA, 256 bp, Homo sapiens
  misc_feature 237, 242, 245, 250: n = A,T,C or G
cgtccggaaaactgttcatctactcactgtagtgccctccttgaaatgtgtgtttgttcattcaactaacaatatttggggatccctgtagtaaacactgtatgaattttacacagtctggccatcaagaaagatcacggagtatattctagatggggaggctactaagtgaataggaatcaccacgctgggctgtttattaggtacagtaataaacataagtactggttgcaaaanaaaanaanaaaanaaaaaa

SEQ ID NO: 180 - DNA, 471 bp, Homo sapiens
  misc_feature 3, 77, 326, 431, 435, 440, 448: n = A,T,C or G
ccnccgcgtccgaaaagacaagacagcatactgtatttttcctcttaaaattcaatgttacaattaaatgattgttntctgagaataagttagcttcagctttctaatcgatgtgttcccacatctacaaattgatatgaaaaattattttgaaatgcacactgcaaaatggtgagaatatgaaagttacctgggaattaaatcagaactgtctccatatgactatttccaagtcacaatcataactttcttaatagcaatggttatatatgtggccagatagtattcagtttcacagtaatgtctcggtcacataaagatagcanagcatagacatagtacaacaatttattatttctgctgattgccaaatgtgcataaaactataaagatatattttccagcccaggtgacagagaccctgtctcccntttnaaaancttcatgntaaaggtgcggccgctagactag

SEQ ID NO: 181 - DNA, 558 bp, Homo sapiens
  misc_feature 486: n = A,T,C or G
cgcgtccgctaatcaacttttaaaaataatgttttacggccgggcgcggtggctcacgcctgtaatcccagcactttgggaggccgaggcgggcggatcacgaggtcagggagatcgagaccatcctggctaacacggtgaaaccccgtctctactaaaaatacaaaaaattagcccggcgtggtggcgggcgcctgtagtcccagctactcgggaggctgattttttattttttgaacttttttacagagaaggggggtctccctatgttgcccaggttggtctcaaacgtttgggctcaagtgatccttctcaccaagagtgctggggattataggcatgagctgctgtgaccggcccaaaatcaaatttcaaaactaaaaaaattctcagataattaatgaacctacgtgaattaatctacaaattccagtttgaaaaacactaaagataaacaactgtcaatgtgggaaacttaaaaagtangttggtatttaggttattggttaaaatgggggaccgactggcatacacagtcctaaatatttaagtcttaag

SEQ ID NO: 182 - DNA, 404 bp, Homo sapiens
  misc_feature 10, 397, 403: n = A,T,C or G
ccctatcttncggtactggtgggccaaattcctgggaccaggtcaaggtgggctgcctcagtaagaaggaaggactggagagtgcccatttcagaggagcaggctggtgggggccagccagaaagtagttccctttggggggaagatgttggacctttattatttgtggtaaccagccgaggctggttgtcaggacagcaggtgagccactttagggaagaaagtgcaggggtgggtggatgcccagattaccaaggccagccaccctgatggggtagggtctggttatctgtgttcaagaagcaaatcccaccccagccccagcactagctctctatgtatgtattttccctgtacaatgttttataaaagagatcattaatttaaaaaaaaaaanaaaaana

SEQ ID NO: 183 - DNA, 838 bp, Homo sapiens
  misc_feature 87, 134, 149, 156, 250, 252, 255, 298, 318, 367, 376, 397,405, 411, 417, 427, 437, 458, 478, 489, 499, 556, 591, 598,602, 613, 636, 645, 676, 681, 734, 753, 756, 761, 772, 784,812: n = A,T,C or G
tcgtccatttacctcacttatggggtaaaaggtcacttcaagtaaggttaaaggttttccctggcaaaggacctaaccagagccccnaagggggggaaaaaaggaggtcacctttggggaggtaccatggcccnttttggtctggcccnttgggcntcttcaacaacaaaggaatattttaccaggcccttttggaggcctttggataatttcttaagaaatttggttaccaggaagaatttaggcttcntnggnaaaaaggaaaaattaggacctaggaaagggaattaaagggggnaaggggaaatcaattaagcnttaatggaaagggggttttacttctggcaatcaagaaccggctttttcntaagtttcntaatggaactttaaaccggtncctaatangggctngtaaanggggttctcntggcggtggnaaaccacctttctttttcctngggcccttcccttttctggncccccaatttncccttctttnaaacccttcaaagtttgcccttggagggtttttaattaattcccccttggtggccanttcccttggggggccaattgggtttcaatttccancaattantggnaaaaaccaaantccaaggggaagggacccccttngggcttaantttttccttttaaatcttcctgggaattttnggatngggggaaaaaaaaataaattaaaattcctttttggggcgcccttggccaagtngggggggaaaaataatttnggnttttnggggggggggntttggggaatanccttaccaaggaaccccttccttggatnccttttggggggtcttttcaaaaaat

SEQ ID NO: 184 - DNA, 499 bp, Homo sapiens
  misc_feature 82, 393: n = A,T,C or G
gcgtccggttgtagtttcccttcccattctcttggtggccctggaagcttctaggcacaagtgtgccaccctgattattccnaccactccatccaacttttctctctctgtgggtgtctgcaccacaagctgcctaccctccaggtgcctcaatggtccggccaccagttgtgcctcggcgccccccggcccacatcagcaagtgtcaggcaggcctccacccaggtgccacgcacggtgcctcatacccagagagtagccaacattggtactcagaccacaggacccagtggggtaggatgctgtacaccaggccggccgctcctgccgtgcaaatgttcctcaagcagcacataagcacctatcgggtccaggagccggcttgtgcacatnccaggacaggagcccctgaccgcgtccatgctggctgcggcgcccctgcatgagcaaaagcagatgattggggagcgtctctacccccttatccatgatgtccaca

SEQ ID NO: 185 - DNA, 520 bp, Homo sapiens
  misc_feature 484, 486, 487, 489, 490: n = A,T,C or G
gtcgccccgcgtccgggcatttgtattttcaacaattgttctcaaatttagaaaagagacatcgcaagatggtgaaataggaagccctgggccctccttccctccacaaacacactgatttgacaacagttcatggacagattccctttataagaaaccaagaaactgttaagaggctcttataccccaggtgagtgcaaaatcatccacatcaaagatagctgggaagttcaagacaccttctttccgtaatttctaaactggcacagtactatatgattgagatgaatctccccacatccaagcttcctgctggggaggagaggggagggtataccattatgtccaatgttccaactcctctaggagctacccaggtaggaggtgggtccagctctgtcaggcttgtcttaagagcactgattgagggtctggtattctctaagtggcccaggaccataagagcagtggatggtgctggggntnngnngtgggttacccataaccccctggtttttgg

SEQ ID NO: 186 - DNA, 486 bp, Homo sapiens
  misc_feature 195: n = A,T,C or G
tccgaagcagtgaaaatagtgtttgactccattgacaacctagaggcggctcctcatgatatcggctacgtcaaacaggccatgttccactatttccaggtgccagatcggctagggatactcactcacctgtatagggactttgataaatgcacgtttgctgggttttgccggaaaattgcagaatgtgctcancagggagaccccctttcccgctatatcttcaggaaggctggggagatgctgggcagacacatcgtagcagtgttgcccgagattgacccggtcttgttccagggcaagattggactccccatcctgtgcgtgggctctgtgtgggaagagctgggagctgctgaaggaagggttttcttctggcgctgacccagggcagagagatccaggctcaaaacttcttctccagcttcaccctgatgaagctgaggcactcctccgctctgggtggggccaggcctaaggggccag

SEQ ID NO: 187 - DNA, 577 bp, Homo sapiens
  misc_feature 465, 468, 477, 504, 542, 565: n = A,T,C or G
cgtccgcgtcgctcccctgctcggggtcagctagtgtccgctctgctcggccgcgggctcccggaggactgcaggcaggatgaccgcaaaaacacgggtgattggtgaatggaagttgctatgggcctctaagggccatcccaagcccaacccaacgttaaacggtccacaatccaccaaggaagtcaagcttttgacacaaactgctgaaaagctgggagggtttcttctgaaagaaagtttcttttttcaaccctgggggacactggtgccctttccacaagccagggaattgggtttatgaagcaagcttggctctaaggggggtgacctcaagatatttgctggggggttgtgaggtttggtggttcttgggaagtgtgtctcaagctttgggggccctggaactgtgcttgaagtgccctcaggcctgtgcccttctggggccgggggtcttgtgggtgnatncgcaagcanggaagcctgggggccattggtccattnaagaaggcaccccggggccaaaccttgcttggctatantattccaagcctgcttcaacccntgggcaggcttt

SEQ ID NO: 188 - DNA, 515 bp, Homo sapiens
  misc_feature 7, 489, 490, 491, 492, 493, 495, 496, 498, 504, 505: n = A,T,C or G
tcgaccncgcgtccggcttcgacgccttccctaacatcgagaaggtgtccaagatcacgtctcccgtgctcatcatccacggcacggaggacgaggtgatcgacttctcgcacgggctggcgctctacgagcgctgccccaaggcggtggagccgctgtgggtggagggcgccgggcacaacgacatcgagctctacagccagtacctggagcgcctgcgtcgcttcatctcccaggagctgcccagccagcgcgcctagcggcggccccaaccggccggacctcagcaataaggcggcccccggacctcaccccgcgccggcccccacccaggggctgcatgtggaccccccgggcggcccaggggaccccgccccgacccaggggctgtggacgatgtacaggcaacagagctaccgcactcctttccttttggaagcaagaagaaaatacgtgaaaacgggaaattaaagatttaaaaattttttnnnnntnnanaaaaannaaagtgcggc

SEQ ID NO: 189 - DNA, 556 bp, Homo sapiens
  misc_feature 168, 483, 505, 543, 549: n = A,T,C or G
cgcgtccgaagccttttgtctcagagaatttattgtcctgacagcagaggccgatggtgggatcgactggcccttaatttacaccagcacttgaagccgcctggaacccgactatcaagtgcatcacagaggggctggcggatcccggaagtcagaacgggacaccgnctttcactgtatcagcgagccgtgcgcctgcgagagtctccgagctgtaaaaagttcaagcacctcttccagcagctcccagaaatgggctgtgcaagatgtgaaacacgtgaccatcacaggcaggctgtgcccacagcgtggggatgtgcaagtctgtgtttgtgatggaggcccgggggaggcccgctgaccccaccacggtcctgtgctctgtggaggagctggcactggcccattacagacgcaagcggttttgaccaggggattcatggcgaaagggtccaccttcagcacccttgtatggccttcttnctgtggggacatcatcttcatnggatgggattcccggatgtcttcagaaacgcctgtcangcattncccctgg

SEQ ID NO: 190 - DNA, 516 bp, Homo sapiens
  misc_feature 2, 217, 231, 264: n = A,T,C or G
cnacacatgcggaatcataggcctgcaaagctcctgctattcactataactctgccatgccttaggcacttcctaacctagaattctgagtgaaggacaacaataactaatacttttgattcaggtattacaaagaagttaagagttcataaggcacctaagtaaagtcacattggttaagagtacatgtctccagatactcttacatttgcaaagnaattgcatttctgnatctatggtctgtaaataaaattgaagagttgngagaataaaagcatgttgtctttgataaattgtttttacaaaacaggcacaagagaggcttgaagggtccttgctatcttttaacctattttataatctttgctgcataagaaacaaatatgcttatttacattctatacttaaacatattatcaaacttttattctgaagataatacacatgaaggctttaaactttaatcttcaatatattttttaatctccctgatgaattagggaaataaatattggg

SEQ ID NO: 191 - DNA, 421 bp, Homo sapiens
  misc_feature 210, 337, 359, 389, 400: n = A,T,C or G
tctcccccttcaccctccttttttttttttttttgttttttcttaaaagcatttagctgggtgcagtgacacatgcttgtaatcccagctattgaggaggctgaggtaggaggattgcttgagtccaggaatttgaggccagcctggggaacatagcaagagcctatcttaaaaaaaaaaaaaaaagcatttcaattattttaaattttntaattacaaaacaattctttcctgtcttagtttagtttactttttactcacaaagttcctggaaagtagttattactcaataattgaatgcatgagtgtcaactgcaaaatctatgcattatgtagngatttgaatcaattagtctttnttgatactccaaaattaccctttttcgagngtctttatcanaaatttgataaatcggaactt

SEQ ID NO: 192 - DNA, 413 bp, Homo sapiens
tccgccccgtgaggggcagctgtggtgtggtgtgatgatgctgggataggcactcagatggttgagtctgagtttggctctgatattatatcaactgcatgggcagctgtggtgtggtgtgatgatgctgggataggcactcagatggttgagtctgagtttggctctgatattatatcaactgcatgggcagctgtggtgtggtgtgatgatgctgggataggcactcagatggttgagtctgagtttggctctgatattatatcaactgcatgggcagctgtggtgtggtgtgatgatgctgggataggcactcagatggttgagtctgagtttggctctgatattatatcaaccgcatcattttggggaagacacaatttctcagaattttatttaagttgtaaaaataa

SEQ ID NO: 193 - DNA, 600 bp, Homo sapiens
acacattgcggcaccgggctgggcctggccatcgtcaagcatgtactgctgcgccaccgcgcgcgcttggaaatcagcatgtgtgctgggccatggcagtacgttcacctgccattttccgccagctcaggtgacgcgcacacggctggtcgggaatgatgaataacctgaagtgacgacgacccaatgtgggagctgctgatactttgctgtctccgcccagcagtgggcactaggcaagcgccccatcagccgctacattggccgacttgcgcctgcctttcaggccctctcgtcaccccttattgaacacacggaacctgcaaaaccccatcatggacccttcccctggtattaccctcgctacactcttcgccgatttcggcatgattctttttgcactgatcctggtactgctcaacggtttcttcgttgcggcggaatttgccatggtcaaactgcgctccacccgggtcgaggccattgcccacaccaacgggctggcgcgggcagatcctgcgcaccgtacacagccagctcgacgcctacctgtcgggctggcagctggggtattaccctcgccttcctgggtttgggttg

SEQ ID NO: 194 - DNA, 363 bp, Homo sapiens
  misc_feature 21, 347: n = A,T,C or G
tgaaatctcctaatacactgngtttttattgttatgtattctatgttttaaagctcctcaaggtattgttattcttttgtataatcagtgtttgtttggagctgtctgtaaattttcctcttttttgctctttattttttctttcaactcagaccttccaaaatgggattatttttcttttttctttagagacatttgcttgataacagaattttaatttggcggctatttatttttttcagcacactgcaggtattaaactacttggcttcattgttggttttgaaaaatcagctgttctaatgttgctctttgaatataatctgcctttttctgtacttgcttgnctttaagttttttgtt

SEQ ID NO: 195 - DNA, 391 bp, Homo sapiens
  misc_feature 27, 69: n = A,T,C or G
cgctccctggtttcttgtctcatgaanaagaaaaaatcctaactgttcttgatgatctttaaggctcanaatgatctggacagaggtatttaccttgaagctcataaagcataggcctttctcacttgcagagtatctttctgaagctggactaaattggttaaggccactgtacttttccactttgtcttctttcctgtcacacaccctatcctttcaggctgtgttgggatggacaaaagcagttctggagtcctaaggagaagatgagtgggatatgtttctgtgacctgcagtcattttaaagtttagctgttgctagctgactccatgtaagaataccttccaggaatttgatggctgtgcactctggcagtgcaactggcatggt

SEQ ID NO: 196 - DNA, 357 bp, Homo sapiens
  misc_feature 2: n = A,T,C or G
cncgcgtccggccctgattgatgaagcacagtcagtaaatcatctcttcattccccagttcttaagccaacatcagcaacactgagagaacattagattaaaggcaggtatagaagagagacttagggtaacaagttagtgggtgcctgaaggcatgtgggaagagatgtggtaaaggtgtgcacactattccttacgtgacttaaaatgtcaaggggcttggtgtggtggctcatgactgtaaaactagagcactttggaaggccaaagctggaggatagcttgaggtcagaagttcaaggccaacttgggcaatatggcaagactgtgtctctaccaaaaaaaaaaaaaaaaaaa

SEQ ID NO: 197 - DNA, 533 bp, Homo sapiens
  misc_feature 19, 25, 182, 184, 493, 510: n = A,T,C or G
ccgtccggagaggctgttnttgatngatactccagaatagacacgggcccttgaaaagcttgtacctttggggaaaagtagaccaggaaaatctcaagccagagaaggactatgaagcttctttttccagttacacatggaaataagaggtcttgcatgagaaacctaaatcaacccctttntntttaagcaggttttggagtctaaatttatactaattgcattgtggagcaggtctagccaagaaattaacatgacaatcagtctctaatctgtctgtctatctacttacttacctaccagtcaggccaaagagattcccacaagtaggttaaaaaaagtaaagtctgataacaaataattagtaagaatgaatgaataaataaatagcacaaaggaacactctaccacaaggaggagtactcatcacatcaaatgagagaataccctaagaaagtgagataatgccagcaatctgaaagatattttaccnaaacgtgtttaaaatgnttaggttattaaaaaaaaaaaaa

SEQ ID NO: 198 - DNA, 209 bp, Homo sapiens
  misc_feature 184: n = A,T,C or G
ctaagctgttattttccctaaaaatgcttcccttgcatttatacttattaagaatagataatagctaacatctatccactgcctttgattcatgaggccctcacgaattgcctcattaggtctccgacagtatggtacaactactctttatattttacagatgaagaaactgaggctggactgntacctttttgctacacatcctaatg

SEQ ID NO: 199 - DNA, 326 bp, Homo sapiens
  misc_feature 56: n = A,T,C or G
aacctgttttgttagatgtgaatctaggaaatacaatatatttttaatgtaaaagnactcttgctttacttgtaaactgattttcgtttttttcccctcaggccatcaagccctgtcgtcctatgaccaacaatgctggcagacttttccactaccggatcacagtctccccgcctacgaactttttaactgacaggccaactgttatagaatacgatgatcacgaagtatatctttgaaggattttctatgtttgcacatgcccccctgaccaatattccactgtgtaaagtaattagattcaacatagactacaccgattcatt

SEQ ID NO: 200 - DNA, 575 bp, Homo sapiens
  misc_feature 20, 178, 194, 205, 367, 370, 371, 372, 375, 377, 439, 494: n = A,T,C or G
aatgcaagaacatctggatnaaatggctttctagatgagaatggttgcattttttaatggctattctggtagaaaggacaacatgtgatattcatcgaccctctttctcagaccctctttataacagctagtatggaaaaatctgtctttcctataaatattttccctggggaatggnttcccattaatgtgtnggatgctttgntgtttctctcttgcacagcgtgtatgttgtcatctgcacttaagaagtggaatggaattgggaatcctggtttcttgctctggctggaggtcccaagtccgcattgtgattttgggaagtcaccgttgttcttctagatctaatttaactcatctgtaaaanaannnggntngaattccgacaatttcatgggtttcattagatgccaatattttatgactcatgatcccagcnagactacacctatttataaggctggttttgcttgtttttactaagagcaacaatnactacatattttcaggttactcaatcatcaaaaaaattataaaatccataaacactttggatttgaaacattgcaactttg

SEQ ID NO: 201 - DNA, 333 bp, Homo sapiens
  misc_feature 37, 298: n = A,T,C or G
cgtccgaaaagcagtctttcttgctcaaagtattaanggtgaacaattgaatagagtactgtggtcgggagactgatttgagactgcagagctgatgctgggtagagggtctggacttgtattcatgttctgtctcagggcagcccctggagcaggagatggcagaggcatttacagctgcagaaaacagggaggaatggaatctgaggtagccctggcctcaaaattcaggcctggctgtatcatttacagagatttttctggagggaaaaagtctcatttctgaggaaggcaaggngggctaatcattattaattttttttaaactttttg

SEQ ID NO: 202 - DNA, 509 bp, Homo sapiens
  misc_feature 473: n = A,T,C or G
gcgtccggttgaagagggcagggaataggggtgggtgagcgtgaacagagtcaggctgattgctgcagggtcccttgcattagttcaggtgagaagagacccgagtaggccagtgagcctggaggagaggctctctgtgtgtttaattggtttccagctttttttctctattcatgtaggttatacacgtttcttctgtgaatttttatttaaatgattttttgttgttactggatctacaaacagcccaactccaaggaatctggcatctctcagtggagcatacaggtgacttcataatctaaccgcattagtaactgccaaaatcggaagtaatttctctctgtttaaaaggcagtgaaacaaattttcagagcaggtttcttcaactgaacaaaatattttggaccttaaaggtggtatggctctcctgatcagggagggacagtgaaaggtttgagctctgacactgnccagctctctggatacaaccaagtgacttttttttg

SEQ ID NO: 203 - DNA, 300 bp, Homo sapiens
cgcgtccgagtatatagaaaaaccattaatttagactctgtgagattaggttgcatgaagaaggttttctgaatatttgaagagtggataaataaatgtcccccaaagcaataaaatcataatcctttaaaatataggaaaaataactaatgggaactaggcttaatactcgggatgaaataatctgtacaacaaactcccatgacacatgtttacctatgtagcaaacctgcacatgtacccctgaacttaaaataaaatttaaagtaataataataaaaaaaaaaaaaaaaaaaaaaa

SEQ ID NO: 204 - DNA, 276 bp, Homo sapiens
  misc_feature 185: n = A,T,C or G
cgcgtccgctgggaggctgtggggtctgccacccagcagatctgtgtcacgggagtggcgctgtcactcgttgaggtggtggcctggttcctttggccttagggaaggacaaacttcaactctgagccttgattgagtgaccttggccaagttacctagcttttctgagcctcacttttttggcnattagatgaaccagaggtttatttcactcagaatcctgttcacgatgctggtatttggaccagcctgcgggtttatcctgggctctttctg

SEQ ID NO: 205 - DNA, 506 bp, Homo sapiens
cgcgtccgaaaaaggatgagaagagaggtgcattccagaagacaaaaggtgtgtagtatcaggataaggggctttaaatatcagatccagagaacactgcacatgtagaaatgggcttggcctgggtcagggcattgagattggttacataatcttttcaaggattggtgaatgagttggagtatgtgtagaaacctacaaagatgacagtttaatctcatgtcataatttttagacaaataatgtattttaaaactgggtgcagttcctaaagctgttctaaaagtcaatgcaactgaatttggaatgtaagcataggacaaacagatgggaaataagtcatgacctctgtgggataaagtgagagttatcaaagaatgtcagtgtttataacaaggaacaagcttgttttggagaattactagatattatggaaaatttttttcttttctacatttgggtaactatagctgaactatagcagatcatattgacttggcaaaaaa

SEQ ID NO: 206 - DNA, 448 bp, Homo sapiens
  misc_feature 3, 369: n = A,T,C or G
ccncgcgtccggttatgtacttttggagacttccattagaaatattggcaagtccctgcttcgtggccatagatttaaaaggcctatcaattttaaatgtttcggtcattgagagctaaaacatgtaacatatcacagtgttattcaccagaaataaaaaatcaagagtctgctcagagtaggttaatatgagttcctttcttcagtccagctgatggtttttagtaagatgaactgccaaggagacaatgagcactgacttctcgatgcatgacttcatcttgttagaaggtgggttgccgggccgcggtggctcacgcccgtaatcccagcactttgggaggccgaggcggccggatcaccgaggtnggggggatcgagaccattctggctacacggtgacaccccgtctctactaaatatacaaaaaattgcccggccgtggtgg

SEQ ID NO: 207 - DNA, 203 bp, Homo sapiens
  misc_feature 3: n = A,T,C or G
ccncgcgtccgatgaatagttagcccatgataaaggaataaaaggatgaagaatatttgaagagaaataaatcttcctcactcctcaggttcccttccatgtgcaggagcctcaacctacaactagcaaccttatctcctgactcattcctctctagaggaggagtaaattagtcaactgatatgctctggaagaaaaaccca

SEQ ID NO: 208 - DNA, 351 bp, Homo sapiens
  misc_feature 351: n = A,T,C or G
cgtccggtctttcctccccctaaataatgcattacaaagtggaaatgcaaatttcctgtgcaagctctaagtagcaggtggtatttccttaatatattgtttttgacctttggggaaattggtattacgagctgactttggaaaattaaaatagcatcaaggtcctacattttaaataaaacaatcgatatcttaatttttaaaatcagactagattacgataccaggaaaagacatacatattttgcttttatgtgttaaagttttgtaattcagggaggacaagaaaagggatatggtgcagctgaactttctaattcactaagacaggaaaaaaaaaaaaaaaaaaan

SEQ ID NO: 209 - DNA, 570 bp, Homo sapiens
cgtccgggaaaaacaagggtttccgccaacaggctgagagcaaaggaggacgcaggaaaactattttaaaaattgacccaagagttcaaaaggcatatggaagcatttaatgggggtgggaggtatccttgtaataagaataccatgcatgtattcccacactgctcttggtggtctgcaaagtgatttcatatgtattttatgtcaacaccagcacaatgaggtaagtaggactgtatacctcagaggcatttggtgatttgtcagagtggagtgtagtgtgttggtgcccagatttgaataggatcatttgagtctgatatcatcatgttgcccaccgcctactcagcctctacacccgatgaggccaatctgcagctcactacagtcaatagagaacaggcaattaacccttaagttatattttagaaagatttctgtctaaaatagataaacttgaaagtatagctcttcaaaataacgtattcctgtgttggcaaatattttccaaactcacaatcaacacataggtgtatttcttagactactagaagtggggacttaccccaa

SEQ ID NO: 210 - DNA, 569 bp, Homo sapiens
  misc_feature 5, 537: n = A,T,C or G
cgccncgcgtccgggaaaaacaagggtttccgccaacaggctgagagcaaaggaggacgcaggaaaactattttaaaaattgacccaagagttcaaaaggcatatggaagcatttaatgggggtgggaggtatccttgtaataagaataccatgcatgtattcccacactgctcttggtggtctgcaaagtgatttcatatgtattttatgtcaacaccagcacaatgaggtaagtaggactgtatacctcagaggcatttggtgatttgtcagagtggagtgtagtgtgttggtgcccagatttgaataggatcatttgagtctgatatcatcatgttgcccaccgcctactcagcctctacacccgatgaggccaatctgcagctcactacagtcaatagagaacaggcaattaacccttaagttatattttagaaagatttctgtctaaaatagataaacttgaaagtatagctcttcaaaataacgtattcctgtgttggcaaatattttccaaactcacaatcaacacatangtgtattttcttagactactagaagtggggac

SEQ ID NO: 211 - DNA, 512 bp, Homo sapiens
  misc_feature 1, 15: n = A,T,C or G
ncgcgtccggtttcnttgggatagattttacctatgaattcctccttagaattctgaaattgctcagatttacccaaatgacagccagtttctcatttcacatttgggggctgtagaatcttccaacattgagaacctgttttaatcaaaggatgctttgtggaatcctgaatgaggaacagcatgttgcaggaagaagagaaggatcctgatgccctaatgggactgatttccttttggggggcaggaagatatatattcgttgggtgcttataaaaggttaattccaaagattgtgtatggttaaaggactgaaagtcacacttagcctcatacttcacttagatgaaaaacaaaagccttcctctccattaccttgtaagatctattccttgtgtcttgtgctgagtggacctggaataatggatagccctcactgagtacctagaaggggactaggggtgggtgatgaaagggggttcacaccgaagatctaagtgctagcttgggta

SEQ ID NO: 212 - DNA, 463 bp, Homo sapiens
  misc_feature 53, 106, 112, 114, 189, 256, 319, 326, 356, 374, 398, 406,432, 436, 444: n = A,T,C or G
cacgccccgtggccttgctagagatccatataatgcagtcatgctgtttcttnctccatagtatgtggggcatgaggaggagacagggagagggtggcttcattgngcaaangnggaatggctgtgctttggggccaaggagatgctgtcctgctgtagctgctctgtgaaaggtcaggcctgcccctntgaggctccctttatcctcctaaattctggggcatctacatgacgctttctagtccacctttgcctncgcagatcatggctactaacctgacctttgtctgtacttgagcacccttcgcgatttaacttncatgtancgtccgacttctaatatggatttgaatttnttgactgttactgctcanaacaatcacccttttttgagcagngagctggnaggataattgccgacaaatgacattngganccgttttnaaccacagggggcatgggg

SEQ ID NO: 213 - DNA, 392 bp, Homo sapiens
  misc_feature 19: n = A,T,C or G
cgatcattttattagagtnatgtatttaagaactgataaatcatgggcttacctacacaatgtctagacacatgagcaatgaacaaatagcaaggtctgtgatatctcatatggcaatactaggactgagattatttttgttacaattaaataattgtcagtaaaaatccacagagatcatttagaatgggaaaaaagtctgatatattttgtttcagattataatcattaatagggtacctgacagttttcaaagttgtttaatgttttttaggtctttaaccttcctaatcctacaaggtggttacaatcccacatattatccttgtgtcaggggtctccagcacctgccttagggtcagtgatttgctagaagtacttacagaactcag

SEQ ID NO: 214 - DNA, 270 bp, Homo sapiens
  misc_feature 18, 243: n = A,T,C or G
atctgacagcctggaacngcacccacacccccaggtgagaatctgatgttctggagcatcacacacaaccacaggtgagcatcggagagtctggagcagcacccacaacccaaggtgagcatctgacaacctggagcagcacccacaccccgaggtgagcatctgacctcccggagcaggacccatacctccaggcgagcatctgaacccatggagcagcacccacgcccccaggcgagcatntgaccgaacagagcagcaccccctcta

SEQ ID NO: 215 - DNA, 453 bp, Homo sapiens
tccgggaaagactctgagaaaggactcctgacctggctcttccagaatgaggatggattttccatatgaaggagccgggggcaggaccttctgggtagagcgtgaaaagaacacagtatgtgtggagagcgggaaattgtgttgaactgtctagaaaacagagccacaggaatgcgtgttgagggcttgggctgtacagtggagagtgccctccctggccagggagttggacattcatcccaccacaagaccccatgaagagttcctcaacagctctgtgtcctcatcaaacctgtgtttgcagaacagtggaggaagagagctgaaggaggggagaggccctgcacctgccaggccctggcctagactacaagggtgagcactgagccatgctctcggggaaccttcactggagttgagggcagtgagaatgtttaaaaaaaaaaaaaaaaa

SEQ ID NO: 216 - DNA, 510 bp, Homo sapiens
  misc_feature 33, 49: n = A,T,C or G
acgcgtccgatgcacacttgtcttttaccacangggtggggcgtggganggaggtttagtttggatagccacgtaaacgcctttccctgtggcctgcgatgttccacaccgtttatgtgtgaactggctgcacccgcgcctcccggacggggctgccagggaggagggcccgggagaccccatccagaccccggcccgcacgctgcagaggtctgctctcagacatgtggtgggctccgtgtcacgggtaaggggtcggggtctagacggcaacagagtgtctctctcttcccgctccctggtgtgcccacctccctgtacagtgtttctgttcaagctgctgcaggggacggggcatttttcctccagactctattttcctgcaaggaagagctgctgtcctttttcttactgaagcccctgattctgtgtctgatgttgctgaccgccgtgcttgctttcttgcccgtgtgcaacttccaatcccaagcacacgtgctcacttccaag

SEQ ID NO: 217 - DNA, 414 bp, Homo sapiens
  misc_feature 20, 24: n = A,T,C or G
gcgtccggggaatggctgtnagtnaagttagaggtaaaaaaatttcatgttaagattttggaactggattttatttaaaataatgatgcgaagccattgaaaggtttttggtgtgacaggataaatttaaaatatgaacacaccaacgcatacttcttttaagaaagaacctgattaaatttgggaattttaaaataaaaacaggaagcatatcgtactctaatataataattcaagggtttttattttcctagaagatcaaggtcatgttaataaagggaatatagttttcttatctgtgttaagacactgatgacttgcaaagaaaagtaacacttttgtgatatccttaggtaattcaagaggaaacgcttgagcaattactgatgttgtaaactgggatcagaagacata

SEQ ID NO: 218 - DNA, 492 bp, Homo sapiens
  misc_feature 1: n = A,T,C or G
nccccgcgtccgcccagttgcaaaggagatgttgtaggatgttaggtctcagcacaaggaacccaaaccttcaggggctctcctctacattatgctcccatttttctcccaaaatatcgatctccacccaccctagacatagaactggagaataagttccagtttcatccctttgcagatcttagggggacccatcaaattcccagccactgggtgaaaatcagcagcttctttataggacctgagttgccttcctagaggatcctagaggaaaaaaaaaaatcttatccttcaaatactgctgtcttccaaaatacgtaaggacgccacggtgaatcatagtggacaccctgcattggttgggttattatttatcctagaagcttgggttcttggagccctagcttatttaagcaacaaagtccctcacagcccacaggtgaggaagtgagtgtaacaaagagatcattggacctaaaatcaaaacacctg

SEQ ID NO: 219 - DNA, 490 bp, Homo sapiens
cccgaaaggaggtttgtggaacttggagagatccaggaggtaacaccaaaaagctgcatttagcaatgcctgcctagccctcctgtacagctcatgttattttgttgccttaggccatcttacaccaaaccattcctatctccatgcttttgtttatgctgttgcctccttttagaagggccacgctccaccgctctgctgtgttgatactaccgacccttcctttagttcctgttcaattcccaagccttctgccaagccttcttggacattcccatcccatgctgactattccttaagctaaaaacccttagagttaatatgatacacttggctacctcattgtttcatatcagtcattcctgtctctagctataatcggctcagccaaggaagatatatttatatggacaatgtctttgtgccttggctgtaaacagtgttgaataattaatctcacttgatgaggtcttacttaatgatagcctcc

SEQ ID NO: 220 - DNA, 346 bp, Homo sapiens
  misc_feature 25, 346: n = A,T,C or G
ctcgtccgggctggatccgtctgcnccactgcaagggcaagatgcagctggtggctgacctgctgctgctgtcgagcgaggcgcggcccgtgctcttcgagggccccgcctcctctggtgccggcgccgagtccttcgagcagtgccgggacaccatcatcgcgcgcaccaagggggttttcatccttacccacgacgtgcagagccagctcaacatgggccgcttcggggaggcgggggacagcctggtggagctgggcgacctggtggtgtcgctgaccgagtgctcggcccacgcggcctatctggccgctgtggccacgccgggcgcccagcccgcgcaagn

SEQ ID NO: 221 - DNA, 417 bp, Homo sapiens
  misc_feature 11, 397: n = A,T,C or G
gattttggctnctgcaacctccgccttaggggttcaatgcaattctcctgcctcagcctccagattgggattacaggcatgtgccaccgtgtctggctaattttcttgtaattttagtacaaaaggggtttcaccacatgggccagactggtctcaaactcctggcctaaagcggatccacctgcctcgacctcacaaggtgctgcgattacagggattacaggctgggattacaggcataagtcaccacacccagcctaaaaattaaaagtttatactgtattgttcacattgtgatgcaactttccatatgtatttccagaatcaactatgtatcaaggaatattgaaagcataaaatgagatcatggtgaattctctcccattgtcattcttgnggtaagggaatgaatggtgg

SEQ ID NO: 222 - DNA, 518 bp, Homo sapiens
  misc_feature 2, 18, 491: n = A,T,C or G
cncgcgtccgagttattnatataaagaacatttttctgttttagagagaacccatttatttgtgaaagaaacagagttttgttcttatccctataaacactgcatttgctgtttcttctctagctgatgtgacatattagggaagcagcacccgactgggactcaaaagacctgggtttggaaactttttgattactagcttagctgtgtgaaatcaggcagatggtataacttctctcattgatgatgtcaatctttttaaaaattttctagcagtgaaattttaaaaaatgaaatgttaggtgaaacctcaaacttacaacagtggtaaaattggaagggttctggatggagtgagggcagggagggggtaactgggctgaggggcccctcttcagcctcttcctccccttcaaccgaagtctgaaaatctctggctaatatgggtggatccctaagatttcttttgtacttttaacataccgaaaagntattctaaagaattttggtatggtttt

SEQ ID NO: 223 - DNA, 419 bp, Homo sapiens
  misc_feature 4: n = A,T,C or G
cgcntccgccgagcgcagcagtctccccctaacctcaaaagcctcctcagaagtaacctggtatcagtgggctgtgcagattcttatagtcttctttgcctttatatatgaaaataactttgttttatgtttgttttcacataggtggaattatactgactcttactctgtgacttgctttcttcacatgacagtaactcctggactgtttctgtagcagccacacaagtctcctttatattgccaatatctatctttatcccaaagacaagatgaatgttcaaaaacggtaatccaaactcacttctaaaaatgggtgtgtgtttaaagaagagctgctcagctgaggcagttttgctgccgaggggatttgagcaatgtctggggacgtgtggttgtcacaacttgtgagggggctc

SEQ ID NO: 224 - DNA, 538 bp, Homo sapiens
  misc_feature 3, 456, 471, 536: n = A,T,C or G
gcntccgtcaatttgcatcagttgccttaaagaatggggtagttataggaagctcacagagaggaaaaaaactcttcatgtctacattgcttcttgaactgattttatttataaaagaagaattgttgagctagtgatagaagtttcatgaattccctggtactaattatcagttaaatgacctctctgaagtctctggagagcgttctgtgtcactaatattggtgaaaatttgaaacaaaaatgctctcccattgtccacatattgcttctttgaatttggtttttcgagccaagaacttagggtgtgagaatatgtttgtggggaaacccacacaaattttatgttagtctctgtacatttaaatttttaccttcctgattacttacgtaagactaaacaatttaagtttctaaaatgccatcacttttgcaaataaaggactttattaaagntgataaataacaatnatgggccatcagctccacctataattaatatccttgcctggcacccctggaagggacttagcttntt

SEQ ID NO: 225 - DNA, 385 bp, Homo sapiens
  misc_feature 2, 40, 70, 111, 127, 142, 143, 149, 183, 196, 295, 373: n = A,T,C or G
cntccgcaattactgccttaggctagattcccatgaatangaattgctgagtcaaaaggttgacacattntttaaaggttagatacatattagtcaaagtttttaagcaanatgctttctaagcctntttgatctttataanncattgntcctttctaaaaatatataactgtcttctgcgtnccaaggataattntttttattaatatggggcttcttgtgtctacttcctcccctttcgttatttcttcaaaatgtttaacaaactaatacatttcagaacacattatgcttncatcttgtcactatttgcagtaccttgtatctcctggactttatgcaatgcgtgtgtgtgcacagatggaatatgttncaccatttggct

SEQ ID NO: 226 - DNA, 389 bp, Homo sapiens
  misc_feature 174, 202, 223, 227: n = A,T,C or G
gcagtgccggcggcgcagttgggaatgggagtgcgcttgcacaagcgccgacgagcgatagcgacgctatgccctctcttgcccaggcgccgggtggcgcggatcaacctgctctcgcagcagcccctgtggtggccgccggtgatgatgcaggaatcgtatttcgacggtggncagcttcgctttcgatcaacatcttcgncgaagttccgcgtgaaccgtncggnatcgacatcgtggcgctggcatctgccgctataccaatcatcgaaaccgcgctggaaggtcgggtccagcgccctgcagaagagacgcctccagcaggacaaggtggcctgctcgacgagcaggctacccgagtgtcgttgaacaagtatcgccttgggtct

SEQ ID NO: 227 - DNA, 438 bp, Homo sapiens
  misc_feature 165, 412: n = A,T,C or G
ctgacacccagtattgccaacctaaggactaggaagaaagggcttacatgtttcttgctttaataatatgtgaattagaaaaggtattcaagaagatacagggttagaatgtgcatctttcttttatgtactgaaatgtttcaactcatatgcagcaatgtggtnaccttgaaagatgattccagagatttcatgcttctggcagtttcaggtcacattggggtgaaatttgacatactgtagtcatccccaaggtaataatgttgatgaaatggtataaaccctgatacattcttaagcaaaatgaatctaaaagtttgtttcaaaatttttaacgttttatgttgctctgactttccatatactgatttttacattacttagtgaaaaaaaaaaattaccttttagcttntggcaacaaaaacatttttggctatt

SEQ ID NO: 228 - DNA, 432 bp, Homo sapiens
  misc_feature 3, 118: n = A,T,C or G
ccncgcgtccgcaagacaggagatttcttaaggtcatatatgcacgatttgcttaaacgtcatatagcataactggaagaatatagaatctacccaaagcctatgctctttctactgnattatttgcttataatagagaatgctaatcagaatcacctgaatagtcttgtagagggtcagtacacaagcctaggtcctatccttcagagaggtgaaatggaggcaaatatattctgaaagagtttcccagttgattctgatgagcactcacaattaagaagtgctgcattaagagctgtacatggtggcttatgcctgtaatcccagctattcctgaggctgaggctggaagatcacttgagcctggaagatcacttgagcctgggagttggagaccagcctcggcaacgtagtgagaccatgtcttttttt

SEQ ID NO: 229 - DNA, 399 bp, Homo sapiens
  misc_feature 16, 72, 348: n = A,T,C or G
ttgggagatatggcanggtgagaatgtttgggaaaggaagtagagacagacattggatttttgtcagtcaantttcttttgattttaaattatttattcattacattgtctacatggcagttaatattctaaaactataaacaaaatttaatatagaaaaaatattatgcttttcttttttgcctttgcatgctcttatttcaaaatagatttaaaattcatggcatattatactagaaaacaagtctgtcaatgatctaagcttctatctttagatactaggaaaaaagagaaaaacccaaagcaagcagaagcaaggaaataagaacagaaataaatggaattganaagaacacttcagaaaatcagtcaaactgaagctgatttttataaagatta

SEQ ID NO: 230 - DNA, 413 bp, Homo sapiens
  misc_feature 7, 231: n = A,T,C or G
ccacgcntccgaggaaactggcagggaaacaaagtatccctggaaggaatttcttaaagaggaagaggcagatccctacaagtttaaaatcaaagaatttgaagatgttgatcccaaagtgaaattgaaagatggacttgtgaggaaggagaaagagaagcataaagataagaagaaagatagagagaaaggcaagaaagataaagataagagagagaaagaaaaagtganagataaaggcagagaagataagatgaaagccccagcacccccactggtgttgcccccaaaagagttggccctgcccttgttcagccctgccacagcctccagggtcccagccatgctgccatctttgttgccagtgcttccggaaaaactgtttgaggagaaagagaagccgaaggagaaag

SEQ ID NO: 231 - DNA, 279 bp, Homo sapiens
  misc_feature 1, 37, 41, 48, 80, 95, 107, 117, 153, 162, 190, 203, 205,211, 243, 244, 250, 251, 263, 266: n = A,T,C or G
nctagactcccctctcgtatcatggatcccaacatcnaggnatatggncatttacgtgttgggatctgctctgccattgnacacagctatattcnattgccccgggngttgtgtatntttccaaaaacgttgaaagggaggttcagaagtatncagttattngtattattagtcgttttgaaactgagtngaaagactcattnangaaagntccatatgccttcttgtctgtctatggctggnntgctcnngagaaaagtccncanttatacaattgta

SEQ ID NO: 232 - DNA, 594 bp, Homo sapiens
  misc_feature 431, 497, 569, 581: n = A,T,C or G
tttcctttttttgggggcggggtcgcgctctgtcgcccaggctggggtgcaggtggcgcgatcatggctcattgcatcctcaaatgcctgggctcaagcaaacatcagttttcttatctgtgaaatgaggataaaaatgtctccacttaagggttgttgcaaggaaggtgttgccttagtcataaaagctagggaaggtgttcctaacgaaaaacaattcgtcagagacatgaaggtagaggaagaattcacacatgaagggggctggggaaaatgatttaagaaaagaaacaggcctggcgcagttgctcaggcttgtgatcccagcactttgggaggctgaggagggtgggatcacctgaggtcggggagttctagaccagcctggccaaccgtggtgaaaccttgtcttctactaaaaatacaaaaanattggcggggtgtggtggcaggtgcctgtattcccagctactttggaggctgggacgggataattncttgagccccggaggcgggggtttccggtgagcccgggattgcgccccttgcactacaagcctggggcacanaagcgaggactntgtcaaaaaaaaa

SEQ ID NO: 233 - DNA, 499 bp, Homo sapiens
  misc_feature 7, 22, 447, 452: n = A,T,C or G
ccacgcntccggtctcaaatcncctcaagtatattcaaaatttgaccacttctcaccagcaccactgtcattatcctgattcaagcctccatcatctctcatcgttactgtgacctcctgatcattctccttgcttcagccctggcccctgcaggcagcattcagtattaagcagtagagttgtttctataaaaatgtagtcagctgggtgtggtgtctcacgctgtaatcccagcactttgggaggccaaggtgggaggatcacttgagctcagtttgaagaccagcctggtcaacatggtgaaaccctgtctctactaaaaatacaaaaattaactgggcatggtggcgggcacctgtaatcccagttactggggaggctgaggcaggagaatcgcttgaacccaggaggcaaaggcttgcagtgaacccagatcacactactgnttttncaacctgggcacagagtgagactgcctcaaaaaaaaaaaaaaaaaaa

SEQ ID NO: 234 - DNA, 628 bp, Homo sapiens
  misc_feature 416, 458, 505, 606: n = A,T,C or G
tcgaggtcaaggacggttatggcccgtaactacctgctgccgcagaattacgccatcaagtggacgcgcggtgctgaggcccagatcaaggacatcactcgcgcccgtaaggctaaggagatcaagtccaaggaggaggctgagcagatccgctcgcagctggagcacctggtcgtccaggtgactgtccaggtcggcgagaacggtcgtctgttcggggccgtgactcctggcgatattgcgctggcagtcaggaaggccggtggccccgccctcgagaagcggtccatcgagatcaccaagccgatcaagaccatcggcaagcacactgtccggcgtcaagctgcatgacgctattaagggtcacgtcacggtcgagactgttcccgccgcgttgatttgacgtacacgcagantagggggaggggcatccaacctgggtgcccttcctttgcttncgtcaccaccggcgaaaggtaaatgaccgaaagtaattcttattacngtgcttaggggggtttcgccgcgccgggccgttagacttagtctagaagaaaaaaccttccacaccttccccttgaacctggaaacattaaaatgaatgcnattggtggggtggtaaacttgg

SEQ ID NO: 235 - DNA, 429 bp, Homo sapiens
  misc_feature 2, 30: n = A,T,C or G
gnggtagctttgtgtatgtcgggcacttcnaggaatagggtgcaggagaaacgtctcagtgtctccccttccgaatcttggcttctggagggagagatgctggggtgggagtgctccttggtggagtactcaggagcttagtaaaagcagagggggctggagaggcaggcctggcctgcagagccagcatggagaagcctggtgtagggctctccagcctgccaatttacagttaagaagaaaggagatatgtatatatatatatacacacacatacatacatacatacacacacacatatatacacacatatatatacacacatgtatacatatatatacacacacatacacatatacacacacatgtacacatatacacacatatatacgtggggtgtgtatatgtatatatgtgtatacgtatata

SEQ ID NO: 236 - DNA, 558 bp, Homo sapiens
  misc_feature 108, 164, 175, 176, 545: n = A,T,C or G
aactgtctaatctcttgacctcgtgatcccctgcctcggcctcccaaagtgctgggattgcaggcatgagccactgtgcccagccatacttttttttttttttctggngcatttctgaagttaaatatgttgagttctctgcccatttgttcaaattctattgnattatttctgnnggattgacaaatgttatgaacaatttggtttcaaaatagatttttctatttagcaactttctattcctctaggacctagtattaaggtcattaagatggcttaatgagtcattaagccattaatgagtcattaagatggctgaccaatctgtgccatcttttttagtgacattttgtttatcagtgtctcttttgtgtatttctttgatttatatcttgacagtattacataagcaggaataaaagagactttgagtgggaatgtctcgctcaaatataaataaccttataaatacaatctttacttctcagagtcctaaaatcttcttggttagtctggtcttcctgggttgattcaaggttctcggngactaaatggcat

SEQ ID NO: 237 - DNA, 526 bp, Homo sapiens
  misc_feature 5, 435, 517, 519: n = A,T,C or G
tgttnacctttgggattacacaatacttgcaatccagctctgccatgggggacatcattacacaaagcactcctcaccagtagtcagatggcacttgatagctacaggcatgtgaatattcttttactgtcaacttttgttgtgatttcacctaaaatatgataagctccttgaggataaaggctaagtcttacttcttcgtatttctggtaaccgcttgtaccaaacacctgccaagcattgttgattgcacctatgaggaggtgagaaagtgccaggccgtcatgcccctctatacaaacatgtaacagtagactctggttcatcaaggagtaaatgacatgatatgtgatagaccacatacattcgtggctatagatagggtgagtaactgtaaccatatccaattgtgagcaaaaagtgtttaattggggnggttttaaactaatataaaattggctaaatcatcatttttcaagctctcgaatcatctgaagacctttttttattttttaananttaggcc

SEQ ID NO: 238 - DNA, 771 bp, Homo sapiens
  misc_feature 59, 141, 143, 149, 184, 290, 291, 355, 366, 392, 395, 408,415, 456, 460, 465, 471, 475, 478, 481, 487, 492, 499, 501,504, 507, 518, 526, 530, 538, 542, 552, 557, 582, 598, 607,609, 610, 614, 619, 626, 628, 633, 634, 650, 663, 673: n = A,T,C or G
  misc_feature 685, 691, 695, 704, 709, 723, 724, 725, 726, 738, 742, 744,747, 750, 753: n = A,T,C or G
cgctccgttgcagtgagctgagatcacgccactgcactccatccttggtgacagagcangactccatctcaaaaaaaaaaagaaattgggttgtctaggcacagtggctcgtgcctgtaatcccagcattttgggaggctncntagaanaatcacttgagcccaggagtttgagaccagcctgnacaacatagtgagaccccatctgtaccaaaaaaaaaaacaccagacctggtggcacatgtttgtagtcccagctactcaagggctgaggtgggagggatcacttgnncccaagaagtcaaggcttcagtgagccatgattggtgccacttgactacaagctggcaacaganccaagaccctntttaaaaaaaaaaaaaaaaaaaaatnggnttgggttataggngaagttncctggaaaaccttacaaaacaagaaccatgtttgggggaancaantgganggggtnaaantgnccncttgangcttntcctttngnggnccntaattaaaaangtttcccnggtnttggcccngggnccggaaaatnccttngaatttctttagccccttttggggngggcaaaagccagggnggaatcccncnngggntcagngattttngnaaccnnaccttggccaaaaatnggggaaaaccccngttttttttntaaaaaataacnaaaaantttnccccctttnctttngggggggcccacannnncccccttttttnatananaanaanaancccccccccccccccccc

SEQ ID NO: 239 - DNA, 315 bp, Homo sapiens
  misc_feature 89, 90: n = A,T,C or G
catctcaaaaaaaaactcacaacatattttatgtacacctagtatcagtgagattttttaataattagatttattatcttccatattgnntacaaaactttcttcaacttcataaaaagtcaagtaacatactgtacttacttctctcacctcattttaaaatagtggataaattgtcagacacagtgactctgcacctgtaatcctagctacttgggaggctaaggtgggaggattgcatgaggccaagagttcaagaccagcctgagcaacacatagagaccctatctctttaaaaaaaaaaaaaaaaaaaaa

SEQ ID NO: 240 - DNA, 612 bp, Homo sapiens
tgtcgacccacgcgtccgcgctcctgtcatctcccttgggtcttcatttaaatgccacaccagagaggccctccctggccaccctaatgaaaacttcaacatcctcaaccctaacatttcctgtcccctgggttattcctccccttggtatttatcaccatttaatgtactatctggccgggcatggtggctcgtgcctgtaatcccagcactttgggaggcccaggcgggcggatcacctgaggttaggagtttgagaccagcctggccaacatggtgaaaccccatctctactaaaaatacaaaaattagccaggcatagaggcatgccgcctgtaatcccagctacttgggaggctgaggcaggagaatctcttgaaaccgggaggcagaggttgcagtgagccaagatcaagccactgcactccagcctgggtgacagagcaagactctgtctcaaaaaacaaaaacaaacaaacaaacaaacaaacaaacaaaaaaacccaacaaacccaccaaacataccatatttggtttctgtaaaaaaataaaaaagagagagagaatttttaaaaaacaaaaaccatactatctaatttacatttttaatct

SEQ ID NO: 241 - DNA, 724 bp, Homo sapiens
  misc_feature 558, 638, 648, 652, 654, 668, 673, 676, 680, 691, 709, 710,712, 714, 717: n = A,T,C or G
ccccgcgtccgctaaggcatgtgagcgccttgtagggcacgttctgtcttctgactacataagcaacacttttgcgaccctaagtcacagcacccacagcttttggcaggatactttaaaacagaaaaaacacatcattgatcctggcaggattttttaagggattgtgcttaagaatgtttaactttggtaatcagagaccaccactggtgtttttctccaaaatcacatctttaagttaattaatacttgaagttaataaataatactgctcaagtgtattagtaatgatgccataataccatgtgaatttatgctgattcaaatgttgtttttttcgtttgatactcatatggccttctgttttgaggacttcagattatttagcaactgatttaatctggtcaagaaataaactttgcttcagctggaaagcgtgaggcttgagaaaagcaaggttttggacaggggacctatgaagctcatgttgaaacttaagtgttttaaggctgtatgggaacttggaatgggagtgaaaagaaccaagccgtctactgncaaggtttttccctcctccctctaaaatttataaacctcattcttagaagtggcaaaaagttgggaaccttttccactgnttcacttctnttantnaggggattaaaggnggatnggnaaanggaagttttcntggttttttaaaaaaaanngnanaanggggggg

SEQ ID NO: 242 - DNA, 710 bp, Homo sapiens
  misc_feature 2, 134, 147, 151, 154, 175, 194, 208, 216, 225, 227, 240,243, 252, 268, 270, 275, 277, 281, 283, 284, 285, 297, 306,308, 315, 334, 335, 339, 340, 357, 363, 377, 384, 385, 387,388, 396, 399, 401, 410, 429, 448, 465, 471, 472, 480: n = A,T,C or G
  misc_feature 481, 482, 486, 491, 494, 498, 499, 500, 502, 505, 507, 508,510, 515, 519, 533, 540, 542, 546, 548, 550, 562, 563, 564,565, 568, 573, 588, 597, 602, 607, 618, 619, 622, 624, 632,641, 643, 645, 647, 658, 659, 661, 663, 667, 672, 673: n = A,T,C or G
  misc_feature 676, 685, 693, 694, 695: n = A,T,C or G
gncacggcggggcaacctggttcccctgggcggtagtcccggcagctgtgcttcccccttcactgcagtgcgtgttcagttggaaacacggagatttcacctttactccctggctatagggggatggtgagaanggggctgcgtgtnaggnganattcaaggcataaatcttagnttgtcttttaaagaattgngtgccgggacgtgnttggaggntgggtgcananaggaagaggcganctnctggaggangcaaaggacaggtcantntgcgnanttcngnnngatgctgctgantgaaccccngntgctgtngccccaacaagaaaggctnngctnngatcaaacatttactgnacctanaaggccacattctngcttaannannccaggaangcncnttcttgttncccattaccaaaatcattnacacttggtttttggcccnacatacctttccttttngaccanngttctggnnnaaanggcantanaccnnngnatntnncntcatnacangaataaaaagcccncagaacncnacanangngcccatcactannnntanagatntcaaaagggggcccnggatccttnaccanagaanactctggtccnnagngnaagaaagnaaaaccccncnanangcactgggacnntntnatanttctnnttnaaacaaaancttataannnaaaaaaaaaattttt

SEQ ID NO: 243 - DNA, 699 bp, Homo sapiens
  misc_feature 538, 673, 687, 688, 696: n = A,T,C or G
aattaataagcctcctgggtgatttggctgcaggtggtcctgagaccacactttaagaaacactaatcaagaatcaaggccttatgactcttagtcctgtttcttcccaaaggactatgttgcctccctacattcgaaaacattccaaacaatacataagagtctttgtaattcacattagtgctcgtatttactgactcaacaattaattcctgattgagtcattcattgagtaattttcttttactcactcagcctctgtggtttgccaggagctacaaataaaagattaaaacacagtcacacctccaaggaactcatataatagtaacagaagtaactaccatttcttgagcactttatttatacataccgtcatacagtttatctcattcacctatctcattccctgcctttcagtaagcctgtatactattataaccgcatagtttgggaatatttcatatatatatatatatatatatatatatatatatatatatatatgtataatcacatatattctcttcaacttgtnctttacatttaatatgtcttaaaagtatttctttgtcagttcttgctttatatatgtctagtatttctttataagggctacaagaagtatccctcaagcattggatatttcaatcaaattacccttgggggggtngggggaaaaaaatnngggggggnttt

SEQ ID NO: 244 - DNA, 682 bp, Homo sapiens
  misc_feature 477, 509, 512, 578, 596, 632, 638, 655, 671: n = A,T,C or G
tcgccccgcgtccggggaaggctaaggcgcgaggatcccttgagcccaggagttctaggctgcagtgagctatgatcacgccactgcacaccagtatgggcaacagagcgagatcccatctctaaacaaatttaaaacaaacgaacaaatgaaaaatattgctgtcttaaggttgggaaggggcagagacccctttgcttgctcatcaccaagacacttctgtgaggccccagggctctttggagaacgttttgaaaatcacggttctaagtaattatagttactgtgactgaactaatttagccctaagcttcctacaatcaagatagagatacactatggactgcatttctccgcttcagattaaaaaaaaaaagtttaagtcagaatgtagttatattttcaggtaaaatgctcaatacattttcaagatgaagctgctcaaaattaaagcagtgagtccaagggttaatctgnaaaaaaaagtacaatttactatctcctggttncanacttatagaccctcataggtgcattggctaatacaaggggccactaaacacattgtggcatttacnggattttattggtgaagngctctataagttttattggtgccaggtaaaagaaangcctcntataaaaaaatggtggnggggggtttttttttnccccccttttt

SEQ ID NO: 245 - DNA, 499 bp, Homo sapiens
  misc_feature 374: n = A,T,C or G
ttccgtacctaagaattgtaccctttcataacagcaccacttggatatgtagaaagagtttgttgtgagatcagatgtaaaacaaataaaagttattcgtgaaatgatatggaagactgggattagaaactgtggcattcaagaagccagttaagctgttctcagaattgacagagattctagagatggtgtagtgcagatggtgtagtgcagggattctcagcctcactgcacatggtaatctcataggaaaattttaacaaggacagatgcagaaattcttattaaactgtcaggactgaagtccagaggtcactatattttaaaaaggtctgcaagtgattgtaacatgcatctatggaggaaaacatcancgtaggagaaaaagggaaagaaaccaactggagtaaaggctctgtcttgagcactgtgctggctcctgtcattctccatctctttttatcttcatagtaagtgagatgggtttgacaaataggga

SEQ ID NO: 246 - DNA, 671 bp, Homo sapiens
  misc_feature 9, 21, 602, 639: n = A,T,C or G
gcgtccggngtaacttgaacnaaagtattctccttcttctgtatatttgttctcaacccccaattcctcataactttctaagtaagtagggtgaaaagaaagtcagggctgcctagggaagctacatttgcttctcaaggcttgcacctgcatatttcatgcccgacatgttgctgaacacagccgagtaaagtgccagaataaaatcagctctgtccacgtggtaccaggaatgctgctgaaatgaaggtaagtataggattccacaggatctaagacagtccagggaactgggaccaattgtgggaaacctcaaagctgagcatatttgaagaaaatgcagagtaaaatggctatgggctgccgggaggcctggatttgagataccaagcaccactgatataaacactgatgctcagaaaaagaaatgatgagtgtgtatttgtgtcccttgagacctaatttaatttataattattcaccagagataagaggcaagggatgtctacttgctggatatctgaatttacacagttctctagtcattagtattttttacaaatataccactcagactaggggggcagaggatctggggtttnaatttcaagacctgtcacttatctgcatgaattttgnagcttataagaacttacaggttaacctttttt

SEQ ID NO: 247 - DNA, 513 bp, Homo sapiens
  misc_feature 17, 19, 31, 37, 41, 73, 104, 123, 137, 138, 168, 182, 306,351, 382, 419, 429, 430, 440, 462, 464, 468, 485, 494: n = A,T,C or G
tgtcgaccccgcgtccntngtatttataaanataatnctgntagataaataagtgattcatattttgtcaaanctattttaaaatttcaatatttaaaatattnttgaatcactgggtgtcgntaagtggcatcatnnatgagatttgattccatgtaccatataatnttagattggtcctntctcaccccttttaaactccttcaagcattgctattactggggttgcctttgggaaaacttacttctagatactaccatatatctgaaatagtagaggtggatgttaataaaattcataaaatnatcatgtattactttttttgatttaccactggaaggaaatacagncatgtgcaatataatgaccgttttggtcatngagacccacatgtgtgacagtggtcccataaggatgnggctgaaaanntcctgttgcngcctagtgacactgtagccatngnaacnccatagcacgacacgtnactcacctnttcatggtgatgctggtgt

SEQ ID NO: 248 - DNA, 329 bp, Homo sapiens
  misc_feature 300, 303, 304, 317, 320: n = A,T,C or G
ccccgcgtccgattttgaatgtattgagactaaagttcctttgaaacattaaagaagatccatcaaactggcaactgtatataaggtctgatatcttctggcactcagagggagagtttctggtggaggtggaagtgacttaggagtcatccatgaacataaatgagatcactcgtgtagggaagagttaatgagattagagagccttggacagagccttgcagcccaaacccatgaaagagcagtaatagtgagtgaattaccttctgaggcagtgcaaagtagataagaaaacaaaanctnnaaaaaaaaaaaanaanaaaaaaaaa

SEQ ID NO: 249 - DNA, 543 bp, Homo sapiens
  misc_feature 17, 115, 116: n = A,T,C or G
ccgcgtccgcagtggtngtgatctcgtctcctgcaacctctgcctcccaggttcaagcaattctcctgcctcagcctcccaagtagctgggattacagattatgtcttgtgttanngaaatcattcaatttttcaccagagaataaggaaaagcaaattagactgtgaataaaatctccatgtacccactaggatgactacaattcaaaaggctgacctatccaggtgaagatgagagtgtgcagcattggaaattcttacacattgctggagatttagaagctaaagaaagaggacaaatgatttggaagcaaagataagaaggaagaaggagatggggtcttgccatgtttcccaggctggtctcaaactcctagattcaagtgatccacctgcgttggcctcccaaagtgctggcattataggcatgaggcaccatgccaggcctgttttgaaatttcatacatatttataaaacatattttcaggatgagagaatataccaagaagttacatagcattgtgtatctgtatagaataaaa

SEQ ID NO: 250 - DNA, 559 bp, Homo sapiens
  misc_feature 334: n = A,T,C or G
tcgaccacgcgtccgggtgaacgtggtcaccaaggccatgggtaccctgggggtgagcttatcctcctgcagcgtccctggttccaaacccaccttcgagctctcagccgacgaggtggagctgggcctggggatccacggggaagctggtgtgcgccggataaagatggcaaccgccgatgagattgtgaaactcatgctcgaccacatgacaaacaccaccaacgcgtcccatgtgcctgtgcagcccggctcctcagttgtgatgatggtcaacaacctgggtggcctgtcattcctggaactgggcatcatagccgacgctaccgtccgntccctggagggccgcggggtgaagattgcccgtgccctggtgggcaccttcatgtcagcactggagatgcctggcatttctctcaccctcctgctggtggatgagcctctcctgaaactgatagatgcttgaaaccactgcagcagcctggcctaacgtggcttgcagtcttcattactgggcggaaagcggagccgggtaagccccttgccgagccccaagaag

SEQ ID NO: 251 - DNA, 471 bp, Homo sapiens
gtcgccccgcgtccgcaagaaatgatgttagtaaagatactttaattgcggggagttctctgttggctggtgaataaggacgttctctttgagttccacctttctttgagaaattttcatgtttcctgtacttttcctctattatatcatggaaacttactaaatcagcctgtgcattccgcccacatattccctcatggtgccttccggtcctagcagctgagccagggccatcaataaatcttcttcttttcccccaagatattcctagttgcttctttactattcattcttgtaattccattcatctgtgtgtatcatttaggatgctgggcagttgcatcgcatttcacctaaggtcacatcctgatgggatttggtgggatcctagagctggctaggaccacttgtgagagctgattgttaaattctccgaaatgacgtgactcaagttgttagactgcttaaagg

SEQ ID NO: 252 - DNA, 433 bp, Homo sapiens
ccggtgaaacctggagctgaagtgaattctcttagagtatattttgaaactgtactaggactttaaacacttttggaatttaaaacagccataaaaattcttgttatactgaaggagttcctgaggcagtgtgcctctcattttaccacctaaagttgccatagaggtccaaggagacactgctgatagcagaaagtcttccagaaagaaattaggcgacccacaccaagcatgtatggctttgagtcttacagatggctttttaatagtttagtctcttaacctaaggaagtttctgaagttccggtcagagagtctaaaaattcacattttacctaataaatgataatgaggctatttatcttgtctgtctggattttttcacttgacatttaatgaaatatcccatattacctataatttttatttgaag

SEQ ID NO: 253 - DNA, 512 bp, Homo sapiens
  misc_feature 68, 163, 228, 242, 243, 244, 260, 265, 266, 272, 281, 294,300, 303, 306, 309, 310, 311, 313, 314, 320, 324, 328, 329,330, 331, 332, 347, 349, 353, 356, 359, 363, 376, 381, 385,386, 387, 391, 435, 442, 462, 499: n = A,T,C or G
ccccccgcgtccgagataatgctgtttgcttccggccgctgtaaatcataggtgaaaaccagtagcangtgctcactcagtgcctcccagaagcggtctgcgggtctcagctgggctgggggcagttttcattgggcaaggcttgggcttagcttcgaagcangggctgggagaggatggatgggggtgtgagagcaaaagaaagacctggctttgcagtgatggcancccacgttcaaatnnnagctcaccactgaccngtcgnntgacgngcgccaggngttaggagactgnaactgnttntgngtnnngnntccggncgtncatnnnnnctgctcagcatacanancctnttnctnatcntaatcctcatacncatgnctgnnnactntacactgttctacttatcaatgacaggtcaaaagtgttatcatntgtgacntagaatgagtgaagtacacnccctcttggaaactatgaatgacttaaagaatcaccntttgcaaaaaatc

SEQ ID NO: 254 - DNA, 608 bp, Homo sapiens
  misc_feature 315, 462, 482: n = A,T,C or G
gccttcgcccctgcctcctcttggctgcggctggtcatcttcccacctccacagtgggccgagctgccaaacaaggggtacacatgtgccccctgacataggccaggtggtctctgccctctgtagctcccatgagagagggctcctcggaccgaaacaggaggccactgcccttgcgcacacaccgtggccgggtcctcctgggcggagcgctttccgtgtgtgggaaagtcaagggcagccccgagcctcgaagcccaggctcccagccccgcgccatgttgcattcccgcctctactccttggtaggctggntgctttgagtggttctttttaattctttctgttggtttctccttttcctttgcctgggttttgctttaacctctctgttgcagagatgcagagcactcagagagcctatttctatcatcgctttcctattctccacctagaaccagntgactggccgcccgagtggngtctcttgtgtgtgtggtgccgtcaaagctgtgcaaagaaatgcttctgcctaggtttcttcgcgccccccccttgcttggcttttcctgcctgcttacacccccggttcctgatctgccctgggc

SEQ ID NO: 255 - DNA, 364 bp, Homo sapiens
  misc_feature 19, 96, 115, 147, 347, 354, 356: n = A,T,C or G
gcccacgcgtccgcaaganagctcctcagatttgtcatagactatatttaaagaaaggccacatttttcttatttaaaatgcattaaacaatgcanccaattaaaagaactgagntggatttgtacaaaagcagggactaggtctgntttgttcactgctatattcccaatgcctagaaccatgtctggcaaacatactggcatgggaagaacatttccataacccctgaatgttctgtgcccctttccaattaatccctaccctcagaagcaaccactattctcatgcttattacattagttttgcctcttcttgactttcatataaatgaaatcatacatctaanaaaaaananaaaaaaaa

SEQ ID NO: 256 - DNA, 520 bp, Homo sapiens
tcgaccccgcgtccgatttgatataaatagttatgttactcatatagaaatctcttccccattacacacatacaaacatttatctatgagtggcttataattgcaaataagatgtaaatcatgctcatgatcattgtcaaaattgtgaaagatttttttctatacctcttttaggtttgttttgtttttgtttttgatttccaggtggcattaaagacaagagggaataatattcattcttacttctactcccaagtcactagtttgctgaatttaattgagttaaagaattgtatcagtcttcttggaagtctaatacaaaaccagttcaacactagttattcattctttgctaattcaccagaattgaaggatggataaaatgagaaagagaagtagttcttcatattattaaaataaagagttaaattagacactttgttggactctttggtcttaataattcctactctttttgaggtccaaaagttttgtctttgataaatataattttaatggg

SEQ ID NO: 257 - DNA, 595 bp, Homo sapiens
aagttgggaaaataattcatgtgaactagacaagtgtgttaagagtgataagtaaaatgcacgtggagacaagtgcatccccagatctcagggacctccccctgcctgtcacctggggagtgagaggacaggatagtgcatgttctttgtctctgaatttttagttatatgtgctgtaatgttgctctgaggaagcccctggaaagtctatcccaacatatccacatcttatattccacaaattaagctgtagtatgtaccctaagacgctgctaattgactgccacttcgcaactcaggggcggctgcattttagtaatgggtcaaatgattcactttttatgatgcttccaaaggtgccttggcttctcttcccaactgacaaatgccaaagttgagaaaaatgatcataattttagcataaacagagcagtcggcgacaccgattttataaataaactgagcaccttctttttaaacaaacaaatgcgggtttatttctcagatgatgttcatcccgtgaatggtccagggaaggacctttcaccttgactatatggcattatgtcatcacaagctctgaggcttcttcttt

SEQ ID NO: 258 - DNA, 261 bp, Homo sapiens
gagtcgaccccgcgtccgctctggaggaagcatagattagaatcatgatttttatctattttaagagaatagaagaacagaaggggttacaatcttgcaatattatgcaactcttctgctctaatatatcaaaaacttgatgatccaagatcatgcagaacagctgagaagaaatcaaagtaaacagtgtaccttgcagccaacagatcctgccaatatgagattagaactctccatcctagcaaaaaaaaaaaaaaaaaa

SEQ ID NO: 259 - DNA, 376 bp, Homo sapiens
  misc_feature 257: n = A,T,C or G
ctggtacctgcgagtcgctgcagcagctgtggcaattgtcaccttcatccaggcccatcccgctttgagggcctagagagagtgggccagaggttaacccccgattcatctgcctccccacgctgggcatctgggtgtgccagggcattcccccgctggtcagacaggtttttgggccagggcggggctgaccagggttaattagagggaactggctaggaggagctggggagggggctgggcagagtccaggcctncagagcccctgggacacagcaggtgtgtgctgccatgggccggggcttgaactctgccagactcaggcgccaaaaacggcgcttgcgacctcaggtccagaagccccggcagcaagctg

SEQ ID NO: 260 - DNA, 639 bp, Homo sapiens
  misc_feature 103, 404, 494, 537, 540, 627, 629: n = A,T,C or G
tcgaccccgcgtccgaaactctgtctagtctaaactattattctatacttctcatctctatatgttaaggattgatctccaagataaattgttttttgtttgntttttagggacaggatcatgctctgttgcccaggctagagtgtagtggaacaatcataactcactgcagcctcgaactcctgggcttaggtgatccacctgccttggcctcctgagtagctggaattccagatgcaaggcaccatgcctggctaactttttaaaatttttcatagagatggggtcttaccatcctgcccaggctggcctcgagctcttcacctcaagcagtcctcctgcctcagcctcccaaggcactggtattgcaggagtgagccaccacgcccagcccaaaataattnttttttaaagcaagatgtagaaaagtgattataatatgtttccatttaggcaagaaaaaaaatggagaggactatacctgtactctctgnacataggatccacagaaaacttctaatggatggttatccctgnggngggaaactgggggacagggaatgatgaagcaggaaaatttttactggataaactttagttctggtggctctttttcttctatcatgngnatggtaactt

SEQ ID NO: 261 - DNA, 634 bp, Homo sapiens
gtcccgcaaagcctttaaaaagagtccgaatttcacttttcaccttttgtagatgtgcacgtgtagctgtagagctcatacttacgtttcacatggcatagttgatggatatgtaggtgtaaagtttatggtagtggacaggctgagaatggtgtatctgtgacaaaaaatctgatggaagtgatatatttgatatgaaagtgaacattttcttagttgggtgtttataacttttttttggtaaattgtttttagtttttatccttattttacttatgcttggcaatagatggtcttttttccccaaatcttcttctgaattccaaggaaacactgttttagcatttatttgattactttggttcattcttttctccactcccatttatttgttttccattttgtaacttctataaagcagataaaaatctggaacttctagatctgaccttcatgccttgtcttttctatggtacttattctttctgtctccttctcattttggattgggcttatgagagaaatcttggggttgatcttccagctcactaatttgatattcatttgtgtctcttcagttacttagcttgcctgaaaactttttttttcagcaattgtgtacttaattttcata

SEQ ID NO: 262 - DNA, 355 bp, Homo sapiens
  misc_feature 3, 110, 114: n = A,T,C or G
ccncgcgtccgtgccctggggcccccctgggcgagcataccctaggcgtcaggcctggaggtctcctcggtgcctcccagctcttctgtgctcctcacactctgctctgngcanattggctgtatttgtaggttactgccttttatttctcacatttctttttggtgagagtatatcaatcaatcaatcatcctcagacctctatgataacactgtgccccacacacaagaagctactcaattaatgtttgtttgttgaaatgagagaaaatatttgtccttagtacagaaagaagatgaagccaacctctgatagaagcccacccatagactagggtgttgagctgccttccaa

SEQ ID NO: 263 - DNA, 543 bp, Homo sapiens
  misc_feature 1, 115: n = A,T,C or G
nccccgcgtccggtagttgcagaagcatgttcttgaacttatcagtcctgacctcagatttcatcttcttctggtagatgtagcatacatctctgagtgttattagaggaccagnctagagcctcatcgtactccttcagttacttcataatcatccagctctttatattaaatgtttttctgtttaaaatggcagcaatgttttttattttttgaaatggtccctgacagcaacagatcttctcgtgtttaattattgagtctgtgctgattacacagaattaaggatatagtttctaaagtacttccatttttatatattttagcattattctgaaaggcctggaaaaaaactattttttattcgatttgaaagtgaagtgacataggtgggtcgctatagcaagaaattaccctgtatttttccatctctatcatcacaggcatctcacagaattagaagtcggacattattgatggatatattagtcatgaataattaaaatacattaaatataaaatgggtcagatacgggcagattt

SEQ ID NO: 264 - DNA, 320 bp, Homo sapiens
  misc_feature 2, 39, 112: n = A,T,C or G
cncgcgtccgggagaaaagagttttatacctaattcttntgcaagtgattacatatttttatacccaggatgttcagcaagatgaactttattttttagatgtatctatggnttttccacccattttattaatttttagaaatataaaagtgcctttaaaatttagctgggttaagatagtaagttttaggctgaggcaggagaattgcttgaacccaggaggcggaggttgcagtgagcctagatcgtgccattgtactccagcctgggcaacaagagcgaaactcagtttcaaaaaaaaaaaaaaaaaaaaaaaaaaa

SEQ ID NO: 265 - DNA, 376 bp, Homo sapiens
  misc_feature 13, 24, 106, 226: n = A,T,C or G
gatcctctaagtncccaatgatcngagaagaaatatgaaagggaattttaaaatattttgaactgaatgaagatgaaaatgccacagataaaactttgcatggggnagctacattagttagcttagagggaaatttatatttttaaattcttatattaggaaataagtcttacataaataatctcagcttccacctaagaagttcaaaataaacccacagtaagcngaagaaaggaaataataaagctgagaaaaaatcaataaagtttaaaagagaaaattaatagatatcaatggaacaaaagttgcctttttaaaaatatcaacaaaattgatagacctttagccagaatgatcaaaaaaaaaaaaaaaaaaa

SEQ ID NO: 266 - DNA, 241 bp, Homo sapiens
  misc_feature 27, 112: n = A,T,C or G
cccgcgtccgcctgaatttcagagtcngttgagaaggtagggagcagggatctctcagacaccaacatgttcagctttattatagataaggctgaattgatttcctggaatngaccttacttccccacctccaaactgcaggccttccccttgcaggttcagaacatgttaaggtaagttcactgcagagataaacagggtgaggacaggccagtcctaaaaaaaaaaaaagaaaaaaaaa

SEQ ID NO: 267 - DNA, 557 bp, Homo sapiens
  misc_feature 14: n = A,T,C or G
ccgttctttttccnaaactaaagaatgcataggacataagttaaaagttcatacataacctggcttcaaatccagttctaccactacctgaaaacatcagtttatttctcatcaatgggttgttataaagtacctagcatagggtattgcttaaatgttaatactcccaatcctgacactaatgtttcagggaagagtgaaagaaatcacattaactccacattattgaacatcttctgtgtcaggctgaatacatctttgtatccattgtcttctggttgtttaaagactagtgtagaagcctgacatgtaaatcggtgattatataagatagtactgtcttgtaatgtgttgtgctagagaggttaagtattaattattatgggagctcaggagaggcacccactggctgctgggagaagagcaaaaacctatatataaagcaatttttaagattttggttctataagggtagaatgttcgatccattagtgtattcccaaagtcctatacacatgtcaagatcgggaaagctcacacacacaataatgcccaag

SEQ ID NO: 268 - DNA, 532 bp, Homo sapiens
  misc_feature 107: n = A,T,C or G
cgtccggccccatgcccagccaagttatgttgtttggtcaattttagataattaaaaaaaaaaatcctatgtagtaacatcctactaggaaagaagataaactcaantatccactgagtggtgacctgaaaccaaagagacatggaggggcagccagtcaaaagccactgcactccagcctgggcaacagagcaggactgtgtctggaaaaaaaaaaaatctagaaacatactcaaatgtaaacataagaacttagcatatggtaaagttgtgactgtgagtcagtgcagaaaagaatgaatcaatcagtaaatggtcctgggaaaaccggctatttattttaaaataataacaaaatatgctgtatatcatcaatggattaaagatttatataccttcagcatatgtccttaaatgttctagaataaaatatatatgaattcaatgtaatttttgatgtgagggaaggccttttagacatgacacaaatgtcaaaaagcataaaaggaaagattttgaataaataataaac

SEQ ID NO: 269 - DNA, 222 bp, Homo sapiens
gcgtccgacagatacaccatcattataggtggccaaatcattcaaatcgctgtttgcttcttctcgggctcttattcaagctcacgatgctattctcatagtgattgcgaatctcactgcataaaggtgattttgaaaacatcacttttcctccacactaatgtgtgagcttagccagagtaggagatatatcttacttaaaaaaaaaaaaaaaaaaaaaaa

SEQ ID NO: 270 - DNA, 396 bp, Homo sapiens
  misc_feature 10, 16, 18: n = A,T,C or G
cccttttttncggccntncgggcaggtacgcggggaggtcatgcccgtgtgagccaggaaagggctgtgtttatgggaagccagtaacactgtggcctactatctcttccgtggtgccatctacatttttgggactcgggaattatgaggtagaggtggaggcggagccggatgtcagaggtcctgaaataagtcaccatgggggaaaatgatccgcctgctgttgaagcccccttctcattccgatcgctttttggccttgatgatttgaaaataagtcctgttgcaccagatgcaagatgctgttgctgcacagatcctgtcactgctgccattgaagttttttccaatcatcggcattgggatcattgcattgatattagcactggccattgg

SEQ ID NO: 271 - DNA, 348 bp, Homo sapiens
  misc_feature 8, 34, 55, 82, 83, 92, 158, 164, 284: n = A,T,C or G
accgcggnggcttcatgcaagctgtgggcatggncaacgatcacgaaaatcattnttcctttaaataaaatacaatcctatnnaaaggagtncttccatgagcaacaatcaaatacgtgcttatgctgcgatgcaagcaggtgaacaactggttcctnatcaanttgacgcaggcgatttacaagcccatcaagacgaagtcaaagttgaatattgtggattatgtcattcagatatttcaagtgattaataatgattggccgatcatctacttatcctgtagncgcaggtcatgaaatcattggaaccatcactgctctttggttcatgaagcgaaaggactcaaag

SEQ ID NO: 272 - DNA, 504 bp, Homo sapiens
  misc_feature 94, 304, 334, 335, 449, 475: n = A,T,C or G
cccttagcgtggtcgcggccgaggtacaccaagaccaattgctaaaatcttggattatggaaaatttaagtatgaaagaaagaaaaaacaaaangttgaaaaagaaaaacaatctttcacaaacaatagagaaattcgtttatcttttggaatcaatttaaatgatataaaaatcaaagcaaaaaaagccaaagaatttttattagataaccgacagagtaaaagtggctcttcgtcttagagggcgtgaaaatacaagacctgaacaaggtaaattaattttaaattctttttttgatgaagnaaaatcgattgcaaaattaaagtaaagaanngcaatcagtttggtaattttttaactcttcatattgaacgtgataagaaaaaattacccaaatttacttcttcaaaacaaataaaggaattaattgattttgaaaaaactattnaaggaaggaagaaactaatgcctaangccaaaaacaaaatcgcactttaaaaaaa

SEQ ID NO: 273 - DNA, 553 bp, Homo sapiens
  misc_feature 15, 49, 364, 459, 541: n = A,T,C or G
cccttagcgtggtcncggcctttgtacgaaattatgactgttttagctncaggaacagatttaaaagtaattgaagacgttttaaaatctgtttttgatgctaagaacatcgaaaaaattgaaaaacttgaaagaacagagttagcatacgaaattaaaaaacacaaacaaggaatttttgttttagctaacttaaaatctgaggaaagtttaatcgaagaatttgtcagaagagtaaatattctcaaaaaacaagttttaagatttttagttattaatctagattctgaaagaggaatgcacaaaactttcagacctagaaaaaatgataaacacaaatttttctcttctaaaaaaccaacancttcaacagaagaaggtaaaagttttcaaaaaccatttgtcaaaaaaccttttgttaaaaaatcagaagaaacagattcttcaaaacaaaatgancaagacaaagtgctaagaaaaccaaaaactgtaaaaaccagcaaaagatcctaaagtagctcacacagcaaaaaaaaaaaanaaaaagtcctgc

SEQ ID NO: 274 - DNA, 513 bp, Homo sapiens
  misc_feature 28, 151: n = A,T,C or G
cccttagcgtggtcgcggccgaggtacnaaattatgactgttttagctccaggaacagatttaaaagtaattgaagacgttttaaaatctgtttttgatgctaagaacatcgaaaaaattgaaaaacttgaaagaacagagttagcatacnaaattaaaaaacacaaacaaggaatttttgttttagctaacttaaaatctgaggaaagtttaatcgaagaatttgtcagaagagtaaatattctcaaaaaacaagttttaagatttttagttattaatctagattctgaaagaggaatgcacaaaactttcagacctagaaaaaatgataaacacaaatttttctcttctaaaaaaccaacaacttcaacagaagaaggtaaaagttttcaaaaaccatttgtcaaaaaaccttttgttaaaaaatcagaagaaacagattcttcaaaacaaaatgaacaaggacaaagtgctaagaaaacccaaaaactgtaaaaccagcaaaagattcta

SEQ ID NO: 275 - DNA, 398 bp, Homo sapiens
  misc_feature 27, 30, 36: n = A,T,C or G
cccttagcgtggtcgcggccgaggtanttncctgancagtcgaagtggatgcccagaccaatggccagtgctaatatcaatgcaatgatcccaatgacgatgattggaaaaaacttcaatggcagcagtgacaggatctgtgcagcaacagcatctgcatctggtgcaacaggacttattttcaaatcatcaaggccaaaaagcgatcggaatgagaagggggcttcaacagcaggcggatcattttcccccatggtgactatttcaggacctctgacatccggctccgcctccacctctacctcataattcccgagtcccaaaaatgtagatggcaccacggaagagatagtaggccacaagtgttactggcttcccataaacacaagccctttcct

SEQ ID NO: 276 - DNA, 529 bp, Homo sapiens
  misc_feature 13, 469, 498: n = A,T,C or G
ccctttcgagcgnccgcccgggcaggtacgcggggaaatgcaaaaaaatcaaatcaatttaatagaatacatcagagatgttaaagatttcccaattgaagggattgtatttaaagatatttcaccacttttagcaaatggagaagtgctaaattacacaattaatcaaatggctgagttagctaaagatgcagatgttattataggtccagacgcaagaggtttcttgtttgggacacctactgcagcttttttaaaaaaaccttttattatggtaagaaaacctaaaaaattaccaggagacgttattagttttgagtatgatttagaatatggtaaatcaactctagaaatccaaactaatatgttgaaaaaaggccaaaaagtagcaattattgatgatgttttagctactggcggaacaatgaaagcgattattaacttaatcgaatctcaaggtgctggttgntcataaagtaatctttttacttgaattangatttttaaaccggaattgaaaaacttaaaa

SEQ ID NO: 277 - DNA, 487 bp, Homo sapiens
  misc_feature 28, 36, 163, 208, 216, 329, 334, 368, 459, 475: n = A,T,C or G
ccctttcgagcggccgcccgggcaggtncttctaangttaaatcctgaggtaagtcaaccaaaacaggatgtgaatatcctaataataattctaaagtcttatcttttaatgttgctctgtaaccaacacctttgatttctaattctttagaaaatcctttanaaactccggttaacataccttgtaatgatgaatttgtagttccgngtaattgnttaatatttttttcttctgatgttcttttagtaagtagagtgttttcaactttttcaattgaaataaatgatgaaaattctcttgataatgttcctaatttaccttttatagntactnaagaattgttaatgtttacttcaacaccttctgntatttgtaaaacacgatttccgacacgagacaatattaattatcaaatgtaagcaatggatttcaccacctacatttttccctttcttgcnttgtataattaggttnaataaatccttt

SEQ ID NO: 278 - DNA, 280 bp, Homo sapiens
  misc_feature 36, 37, 220, 249: n = A,T,C or G
cccttagcgtggtcgcggccgaggtacaagatagtnntctcagtaaaaggtctattatctaacttgccaaacttgtttactgagagccctaaggaactaaaactgccataatgccgtgcacagcttgaaaagcaattagagtaagcaagattagtttttcctcccttccagttcctcagcaggcctggctgaaggcccaggagggaaggaaatataaganccaacaataaaaatagcactagcaataanaagaatgccatcccatggagcacaccataat

SEQ ID NO: 279 - DNA, 567 bp, Homo sapiens
  misc_feature 18, 26, 27, 192, 212, 292, 477, 542: n = A,T,C or G
ccgaggtactaaactctntttaatgnnctaacgtcatattttttaagtttttcaattccgtttaaaaatcctaattcaagtaaaaagattactttatgaacaacagcaccttgagattcgattaagttaataatcgctttcattgttccgccagtagctaaaacatcatcaataattgctactttttggccntttttcaacatattaagttnggatttctaagagttgatttaccatattctaaatcatactcaaaactaataacgtctcctgggtaattttttagggtttncttaccataaataaaaaggggtttttttaaaaaaaagctggcagtaagggtgtcccaaacaaagaaaaccctcttgcggtcttgggacctataataacaatctgcatctttaagctaaactcaagccatttgggattaattggtgtaaatttaagcactttctccatttggctaaaaagtggggngaaaatatctttaaaaatacaatcccttcaattggggaaaaatcttttaacatcctctggatggnatttctattaaaaattggatttgga

SEQ ID NO: 280 - DNA, 384 bp, Homo sapiens
tatttggtgaagatcagcgttatcagcattttctacgattaaacgctggccatgctttgactgatgaaatccgccaagctattcagcagttggcggattgggtcagagaaagtctcaagtcgaaattgagttagtcgaagtctgctttcaatacgatgcgataacgtgcttgacctgaatgaagtcgctcaatggcatcgttgagctgtgacataggatagagttcaatttgcggggcgatatttttacgtgctgcaaatttgaagaagttgacgaagtgctaaaggagaacccgtcggtgaacctgttactgatttggcaccatcaatcaaagcacccgactgaaactgggaataggttctaaaagtcagacctagaaaaatg

SEQ ID NO: 281 - DNA, 231 bp, Homo sapiens
  misc_feature 1, 34, 79, 96, 125, 204: n = A,T,C or G
nggtacctccaccgcggtggcggccgaggtacancctctcggcccggctaaacatcatcgtcttggtaggtcattaccntaccaactaactaatgntccgcacccccatttttaagtgaagctgngaagctcctttctattactcatcatgcgataaataactatatccggtattaagctattgattccaatagttatcccagncttaaaggtaggttaggtacctgcccg

SEQ ID NO: 282 - DNA, 272 bp, Homo sapiens
  misc_feature 4, 10, 17, 22, 42, 47, 83, 84, 93, 96, 112, 119, 122, 123,132, 133, 150, 155, 158, 174, 184, 199, 208, 210, 227, 232,236, 245, 261: n = A,T,C or G
cganaagcangattttnaattnttgcagcccgggggatccgnggagnggggagagcccaccgcgggggagcgccaacacgacnnagagcgagncgnaatacgcgcgcacacngaccgcngannaacaaacgnngagacggggaaaacccnggcgnccncaacaaaaacgcccgngcagcacagnccccaaaagccagcnaggcggaanancgaacaggcccgcaccnagcgnccgncccaacagnagcacaagccccgaanggcgaaaaggg

SEQ ID NO: 283 - DNA, 776 bp, Homo sapiens
  misc_feature 10, 18, 34, 35, 42, 49, 64, 78, 79, 97, 98, 104, 110, 111,134, 145, 161, 162, 163, 164, 165, 166, 167, 168, 169, 170,171, 172, 173, 174, 175, 176, 177, 178, 179, 180, 181, 182,183, 184, 185, 186, 187, 188, 189, 190, 191, 192, 193: n = A,T,C or G
  misc_feature 194, 195, 196, 197, 198, 199, 200, 201, 202, 203, 204, 205,206, 207, 208, 209, 210, 211, 212, 213, 214, 215, 216, 217,218, 219, 220, 221, 222, 223, 224, 225, 226, 227, 228, 229,230, 231, 232, 233, 234, 235, 236, 237, 238, 239, 240: n = A,T,C or G
  misc_feature 241, 242, 243, 244, 245, 246, 247, 248, 249, 250, 251, 252,253, 254, 255, 256, 257, 258, 261, 287, 288, 294, 305, 309,315, 317, 318, 319, 324, 337, 342, 345, 351, 357, 360, 361,370, 374, 376, 378, 394, 396, 397, 399, 410, 414, 418: n = A,T,C or G
  misc_feature 420, 421, 431, 447, 448, 456, 471, 475, 484, 491, 501, 506,514, 515, 517, 525, 530, 539, 543, 550, 566, 567, 580, 597,614, 618, 639, 653, 681, 684, 685, 697, 699, 700, 712, 713,714, 723, 732, 734, 741, 748, 750, 754, 755, 756, 757: n = A,T,C or G
  misc_feature 758, 760: n = A,T,C or G
aaaccccctnaaaaagtnccaaggggccgccaanncgactanagcgagncgcattacgcgcgcncactgtttgtcgtnnttaacgccgcgaccgggnngaaccngggcgnnacccaacaggaagcgccgcgcancacaacccccnacgccagcaggccgannnnnnnnnnnnnnnnnnnnnnnnnnnnnnnnnnnnnnnnnnnnnnnnnnnnnnnnnnnnnnnnnnnnnnnnnnnnnnnnnnnnnnnnnnnnnnnnnnagnggaggaaacagcgcagcagagaccgnnacacangccaacgcccnagcncccgcncnnnacgcnagcaaccccaccnaacancgnccacgnacgacngcnngcccccgcncaancncnaaaacgggggcccccnannanggggacccganaaancgcnannacggcacccnccgaccccaaaaaacnngaaaaagngagaagggagcacgnaagnggggccaancgccccngaaaagaacnggcgncccgcccnnangaacgaangggangacccacgncccnaaaaaanagggggacacccgagnnacccaaacggggnaacaacacgcaaacccnaaggccggccgaaacgngaanggaaccaacaaggggacacangcccgaaaaccggnccaaagggggaaaaaaaaaagaagccgnaanncaaacaaaaaancnnaacggcgaaagnnnaaacaaaanaagaaaccncnaacaacncaaaggngncacnnnnncngggaaaaaggggcccc

SEQ ID NO: 284 - DNA, 396 bp, Homo sapiens
  misc_feature 42, 70, 89, 182, 226, 227, 228, 229, 230, 231, 232, 233,234, 235, 236, 237, 238, 239, 240, 241, 242, 243, 244, 245,246, 247, 248, 249, 250, 253, 282, 283, 284, 285, 286, 287,288, 289, 290, 291, 292, 293, 294, 295, 296, 297, 298: n = A,T,C or G
  misc_feature 299, 300, 301, 302, 303, 304, 305, 306, 307, 308, 309, 310,311, 312, 313, 314, 315, 316, 317, 318, 319, 320, 321: n = A,T,C or G
cgggcaggtacctaacctacctttaagactgggataactatnggaaacaatagctaataccggatatagntatttatcgcatgatgagnaatagaaaggagcttcacagcttcacttaaaaatgggggtgcggaacattaagttagttggtagggtaatggcctaccaagacgatgatgttnagcccgggcccgagaggctgtacctcggcccgccaccgcggtgnnnnnnnnnnnnnnnnnnnnnnnnnagncgtattacgccgcgctcactggccggcgnnnnnnnnnnnnnnnnnnnnnnnnnnnnnnnnnnnnnnnnacttaatccgccttgcagcacaatcccccttttcgccagctgggcgtaatagcgaaagaggccccgcacccgaac

SEQ ID NO: 285 - DNA, 393 bp, Homo sapiens
  misc_feature 8, 17, 74, 84, 101, 102, 112, 122, 127, 166, 175, 217, 296,303, 348, 350, 353: n = A,T,C or G
cgtccgtnaggcctgtncttacggctgggtttagaaaccagcccattcagaaagactgaatcagaacatggatnaagtgaactnattctaagatgactcgnntatccatgtngattaatctnctggntcataataggcctcttccctttgattgaagggtcacgtntaagtatanaaaacataaaactgtaaggtagaggaagcgaaggatagcttngtattaatgttgcgttaaagcttcagagacaagaacaagaacactcctcccacgtgacagcatttgaataggaggcggngggtgcngcagcctgggcagcttcagtcccgatttacaataaagtaccttgngngtnattagttcttaaatgtttatttagaaatggcattgatgtt

SEQ ID NO: 286 - DNA, 400 bp, Homo sapiens
  misc_feature 51, 346: n = A,T,C or G
gcgtccggtcaccgcactgaacttcgggaccaaaagcttccatgccgcggnccccagacaaaggcagcttcccgctggaccacttcggtgaatgtaaaagctttaaagaaaaattcatgaggtgtctccgtgacaagaactatgaaaatgctttgtgcagaaatgaatctaaagaagtatttaatgtgcaggatgcaaaggcagctgatggcaccggagccgctagagaagctcggctttagagacctaatggaagggaagccagaggcaaaggatgaatgttgagaagggagccacaggaccttgtccccagcctggagcagagctgagcccttctgcccacagngcagggggacctgacactcagcccgtgctggcccgtgcaggggctctccctggg

SEQ ID NO: 287 - DNA, 498 bp, Homo sapiens
  misc_feature 21, 27, 214, 477: n = A,T,C or G
cgtccggtgcactgcaacttntatatntaaccctaaactccaataaaacaaattccagggaaaaccaagggtgtaatgggatgtgcgtgtttatcaggagtgtgctctcacgtggatgctgaatgatggaggacagcggactgcataagccagaaacctgtacgggtgctggctgtggaaagacgtgtctgtctctatctatgtacaatagttnattctgtcaggctgaaaaagtatggtctttaggaccttgcccctctaactatagaaacttaaacagtgtactgctattagatatatctgatattaatagaacatgccaagtgcaggtcccaaatgcgtatttgtgaagcacacatctgagtaaatggcttagatggaaagcaagtcatcatgagtaaaaattaagcctcaaacctgccggtgctcctcacctctttgtcaccaggtaaaggtcacactgtgtgttgcttttgntgtcttctcttcctaacctag

SEQ ID NO: 288 - DNA, 397 bp, Homo sapiens
  misc_feature 2, 115, 336: n = A,T,C or G
cncgcgtccggggcttgtttactatggccgatgatctggagcagcagcctcaaggctggctgagtagctggctgcccacgtggcgccccacttccatgtctcagctgaagaatgnggaagctaggatcctccagtgtctccagaataagttcctggccagatatgtgtccctcccaaaccagaataaagatctggacggtgactgtgagccccgagcaaaaggaccgcacccccctggtgatggtgcacggttttgggggcggcgtgggcctctggatcctcaacatggactcactgagtgcccgccgcacactgcacaccttcgatctgcttggntttgggcgaagctcaaggccagcattcccgagggacccggagggggctgaggatgagtttg

SEQ ID NO: 289 - DNA, 554 bp, Homo sapiens
  misc_feature 1, 24, 40, 56, 63, 99, 101, 130, 143, 161, 181, 190, 193,223, 233, 236, 239, 254, 267, 271, 272, 279, 283, 288, 303,308, 333, 335, 357, 365, 391, 412, 413, 425, 429, 430, 469,509, 512, 514: n = A,T,C or G
nggaaagccggcataagtgacatngtttgggcagttgccngctggactgaagggcnaacccanaccaccttaagccataaaagcccgtgacactgctancnaaggtgccttgcccaccgctttgccaccngtcccggaaatgnaaaaaaagtcgcgtgccntaaaaaagctgccggaaggncctgggtgnacntttgggccacccccaccccgctggcaaggncttgaattgngtnacnccaaaagacgcccangccggaccttggnaaannattgttntttnggganaaaaaaaaaatggancccgntgggggaggcccttgggggcattgngnaagcccccggagggttccccgntgttggcnggggtcaaattcaaaggccagtggtnggccaccccggggaacctggnngctgttgcaagnaccnnggtggggaaccgtttcaaggaataccccaaccaacccangtagccaccttaaggtaatttggcccaccttgcccaccanaangngccattggggaagaaaccaccaaaaacgttccccccgggt

SEQ ID NO: 290 - DNA, 490 bp, Homo sapiens
ccccgcgctcagtatgactctttagtcccagttttcatgggtagtctctaaattctttacctttatgtgattgtgagttgggaggtggtgggcatcatcttagtccatttacctttttcagttttgtaattatcgtcttcatctactacctttatataatataaagggaaggggtcttcctttacaaatagttttatcatccttctctttttgatgtctatatcttctattttttgaggagaatatatgttgtatagacctacacgtgggtggaagaagagtcatgtatgtgtgattgtgtgagatccagaatgttggaacttttaatttcttattttgtacttataattacctgctggaatacctggttgcattctgtatattgtaccctcatttaaaagttcatggaggcaaaataactctgttgcacataaggccggggcttatgcatgtcctatcggatgtgggctcagatcacggaagacccgaa

SEQ ID NO: 291 - DNA, 291 bp, Homo sapiens
  misc_feature 66, 190, 199, 264: n = A,T,C or G
tcttgcagactcaagctccgcgcgcagccgctcctggtgcgggcccacagcagcctgggccccggntcggccccggagccccctggcctgcgacgactgttcccttcgatcggccaaatcctccttcagcctcctggcgcccatccgcagcaaggacgttcgcagcaggagttacctggagggcagcctnctggccagnggggccctgctgggggcagacgagctggcccgctacttcccagaccggtacgtggcgctcttcgnggccacctggaacatgcagggccagaa

SEQ ID NO: 292 - DNA, 576 bp, Homo sapiens
  misc_feature 1, 167, 435: n = A,T,C or G
nggcccgcccgggcaggtactaaactttaattaatgagctaacgtcatattttttaagtttttcaattccgtttaaaaatcctaattcaagtaaaaagattactttatgaacaacagcaccttgagattcgattaagttaataatcgctttcattgttccgcccagntagctaaaacatcatcaataattgctactttttggccttttttcaacatattaagtttggatttctagagttgatttaccatattctaaatcatactcaaaactaataacgtctcctggtaattttttaggttttcttaccataataaaaggtttttttaaaaaagcctgcagtaaggtggtcccaaacaagaaaaccctctttgcgtctgggacctataataaccatctgcatctttagctaactcaagcccatttgattaattggngtaatttagcacttctccatttgctaaaaggtggtgaaataatctttaaaatacaatcccttcaaattggggaaatcttttaaacatcccccggcggtacctcgggcccgcttctagaactagtgggatcccccgggcctg

SEQ ID NO: 293 - DNA, 436 bp, Homo sapiens
  misc_feature 113, 114, 142: n = A,T,C or G
gctccccgcggtggcggccgcccgggctggtacgcggggaaatgcaaaaaatcaaatcaatttaatacgaatacatcatgagatgttaaagatttcccaattgaagggattgnntttaaagatatttcaccacttttagcanatggagaagtgctaaattacacaattaatcaagtggctgagttagctaaagatgcagatgttattatagggccagacgccaagaggtttcttgtttgggacacctactgcagcttttttaaaaaaaccttttattatggtaagaaaacctaaaaaattaccaggagacgttattagttttgagtatgatttagaatatggtaaatcaactctagaaatccaaactaatatgttgaaaaaaggccaaaaagtagcaattattgatgatgttttagctactggcggacaatgaaag

SEQ ID NO: 294 - DNA, 600 bp, Homo sapiens
  misc_feature 282, 300, 303, 307, 315, 317, 322, 324, 326, 335, 336, 345,367, 368, 370, 399, 409, 410, 411, 420, 430, 433, 435, 436,444, 450, 474, 479, 484, 494, 502, 514, 515, 530, 531, 538,550, 564, 571, 572, 579, 583, 584, 596: n = A,T,C or G
ttagggcgaattggagctccccgcggtggcggccgcccgggcaggtacaatttctaattgatcctgttcacattcagtgaaatggcattgcatatttatatgttgcttacagcttattgatttaggtaactattgtgtcttccttcactatctgacctgaaaagcactctcttctctatgcactcttatattctgcctttctgcctggagtttgaaatacatgtctctttagtttcttttgcacatgctacattgtgctttagaccgggagataatacaggngccttaccttacaaattnatntttntggcaacncnaattntntngaaattttnntttaatttnaaaaccccaaaccaattttccnncncaaaaattttttttttgggaaaaattaanttctttaaannnaaccccccnaaaaattatnggngnnaaaagggngccccnttttgggcccttttttttttttcncgggnggggnaaaaaatttnaaaaaaanttttttttgggnnccccgggagaaaaanntcccctnttttttttttcnggggttttaaaaanggggggnnaaaaatntttnntggccccccccntttt

SEQ ID NO: 295 - DNA, 476 bp, Homo sapiens
  misc_feature 29, 56, 69, 70, 75, 102, 104, 155, 178, 180, 224, 269, 319,327, 328, 331, 392, 415, 418, 421: n = A,T,C or G
tatagggcgaattggagctccccgcccgnggtcccaaatggaagtgtgaaaaccanggcccatcccccnnttttntagaggggtggtaaaaaataaacccananatcaaggggagaaaggaaaaggatgaaaggacaaactgccaaaaaaatttncccaaagtggcgacttttttaantntgggagccagaattctgagggctttgcattgtctttgcaattcnctcaaggagcctgaaattgaaaaaaaatgccaacaaggccaaatnaactactttttaggagggggttttggaggtcttgggaagcctcattcccnttcaaccnntcnaattctgggaatgggggaaatggaaagaatagaagatgttgggtgcccactaggctactgnttgaaaaggggaagcttgaaaanttnctncacccaaggttgggtattcaaaaatattgtaatggactgggtattggcaaaaagg

SEQ ID NO: 296 - DNA, 500 bp, Homo sapiens
  misc_feature 91, 217, 272, 410, 470: n = A,T,C or G
ggcgaattggagctccccgcggtggcggcccgaggtacaggtgggtcccttttcagaggttgggccttctagacctcacctgttctcactnccctggtttaaattcaaccccaagccatggccaatggccaaataatagaaattggttccctacccagctggaccaggggagggaggtcttgtgcagtttcttgaccactttgttggttggaccatnggcttaaataccaatggggtattcggcttgagacctaaagtttgtaagaaaattnaaccaaaatggtgcctgcttgggttaaaaatgggctaccacctcaatctggacttcaattcttttaattctaattttaagtttgggttttggtattctttggcctaaaggtggcggtagtcccaacctctttgggtanttaccccttcctaaataggtcaatacctaggtaggtcaatacctccctgggtggtaaggnggtatttcttcttaaaaaagccttttaaaa

SEQ ID NO: 297 - DNA, 202 bp, Homo sapiens
  misc_feature 83, 84, 186, 187, 195: n = A,T,C or G
ccgcggtggcggccgcccgggcaggtacggccacactgggactgagatacggcccagactcctacgggaggcagcagtaaggnnttttccacaatgagcgaaagcttgatggagcgacacagcgtgcaggatgaagttcttcggaatgtaaactgctgttataagggaaaaaaaaaaaaaaataannaaaaaaanggtacct

SEQ ID NO: 298 - DNA, 395 bp, Homo sapiens
  misc_feature 40, 52, 212, 269, 315, 334: n = A,T,C or G
tagggcgaattggagctccccgcggtggcggccgcccggncaggtacgcggngaaatgcaaaaaaatcaaatcaatttaatagaatacatcagagatgttaaagatttcccaattgaaggggttgtatttaaagatatttcaccacttttagcaaatggagaagtgctaaattacacaattaatcaaatggctgagttagctaaagatgcanatgttattataggtccagacgcaagaggtttcttgtttgggacacctactgcagctnttttaaaaaaaccttttattatggtaagaaaacctaaaaaattacnaggagacgttattagtttngagtatgatttagaatatggtaaatcaactctagaaatccaaactaatattttgaaaaaag

SEQ ID NO: 299 - DNA, 186 bp, Homo sapiens
ccgggcaggtacggccacactgggactgagatacggcccagactcctacgggaggcagcagtaaggaattttccacaatgagcgaaagcttgatggagcgacacagcgtgcaggatgaagttcttcggaatgtaaactgctgttataagggaaaaaaaaaaaaaaaaaaaaaaaaaaaaagtacct

SEQ ID NO: 300 - DNA, 448 bp, Homo sapiens
agggcgaattggagctccccgcggtggcggccgaggtacttttctaggacaatcaggaagtaatcttaaaaaaataattgaagatgttaaaaaatacgttaaaaataaaaaacttgttttaaacatagatgcagtagaaattgaaaaaccagatttagatgcaaaattattagctgaatcaattgcaattaaattagaaaaccgtggatcataccgtatggcacaaaaatttgcaattcgtttagcacaaaaagccggagctaaaggtattaaaactaaagttagtggtcgtttaaatggtgttgatatggctagatcagaaggatattctgaaggtgaaatgaaattacacacacttagacaagatgttagttatgcaacagcaacagcaagaacaacttatggagcacttggagttaaagtttgagtttcattaggcgaagtattt

SEQ ID NO: 301 - DNA, 563 bp, Homo sapiens
  misc_feature 40, 42, 91, 138, 285, 299, 448, 460, 494, 498: n = A,T,C or G
ccggccaggtacgcggggaaatgcaaaaaaatcaaatcangntaatagaatacatcagagatgttaaagatttcccaattgaagggattgnatttaaagatatttcaccacttttagcaaatggagaagtgctaaatnacacaattaatcaaatggctgagttagctaaagatgcagatgttattataggtccagacgcaagaggtttcttgtttgggacacctactgcagcttttttaaaaaaaccttttattatggtaagaaaacctaaaaaattaccagganacgttattagtttngagtatgatttacaatatggtaaatcaactctagaaatccaaactaatatgttgaaaaaaggccaaaaagtagcaattattgatgatgttttagctactggcggaacaatgaaagcgattattaacttaatcgaatctcaaggtgctgntgttcataaagnaatctttttacttgaattaggatttttaaacggnattnaaaaacttaaaaaaatatgaccgttagctcattaattaaaagtttagtacctcggcccgctctag

SEQ ID NO: 302 - DNA, 503 bp, Homo sapiens
  misc_feature 17, 42, 44, 265, 277, 280, 292, 294, 303, 352, 357, 377,404, 441, 469: n = A,T,C or G
aggtactttgatatctncgccctctcgtgtgttccttgtggngntaaccagaggcaagatgcccgaggaacttcatgtgtatgtctaccaggatttcagatgatctctaataatggaggacctgctattatttgtaaaaagtgcccagaaaacatgaaaggtgttacagaagatggctggaactgcatttcttgccctagtgacttaactgccgaaggaaaatgtcactgtcccattggccatattttagtggaaagagacattnatggaacattgntgnctcaagcaactngngagctctgngatggaaatgaaaactcttttatggtagtaaatgctttaggagacaggngcgtncgatgtgagccaacatttgntaataccagcaggtcctgtgcatgttncgaacctaacattttaacagggggattatgtttcagnagcacagggaatttttccttgtacgtanaatttcacctgcacgttatggagaagtttggcat

SEQ ID NO: 303 - DNA, 558 bp, Homo sapiens
ccgggcaggtacgcggggaaatgcaaaaaaatcaaatcaatttaatagaatacatcagagatgttaaagatttcccaattgaagggattgtatttaaagatatttcaccacttttagcaaatggagaagtgctaaattacacaattaatcaaatggctgagttagctaaagatgcagatgttattataggtccagacgcaagaggtttcttgtttgggacacctactgcagcttttttaaaaaaaccttttattatggtaagaaaacctaaaaaattaccaggagacgttattagttttgagtatgatttagaatatggtaaatcaactctagaaatccaaactaatatgttgaaaaaaggccaaaaagtagcaattattgatgatgttttagctactggcggaacaatgaaagcgattattaacttaatcgaatctcaaggtgctgttgttcataaagtaatctttttacttgaattaggatttttaaacggaattgaaaaacttaaaaaatatgacgttagctcattaattaaagtttagtacctcggccgctcta

SEQ ID NO: 304 - DNA, 241 bp, Homo sapiens
  misc_feature 23, 38, 98, 99, 148, 154, 159, 170, 189, 219: n = A,T,C or G
gcggtggcggccgaggtaccttntccgaatgcaccttnaaagcgggtattagcctatacaggctgttttagtcgaatgcagaccatcaaggaaattcnngaatatctatctcaaagactgcgcattaaagaggaagatatgcgcctgnggctantccanaagtggagaantaccttactctttctgggntgatgaggaatcataaatctggaatatttngaaaatccaggatgaacaacac

SEQ ID NO: 305 - DNA, 507 bp, Homo sapiens
  misc_feature 3, 5, 76, 77, 158, 197, 441, 449, 489: n = A,T,C or G
gcngncgcggggaaatgcaaaaaaatcaaatcaatttaatagaatacatcagagatgttaaagatttcccaattgnngggattgtatttaaagatatttcaccacttttagcaaatggagaagtgctaaattacacaattaatcaaatggctgagttnagctaaagatgcagatgttattataggtccagacgcaangaggtttcttgtttgggacacctactgcagcttttttaaaaaaaccttttattatggtaagaaaacctaaaaaattaccaggagacgttattagttttgagtatgatttagaatatggtaaatcaactctagaaatccaaactaatatgttgaaaaaaggccaaaaagtagcaattattgatgatgttttaagctactggcggaacaatgaaagccgattattaacttaatcgaatctcaaggngctggtgntcataaagtaatcttttttacttggaattagggatttttnaaccggaaattggaaaaa

SEQ ID NO: 306 - DNA, 386 bp, Homo sapiens
  misc_feature 117: n = A,T,C or G
atagggcgaattggagctccccgcggtggcggccgcccgggcaggtacgcggggcaattatgaaattattgcagaaagaagattcactctcacctgatgaataagtgttcataggtnaaggctacaaaatactaatttgttattatttttaataataatttttgttttgctgagaaagtggatttaccacttttttattttttaatccaaggaggaaaaattatttccaaaccaaatcctaaaaatttttcacgttctaaaccagttcaagaacattgagtaaacagaaatattccatttgtcaaagtttttcttatcggctcagataatgaaaaaattgggataattgaaacaagagaagctattgaaatggcaaaagaacaaaa

SEQ ID NO: 307 - DNA, 404 bp, Homo sapiens
  misc_feature 6, 104: n = A,T,C or G
cgaatnggagctccccgcggtggcggccgaggtacgcgggggcagcaagcggacgtgagcgataatggcggatatggaggatctcttcgggagcgacgccgacngcgaagctgagcgtaaagattctgattctggatctgactcagattctgatcaagagaatgctgcctctggcagtaatgcctctggaagtgaaagtgatcaggatgaaagaggtgattcaggacaaccaagtaataaggaactgtttggagatgacagtgaggacgagggagcttcacatcatagtggtagtgataatcactctgaaagatcagacaatagatcagaagcttctgagcgttctgaccatgaggacaatgacccctcagatgtagatcagcacagtggatcagaagccccta

SEQ ID NO: 308 - DNA, 405 bp, Homo sapiens
  misc_feature 111, 366, 387: n = A,T,C or G
ggcgaattggagctccccgcggtggcggccgaggtactaatgttattaatgtgactgacaagtaattagaaaactggaaattaaattttacaaacatttttaaaatcgctncaattaaaaaaattcaagatggttacattatgaatatgaatgaaatgtcattagcgacttcgttaaatgtatatgtaattctatattttccccaaaacccacattttatgaagaatatttatttatttatttatttttgttttttgagatggagtctcgctctgttgccagactggagtgcaatggtgcgatctccgctcactgcaacctccacctcctgggttcaaacgattctcctgcctcagcctcccgagnagctgggactacaggcaccgncaccacgcccggctaatt

SEQ ID NO: 309 - DNA, 437 bp, Homo sapiens
ccgcggtggcggccgcccgggcaggtactgaccctccttgatggtttactttgcaagctatggtgacctccgcaagttgtgtctgggcccatccagggctctgactaattgtattcaaatcaaggcaggagcgggccagctggcgttgacttaaccaagccattttataagcctcccgatcatttttaagccactctaagtcgtgtagtaggatctggtcagagttatgtatactctgatgggcatgtgctgtgtcgtctaaaatgtccagaagttctgaaacacttttagatcttccagaatttcttgaggaagtctgcctaagtaactgatgcacatcaagttcatcaccggaggaatcaaaagaatttccattttctatttctctacagaaaagaaaaggatcttcctttaagatggaaatattatttctcttc

SEQ ID NO: 310 - DNA, 437 bp, Homo sapiens
  misc_feature 114, 119, 120, 121, 420: n = A,T,C or G
ctacttagggcgaattggagctccccgcggtggcggccgaggtaccacttgaattatctattgaaagaactactacatcgagtttttgttcttttgccatttcaatagcttctnttggnnnaattatcccaattttttcattatctgagccgataagaaaaactttgacaaatggaatatttctgtttactcaatgttcttgaactggtttagaacgtgaaaaatttttaggatttggtttggaaataatttttcctccttggattaaaaaataaaaaagtggtaaatccactttctcagcaaaacaaaaattattattaaaaataataacaaattagtattttgtagcctttacctatgaacacttattcatcaggtgagagtgaatcttctttctgcaataatttctaattgccccgngtacctgcccgggcggc

SEQ ID NO: 311 - DNA, 252 bp, Homo sapiens
  misc_feature 41, 64, 129, 230: n = A,T,C or G
ttagggcgaattggagctccccgcggtggcggccgcccggncaaggtacctgactgtggctcanatctgcgtcgcagcagcgagagaagaaatcactccatatccgatgagaggaagggtggcacaganatggtgtctacaattagagacatttctgactccaccttagcctaagcaaactttatatactgagtaacatttgaaggttgtcttttaatggtggggggtgntttttcctttttaaactacagt

SEQ ID NO: 312 - DNA, 372 bp, Homo sapiens
  misc_feature 7, 11, 32, 171, 172: n = A,T,C or G
ccaaaangggncctggggcgtggtcacggccnaggtacaaaattatgactgttttagctccaggaacagatttaaaagtaattgaagacgttttaaaatctgtttttgatgctaagaacatcgaaaaaaattgaaaaacttgaaagaacagagttagcatacgaaattaannagcacaaacaaggaatttttgttttagctaacttaaaatctgaggaaagtttaatcgaagaatttgtcagaagagtaaatattctcaaaaaacaagttttaagatttttagttattaatctagattctgaaagaggaatgcacaaaactttcagacctagaaaaaatgataaacacaaatttttctcttctaaaaaacca

SEQ ID NO: 313 - DNA, 341 bp, Homo sapiens
  misc_feature 4, 11, 32, 79, 89, 142, 151, 202, 286, 331: n = A,T,C or G
aatngggcctngcgtggtcacgcccaggtacnaaattatgactgttttagctccaggaacagattaaaagtattgagcnttttaatctnttttgatctaagacatcgaaaattgaaaacttgaaagacagagttagcatacnaatttaaangcacaacaggattttttgttttactaacttaaatctggggaagtttaatcnaagatttgtcagaagagtaaatattctcaaaaaacaagttttaagatttttagttattaatctagattctgaaagaggattgcncaaaactttcagacctagaaaaattgataaacacaaatttttctnttttaaaaaa

SEQ ID NO: 314 - DNA, 342 bp, Homo sapiens
  misc_feature 1, 8, 11, 16, 17, 22, 163, 195, 231, 253, 278, 305, 308,311, 320: n = A,T,C or G
ngggcctnggngtggnnacganccaggtacttttaccaaagaatctactagaactctctgctattcaaaacaaagagctcatacttgttggagtagggaaaaaattagaaatttgaccaaaagatagattcaatcaactacaaagtcaattccaagatgctgntaacatcgaaactcttgaaaaagaactattanaatctggagttgaactttaatggatcatatacctgntttgcttgatcaagcggattgntcagcttaatattaaagaagatggnatctatttagatcttactttaggacgnggnggncattcgagncaaattttaaaaaaacttacta

SEQ ID NO: 315 - DNA, 352 bp, Homo sapiens
ccctttcgagcggccgcccgggcaggtacttgtccataatttgtgaatatattaactaatttttcttttgagtattcatttactaactcataagctgaaaagctttgagcttgattcattctcatatccaaacgagcttgtttgttgtatgaaaatcctctattggcttgatctaactgaggtgaagatactcctaaatcaagtaatacaccatctactttgttgatttgaagtttttttagttcttgatcaaaatctttaaaatcagatcaaataaattcaatatttgaagaaatttttaagagtttttcttttgtttgttcaattgcttgtttgtctttatcaaagacta

SEQ ID NO: 316 - DNA, 360 bp, Homo sapiens
cccttagcgtggtcgcggccgaggtacaggaactgccaaaggcaacagaaattctttctccctatgtcccagcctacccccactttaccgaggccaacagccgcctcagaaaccagattcaggagctaacatgccccaggtctcacgaggatcagagactccagaggccagggaaggagatcaaggtagtcaagcgggggtcgtctcagatctggttgtgctcgagctatgcaaatgcctctcatggagatgtgaggacctatctattatgatgaccagggccacatccggagggggcaacagactttcatctatcagcccttttcaaccactgatctactaaactggaaacactctgaa

SEQ ID NO: 317 - DNA, 338 bp, Homo sapiens
  misc_feature 1, 10, 163, 164, 165: n = A,T,C or G
ngggccttgngagcggccgcccgggcaggtacgcgggggtttaaaaaaatatttaaaaaaatggaggaattatgaacttaaaaagcaaattaagaagctttttaggtgctactgcacttgtgttgccagtagcattttttgcttcttgccaaacaagatttgnnnaagtaaatgaccataaattagtgattgctcacacttttaatagtagagaaggaaggtttttagcattagatcaaattgttaagctttgaaatgaaagtgaaaaagttaaaaacaaagaagaaggattttatccaataacactaaatcgacaatttgcgcaaacttatgcagaa

SEQ ID NO: 318 - DNA, 307 bp, Homo sapiens
  misc_feature 216, 257, 263: n = A,T,C or G
caggtactttagctccaaaatcagtttgatgagatacagttgcccctatatgagaatgcacaggattcctcattggtgagttcaaccatacattttgggtaactcctgaagacatctgcaaattgtgagttagttggtggggtccattaacatttgcatatgttattctttctactgaagtgtgtgaggccacaactgtcccattatgcatatcanaaacagaaatttgttgaggataattttggatattcagcagnggctgngaaactggatttgaattaccgggatacatgcatgcttcttggtt

SEQ ID NO: 319 - DNA, 481 bp, Homo sapiens
  misc_feature 405: n = A,T,C or G
cccttagcgtggtcgcggccgaggtacgcggggcaatacgtagagataataacagttttttaaaaaacttaatatttgttattgaatgtatatttttgagtattgcatcttttctatactaataaggaggtgtaatttgaacgcttttagaaagaaaaaagaagaattagtgcaagaaattaaagatttgattaattcttcttcttcattagttatagctgaatatcgtggattaacagttgctgaaattgaaactcttagaaatgaagcttaaagaagcaggtgtttttgtaaaagtttataaaaatagactatttaaaatagcatctaaagaagcaggtttcggagatttagaacaatcactagttggtccaaatttttttgcttttggttctacagatgcantagctccagctaaaattatttcaaaattcgctaaaaacaaatccagtaagttgtattaaaaggcggtattttttga

SEQ ID NO: 320 - DNA, 452 bp, Homo sapiens
  misc_feature 50, 60, 70, 82, 125, 135, 146, 173, 224, 289, 313, 340, 343,382, 389, 414, 422: n = A,T,C or G
cccttagcgtggtcgcggccgaggtaccacggaattttaaaaatagactntaaaaaaccntcaattgcanaactaattttgnttgatttacttcaaattgaaggaactcttttaggttttgttgnaatagtaaangaaattcgatnagtaattcaatcaaagaataatgaatngacaaattctgacataaaaacagccaaagaatatcatttagaacaactaanagcgcttaaaaaaacttcaaattaacaaatataatttataatttatggcactatgaaaaaaaagngactttatttaatatcaactttancattttcaacaattttattagctattnctngtggtaaaaatcaaactactcctgtaggcacacaaccanttgatantccaagcctggaggattcatcaagngaatcaanagttctggatttaaattaatagaaaaaaag

SEQ ID NO: 321 - DNA, 437 bp, Homo sapiens
cccttagcgtggtcgcggccgaggtacaatttctaattgatcctgttcacattcagtgaaatggcattgcatatttatatgttgcttacagcttattgatttaggtaactattgtgtcttccttcactatctgacctgaaaagcactctcttctctatgcactcttatattctgcctttctgcctggagtttgaaatacatgtctctttagtttcttttgcacatgctacattgtgctttagaccggagataatacagtgactttacctcacaaatcatattctgtcaacacaaatctatgaatttagtttatttaaaatcagaacaatttcctacaaaatttttctggaaaatagactcctaacagacctaccagaatcatgcttaaagggctcccttgacacttattctatactgaaggataaattttaaaaaat

SEQ ID NO: 322 - DNA, 405 bp, Homo sapiens
  misc_feature 263: n = A,T,C or G
ccctttcgagcggccgcccgggcaggtactttttttttttttttttttttttttagttaaatataaatttatttattaactttttcaataccttttgaaggtcaaagtttgtaagatgaattaggttcttttgaaagtaaattcccacaactgaaagtgcagctagaataataaatactgcatatgcagcttctgttgatgctgatttaattcctgcaactagaacagttgctatagaataaaatgcataacctaatcctcanataagtccaaattgatatccaacttttttaggatttgatcctttgtattcgggaggaagatttaagataacaccttgaattcctcaaagcattactcccattaaaaatcctaaaatatagaataatcaagttccattaccta

SEQ ID NO: 323 - DNA, 194 bp, Homo sapiens
gcggtggcggccgcccgggcaggtacaaggtaaagcaagagctggctctctacgttcaccaatttttgtaggtggtggtcgtgcatttgggcctacaaataataaaaattacaaaattaaattaaacaaaaaagttcgcaaattagcttttgcctcagcttttaagtcaacttgctcaaaataatcaagtacct

SEQ ID NO: 324 - DNA, 327 bp, Homo sapiens
  misc_feature 1, 2, 163, 164, 244: n = A,T,C or G
nncttagcgtggtcgcggccgaggtacgcggggaaatgcaaaaaaatcaaatcaatttaatagaatacatcagagatgttaaagatttcccaattgaagggattgtatttaaagatatttcaccacttttagcaaatggagaagtgctaaattacacaattanncaaatggctgagttagctaaagatgcagatgttattataggtccagacgcaagaggtttcttgtttgggacacctactgnagcttttttaaaaaaaccttttattatggtaagaaaacctaaaaaattaccaggagacgttattagttttgagtatgatttag

SEQ ID NO: 325 - DNA, 352 bp, Homo sapiens; identical to SEQ ID NO: 315

SEQ ID NO: 326 - DNA, 360 bp, Homo sapiens; identical to SEQ ID NO: 316

SEQ ID NO: 327 - DNA, 338 bp, Homo sapiens; identical to SEQ ID NO: 317
  misc_feature 1, 10, 163, 164, 165: n = A,T,C or G

SEQ ID NO: 328 - DNA, 307 bp, Homo sapiens; identical to SEQ ID NO: 318
  misc_feature 216, 257, 263: n = A,T,C or G

SEQ ID NO: 329 - DNA, 379 bp, Homo sapiens
atagggcgaattggagctccccgcggtggcggccgaggtactaaactttaattaatgagctaacgtcatattttttaagtttttcaattccgtttaaaaatcctaattcaagtaaaaagattactttatgaacaacagcaccttgagattcgattaagttaataatcgctttcattgttccgccagtagctaaaacatcatcaataattgctactttttggccttttttcaacatattagtttggatttctagagttgatttaccatattctaaatcatactcaaaactaataacgtctcctggtaattttttaggttttcttaccataataaaaagggtttttttaaaaaagcttgcagttagggtggtcccaaacaa

SEQ ID NO: 330 - DNA, 445 bp, Homo sapiens
  misc_feature 406, 429, 431: n = A,T,C or G
ccgcggtggcggccgcccgggcaggtacacctctgattctcactagttgaatgcaagaacttgaaaggttcaggtaagtgttttgaaaaattttgactttccaaacttttgccacttgctatctgaaactcaggaatcaaaaaataccgacaggcactgttactttcaaaattctttctataagttgagaatgggacagatttgcagagcaagggaaacttgaacagttacttctagtggtaggaaatgaggtggctaggatattacccagctggtgggtgacttgggcagtgtgttcctgctttcagtggttagcctttagcaaatctgctttagagtgagagtagagggcaggctgttgtattacagtgctcttgtttttgtaaaatttaattcactctactgntattttgtctccttgggtaaagngntatttaatttttct

SEQ ID NO: 331 - DNA, 282 bp, Homo sapiens
  misc_feature 9, 33, 111, 275: n = A,T,C or G
attattgcngaaagaagattcactctcacctgntgaataacgtgttcataggtaaaggctacaaaatactaatttgttattatttttaataataatttttgttttgctganaaagtggatttaccacttttttattttttaatccaaggaggaaaaattatttccaaccaaatcctaaaaatttttcacgttctaaaccagttcaagaacattgagtaaacagaaatattccatttgtcaaagtttttcttatcggctcagataatgaaaaaatnggggata

SEQ ID NO: 332 - DNA, 530 bp, Homo sapiens
  misc_feature 269, 281, 291, 303, 319, 320, 336, 359, 368, 371, 374, 404,408, 429, 430, 435, 436, 438, 439, 443, 453, 459, 460, 466,469, 470, 472, 481, 482, 486, 491, 499, 500, 506, 511: n = A,T,C or G
ccgcggtggcggccgcccggccaaggtacgcgggggcagaagaggaagatttctgaagagtgcagctgcctgaaccgagccctgccgaacagctgagaattgcactgcaaccatgaggtaaatattttcccttcgtattcggtagtgctgttgagtcatcttgtccaatgcaaatcctgagaagctatgttcccaaagagggccagctccatttagtgtttgtttatagccttactatgcctctacctctgggggttgtaaatctgttntacccaatgggngggtttgttncccttcctgaancaaatttttctgcttnnacacttgggcaaaccntttcctaaatttcatcctcccanaactttgcnccnccnttggggggaggtttggggttttcaactccngaanaaaaagaggggccccccaccnnagggnntnntttnttttaaattngggccnngggggnttnnanttaaaaaanngggnttttngggggacnntttttnttttnacccccccccccctttttt

SEQ ID NO: 333 - DNA, 542 bp, Homo sapiens
  misc_feature 380, 399, 403, 405, 406, 408, 411, 430, 431, 437, 438, 439,442, 450, 452, 474, 477, 481, 486, 496, 497, 499, 518, 520,523, 524, 530, 542: n = A,T,C or G
ggcgattggagctccccgcggtggcggccgcccgggcaggtacaacgttgaccttccttgcccaagaatgaatgattaaaaagttgaaaagctgtgtttgtagatcgttcaggccttcgtctgcaactatcaggaaatatgggtaactctcttccaagaaacttccccactcttttgataagcatctcgaaaatgttgttcgaacatcaatggtggtattttctgaagatgaagaattaaagcagttctcaaagaaagaagttcagggaagttgaaatacgcatactcggcatccttgaagaaaactatggtgaattgtcctcctttgctaataagatccacaagatagccgttcaaccagatagaaaaaatgggaggtncctgccccaggctttaaantgantnncnccncagcatccccttggggatnnggtaannnccncccccccnancaaaaaaaaaaatttttccccnccnaccnaattntgaaaaaccnngngggggtttaaaaattttgngntcnnaatttnaaaaaaaaaaan

SEQ ID NO: 334 - DNA, 442 bp, Homo sapiens
  misc_feature 343: n = A,T,C or G
ccgggcaggtactaggagatattgattctagtcaattaggcattgtagactgtcatgaccacttaataaaaaattatggacctgaagctcacgagcatccagattttattatgatgtcaaaagatgctgcaattaaagaaatgaatgaatatgtagcaaaaggaggaaaaactgttgttacaatggaccctcctaacgttgggcgtgatgtttatcaaatgttagatattgcaaagaaattagaaggaaaagctaacattattatggcaactggttttcataaagctgcattttatgacaaaggtgcttcttgacttgctttggctccaacagataaaattgnaaaaatggttgtagctgaaatcgaagaaggaatggatgaatataactacagcggaccagttgtaaaaagatctaaatccaaagccggaattattaaagc

SEQ ID NO: 335 - DNA, 377 bp, Homo sapiens
  misc_feature 50, 51, 56, 57, 59, 62, 80, 143, 306: n = A,T,C or G
ctccccgcggtggcggccgaggtaccgcggggaaatgcaaaaaaatcaanncagtnnantcnaatacatcacagatgttnaagatttcccaattgaagggattgtatttaaagatatttcaccacttttagcaaatgggagangtgctaaattacacaattaatcaaatggctgagttagctaaagatgcagatgttattataggtccagacgcaagaggtttcttgtttgggacacctactgcagcttttttaaaaaaaccttttattatggtaagaaaacctaaaaaattaccaggagacgttnttagttttgagtatgatttagaatatggtaaatcaactctagaaatccaaactaatatgttgaaaaaaggc

SEQ ID NO: 336 - DNA, 472 bp, Homo sapiens
  misc_feature 338, 343, 344, 358, 364, 369, 370, 373, 392, 398, 399, 416: n = A,T,C or G
ctcctatagggcgaattggagctccccgcggtggcggccgaggtacgcggggaaatgcaaaaaaatcaaatcaatttaatagaatacatcagagatgttaaagatttcccaattgaagggattgtatttaaagatatttcaccacttttagcaaatggagaagtgctaaattacacaattaatcaaatggctgagttagctaaagatgcagatgttattataggtccagacgcaagaggtttcttgtttgggacacctactgcagcttttttaaaaaaaccttttattatggtaagaaaacctaaaaaaattaccaggagaccgttatttaggttttngggtnnagatttaaaattgnggaaanccccnnttntagaaatccaaactaattntgttgnnaaaagggccaaaaagtnccaattattggtgatgttttagctactggcggaacaatgaaagcgattattaactt

SEQ ID NO: 337 - DNA, 346 bp, Homo sapiens
ccgcggtggcggccgaggtaccaataatagcaaccctgtgatttgtccaagtgcccgggagtggaggccatcctgacaacagctctatgattttctatgccaatgacacaggagcccaacagtttgaaaagtggtgggataagtccaggacagtccccttttatcttgtagggctcctcctcccactgctcaatttcaagtctccttcatttttttcaaaatttaatatcctaggcacagtgtctgtcctttatttgattttccttgtcacctttaaggctgttcgcttgggatttcatttggaatttcattggtttataccaacagaattttttgtacctgcccg

SEQ ID NO: 338 - DNA, 167 bp, Homo sapiens
ccgggcaggtacctggaagacttctccacctcgggggcctggctgcctcacaggtatgaagacaaccaccataactgctactcttacgcactcacgttcattaactgcgttctgatggcagaaggtagacagcaactggacaagggtgaatttacggagaagtacct

SEQ ID NO: 339 - DNA, 208 bp, Homo sapiens
ataaactgcgggatctcaatggcttctatgatcgtattgaggcagtagttcccacactctgcccggtgccagcatgaaagagaacagggagagtcagcctttcacagtccttgtcaaatcccaattactctggttgcagatcacttgaagcctgccttgtttctctcacaaagctctgcccgagagtccagccccgcgtacctgcccg

SEQ ID NO: 340 - DNA, 347 bp, Homo sapiens
  misc_feature 22, 48, 89, 90, 125, 303: n = A,T,C or G
gcgaattggagctccccgcggnggcggccgaggtacaagatagtcatntcagtaaaaggtctattatctaacttgccaaacttgtttanngagagccctaaggaactaaaactgccataatgccntgcacagcttgaaaagcaattagagtaagcaagattagtttttcctcccttccagttcctcagcaggcctggctgaaggcccaggagggaaggaaatataagaaccaacaataaaaatagcaatagcaataagaagaatgccatcccatggagcacaccataattctggaaccacctntcccggatcaggcttccattgctcacgatgctcacgctgggcag

SEQ ID NO: 341 - DNA, 538 bp, Homo sapiens
  misc_feature 496: n = A,T,C or G
tagggcgaattggagctccccgcggtggcggccgcccgggcaggtacttttctaggacaatcaggaagtaatcttaaaaaaataattgaagatgttaaaaaatacgttaaaaataaaaaacttgttttaaacatagatgcagtagaaattgaaaaaccagatttagatgcaaaattattagctgaatcaattgcaattaaattagaaaaccgtggatcataccgtatggcacaaaaatttgcaattcgtttagcacaaaaagccggagctaaaggtattaaaactaaagttagcggtcgtttaaatggtgttgatatggctagatcagaaggatattctgaaggtgaaatgaaattacacacacttagacaagatgttagttatgcaacagcaacagcaagaacaacttatggagcacttggagttaaagtttgagtttcattaggcgaaagtatttgcaaagcaaaatcaagcatataatgaagaagaaccaacncacaaaaaagggccaaaaagagcagcaagagttaaaaaagaa

SEQ ID NO: 342 - DNA, 357 bp, Homo sapiens
ccgggcaggtaccgctgtgtccgggtgggtggtcagaatgccgtgctccaggtgttcacagctgcttcgtggaagaccatgtgctccgatgactggaagggtcactacgcaaatgttgcctgtgcccaactgggtttcccaagctatgtgagttcagataacctcagagtgagctcgctggaggggcagttccgggaggagtttgtgtccatcgatcacctcttgccagatgacaaggtgactgcattacaccactcagtatatgtgagggagggatgtgcctctggccacgtggttaccttgcagtgcacagcctgtggtcatagaaggggctacagctcacgcatcgtgggtgga

SEQ ID NO: 343 - DNA, 293 bp, Homo sapiens
  misc_feature 223, 240: n = A,T,C or G
ccgggcaggtaccgctgtgtccgggtgggtggtcatgaatgccgtgctccaggtgttcacagctgcttcgtggaagaccatgtgctccgatgactggaagggtcactacgcaaatgttgcctgtgcccaactgggtttcccaagctatgtgagttcagataacctcagagtgagctcgctggaggggcagttccgggaggagtttgtgtccatcgatcacctnttgccagatgacaaggngactgcattacaccactcagtatatgtgagggaggggatgtgcctctggccac

SEQ ID NO: 344 - DNA, 362 bp, Homo sapiens
  misc_feature 260, 277, 307, 333, 355, 358: n = A,T,C or G
ctatagggcgaattggagctccccgcggtggcggccgaggtactaaactttaattaatgagctaacgtcatattttttaagtttttcaattccgtttaaaaatcctaattcaagtaaaaagattactttatgaacaacagcaccttgagattcgattaagttaataatcgctttcattgttccgccagtagctaaaacatcatcaataattgctactttttggccttttttcaacataattaagtttggatttctagagnttgatttaccatatttntaaatcattcctcaaaactaataaccgccntcctgggaaatttttttagggttttnttacccctaaataaaaaagggnttntttt

SEQ ID NO: 345 - DNA, 432 bp, Homo sapiens
ccgcggtggcggccgcccgggcacggtaccacttgaattatctattgaaagaactactacatcgagtttttgttcttttgccatttcaatagcttctcttgtttcaattatcccaattttttcattatctgagccgataagaaaaactttgacaaatggaatatttctgtttactcaatgttcttgaactggtttagaacgtgaaaaatttttaggatttggtttggaaataatttttcctccttggattaaaaaataaaaaagtggtaaatccactttctcagcaaaacaaaaattattattaaaaataataacaaattagtattttgtagcctttacctatgaacacttattcatcaggtgagagtgaatcttctttctgcaataatttctaattgccccgcgtccttggccgctctagaactaggtggg

SEQ ID NO: 346 - DNA, 420 bp, Homo sapiens
  misc_feature 14: n = A,T,C or G
cactactatagggngaattggagctccccgcggtggcggccgcccgggcaggtactaggagatattgatcctagtcaattaggcattgtagactgtcatgaccacttaataaaaaattatggacctgaagctcacgagcatccagattttattatgatgtcaaaagatgctgcaattaaagaaatgaatgaatatgtagcaaaaggaggaaaaactgttgttacaatggaccctcctaacgttgggcgtgatgtttatcaaatgttagatattgcaaagaaattagaaggaaaagctaacattattatggcaactggttttcataaagctgcattttatgacaaaggtgcttcttgacttgctttggctccaacagataaaattgtaaaaatggttgtagctgaaatcgaagaaggaatg

SEQ ID NO: 347 - DNA, 213 bp, Homo sapiens
gggcgaattggagctccccgcggtggcggccgcccgggcaggtaccgtagaagaagaaggaatacctaaagaaacagacatagaaatcatcccagaaatcccggaaactctagagccactgtcccttccagatgtgctgaggatctcggcagttctggaggacaccacaggccagctctctattctgaactacatcatgcccgttcagtacct

SEQ ID NO: 348 - DNA, 480 bp, Homo sapiens
  misc_feature 2: n = A,T,C or G
tncttagggcgaattggagctccccgcggtggcggccgaggtactaaactttaattaatgagctaacgtcatattttttaagtttttcaattccgtttaaaaatcctaattcaagtaaaaagattactttatgaacaacagcaccttgagattcgattaagttaataatcgctttcattgttccgccagtagctaaaacatcatcaataattgctactttttggccttttttcaacatattagtttggatttctagagttgatttaccatattctaaatcatactcaaaactaataacgtctcctggtaattttttaggttttcttaccataataaaaggtttttttaaaaaagctgcagtaggtgtcccaaacaagaaacctcttgcgtctggacctataataacatctgcatctttagctaactcagcccatttgattaattgtgtaatttagcacttctccatttgctaaaaggtgg

SEQ ID NO: 349 - DNA, 486 bp, Homo sapiens
tcttagggcgaattggagctccccgcggtggcggccgcccgggcaggtactaaaacaggtgctcctgttaaaatagaagatcttgcagctacttctagagatttaaattctaaacgatcaatagcagcgtatcctgttccggctttaataattccggctttggatttagatctttttacaactggtccgctgtagttatattcatccattccttcttcgatttcagctacaaccatttttacaattttatctgttggagccaaagcaagtcaagaagcacctttgtcataaaatgcagctttatgaaaaccagttgccataataatgttagcttttccttctaatttctttgcaatatctaacatttgataaacatcacgcccaacgttagggagggtccattgtaacaacagtttttcctccttttgctacatattcattcatttctttaattgcagcatcttttgacatcataataaaatctgg

SEQ ID NO: 350 - DNA, 367 bp, Homo sapiens
tagggcgattggagctccccgcggtggcggccgcccgggcaggtacattcttcactatcactgtcctgtaaatttagtagccttggctggaaacactgtagtcgacatgatctgatattgcttaatatttcagaaagagacagtctattttcacaatgtttactggaagcattggtccgagagaaattagaagaaaagtctatagtttgggaagagcttgaaaaactattcagcatttcagggtctatctgtttcaggactgggtcatgttctgtggatattcggtccattatgacccttccacctctgccaattcgcctccttgcaaatcctatacatcttcttgggactgtaagtgttgtaaggc

SEQ ID NO: 351 - DNA, 438 bp, Homo sapiens
  misc_feature 3, 395, 415: n = A,T,C or G
ctncttagggcgaattggagctccccgcggtggcggccgaggtacagcttggtgactgtaattaacaacaatgtattttgaaagtcactgagtaaattttaagtggtttttccaaaaaagcacataaggtaatgcaccgttaattagctatattgagccattccacaatgtatagatatttcaaaacatgttacacatgataaatccagtttttctacgtcattttttaaaattatatttaatttttttattttgaaagttttttcacagatcttttttttagtattattaccttctgatatatgtgtcattattgaagaaccataccttttaaaggtattattttgtaattaaggtatgtcaacagtaaaaaataaccagtggcccaggccatnggggctcatgcctgtaaatnccagcacttttttcggaggcccg

SEQ ID NO: 352 - DNA, 362 bp, Homo sapiens
  misc_feature 334: n = A,T,C or G
ccgcggtggcggccgaggtacctgtgaagacagctacacctggtttcctccctcatgccttgatccccagaactgctaccttcacacggctggagcactcccaagctgtgaatgtcatcttcaaacaacctcagccagagtgtcaatttctgtgagagaacaaagatttggggcactttcaaaattaatgaaaggtttacaaatgaccttttgaattcatcttctgctatatactccaaatatgcaaatggaattgaaattcaacttaaaaaagcatatgaaagaattcaaggttttgaggtcggttcaggtcacccaatttcgaaatggaagncatcgttgctgggtattgaaaggtttgt

SEQ ID NO: 353 - DNA, 458 bp, Homo sapiens
cctatagggcgattggagctccccgcggtggcggccgaggtactttttgttttatattcttcaaatcctattgatgaaaaacttaaagatgaattagaaaaatcttatgtaattagacaaaaaccaaaaaaacaaaaacttattttagaaagacttggataatgattgattataaaaaaatgattgaccatactttattaaaaccagaagctacatctaaagatattttaaaacttatttcacaagctaaagaacatggatttagaggagtttgcattaactcttcttgagttaaattagcaaaagaaaaacttgcaaatacagatttagatatcgtttcagtagttggctttccattaggtgcatcaaacacacaaaccaaggtttttgaagcaaaattagcagttgaacatggagctactgaaatagatatggttataaatgtgggtaaattcaaa

SEQ ID NO: 354 - DNA, 338 bp, Homo sapiens
cttagggcgaattggagctccccgcggtggcggccgaggtactgtgcatgaaaccacacatacgggcaaaagcaggaagagactttgcagacataaaaaccaggtaagttttgagagtcaggtgattgcaagatttttttttctttcattgacacttagctaattttgagccatatttttaaatgtgtgtcttttcagttacttgaaacctcttctcccacctcccatcctttccaaacctcctccaagccaattttccagttggtttaaaagaaatcattagggtgacccccactcccactttctggaacctcaggcagagctcctggggttcctcc

SEQ ID NO: 355 - DNA, 513 bp, Homo sapiens
  misc_feature 1, 2: n = A,T,C or G
nntttttttttttttttttttttgcgtggaatccttcacctcttgctaaaggaacagtaatgtcatatcctgttaatcttgcaggaggcgctaataagaattcaaatgctttctcatttctcttgtaataatttcagtgaactgaaaatgatttaacagcttcgtgaacaactaaaagtcttccagtttttttaacagagttaataattgtatctgtatctaaaggagaaattgttcttaaatcaattaattctacagagtattctccatttaattgttttaaagcagctagtgcttcgtgaacttgtgctccatatgttactaatgttaaatcagaaccttctactaatacatttgctttaccaatttcaacttcataaattcctgctggagcttcttgtttgaatgaacgataaattttcttaggttctaagaaaataactggatctgggtcgttaatagctgcgattaataatccttttgtatcataaggagttgaaggcataacaactt

SEQ ID NO: 356 - DNA, 583 bp, Homo sapiens
agggcgaattggagctccccgcggtgggcggccgaggtctaaactttaattaatgagctaacgtcatattttttaagtttttcaattccgtttaaaaatcctaattcaagtaaaaagattactttatgaacaacagcaccttgagattcgattaagttaataatcgctttcattgttccgcagagctaaaacatcatcaataattgctactttttggccttttttcaacatattagtttggatttctagagttgatttaccatattctaaatcatactcaaaactaataacgtctcctggtaattttttaggttttcttaccataataaaaggtttttttaaaaaagctgcagtaggtgtcccaaacaagaaacctcttgcgtctggacctataataacatctgcatctttagctaactcagccatttgattaattgtgtaatttagcacttctccatttgctaaaagtggtgaaatatctttaaatacaatcccttcaattgggaaatctttaacatctctgatgtattctattaaattgatttgatttttttgcatttccccgcgtacctgcccgggcggc

SEQ ID NO: 357 - DNA, 215 bp, Homo sapiens
gaatgggagctccccgcggtggcggccgaggtacaagatagtcatctcagtaaaaggtctattatctaacttgccaaacttgtttactgagagccctaaggaactaaaactgccataatgccgtgcacagcttgaaaagcaattagagtaagcaagattagtttttcctcccttccagttcctcagcaggcctggctgaaggcccaggagggaag

SEQ ID NO: 358 - DNA, 539 bp, Homo sapiens
  misc_feature 8, 217, 252, 269, 297, 299, 304, 332, 350, 413, 430, 444,463, 495: n = A,T,C or G
aggtacangatagtcatctcagtaaaaggtctattatctaacttgccaaacttgtttactgagagccctaaggaactaaaactgccataatgccgtgcacagcttgaaaagcaattaagagtaagcaagattagtttttcctcccttccagttcctcagcaggcctggctgaaggcccaggaggggaagggaaatataacggaacccaacaattaanaaataggcaaatagccaattaaagtaaggaatggncatcccatgggaggcancaaccattaatttcttgggaacccactntntcccngggattcagggcttccatttgcttcacngatggcttcacgtctggngcagcccgccaactcttactttgccaggaaaccctcacctcaactttgcccagggtatttctnccccgggtcttggaaangaaaatgggcttcntccacctgaaaaagggttngaatcctttcttcccattacccaggctttccntttaaagccaaaaaggcaaattccctccttttttggcttttcct

SEQ ID NO: 359 - DNA, 401 bp, Homo sapiens
  misc_feature 14, 55: n = A,T,C or G
ctaattgatcctgntcacattcagtgaaatggcattgcatatttatatgttgctnacagcttattgatttaggtaactattgtgtcttccttcactatctgacctgaaaagcactctcttctctatgcactcttatattctgcctttctgcctggagtttgaaatacatgtctctttagtttcttttgcacatgctacattgggctttagaccggagataatacagtgactttacctcacaaatcatattctgtcaacacaaatctatgaatttagtttatttaaaatcagaacaatttcctacaaaatttttctggaaaatagactcctaacagacctaccagaatcatgcttaaagtgctcccttgacacttattctatactgaaggataaattttaaa

SEQ ID NO: 360 - DNA, 283 bp, Homo sapiens
ccgcggtggcggccgaggtacaagatagtcatctcagtaaaaggtctattatctaacttgccaaacttgtttactgagagccctaaggaactaaaactgccataatgtcgtgcacagcttgaaaagcaattagagtaagcaagattagtttttcctcccttccagttcctcagcaggcctggctgaaggcccaggagggaaggaaatataagaaccaacaataaaaatagcaatagcaataagaagaatgccatcccatggagcacaccataattctggaacc

SEQ ID NO: 361 - DNA, 463 bp, Homo sapiens
  misc_feature 2, 414, 434: n = A,T,C or G
tnctatagggcgaattggagctccccgcggtggcggccgaggtactttttgttttatattcttcaaatcctattgatgaaaaacttaaagatgaattagaaaaatcttatgtaattagacaaaaaccaaaaaaacaaaaacttattttagaaagacttggataatgattgattataaaaaaatgattgaccatactttattaaaaccagaagctacatctaaagatattttaaaacttatttcacaagctaaagaacatggatttagaggagtttgcattaactcttcttgagttaaattagcaaaagaaaaacttgcaaatacagatttagatatcgtttcagtagttggctttccattaggtgcatcaaacacacaaaccaaggtttttgaagcaaaattagcagttgaacntggagctactgaaatagatnatgggtataaatggtgggtaaatttcaaa

SEQ ID NO: 362 - DNA, 222 bp, Homo sapiens
ccgcggtggcggccgcccgggcatggtacagcctctcggcccggctaaacatcatcgtcttggtaggccattaccataccaactaactaatgttccgcacccccatttttaagtgaagctgtgaagctcctttctattactcatcatgcgataaataactatatccggtattagctattgtttccaatagttatcccagtcttaaaggtaggttaggtacct

SEQ ID NO: 363 - DNA, 462 bp, Homo sapiens
  misc_feature 14, 16, 27, 355, 427: n = A,T,C or G
cactactatagggntnattggagctcnccgcggtggcggccgtgctgttgcttggccgcgcgccaggctggccagaggtgctgttccactggggcgtggccgtgatggtgtgcgccgatcgacgttctgttttaatgaaaggatggacatgcaactgacactcgcacaactcttggcaatcatgcccaatgcccgctccaaagcgggtatttttttgcctgcgctaaacgtggccatggcggaattcggtatcaacacgtcggcgcgccaggccgcgtggctggccaccatcggtgtcgagtccggtagcctgcagcgggtagaggaaaacttgaactaccgcgcggatcgcctnctcgttattttcggaaaatacttcacgccggcgttggccgcagcttattgccggcaagccggaaatgatcgncaaccgtgtttacgccaacccgcatgggggaaacg

SEQ ID NO: 364 - DNA, 534 bp, Homo sapiens
  misc_feature 495: n = A,T,C or G
aggtactaaactttaattaatgagctaacgtcatattttttaagtttttcaattccgtttaaaaatcctaattcaagtaaaaagattactttatgaacaacagcaccttgagattcgattaagttaataatcgttcattgttccgccagtagctaaaacatcatcaataattgctactttttggccttttttcaacatattagtttggatttctagagttgatttaccatattctaaatcatactcaaaactaataacgtctcctggtaattttttaggttttcttaccataataaaaggtttttttaaaaaagctgcagtaggtgtcccaaacaagaaacctcttgcgtctggacctataataacatctgcatctttagctaactcagccatttggattaattgtgtaaatttaagcacttctccatttgctaaaagtggtgaaatatctttaaatacaatccccttcaattggggaaatctttaaacatctcnggatggtattctattaaaattgaattgaatttttttggc

SEQ ID NO: 365 - DNA, 639 bp, Homo sapiens
  misc_feature 368, 421, 503, 520, 541, 564, 588, 613, 615, 617, 621: n = A,T,C or G
ccgcggtggcggcccgaggtaccaaaataaagggtatttgctacctttaatacttgccagttcaggttggaggcacaggcagcagcaagaatggaaagaaatgttcttacaacattttcacaggaaatgtcccagttaattttgaatgaaatgcaaaagctgaatattccagtttattcaatgattttgttgaatctgaattttttttgattgatggggattcattacttatcacatgtatctgtgagatatcatttaagcctgggcagaacctccatttcttctatctggttgaacgctatcttgtggatcttattagcaaaggaggacaattcaccatagttttcttcaaggatgccgagtatgcntattcaacttccctggacttctttctttgagaactgctttaattcttcatctncagaaagaataccccatttgatgttcgaacaacattttcgagatgcttatcaaaaagagtggggaaagtttctttggaagangagttaccccatatttnctgattgttggcagacgaaangccttgaacgatctacaaaaccncagctttttaaactttttaaatcnttcaattccttggggcaaagggaangntnaacntttggtaccttgcccggg

SEQ ID NO: 366 - DNA, 286 bp, Homo sapiens
ccgcggtggcggcccgcccgggcaggtacgcggggaaatgcaaaaaaatcaaatcaatttaatagaatacatcagagatgttaaagatttcccaattgaagggattgtatttaaagatatttcaccacttttagcaaatggagaagtgctaaattcacaataatcaaatggctgagttagctaaagatgcagatgttattataggtccagacccaagaggtttcttgtttgggacacctactgcagcttttttaaaaaaaccttttattatggtaagaaaacctaa

SEQ ID NO: 367 - DNA, 204 bp, Homo sapiens
aggtacagcctctcggcccggctaaacatcatcgtcttggtaggccattaccctaccaactaactaatgttccgcacccccatttttaagtgaagctgtgaagctcctttctattactcatcatgcgataaataactatatccggtattagctattgtttccaatagttatcccagtcttaaaggtaggttaggtacctgcccg

SEQ ID NO: 368 - DNA, 200 bp, Homo sapiens
  misc_feature 117, 133, 169, 192: n = A,T,C or G
accgcggtggcggccgaggtacggccacactgggactgagatacggcccagactcctacgggaggcagcagtaaggaattttccacaatgagcgaaagcttgatggagcgacacagngtgcaggatgaagttnttcggaatgtaaactgctgttataagggaaaaaaanaaaaaaaaaaaaaaaaaaaggtncctgcccg

SEQ ID NO: 369 - DNA, 603 bp, Homo sapiens
  misc_feature 12, 22, 29, 36, 40, 42, 44, 49, 51, 138, 139, 142, 143, 144,159, 160, 252, 270, 280, 289, 295, 303, 319, 326, 343, 346,374, 398, 420, 453, 466, 481, 492, 494, 518, 536, 541, 546,552, 587: n = A,T,C or G
ggcggccgaggnacaatatagncatcgcnttaaacngccnantnttaancncgccaaacttggttactgagagccctaaggaactaaaaccgccataatgccgggcacagcttgaaaagcaattagaggaagcaagannagnnnttcctcccttccagnncctcagcaggcctggctgaaggcccaggagggaaggaaatataagaaccaacaataaaaatagcaatagcaataagaagaatgccatcccanggagcacaccaaaattcnggaaccaccnctcccggancaggcntccattgntcacgaagctcacgcngggcagnccgcaactttactttgnagnaacctccccacttggccaagggaattcncccccgggcctggaagaaaagggntctcccacccggaaaggggcgnaccttttcccaaaaccagcctttccttaaagcnaaaagcaaacccnctcttttgggtttcncaaagggggcngnacaaaagggaagggttttggggcngggggggggaaacaaaanccccncattnggaagnttgcccccggccgaggggaaggggaaaaggttggnccccggttgggggggg

SEQ ID NO: 370 - DNA, 337 bp, Homo sapiens
  misc_feature 11, 41, 194, 195, 203, 232, 325: n = A,T,C or G
attgttgctcnccgcggtggcggccgcccgggcaggtacanggaactgccaaaggcaacagaaattctttctccctatgtcccagcctacccccactttaccgaggccaacagccgcctcagaaaccagattcaggagctaacatgccccaggtctcacgaggatcagagactccagaggccagggaaggagannaaggtagncaagcgggggtggtctcaaatctggttgngctcgagctatgcaaatgcctctcatggagatgcgaggacctatctattatgatgaccagggccacatccggagggggcaacagactttcatntatcaagccctt

SEQ ID NO: 371 - DNA, 238 bp, Homo sapiens
aggtactattgactaaagtcagttgggggagagagaggcggaagtatattacttttatgcttggttatactagagaacaaatagaaactgactaaagaaacattagatcagtggttctcagagtattgatatctgggagtcccagcaacagtctgaggaggttcatgagttcagaatattttgataataacactaagatggtatttactcttctaactgggtagatatttgcactggt

SEQ ID NO: 372 - DNA, 358 bp, Homo sapiens
ccgggcaggtaccgggtctagggaagatgcagaacacttcagcctggcagaaggctctaaagatcgtcaacctttcctctgttcattttgaaatttttaaaaatatgctaacttagctgaaaatctcatggaaaccaggctcctcatcagacttgaaagtcaaaccggtttctcaacaacttctctttatggttctgtatggctccacagaaaaccagaaaaacatttggggcaagaagctatgactctgtgaggccacatgggagcaggcagtcaattattacactaaggaacacccagttagcatgaagtatcccatcacctcggtattaagccctgcatgcattagctattacct

SEQ ID NO: 373 - DNA, 377 bp, Homo sapiens
actttttttttttttttgctcaatagaagtatggaataattccaggtaatttaaagcatatttttcaattggtgtaagctgctccatgaagtcagctagctcctctaattgggatggttcttcatcacacggcatgttctcagagtctgatgacagagcatcagtgtgtggtcccagcaccccctcctgtgcggacttctgggcatcctcctccagatactcaatactcttgagggcctgaggaaagtctctatgaaaggtcttgcaattttgggtgcaatggtttccgtgacagaaggttcctgagaaagcaccacaaactcctcagctttgaccgggaagccagcatcacggacgcgtgggtcgaagcttgacct

SEQ ID NO: 374 - DNA, 225 bp, Homo sapiens
  misc_feature 57: n = A,T,C or G
ccgggcaggtaccgctactgaaattattaaacatacactacagatcaattatataantatgttaatatctttagaaatcaagagttgcagcataagagaaagggatacaaaaacaaaacaagcaaagaagttacataaaaacgtaacgttgtattggaaaaaccagtatgaacttatgatttagttttctttctaaaaacggacgcgtgggtcgaagcttgacct

SEQ ID NO: 375 - DNA, 356 bp, Homo sapiens
  misc_feature 1, 5, 21, 29, 36, 51, 59, 61, 73, 80, 83, 88, 89, 93, 108,126, 164, 234, 244, 270, 272, 283, 294, 295, 298, 299, 304,314, 315, 316, 323, 324, 332, 334, 335, 340, 342: n = A,T,C or G
ngcgntgcgctcacctgcccnctttccantcgaggnaaacctggtcgtgcnagggtgcnantaatgaattcgnccaaacnccnccggnngagnaggcggttttgcgtnattggggccgctattccncttttctcgctcacctgacttcgctgccgctcggtcgntcggcttgccggccgaagccgggtaattcaagcctccactcaaaaagggccgggtaaattaccgggtttnttccaccaangaaatttcaagggggggattaaaccncnaagggaaaaangaaacattgtnnganncaaanaaagggcccnnncaaaaanngggcccangnngaacncnccgtaaaaaaaaag

SEQ ID NO: 376 - DNA, 848 bp, Homo sapiens
  misc_feature 50, 351, 352, 353, 354, 355, 356, 357, 358, 359, 360, 361,362, 363, 364, 365, 366, 367, 368, 369, 370, 371, 372, 373,374, 375, 376, 377, 378, 379, 380, 381, 382, 383, 384, 385,386, 387, 388, 389, 390, 391, 392, 393, 394, 395, 396: n = A,T,C or G
  misc_feature 397, 398, 399, 400, 401, 402, 403, 404, 405, 406, 407, 408,409, 410, 411, 412, 413, 414, 415, 416, 417, 418, 419, 420,421, 422, 423, 424, 425, 426, 427, 428, 429, 430, 431, 432,433, 434, 435, 436, 437, 438, 439, 440, 441, 442, 443: n = A,T,C or G
  misc_feature 444, 445, 446, 447, 448, 449, 450, 451, 452, 453, 454, 455,456, 457, 458, 459, 460, 461, 462, 463, 464, 465, 466, 467,468, 474, 477, 479, 487, 493, 494, 504, 514, 533, 542, 563,566, 567, 569, 570, 571, 575, 588, 595, 596, 598, 615: n = A,T,C or G
  misc_feature 616, 623, 624, 629, 631, 637, 641, 644, 649, 664, 666, 667,668, 680, 681, 682, 683, 686, 687, 700, 707, 711, 715, 719,722, 732, 744, 745, 754, 759, 765, 767, 782, 790, 791, 798,801, 807, 812, 814, 815, 819, 821, 824, 836, 838: n = A,T,C or G
ccgggcaggtacactccagctcctctatcctttgttccaggtgagccttntcattaaatgctgtctcttgagcaatctttagcctctcccttagactatctcgttctgtggtcattcttcgtaaatcagtaaaggctacatctctttcagtctccactcgccggagaatagcatgtgccgttgttgatttaggactcttacagcttttcatcatttctcgtcgaagtcgggtaatttcttcctgtgcctgttcataaagaaggaagatcttgtctctctcagatttaagaaccttgacattaccctgaatttctgccaaatcggacgcgtgggtcgaagcttgtacacctnnnnnnnnnnnnnnnnnnnnnnnnnnnnnnnnnnnnnnnnnnnnnnnnnnnnnnnnnnnnnnnnnnnnnnnnnnnnnnnnnnnnnnnnnnnnnnnnnnnnnnnnnnnnnnnnnnnnnnaaaatngcncnctggggcnaaatcnngggaaaatangctgttttcntgggaaaaaaattgttttnccccgcaanaaaaatcccccacaaaaattntanngnnngggngaaaaaaaaaagnaaaaaanngngggggggggcccccaannggggggnngcccncncccctnatanttnatggngggggggggccctcnannnggcccctttttnnnnaanngggaaaaaccttnggcgggncccntttntatnaanaaaaaacccncccccccccccnnggggggggnggggnggtttngnttattggggggcccntttttccnnttttccnaanaaaaanaaaananncggngnccnggagggggaaangngggggggggg

SEQ ID NO: 377 - DNA, 401 bp, Homo sapiens
  misc_feature 373, 382, 389, 393: n = A,T,C or G
cgaattggagctccccgcggtggcggccgaggtcaagcttcgacccacgcgtccgtgatgctggcttcccggtcaaagctgaggagtttgtggtgctttctcaggaaccttctgtcacggaaaccattgcacccaaaattgcaagacctttcatagagactttcctcaggccctcaagagtattgagtatctggaggaggatgcccagaagtccgcacaggagggggtgctgggaccacacactgatgctctgtcatcagactctgagaacatgccgtgtgatgaagaaccatcccaattagaggagctagctgacttcatggagcagcttacaccaattgaaaaatatgctttaaattacctggaaatattncatactttntatttgnggcnaaaaaaaa

SEQ ID NO: 378 - DNA, 495 bp, Homo sapiens
  misc_feature 72, 73, 74, 75, 76, 77, 78, 79, 80, 81, 82, 83, 84, 85, 86,87, 88, 89, 90, 91, 92, 93, 94, 95, 96, 97, 98, 99, 100,101, 102, 103, 104, 105, 106, 107, 108, 109, 110, 111, 112,113, 114, 115, 116, 117, 118, 119, 120, 121, 122, 123: n = A,T,C or G
  misc_feature 124, 125, 126, 127, 128, 129, 130, 131, 132, 133, 134, 135,136, 137, 138, 139, 140, 141, 142, 143, 144, 145, 146, 147,148, 149, 150, 151, 152, 153, 154, 215, 252, 254, 315, 317,336, 338, 340, 362, 365, 393, 459: n = A,T,C or G
gccggcccgaggactccagcctgggcaacagagcaagactccatctcaaaaaaaaaaaaaaaaaaaaaagtnnnnnnnnnnnnnnnnnnnnnnnnnnnnnnnnnnnnnnnnnnnnnnnnnnnnnnnnnnnnnnnnnnnnnnnnnnnnnnnnnnngggggccccgggtacccaagcttttgttccctttagtggagggggttaatttgccgccgcnttgggcgtaaatcaatgggtcattagctgtttcctgngntggaaaaattgttatcccgctcaccaaattccacaccaaaccattaccggaagccccgggngnagccattaaaaaaggtgtnananagccttggggggggtgccctanatnggaaggtggagcctaaacctcaccattnaatttggccgttggcgcctcaccttgccccgcttttccaaggtccggggggaaaaacctggtccgnggccaagcttgcaattaaattggaaattcgggccca

SEQ ID NO: 379 - DNA, 544 bp, Homo sapiens
  misc_feature 7, 28, 29, 34, 399, 403, 414, 424, 434, 452, 454, 495, 525,526, 527, 534: n = A,T,C or G
gaattgnagctccccgcggtggcggccnnccggncaggtggaaaggtgggtggggagagggaggcttatttgttgctgcagtgtaactaagtgaaacctaattcatatgactcaaactaaggtatatttggttagatctaggtgagttctactttagaggaaatcctggtaactgttgtttgtttgtaagttatagctgtaattaattttccctgtattcaaagcccccaaaccctgcattcagatactatgcatttagacttccttaggcaaagtcaaggcaacaagctgatgattctaagctattattcaaggagtatctaccatcataaaggtggtttaagtcatataggataatatcaatcaataatacagggagatggcaaaaattttttgggnaaancccaatattancttgggtttnatgacccccnaatctcacactttggggncntatgggaaaggctttttttaagacccgggagttcaagaccngccctgggcaacattaaaaaacctcctttnnnccaaaanctttaaaaaa

SEQ ID NO: 380 - DNA, 273 bp, Homo sapiens
tagggcgaattggagctccccgcggtggcggccgcccgggcaggttacaagtcgacccacgcgtccgcttcagaatatccaattcatgtgaactacaggaaattatagtttagatatttttaaatgatttgcctgtcaccgtataacacaagggtgtcatgaccaagctagatctctttaccatatcattaataaaagtcaaattttaaatttgtgcccaatttggctgggtgtggtggctcattcctgtgattccagcactttgggagacct

SEQ ID NO: 381 - DNA, 571 bp, Homo sapiens
  misc_feature 561: n = A,T,C or G
ctacttagggcgaattggagctccccgcggtggcggccgaggtcttcgacccacgcgtccgcatttattaaggcttgtatatgttcaagatccagtgaagactgtcttgggcgtgtataattgatcttaaccacaaggctgagaagttatgtgcagggcttatgatgctacttccaaagtattaaatcctccagagaagcctgtagtgtgggatgcaaactattttaagtgtgaccatgaggtgtttttttgtggaccattttaaagccaatgataggttctaaagcaatctcaacctgagttaggtagaatgggttggttatctgcactctagcggcccttcatagctattgtattctggatttcaattcggcactttatgtattagctaaaaatttcatgaccagatcttttgaagtatacaaagtaaatcttcaaggtggatagtttatccaagtgtaaaatgtgttgcactaggtcagcttggaattttgagatgacttttggcatcattgcatacatctggtttgtgtacctgcccgggccggccgctctagaacngtggatcccc

SEQ ID NO: 382 - DNA, 277 bp, Homo sapiens
  misc_feature 122: n = A,T,C or G
ctacttagggcgaattggagctccccgcggtggcggccgaggtactattgactaaagtcagttgggggagagagaggcggaagtatattacttttatgcttggttatactagagaacaaatngaaactgactaaagaaacattagatcagtggttctcagagtattgatatctgggagtcccagcaacagtctgaggaggttcatgagttcagaatattttgataataacactaagatggtatttactcttctaactgggtagatatttgcactggt

SEQ ID NO: 383 - DNA, 501 bp, Homo sapiens
  misc_feature 378, 379, 390, 397, 404, 423, 446, 450, 455, 461, 464, 467,480, 481, 485: n = A,T,C or G
ttagggcgaattggagctccccgcggtggcggccgaggtacatatctgcatatacaccattaattttacatcgttgaggtagccaaaactgctcgtaagtgggcttttattaaataatataatgttcttaatagaggaaaaaggaattgaatacatttttaaaaacaaaataacaaaaccaatccattgtcccacaaaagaaaatcagtggagacaaaagcagtttaatttgctggattcttttgtggcttattttttgagtattatttacaaaatgttagactaatttttaagcaatattaataataagcaacatacaactccaagaataatataataaataataaactgcggacgcgtggttcgaagcttgctcgnngggggccgggncgcttcnaggcccncccgggcaggtacccagtnatcacataaattctgcaatcatntggntattnagcttnacntgntttttttatttgnngaanttgttgttgtattcag

SEQ ID NO: 384 - DNA, 276 bp, Homo sapiens
acttagggcgaattggagctccccgcggtggcggccgcccgggcaggttacaagtcgacccacgcgtccgcttcagaatatccaattcatgtgaactacaggaaattatagtttagatatttttaaatgatttgcctgtcaccgtataacacaagggtgtcatgaccaagctagatctctttaccatatcattaataaaagtcaaattttaaatttgtgcccaatttggctgggtgtggtggctcattcctgtgattccagcactttgggagacct

SEQ ID NO: 385 - DNA, 470 bp, Homo sapiens
  misc_feature 378: n = A,T,C or G
ctacttagggcgaattggagctccccgcggtggcggccgcacttttttttttttttttttttaagaaatagggtctcactctgtcccccaggctggagccattatagctcactacagcttctgactcctaggctcaagggatcctgccacctcagcctccctggtagctgggactataggcaggagatcgcttgaaccgggaggcggaggttgctgtaagctgagatcgcgccattgctttccagcctgggtgccagagcaaaactctgtctcaaaaaaaaaaaaaataataataataaataaataaaaaggcaaggaatatagggaaaagtcaaaagagatggactgtgagaagactgggaaagccagaagaatggnggaaaatgtagcatggagtaagacaataaaaatataagaggactcatttcggacgcgtgggtcgactcacctcggccgctctagaactagtg

SEQ ID NO: 386 - DNA, 348 bp, Homo sapiens
ttagggcgaattggagctccccgcggtggcggccgcccgggcaggttacaagcttcgacccacgcgtccgggaaattttaattaaaaataggtgaacattttaaatgacctaatacatatttagtccacattgaaactttggcattttgtcattgccattaaaattttgatggcattaaaatttgatgccattaaaattttgatcagtaggtagcatttttttcttagctacaattgttttttttaattataagtattaaaaattcatgaagatgattctttttgtaaaacagttttgcataaaaagtaagtctcattttaaagcaactaccaacttactggccacct

SEQ ID NO: 387 - DNA, 267 bp, Homo sapiens
aggtcttcgacccacgcgtccgatggtttttgcaaaaattgaaaatgcatcgatattacagttaattttttcagtgtgtatgtggtattaggcttagaactataacacaggaagtttttagagtatgtccactctggtttactcctttgtaagtattaatacctgataatttacatcctacagccctgcctttttttttttttttcaagtttgtcccagcaagtcttggccctttgcattttcttaatacattttagtacctgcccg

SEQ ID NO: 388 - DNA, 403 bp, Homo sapiens
ccgcggtggcggccgaggtacaaagaacaaagggaagctaaggaagaaaagatagtcaataaaagatgtctcatctgggcttagtggctcatgcctgtaatcccaacactttgggaggctgaggctcgaggactgcttgagtccaggaatttgggcaagtaggaaattactgaacagctgctatcacagacaaatgcctaacattgtgaagtgctacacaggggaaggagacccacgctaagaggagagcatgcacccagacacagaactcagaggacacagttcaaaacacacatacaagaggcttaggcacctgtgggcgtgtgtgtgctcacagccagcaaaatgaaaaaaaatcccagctctgaaggagaggcaagtgcatggcttccgtacctgcccg

SEQ ID NO: 389 - DNA, 480 bp, Homo sapiens
  misc_feature 114, 258, 329, 376, 379, 402, 456, 457, 460: n = A,T,C or G
acttagggcgaattggagctccccgcggtggcggccgaggtcttcgacccacgcgtccgatggtttttgcaaaaattgaaaatgcatcgatattacagttaattttttcagtgngtatgtggtattaggcttagaactataacacaggaagtttttagagtatgtccactctggtttactcctttgtaagtattaatacctgataatttacatcctacagccctgccttttttttttttttcaagtttgtcccagcangtcttggccctttgcattttcttaatacattttagtacctgcccgggcggccggccgcccgggcaggtacnactacctctttaaagttgtccttattggagattctggtgttggaaanagnaatctcctgtctcgatttactangaaatgagtttaatctggaaagcaagagcaccattggagtagagtttgcaacanngangcatccaggttgatggaaaa

SEQ ID NO: 390 - DNA, 257 bp, Homo sapiens
  misc_feature 7, 76, 124, 125, 172: n = A,T,C or G
tccccgnggtggcggccgaggtactattgactaaagtcaagttgggggagagagaggcggaagtatattacttttntgcttggttatactagagaacaaatagaaactgactaaagaaacattnnatcattggttctcagagtattgatatctgggagtcccagcaacagtntgaggaggttcatgagttcagaatattttgataataacactaagatggtatttactcttctaactgggtagatatttgcactggt

SEQ ID NO: 391 - DNA, 300 bp, Homo sapiens
  misc_feature 17, 18, 42, 252: n = A,T,C or G
agggcgaattggagctnnccgcggtggcggccgaggtcttcnacccacgcgtccgatggtttttgcaaaaattgaaaatgcatcgatattacagttaattttttcagtgtgtatgtggtattaggcttagaactataacacaggaagtttttagagtatgtccactctggtttactcctttgtaagtattaatacctgataatttacatcctacagccctgcctttttttttttttttcaagtttgtcccancaagtcttggccctttgcattttcttaatacattttagtacctgcccg

SEQ ID NO: 392 - DNA, 290 bp, Homo sapiens
ccgcggtggcggccgcacttttttttttttttttttacctgaaaatgcttattctagcttcacatttgattgtttggctaagaagaaaattatttattagacttaattttcctcacgagtttaaagattgcttcagatcttaaacttctaatgaggaaagctgagaagtccaatgccattctgattcttgcaacttacaagtagtctttttttgtctagacgctttcaggaccttcttttttcctcagtcagtgtatccaaaccttcacagtgatatcttttgggtacct

SEQ ID NO: 393 - DNA, 253 bp, Homo sapiens
ccgcggtggcggccgaggtcttcgacccacgcgtccgcatttattaaggcttgtatatgttcaagatccagtgaagactgtcttgggcgtgtataattgatcttaaccacaaggctgagaagttatgtgcagggcttatgatgctacttccaaagtattaaatcctccagagaagcctgtagtgtgggatgcaaactattttaagtgtgaccatgaggtgtttttttgtggaccattttaaagccaatgatag

SEQ ID NO: 394 - DNA, 474 bp, Homo sapiens
  misc_feature 17: n = A,T,C or G
gggcgaattggagctcnccgcggtggcggccgcccgggcaggtcttctacccacgcgtccgcacattttgatggtcagtcaataacttaagcagttaccaaaatactaggtatccaaggagcgagaggtgggcgagcataagaaacacatttctcatggcacagctctgccaaagccctgcagaatcatttacacataggtctttggttagtagcccctggcacagaattctgatcttaaacaaatattgtctataatcaagtagagcaatgcaattaaaaaaaaaaagcacaggttttggggccatgctgaaatcccagccttgctatttgctggctgtgtgaccgtggttccttggtctcattatgctttggttcccgtatctataaaacggacgtaataatgtctccctctcattattgtgaagtcgaaatgatgtctgtaaagtgcccaacacagtactaaagggctatt

SEQ ID NO: 395 - DNA, 279 bp, Homo sapiens
ccgcggtggcggccgcccgggcaggtcaagcttcgacccacgcgtccgtttaagtaacattcagatttgtgtgtgtggagaggttgtagggaacagaattgtaggaaggtgctcacacctgtttttgtttgtttgttttatgtatatatggtgggtagaaaataaggattaatgaatgcagtaaggtatttgagcactcttgtttatcttgtgtaggtgccaaccaaatatttttatagagatgtggttaagcctcttggcatgttcaactgtgtacct

SEQ ID NO: 396 - DNA, 166 bp, Homo sapiens
  misc_feature 121, 124, 148: n = A,T,C or G
ccgggcaggtctcttgtctagtatactcaaggcagcctagtaaattattatttatctatacaatactggaaaaacttgtagacaaaaacatgacttgaattgctaaaaaaaaaaaaaaaanganggagaatgaaaacttccggacgcntgggtcgaagcttgacct

SEQ ID NO: 397 - DNA, 490 bp, Homo sapiens
agggcgaattggagctccccgcggtggcggccgaggtcttcgacccgcgcgtccgcatttattaaggcttgtatatgttcaagatccagtgaagactgtcttgggcgtgtataattgatcttaaccacaaggctgagaagttatgtgcagggcttatgatgctacttccaaagtattaaatcctccagagaagcctgtagtgtgggatgcaaactattttaagtgtgaccatgaggtgtttttttgtggaccattttaaagccaatgataggttctaaagcaatctcaacctgagttaggtagaatgggttggttatctgcactctagcggcccttcatagctattgtattctggatttcaattcggcactttatgtattagctaaaaatttcatgaccagatcttttgaagtatacaaagtaaatcttcaaggtgatagtttatccaagtgtaaatgtgttgcactaggtcagcttggaattttgagat

SEQ ID NO: 398 - DNA, 384 bp, Homo sapiens
ttagggcgaattggagctccccgcggtggcggccgaggtcgccatgttggctgggctggtctcgaactcctgacctcaagtgatctgtcctggcctcccaaagtgttgggattacaggctactaaagctttttatttatttctgtggatttgagttattgtgtagtgtcatttatttttcatatgaaggattccttttggtattttttgaagaacttctttatcagaattaattatctcacttttgaaaatttttaacaatctagaaacgtcttttttgttttttgaagaatagttttctggatgtaaaatttttggttaattttgtttttctttgaacactgaatatttaatcttatgccttctggctttcagtacctgcccg

SEQ ID NO: 399 - DNA, 453 bp, Homo sapiens
ccgcggtggcggccgaggtagcttgagtcgacccacgcgtccgttcagatccgtttcagaaacgtgagtctctagctcaggagatttccacaactgtccttagtaacctgatcttattctcatgtttaaccttggcagtgggaagttcttcctggtatcctgcctaatttactggagttggcattaatgccatttccccctaaggcgtggctcttggaccagtatcacctgagaatttgatagacatagacccagagttactgaggcaggtgctctgttttggggaccagcaatcggtgctttagcaagttctttgggtgatagggtttggaaactactgctctaaagcatcatctgttttgactttgccatgcacaatctgaactcactcccgtgaggccctgctcctgatactttaaatcgtcctgtctctttttctgcctctctgtggag

SEQ ID NO: 400 - DNA, 480 bp, Homo sapiens
  misc_feature 405, 457: n = A,T,C or G
ccgggcaggtacaggcacctatagaatttaaaggggagatttctttattttgtattcaatgtattaataagatttttaaaacatattttggagaaattgctaattagtgtataatcctgatgccaattctaaaaaaccttttttttttttgtagagacagggtcttattctgtcacccgggctggagtgctctggtatgatcctagttcactgcaacctcaaatacctggtctcaagcaatcctcccacctcagcctccccagtagctgtctctataagcatgcaccaccacacctggctaaccttcttattatttttggtagagacagtctcactatgttgcccaggctggtcttgaactcctaacctcaagcaaacatccctcctcgtgctcccaaaatgctnggattaccagcattaagccttacaagcataagctaccatggactggctttcnaaaaaatatttggtttaaaattc

SEQ ID NO: 401 - DNA, 533 bp, Homo sapiens
  misc_feature 90, 91, 157, 398: n = A,T,C or G
ccgcggtggcggccgcccgggcaggtggaaaggtgggtggggagagggaggcttatttgttgctgcagtgtaactaagtgaaacctaatnnatatgactcaaactaaggtatatttggttagatctaggtgagttctactttagaggaaatcctggnaactgttgtttgtttgtaagttatagctgtaattaattttccctgtattcaaagcccccaaaccctgcattcagatactatgcatttagacttccttaggcaaagtcaaggcaacaagctgatgattctaagctattattcaaggagtatctaccatcataaaggtggtttagtcatatagataatatcaatcaataatacaggagatggcaaaaattttttgtgaagagccagatagtanctgagtatgatgacccctaatctcagcactttgggaggctgatgggagagggtcatttaagaccaggagttcaaagaccagcctgggcaacattaaaaaactccatttctaccaaaaactttaaaaaaaattagc

SEQ ID NO: 402 - DNA, 352 bp, Homo sapiens
gcggtggcggccgaggtcaagcttcgacccacgcgtccggggaggacctaggcaacggcctgagactccgagactctatgttgaagatgcctggactaacctactgaagatacgtggttttaccaacagccagcaccaataggaagatatgaatgaagccatctgagaccagccatctggcagccaaactgccaactgactgcaaatgcatgaatgatcccactgacaccacgtagagcacaaatgagttgcctccactgagcccagcccaaattgttatcctataaaatcataaaaacataaacagttgttttaagtcaaaaaaaaaaaaaaaaaaagtgcgacctgcccg

SEQ ID NO: 403 - DNA, 364 bp, Homo sapiens
  misc_feature 16, 18, 23, 37: n = A,T,C or G
tactatagggcgaatngnagctncccgcggtggcggncgaggtattcaacaagggccctgagagagggacaggcagcccctgtgaatcttgctgttcagcagagacaggagtcagcacgtgtgagggcagcagggaagtcttcctggaggagtgagacctggcgatgaggaggcacggcagggaggtggaacaggcaggagagactcttcaggaattgaggagatagaatagaggacactaaagccttagagaggccaggggtggtggcttggcaggatcatcgcttgaggctaggagtttaaaagcagcctgggcaacatagcgagaccccatctctaaacacaaaaaataaaaacctgcccg

SEQ ID NO: 404 - DNA, 416 bp, Homo sapiens
  misc_feature 93: n = A,T,C or G
ccgcggtggcggccgaggtcaaagcttcgacccacgcgtccgtgatgctggcttcccggtcaaagctgaggagtttgtggtgctttctcaggnaccttctgtcacggaaaccattgcacccaaaattgcaagacctttcatagagactttcctcaggccctcaagagtattgagtatctggaggaggatgcccagaagtccgcacaggagggggtgctgggaccacacactgatgctctgtcatcagactctgagaacatgccgtgtgatgaagaaccatcccaattagaggagctagctgacttcatggagcagcttacaccaattgaaaaatatgctttaaattacctggaattattccatacttctattgagcaaaaaaaaaaaaaaaaagtgcggccgctctagaactagtg

SEQ ID NO: 405 - DNA, 203 bp, Homo sapiens
  misc_feature 112: n = A,T,C or G
ttagggcgaattggagctccccgcggtggcggccgaggtcaagcttcgacccacgcgtccggaagttttcattctccctcttttttttttttttttttttagcaattcaagncatgtttttgtctacaagtttttccagtattgtatagataaataataatttactaggctgccttgagtatactagacaagagacctgcccg

SEQ ID NO: 406 - DNA, 312 bp, Homo sapiens
  misc_feature 2: n = A,T,C or G
tnctatagggcgaattggagctccccgcggtggcggccgcacttttttttttttttttacctgaaaatgcttattctagcttcacatttgattgtttggctaagaagaaaattatttattagacttaattttcctcacgagtttaaagattgcttcagatcttaaacttctaatgaggaaagctgagaagtccaatgccattctgattcttgcaacttacaagtagtctttttttgtctagacgctttcaggaccttcttttttcctcagtcagtgtatccaaaccttcacagtgatatcttttgggtacct

SEQ ID NO: 407 - DNA, 432 bp, Homo sapiens
ccgcggtggcggccgcactttttttttttttttttttctcttatattgaagtaaaatttaaaatttaatactttttattttttaaaagcatgtatggcatcatttcagtcttattaaattctctctgcatccattcacccatccttctttttgtgtgtgtgtgtagtggtctctgtgagagggttcattaatgtcaatcctgatcatttcttcctcaagagatgtcagtagatttgttttttttgctttggacttttatgaattgattgaatttttatgccaattatttttaaagtattacatagaagaacaaatggacagaaaaatttaaatgcaatcaaatcttgttgattttgaagtataggaaataatcttttttttattatactttaagttttagggtacctgcccgggcggccgctctagaactag

SEQ ID NO: 408 - DNA, 253 bp, Homo sapiens
ccgcggtggcggccgaggtactattgactaaagtcagttgggggagagagaggcggaagtatattacttttatgcttggttatactagagaacaaatagaaactgactaaagaaacattagatcagtggttctcagagtattgatatctgggagtcccagcaacagtctgaggaggttcatgagttcagaatattttgataataacactaagatggtatttactcttctaactgggtagatatttgcactggt

SEQ ID NO: 409 - DNA, 273 bp, Homo sapiens; identical to SEQ ID NO: 380

SEQ ID NO: 410 - DNA, 275 bp, Homo sapiens
ctatagggcgaattggagctccccgcggtggcggccgaccagtgcaaatatctacccagttagaagagtaaataccatcttagtgttattatcaaaatattctgaactcatgaacctcctcagactgttgctgggactcccagatatcaatactctgagaaccactgatctaatgtttctttagtcagtttctatttgttctctagtataaccaagcataaaagtaatatacttccgcctctctctcccccaactgactttagtcaatagtacct

SEQ ID NO: 411 - DNA, 291 bp, Homo sapiens
  misc_feature 112, 113, 114: n = A,T,C or G
acttagggcgaattggagctccccgcggtggcggccgaggtcaagcttcgacgcgtccgatcacttttttcattgataccttattagataaaacattagccccctagagtgnnntgtgaaggaaatatgcctaataagagatgatagttttagcaataaatgagcattagaactattatttattaatgaaatgaactggtggtctgaaagtgatgataaacagacaactgtggaaaatgaattattaaaattccatggaattccttttgaagtttatgaagtacctgcccg

SEQ ID NO: 412 - DNA, 109 bp, Homo sapiens
ctatagggcgaattggagctccccgcggtggcggccgaggtcttcgacccacgcgtccgcatttattaaggcttgtatatgttcaagatccagtgaagactgtcttggg

SEQ ID NO: 413 - DNA, 177 bp, Homo sapiens
  misc_feature 113, 177: n = A,T,C or G
agggcgaattggagctccccgcggtggcggccgcccgggcaggtacaacttgtgatgcttttggcaggaattacagaacaaccaatgccattcaagttgtggagattatactngcaggtgaactcgtaaagagaagattctggaatgcctatatctgaaagcttgagtcgacacctn

SEQ ID NO: 414 - DNA, 306 bp, Homo sapiens
ccgcggtggcggccgaggtcttcgacccacgcgtccggaatgagtgagtgcagaactggcaaccagaagacaggaacaaggcctgggaatggagcggaaaggtagctgctatatatagttccttcagccagtaacgattagagccaatagccatctggatgatgaatggctcctaattgccttaaattacggcagttagctaagggtttctgttgctacatgggttaccgtaggccgctgcaccctgcataactgtcctcaggcctgcgtcccctgagtctcagcacttgggcctccacctgcccg

SEQ ID NO: 415 - DNA, 306 bp, Homo sapiens
  misc_feature 253, 286: n = A,T,C or G
ctacttagggcgaattggagctccccgcggtggcggccgaggtctcccaaagtgctggaatcacaggaatgagccaccacacccagccaaattgggcacaaatttaaaatttgacttttattaatgatatggtaaagagatctagcttggtcatgacacccttgtgttatacggtgacaggcaaatcatttaaaaatatctaaactataatttcctgtagttcacatgaattggatattctgaagcggccccntgggtcgactttgtaacctgcccgggcggccgntctagaactagtgggatccc

SEQ ID NO: 416 - DNA, 145 bp, Homo sapiens
  misc_feature 33, 40, 116: n = A,T,C or G
tatggcgaattggagctccccgcggtggcgggncgaggtnaagcttcgacccacgcgtccgattattctctccatttaggctataaatctttcagtgtagggtgtttctaatgtcntattcttccaaaaaaaaaaaaaaaaaagt

SEQ ID NO: 417 - DNA, 299 bp, Homo sapiens
ccgcggtggcggccgaggtactcttgatgtcataagattagaaaatgtggttaattgtcatcaacccattaagttcttaaatgtcattgaatggagtccttgtcatgttacagaggagcgtaaaattgtggttaaacatttttttaaagattacatggtagagccacagtttgttatgcagaaggaaaatttagcaaatattattttgcttaatagcctttaaaaaatcgtataaatttgatttgtagttttatccccagagtcattagatttttccaaaaaaaaaaaaaaaaaaaggt

SEQ ID NO: 418 - DNA, 390 bp, Homo sapiens
  misc_feature 94, 113, 116, 118, 119, 170, 191, 196, 255, 390: n = A,T,C or G
ctacttagggcgaattggagctccccgcggtggcggccgcccgggcaggtgccaaagccttaacttagattgttacttatgtttctaaatctgnggaagcacatttccttttnttntnnttttcttttactgttaatatccttattctctattttaccagtggagaatgnttagtattaatttccatttanctcangattcaagaaatgcaaagtgctatttttatcaaatttctgaaagcctactgtcttctgntttggaagtcccacaacagctctttaatttccttaagccccactttcctcatcagcaagttggtgtggcaatggatcataataggttgctgggaggatgaagtgagcggaccgcgtgggtcgaagcttgtacctn

SEQ ID NO: 419 - DNA, 108 bp, Homo sapiens
ccgcggtggcggccgcactttttttgtattacttcaacttttaaaaattctaaagaaaaccatcatctcagaccagcatttccggacgcgtgggtcgaagcttgacct

SEQ ID NO: 420 - DNA, 195 bp, Homo sapiens
tacttagggcgaattggagctccccgcggtggcggccgcccgggcaggtgtcaaacatctccctcgtccggatccttctaacgcaggagtctcagacgcaaatgccggcaagggccaggcaggtgatgtaagatgcgtggagcagatgccaagccacagggagtggtggagactggggtgaactggaaagcacct

SEQ ID NO: 421 - DNA, 385 bp, Homo sapiens
  misc_feature 319: n = A,T,C or G
ccgcggtggcggccgcccgggcaggtacacaaaccagatgtatgcaatgatgccaaaagtcatctcaaaattccaagctgacctagtgcaacacatttacacttggataaactatcaccttgaagatttactttgtatacttcaaaagatctggtcatgaaatttttagctaatacataaagtgccgaattgaaatccagaatacaatagctatgaagggccgctagagtgcagataaccaacccattctacctaactcaggttgagattgctttagaacctatcattggctttaaaatggtccacaaaaaaacacctnatggtcacacttaaaatagtttgcatcccacactacaggcttctctggagggatttaatactttgg

SEQ ID NO: 422 - DNA, 168 bp, Homo sapiens
ggtggcggccgcccgggcaggtgtcaaacatctccctcgtccggatccttctaacgcaggagtctcagacgcaaatgccggcaagggccaggcaggtgatgtaagatgcgtggagcagatgccaagccacagggagtggtggagactggggtgaactggaaagcacct

SEQ ID NO: 423 - DNA, 412 bp, Homo sapiens
  misc_feature 2: n = A,T,C or G
tncttagggcgaattggagctccccgcggtggcggccgcccgggcaggtacataatatacagaggtataatctgtaacatcaataatgtaaagtggggaagggcaaggtggaaaaggagtagaatgcttgtatgtgactaaaattatgttggtatcagtttaaaatatattattataactttagaatgctatacccattcccacagtaattcccatagtaaccaaaaagaaaatatctgtaggatacacacaaaagaaaatcagaagtagatgcaaacttgtcactacaggaaaaaaaaagctatcaaaatagaaaacaataatggagaaaataagacaccaaaagctataagactcacagaaaataaataataaaatggcaaaaagaagcggacgcgtgggtcgaagacct

SEQ ID NO: 424 - DNA, 454 bp, Homo sapiens
  misc_feature 257, 379, 381, 384, 400, 402, 412, 413, 423: n = A,T,C or G
cactacttagggcgaattggagctccccgcggtggcggccgaggtgtacaaagcttcgacccacgcgtccgatttggcagaaattcagggtaatgtcaaggttcttaaatctgagagagacaagatcttccttctttatgaacaggcacaggaagaaattacccgacttcgacgagaaatgatgaaaagctgtaagagtcctaaatcaacaacggcacatgctattctccggcgagtggagactgaaagagatgtancctttactgatttacgaagaatgaccacagaacgagatagtctaagggagaggctaaagattgctcaagagacagcatttaatgagaaggctcacctggaacaaaggatagaggagctggangnccntcccgggggccggggncngcccgccccnngcagggtcanatgattgcagaatttatgtgattcctggggt

SEQ ID NO: 425 - DNA, 401 bp, Homo sapiens
gggcgaattggagctccccgcggtggcggccgcccgggcaggtacttactgagccacttacaattatttctgaaaaatctcagagaactgaggatagatcagaaaatttaaagaaagcaaataccaaattttcaaaccaggataggaagtgaataccttgtaaatacactttgttaagtgatgataattctgagtaaaaatttagaagattttgagaaaagcatttgaacttctaggggccaataaaataccatgcagaagaatgtttaaaaagtcatgccaaatttgaatccatttgatcctcaacctcatcagatgttatatgccaaactacttattttggcttagataataatcatatagaatgaaactttccacaaatagactgtggtcagtggctg

SEQ ID NO: 426 - DNA, 244 bp, Homo sapiens
  misc_feature 88: n = A,T,C or G
ccgcggtggcggccgcccgggcaggtcaagcttcgacccaccgtccggcaatgatgagcaaaaacaagtttggtccccctgttatagngcctggtaaaggtttttgttgttgttttgcaggggtgggggaaccaggaaatcagatcatcacaacaatatatacttatctgtaactatggtaactgctacagcaaaggggcgtatcatactattagcatactaagtttcacttaaagaggtcgga

SEQ ID NO: 427 - DNA, 190 bp, Homo sapiens
  misc_feature 115: n = A,T,C or G
agggcgaattggagctccccgcggtggcggccgcccgggcaggtgtcaaacatctccctcgtccggatccttctaacgcaggagtctcagacgcaaatgccggcaagggccaggnaggtgatgtaagatgcgtggagcagatgccaagccacagggagtggtggagactggggtgaactggaaagcacct

SEQ ID NO: 428 - DNA, 364 bp, Homo sapiens
  misc_feature 3, 314, 345, 353, 362: n = A,T,C or G
tanggcgaattggagctccccgcggtggcggccgcccgggcaggtcaagcttcgacccacgcgtccgtgataacttctcctaagtgccaggcattgtattacatgttgggagcacaaagatgaataataacaataggttcacagaaaagatgaattgattgagagaaaaagaaccctccaggagccctcagcgtagtagggggttggtgttggagggtggaggaatggaaaaggccctgaaatgcaggcagagaaatgatgaaacaattcaggggctgtggtgaggttaaatgaatatctttacagcagcctcnaagactgatcaggttactataccctctcttntgtccacngtgcatttnaa

SEQ ID NO: 429 - DNA, 228 bp, Homo sapiens
  misc_feature 74: n = A,T,C or G
ccgggcaggtcaagcttcgacccaccgtccggcaatgatgagcaaaaacaagtttggtccccctgttatagagnctggtaaaggtttttgttgttgttttgcaggggtgggggaaccaggaaatcagatcatcacaacaatatatacttatctgtaactatggtaactgctacagcaaaggggcgtatcatactattagcatactaagtttcacttaaagaggtcgga

SEQ ID NO: 430 - DNA, 381 bp, Homo sapiens
  misc_feature 74: n = A,T,C or G
ccgggcaggtacactccagctcctctatcccttgttccaggtgagccttctcattaaatgctgtgtcttgagcnatctttagcctctcccttagactatctcgttctgtggtcattcttcgtaaatcagtaaaggctacatctctttcagtctccactcgccggagaatagcatgtgccgttgttgatttaggactcttacagcttttcatcatttctcgtcgaagtcgggtaatttcttcctgtgcctgttcataaagaaggaagatcttgtctctctcagatttaagaaccttgacattaccctgaatttctgccaaatcggacgcgtaggtcgaagcttgtacacctcggccgctctagaactagtgggatcccccgg

SEQ ID NO: 431 - DNA, 224 bp, Homo sapiens
  misc_feature 108, 203: n = A,T,C or G
agggcgaattggagctccccgcggtggcggcccgcccgggcaggtacgatttaaaatctcctcctcctacagcggtcgagtattgaagcaggtctttgaggatgggcnggaattagagtcaccaaaggaggaataccctcacagttttctgcaagagtctcttgaaacaatggatggtgtttatgggtctggggaagaccccncgccccaaatgttgctcccct

SEQ ID NO: 432 - DNA, 345 bp, Homo sapiens
cttagggcgaattggagctccccgcggtggcggccgaggtacacacaaacacacacacaaagtttaatatactttttaaaaaattttattgtattgttttcttgaaatagggtcttgctatgttgcctaggctggtcttgaactcctgggattaagcaatcctcccaactaagccttccaaaatgctggcattacaggtgtgagctaccacaatcagtctcttagattttgttttttaagaacaattcgaagtttactgcaaaattgtgaagaacgaacagactgttcccacatatccctttttctttacacaccggacgcgtgggtcgaagcttgacctgcccg

SEQ ID NO: 433 - DNA, 356 bp, Homo sapiens
  misc_feature 82: n = A,T,C or G
ccgcggtggcggccgcccgggcaggtcaagcttcgacccacgcgtccggcttgaggtgggtttaggaaacatttggtatctntggcagggacagatgttgacctggccggtcggcagcttttacaaacctaaggacttcagggtccggttgcgcatgaggaccggggaggacagagctgtttgcaataggtgtgggcttttatagcattgtgagcatttcacgttagcgtaagtgttgctgctgtgcaggtggtctctggggcttacaatcttccccaatgttcttccccacccctcccaccattctggtgaacaagcctcttgggattctttgaaaaaaaaaaaaaaaaaaacct

SEQ ID NO: 434 - DNA, 408 bp, Homo sapiens
  misc_feature 116, 117: n = A,T,C or G
tagggcgaattggagctccccgcggtggcggccgcccgggcaggtacataatatacagaggtataatctgtaacatcaataatgtaaagtggggaagggcaaggtggaaaaggagnngaatgcttgtatgtgactaaaattatgttggtatcagtttaaaatatattattataactttagaatgctatacccattcccacagtaattcccatagtaaccaaaaagaaaatatctgtaggatacacacaaaagaaaatcagaagtagatgcaaacttgtcactacaggaaaaaaaaagctatcaaaatagaaaacaataatggagaaaataagacaccaaaagctataagactcacagaaaataaataataaaatggcaaaaagaagcggacgcgtgggtcgaagacct

SEQ ID NO: 435 - DNA, 348 bp, Homo sapiens
  misc_feature 63, 73, 96, 150, 162: n = A,T,C or G
caggtacaggcacctatatgaatttaaacggggaagatttctttattttgtattcaatgtatnaataagattnttaaaacatattttggagaaatngctaattagtgtataatcctgatgccaattctaaaaaaccttttttttttttgnagagacagggtnttattctgtcacccgggctggagtgctctggtatgatcctagttcactgcaacctcaaatacctggtctcaagcaatcctcccacctcagcctccccagtagctgtctctataagcatgcaccaccacacctggctaaccttcttattatttttggtagagacagtctcactatgttgcccaggct

SEQ ID NO: 436 - DNA, 360 bp, Homo sapiens
ttagggcgaattggagctccccgcggtggcggccgaggtattcaacaagggccctgagagagggacaggcagcccctgtgaatcttgctgttcagcagagacaggagtcagcacgtgtgagggcagcagggaagtcttcctggaggagtgagacctggcgatgaggaggcacggcagggaggtggaacaggcaggagagactcttcaggaattgaggagatagaatagaggacactaaagccttagagaggccaggggtggtggcttggcaggatcatcgcttgaggctaggagtttaaaagcagcctgggcaacatagcgagaccccatctctaaacacaaaaaataaaaacctgcccg

SEQ ID NO: 437 - DNA, 523 bp, Homo sapiens
  misc_feature 478: n = A,T,C or G
ttagggcgaattggagctccccgcggtggcggccgcccgggcacggtaccacgtagcaacatatgagtatttctctagataactttttttttgacaaggtctcactctgttgcccaggctggagtgcaatggtgcaatcttggctcactgcagccttgaccttccctagctcagctgaacctcccatctcaggacaccattgcctccactgcccatcctgcatctgcctgcctaccccaaaagtgttgagaatacaagcatgagccagagccacggaacctggcctctagagagactttctattttagttttttcttctcttatttgtgaagccttgaaaaaactactgtggtttatttagattctggtttgtgacttttttaaataaactttttattttggaataaatttatgtttagagaatagttgcaaacataataaagtgagttttcataaacgccttaccagtttcccctgntggttaacattttacatcaccatgctgttgcattggtcaaaacta

SEQ ID NO: 438 - DNA, 373 bp, Homo sapiens
ccgcggtggcggccgaggtcttcgacccacgcgtccgcatttattaaggcttgtatatgttcaagatccagtgaagactgtcttgggcgtgtataattgatcttaaccacaaggctgagaagttatgtgcagggcttatgatgctacttccaaagtattaaatcctccagagaagcctgtagtgtgggatgcaaactattttaagtgtgaccatgaggtgtttttttgtggaccattttaaagccaatgataggttctaaagcaatctcaacctgagttaggtagaatgggttggttatctgcactctagcggcccttcatagctattgtattctggatttcaattcggcactttatgtattagctaaaaatt

SEQ ID NO: 439 - DNA, 329 bp, Homo sapiens
  misc_feature 41, 66, 73, 161, 255, 296: n = A,T,C or G
tcgaggccgcccgggcaggtacacaaaccagatgtatgcantgatgccaaaagtcatctcaaaatngcaagcngacctagtgcaacacatttacacttggataaactatcaccttgaagatttactttgtatacttcaaaagatctggtcatgaaattttnagctaatacataaagtgccgaattgaaatccagaatacaatagctatgaagggccgctagagtgcagataaccaacccattctacctaactcangttgagattgctttagaacctatcattggctttaaaatggnccacaaaaaaacaccttatggtcacacttaaaa

SEQ ID NO: 440 - DNA, 300 bp, Homo sapiens
tacttagggcgaattggagctccccgcggtggcggccgaggtaccctaaaacttaaagtataatagtaataataaaaaaagaggtgcttttctcctaagtcaacattttagaggaaaagagtcaattcaagcaattatcacatatgtgtaactgaagcacatatgtgtaacttttcaagagtgattagatggtctgttgtctttgaagtgatagtcaaatatcaggtgtgttctagggaggttgtgtaagacttttgcttgtattctcccggacgcgtgagtcgactcaagacctgcccg

SEQ ID NO: 441 - DNA, 150 bp, Homo sapiens
  misc_feature 3, 111: n = A,T,C or G
ctnctatagggcgaattggagctccccgcggtggcggccgaggtcaagcttcgacccacgcgtccgattattctctccatttaggctataaatctttcagtgtagggtgtntctaatgtcatattcttccaaaaaaaaaaaaaaaaaagt

SEQ ID NO: 442 - DNA, 270 bp, Homo sapiens
agggcgaattggagctccccgcggtggcggccgcccgggcaggttacaagtcgacccacgcgtccgcttcagaatatccaattcatgtgaactacaggaaattatagtttagatatttttaaatgatttgcctgtcaccgtataacacaagggtgtcatgaccaagctagatctctttcatatcattaataaaagtcaaattttaaatttgtgcccaatttggctgggtgtggtggctcattcctgtgattccagcactttgggagacct

SEQ ID NO: 443 - DNA, 321 bp, Homo sapiens
  misc_feature 211, 264: n = A,T,C or G
cgcccgggcaggtacacaaaccagatgtatgcaatgatgccaaaagtcatctcaaaattccaagctgacctagtgcaacacatttacacttggataaactatcaccttgaagatttactttgtatacttcaaaagatctggtcatgaaatttttagctaatacataaagtgccgaattgaaatccagaatacaatagctatgaagggccgntagagtgcagataaccaacccattctacctaactcaggttgagattgctttanaacctatcattggctttaaaatggtccacaaaaaaacacctcatggtcacacttaaa

SEQ ID NO: 444 - DNA, 179 bp, Homo sapiens
  misc_feature 3, 5, 54, 124, 132, 133, 142, 150, 157, 158, 159, 160: n = A,T,C or G
acngncaggtaccaagattaaggacagagttccctccattggtcattgatttgnaaaccaaaatgtatctgtgacaggtattaatccggacgcgtggtcgaagacgaaaggacacgagaaatanggacctannccgctctanaactaggnatccccnnnnctgcaggaattcgatatca

SEQ ID NO: 445 - DNA, 320 bp, Homo sapiens
  misc_feature 167, 286, 292: n = A,T,C or G
ccgcggtggcggcccgcccgggcaggtgccaaagccttaacttagattgttacttatgtttctaaatctgtggaagcacatttccttttcttcttcttttcttttactgttaatatccttattctctattttaccagtggagaatgtttagtataatttccatttanctcaagattcaagaaatgcaaagtgctatttttatcaaatttctgaaagcctactgtcttctgctttggaagtcccacaacagctctttaattttcttaagccccactttcctcatcancaagtnggtgtggcaatggatcataataggttgc

SEQ ID NO: 446 - DNA, 145 bp, Homo sapiens
cgggcaggtacccttattttccctgatacagcacaactctgcctattctaatcatgacctagacacattcaatgaactacaagttctcctttacacggacgcgtgggtcgactccggacgcgtgggtcgaagacctcggccgcct

SEQ ID NO: 447 - DNA, 859 bp, Homo sapiens
  misc_feature 257, 258, 259, 260, 261, 262, 263, 264, 265, 266, 267, 268,269, 270, 271, 272, 273, 274, 275, 276, 277, 278, 279, 280,281, 282, 283, 284, 285, 286, 287, 288, 289, 290, 291, 292,293, 294, 295, 296, 297, 298, 299, 300, 301, 302, 303: n = A,T,C or G
  misc_feature 304, 305, 306, 307, 308, 309, 310, 311, 312, 313, 314, 315,316, 317, 318, 319, 320, 321, 322, 323, 324, 325, 326, 327,328, 329, 330, 331, 332, 333, 334, 335, 336, 337, 338, 339,340, 341, 342, 343, 344, 345, 346, 347, 348, 349, 350: n = A,T,C or G
  misc_feature 351, 352, 353, 354, 355, 356, 357, 358, 359, 360, 361, 362,363, 364, 365, 366, 367, 368, 369, 370, 371, 372, 373, 374,375, 376, 377, 378, 379, 380, 381, 382, 383, 384, 385, 386,387, 388, 389, 390, 391, 392, 393, 394, 395, 402, 412: n = A,T,C or G
  misc_feature 415, 422, 428, 430, 433, 438, 442, 455, 458, 461, 462, 470,475, 483, 485, 486, 489, 495, 498, 506, 508, 509, 512, 516,521, 524, 526, 531, 536, 538, 542, 543, 544, 545, 546, 553,554, 556, 557, 563, 568, 570, 571, 572, 575, 576, 579: n = A,T,C or G
  misc_feature 580, 583, 586, 592, 594, 595, 599, 600, 603, 604, 606, 615,616, 617, 618, 622, 623, 624, 625, 626, 627, 629, 630, 631,633, 634, 636, 637, 638, 640, 641, 642, 643, 645, 646, 647,648, 649, 650, 651, 654, 655, 656, 657, 658, 659, 660: n = A,T,C or G
  misc_feature 663, 667, 668, 669, 670, 674, 676, 677, 678, 679, 680, 682,683, 685, 686, 687, 688, 689, 690, 693, 694, 695, 696, 698,702, 703, 704, 705, 708, 709, 710, 711, 712, 713, 714, 715,716, 717, 720, 721, 722, 723, 724, 725, 726, 727, 728: n = A,T,C or G
  misc_feature 729, 730, 731, 732, 733, 735, 736, 738, 739, 744, 745, 746,747, 750, 751, 752, 753, 756, 757, 758, 759, 761, 762, 763,764, 765, 768, 769, 771, 773, 774, 775, 776, 779, 781, 784,788, 790, 792, 793, 794, 795, 796, 797, 798, 800, 801,: n = A,T,C or G
  misc_feature 802, 804, 806, 809, 810, 811, 812, 813, 814, 815, 816, 817,818, 819, 820, 822, 824, 825, 826, 827, 831, 832, 836, 837,838, 839, 841, 843, 844, 845, 848, 850: n = A,T,C or G
cgaggtcttcgacccacgcgtccgctttcttttgttgttaaggacccatgacctgcagtttccctaacattcatttttatacagggcagaggtatgtgtgcgagctcagataccttaaattcatatgcctttaatacaatcaggcagatttctaaatgagggatgcttccccacaaatggagagtgaaagtgggccagcctaaaaggacctccatagcactgtgcatggccagctgtttgtggctgtacctgcccgnnnnnnnnnnnnnnnnnnnnnnnnnnnnnnnnnnnnnnnnnnnnnnnnnnnnnnnnnnnnnnnnnnnnnnnnnnnnnnnnnnnnnnnnnnnnnnnnnnnnnnnnnnnnnnnnnnnnnnnnnnnnnnnnnnnnnnnnnnnatcatgntcatagctgnttnctgggtnaaaatngntantccgntcanaattttcacacantcntannaaccgttnccttnaattgttnannccnggggtnccnaattgggngnnctnactnaaatnaantngggtngcttntnttgnnnnntttttanntnngtttanccttntnnncannttnnttnttnaaattngnnaaannccnngnggggagggnnnntttnnnnnntnnngnnannntnnnngnnnnnnnggnnnnnnnttnattnnnntctntnnnnntnntnnnnnntannnnantttnnnnttnnnnnnnnnnggnnnnnnnnnnnnnntnnanntttannnnaannnnggnnnntnnnnnttnnantnnnnttngngtngttntntnnnnnnnannntntnttnnnnnnnnnnnntntnnnntttnntttnnnnangnnnttnttntttttttt

SEQ ID NO: 448 - DNA, 243 bp, Homo sapiens
gcggccgccgggcaggttacaagtcgacccacgcgtccgcttcagaatatccaattcatgtgaactacaggaaattatagtttagatatttttaaatgatttgcctgtcaccgtataacacaagggtgtcatgaccaagctagatctctttcatatcattaataaaagtcaaattttaaatttgtgcccaatttggctgggtgtggtggctcattcctgtgattccagcactttgggagacct

SEQ ID NO: 449 - DNA, 257 bp, Homo sapiens
cgcggtggcggcccgaccagtgcaaatatctacccagttagaagagtaaataccatcttagtgttattatcaaaatattctgaactcatgaacctcctcagactgttgctgggactcccagatatcaatactctgagaaccactgatctaatgtctttagtcagtttctatttgttctctagtataaccaagcataaaagtaatatacttccgcctctctctcccccaactgactttagtcaatagtacctcggccg

SEQ ID NO: 450 - DNA, 484 bp, Homo sapiens
ctatagggcgaattggagctccccgcggtggcggcccgaggtgtcaagcttcgacccacgcgtccgaaagagacccctgggctagggagccatttgcaagtccctcagatggcctcaggtgtgggtcatgctccactgcagccatggttactgggaagccaagtggactccatggggctccaagcaggggagggagctcctgggagacacagtgtggcccagatgccctggtcatggggacatccaagcacaggtgagaaacttgggcagggagggtgcagaggaaatttggaaatggctgagaggctggactcaaggtctcttgggcttgaactgagctcaagcagtccacccacttcagcttccagggtgctgggattacagtcgtgagccatggcatccggctggactcaaggtctcttgttccctgatcctgggcttggcatggagaagggaggaagctgaagggggcaggtaaaaagat

SEQ ID NO: 451 - DNA, 479 bp, Homo sapiens
ctatagggcgaattggagctccccgcggtggcggccgaggtacaagcttcgacccacgcgtccgattataccctaaaaaagtagaaagatggaataattaggagtaaaattagtgaaatggaaagatatgttatagaaaggaccaagaaacgcaaaagttggtatttgaaaagactgaaaaaattcatgaacctgtgaaaacagtggtcaagaagaaaagagaggcatattttgatctctgttttacatgttactcaatgttcattgctgcctcccttgtccataaagtgcctttagtgtgtatgttactttagattatcttggtgtcatcaagctttactcagcaaagaaccactttgttgtctactttaaaacataagttatctttaaaagaatgggtatcttttatagttccatattaatggcgaagaaactgcaggtaacagtgccttaccagctgggttttgctaacttttctc

SEQ ID NO: 452 - DNA, 197 bp, Homo sapiens
ccgcggtggcggcccgcccgggcaggttttatatttttttcctctttaaaaaataatttggttttgaatattaaatttacatatttctaagttaaatcaacattcgtagaggaattatcaaaaaaaactagtaagtctgaaaaaaaaaccatattttatattctgaggtcccggacgcgtgggtcgaagcttgacct

SEQ ID NO: 453 - DNA, 565 bp, Homo sapiens
tatagggcgaattggagctccccgcggtggcggccgccggcaggtacccaacacaaactattcaataaagtaatctgctttaaaaataaaacacactgaaaggccgaggcaggtggatcacctgacatcattagttcaagaccagtgtggccaaactggtgaaaattagtctcgactaaaaatcaacattagctgggcgtggtggcaggcgcctctaattccagctactcaggaggatgaggcaggagaatcacttgaagcaaggaggtggaagttgcagtgagctgagatcgtgccattgcactgcagcctgggcaacagagtgagactccgtctcaaaaacaccaccaccaacaaaataaacacaacagaattattctgcaaatacagatattggagtagctgagttccatctcaaatttgactatgcaggttgacaggtgatcttggcaaactacttatcctttctgaagttcaactttttcaccaaatggtattgggatacaacacttgctcttgcctatctcacatgaattatccattttggacaacttggtaaactata

SEQ ID NO: 454 - DNA, 289 bp, Homo sapiens
ccgcggtggcggcccgaggtcccaaaagatatcactgtgaaggtttggatacactgactgaggaaaaaagaaggtcctgaaagcgtctagacaaaaaaagactacttgtaagttgcaagaatcagaatggcattggacttctcagctttcctcattagaagttaagatctgaagcaatctttaaactcgtgaggaaaattaagtctaataaataattttcttcttagccaaacaatcaaatgtgaagctagaataagcattttcaggtaaaaaaaaaaaaaaaaaaagt

SEQ ID NO: 455 - DNA, 492 bp, Homo sapiens
tatagggcgaattggagctccccgcggtggcggccgaggtactctacagcatcctgataacagcctctgccctgggaaacagactgtgaccatgcatttctagtccagcatatcctatcagaagaccaaatggcttcatcaaaaacagagtgacaacctcttctctttgcctcttctgtgcttgttaacaggcagcattggggcaggagagcctgcaggcctttcacggctgcttgagttctcacctgtttgtctgagctctgattcctctgccctgtaagcgtaaaggagatgtgctgagtggaaagacctctaaacaggcagccaggaagccagatttcaggtccatctctgcctctaactggcagctttgccttgggtaaatcatcaagtgggcaatagtttctctcctgtaaaaggaaaagattgggtttaagattgtttctgaagttctctctagatttaacctggaaggagttgaaattgctaacc

SEQ ID NO: 456 - DNA, 346 bp, Homo sapiens
ccgcggtggcggccgcccggcaggtacaacattttacatttccagggactgcaaaaatgttagttccttcccccatcatttagtttgaaaattcttagataattctttgctggtaaattccaacagaatagttagcacacaggttccacacacacaagttctagataggaatctgaagcaccacaatgaaaagaacatttaacatcttttaaaaatgtttaatgttatcagaaagatgtttggtatatgtgttccatgcatgctcctgctggttctatttgaaaaagaagtttttacagttatctgttgtcaccatattgtaaacggacgcgtgggtcgaagacct

SEQ ID NO: 457 - DNA, 514 bp, Homo sapiens
  misc_feature 473: n = A,T,C or G
ctatagggcgaattggagctccccgcggtggcggccgccgggcaggtacaataaatagcattcccacggtgaccacaagtcttggaatcagttccaggtgtcgtcgtggccgttgacaccgctgccttctgacggtaaatgtattgtagaattcatgttgtatcaggcttcagtttcctcattctaaaatgagaggattggataagttagtagtttctaatttttacttttaatcagtggcatctcccatttatttttcatttgaaataaaacttttgaattttatcttctacctaaataacatattttgttttatgtttcaagatgaagctcacactgagttggaaaaaaggaaaaagcaaaggatcaaagctgggggaaaatactggaccatgtgcttcacctcatggtgccaaataaagagaaaatggggagaagatagggacagataaagatctatttgctcggattgngctctcatccttggcaacatgttgacaatgccctggaaata

SEQ ID NO: 458 - DNA, 588 bp, Homo sapiens
  misc_feature 525, 539, 588: n = A,T,C or G
ccgcggtggcggcccgagagctccaggacgaaggtataaacacagcagagggcagagcctgatttcaatcaggggctactctaagaaaggcaggaaactagataaatacatttaaaagaaattcctcagtggcagggacagtagagcagcagggggagatcccagcacggacaggtaacagtgtgatgtggcagaaaggctttggttgcaagtggagaacagatgtctctggctgcctctggcagctgcctccttctgggccttgacttttcaaagccaggccaggcctcccccaccctggaccacctgtagctggttcagaaggccccaggctgggcttcatagatgaagacacagctgactcaagtctctggctctgtcggctcttggccaccttgccgctcccataacggtgtttctcaggtcaacccctcttctccattcctacttcaatgacctcaggtcaggcccttgccacttctcttctggacaaagatgacagcccttcactggtatcctcgtctncaacctaatttatncttcacagtgctggcagaagtgacatcttttaaacacacaacgaccccn

SEQ ID NO: 459 - DNA, 343 bp, Homo sapiens
gcggccgaggtccgcacttttttttttttttttttatttttactccagaattttcctttaatatttaggactccaatctttacttacaaaatagcttttatttacgtgcacatgatcgtggtttcaaaattttctaagcactatgctaaatttgtcatcaaaacataacagattcccatcttacaaacatagttgctagttgaatgagtaaaagagatttcaaatttcaattcaaggaggcatgtctaaaagaccagaccattcatttgatgaaattgtaaatgccgatcatccaacttaacaggaactgcacatttgttcctttctagttagaaaaaaataa

SEQ ID NO: 460 - DNA, 324 bp, Homo sapiens
ccgcggtggcggcccgcccgggcaggtcttcgacccacgcgtccgtgattgcctattgtttgttgattgactgatttatgcctctaagaggaactatcttttgataatattaaataagatgtcctaatacaaaactgatagagttcagaaataataagaatctcctggccaggcgtggtggctcacgcctttaatcccagcactttggaaggctgaggtgggcggatcacgagatcaggagattgagaccatcctggctagcatggtgaaaccctgtctctactaaaaatacaaaaaaaattagcccgggtgtgatggcgacct

SEQ ID NO: 461 - DNA, 211 bp, Homo sapiens
cgcggtggcggcccgcccgggcaggtacagaaaggacaaatacatcagtagaaaagaagacaatataagggcagattgaaatatatacgtgaacgtcacaaagaccaattactgccatttcaattcaatgaggaaataatgatgtatttaataaatagtgctagaatgctgcattatctgtctaggatgaaaaaaaaaaaaaaaaaaaagt

SEQ ID NO: 462 - DNA, 370 bp, Homo sapiens
  misc_feature 71, 145, 209, 274, 316: n = A,T,C or G
ccgcggtggcggcccgaggtggaatgtctgttttcacaaaattttgtattttctcctaatagtatgaggtngaagaaatctacatcttctcaagtgagcttatgattaactcgatgagttttcttgctattctcaaatcggaatntccagacctggctagaaactaaagtctaagcccattcattaaagtcttgaatttatttactttngccaagaacagctatataaaattagattcctcctggtataaaattgggtgttttcttagatattngctatcaaaagtcatttttcttggaaatcggacgcgtgggtngaagcttgtacacctgcccgggcgggcggccgcacttttttttttttttttttt

SEQ ID NO: 463 - DNA, 325 bp, Homo sapiens
cactacttagggcgaattggagctccccgcggtggcggccgcccgggcaggtactgaaagcatacaactgagggttcacggatttctaagaaatgcatttcccttgtctatgttcatcagcctttaatactttggctacaaggcatatcagagaaagggaggttaaattgggtaatgacaaaagaacatatgtaactctggaaataggaaaaatgttccagaaatgggatcaatgtgccagcaataagcatagttcatttcatttgaaaattcagttaaagagcccaataaacagttccaaaccggacgcgtgggtcgaagacct

SEQ ID NO: 464 - DNA, 180 bp, Homo sapiens
  misc_feature 6: n = A,T,C or G
actatngggcgaattggagctccccgcggtggcggccgaggtgtcgactcaagctttcagatatagggcattccagaatcttctctttacgagttcacctgctagtataatctccacaacttgaatggcattggttgttctgtaattcctgccaaaagcatcacaagttgtacctgcccg

SEQ ID NO: 465 - DNA, 372 bp, Homo sapiens
ccgcggtggcggccgaggtaatagctaatgcatgcagggcttaataccgaggtgatgggatacttcatgctaactgggtgttccttagtgtaataattgactgcctgctcccatgtggcctcacagagtcatagcttcttgccccaaatgtttttctggttttctgtggagccatacagaaccataaagagaagttgttgagaaaccggtttgactttcaagtctgatgaggagcctggtttccatgagattttcagctaagttagcatatttttaaaaatttcaaaatgaacagaggaaaggttgacgatctttagagccttctgccaggctgaagtgttctgcatcttccctagacccggtacctgcccg

SEQ ID NO: 466 - DNA, 184 bp, Homo sapiens
  misc_feature 21: n = A,T,C or G
ccgcggtggcggccgcccggncaggttacaagcttcgacccacgcgtccgggaaattttaattaaaaataggtgaacattttaaatgacctaatacatatttagtccacattgaaactttggcattttgtcattgccattaaaattttgatggcattaaaatttgatgccattaaaattttgat

SEQ ID NO: 467 - DNA, 343 bp, Homo sapiens
ccgcggtggcggccgcccgggcaggtcaagcttcgacccacgcgtccgtgataacttctcctaagtgccaggcattgtattacatgctgggagcacaaagatgaataataacaataggttcacagaaaagatgaattgattgagagaaaaagaaccctccaggagccctcagcgtagtagggggttggtgttggagggttggaggaatggaaaaggccctgaaatgcaggcagagaaatgatgaaacaattcaggggctgtggtgaggttaaatgaatatctttacagcagcctcgaagactgatcaggttactataccctctcttctgtccacgtgcatttc

SEQ ID NO: 468 - DNA, 331 bp, Homo sapiens
actacttagggcgaattggagctccccgcggtggcggccgaggtcacaacattcccccttccccaaacagtaatatggacactgatttaacaagacttataaaaaaataaggcacatttattttgatatggtaattttaaaatagaaaccccttctcagaacacctgtattcaaatgagctgtgtaaaaagacaccttgtggtacctaaaataggtttatggtacctatggaattgcttctattttagtgaagatggaataaattgcacccatcccacattgtcaagtaatgaaaatatgcggacgcgtgggtcgaagcttgacctgcccg

SEQ ID NO: 469 - DNA, 224 bp, Homo sapiens
gacctctttaagtgaaacttagtatgctaatagtatgatacgcccttttgctgtagcagttaccatagttacagataagtatatattgttgtgatgatctgatttcctggttcccccacccctgcaaaacaacaacaaaaacctttaccaggctctataacagggggaccaaacttgtttttgctcatcattgccggacggtgggtcgaagcttgacctgcccg

SEQ ID NO: 470 - DNA, 190 bp, Homo sapiens
  misc_feature 29: n = A,T,C or G
gctccccgcggtggcggccgcccgggcanggttacaagcttcgacccacgcgtccgggaaattttaattaaaaataggtgaacattttaaatgacctaatacatatttagtccacattgaaactttggcattttgtcattgccattaaaattttgatggcattaaaatttgatgccattaaaattttgat

SEQ ID NO: 471 - DNA, 299 bp, Homo sapiens
  misc_feature 215, 227: n = A,T,C or G
gcgaattggagctccccgcggtggcggccgcccgggcaggtcaagcttcgacccacgcgtccgtgataacttctcctaagtgccaggcattgtattacatgctgggagcacaaagatgaataataacaataggttcacagaaaagatgaattgattgagagaaaaagaaccctccaggagccctcagcgtagtagggggttggtgttggagggtnggaggaatgganaaaggccctgaaatgcaggcagagaaatgatgaaacaattcaggggctgtggtgaggttaaatgaatatctt

SEQ ID NO: 472 - DNA, 237 bp, Homo sapiens
  misc_feature 93, 128, 138, 139, 171, 176, 219, 235: n = A,T,C or G
attggagctccccgcggtggcggccgcccgggcaggtacaagcttcgacccacgcgtccggagcgttgcttggatttctaattacttctaagngtagttttatttaatttcagtcctttagaaaaaanaaaataaaannaaatgtgcgggcccggcctgcccgggcaggtnccacncgttcgaaaaaagaaagaaaaaaaaaaactttctctttgccanttcttcttcttctttntt

SEQ ID NO: 473 - DNA, 379 bp, Homo sapiens
  misc_feature 24: n = A,T,C or G
ctacttagggcgaattggagctcnccgcggtggcggccgcactttttttttttttttttttccttttgagacacagtctcactcttgcccaggttggtctaaaactcctgggctcaagcaatcctcccgctttcagcctcccaaagtgctggggttacagccgtgtgccactgtgtctggcccttttctttttcataggagaagggttgttgactcccaggaaacgtcacctggaaccaagaatgtgaactcaaggacccccgcctgttggcagctgcatttacttgactcctgttcactgtttcttagccttgtcctttctctcctgccagttctaggggacactgcttctcctggttgacctcatcaatgcccaacc

SEQ ID NO: 474 - DNA, 399 bp, Homo sapiens
ccgcggtggcggccgcccgggcaggtacacaaaccagatgtatgcaatgatgccaaaagtcatctcaaaattccaagctgacctagtgcaacacatttacacttggataaactatcaccttgaagatttactttgtatacttcaaaagatctggtcatgaaatttttagctaatacataaagtgccgaattgaaatccagaatacaatagctatgaagggccgctagagtgcagataaccaacccattctacctaactcaggttgagattgctttagaacctatcattggctttaaaatggtccacaaaaaaacacctcatggtcacacttaaaatagtttgcatcccacactacaggcttctctggaggatttaatactttggaagtagcatcataag

SEQ ID NO: 475 - DNA, 277 bp, Homo sapiens
  misc_feature 3, 43: n = A,T,C or G
ctncttagggcgaattggagctccccgcggtggcggccgaccngtgcaaatatctacccagttagaagagtaaataccatcttagtgttattatcaaaatattctgaactcatgaacctcctcagactgttgctgggactcccagatatcaatactctgagaaccactgatctaatgtttctttagtcagtttctatttgttctctagtataaccaagcataaaagtaatatacttccgcctctctctcccccaactgactttagtcaatagtacct

SEQ ID NO: 476 - DNA, 180 bp, Homo sapiens
  misc_feature 113, 178: n = A,T,C or G
ttagggcgattggagctccccgcggtggcggccgaggtcaacgcttcgacccacgcgtccggtttgggtggaattataatattttagataagatttaagaggattgctagatnggaatgcgaatgatgataaggcttttagagttagataagagagagggcgctctagaactagtggntc

SEQ ID NO: 477 - DNA, 328 bp, Homo sapiens
ctatagggcgaattggagctccccgcggtggcggccgaggtcacaacattcccccttccccaaacagtaatatggacactgatttaacaagacttataaaaaaataaggcacatttattttgatatggtaattttaaaatagaaaccccttctcagaacacctgtattcaaatgagctgtgtaaaaagacaccttgtggtacctaaaataggtttatggtacctatggaattgcttctattttagtgaagatggaataaattgcacccatcccacattgtcaagtaatgaaaatatgcggacgcgtgggtcgaagcttgacctgcccg

SEQ ID NO: 478 - DNA, 305 bp, Homo sapiens
  misc_feature 305: n = A,T,C or G
tatagggcgaattggagctccccgcggtggcggccgcccgggcaggtacttatactagaagatgctccaaggtttcagaaaggaattaattactttcaatttgcacaatttagaacaaatatctggcttttccctaagcttaatgattttccatttcacacaactaaaatataatagcattattttataatcaagtttaactgatggtctatgatagtagagcgatttagtattttgacaaaaatcttatgagacatgaagtcattcaatttgccggacgcgtgggtcgactcaagctagacctn

SEQ ID NO: 479 - DNA, 289 bp, Homo sapiens
ttagggcaattggagctccccgcggtggcggccgaggtcttcgacccacgcgtccgctttcttttgttgttaagggcccatgacctgcagtttccctaacattcatttttatacagggcagaggtatgtgtgcgagctcagataccttaaattcatatgcctttaatacaatccaggcagatttctaaatgagggatgcttccccacaaatggagagtgaaagtgggccagcctaaaaggacctccatagcactgtgcatggccagctgtttgtggctgtacctgcccg

SEQ ID NO: 480 - DNA, 289 bp, Homo sapiens
actactatagggcgattggagctccccgcggtggcggccgaggtcttcgacccacgcgtccgctttcttttgttgttaagggcccatgacctgcagtttccctaacattcatttttatacagggcagaggtatgtgtgcgagctcagataccttaaattcatatgcctttaatacaatccaggcagatttctaaatgagggatgcttccccacaaatggagagtgaaagtgggccagcctaaaaggacctccatagcactgtgcatggccagctgtttgtggctgtacc

SEQ ID NO: 481 - DNA, 224 bp, Homo sapiens; identical to SEQ ID NO: 469

SEQ ID NO: 482 - DNA, 279 bp, Homo sapiens
  misc_feature 4: n = A,T,C or G
actnctatagggcgaattggagctccccgcggtggcggccgaggtactattgactaaagtcagttgggggagagagaggcggaagtatattacttttatgcttggttatactagagaacaaatagaaactgactaaagaaacattagatcagtggttctcagagtattgatatctgggagtcccagcaacagtctgaggaggttcatgagttcagaatattttgataataacactaagatggtatttactcttctaactgggtagatatttgcactggt

SEQ ID NO: 483 - DNA, 394 bp, Homo sapiens
  misc_feature 252, 347, 366, 373, 381: n = A,T,C or G
ctacttagggcgaattggagctccccgcggtggcggccgcccgggcaggtcaagcttcgacccacgcgtccgtgataacttctcctaagtgccaggcattgtattacatgctgggagcacaaagatgaataataacaataggttcacagaaaagatgaattgattgagagaaaaagaaccctccaggagccctcagcgtagtagggggttggtgttggagggtggaggaatggaaaaggccctgaaatgcangcagagaaatgatgaaacaattcaggggctgtggtgaggttaaatgaatatctttacagcagcctcgaagactgatcaggttactataccctctnttctgtccacgtgcatttnaaaaacnttggccgntctagaactagtg

SEQ ID NO: 484 - DNA, 280 bp, Homo sapiens
ccgcggtggcggccgaggtcttcgacccacgcgtccgatggtttttgcaaaaattgaaaatgcatcgatattacagttaattttttcagtgtgtatgtggtattaggcttagaactataacacaggaagtttttagagtatgtccactctggtttactcctttgtaagtattaatacctgataatttacatcctacagccctgcctttttttttttttcaagtttgtcccagcaagtcttggccctttgcattttcttaatacattttagtacctgcccg

SEQ ID NO: 485 - DNA, 290 bp, Homo sapiens; identical to SEQ ID NO: 392

SEQ ID NO: 486 - DNA, 331 bp, Homo sapiens
  misc_feature 23: n = A,T,C or G
actatagggcgaattggagctcnccgcggtggcggccgcccgggcaggtggaggcccaagtgctgagactcaggggacgcaggcctgaggacagttatgcagggtgcagcggcctacggtaacccatgtagcaacagaaacccttagctaactgccgtaatttaaggcaattaggagccattcatcatccagatggctattggctctaatcgttactggctgaaggaactatatatagcagctacctttccgctccattcccaggccttgttcctgtcttctggttgccagttctgcactcactcattccggacgcgtgggtcgaagacct

SEQ ID NO: 487 - DNA, 282 bp, Homo sapiens
  misc_feature 5, 15, 18, 75: n = A,T,C or G
ctatngggcgaattnttnctccccgcggtggcggccgaggtcaagcttcgacgcgtccgatcacttttttcattnataccttattagataaaacattagccccctagagtgttttgtgaaggaaatatgcctaataagagatgatagttttagcaataaatgagcattagaactattatttattaatgaaatgaactggtggtctgaaagtgatgataaacagacaactgtggaaaatgaattattaaaattccatggaattccttttgaagtttatgaagt

SEQ ID NO: 488 - DNA, 183 bp, Homo sapiens
  misc_feature 183: n = A,T,C or G
ccgggcaggtacaaatcaagtcattaacattttcaatgtcaaaaatacagcacgctgttaagagttctgtcagtgctcattatcccactagatcccacaaagggcaaactcaaaagatgaaacaaaggcaacgccatcaataaccaccatattccacaggctttctcccctaggacgtacctn

SEQ ID NO: 489 - DNA, 383 bp, Homo sapiens
  misc_feature 296, 307, 309, 327, 364: n = A,T,C or G
ccgcggtggcggccgcccgggcaggtggaaaggtgggtggggagagggaggcttatttgttgctgcagtgtaactaagtgaaacctaattcatatgactcaaactaaggtatatttggttagatctaggtgagttctactttagaggaaatcctggtaactgttgtttgtttgtaagttatagctgtaattaattttccctgtattcaaagcccccaaaccctgcattcagatactatgcatttagacttccttaggcaaagtcaaggcaacaagctgatgattctaaagctattnttcaagggagntntttacccatcataaaggnggtttttagtcattatagataatattcaatcaattantaccgggggatggcaaaaa

SEQ ID NO: 490 - DNA, 378 bp, Homo sapiens
  misc_feature 218: n = A,T,C or G
ccgcggtggcggccgaggtgtaatttggagaatatttaaagcaaaagagcaaacaacaaaaactaagttaacacttacccagtgcagtaagggaattgtaagatacagcctgcttaaggaggtctgcagacagatgcacctaagatttcagctgttttaggtcacttttctcaaaatatttattatctggcaatggggatgggagtggggaacacctntctgtgaggcaaatggtatctcaacaaataccgacttttcaaggaagaaagctctccacttctctcataaacttatatactaccttaaacagtatgcagtattcgcggacgcgtgggtcgaagcttgacctgcccgggcggcccgctctagaactaggtg

SEQ ID NO: 491 - DNA, 372 bp, Homo sapiens
  misc_feature 349: n = A,T,C or G
ccgggcaggtacagcctcacatacacagatgcaggtgaagtcaccaaagctgatctctcattcgttctggggacagttagcagcgtagtggtcccactgcagcaaaagtttgaaattcattttcttcaggaaaatacccagccagtccctctcagtggaaaccctggttatgtcgtggggctcccattagctgctggattccagcctcataagggtggagctctcccgtgtcagctcgtagcacagaaggtgaagagcctgctgtggggccagtgcttcccagattacgtggccccttttggaaattcccaggcccagggacatgctggactgggtgcccatccacttnatcacccagtcattcaacaggga

SEQ ID NO: 492 - DNA, 253 bp, Homo sapiens
  misc_feature 38, 121, 130, 212: n = A,T,C or G
ccgcggtggcggccgaggtactattgactaaagtcagntgggggagagagaggcggaagtatattacttttatgcttggttatactagagaacaaatagaaactgactaaagaaacattanatcagtggntctcagagtattgatatctgggagtcccagcaacagtctgaggaggttcatgagttcagaatattttgataataacactaanatggtatttactcttctaactgggtagatatttgcactggt

SEQ ID NO: 493 - DNA, 210 bp, Homo sapiens
actacttagggcgaattggagctccccgcggtggcggccgttaaaggaataatctgcagaacatcttgatttacaagggacaaaatgatgcaaattatatgctgtccaacctactggtgaactggatcagaatggtccaaggactgttaaacagaggaagtatttacattttgaaaacttgcggacgcgtgggtcgaagcttgtacacct

SEQ ID NO: 494 - DNA, 185 bp, Homo sapiens
ccgcggtggcggccgttaaaggaataatctgcagaacatcttgatttacaagggacaaaatgatgcaaattatatgctgtccaacctactggtgaactggatcagaatggtccaaggactgttaaacagaggaagtatttacattttgaaaacttgcggacgcgtgggtcgaagcttgtacacct

SEQ ID NO: 495 - DNA, 428 bp, Homo sapiens
  misc_feature 3, 234: n = A,T,C or G
ctnctatagggcgaattggagctccccgcggtggcggccgcccgggcaggtaccctaaaacttaaagtataataaaaaaaagattatttcctatacttcaaaatcaacaagatttgattgcatttaaatttttctgtccatttgttcttctatgtaatactttaaaaataattggcataaaaattcaatcaattcataaaagtccaaagcaaaaaaaacaaatctactgacatntcttgaggaagaaatgatcaggattgacattaatgaaccctctcacagagaccactacacacacacacaaaaagaaggatgggtgaatggatgcagagagaatttaataagactgaaatgatgccatacatgcttttaaaaaataaaaagtattaaattttaaattttacttcaatataagagaaaaaaaaaaa

SEQ ID NO: 496 - DNA, 430 bp, Homo sapiens
  misc_feature 6, 406: n = A,T,C or G
cgactnctatagggcgaattggagctccccgcggtggcggccgcccgggcaggtcttcgacccacgcgtccgtagtaatagggaattaactgaccccttttggatgggggagagcatcaggctggggtcaggtaagtgtaaatggccttctgagcatgctcttctaggctgactcccagccctgacttgaaaccattagcgctaacttgctctgttttgagaaaaactttccaaacttttgcatgagaaactagaaaaaggaatgtatgccacgtaactggattacagaaatgagttaattgtctctgtgataaaaaaaaaatgaaatattttcttattgaattaatatttttgtcttgaagcattttctagtgatagaatgtatttgtcttttttcctggggggnacctcggccgctctagaactagtg

SEQ ID NO: 497 - DNA, 302 bp, Homo sapiens
  misc_feature 233, 302: n = A,T,C or G
ctacttagggcgattggagctccccgcggtggcggccgcccgggcaggtacccccaggtcagcactttgaacacttgaacatctatgaaatcacatagtaaagtgataggagatggggctaagcttttaatggcctttagacatagcattagacataacctaagctgaaaggctttgggaagttgttgtgttaaatccccaacacactctcgtgttttcttaggacttgcctnttatttaaaaaaaaaaaaaaaaagttgcggcccgctctagaactagttggatcccccgggcttgcaggn

SEQ ID NO: 498 - DNA, 236 bp, Homo sapiens
ccgcggtggcggccgaggtacccttttataagggtgtatccccttttggtaacttactgtttgttaatttgtagtgttccctgccagtaagcttgtaacactctagtgactcaccttcgggtgggagggtaggaaagggagaggcctgcctcctaaacctgggaagatggggagagagtggtaaacctgagagcccaaaaaacaaaccaaaacaaaaaaaaaaaaaaaaaaaaagt

SEQ ID NO: 499 - DNA, 275 bp, Homo sapiens
aggtacccaaaagatatcactgtgaaggtttggatacactgactgaggaaaaaagaaggtcctgaaagcgtctagacaaaaaaagactacttgtaagttgcaagaatcagaatggcattggacttctcagctttcctcattagaagtttaagatctgaagcaatctttaaactcgtgaggaaaattaagtctaataaataattttcttcttagccaaacaatcaaatgtgaagctagaataagcattttcaggtaaaaaaaaaaaaaaaaaaagt

SEQ ID NO: 500 - DNA, 253 bp, Homo sapiens; identical to SEQ ID NO: 408

SEQ ID NO: 501 - DNA, 371 bp, Homo sapiens
  misc_feature 313: n = A,T,C or G
ccgcggtggcggccgcccgggcaggtcaggagtgtcccaaagatttcccaagtccagcccagagaagctgaaagcctttcccccaggtgtggggctgagttagatgtgggtcataaaggatgtggcctcgaggctgggaggcagctgggcaaagtgggaagcctccctactcctgagacagtgatggctcaaatccaggccaacctggaacatgatcctcaacttctctaagttcacctttcccaggtgtgaaatgggttgttctgggaattgagtgagctaatgatacactccctggcacacagcgagcctnaaaacgcttgtgtcccctccctacctcacagcccattttagaagtttgctgtcactta

SEQ ID NO: 502 - DNA, 395 bp, Homo sapiens
  misc_feature 5, 257, 266: n = A,T,C or G
gactnctatagggcgaattggagctccccgcggtggcggccgcccgggcaggttttcttatgagtgggaggtgactgatcgtggaggtggatttcttatgagtgggaggtgactgatcgtggaggtggatttcttatgagtgggaggtgactgatcgtggaggtggatttcttatgattggcttatcaccatccctccttggtgctgtttttgcaacagtgagtgatttcttgtgagatccggttgtttaaatccanaggcacctncccctaccctctagctcccattcctgccatgtaagacacctgctccccctttttcttaccccatgattggaagcttttttgaggcctccccagaagctgatgccagccctatgcttcctgcacagcctg

SEQ ID NO: 503 - DNA, 379 bp, Homo sapiens
  misc_feature 24: n = A,T,C or G
ctactatagggcgattggagctcnccgcggtggcggccgaggtttttgaaatgcacgtggacacgaagagagggtatagtaacctgatcagtcttcgaggctgctgtaaagatattcatttaacctcaccacagcccctgaattgtttcatcatttctctgcctgcatttcagggccttttccattcctccaccctccaacaccaaccccctactacgctgagggctcctggagggttctttttctctcaatcaattcatcttttctgtgaacctattgttattattcatctttgtgctcccagcatgtaatacaatgcctggcacttaggagaagttatcacggacgcgtgggtcgaagcttgacctgcccgggcggc

SEQ ID NO: 504 - DNA, 494 bp, Homo sapiens
  misc_feature 322, 368, 385, 400, 409, 427, 455, 460, 485: n = A,T,C or G
cttagggcgattggagctccccgcggtggcggccgaggtacaagcttcgacccacgcgtccgaaattcttggttaaggattattataaaatagaatggtatttcagtaaatccctgaggcttaggagtccaggtacaatgttggttctcaattaaaatataaatcatgtctagggacacttaggaacacagaacatatatttagagctagaaaatatacagcttcagaccaggcaaagtgctgggattacaggcgtgagccaccacgctcgtcctcacatggggttttattattaggatggtaagagtattataagggattnggtacaaggcataatgagtccttttgctttttaggcttttgacttntggttttaagacttttntttagctttttgttngttagacanccatttgggcaaggcttnggttttttaataaagtttgcttgggatnaaacntgaccttaatggaaattgtcccctncccccaaaa

SEQ ID NO: 505 - DNA, 301 bp, Homo sapiens
ccgcggtggcggccgcccgggcaggtactactgatacaaatagcatggatgaaactcaaaatcattattctaagagccagatactatagcctgtattttatgattcactttcaatgaaattctacaatagacagaactatctatcaacagaaagcagatcagtggttttctgcagccagaggtatgaaaggtttgaaacatgtggcaccagtaggacatatggaaacttttttggtgtgatggaagtatttttttatcttgattgtgtggtgtttgttatacagtggtatacatttgacct

SEQ ID NO: 506 - DNA, 312 bp, Homo sapiens
  misc_feature 28, 32, 48, 50, 77, 79, 91, 108, 119, 142, 179, 182: n = A,T,C or G
ggggcggccgcccgttcaggtacacgtntttnccaaccaattttatangnatatatatattctacttccaacacccntnttcatcctggtncaatcaaagcctggttntggccaacaanaaactcgtcaggagatcgaaggntgtagatgtctgcacgtggcttccttggaggtccagnggngactccctcttccaaaatccattctgtacccgctggctgctctaacgggcaggacaacagcgtatgaagcctgactgcaactaggagaagtaccacactcccggacgcgtgggtcgaagcttgtacacct

SEQ ID NO: 507 - DNA, 288 bp, Homo sapiens
  misc_feature 9, 34, 47, 52, 83, 96, 116, 121, 122, 123, 124, 133, 152,231, 252: n = A,T,C or G
ggccgaggncaagcttttacccacgcgtttgaanccatctgtttggnacccngaaagggggcaggaaaggctggggtcccagnccaccctaagggnatctgagtggcccagggctncaagnnnncccacctgnccaatgggaccctttctgncctcaccctacaaggggcacaaagggaagacaccaaacctggcaggaacttttcacgcaatcaagggaaggaaaggcantcctggcagagggaacagcangccaagcgggagaaggctcaaagtaaggagggtaag

SEQ ID NO: 508 - DNA, 284 bp, Homo sapiens
ccgcggtggcggccgaggtcaagcttcgacccacgcgtccgcttttcaattttattgtatagtttttgataatgttaatgtctgagatctttatgggtgagtctgctgtcatttctgctatttctcgtagtgatttgcttgtatggtttatgattttttaaaaactgaatgtgtattagaattgtgtctggtaattctttagggacccattgtagatgtatttcttcaaagagcatttgtggttattatatttgggtgcttggggcactgccagtacctgcccg

SEQ ID NO: 509 - DNA, 271 bp, Homo sapiens
ccgcggtggcggccgaggtattgaaccaggtcaaaacattgttgaatatcaaacccaatctatttaatctgtaagaaacaaggaccctgagaaagattctgaccaagggtatgtgatcggaaacttgacagataaatgtagtatacttgtaaagccatactgtgaaaaacttggggattatttgaacacaaattatcacctggaaaaagacagaaaacaaggcagaagactgtgcaaagaggttggaatattcaaaacttcagattagaag

SEQ ID NO: 510 - DNA, 290 bp, Homo sapiens
  misc_feature 26, 27: n = A,T,C or G
ccgcggtggcggccgaggtacccaanngatatcactgtgaaggtttggatacactgactgaggaaaaaagaaggtcctgaaagcgtctagacaaaaaaagactacttgtaagttgcaagaatcagaatggcattggacttctcagctttcctcattagaagtttaagatctgaagcaatctttaaactcgtgaggaaaattaagtctaataaataattttcttcttagccaaacaatcaaatgtgaagctagaataagcattttcaggtaaaaaaaaaaaaaaaaaaagt

SEQ ID NO: 511 - DNA, 348 bp, Homo sapiens
  misc_feature 201, 274, 290, 327, 334: n = A,T,C or G
ccgcggtggcggccgcgaccacgcttggccgcccgggcaggtcaagcttcgacccacgcgtccgaaattaatgaaatgttttacattcttttaaaaacctttgaaatatggtgtgtattttatgctttagcaaatctcagtttggaccatttcaggtggtcagcaattacacatggctagaactaagagcaatcagttttnttccacagtttttctaaaattttcttgtcaaaaatcttgatggtatgaattactcttttaaaaagtgcacttnaccagcaacagaaaanaaccctggaggggtatgggttttaaagctggtacctnggcccgntctagaactaggtg

SEQ ID NO: 512 - DNA, 280 bp, Homo sapiens
  misc_feature 280: n = A,T,C or G
cttagggcgaattggagctccccgcggtggcggccgaggtctcccaaagtgctggaatcacaggaatgagccaccacacccagccaaattgggcacaaatttaaaatttgacttttattaatgatatggtaaagagatctagcttggtcatgacacccttgtgttatacggtgacaggcaaatcatttaaaaatatctaaactataatttcctgtagttcacatgaattggatattctgaagcggacgcgtgggtcgacttgtaacctgcccgggcggcn

SEQ ID NO: 513 - DNA, 211 bp, Homo sapiens
ccgcggtggcggccgcccgggcaggtacagaaaggacaaatacatcagtagaaaagaagacaatataagggcagattgaaatatatacgtgaacgtcacaaagaccaattactgccatttcaattcaatgaggaaataatgatgtatttaataaatagtgctagaatgctgcattatctgtctaggatgaaaaaaaaaaaaaaaaaaaagt

SEQ ID NO: 514 - DNA, 292 bp, Homo sapiens
  misc_feature 234: n = A,T,C or G
cactacttagggcgattggagctccccgcggtggcggccgaggtctcactatagggatctagatcacgagcggccggccgcactttttttttttttttttttatttctgccacctctttcacttgggaatctattttcactgctctccaaagttttgagaaggcaatagtcctggaaaatgggtcctgagctcctctcagcagtcctgctttctttccacctgcactgtaaggngaccctaactgggtctaagacaaaaagtcggacgcgtgggtcgaagcttgtacacctt

SEQ ID NO: 515 - DNA, 393 bp, Homo sapiens
cactacttagggcgattggagctccccgcggtggcggccgaggtgttagttaccacttcattactggagggcactgtcacaaacttctgactatccagacttgaagctggaagcaaatacaagtctgaggggctctaagctgggaggttctggcctctccctagctctctatggctctacctctctgcttgaagctccctgcactgcactcccattactctgactggggataggaccactgctgacagggccccacctcaacttctttcattgccctcttccaggaaatcccaccctgggatacttcaaagacctcatatgctacaaagatcaaggccacctaatgagtgctctagagatcagcaccaaagatgcttgccagagtcttctcta

SEQ ID NO: 516 - DNA, 431 bp, Homo sapiens
  misc_feature 192, 249, 280: n = A,T,C or G
acactacttagggcgattggagctccccgcggtggcggccgaggtcaagcttcgacccacgcgtccggggaacccttgttcaggttctttttaggcaacccaagccaagacaacaaagtaagatagagccccaaatgtggtcgtataaggtttttcaaagaaagtaacacttgagttaggtcttaaagtttnacctaagaaactgcccaggtggacaagaagaaagggtgttccaagtagaaataatancatggacaaaggcaatgtagcaggaaaagtnttcgtaaattcagggaatttcaagtgtttcacgatggaaggagcaatagagtcatttacttgcggtggcaggggatgttggaaatgtaaacaagagtgagatacagaagattttatgtggcatgccaactgggacttttttttgtaaacaa

SEQ ID NO: 517 - DNA, 416 bp, Homo sapiens
  misc_feature 130, 134, 142, 152, 212, 221, 223, 234, 247, 253, 267, 291,302, 306, 312, 327, 330, 336, 337, 362, 369, 375, 393, 402,403, 405, 406: n = A,T,C or G
tcgcggtggcggccgaggtcaagcttcgacccacgcgtccggagaaataccatttgcacagtcaatcacttctgaccaagcttatcagaaaaaggagaaaagaatgtctccccactaaatgttctagggngggngaggaaanctagggtggntatctaaatcaacaaatattctagatattccaatatctaaattattgttggaaatactcntcctgaagngntcatttgaacnctaaagcaggagnacagcntttgttgtatcaanatgggcaggggtttttaaagggtntccattttttnttantttccncattattaaattccnttntaaatnntttttaggaccaaaaatttttcccntttcttngaggtntttaaagggggatttaanaaaatgggnnanntggggggttt

SEQ ID NO: 518 - DNA, 254 bp, Homo sapiens
cttagggcgattggagctccccgcggtggcggccgaggtacatggtagagaaagattcaaaatgctgctgttctacctgagatgggaaaaatgaaagcaaaataacatcaacaaaaacaaacaaacagccttgtagttccatgtcactagccagggatttaagaccagcctagagaacatggtgagaccccttctctacaaaaataaaaataaaaatacaaaataagctggacatggtggtgtgtacctgcccg

SEQ ID NO: 519 - DNA, 403 bp, Homo sapiens
  misc_feature 212, 253: n = A,T,C or G
attggagctccccgcggtggcggccgaggtacaatgcttcgacccacgcgtccgctcacttcatcctcccagcaacctattatgatccattgccacaccaacttgctgatgaggaaagtggggcttaaggaaattaaagagctgttgtgggacttccaaagcagaagacagtaggctttcagaaatttgataaaaatagcactttgcatttnttgaatcttgagctaaatggaaattaatactaaacattctncactggtaaaatagagaataaggatattaacagtaaaagaaaagaagaagaaaaggaaatgtgcttccacagatttagaaacataagtaacaatctaaggttaaggcttttggcacctgcccgggcggcccgctctagaactagtgggat

SEQ ID NO: 520 - DNA, 311 bp, Homo sapiens
cactacttagggcgaattggagctccccgcggtggcggccgcccgggcaggtcttcgacccacgcgtccgagctatggacctaaggcagcgagtggattcattagtcctctttcagctgaatgcatgctacagtataagaaaaaagctgctgcctatatgaagtctttgagaaaggtttgttagctgctgttaatatttaaatcagaggaaacatcaggagtcattctagagaatggcaagagtttttctgcagtttatattgttgactttttatacgatattggggtacctcggccgctctagaactagt

SEQ ID NO: 521 - DNA, 285 bp, Homo sapiens
ctacttagggcgaattggagctccccgcggtggcggccgaggttcgacccacgcgtccgctaggaactatgttaaaaaaaattcaagaaagaatttaagggagattacagtgttactgtgacaccaggaaaacttagaactttgtgtgaaataagactggccagcattagaggtgggttggccatcagaaggaagcctggacaggtcccttgtttcaaaggtatgacacaaggtaacccgtaagccaaggcacccagaccagtttccatacatagaacctgcccg

SEQ ID NO: 522 - DNA, 419 bp, Homo sapiens
  misc_feature 378: n = A,T,C or G
cgactactatagggcgattggagctccccgcggtggcggccgcactttttttttttttttttttaagtaaagaaggttttataatatagtgaaaacaatacggagatgaaaaccaggagacctgggtcccgcctttgttacaaatgcctttcctaaaagctccagaatggtgcgaggtcaaaacagatgggcagaaaggaagtggtcatcagagcaagagaaagagcaggtgccaggcactcacgtgtgcggtcatatcaggtagagatgatgagtagagatctgccctagaagacactgaattctgagattcaaaggggaaaagttgattttatagccagtgattttatagcccactttcctgccccacccctactntaagaattgcggacgcgtgggtcgaagcttgtacctgcccg

SEQ ID NO: 523 - DNA, 333 bp, Homo sapiens
  misc_feature 3, 121, 141, 208, 251, 303: n = A,T,C or G
ctnctatagggcgaattggagctccccgcggtggcggccgcccgggcaggtcccagaataactaaataaataaaaggctaaagaaaactggaacagtactgcgtctccatctgagacgcantcttctacttccagcatcgnagagaagggctagggacaattttttttcaaaagatttatatacaggcttgaatccagaaattaaggntaaaagcataaatattgataatttcaactaaattcagaatggnttcagaaagatatgatacaacaatttagaataaaacaaagcagaagagcatnatattttgcggacgcgtgggtcgaagacct

SEQ ID NO: 524 - DNA, 305 bp, Homo sapiens
ccgcggtggcggccgaggtgtacaagcttcgacccacgcgtccgcttaaaagattttttttttatgtaaactgttgaatatttgaaatagtccacttcaccttaatgggtcttgtctatcttcattagtcttcaaagaaaaaccatttgctaccaaagtaaatcagtattttgaatgtgcttctcttgttttttgtttattagctagttcctgtaagcatttccaccagaacttgaggcaaatcgtaaggaagctgtttcttttaaaacacaaaccaccaccaaaaatttaaatgtacctgcccg

SEQ ID NO: 525 - DNA, 426 bp, Homo sapiens
ctacttagggcgaattggagctccccgcggtggcggccgaggtttcaagacccgcctggccaacatggtgaaaccccatctctactaaaaatataaaaatcagccgggcatggtggcatgtgcctgtaatcccagctactcaggagtctgagggaggagaatcacttgaacctggaggcagaggttgcagtgagtcgaggttgcgctactgcactccagcctggacaacagagggagactctgtctcaaaaaaaaaaacctacagctgttcaaggaccagctgacaggtcaagtgtggccttttctggtctttgaacacatcatagaaagtgacaaatgctgcaaagccatgaagaacatgaactataaacgggtagactaactgcccagcttagacacttatctatgccacaaaacagctgaatt

SEQ ID NO: 526 - DNA, 324 bp, Homo sapiens
ccgcggtggcggccgaggtaccaaaacccggcttttttcgaaatacctgcaaaaaaaagtggatgattccaaatccaactgaagtgtctgctctctctccaattcagaacaaccagaagggcctgtcttgaattaggtaatgcattaaagaaaagtaggattattatattccaattctttccatcagatgtaaaacattattggtagatcacatctgttttaataaatctgtaagaaagacgtgtaattataattatgttaccattgtatgtaaatggcattttaacaagacatattaatacatttttatagagtacctgcccg

SEQ ID NO: 527 - DNA, 420 bp, Homo sapiens
  misc_feature 372: n = A,T,C or G
cactacttagggcgaattggagctccccgcggtggcggccgaggtcttcgacccacgcgtccggttaatttgggagaaggaagagagagtgacatatttggctaccttcagggaacaaaatctaacagcacagatggtagtagaggagataccaatttacatattaaggagctagagttgatgatggtatgactcagccctctgagattaaattctacttactagggctatgaatggagataagtaggtatcccaccttttattagaaggttccttaaaataaatatgggactctggtcagagagtagggccattaatttgctcctggtttttacctggcatccacccaccagtacctgcccggggggcggncggcccgccccgggcaggtcccgcactttttttttttttttttccttt

SEQ ID NO: 528 - DNA, 407 bp, Homo sapiens
ccgcggtggcggccgcccgggcaggtattgccctttgatgtccccatgagggccaggcccaggcagaacccatcccattttatccttaaactcagaaggaaatttgtctaaatattaaaggattaatatggggaataaaaaatgaaccttaaaccctgccactgatacacaagctgtctctcttagagttcaatgaacacttcaggagagtatttccaacaatatttagatattggaatatctaaatattgttgatttagataaccaccctagatttctcaccaccctagaacatttagtggggagacattcttttctcctttttctgataacttggtcagaagtgattgactgtgcaaatggtatttctcagctaaaatctcccttatgaacccttctcgaaatcc

SEQ ID NO: 529 - DNA, 446 bp, Homo sapiens
acttagggcgattggagctccccgcggtggcggccgaggtactcccatttccctgaaacaagcagccagcaactatctcagaaatgtgtcatttttactggttataattcttaaaaagcttgttttcctaagatatgaaatgcctgccagtatacaaactgttgtaactacttccctttttgcttttagcggggaaaaaatagcttaatgacagcatagaatcatgtagtaaatataattcattttttgaaaggttcagctatatcctcttccatttgtttattttaaatgatctaattgcaaacatgtcatcactcccttgatgtttacctccttgttatgcatttttagcaggctttattgtcacctgagattttttttttctttgacaggccggagtctagatgaaggaaaatgtgttagaagcaccttatccacagatgggg

SEQ ID NO: 530 - DNA, 453 bp, Homo sapiens
atagggcgaattggagctccccgcggtggcggccgaggtacgtagcagagcagctccctcgctgcgatctattgaaaagcttgagtcgacccacgcgtccgctgcataaaagttatgcaaaaagcattttatgatataccagcaaaaaacatggaaaatgaaattttgaaaagcaatgccacttcaaagatccctcaagtgcctagagggagaaaatgagttaatatgctttgaagaactgtatccagaaaataaaattacaaaggaggagagggataggattccaggacaatctcaaaactattgctttttcctaaattcattgcaaccttaaaatcctagcaagttctttaatgtaaattaacaagctaattctagaattcatatgcatattcaaaagtcgaataattgtcaaggctatcctgtagaatgggacagagaggattgaaattt

SEQ ID NO: 531 - DNA, 310 bp, Homo sapiens
ctacttagggcgattggagctccccgcggtggcggccgaggtactttaatcccgtcttacagaagagaaaactgagatttagcaacataaaagtatttcccgtaagtaaacagtagagccaagatcttgacctacgccatctgataccctgagcccatgctataaaagaggagcattagaaatatttgaaagatagaaatgagaactagtcaatatttattttgcttagcactgtattcagtattatggcatcttaaagtagttaagactcaatatttcatcaaaaaagtttaaaatctaatcagagaat

SEQ ID NO: 532 - DNA, 322 bp, Homo sapiens
cgctacttagggcgattggagctccccgcggtggcggccgaggtacaaataagcccaccccactaggaactatgttaaaaaaaaattcaagaaagaatttaagggagattacagtgttactgtgacaccaggaaaacttagaactttgtgtgaaatagactggccagcattagaggtgggttggccatcagaaggaagcctggacaggtcccttgtttcaaaggtatgacacaaggtaacccgtaagccaaggcacccagaccagtttccatacatagaaagttacagctgcttttatacccccttgccccgccaacgtagt

SEQ ID NO: 533 - DNA, 342 bp, Homo sapiens
ctacttagggcgaattggagctccccgcggtggcggccgcccgggcaggtcgcacttttttttttttttgtagagacaggatctccttatgttgcccaggctagacttgaactcctgggctcaagggatcctcctgccttggcctccaaaagtgctgggattataggtgtaaaccagtgtgcctagcctacagttttttaattttataaaatgttatttctaatttttctccaaaagtaaaagtggcattccaatggcaatattaattcaggtatccagaactcttaacctaaatttgggtgagatgaggaaaagtgtattgttaattttatgtgtcaactt

SEQ ID NO: 534 - DNA, 408 bp, Homo sapiens
  misc_feature 25: n = A,T,C or G
ctactatagggcgaattggagctcnccgcggtggcggccgcccgggcaggtcttcgacccacgcgtccgtagtaataggaattaactgaccccttttggatgggggagagcatcaggctggggtcaggtaagtgtaaatggccttctgagcatgctcttctaggctgactcccagccctgacttgaaaccattagcgctaacttgctctgttttgagaaaaactttccaaacttttgcatgagaaactagaaaaaggaatgtatgccacgtaactggattacagaaatgagttaattgtctctgtgataaaaaaaaaaaaatgaaatattttcttattgaattaatatttttgtcttgaagcattttctagtgatagaatgtatttgtcttttttcctggtggtacct

SEQ ID NO: 535 - DNA, 140 bp, Homo sapiens
ccgcggtggcggccgcccgggcaggtgtccccatgagggccacggcccaggcagaacccatcccattttatccttaaactcagaaggaaatttgtctaaatattaaaggattaatatgggaataaaaaatgaaccttaaa

SEQ ID NO: 536 - DNA, 453 bp, Homo sapiens
  misc_feature 4, 208, 223, 236, 239, 242, 247, 253, 258, 271, 285, 289,290, 292, 293, 318, 322, 325, 330, 335, 336, 341, 343, 358,361, 367, 387, 392, 393, 394, 401, 408, 416, 419, 426, 429,431, 433, 435: n = A,T,C or G
gaantggagctccccgcggtggcggccgaggtccagtagatttggagagtaatacaaatcctttctttctggttagaacacactgccaaaagccacctctttcatctaaggaaaagattaaaaatgcatgttgatatctcctaactatcacacaacttccactattacaatgaaaaatctggtcccctttcattgcctttgaaaaccnttttgccgaggtggntttcaaaaaaacncgnganttttnaaaaanttggntttggttttaccnggggaaaggggacntttnncnnttttttttttttttttttttttttnaaanggngattnggttnnggttntncctggggccaaaatnccnttttgnggaaccttttttggggtccnaaaannnacaaaanaaagggnttgggacnatntttttgnatncncncnaaaaaaattttttttttt

SEQ ID NO: 537 - DNA, 282 bp, Homo sapiens
  misc_feature 22: n = A,T,C or G
acttagggcgaattggagctcnccgcggtggcggccgaggttcgacccacgcgtccgctaggaactatgttaaaaaaaattcaagaaagaatttaagggagattacagtgttactgtgacaccaggaaaacttagaactttgtgtgaaatagactggccagcattagaggtgggttggccatcagaaggaagcctggacaggtcccttgtttcaaaggtatgacacaaggtaacccgtaagccaaggcacccagaccagtttccatacatagaacctgcccg

SEQ ID NO: 538 - DNA, 249 bp, Homo sapiens
  misc_feature 222: n = A,T,C or G
cactacttagggcgattggagctccccgcggtggcggccgcccgggcaggtcaagcttcgacccacgcgtccgtgataacttctcctaagtgccaggcattgtattacatgctgggagcacaaagatgaataataacaataggttcacagaaaagatgaattgattgagagaaaaagaaccctccaggagccctcagcgtagtagggggttggtgttggagnggtgggagggaatggaaaaggccctga

SEQ ID NO: 539 - DNA, 196 bp, Homo sapiens
aattggagctccccgcggtggcggccgaggtgacaagcttcgacccacgcgtccgcaagttttcaaaatgtaaatacttcctctgtttaacagtccttggaccattctgatccagttcaccagtaggttggacagcatataatttgcatcattttgtcccttgtaaatcaagatgttctgcagattattcctttaa

SEQ ID NO: 540 - DNA, 322 bp, Homo sapiens
tacttagggcgattggagctccccgcggtggcggccgaggtactcccatttccctgaaacaagcagccagcaactatctcagaaatgtgtcatttttactggttataattcttaaaaagcttgttttcctaagatatgaaatgcctgccagtatacaaactgttgtaactacttccctttttgcttttagcggggaaaaaatagcttaatgacagcatagaatcatgtagtaaatataattcattttttgaaaggttcagctatatcctcttccatttgtttattttaaatgatctaattgcaaacatgtcatcactccctt

SEQ ID NO: 541 - DNA, 336 bp, Homo sapiens
  misc_feature 4: n = A,T,C or G
actnctatagggcgaattggagctccccgcggtggcggccgcccgggcaggtacattggattgttaaaagaggagtctagaaaaattaatcctgaaccctaaagaataaatcttaagtggtggatacatgggttgaatagtgtgctccaaaattcacatccacttgaaacttcagagagtggccatatttgtaaataaggtatttgcgggtgtaatcagttaaggatctcaagataaattcatcctgaattataagttgtccttaaatccaattactggtatccttacaagaaggtgagaggagacagaatagagccatctgaaaagggtcagaaa

SEQ ID NO: 542 - DNA, 237 bp, Homo sapiens
  misc_feature 235: n = A,T,C or G
ctaacactactatagggcgattggagctccccgcggtggcggccgaggtcaagcttcgacccacgcgtccgcaaaaatcaatcaagggttcctactcaagtaaaaagcaacttgtaggaaaataataggggatatattttgctcattaaggatctttttatagtggctcttggtgcactgcctgtgagttagcccttatcctcaaggagcagcttaaaaaaaaaaaaaaaaaaangt

SEQ ID NO: 543 - DNA, 189 bp, Homo sapiens
  misc_feature 20, 113: n = A,T,C or G
ctactatagggcgattggancctccccgcggtggcggccgaggtacttcctggaaatcaattaactgagtcttttgaaacccctagagaagataggagaaaattggttcagancgagcatttaaattaagtcagcaaagtcagaatttaaaattgggcaattccttgtctacattttctttacactcaa

SEQ ID NO: 544 - DNA, 296 bp, Homo sapiens
  misc_feature 3, 16, 79, 94, 135, 136, 145, 151, 166: n = A,T,C or G
ctnactatagggcgantggagctccccgcggtggcggccgcccgggcaggtgccaaagccttaacttagatcgttactnatgtttctaaatcangtggaagcacatttccttttcttcttcttttcttttactgnnaatatcctnattctntattttaccagtggngaatgtttagaattaatttccatttagctcaagattcaagaaatgcaaagtgctatttttatcaaatttctgaaagcctactgtcttctgctttggaagtcccacaacagctctttaatttccttaagcc

SEQ ID NO: 545 - DNA, 442 bp, Homo sapiens
acttagggcgaattggagctccccgcggtggcggccgaggtaccatcacacagaaggaggagggagctaatccagtaacaaacattcaaagattaaattgtagatatgcacctctgtatttggcactgttgattaatattataacaccttcctctcaaagacaggcattcttaagcgttagtcacaatataccagaatttgctattcatattaaaaccaccttttaaactttataacagtaaccaattattatagttttaagaaacaaaacgcaatgagaactgggaatggaattcaaatcctccaaattcttgctatgctccaagctgccatccataaaacaggtttaatttgggtaatttttccattgtggggaagggtcaacaagaaacaatttaaagacaatattttccaatacaaataaagacatacactttttgtt

SEQ ID NO: 546 - DNA, 207 bp, Homo sapiens
  misc_feature 17, 19, 20, 23, 30, 164, 202: n = A,T,C or G
tacttagggcgattggnanntcnccgcggnggcggccgcccgggcaggtacaagcttcgacccacgcgtccgaaataataaagctagaagtaatatttttccttttgtctattttccaaattgactcgatattgatggctacttttgtaagtttttatttaagnttaaagggaatatttattgatcacctctatgtgctcantacct

SEQ ID NO: 547 - DNA, 381 bp, Homo sapiens
  misc_feature 12, 116: n = A,T,C or G
tactatagggcnattggagctccccgcggtggcggccgcactttttttttttttttttttttccagtgctaaaacatcagataagagcctacctgacattttggagaatttgctgngctgggattgatattccgcattgcctaagagtaaaaaataagacggacgcgtgggtcgaagcttgacctgcccgggcggccggccgcccgggcaggtaccacaggaggcagaaggaaatcctcaaccttccgaagaaggcgtaagccaggaagcagaaggaaaccccagaggagggccgaatcagcctggccagggatttaaagaggacacacccgttaggcatttggaccctgaagaaatgataagaggagtagatgagcttga

SEQ ID NO: 548 - DNA, 111 bp, Homo sapiens
  misc_feature 42, 63, 65: n = A,T,C or G
cttagggcgaattggagctccccgcggtggcggccgcccggnagggtcgcggtgggtcgactnangctagagaattgtaatacgactactatagggatctagatcacgagc

SEQ ID NO: 549 - DNA, 366 bp, Homo sapiens
ctacttagggcgaattggagctccccgcggtggcggccgaggtttttttttttttttttttaccagaacatcacataagtttatttcagatgtaacagcaatgttaaaattgacaagtttaattcttaactgcaccaagtaaacttagccatttaagtatttttttaagttattccctccaaaaaactgagggagcttttcttttccaccaccacaccatggtttcccaatagttctctttttggaggacttttcaattgatgagtaaactgctttagatatttcagaacttcattccccaaatgaaagctaatctggacaaactatatattgcatagatttctctacagattctttgctttaaaa

SEQ ID NO: 550 - DNA, 233 bp, Homo sapiens
  misc_feature 197: n = A,T,C or G
cactacttagggcgattggagctccccgcggtggcggccgaggtacggatgaggcggggaggtgggacccccaaacatatatcagcccaacagccctaagtctccttctttattattaggaaaacaacaacaacaacaaacaaaaaaatggcgtcatgaatatgaacagcattgtcagatgaattagttgaagtggnttttttttgttttttttttttttttgaacctgcccg

SEQ ID NO: 551 - DNA, 473 bp, Homo sapiens
  misc_feature 14, 46, 68, 81, 149, 170, 332, 344, 456: n = A,T,C or G
ctatagggcgaatnggagctccccgcggtggcggccgcccgggcangtgcttcgccccacgcgtccgnaataattggaaanggcctatagattaaaaagctgagaaagtatatggtagggagcacactccccacaagtatgaactctgngattacgacatctcataaatncatgagcactcatgttggcttgctttgtagctatgaacttaccctgtattattgaaacgtcagcataatgactggaaggagaaattggtccattttagagcattactattatgctatctgtccatttaaattaataattgcattaaattcattttagaaggngctattacattngtagtaagaaagtaaattcatatataaatatttgattatcagatggtttacttacagatacttattttcctgtaaaataggagagtttacctgaagaaaaataaaacttttnacttttctgggaaaaaa

SEQ ID NO: 552 - DNA, 353 bp, Homo sapiens
  misc_feature 31, 115, 121, 124, 128, 137, 193, 194, 202, 210, 283, 288,342: n = A,T,C or G
ctacttagggcgaattggagctccccgcggnggcggccgcccgggcaggtaccaagtgaatttaaataattggtgtggattggccagtagctaagaagtgggcttttaaagagtnttgaanatngaangggtttttntttcttttttaaaaaagaaaaacaaactattgattgtctataatgaaaagctaggnnttgccctnttcatgtntactctccttccaaatagttatatccaaaactgtttttccctctcccctaccttgtcccccctattaaaatanaaacngggattgattaatgtcccgctcctgaatacatgtaaaatttgtacctcggccgntctaaaactag

SEQ ID NO: 553 - DNA, 350 bp, Homo sapiens
  misc_feature 229, 302, 329: n = A,T,C or G
cttagggcgaattggagctccccgcggtggcggccgaggtcaagcttcgacccacgcgtccgcttgtcaataaaaaacaaacaattgctaaataaaacaacctgagaaaatctccagagaactatactgagtgaaggaagaaaaatccccaaagattacacactgtatgtcatttatataacattcttgaaatgacacaatcacagaaatagagaatactggtcactantgcattaaggaaggtgtggaaggatgtagtgatgggaggaaatgtgtatggctgtaacagggcaacagaggcntcattgtgatgatggaagtgttctgtntcttgggttttttgaatgtca

SEQ ID NO: 554 - DNA, 179 bp, Homo sapiens
  misc_feature 106, 163: n = A,T,C or G
cactacttagggcgaattggagctccccgcggtggcggccgttaaaggaataatctgcagaacatcttgatttacaagggacaaaatgatgcaaattatatgctgnccaacctactggtgaactggatcagaatggtccaaggactgttaaacagaggaagtntttacattttgaaaac

SEQ ID NO: 555 - DNA, 210 bp, Homo sapiens
  misc_feature 18, 20, 161: n = A,T,C or G
ctacttagggcgaattgnanctccccgcgggggcggccgctaaaggaataatctgcagaacatcttgatttacaagggacaaaatgatgcaaattatatgctgtccaacctactggtgaactggatcagaatggtccaaggactgttaaacagaggaagtntttacattttgaaaacttgcggacgcgtgggtcgaagcttgtacacctt

SEQ ID NO: 556 - DNA, 258 bp, Homo sapiens
  misc_feature 134, 258: n = A,T,C or G
tacttagggcgaattggagctccccgcggtggcggccgcacttttttttttttttttttgttttggtttgttttttgggctctcaggtttaccactctctccccatcttcccaggtttaggaggcaggcctctncctttcctaccctcccacccgaaggtgagtcactagagtgttacaagcttactggcagggaacactacaaattaacaaacagtaagttaccaaaaggggatacacccttataaaagggtacctn

SEQ ID NO: 557 - DNA, 329 bp, Homo sapiens
  misc_feature 262: n = A,T,C or G
tacttagggcgaattggagctccccgcggtggcggccgaggtcaagcttcgaccacgcgtccgctttcaatagatcgcagcgagggagctgctctgctacgtcacaatctttcaaaaaaatgaacatgtaagaaaaagcagttttcattgtgctaattattgcaggccttcatgcacgtaaacctcaacaaaatgtgtgccaacaatatacaaatttccatataaacaaagtcattgatcactaacaaaatataaacatggnttcttttatattagattttttttaaaaaaaagctatttaccagcaagaaaaaacaagtacctgcccg

SEQ ID NO: 558 - DNA, 304 bp, Homo sapiens
  misc_feature 265: n = A,T,C or G
acttagggcgaattggagctccccgcggtggcggccgaggtcttcgacccacgcgtccgcatttattaaggcttgtatatgttcaagatccagtgaagactgtcttgggcgtgtataattgatcttaaccacaaggctgagaagttatgtgcagggcttatgatgctacttccaaagtattaaatcctccagagaagcctgtagtgtgggatgcaaactattttaagtgtgaccatgaggtgtttttttgtggaccattttaaanccaatgataggttctaaagcaatctcaacctgagttagg

SEQ ID NO: 559 - DNA, 366 bp, Homo sapiens
  misc_feature 300: n = A,T,C or G
cttagggcgaattggagctccccgcggtggcggccgaggtcaaggcttcgacccacgcgtccgctccaggagacttctgcttacctctcagtgatcaaaaaccgtttcaccacagttacttaccacgtcctaccgatccgcattctcgcaagtgtccttcactccatttactctactgcatttttcactgtatttctcatgccaaaacttgggcttctccaccagtctgcacacgttcatgctctcaattctcacagccatctatttcattctccactaaactgttagagggatttctgnagaaattaaagaaattcctatcactcctaaaaaaaaaaaaaaaaagtgcggccgctctagaactag

SEQ ID NO: 560 - DNA, 207 bp, Homo sapiens
ctatagggcgaattggagctccccgcggtggcggccgaggtgtacaagcttcgacccacgcgtccgcaagttttcaaaatgtaaatacttcctctgtttaacagtccttggaccattctgatccagttcaccagtaggttggacagcatataatttgcatcattttgtcccttgtaaatcaagatgttctgcagattattcctttaa

SEQ ID NO: 561 - DNA, 428 bp, Homo sapiens
  misc_feature 193, 214, 308, 399: n = A,T,C or G
ctatagggcgaattggagctccccgcggtggcggccgaggtacagctttatttatttcttttaggaattgcaggttcctaacaaagtaggggtgaggggggtgttacaaaccagtcactaggcaggaacattagactccaaaagcagagaaatgcttaatttttcttctacctgtttcaccacattcatgtanaactgtagtaaaaaagatggngaatcaggctgaatcaatctaaataacaacttaaggctcccaaatcacatgaacctaggaccactaaatccaatgtcagacgtgtttaaatggngcactgctctacatttttctattatgcaaagagctagaaaataatggtagtgtcattatgacattccatgaaaatgaagaaaatctttcangaaaaatttagaaaataaaaatgtttact

SEQ ID NO: 562 - DNA, 383 bp, Homo sapiens
  misc_feature 89, 128: n = A,T,C or G
ttagggcgattggagctccccgcggtggcggccgcccgggcaggtgccaaagccttaacttagattgttacttatgtttctaaatctgnggaagcacatttccttttcttcttcttttcttttactgntaatatccttattctctattttaccagtggagaatgtttagtattaatttccatttagctcaagattcaagaaatgcaaagtgctatttttatcaaatttctgaaagcctactgtcttctgctttggaagtcccacaacagctctttaatttccttaagccccactttcctcatcagcaagttggtgtggcaatggatcataataggttgctgggaggatgaagtgagcggacgcgtgggtcgaagcttgtacct

SEQ ID NO: 563 - DNA, 190 bp, Homo sapiens
  misc_feature 17, 131: n = A,T,C or G
ctactatagggcgaatnggagctccccgcggtggcggccgaggtacccagtaatcacataaattctgcaatcatctgtttatttagcttaactgtttttttttttatttgttgaagttgttgttgttattncagtctttttcttattgggttgaccagacttggtaaaatctgtaagaaagttccataat

SEQ ID NO: 564 - DNA, 464 bp, Homo sapiens
  misc_feature 160, 192, 194, 290, 299, 302, 308, 322, 324, 343, 354, 357,380, 382, 397, 417, 420, 425, 426, 436: n = A,T,C or G
ctacttagggcgaattggagctccccgcggtggcggccgaggtgttcttcagattcaaatgccaacactaatttgaacttctttgggtctatgacagtttgcaagccatacaaacccaaagagctaatctgtgatttcttaacttgagaaaataataatnataaccaccactggaacctacataggtttgtngnttatttaacatgacttaaccttttgtttgtatttttttgaaaaaaaaaaaaaaaaagtgacctgcccggggcggccggacggccgggcaggtcgcnctcaaattnttnaatttnttttggaaagacangnattttttatttttgccaangctaaaacttnacnctgggcctttaaaggggattccntnctggcctttgggccnccaaaaagtgcttgggattnttngggtnnaaaccccggnggggccctagcctaccagtttttttaaa

SEQ ID NO: 565 - DNA, 415 bp, Homo sapiens
cttagggcgattggagctccccgcggtggcggccgaggtcaagcttcgacccacgcgtccgtgcaaatttgactttgtaaatggcccttgggctctgggaggaaagcaactgttgggccatgtggttgtatctttagttttgtaaagaattgccaaactgttttataatgtgggtatatctttccacacttccagcacaatgtatgagtgatccagtttcttagcaccatagtcagaatttactgttgctactattttttagctatcctgatagatgtgtagtgatattttattctggttttgaagcagtgtcattgtctggggtaaatccttgaggtttgttgtctcagtcaaggggaatcaagggacatggacacacaagtagtgaatttaagagtggaagtttaataggtga

SEQ ID NO: 566 - DNA, 189 bp, Homo sapiens
tacttagggcgaattggagctccccgcggtggcggccgcccgggcaggtcaagcttcgacccacgcgtccgtcttattttttactcttaggcaatgcggaatatcaatcccagcacagcaaattctccaaaatgtcaggtaggctcttatctgatgttttagcactggaaaaaaaaaaaaaaaaaaagt

SEQ ID NO: 567 - DNA, 315 bp, Homo sapiens
  misc_feature 277: n = A,T,C or G
acttagggcgaattggagctccccgcggtggcggccgcccggggcaggtcaagcttcgacccacgcgtccgcatattttcattacttgacaatgtgggatgggtgcaatttattccatcttcactaaaatagaagcaattccataggtaccataaacctattttaggtaccacaaggtgtctttttacacagctcatttgaatacaggtgttctgagaaggggtttctattttaaaattaccatatcaaaataaatgtgccttatttttttataagncttgttaaatcagtgtccatattactgtttggggaagg

SEQ ID NO: 568 - DNA, 401 bp, Homo sapiens
  misc_feature 367, 368: n = A,T,C or G
ctacttagggcgattggagctccccgcggtggcggcaggtacaaataagcccaccccactaggaactatgttaaaaaaaaattcaagaaagaatttaagggagattacagtgttactgtgacaccaggaaaacttagaactttgtgtgaaatagactggccagcattagaggtgggttggccatcagaaggaagcctggacaggtcccttgtttcaaaggtatgacacaaggtaacccgtaagccaaggcacccagaccagtttccatacatagaaagttacagctgcttttatacccccttgccccgccaacgtagttaagagaacagcagcataagcggctggcagaggcaaggaaagaccagtnnagagaaaaaaaggccatctataccaattctaag

SEQ ID NO: 569 - DNA, 430 bp, Homo sapiens
  misc_feature 59, 90, 109, 226, 256: n = A,T,C or G
cttagggcgaattggagctccccgcggtggcggccgcccgggcaggtacgagcggccgnccgggcaggtacacaaaccagatgtatgcantgatgccaaaagtcatctnaaaattccaagctgacctagtgcaacacatttacacttggataaactatcaccttgaagatttactttgtatacttcaaaagatctggtcatgaaatttttagctaatacataaagngccgaattgaaatccagaatacaatagctntgaagggccgctagagtgcagataaccaacccattctacctaactcaggttgagattgctttagaacctatcattgggctttaaaatggtccacaaaaaaacacctcatgggcacacttaaaatagtttgcatcccacactacaggcttctctggagggatttaatactttggg

SEQ ID NO: 570 - DNA, 350 bp, Homo sapiens
  misc_feature 175, 239: n = A,T,C or G
ctacttagggcgaattggagctccccgcggtggcggccgaggttattttccctcagtaacatgtaattgctacattttttataagaaggtatggttagaaaaaaatgtgaaagatcacttaaaccaaagccagttacaaggagtaatctctcctgttggtttaccttcacctcanaactacaagaatattacaatacatagtgaatagttgtctgtaacatttctaccagttgtttcantagcatattggtcttggcatttcttggcactgtggttctgctgtattatttgtgatgtcttattgtttgtgagcttttgtttttttttaaagaaaaaacaaaaactaagtg

SEQ ID NO: 571 - DNA, 254 bp, Homo sapiens
  misc_feature 95, 109, 134, 181: n = A,T,C or G
tagggcgattggagctccccgcggtggcggccgcccgggcaggtacccagtaatcacataaattctgcaatcatctgtttatttagcttaactgnttttttttatttgntgaagttgttgtgtgttatttcagnctttttcttattgggttgaccagacttggtaaaatctgtaagaaagntccataattatggggaagatttcctctgaattggctaaattcctgtagctgaaaaaaaaaaaaaaaaaaaagt

SEQ ID NO: 572 - DNA, 204 bp, Homo sapiens
  misc_feature 8: n = A,T,C or G
ttagggcnattggagctccccgcggtggcggccgaggtgtacaagcttcgacccacgcgtccgcaagttttcaaaatgtaaatacttcctctgtttaacagtccttggaccattctgatccagttcaccagtaggttggacagcatataatttgcatcattttgtcccttgtaaatcaagatgttctgcagattattcctttaa

SEQ ID NO: 573 - DNA, 233 bp, Homo sapiens
tacttagggcgaattggagctccccgcggtggcggccgcccgggcaggtacttttacggcttctgacaggcctcagaagaacattccctaccccaaaattataaaaataatcttgtatatattcttctcaaaactttatactttttttaaggcttggatttttaatctatctggaatgtatttttaaatactgagtgagtcacttttctcccggacgcgtgggtcgaagacct

SEQ ID NO: 574 - DNA, 242 bp, Homo sapiens
  misc_feature 17, 55, 57, 94, 96, 121, 134, 147, 152, 153, 155, 164, 197,205, 220: n = A,T,C or G
gaattggagctccccgnggtggggccgctcgaggccgctctgacctctttaaggnanacttattatgctaatagttgatgcgcccttttgctgnancagttaccataggttacatgataantatatattgttgngatgatctgattncctgnntnccccacccntgcaaaacaacaacaaaaacctttaccaggctntataacanggggaccaaacttgnttttgctcatcattgccggacg

SEQ ID NO: 575 - DNA, 278 bp, Homo sapiens
  misc_feature 252: n = A,T,C or G
aggtacttaccccagacaacgacgccgcttcaccatgatgatggacaacaggcaactttttttttggagtttcagcttgcttccaacagggacggtgagtgtgaggtttattcccatttctaagacgatagaagttttcagcctaagccgtattcctaggtaagcagctggattgcaagttttgtcttggaaattctccttaatgactaaaagttaaagaattaaacaacctagctgggcttaaatttcttncttacccattagaagtacccttgccc

SEQ ID NO: 576 - DNA, 378 bp, Homo sapiens
  misc_feature 7, 34, 74, 229: n = A,T,C or G
tagggcnattggagctccccgcggtggcggccgnggtctaagagacagggtctcactacattgcctagattggnctcacactcctgggctcaagcaatcttcctctcttggcctcccaaagtgttgggattgcaggtgtgcgccactaggcccagcttgaaaaatttttaatgcatgtggtaatccacaggagatcacatttagtatatgaccaagttaattaagaagncaaaaaacacgttaaatttaagcagaataaggctgggttcggtggctcatgttagtttttatccttaaaattgtctgagttcttagaacacagaaaaaacaaatttgaatgcatttctaacagcttaataatttatatgtcccattatg

SEQ ID NO: 577 - DNA, 177 bp, Homo sapiens
  misc_feature 5: n = A,T,C or G
ggggnggcggccgcccgggcaggtcaatgcttcgacccacgcgtccgatttcaggttgacttttctcacctttaacctctttatatagcacagtgcaatctggccctactgccacttcatctgggttatctgtagcttgagttgtaaaaaaaaaaaaaaaaaaagtgcggccgacct

SEQ ID NO: 578 - DNA, 141 bp, Homo sapiens
aggtgtcgactcaagctttcagatataggcattccagaatcttctctttacgagttcacctgctagtataatctccacaacttgaatggcattggttgttctgtaattcctgccaaaagcatcacaagttgtacctgcccg

SEQ ID NO: 579 - DNA, 238 bp, Homo sapiens
ccgggcaggttacaagtcgacccacgcgtccgcttcagaatatccaattcatgtgaactacaggaaattatagtttagatatttttaaatgatttgcctgtcaccgtataacacaagggtgtcatgaccaagctagatctctttaccatatcattaataaaagtcaaattttaaatttgtgcccaatttggctgggtgtggtggctcattcctgtgattccagcactttgggagacct

SEQ ID NO: 580 - DNA, 352 bp, Homo sapiens
gtgaacctgcccgggcggccggccgcacttttttttttttttttttttccttttgagacacagtctcactcttgcccaggttggtctaaaactcctgggctcaagcaatcctcccgctttcagcctcccaaagtgctggggttacagccgtgtgccactgtgtctggcccttttctttttcataggagaagggttgttgactcccaggaaacgtcacctggaaccaagaatgtgaactcaaggacccccgcctgttggcagctgcatttacttgactcctgttcactgtttcttagccttgtcctttctctcctgccagttctaggggacactgcttctcctggttgacctc

SEQ ID NO: 581 - DNA, 358 bp, Homo sapiens
ccgggcaggtaccctaaaacttaaagtataataaaaaaaagattatttcctatacttcaaaatcaacaagatttgattgcatttaaatttttctgtccatttgttcttctatgtaatactttaaaaataattggcataaaaattcaatcaattcataaaagtccaaagcaaaaaaaacaaatctactgacatctcttgaggaagaaatgatcaggattgacattaatgaaccctctcacagagaccactacacacacacacacaaaaagaaggatgggtgaatggatgcagagagaatttaataagactgaaatgatgccatacatgcttttaaaaaataaaaagtattaaattttaa

SEQ ID NO: 582 - DNA, 267 bp, Homo sapiens
ccgggcaggtacttatactagaagatgctccaaggtttcagaaaggaattaattactttcaatttgcacaatttagaacaaatatctggcttttccctaagcttaatgattttccatttcacacaactaaaatataatagcattattttataatcaagtttaactgatggtctatgatagtagagcgatttagtattttgacaaaaatcttatgagacatgaagtcattcaatttgccggacgcgtgggtcgactcaagctagacct

SEQ ID NO: 583 - DNA, 306 bp, Homo sapiens
aggtcgccatcacacccggctaattttttttgtatttttagtagagacagggtttcaccatgctagccaggatggtctcaatctcctgatctcgtgatccgcccacctcagccttccaaagtgctgggattaaaggcgtgagccaccacgcctggccaggagattcttaattatttctgaactctatcagttttgtattaggacatcttatttaatattatcaaaagatagttcctcttagaggcataaatcagtcaatcaacaaacaataggcaatcacggacgcgtgggtcgaagacctgcccg

SEQ ID NO: 584 - DNA, 279 bp, Homo sapiens
aggtgtacaagcttcgacccacgcgtccgcatttttctggtgttccctcttacgtgcacaccccttgctcccctttgggttgacttataatctgacttttgtgacagatgttaggaggtggagcaaaggaatttcagaccaatcagttaagagactgctgtggggtaagaaaaaaaattagcctcttaaaattactcttatcaaaggaaaaaaagttggaagcacatgatagtataaccagaaacatgacacagaagaattaagggaagaacctgcccg

SEQ ID NO: 585 - DNA, 340 bp, Homo sapiens
ccgggcaggtggaaaggtgggtggggagagggaggcttatttgttgctgcagtgtaactaagtgaaacctaattcatatgactcaaactaaggtatatttggttagatctaggtgagttctactttagaggaaatcctggtaactgttgtttgtttgtaagttatagctgtaattaattttccctgtattcaaagcccccaaaccctgcattcagatactatgcatttagacttccttaggcaaagtcaaggcaacaagctgatgattctaagctattattcaaggagtatctaccatcataaaggtggtttagtcatatagataatatcaatcaataat

SEQ ID NO: 586 - DNA, 307 bp, Homo sapiens
ccgggcaggtcttcgacccacgcgtccgtgattgcctattgtttgttgattgactgatttatgcctctaagaggaactatcttttgataatattaaataagatgtcctaatacaaaactgatagagttcagaaataattaagaatctcctggccaggcgtggtggctcacgcctttaatcccagcactttggaaggctgaggtgggcggatcacgagatcaggagattgagaccatcctggctagcatggtgaaaccctgtctctactaaaaatacaaaaaaaattagccgggtgtgatggcgacct

SEQ ID NO: 587 - DNA, 350 bp, Homo sapiens
aggtacattgttagacaagtgtttatcactaatctggaatacatcatcttcaataaggctcttgttttcctccaagctgcactgctcacactgctcagttttctgttaagcaacctgctcattatagtagagcaccaaggtgatctgttcttctgttcttcagaagttcactatttcttgttgcaacagggctacatgattttaagattcctcaaagtcaatacgaattaacattattttccatttccattctgtatatcttcacattccataaatataatactcatgtatacgttaaatttccttataagttcaacacattgaaagctaaaataaagacttcctactag

SEQ ID NO: 588 - DNA, 338 bp, Homo sapiens
ccgggcaggtacacaaaccagatgtatgcaatgatgccaaaagtcatctcaaaattccaagctgacctagtgcaacacatttacacttggataaactatcaccttgaagatttactttgtatacttcaaaagatctggtcatgaaatttttagctaatacataaagtgccgaattgaaatccagaatacaatagctatgaagggccgctagagtgcagataaccaacccattctacctaactcaggttgagattgctttagaacctatcattggctttaaaatggtccacaaaaaaacacctcatggtcacacttaaaatagtttgcatcccacacta

SEQ ID NO: 589 - DNA, 353 bp, Homo sapiens
ccgggcaggtgacttggctgtgaaaagtgctaaaacagataaaagactatactgacaggcaaatggagcctgttatgacactgacattgaaggtgaaaggagaatccagttcacattagccagggtctcagggaccaggttttgaggcagtatttctgcctcttgaggacagggcagagcaggtgggtaaaaagcaaagagaccagggaagggggactaaaagtaagggaaacagcatctgaggaaaggctcctctgactggattttcacaaacattatttattaacctcactaaacaaggataatgggacaaaacaggggcaagctggaaaaccagcaggggtatttggcag

SEQ ID NO: 590 - DNA, 354 bp, Homo sapiens
  misc_feature 134: n = A,T,C or G
ccgggcaggtacatcaccctgctgagggacatccaggacaaggtcaccacactctacaaaggcagtcaactacatgacacattccgcttctgcctggtcaccaacttgacgatggactccgtgttggtcactgncaaggcattgttctcctccaatttggaccccagcctgttggagcaagtctttctagataagaccctgaatgcctcattccattggctgggctccacctaccagttggtggacatccatgtgacagaaatggagtcatcagtttatcaaccaacaagcagctccagcacccagcacttctacctgaatttcaccatcaccaacctaccatattcccaggac

SEQ ID NO: 591 - DNA, 314 bp, Homo sapiens
ccgggcaggtggaaaggtgggtggggagagggaggcttatttgttgctgcagtgtaactaagtgaaacctaattcatatgactcaaactaaggtatatttggttagatctaggtgagttctactttagaggaaatcctggtaactgttgtttgtttgtaagttatagctgtaattaattttccctgtattcaaagcccccaaaccctgcattcagatactatgcatttagacttccttaggcaaagtcaaggcaacaagctgatgattctaagctattattcaaggagtatctaccatcataaaggtggtttag

SEQ ID NO: 592 - DNA, 236 bp, Homo sapiens
aggtcaagcttcgacccacgcgtccgcagcctgggtgatagtgagatcctgtcttaaaatgaagaaagaaagaaaaaaagaatgagaaggaaggatattaattgaagtaagagcacatttgattacaaaatagaagaggagtaagtgagaactaaacggggaatacagatagcagagattaaataggctataagaaaaaaaagggatgataataagaccatggtagtacctgcccg

SEQ ID NO: 593 - DNA, 360 bp, Homo sapiens
  misc_feature 198, 335: n = A,T,C or G
agggccgaattggagctccccgcggtggcggccgaggtcttcgacccacgcgtccgtttacaatatggtgacaacagataactgtaaaaacttctttttcaaatagaaccagcaggagcatgcatggaacacatataccaaacatctttctgataacattaaacatttttaaaagatgttaaatgttcttttcattgnggtgcttcagattcctgattctagaacttgtgtgtgtggaacctgtgtgctaactattctgttggaatttaccagcaaagaattatctaagaattttcaaactaaatgatgggggaaggaactaacatttttgcagnccctggaaatgtaaaatgttgtacc

SEQ ID NO: 594 - DNA, 378 bp, Homo sapiens
ctatagggcgaattggagctccccgcggtggcggccgcccgggcaggtacaataaatagcattcccacggtgaccacaagtcttggaatcagttccaggtgtcgtcgtggccgttgacaccgctgccttctgacggtaaatgtattgtagaattcatgttgttatcaggcttcagtttcctcatctctaaaatgagaggattggataagttagtagtttctaatttttacttttaatcagtggcatctcccatttatttttcatttgaaataaaacttttgaattttatcttctacctaaataacatattttgttttatgtttcaagatgaagctcacactgagttggaaaaaaggaaaaagcaaaggatcaaagctg

SEQ ID NO: 595 - DNA, 359 bp, Homo sapiens
  misc_feature 211, 325, 335: n = A,T,C or G
ctatagggccgaattggagctccccgcggtggcggccgcccgggcaggtgccaaagccttaacttagattgttacttatgtttctaaatctgtggaagcacatttccttttcttcttcttttcttttactgttaatatccttattctctattttaccagtggagaatgtttagtattaatttccatttagctcaagattcaagaaatgcanagtgctatttttatcaaatttctgaaagcctactgtcttctgctttggaagtcccacaacagctctttaatttccttaagccccactttcctcatcagcaagttggtgtggcantggatcatantaggttgctgggaggatgaagtga

SEQ ID NO: 596 - DNA, 144 bp, Homo sapiens
atggcgaattggagctccccgcggtggcggccgaggtcaagcttcgacccacgcgtccgattattctctccatttaggctataaatctttcagtgtagggtgtttctaatgtcatattcttccaaaaaaaaaaaaaaaaaaagt

SEQ ID NO: 597 - DNA, 339 bp, Homo sapiens
ccgggcaggtcttcgacccacgcgtccggctctccagtttatacatgaagaaactttccgaaagtcttgcagcttgtggagagcagagctggagagcaggctagtctgattttagaagggagttaaccattacataacctgcaggtggcttctccccatacctgccgtgggataatatggctcactttttacttcatttacaatatttaataagtgcgattttagacttgagaagagaatattttctgctaaaattatccccactagagataatcaccagtgaattaatacactgcagcaacggaaccagtcagcttttttggtaatcattcccttcct

SEQ ID NO: 598 - DNA, 319 bp, Homo sapiens
  misc_feature 15, 195, 236, 250, 253, 266, 278, 279, 291, 304, 305: n = A,T,C or G
ccgggcaggtcttcnacccacgcgtccggctctccagtttatacatgaagaaactttccgaaagtcttgcagcttgtggagagcagagctggagagcaggctagtctgattttagaagggagttaaccattacataacctgcaggtggcttctccccatacctgccgtagggataatatggctcactttttactncatttacaatattcaataaagtgcgattttagacttgagangagaatattttctnctnaaatttatccccnctagagataatnnaccagtgaattnatacactgcaccnnacggaaaccagtca

SEQ ID NO: 599 - DNA, 147 bp, Homo sapiens
aggtgcttcgacccacgcgtccggtatttctcttaaagttaattttgatagatatttatctagatgctttcttttttcccttgccataatagctggcttgtagagagagttatgtttgaaaaggcttgccttttttccgtcgctctg

SEQ ID NO: 600 - DNA, 323 bp, Homo sapiens
  misc_feature 188, 229, 264, 280, 282, 294, 295, 298, 304: n = A,T,C or G
aggtcaagcttcgacccacgcgtccgtgatgctggcttcccggtcaaagctgaggagttttgtggtgctttctcaggaaccttctgtcacggaaaccattgcacccaaaattgcaagacctttcatagagactttcctcaggccctcaagagtatttgagtatctggaggaggatgcccagaagtccncacaggagggggtgcttgggaccacacactgatgctcttgncattcagactctgagaaacatgccgcgtgatgaanaaaccatcccaattanangaagctagctgnnttncattgnagcagctttaccccaattt

SEQ ID NO: 601 - DNA, 328 bp, Homo sapiens
  misc_feature 200, 212, 237, 248, 256, 279, 292, 327: n = A,T,C or G
ccgggcaggtcaagcttcgacccacgcgtccgtgataacttctcctaagtgccaggcattgtattacatgctgggagcacaaagatgaataataacaataggttcacagaaaagatgaattgattgagagaaaaagaaccctccaggagccctcagcgtagtagggggttggtgttggagggtggaggaatggaaaaggncctgaaatgcangcagagaaatgatgaaacaattccnggggctgcggngaggttanatgaatatctttacagcagcctngaagactgatcangttactataccctctcttctgtccacgtgcatttna

SEQ ID NO: 602 - DNA, 361 bp, Homo sapiens
ccgcggtggcggccgaggtcttcgacccacgcgtccgcatttattaaggcttgtatatgttcaagatccagtgaagactgtcttgggcgtgtataattgatcttaaccacaaggctgagaagttatgtgcagggcttatgatgctacttccaaagtattaaatcctccagagaagcctgtagtgtgggatgcaaactattttaagtgtgaccatgaggtgtttttttgtggaccattttaaagccaatgataggttctaaagcaatctcaacctgagttaggtagaatgggttggttatctgcactctagcggcccttcatagctattgtattctggatttcaattcggcactttatgtat

SEQ ID NO: 603 - DNA, 380 bp, Homo sapiens
  misc_feature 324, 343, 367: n = A,T,C or G
attggagcctccccgcggtggcggccgaggtagcttgagtcgacccacgcgtccgttcagatccgtttcagaaacgtgagtctctagctcaggagatttccacaactgtccttagtaacctgatcttattctcatgtttaaccttggcagtgggaagttcttcctggtatcctgcctaatttactggagttggcattaatgccatttccccctaaggcgtggctcttggaccagtatcacctgagaatttgatagacatagacccagagttactgagggcaggtgctctgttttggggaccagcaatcggtgctttagcaagtnctttgggtgataggggttntggaaactactgctctaaagcatnatctgtttttgac

SEQ ID NO: 604 - DNA, 279 bp, Homo sapiens
  misc_feature 71, 200: n = A,T,C or G
ggtacccaaaagatatcactgtgaaggtttggatacactgactgaggaaaaaagaaggtcctgaaagcgtntagacaaaaaaagactacttgtaagttgcaagaatcagaatggcattggacttctcagctttcctcattagaagtttaagatctgaagcaatctttaaactcgtgaggaaaattaagtctaataaatanttttcttcttagcccaaacaatcaaatgtgaagctagaataagcattttcaggtaaaaaaaaaaaaaaaaaagtgcggc

SEQ ID NO: 605 - DNA, 203 bp, Homo sapiens
  misc_feature 14, 15, 203: n = A,T,C or G
ccgggcaggtacannttgtgatgattttggcagcaattacagaacaaccaaggccattcaagttgtggagattatactagcaggtgaactcgtaaagagaagattctggaatgcctatatctgaaatcagaatcctagtagtttgtagtttgcctcttcctagaagttcaagagactcaagtcataggctacagatgtacctn

SEQ ID NO: 606 - DNA, 184 bp, Homo sapiens
aggtcttcgacccacgcgtccgcaactgttgatctaacttttccacttgaatgtctaattggcaaatcaaacctaacatgttccaaacgagttctgaagcaccccctctgccaaatctacgtctcccacagccttccctatttctctacctggtacctgcccgggcggccgctcgacctgcccg

SEQ ID NO: 607 - DNA, 336 bp, Homo sapiens
aggtcttgagtcgacccacgcgtccggagatgtatacgccactataggaactataagaaaaagtcaaatggaaatcttataaataaaaaccacagtcactataatgaggaaatactttgataaggtgtcagtgaactcaaaaatcaatcaatagaaactactcaaactaaaactcaaagagaaaaaaaaagatgggagataattattttttaagaattggtcatcaaaatgtagcaacaagtttgccttatcctatatcatttgaattttcaaaaaataagctcattatacaatctttaaaatattttgaatagaactgtttcatgtgttatttgt

SEQ ID NO: 608 - DNA, 343 bp, Homo sapiens
aggtcaagcttcgacccacgcgtccggggaacccttgttcaggttctttttaggcaacccaagccaagacaacaaagtaagatagagccccaaatgtggtcgtataaggtttttcaaagaaagtaacacttgagttaggtcttaaagtttcacctaagaaactgcccaggtggacaagaagaaagggtgttccaagtagaaataatagcatggacaaaggcaatgtagcaggaaaagtcttcgtaaattcagggaatttcaagtgtttcacgatggaaggagcaatagagtcatttacttgcggtggcaggggatgttggaaatgtaaacaagagtgagatac

SEQ ID NO: 609 - DNA, 314 bp, Homo sapiens
aggtcaagcttcgacccacgcgtccgtgatgctggcttcccggtcaaagctgaggagtttgtggtactttctcaggaaccttctgtcacggaaaccattgcacccaaaattgcaagacctttcatagagactttcctcaggccctcaagagtattgagtatctggaggaggatgcccagaagtccgcacaggagggggtgctgggaccacacactgatgctctgtcatcagactctgagaacatgccgtgtgatgaagaaccatcccaattagaggagctagctgacttcatggagcagcttacaccaattgaa

SEQ ID NO: 610 - DNA, 317 bp, Homo sapiens
actttttttttttttttagcttgagtcgacccacgcgtccggggatctagatcacgagcggccggccgcccgggcaggtacggaagccatgcacttgcctctccttcagagctgggattttttttcattttgctggctgtgagcacacacacgcccacaggtgcctaagcctcttgtatgtgtgttttgaactgtgtcctctgagttctgtgtctgggtgcatgctctcctcttagcgtgggtctccttcccctgtgtagcacttcacaatgttaggcatttgtctgtgatagcagctgttcagtaatttcctactt

SEQ ID NO: 611 - DNA, 343 bp, Homo sapiens
aggtttcgacccacgcgtccggaatttatctggccaggcattggtagtttacagaagtctaccagatgattctaatgtgtggtcaagactgagaactatgtgtttaattgggttcatttcaagaatactgtaaaaattttatctaaatactaaatatccataaaagaaacctcggtaatcaggccaggtttttgagtttttccagattagcccaactacaggggaaagagactttcgcactatatcccagagtctctgctcctgcttccagcctcaatgcactgggcctttctgctgccttggagcacttagagggattacaggaggagtgatctgtggagtt

SEQ ID NO: 612 - DNA, 426 bp, Homo sapiens
  misc_feature 291, 406, 407, 408, 413: n = A,T,C or G
atagggcgaattggagctccccgcggtggcagcgcccgggcaggtacatacagcctgaagttaacctttctatgttaaatgaaaaaactttgtcattcatcaggtcacagaaaccaaaaactaaacaatgcaaaaaaaaaaaaatctaaaaataaaagaattttatatttgaagttattctggatattcgcaccattttagcttctgaaaaaaatgcaactatgaaatgaagacctcatatattttcatttatcaatataatgttaaaagtttcattccaccgggtgtggnggctcacacttgtaatcccagcactttgggaggccgaggcgggcggatcatgaggtcaggagatcgagagtatcctggctaacatggtgaaaccccgtctctctaaaaaaattcnnnaaaanaaaaaaaaaggaa

SEQ ID NO: 613 - DNA, 538 bp, Homo sapiens
  misc_feature 172, 411, 458, 487, 489, 490, 519, 520: n = A,T,C or G
cgaattggagctccccgcggtggcggccgaggtacattgtagttttcttagccatttttcaatagtctacacagtgtttatgtttccttttatttgtgtatagtggagtagaggggaggtttttttattcaaatagaagaagctaaaactcaaatgcaatgtcagatctcanaataaactgacccaatttctgaaacccaataaacacatttcatttgtaatattctttattatatagctctatgaaaagtaatttgtgactttcgatcttaaaagagagttttaaaaatacacagtaaattgaaagaaaaactactacatttaaaacagtattttcctgaaaacatagaatgaaaatgcaagtattttgtgcatggcagctgtttttaaggaaccaatgttatatatggngaattttgtggaagactatgtctcttaaaatatttcttataaaatancatggctttttaatagctgggaatctgangnnggatttcccatgaagaccttaaatggctnngcaggaattataaaaaag

SEQ ID NO: 614 - DNA, 468 bp, Homo sapiens
acttagggcgaattggagctccccgcggtggcggccgaggtacatgcctgtaatcccagctgttggggaagctgagatgggaggattgcttgagcctgggatactgatattgaggctgcagcgggccgagaataccactgcactccagcctggatgacagagtgagacactggctcaaaaaaaaaaagaaaaaggaagaaaaaagtttaaatcaatgaatgttctcatttctaatgaaataatgaaacattattgggagagttatagtcataatcatcttactgcactatcaattaaaaaatacatcattttttagagcacaatatataccataaagaattattcaaatagtctaaatattacgatcaaatttttaatagactttgttacttaaactaaaactgtattagtctgtattagtcagctcaagttgggattcacacctgtaatcccaacacctaggggggc

SEQ ID NO: 615 - DNA, 377 bp, Homo sapiens
  misc_feature 344: n = A,T,C or G
ccgcggtggcggccgaggtacactgtgtaagtggtcaaagatagacatggttttatttacaaggaaatttgctgaagtgtaaattataacacgaagagatgggagggaggggtaaacacctaaatgtctaacaacagagaatggttctctgttgatacaaaattatgatacatcaaaaaagaacaacaatcaaattctctgagaattcccattacagttaaaaggagctcccagccaggtgcggtggctcacgcctgtaatcacagcactttgggaggccgagtcgggtggatcacgaagtcaagagattgagactaccctggccaacactgtaaaaccccgtntctactaaaatacaaaaattagctgggccgtgg

SEQ ID NO: 616 - DNA, 342 bp, Homo sapiens
  misc_feature 219, 236, 280, 297: n = A,T,C or G
ttagggcgaattggagctcaccgcggtggcggccgaggtactgaataactgccaatgccatctgcctgtggccttctcaagtttgtctgcacctgtggttatcctgacttcaaacccggggagacagaggctagaagaggcagacagctcttgtgtattctcctgtccagtgcaaagaacatctggaactctgagccctaaccttaaatgcaagacctnatctgcaggtgttcctnatccttttagcccctcagtgatgtaagcaacaaacgtcacccanctcctggggcacacttnactcccagatgagcttgtcctggatttgcagggagcctggctccc

SEQ ID NO: 617 - DNA, 470 bp, Homo sapiens
  misc_feature 19, 347: n = A,T,C or G
tagggcgaattggagctcnccgcggtggcggccgccggggcaggtacatcaccctgctgagggacatccaggacaaggtcaccacactctacaaaggcagtcaactacatgacacattccgcttctgcctggtcaccaacttgacgatggactccgtgttggtcactgtcaaggcattgttctcctccaatttggaccccagcctggtggagcaagtctttctagataagaccctgaatgcctcattccattggctgggctccacctaccagttggtggacatccatgtgacagaaatggagtcatcagtttatcaaccaacaagcagctccagcacccagcacttntacctgaatttcaccatcaccaacctaccatattcccaggacaaagcccagccaggcaccaccaattaccagaggaacaaaaggaatattgaggatgcgctcaaccaactcttccgaaacagc

SEQ ID NO: 618 - DNA, 287 bp, Homo sapiens
  misc_feature 24, 51, 65, 67, 75, 90, 245, 247: n = A,T,C or G
gccgggcaggtacagatggggttncaccgtgttagccaggatggtctcganttcctgacctcatnangcatccanctcggcctcccaaantgctggaaattacaagggcgttgagcccacccgcacctgggccagaatcttacatatttcttaaacatcattaaatatatattgtattttttactttttttttgaataggggtcttgctatgttgcccaggcttggttttgaactcctggccttnangagatcctcccgctctcaaacctctcaaaagcaatgggta

SEQ ID NO: 619 - DNA, 180 bp, Homo sapiens
aggtaccccattttatgccataagtcaggtttctccctcaatagccctttggaactctcaaggtccagagtggcatcaaaccaactgacacatgagttgatacatcatgtgctgccaacagagaaattagtctgtgccaaactcagcacaatcctgcagttcaaaccagaatttcaaaaa

SEQ ID NO: 620 - DNA, 219 bp, Homo sapiens
accaagatttgaatcatgctttcaaaagctaatgtgaagttagacatatttggtttcataatcacagaattttaaaaacaccaggtctgcaatattcagaaatcaccattaacgctctcttgacacatacaatcaatttcactttagatcgctgattttcttaacaactgatttagttatttctgaatactgctagaaaattcaaaatctacaattaat

SEQ ID NO: 621 - DNA, 394 bp, Homo sapiens
  misc_feature 177, 266: n = A,T,C or G
aggtacatcaccctgctgagggacatccaggacaaggtcaccacactctacaaaggcagtcaactacatgacacattccgcttctgcctggtcaccaacttgacgatggactccgtgttggtcactgtcaaggcattgttctcctccaatttggaccccagcctggtggagcaagtntttctagataagaccctgaatgcctcattccattggctgggctccacctaccagttggtggacatccatgtgacagaaatggagtcatnagtttatcaaccaacaagcagctccagcacccagcacttctacctgaatttcaccatcaccaacctaccatattcccaggacaaaagcccagccaggcaccaccaattaccagaggaacaaaaggaat

SEQ ID NO: 622 - DNA, 323 bp, Homo sapiens
  misc_feature 1, 85, 194, 248: n = A,T,C or G
nccgggcaggtactggatgacagcaagtgcacacatcaagagaaagttaccattcagaggtgcagtgagttcccttgtccacagnggaaatctggagactggtcagaggtaagatgggagggctgttatttcccctaggtcatctcttacattctagttctggtgctctctatctgtttaagacaaacccttgngcacctttctcccacccctccctttctcccttgtctcccttgagaaaacaactncagttctctgcctgcaccatgactgtcgatacgcgggggcagttcggcggtcccgcgggtctgtctcttgcttca

SEQ ID NO: 623 - DNA, 322 bp, Homo sapiens
aggtacaagctgtgcactgcaaggtaaccacgtggccagaggcacatccctccctcacatatactgagtggtgtaatgcagtcaccttgtcatctggcaagaggtgatcgatggacacaaactcctcccggaactgcccctccagcgagctcactctgaggttatctgaactcacatagcttgggaaacccagctgggcacgggcaacatttgcgtagtgacccttccagtcatcggagcacatggtcttccacgaagcagctgtgaacacctggagcacggcattctgaccactcacccggacacagcggtacctgcccgg

SEQ ID NO: 624 - DNA, 334 bp, Homo sapiens
  misc_feature 70, 292, 313: n = A,T,C or G
cgggcaggtactttgcaagacacgcctggctacgaacaacatgggacaatgggcagcctcgctgcactgnacagaggaaaggaaagaggccttgcagccactgcctgggaaggagcagcacattctgcattaaccaggcatgcctcactcactgcaatccccaaacaagcccaactctccgtgttgattattcttaccatactccaccagaaagcagcatgattttctgtcctcaaatacttcagattccaagagaactgcaccttctagagtctctactgataacctcagncacttacccacttgaagcatnagcacacacttaaaaaggaaa

SEQ ID NO: 625 - DNA, 505 bp, Homo sapiens
ttagggcgaattggagctccccgcggtggcggccgaggtacatattcttccaacctttcttctgtgcataatcatctaggtgtggtgcttacattttcttttggcagtgttatcttagtatcttccagcatggttttctcacctgatactgtaaccatacttccatatcctcaaatgtgttgttttctaaaataactttttttttctttttttagagacggagtctcacttggccaggtgcggtggttcacgcctgtaatcccagcactttgggaggccgaggcgggtggatcacgaggtcaggagttcgatgaaaccccgtctctactaaaaatacaaaaattagccaggtgtggtggcgcacgcctgtgatcccagctactcgggaggctgacgcaggagaatctcttgaacttgggaggtggaggtcgcagtgagccgtgatcgcgccgctgcactgcagcctgggtgacagagtgagactctgtctcaaaaaaaaaaaaaa

SEQ ID NO: 626 - DNA, 493 bp, Homo sapiens
  misc_feature 477: n = A,T,C or G
aggtacgcgggacatactccctaggtgtctgtgaggatggtggaggggattttctccatgccgggaggcttcctggagcaggtgctgcctctcgtgactcttgaaagatgcttgtgaataaagcatactgggagctgagctgctgtttagtaattaaaaatcctttccattgtttagagctcagcacctttgtgcattcatattacgcattcattttcgtatcattgttgaatttctcacttctgctactgcaatgtatgtctacagctgacaagtcttccttgggagccctacgtagctcttttttttcttttctttctttttttttttgagacggaatcttgctctgtcacccaggctggagtgcagtggcgcaatctcggctcactgtaagctccacctcccgggttcacgccattctcctgcctcagcctcttgagtagctgggactacagggtgcccaccaccacgcctggntacttttttttggtat

SEQ ID NO: 627 - DNA, 483 bp, Homo sapiens
tacttagggcgaattggagctccccgcggtggcggccgaggtacactctgccatgaaggttctggggtggagagggaagcaatgtatatcctacccatggtgattggtccgatggaagtcacatcctgatgggaaaaaaggactgagccagagtggactgtctaaaccaaaatgggataaacaagcatggcatggagccaaaacaaatggctaagtcagaggtcctaatgcagaaggctggacaactaggatggtggggaaagacatgagcttgaaggacttcccaagataaagcagaactaaccagaagagcctgttatagattcatattgggggagtttggggggtttgtgcagggtgcatcaaaaagcactcgcatggaataaacatatcttgcacaggaacatatgacaggtaattgaatagtttgatttgaactatgtaaagacatgatcctgatggtagaaggatggtacctgcccg

SEQ ID NO: 628 - DNA, 379 bp, Homo sapiens
  misc_feature 192, 224, 284: n = A,T,C or G
ttagggcgaattggagctccccgcggtggcggccgaggtactttttttttttttttttttttgggaccgagtctcactctgtcgccaggctagagtgccatggcgcaatcttggttcactgcaacctccacctgctgggttcaagcgattctcctgcctcagcctcctgagtagctgggattacaggccctnaccaccacgcccagctaatttttgtatttagnaaagatggggtttcactgtgttggccaggctggtctcgatcttttgaccttgaaactttnacataaactttcacatttccatgacaaagttttagcagtaacttccaaattggtcttattcaactccaacattaaactttgtatgtacctgcccg

SEQ ID NO: 629 - DNA, 520 bp, Homo sapiens
  misc_feature 3, 509: n = A,T,C or G
ctnctatagggcgaattggagctccccgcggtggcggccgcccgggcaggtacatgatccaggatgtgatgggatcttagggcttggctggaaggtttctccagtcagccatctagcagagctgcagatctgggctgggctgttggctaaagtgctcttcacagacacctcattcggctcttccttcagcttcttcacttatttcttactcagtcactactcagctccttgtccatgtgtccttgaagccatcctaggtcttattctgattctgaattcttcagtcacccataagcttctccttaccccgggagtcagtgggtgtgtgttcccaggtggacttaaccattcttctcctttatgatcctttcccttgggtggacaagtgtgatttggttgtaaggccatttttcaagttgcctatacattgataaaagaaatcccactaacggaagtagactgcatgccaaatttcagtgtctttctccaggggccaaggttggacccanaagtgcatggg

SEQ ID NO: 630 - DNA, 419 bp, Homo sapiens
  misc_feature 80, 85, 184, 238: n = A,T,C or G
ccccgcggtggcggccgcccgggcaggtacattattgcttcctgggagagctgaccatgagtcaattggcccacaataanttatnaaatgaaaaccggccatcatctgcatcttatgagtgcacgtcatcagagatgtccactccagttacaagaaagtcctgagggctttcttggagcctgangggcgctggaggtgagacctggaggtgagcaggagttaactaggatgagggacnggcgcagcatacaggaaaagctgcctgggggagaaaggaccaacagcaaagactgagaaaaaaatgctgttgtgaccagggttcagagcgggcatggaggactgagggttcagagcgggcatggaggactgagggttcagagcgggcatggaggactgagggttcagagcgggcatggagg

SEQ ID NO: 631 - DNA, 566 bp, Homo sapiens
  misc_feature 57, 224, 329, 374, 391, 488, 491, 496, 527: n = A,T,C or G
ccgggcagggtactaaggacaaaaagacatttattctctttgacccttgctgccagnacagaaaatgacttcacccaaggacacagcacttgcgggtggccttctccacctccagctattgcttggtttcaggtgaccactccctttctcttctcaggcctatgggtggtaacaagctcccatccactgctagtcttagacatctttactttccttgattgatncccttgactctgcccacatcttttaaaatatcccatattaaactttttacacccctttgaatgtgtcctgcttcctgctgggaccatgactagtctcttctagtnggaatccatatcaccttctgtgatgtagtctccaagtcaggcagnctcatttcaactacagnctttctttatgcttctctttttcctttctggactcttacctttcttttatttcttactcagcaacagtgtctgcccattaaaatgcacctttgcggnggnggttngggtatctttatctctcttatttcttccttnctggtgcattttcactggcattgcatgggaattttggtt

SEQ ID NO: 632 - DNA, 524 bp, Homo sapiens
ctacttagggcgaattggagctccccgcggtggcggccgaggtacgcgggacatactccctaggtgtctgtgaggatggtggaggggattttctccatgccgggaggcttcctggagcaggtgctgcctctcgtgactcttgaaagatgcttgtgaataaagcatactgggagctgagctgctgtttagtaattaaaaatcctttccattgtttagagctcagcacctttgtgcattcatattacgcattcattttcgtatcattgttgaatttctcacttctgctactgcaatgtatgtctacagctgacaagtcttccttgggagccctacgtagctcttttttttcttttctttctttttttttttgagacggaatcttgctctgtcacccaggctggagtgcagtggcgcaatctcggctcactgtaagctccacctcccgggttcacgccattctcctgcctcagcctcttgagtagctgggactacaggtgcccaccaccacccctggctactttttt

SEQ ID NO: 633 - DNA, 433 bp, Homo sapiens
  misc_feature 52, 61, 65: n = A,T,C or G
gccgaggtacttccctgagcagtcgaagtggatgcccagaccaatggccagngctaatatncaangcaatgatcccaatgacgatgattggaaaaaacttcaatggcagcagtgacaggatctgtgcagcaacagcatctgcatctggtgcaacaggacttattttcaaatcatcaaggccaaaaagcgatcggaatgagaagggggcttcaacagcaggcggatcattttcccccatggtgactatttcaggacctctgacatccggctccgcctccacctctacctcataattcccgagtcccaaaaatgtagatggcaccacggaagagatagtaggccacagtgttactggcttcccataaacacagccctttcctggctcacacgggcatgacctaattaagaacccccgcgtacctgcccgggcggc

SEQ ID NO: 634 - DNA, 537 bp, Homo sapiens
ctacttagggcgaattggagctccccgcggtggcggccgcccgggcaggtacaaaagtgaaatccctaagtcaaactgtggcttataagcagaaatcctggttagtatttcaaagttctcttagcgttttctcctgcgacttaaaagacttaaaaacgtgaaaagacatggacgtaagactccaaacaaaaatacatttctttgaaactaaatagctcttaagtaagaaaaatttctatagatcttcaaatcatcccctaagcaaaatattctctaattaagtatttctgtatttccatctatgttcttcccaggcttggggctgttgatcagacctatttttaggggtaagtttctaggggtcatagaagatacagattttgacctgcttaatgtcaagaggttgcacggttgatttgtccagttgtgaattctatgaatgaagctttttgcttaaataaaacgatattcccctctggctgctgtgagcaccgggagacttgtttcggcagtgcctgggtgctggggcagggcccg

SEQ ID NO: 635 - DNA, 527 bp, Homo sapiens
  misc_feature 486: n = A,T,C or G
tgggcgaattggagctccccgcggtggcggccgaggtacgggagtaaaataaaagggtcggattttgtaggattctaaggaagaggcagtgtgctctgtccacaggctgcaaggtgagaacctaaaagaatgagatatattcccattttggaatggcaatcaaaaagaggatctctctgtcaagtctttacattaatgctgagtaacaatctcaaaagcctgcccattcccctttagacacatgtggcaaaagcagaactgaaggaatggccaaggggcttgaacaagtagagagaccgacagtctttcaaatttcagggaaccccagatacattttgggggagccactgttttcccattttcctgaaaagttcttgcaggtataagaaataggaatagaaattgaataggttctggagccagggctacaaaggccccagctctgatctgttagactgaaaaccacacatcagatgaaattatatncacaaaaaggagagtccttaaaaacagccatttcggtccct

SEQ ID NO: 636 - DNA, 347 bp, Homo sapiens
aagagcacgtatagcatgggggaaagaacctaaatgtctctctgtcctgtgagctggtgaaaaacccagcatgagaacgcagtgtcaggtgtgggactccttctgcccctgcagtgggtgttacgggcggtgtgccctggcgagcaagctttgattcttggttctttgagctcgtttcagaggctgagtccccacatcagctttagttcttggacttccctgtattaagcaagaattaggagaatggctgtccctgcaggcgcctcccgtaaatcctgagctctctggcgcaatctgaaacttctcttctgttttctttggctgtatcagccgaaccaggagaggcc

SEQ ID NO: 637 - DNA, 376 bp, Homo sapiens
  misc_feature 31, 338: n = A,T,C or G
ccgggcaggtaccaggagagatctgagacanggtatgaagtaaaagatttaagattggaagtggagagtgtcatggaccagtgcctttcggatgggtgacttctggaattcttgttaggcacagcggaggttggtcctgtgggaaaggaagaatatttccggggtgaggagacttcggggtgtgggccgggtgcctttttaaatttggaatggtgtatacaatagggaaaggatgttaactttgcagcagcggggatggtgaatataacctgatagggacccttccattttgttggaaaggggaggaggggtgtgctacccagacccagtctcctggntgtaagggtaagaaagtgaattgggaagaatcctcagg

SEQ ID NO: 638 - DNA, 395 bp, Homo sapiens
ccgggcaggtacctggactcctaagcctcagggatttactgaaacaccattctattttataataatccttaaccaagaattttaaggatcttaaatttttctgtggttctattgttatctgatatatagatgatctgctgccatatcctaaagagcagatgaggccgggtgtagtggctcacgcctgtaatcccagcactttgggaggcagacgaaggtggatcacctaaggtcaggagtttgagaccagcctggccaacatggtgaaaccccatctctactaaaaatacaaaaattagctgggtgtggtggtgggcacctgtaatcccagctactaggaaggatgaggcaggagaatcacttgaacccaggaggcggaggttgcagtgagctga

SEQ ID NO: 639 - DNA, 386 bp, Homo sapiens
  misc_feature 32, 35, 149: n = A,T,C or G
aggtaccacttaacaagggttctcagctgtgnggncactggaccactgggatatgctgagctattgcttaaacactgacttaaataaaacaaatattttaaataatgagaatgctactgtaattagaaggcaatcatttcaaagtctanatggaggccaggggcggtggctcatgcctgtaatcccagcactttgggaggccgaggtgggtggatcacatgaggtcaggagtttgagaccagcctggccagtatggtgaaactccatctctactaaaaatacaaaaattagccaggcgtggtggtgtgcacctgtaatccactgaggcaggagaatcacttgaacccgggaagtggaggttacagttgagctgagatagcaccact

SEQ ID NO: 640 - DNA, 394 bp, Homo sapiens
aggtacaaaggttcagtggtgagaagagggagcaaggcctttggaataatgaactccagttgttcctcataggtgcagcagaaatagcgagaggtcaggattatggagattggtaaggcgagatcatccaagggccttttgcttggtaagccattttactttaatcttgagtgccatagggattcattgacggattgatacagggaaatgaaatgattttttttttttttggttgggggagacaagagtcttgctctgttgcccaggctggagtgcagtggcacaacgtcggttcactgcagtgtctgcctcccaggttcaagcaattctcatgcctcagcctaccttgtagctgggattacaggtgcacaccaccacacccagctatttttta

SEQ ID NO: 641 - DNA, 397 bp, Homo sapiens
  misc_feature 35: n = A,T,C or G
aggtacaaaggttcagtggtgagaagagggagcanggcctttggaataatgaactccagttgttcctcataggtgcagcagaaatagcgagaggtcaggattatggagattggtaaggcgagatcatccaagggccttttgcttggtaagccattttactttaatcttgagtgccatagggattcattgacggattgatacagggaaatgaaatgattttttttttttttggttgggggagacaagagtcttgctctgttgcccaggctggagtgcagtggcacaacgtcggttcactgcagtgtctgcctcccaggttcaagcaattctcatgcctcagcctaccttgtagctgggattacaggtgcacaccaccacacccagctattttttatat

SEQ ID NO: 642 - DNA, 108 bp, Homo sapiens
  misc_feature 25, 30, 33, 39: n = A,T,C or G
aggtacctcgtttctgaggatcaanacctnagngaccgngtgtgtgtgtgtgtatttgtgtgtgtgtgagtcctatttgggccccgcctttcagccctgtcttgcagc

SEQ ID NO: 643 - DNA, 260 bp, Homo sapiens
aggtactttcaatttctgtgggataaactccagctccagtttcagaacccactctaattggtttaagccaggaaagggagagggacatgttgctgggaggcccccatctggggcctgagcttggaatcaaatcagaggaaggcaacacatgtaaagtgctgagagtggaaggatgaagagagctagggctttgtgccatcactcgtgctctggacataagtggagctgggattcagcattacctgcccctgtacctgccc

SEQ ID NO: 644 - DNA, 366 bp, Homo sapiens
cgggcaggtactagtccaggtgtgagatgaagggggcctggatgaagcagagggtgagagacaaggaagattctgaggaccttgtggctagatgtgggggttaagtcaggttcaactcctaggctggatgaattggcagatggcacatgaactacaagagaatggaaggcagaacctattttgtgggcaaaaaataaattacattttgcaatactgaattgaggggcttcttggaagtccaggtgtagatgtcttacaaaaatagaatattctgggctgggtgcagtggctcacccctgtaatcccagcactttgggaggccaaggtagggggatcacctgaggtcaggagttcgagaccagcctg

SEQ ID NO: 645 - DNA, 331 bp, Homo sapiens
  misc_feature 3: n = A,T,C or G
ggncaccacactctacaaaggcagtcaactacatgacacattccgcttctgcctggtcaccaacttgacgatggactccgtgttggtcactgtcaaggcattgttctcctccaatttggaccccagcctggtggagcaagtctttctagataagaccctgaatgcctcattccattggctgggctccacctaccagttggtggacatccatgtgacagaaatggagtcatcagtttatcaaccaacaagcagctccagcacccagcacttctacctgaatttcaccatcaccaacctaccatattcccaggacaaagcccagccaggcacc

SEQ ID NO: 646 - DNA, 356 bp, Homo sapiens
ccgggcaggtacaggggcttgggggcttggccaggctcttctccatccatgccacggggctgacagccacagatctggaagctcaggcctaggagtgcaggctccgttaagccctgtgtccaacatcctgactcctaggggtgcccaagatttgagtggccactttcacctctggaggaagtaatacctaaggcgctgatagaaatagaacttccgctgccaggcaaggtggctcacacctgtaatcctagcactttgggcagcctcaacgcaggtggatcacttgaggtcaggagttcgagactagcctggcccaacatggtgaaaccctgtctctactaaaaatacaaaaatta

SEQ ID NO: 647 - DNA, 368 bp, Homo sapiens
  misc_feature 7, 28, 29, 33, 34, 72, 179, 187, 190, 193, 200, 303, 315: n = A,T,C or G
aggtacntgtttcagtcactgggctganntggnncacagcacaaccttcatagccactgtatgaagaagtanaagacccagactcttgctttatgttggtatcaaaagtcatttcagagtcaggctgatcactcccaagtaacccactgacttctttactccagctctctgtctgctgntgactcanaangtnacacttnattttctccattgctgatataatcatatctgcaacataaaagtgggcattttccttttctacatcaacaggcagcacaaatacctctggtgagaaggaattcnaagaaatggttnttctactgacttgaacagcaccttcatcagcagcagatgtcagatgggaaggc

SEQ ID NO: 648 - DNA, 363 bp, Homo sapiens
ccgggcaggtaccactagattgcctccctgtgcctgggcaatttcagaaaatggtggttttcctttcgtttccatcttttttaagacttaaaaagtatctgctctcattttctcctagcggcctccatgccttgactcaaaaaatgctgtcttagttgacagccttgaaatgagtatgaccctagctctagttgggtggaaatcacctcgcatagaaatagacctggagggccgggcacggtggctcactcctataatcccagcactttgggaggcccaggtgggtggatcccgaggtcaggagttcaagaccagcctggccaacatggtgaaaccccgtctctactaaaaaaaaaaaaaaaa

SEQ ID NO: 649 - DNA, 353 bp, Homo sapiens
  misc_feature 50, 93, 101, 172, 179, 224, 227, 228, 232, 234, 235, 249,254, 255, 261, 262, 273, 294, 298, 302, 305, 318, 319, 325,332: n = A,T,C or G
aggtactagtatgaaggaaataatatccacacactgatactggtccagcngaaaccaagaccgctcctggtgcattaacttttaacagagcanggactcanttctctgaaaatagtgccataaaacatgtgctcccagaagaataaatatttggcttgctagaatttctgcngcttttntgtaaaagttgattattcggtattaaagaggagtatcaaatatgngtnnatgnannaaaaacttggaaanagtannggaccnnggcttatctcntcattttcattctgcacactncaantcantcnttttcccatcttnnttcccntctctgnaatttatcaccctccccctct

SEQ ID NO: 650 - DNA, 392 bp, Homo sapiens
  misc_feature 195, 220, 243, 246, 250, 254, 268, 270, 280, 291, 304, 327,337: n = A,T,C or G
ggcgatggactccaccgcggtggcggccgaggtacttaccacagagaaaagccaataatcacaatatatgttgtcttactgacccataacccattttctgagggtggcaggcattgtgcccccactgtgaggtgggactatatacatatacaaaggaggtgtttaactgggtggcatgtctcagggagatgtaangacttacctgcatatcctggcagtnttgaaatgatagtgaactgttcntanggcntccncttgatggcatagncnaaacaccagnattttcttggnagaatgattcggnaaatgctacatagaagaaatggntggtgagctnttactgtgactgtgcccatagtaagtcatcctggaccctctgaatcttatcccac

SEQ ID NO: 651 - DNA, 836 bp, Homo sapiens
  misc_feature 163, 203, 217, 245, 261, 302, 356, 405, 437, 450, 487, 508,511, 516, 522, 545, 569, 572, 605, 606, 611, 622, 624, 627,646, 647, 653, 655, 667, 668, 681, 709, 727, 740, 746, 749,750, 754, 756, 763, 767, 768, 779, 781, 782, 783, 790: n = A,T,C or G
  misc_feature 805, 808, 815, 822, 835: n = A,T,C or G
gcgaattggagctccccgcggtggcggccgaggtactttgtttttttttttttttttttttttttatgatattcatctatgaaccaatttaattttaatttaaaaatgacttctgatctggcagatgatttgggttctagaaagaaattgtgccaggcatggnggctcatgcctgtaatcccagcactttgggaggctgaggngggagaaacctgtnagctcaggaattggagaccaaccctggnaacgtaacaagacttnttttttacaatattaataataaaaaaaggccaggtgccggnggttcacacctgtaatcccagcactttgggaggccaccagacaggtggatcatnaggtcaggagttcgagaccagcctggccaacgtggggaaaccctgcctntactaaaaacacaaaaattatctttgctttgntggcgggaggctntaatccagcttctagggaggttgaggcaggaaaatcncttgaatcttgaaagcaaaanttncaatnagcccnggtcacaccatttgccttccaanctgggcaacaagagccaaattttnttnaaaaaaaaaaaaaaagggccggccttgggggtnntcccnggaaccccacncnttntgaggccccaccggtggtnntagggncngagttcaaaacnnccttccacttttngaacccgttttttaaattccaaaaattnctggctggataaatccgnagccccttcttgngggtgnggnnggantntttcccncaanngggggtgggtnannnccgaaancccttatttcccctntgnaaagggncttttcnaaaaaaaaaaaana

SEQ ID NO: 652 - DNA, 753 bp, Homo sapiens
  misc_feature 210, 233, 238, 247, 253, 259, 266, 274, 315, 327, 335, 337,362, 366, 375, 424, 504, 509, 601, 620, 639, 665, 675, 683,687, 692, 694, 700, 728, 729, 731, 741: n = A,T,C or G
cccgcggtggcggcccgcccgggcaggtacaggtaaggcagaaggaaggaagggcaaagaaacaattccagggccctggtttctgggatgacaggcttcccaacactcatgccaggactattttccacctcggttcactatgggttttttttctttttttttaatataatgaatttttaaaatgtgtgtttgttgcccagattattccanaaagagttgaagggaggaaaggngtgcntggggtgcntggganttttanccctctntccacccngatttctaagttggggggggcatccaaacagcttcacccangtgcccaggctnttttttgntntccaaagccaacccttccagggcanggangggtgaagnttaggagggcaaaggttagcctggaggctgcaattaacaagaatcaaantggggtttaaggattctcacacccagtttgctaatttcagctggtccttgtagaggtgacacctagtaggacaacatggnttttngggcagggctggggtgctggtctctgctttctagggtagaaaggaatcatacattgaaaatgcttaaatcgatggaatgatttatgttcctnatctttcatctttttctgngtggctggttttctgccanccttacttggacaagcaccattctanaccttttctntaggcatntccnagaangngaagtngaaaggaagaaaaaaaacttattttttnngnccaaaaattnggcaaaaaaaaa

SEQ ID NO: 653 - DNA, 567 bp, Homo sapiens
  misc_feature 120, 121, 255, 264, 267, 272, 276, 280, 306, 307, 315, 325,370, 376, 540: n = A,T,C or G
tccaccgcggtggcggcccgaggtacgcgggggcccttctatctcaggatgtttgcacttgctatttccttttcttaaaggctcatccctagatatttgcatgactggcttcctaatttnntgtaagcttttgctgagaagttactttaccaactgtcattgaggttttccctgaacatcttaggtaagataacaagctcccctccttttctttcctcacttcttggtattccttatctcgtaactttttttttnggggggatnganacttncgtnttgnttttgttggccaagcttggagtgcanngggtgcantcttggcttnactgaaacctccacctcccgggtttaaagcgattcttctgccttnagcctnccgagtagctgggactacgggcaagtgccaccacacccagctaattttttgtatttttaagtagaggtggggttcactgtgttaggatggtctctatctcctgaccttttgggccacccacctcggcctccaaagtgctgggattataggtgtgagccagtgcncccggcctctcataattttcttaaatt

SEQ ID NO: 654 - DNA, 486 bp, Homo sapiens
  misc_feature 2, 33, 123, 124, 129, 130, 131, 253, 255, 284, 295, 319,338, 352, 455, 469: n = A,T,C or G
cnaattggagctccccgcggtggcggtcagttngtcttagagatacccatgaggtcacctactcaaaatggggctcagagtagccttgtcccattcttgtccagtgggcgcagctacagtctnnctggnnnggagtgactggaggctgtccccacgtcccacttcagtgaggcattcatgtgcacccagcacactttctagctttatttgcctggaggggaagattctccagaaccttgttaagatgcacagngngggcccttggactggcaagtgtggccttnggcagtccctnggagcttgttaggaatgcaaaatnttaagcttcttcctactgnatctaaaggttgantttaaacaagatccagcttgtttcgtttcacatgaaagttgaggcacactgctctagaaagttcttttatctttactggcccaccaaagtaatcaaactttgngaagtaccctcggnccgctctagaactagtg

SEQ ID NO: 655 - DNA, 700 bp, Homo sapiens
  misc_feature 120, 121, 252, 269, 292, 307, 309, 318, 345, 393, 440, 459,553, 660: n = A,T,C or G
gctccccgcggtggcggccgccgggcaggtacgcgggatatgaagtgaggttaagtcagatggaatggcagtggactactgtttttggttaataaatcgagatacccttaagagttgtgnnctgaacatactgtctttctttccccagttccatgtcacagcacctgcctaataataggtgctcgaaaaacatctgttgaatgaaatgaattcttttgtttgcagtagggcaaagaagggtagagaggaacnactttgccaagctgatntgtaaatgttgcaaaagggtttnggccagaaaattccnanaacccattngagaggcaatacatgttaagggacctntaagatgtttcacaaccttggaaataattaaaaagaactttctactgntttacttatttcccactcctggctgcccctcttgggtggactgcctnctgttggagggaatactgngtgagacacatcttttagtaaaacagaaatgtgaaaccaacttgcagaaatcacaagcacactgttaccaaataggtcttgactggctcccttnctgggggacaaatgttttgataatgtctgtcagtagattcagttccctatttctttttaagacttgatatttaagaatactggttcttttttggccagcatcgcaangaagtttttctttaacttttgggccaaaaaaaaaaaaaaa

SEQ ID NO: 656 - DNA, 538 bp, Homo sapiens
  misc_feature 258, 265, 304, 436, 452: n = A,T,C or G
cgaattggagctccccgcggtggcggcccgaggtacaggatgttttcctaaattttaagtcaaattcttccttgacacatacctatttttattttgttttggttctcatctctgtgaacagagcaaagcatgcaaccattgtaacactttcatttgtttttataaactcaagttctagagttggatttcatgatttgcataactcggcatagtgtaagtgcttgtagttttaaacagaaaaagagggaagaaatgacnattccanaaaaaaagatcaaatcttatgactgtaatttattaaggnatccaatggaattctttccctttttctttcttttttttttttttaaagagacaagctcaagttccataagctgggaatgcagtatcatgatccatagttcacagcagccttcaactccctggggttcaaggngatcctaagaacttgngggcctcaagcagtcctcctgcctcagcctgccaaagtgctggggattacaaagcatgagccactgctcctaattcttaagagata

SEQ ID NO: 657 - DNA, 541 bp, Homo sapiens
  misc_feature 258, 266, 267, 304: n = A,T,C or G
gaattggagctccccgcggtggcggccgggcgcggtggctcatgcctgtggtcccagaactttgggaagccgaggcgggcggatcacgaggtcaggagatcaggaccatcctggctaacacggtgaagccccgtctctactgaaaatggaaaaaattggccggaccgtggtggcgggcgcctgtggtcccaggtggctggatacacgggtgtgcaccaccatactggctgattcttgtatttttggtagagatggggntttggccnngttggtccagctgatcttgaactcctgcacctgcctnggccttccaaagtgttgggattaccggtgtgagacactggcccctggctatattttactatttggaaatcacaatgcatcttaaaattgatggcttcttgcaaccactttcaaccaggtgcctgtcatgatttaagtgctagcatcaaggcaggttagttatgaagaaatagagtgtgtgtttatatactcacacagttagaaatcgacccttttaaaaattatttctttttgaaaa

SEQ ID NO: 658 - DNA, 706 bp, Homo sapiens
  misc_feature 30, 255, 262, 273, 279, 309, 313, 324, 513, 542, 567, 586,643, 672, 683: n = A,T,C or G
agctccccgcggtggcggcccgcccgggcnggtaccgcgggatatgaagtgaggttaagtcagatggaatggcagtggactactgtttttggttaataaatcgagatacccttaagagttgtgttctgaacatactgtctttctttccccagttccatgtcacagcacctgcctaataataggtgctcgaaaaacatctgttgaatgaaatgaattcttttgtttgcagtagggcaaagaagggtagagagaaancaacctngcacaagctgnttgttnaatgttgcaaaaggtttaggccaagaaaanttcnaaaacccattngaaaagcatacatgtttagtggaaccttgaaaatgttttcacaaccttgggaaataatttaaaagtaacttctactggttttacttatttcccactcctggctgcccctcttggggtgggactgcctcctgttgggaggggaatactgtgtgaggacacatcttttagtaaaacagaaatgtgaaaccnactttgcagaaatcacaagcacactgttnccaattagcttgactggcttccttnctggggggacaaatgtttngataatgtctgtcagtagattcagttcccctatttctttttaagactgatatttaanaatactgtttcttttttgccacctcgcantggaagttttntttacttttggccaaaaaaaaaa

SEQ ID NO: 659 - DNA, 463 bp, Homo sapiens
  misc_feature 318, 328, 337, 352, 359, 372, 378, 386, 396, 401, 402, 403,407, 410, 411, 412, 418, 428, 430, 436, 438: n = A,T,C or G
ccgcggtggcggccgaggtactggtaaagggatagtcacatagatcaatgaaaaagaacagagaatctgtgaacagaccatgcaaatatgcctgcctggtttttcacaacagtgcaaaagcaactcagccaacaaaagacagcttttggccaggccgcagtggctcactcctgtaatcccagcactttgggaggcccgaggcgggtggatcaacgaggtcaggagatcaaagaccatcctggctaatatgataaaacccccgtctctactaaaaaaacacacaccccaaattgcccggtgtggtggcaggtgcctttngtcccaactnctttggganggttaagcaaggganaatggcnttgaacccggaanggaaanctttgccntggggcccanatttnnncccnttnnncttcanctttgggtgnanaaaaancnggacttggtttcaaaaaaaaaaaaa

SEQ ID NO: 660 - DNA, 179 bp, Homo sapiens
  misc_feature 84: n = A,T,C or G
tagggcgaattggagctccccgcggtggcggccgaggtacctttgaaggtgagctttgaagatgcaacatgaatttgacagtanagatgtagggaggaaggaaggcaggacaggtcagacagaagtgcaggaacagcccaggcctttgcagccttcccacaccccctacaagacctgcc

SEQ ID NO: 661 - DNA, 199 bp, Homo sapiens
  misc_feature 22, 46: n = A,T,C or G
acttagggcgaattggagctcnccgcggtggcggccgcccgggcanggtacgcggggacttgacttaaactctggggcccgggaggccgccggttttctccccgcttgccggggtggtcctcttccctttgtcggaccaaagaagtaaacactgtgtggagagggactgacgtgtttggagggaaatgggaatgtacct

SEQ ID NO: 662 - DNA, 411 bp, Homo sapiens
aggtactccaagctctgagaccacctcttctgcaaagccttcctgattctgcaaagaacaggtaggcatttcatccttgggacctcacagcaattcaggacacatttgtgtcccagccctgcttggcttggctgtctccatgaatatacactttgtaacttctgcaccaggcatcataccaagcacacagtaggcactcctgtgttttttgaataagtgactatatcatcaccacatttcaaatgcggaatatatgagctactagaaaagacataagggtagattttacatctttattgtatcctagatatacaagtctattactgccttttcccatgttctgtcaacatagcataaagaatgtggatttacctgttagaaattgaataagcggccgctctagaactagtg

SEQ ID NO: 663 - DNA, 615 bp, Homo sapiens
  misc_feature 62, 118, 234, 362, 383, 406, 417, 418, 447, 449, 460, 462,466, 475, 485, 519, 522, 523, 526, 539, 540, 543, 545, 559,563, 572, 574, 590, 591, 594, 595, 603: n = A,T,C or G
acttagggcgaattggagctccccgcggtggcggccgaggtacaagttacacggcaattttnttaataactccctttactatgtcagacaagctatgtcaagcgtcttctgtatcctntacggggaaaaaaaaaaagttaaccagagccaaatgcttgctttcaaagataacttgccatcctgaaaatataatttttacaattcaataacacctttttgaaaaataaaataatntggcaaaaatgcccatgcattaacaaaccattttttcagtttaatctctttatatgttcaactttgatgtattttaaataaacaaagcaaaattcaactaaaaatacaatctggattccatagccaanggttttatttacaattcctantaggaaggctttatttttagctntcaaatggggnnggacctataagggaaatttaaaccgtttncnttgagtttttntntttnaaggggaangggggagganttcccaaaatggggaaaggggaaaaaaagggggnaannccnttttggccttttnnggnanttttaaaaaaaaantttncccccccgngncccccaaaaaaaaaannaanntttttttnaaaaaaaaaaaa

SEQ ID NO: 664 - DNA, 326 bp, Homo sapiens
cttagggcgaattggagctccccgcggtggcggccgggcaggtactgctggttttctggtgttcctacaagctgcctaggtctcttttgttctcagcagttcccaggcatgcaaaagttgccagttctgtcagcattccaagtcaggtaagacagaaagccatctcttaggcagtccccagaaaagctgaaaggttggatatactttctactcttctcttttcttcatgagagaaaggccatgtgggcattttctcccaataacactgagttctgttgtcttctgtcggctgtgctgcaggttctcaggtgctgcagttagctgct

SEQ ID NO: 665 - DNA, 405 bp, Homo sapiens
cttagggcgaattggagctccccgcggtggcggtaagatttcctgaagggatccatagccaaaacatgtttgaaggccactgggctcgctaacttctaaaagcaccccagttctagcagacatcctaaggaacattcccaggaaaattccagcctagaacctcctggggtctgacaaccttagagaacagtgctggctttgaatgggcttgggggcagcctcgaaaccctctttccagtctccatgcaggcaggggagctccttaagcaacacataggacatttctgggagaaatgggatccccaacacaatgaacactatagattttaatggtctatatggttaaatacacaaggcccctcatttccaaccccgcctgttcatctgattcatctgtacctcggc

SEQ ID NO: 666 - DNA, 613 bp, Homo sapiens
  misc_feature 493, 528, 564, 594: n = A,T,C or G
gggcgaattggagctccccgcggtggcggccgaggtacttcagacattcccccagtggctgaagtggcatatgaattatgaagttggatcatttggaatgaatgtaagagaattgccaagggctcctcctactccagagaggaaacctcatccagggccatgaagccacttcctcaccatctgtgtgctgcttaagctaatgctgcgggaaccatggttccttgggaggaatcaagctgactcttggcatgagattcctgccttcctagggttgagagcggcactgccatggcttctctggacgacccaggggaagtgagggagggcttcctctgccctctgtgcctgaaggatctgcagtctttctatcagcttcactcacattacgaggaagaacactcaggggaaggaccgtgatgtcaaagggcaaattaaaagtaagaggcgaggaccttgcctaccccctgcttgtcgttgagagctttaactcacnggatagttcttatcacttttggtggtggcacaggnatatgataattagtagtagccaacagatgactagtngttgtcatgtgccaagcgttttaaaagttncctgttattaatttcatta

SEQ ID NO: 667 - DNA, 351 bp, Homo sapiens
ttagggcgaattggagctccccgcggtggcggccgcccgggcaggtacgcgggggaagagaaagcgtgagggctgggcctgcggcgggctttagggagtggtccctggctgtggatagatctgctgatgagtccaggccccggtccattctcctcgcgctgcaaggatgctcctgggatttcggagaggccgcaggagtcatttcaaacacatcatccatggccttttacctgcagccagcgttgctccgaaggcagctgtgccacgcacacctcctccccgcagccccaacccatctccagagagaccaagatctgctctggcagcagccattctggcgacaacattgac

SEQ ID NO: 668 - DNA, 399 bp, Homo sapiens
agggcgaattggagctccccgcggtggcggccgaggtactggataggagagggaggagggctggcagctgagtagccagaatcaggcagacggtggtagcagaagtcagaggccgagggaatcagggaaaggagttcaaccatggaggaccttgctggccaggttagagactgtggacttttgtctgggtgagacaggaagtcactggagggctgtgacagagctctgaggctgtgaggcactgctctgtcagtgccatgagtggggaaaacaggagcttgctgcactggtagagaccacagataatgatgacttggacagagcagctgggagagaactagttcaataaccctaacacgcctctccattctgcattttccctaaaaatgtacctgcccg

SEQ ID NO: 669 - DNA, 570 bp, Homo sapiens
ccgcggtggcggccgaggtacctgccctatcttgctgaatgttttataatctaataaaactcagataaagacccagatgtcacacctgaacaggaaaagctgaaaggaaaagataattaaaatataaatcaacagaatcaagattttgaaaagacctagaaaacttgaaggattactgaagccaagcaagaggaaatgataggattaaaagtaaaatcttgtgtttagattttttttttttttttcaaacggagtctcgctctgtcaccaggctggagtgcaatggcgcaatcttggctcactgcaatctccatctccgggctcaagcaatcctcccacctcagcctccctagtagctgggaccacaggcatgcgccacacgcctggataatttaaaatatatacatatttttgtagagacagggtgctgctttattgcccaggctagtctcaaactcctggcttcaaggcatcctcctgccccagctttccaaagtgctgggattactggtgtgagccactgtgccgggacataaatagttatgctgtattggttaaggaataatgaca

SEQ ID NO: 670 - DNA, 357 bp, Homo sapiens
ccgcggtggcggccgcccgggcaggtacgcggggaggtcatgcccgtgtgagccaggaaagggctgtgtttatgggaagccagtaacactgtggcctactatctcttccgtggtgccatctacatttttgggactcgggaattatgaggtagaggtggaggcggagccggatgtcagaggtcctgaaatagtcaccatgggggaaaatgatccgcctgctgttgaagcccccttctcattccgatcgctttttggccttgatgatttgaaaataagtcctgttgcaccagatgcagatgctgttgctgcacagatcctgtcactgctgccattgaagttttttccaatcatcgtcat

SEQ ID NO: 671 - DNA, 457 bp, Homo sapiens
ccgcggtggcggccgaggtacaaggaaggccttaaagactgccccactctccttgtttcccatcccctgtcccttctacttctcacattcaccactatgtgccctaggacaaaatcaaatgtggaaacatttggtcatgtctactttgtccaagggtgggagttcttgaggaattcaagtgggaactagaacaactttctaccctttccttcccttccttcctccccacctctacctagaagcccatcaatcactttgaacttcttggagaaaaaaggaaacaaaagaaaaagaaaaggagaggctgggtgcggtggctcatgcctataatcccagcacattgggaggccaaggtgggtggatcacttgaggtcaggagtcgagaccagcctggccaaaatggtgaaaacatgtctctactaaaaatacaaaaattcgctgggtgtggtggtgggtg

SEQ ID NO: 672 - DNA, 302 bp, Homo sapiens
  misc_feature 296: n = A,T,C or G
ctatagggcgaattggagctccccgcggtggcggccgaggtacgcgggacactggtgggggagagtccgacgcgcctggctaggagcgccgaccgcagggcctctacggaccttactagaaaaatgaaacctgatgaaactcctatgtttgacccaagtctactcaaagaagtggactggagtcagaatacagctacattttctccagccatttccccaacacatcctggagaaggcttggttttgaggcttcatgccagaaaggggaatggggaatggctgcttaacggcatgtntttttt

SEQ ID NO: 673 - DNA, 297 bp, Homo sapiens
cgcggtggcggccggccgggcaggtacacgatgaaacgggggtaaggaaggagaagaaaaacattgaaaggcatttgacagggtaaggttgtattccccagacaaccctgtcaagcagctctgaagggatgatgagcctggactctctggactcctagattatgaactcctgcagtggaccatgtcctattttttggaggcgttggggggaattgtcttacgcagcacccaagcacactgctatgcaatggaccacagataggaagcaagcactgcatttggctcccccgcgtacct

SEQ ID NO: 674 - DNA, 334 bp, Homo sapiens
ccgcggtggcggccgaggtactaaatcattaattcatcctgagctagtggctttattaatgagtatctcacaaataccacaaaaattcaacctggccatgtggagcaatataaaattatggcatttcttggtatgtttttctctttggcgaggagacaacttgatcttgtgtttccagaagcatgttaatttgccctgcttgcagaatctctctggcttgaaaggagattatattcatggcagtctgtgaattttcattttatttcatttatttatttgaagacaagagtctcactccagcctgggtgacaagagcaagactcccgtctcaaat

SEQ ID NO: 675 - DNA, 240 bp, Homo sapiens
  misc_feature 4, 205: n = A,T,C or G
atanggcgaattggagctccccgcggtggcggccgcgcggggaggtaccatgaggggagaaccggcaaggggtgccattctagcatctgggtgggagagaggaggctgaatgccaggggaaacttcttggaaaaagtgatgctgagttaggacaatttagtcaatgagaagggatctggctgttcctggcagtggagacaacatntttaaaggcatgggagaatatctaaaatttaccct

SEQ ID NO: 676 - DNA, 200 bp, Homo sapiens
  misc_feature 38, 188: n = A,T,C or G
agataataacatctgatatccacatggggtctggaggngcaagccaccttcctttcatcccacggtctcacagcagccctggaaagaggctgctctctgttggaggctaagggccagtgttggaaggagctcgggtggaaagtgtggtctgcatgaggggctcccgtgaatagaggagaggggtggcnggtacctgcccg

SEQ ID NO: 677 - DNA, 410 bp, Homo sapiens
  misc_feature 24, 48: n = A,T,C or G
tactatagggcgaattggagctcnccgcggtggcggccgcccgggcanggtacctgcctctgccagatacccctgagggaagaggatgttctataaccaggccgacaggttagcatttgtgaacacagttctgacgttgttgggagggtttgtttgccagaaacatccccatgcgctactctttcaaccagaggtcaagaagtcctttacttttgtgtcttttttgtttgtttgtttgagacggagtttcactcttgttgcccaggctggagtgcaatggcgcaatctcggcttaccacaacctctgcctcccaggttcaagcaattctcctgcctcagcctcccgagtagctgggatcacaggtgcccaccaccacgcctgctaattttcatacccgcgtacctcggcc

SEQ ID NO: 678 - DNA, 511 bp, Homo sapiens
  misc_feature 348, 359, 467, 482, 496: n = A,T,C or G
agggcgaattggagctccccgcggtggcggccgcccgggcaggtactctgtggtatttcacataatattaaccagctgttagcaatgactgatatatacttcccattgaaaatgatgtaaggtctgaaaggattcattttgacaattttatatcacatatttatatttaccttaggtggttctttttaatgttttaatttgggaccacactaatttctaacttggtaactcatctcttaccaaaattaataccaagccaagaaaaatggtttcatgaatagaatctactagtcttttatatcttataatggtagatcactgatgaggtagaactccataagagcttcnctctcacagtnaaaggttttggttgtgcatggattacacctggtgaaagttggttagtatttgtctaagtggcttaagacaaatttattttgatttgtattgtgaatgactttgcgaancacccagaatttttnccgcttcgtgtgtngtgtgtgtgtgtgtt

SEQ ID NO: 679 - DNA, 482 bp, Homo sapiens
  misc_feature 421, 430, 435: n = A,T,C or G
tagggcgaattggagctccccgcggtggcggccgcccggcaggtacccacataatagctcagtgcatgcaatttacaaagtaataagtgaaatgctccccatagttgactataacatttcctcatttttctctgaatttgctttttaaaaaactcttccccttgccattcccttccccattccagattgtaactgcttctttccagctgcatcagaagaaggggactttccatgtaggtgttattctcagaaaaggccagaaaagaccaggtcatggtggggatgatttgctccaagcataaaagagaattgtgatggttcaggaagactggaaaataacgagactggaaagaaatgagaagggcttcagaggaatggcacattgaaataaaagggaagtggtaagaacaggaacccaagnggaatgaangggcncacagtggcagggatgattggatagactgtggaataaaaataatttg

SEQ ID NO: 680 - DNA, 324 bp, Homo sapiens
aggtacaaactggcttcttctctttgtcaccagcacctgcttcatagtctctctggagtgccaggaacgggtcatttagattaaatctcccataccgttcctggataaatacctccttcctgcgagcccgcagggcctcgatgacaaggtctctggcctccagctccccttccatcacgctgaggagcatccgcagctcggatttactgagagtatccacatcaaactcttttttcagttttacaagtggaaattaagcagtcctcctccccgtttctccttccattgccaggctcagctcctctcaccccaagtacctgcccg

SEQ ID NO: 681 - DNA, 310 bp, Homo sapiens
agggcgaattggagctccccgcggtggcggccgaggtacaggtggaaagtgaggtggttttatttctagttcaccattgtccttaggctgtatagacctctggaatcccagcttatgtggagaaggtatcctgttagacttccctcctttggtcagcactgggccttaacttctggcccctcaaagctgctaaaactgaaggccaggcttgcctggcttggcaaaggacgtcgggcagaagcagcttctcctctcctcttgtttctctgtttcccctcaccataggctttggcctgggagttttcctaca

SEQ ID NO: 682 - DNA, 364 bp, Homo sapiens
  misc_feature 231, 302, 307, 309, 315, 326, 339, 351: n = A,T,C or G
ccgcccgggcaggtaccttcttggttgctgtgactgtctgctagcactaagactgtcttaagcagatagagggcaatggtctttgaaggcaaatgacaaagcgtggccctgagctccctgactgagttcatttggactctcaagggatgccctggagctagactcgatctgagtggttggactaactcctctttgtttttgtattgaagagccagcttaccccgccatttntaaacctcaggccaggaaaaccaaaaaacaaaaaaacccaacccaaacaaaaaacaaaccccaccttcttnagaantnagtaancttaaggcttnaagaatcaacagngcccctttgggnattaagggccatt

SEQ ID NO: 683 - DNA, 516 bp, Homo sapiens
ccgcggtggcggcccgaggtactataaaatactatcctaactttttatgtgtttttttaacttgttttttagaagttttgtagcggtttttaaaaatgatgtatttataactggttaggatgctaatatctgtatcttttactctataacctaatttttacattttcagaaaaaaatttttacaacaatgtaaaaaatacatggcccgggtgcggtggctcacgcctgtaatcccagcactttgggaggccgaggcgggtggatcacctgaggtaaggagttagagaccagcctggccaacatggtgaaaccccgtctctactaaaagtataaaaattagctgggcatggtggcaggcgcctgtaatcccagctacttgggaggctgaggcaggagaatcgcttgaacccaggaggcaaaggttgcagtgagcccaagatccgcgccattgcacttctagccagggagagaagagccgagacttcatcttaaaaaaaaaaaaaaaaaaaaaaggtc

SEQ ID NO: 684 - DNA, 419 bp, Homo sapiens
  misc_feature 143, 145, 170, 193, 195, 197, 204, 205, 211, 212, 228, 243,246, 268, 289, 302, 304, 308, 310, 312, 320, 323, 330, 333,338, 344, 347, 349, 350, 366, 372, 381, 383, 384, 385, 391,402: n = A,T,C or G
cgcgaattggagctccccgcggtggcggccgaggtacacactctggccctggctttatttttagattttcctttcccggttgatatcggaaggcacagaggcaggaggtggggtggatagtaatgtgtgcccccttgggggtnanagtgaggtggagggggatgttaatnaccatgagaggcagagggtcagncnantttccanngcttcnngcttcctttaaatganggaaaacacgtgcangtnttaggagacaaaggaagggaantgactgtttcctggcctggtntgtgggcccagtngnctgntncnttcagtgnctncgtgcanttngactntacacntangnnggcaggcataggtgtncggttntgaaagacngnnntctttncacattctctnctgctctagggactgac

SEQ ID NO: 685 - DNA, 304 bp, Homo sapiens
gggcgaattggagctccccgcggtggcggccgcccgggcaggtactttagtagaactctaggaactgaccaaacccttttaacaaccaggggagtgcttgatgaaggaagaggctaccgatctttcataagtatgaataagcagcatgcataaaccaattaccttcccctattcctcacaaccaccaccaccacacccaccacctcttgtggcagtggggatagcagcccatgttcctggagttgctaaccggtgccaggagggacagtagggatcatgtccttcaaaatttagggttgtacct

SEQ ID NO: 686 - DNA, 323 bp, Homo sapiens
  misc_feature 86: n = A,T,C or G
ccgcggtggcatgcatcaaggtgacaggtgacggcatggttatggattaactcaccaaggaaatgagtgtggaaagaagaatgcanaaatctgaggactagagcctggagatggggagcttcgagctcagaggaagaagaggatcttcatcacggggagacatcagccttctgagtatctgggactgcaggttatgtgccaccacactcggctaattaaaaaaaattttcttagagacagggtctctctacgttgcccaggctggtctcaaactcctgggctcaagtgatcctcctgcctcagccttccaatgccttgggctt

SEQ ID NO: 687 - DNA, 482 bp, Homo sapiens
  misc_feature 79, 208, 297, 361, 370, 452: n = A,T,C or G
atgcatcaaggtgacaggtgacggcatggttatggattaactcaccaaggaaatgagtgtggaaagaagaatgcaaaantctgaggactagagcctggagatggggagcttcgagctcagaggaagaagaggatcttcatcacggggagacatcagcccttctgagtatctgggactgcaggttatgtgccaccacactcggctaatnaaaaaaaattttcttagagaccagggtctctctaccgttgcccaggctggtctcaaactccctggggcttcaaagtgaatccctccctngccctcagcccttccaaatgcccttgggggcttacaggccattggagccccaccatgtgcaaangaaaagaanagcaatttttggacatcctgcccaaaacaaacaaaggtttgggcaatgggtcctggtcaagcaaaaacaagtggggtttggnggaataaaccaacccttgggttaaaaataa

SEQ ID NO: 688 - DNA, 283 bp, Homo sapiens
  misc_feature 1, 80: n = A,T,C or G
nggcgaattggagctccccgcggtggcggccgggggccattgagactgccatggaagacttgaaaggtcacgtagctganacttctggagagaccattcaaggcttctggctcttgacaaagatagaccactggaacaatgagaaggagagaattctactggtcacagacaagactctcttgatctgcaaatacgacttcatcatgctgagttgtgtgcagctgcagcggattcctctgagcgctgtctatcgcatctgcctgggcaagttcaccttccctgg

SEQ ID NO: 689 - DNA, 177 bp, Homo sapiens
ccgcggtggcggccgcccgggcaggtacgcggggggatactcattagagttgctcggtggagatggaatgatggtggggtgcagttaaacatggctgagtgctttctgcttaaggacctgatgtattaatgctctccaggtcattcatatttgggggaaggaacaaagagggtacct

SEQ ID NO: 690 - DNA, 413 bp, Homo sapiens
cctatagggcgaattggagctccccgcggtggcggccgaggtactgctatgaatctcacagatgtaataatgagttaaagaagctaggcacaaaagaatattactgtatgattccaatcatataaagttcaaaccagatcaaactaatcaatgaacgaggagtcaggattctggttatattcagggatagtgatggaagagggctataaggagggtgtctgggtgcaggtcatgttctagatcttgatctgagtgggggttacataggtgtattcacttcatgagaattcagagggctgcacactaatgatctgtataatgctcctctatagtatgtcacacttcaaaaaagtttacagaaacagttccttcctaattttcacagggcctaagagctaaaaacgcagccccag

SEQ ID NO: 691 - DNA, 462 bp, Homo sapiens
  misc_feature 1: n = A,T,C or G
nctatagggcgaattggagctccccgcggtggcggccgggggccattgagactgccatggaagacttgaaaggtcgcgtagctgagacttcaggagagaccattcaaggcttctggctcttgacaaagatagaccactggaacaatgagaaggagagaattctactggtcacagacaagactctcttgatctgcaaatacgacttcatcatgctgagttgtgtgcagctgcagcggattcctctgagcgctgtctatcgcatctgcctgggcaagttcaccttccctgggatgtccctggacaagagacaaggagaaggccttaggatctactgggggagtccggaggagcagtctcttctgtcccgctggaacccatggtccactgaaagttccttatgctactttcactgagcatcctatgaaatacaccaagtgagaaattccttgaaatttgcaaggt

SEQ ID NO: 692 - DNA, 579 bp, Homo sapiens
  misc_feature 68, 74, 116, 154, 181, 295, 463, 495, 498, 501, 503, 518,536: n = A,T,C or G
gggcgaattggagctccccgcggtggcggccgggcaggcacttttttttttttttttttttttttttnccatanagatggggctttgccatgttgcccaggctggtctcaaacttntgagctcgagcaatctgcccacctcggcctcccaaggngctgggattacaagcatgacctgccgngctggctaaagtttcttatttatacttactcattcctctaatatctggatttccttagtcatctgtcacttctccctgcatatttcctgtgatgtctttaggtccctcccactnttgtagtagcactccctggggaccaatttcgaaggatgctgagtcatatggtttttggttttgagagggttgaaaatggagactcaactcaatttaggagctatcccatcataactagtagcaaaacacgtcactacttgagtctcaacaaaagacaaaaaaggtttnaaagttggggaacaaatagctgccaagggttnttnttntntgacaaaaacattgngttggggatttaaaatcnatgtgaatccttaatccctaactcatccatgttggggtttttt

SEQ ID NO: 693 - DNA, 387 bp, Homo sapiens
  misc_feature 3, 38, 50, 205: n = A,T,C or G
ccncgaattggagctccccgcggtggccgcccgggcanggtacctgcttnccagaagtgttatcatgattaaatgacagaccagtggcagtagcatctcctgagggagggttagaaatgcatattctcaggcaccactgcagtcttgctgaatctgaagctttggggatgggacccggtagtctttttggataactctgccaagnggttccaatgtgctcaagtttgagagttgctgaattaaagcgctgggtcttgccaggcatacctgtaattccagctctttgggaggctgaggtggaaggattgcttgagcccaggagttcgagaccagcctgggtaacatagcaagatcctatctctaccaaaaaaaaaaaaaaaagtacct

SEQ ID NO: 694 - DNA, 331 bp, Homo sapiens
  misc_feature 128, 246: n = A,T,C or G
ggcgaattggagctccccgcggtggcggccgcccgggcaggtactggtctctgtctttacagctgaagcatcagaggatggagtgaccaggctggttccaatgacagttatacggccatggggagtanacatggagtctaattcagtgcttgaggctaagaatgaagttgtatgcattgtggaaattgttccaggagatcttgcaactttcaagtttgaagtcatgtctgtgacagtccaggaatntgatgcagctgtggaagaccaggtggaagggtgttctgtagaagttgtgcgcctctctgtggccggggtgctgtccatggtacct

SEQ ID NO: 695 - DNA, 428 bp, Homo sapiens
  misc_feature 59: n = A,T,C or G
atagggcgaattggagctccccgcggtggcggccgcccgggcaggtacacatgtatcanggaaaagaaaacgttatttgtcccacagatgctgctaggagcagctaccccaagacaggccttgcaccttgggtcatgacaatgcgtggctactgagagctgttgacagagtggacagggcccagaccaggacagtctctctagaggtcttcacctcctcaaccgtaacttaatcagccccatgccgggctagccccatgccacaaaggctcagaaatgccctgcaacatgtgggacacctggtagtatctacataggggccagcatccatcccagctgctgggggtggctcaagagctgtgagggacaccctttcctgcctgataccgtggaccagtttgcaaagagctgactgtcctgctaggccca

SEQ ID NO: 696 - DNA, 365 bp, Homo sapiens
  misc_feature 120, 158: n = A,T,C or G
tagggcgaattggagctccccgcggtggcggccgccgggcaggtactttttttttttttttttttgtatatttagtagagatggggttttaccatgttggtcagtctggtctcgaacggntgacctcaagtgatccgcccaccttggcctcccaaagngctaggattacaggcatcagccactgtgcccagccagccctatgcttttaagagttcgatggttgaaagagactgagcggggaaggtagagcggggcaggggagggactacttggagtcaagtcaaagttttagggaaagacctgaatctgaaaaagattatttaacctttatgtgtctgaaatactatattgtgcgaattgtacct

SEQ ID NO: 697 - DNA, 501 bp, Homo sapiens
  misc_feature 198, 444, 446: n = A,T,C or G
ccgcggtggcggccgcccgggcaggtacacaaacacgacagaagcccacggagcaagccctgtgctggccccttcacatgactttaggccctctagcaaggtgatgtttatttacagggttgcataaacaaggcctcaccattcaaaaaaccttgtattctattacatgtttcacattaacaaagactggaaattctntaggaaagggatcttttttatctacatgaaaagcacaggctagtaaagacttgttgaaaaagttgaaagaacataaatgtatatggtatatgccacatagcataatggaggaagatagcaaataggaaacatattggtgaggaagactggagtttgatgatctagtcaggaaaacatcaagttaaatcctttactttacacctaaaccataaactggtgaataaaacaagtatgtgaaagcacaanangagagaggacaggccgggcgcagtggctcacgcctgtaatcctacactttgggag

SEQ ID NO: 698 - DNA, 544 bp, Homo sapiens
  misc_feature 55, 59, 64, 67, 80, 82, 93, 95, 111, 113, 120, 128, 131,137, 138, 150, 158, 159, 219, 233, 235, 236, 244, 247, 256,267, 269, 275, 298, 318, 324, 383, 386, 412, 414, 422, 430,457, 460, 462, 472, 485, 518, 519, 526: n = A,T,C or G
tatagggcgaattggagctccccgcggtggcggccgaggtaccatcctatgcagncatnctgtnagnacccattccattntnctatccctggntngctggtgtcaatactntnaagcganttactgcnggngctctnntttttccctcanagataccnngttgatttctttgattctctccatctctacaggcataataactcctaatatttaaaaacnctgtagagggatgnanngaagctgnggngagagcccntgggcttttcncntgggtnaagatgcacattcctgaaaattntgggccttggcttaagctgnactagngccggccactcagctgatctcactagcgtcacctgtcgcaatggtgctgaagcgcactnccnagaggccataaggcaaagcgagagtncntggctatngactggancccatttaagcaaaaaaacatgcctcncgnangacaaattcnatcaacaaagggngggcaatacaggatctgtacctgcccgggcggnncgggcangaaccttttttttttttt

SEQ ID NO: 699 - DNA, 444 bp, Homo sapiens
ttagggcgaattggagctccccgcggtggcggccgaggtacccagcccgccacccggcttgtgtgtcatcctgggcccaggcaggtgatgatgccaaacacaaggcccagctatgtaaccaagtaaaaactttcatcagaatgcccatctttgtgacccacagcccattgtcaagagccttccctgtgccaggagttcagcaggttcacctccgcctccactagtcactaagacacggatattttaagaattaaaagcctccacaagccaggcacaatggcttacacctataatcccacaactttgggaggccaaggtgggaggatcacttgagccaacgagttcgagaccagcctgggcaacatagcgagaccttgtctctacaaaaaaatttaaaagttagccaagcatggtggggcatgtctatagtcctaactacttggg

SEQ ID NO: 700 - DNA, 500 bp, Homo sapiens
gcgaattggagctccccgcggtggcggccgaggtactttcagtagaggccaggtttcaccacgctggccaggctggtcctgatcccccggccccaggtgatccgtccacctcagcctcccaaagtgctgggattacaggcgtgagccaccgcacccggctctttttttttttttttaaaatcatgattttaacagaagcctccattcaaggcgagacatgccttttatttctctaattgcgagacacttttctgaatcctcttgtcagttgcaccttttaatacaattgaggtgacactgttcttcatggtgacactggtctttcccaagaggtttcagctaattcagtctatcagattttacatcagattttaaaatttgcttcaaacttgggtgcttgtattcaaattcatgcttcatagaaaaatgcatatcaagttcaacagttgactaactgcagccacgttcacagtacctgcccggcggccgctctagaacta

SEQ ID NO: 701 - DNA, 580 bp, Homo sapiens
  misc_feature 298, 331: n = A,T,C or G
atagggcgaattggagctccccgcggtggcggccgaggtacagaaaaggctgatacacactgacagattttgtaacaagggacatttaaaactgagctggtaatagacttgatttctggtgttgccactcaataggcatgactaaatagtgtacctcactgttctactttttataattaaaattttagaggaagctgagttcttgtatttaactacaagttagagactcagcccacaagctttttttttttttttttaatatggtttctttttttttttttgagacggagccttgctntgtcacccaggctggagtgtagtggcgcgtctntgctcactgcaatctctgccttcccggtccaagtgattctcctgcctcagcctcctgagtagctgggattaccggcgtgcaccaccacgcccaactaattttagtatttttagtagagacggggtttccccatgttggtcaggctggtcttgaactcctgaccttgtgaactgcccaccttggcctcccaaaaacgctggggttacaggcgtgagcaaccatgcccagcctttttttttttttttattt

SEQ ID NO: 702 - DNA, 728 bp, Homo sapiens
  misc_feature 18, 32, 78, 107, 158, 171, 185, 197, 208, 209, 240, 244,341, 382, 402, 403, 487, 488, 499, 507, 510, 514, 530, 541,580, 585, 615, 618, 647, 648, 651, 663, 664, 667, 668, 669,673, 678, 691, 715, 720: n = A,T,C or G
aggtacgcgggatatatntaaatttaagaaancatccccggtaatatggctcttcataattctaagactaaggctggngtagaaacctaaccacctaccttacaagngaagggggctataccatggggtaagccaagtttgaaatttatggggaatcntacccaacttggnttaagggggccctnggatttggcctngggggccaagnnttttctgtattttttataaaaggtgatcttncatnggtattcccttggtttaccttggataaggggggattaccaatgccttcttaaggaaaaaaattcaccttatttgggccttggggggaaggtagggtngggcttcaatagcccttggtaaattctcccaagccactttnggggaaggaagggcctgganngttttgccgccccacttaccacttcccaagcccttggggggtggaaccaagaagtgggaaggaacctcttggcccctcaatatnnaaaaaaaaatnagaaaggnaanattncacctattcttaccanaacccctaagnacctaatttttaaaaaaataccaaaaagaattggccctngtttntcaaaaaccacctaatttgggaaataaaanaanggggtggaagaattattttctttaacccnnatnggaataaaaatnnatnnnattnggggntcccttggccccngggccgggcccgcttctaaaaacntaagnggggatcc

SEQ ID NO: 703 - DNA, 409 bp, Homo sapiens
  misc_feature 32, 233, 338, 384: n = A,T,C or G
tagggcgaattggagctccccgcggtggcggncggggcaggtactactgacttacctgccatgggctttctcaagacaagtcctgcaggagaggcacactcacttctagcgtcaactattgaaccagccactgccttcactcctcatctctcagcagcagtggtcactggatccagtgctacatcagaagccagtcttctcactacgagtgaaagcaaagccattcattcttnaccacagaccccaactacacccacctctggagcaaactgggaaacttcagctactcctgagagccttttggtagtcactgagacttcagacacaacacttacctnaaagattttggtcacagataccatcttgttttcaactgtgtccacnccaccttctaaatttccaagtacct

SEQ ID NO: 704 - DNA, 412 bp, Homo sapiens
ccgcggtggcggccgaggtactgtgaaagaactagcactttgagcagagaacaaatgccttacttgagtttcccctggactctatccctattcaaagatgcttggttatacctcaagagggaagcaatccagaccaactcctatgacatgacaggcactcaagcctgatgaggcagaaacctggcagctgtagatgttggaaaggataatttatgtgttcaagtgactaggattctaagggctagatgctagcttcaagcacggctggatctaggaagcccttttgctctcccttttccttggtctacttttctctgtaggcaagttcattcattcttaggcaagttctctgcatgtggcagcaatgatggacactggaatctctgggtattcagagttctttcagtagcag

SEQ ID NO: 705 - DNA, 355 bp, Homo sapiens
  misc_feature 249: n = A,T,C or G
cgggcgggtaccttaccaccccatccccagagcattgcatggggtgtttggcacacagtaggtgctcaatgtaaacgtgtgcactgtggcatgttagagccagacaggatctcatccagcccgttctctgcacccctccctcccctctccaagtagccctgctgtgggttcaagtaaagaggggctggggcgctggtctgattgtgtgggtgatttggggagatctcttcctcttccggaaccccaaanggttgggacaaacacagcaacaagcccagctccctgaatttcagtgattcatttgtgggataaaggagtgaatgataaagtgaaggacgactgtccccgcgtacct

SEQ ID NO: 706 - DNA, 258 bp, Homo sapiens
  misc_feature 1, 8, 16, 36, 57, 93, 123, 134, 202, 239, 246: n = A,T,C or G
nggttaantgccgccncttggccgtaatcattgggncattaagcctggttttccctngtgtgaaaaaatttgttatcccgctccacaatttcncacaccaaacattaccgaaacccgggaagncaataaaaaantggtaaaaagcccttgggggggtggcccttaaatgaaggtggaagcctaaacctcaacaatttaaatnttggcggttgcggctcaacttggcccccgcctttttnccaagangcgggggaaaaa

SEQ ID NO: 707 - DNA, 394 bp, Homo sapiens
ggcgattggagctccccgcggtggcggccgaggtactgaacatccatggcagacgctattctttccctcttagagatgcagacactgaggctcagagaagttgtcccgcacccagtatgtgatggagaggtagagggtaaaaacatcaactgaaggatttagcatttggggaagaaggaagaagcccaaaatggagtagatcaaaggctcccccgtgaacaaatttaaaattaaggagaaagaagcagaattcagtcttctccacacccataaccaaacagctcctatgaaggcaccaagcctgacgctcatcccaataaaaaggaacgatctggagagaggggcagccgctggtgacaagagaaccccccaggcagcctcgtcatctggccag

SEQ ID NO: 708 - DNA, 472 bp, Homo sapiens
  misc_feature 108: n = A,T,C or G
gggcgaattggagctccccgcggtggcggccgaggtacttttgggggacagatatcatataggggattcatgtcagtgaccaaacgaagtgaccattacagccctttngaaacctgaggtgtaatttttaaaaatgaactcatgactttaatagtcatagactcaaacctgagttgattattatgaattagtttatgggagtctcaatatgtgaatatgatggagacaagttttggaatacagataaatcaagtcactgtattcactctctctctctctctttgaatagccttatctttgcctatacacacaaacagtgcagccatcaaaattttcaatttacaaaatgttcacagtcatgcttcttccttgactaaacactggggttgctgccagtggtaattggcttgaaaccagctaatttttatatatctatttagtctggatattctagatgagtgggcactatagt

SEQ ID NO: 709 - DNA, 544 bp, Homo sapiens
  misc_feature 437: n = A,T,C or G
attggagctccccgcggtggcggccgccgggcaggtacccacgttttgctcccactccttgaccgcaggggctcggacacaaacccctgtcaccaggagagtcagtcagcactacttgggagggctaaagggaaatttggaaataaaattccaaagtttggagtaaaaaaattcaagtgttgattttatattctttccctttctgacacagcctaaagcgtagggggaacatgtgtttatctgtgggagataaacaagatggagtcccaaagactttaacaaaatatttttttaaaaatccactagaatagaaaatacattatttagatatactttatgctgagagtgagtatatatgcttgtcctatttaaacttgtgagaaaaagtggtatcccttgatacatttagaaatatgggggctatcttggttcattgnggggggtgggggcagaaggagaataaatgcaggatgcccttgttgaaaggaatcttagcatggcccacaggggacgtttccagtcgattaccaaggaatgccagcct

SEQ ID NO: 710 - DNA, 463 bp, Homo sapiens
tagggcgaattggagctccccgcggtggcggccgccgggcaggtacccacgttttgctccacactccttgaccgcaggggctcggacacaaacccctgtcaccaggagagtcagtcagcactacttgggagggctaaagggaaatttggaaataaaattccaaagtttggagtaaaaaaattcaagtgttgattttatattctttccctttctgacacagcctaaagcgtagggggaacatgtgtttatctgtgggagataaacaagatggagtcccaaagactttaacaaaatatttttttaaaaatccactagaatagaaaatacattatttagatatactttatgctgagagtgagtatatatgcttgtcctatttaaacttgtgagaaaaagtggtatcccttgatacatttagaaatatgggggctatcttgtttcattgtgggggtggggcagaagg

SEQ ID NO: 711 - DNA, 359 bp, Homo sapiens
  misc_feature 171: n = A,T,C or G
ttagggcgaattggagctccccgcggtggcggccgaggtacgcgggacggtgagccggaggagtcatgtcagaggggcgagcaggagcgattccgtcgccaaacaggttatgagtgccagtgagccgccttagatagaagcatcgtcagcactttattaatgatggatagngagaataaacccgaaaatgacgaggatgaaaagataaacaaagaagcacaagacttgacaaagctttcatcccataatgaagacggtgggcctgtatctgatgtgatagcaagtttccctgagaattctatgggcaaaagaggtttttcagaatcatcgaactctgatagtgttgttataggagaaga

SEQ ID NO: 712 - DNA, 329 bp, Homo sapiens
  misc_feature 1, 7: n = A,T,C or G
ncccgcngtggcggccgaggtactcttatgagaggaacattaaaatttgcaattataatgcaaagaaacaggagacgatcgtgagaataagcaatgtcacacacatttctctccaaactatatgtatcttgtcctttaaattctttgacgtgtgtgtggggcctgggtggggggtgtgggtgtgtggtgttctaagggccttttctactaattccaataactgggttatctgtgaggctgcttattctcactgtattttactgcttctttgcctttcttgtttttttttttaaccatactcaggtatggttaaaatgtaaatgaaagaa

SEQ ID NO: 713 - DNA, 354 bp, Homo sapiens
ccgcggtggcggccgcccgagcaggtactggggctgcacaggctgtggcaacactggctagtcaaagcctggaaagacctgtgagcttgaactcttctgggttgccattgttctgttggtttcagcagtgagactgagagagcctgttctgtttagaaaagccacagtggttttctaggtaaagtctgcaggagatgtcacttggtgccttttcaatacgagttttccacctgcatttttggaaccattatgggccttttaaaaatttattaataagtctcttaaatattttataatctagcttctgagacaagatgattttaaaacagttatatgctctaaattaaaaattta

SEQ ID NO: 714 - DNA, 526 bp, Homo sapiens
  misc_feature 103, 105, 106, 109, 110, 140, 180, 190, 212, 216, 227, 241,243, 304, 310, 343, 368, 400, 406, 408, 421, 427, 431, 432,462, 478, 503, 504, 510: n = A,T,C or G
aggtaccgtgtgagcaggtggcgttcaccaggggtgagactttattgacagtaagttgcctctgccaaaaaacgccctcatatgtctgctgatgtttgaattncnnccnnatggcaggaggttttttggtcctccccagntttaaaaaaaaattggttaaaaataacctgggtttggttntttcttttgntatggggaaggcccttccaagnaagnggaaaataaanaaaaaagtaattananccttaaccttccttaagggggaattaattggtaatttcaaaattttttggaatggccttancttttnttaattttttttaaattttttaaattttggganggaaaccaaggggggggtttccttntgggcctttcttggtttggcccccagggggcntggggnanggttggccaaggnccaatntttnngccaaaatttccaaaccaagggccctttcnaacctttgggccaagntccccctttcaaaaaccccctttcnnccttgntttgggccccccaaaa

SEQ ID NO: 715 - DNA, 400 bp, Homo sapiens
  misc_feature 126, 165, 186, 211, 215, 232, 243, 316, 345, 353, 386: n = A,T,C or G
ccgcggtggcggccgaggtaccgttttatgatgataacataactttaatgctccaacctgagaaagataaaatagactaagatgaccattgaatgcaaacagaaagttctaaatgaacaatcaagncaggacctggaaatttcaggtccctggtggttggaaaantaaattaaattaaaaaccaantttcttggtttttccaaggaaaaantggntaaaaaaaattaaggtntttaaaataanccccagggaaaaatttccaaattcaaaattattaaaaaggccttaaattaaattaatattttttggcatttcnaaggccccaaaccttaaaattggccttanccaaaatnggtttttgggtaattaaaccagggccaaatttnattaaaaaaattcc

SEQ ID NO: 716 - DNA, 553 bp, Homo sapiens
  misc_feature 111, 115, 117, 126, 127, 175, 179, 211, 212, 224, 242, 250,270, 282, 290, 332, 345, 378, 403, 408, 415, 433, 450, 451,461, 493, 510, 520, 527: n = A,T,C or G
aggtacacgattatttcaccatccaggtattaagcctagcacccaagagttttttttttgcttctctccttcctccctccaccctcaagtaaatcccagtgtctgttgccncccntncttcggtannaaccaaggtggtttttttttaaatttttccaccaaaaaaaaatcttcncatncaaccttccttcttttcaattttttggccttnnccttaaaaccgnaacctggaaaaacccttnctgggttntggcttcccccagtaaaagnaccaaaggaaanttttaaantttcaatttttttaattccccgggttttttaaaaaagggttnaaaagggaaaggntttccttaacccccaagtgcccaaggggaaagnttggggttggggggccttccaaccnaattnccttaanttaaaaatttttgccccnaagggccaaaccctttnntttgggaagngaaaggggggccccccggaaagggggccccgnaagggtttgggggaaanttccaaaccnaatttgntaaagggggtttttggggggaaaaag

SEQ ID NO: 717 - DNA, 385 bp, Homo sapiens
  misc_feature 122, 132, 208, 255, 317, 336, 343, 357, 371, 373, 384: n = A,T,C or G
ccgcggtggcggccgaggtactacaataaggacaaatattcaaaacattctgttaagtaaaataagacagtcaaaaaggaaagctgtataattacactcatgtaaaaatatttagtccaacnctcacagganaaccaaaggtggtcaataggttcctcaagccaggtggccaccccaaaggaatggttaaaccaaggttcttccttcngttaaggttcctggaaggaattaaaaccaattccccaaggaggtttnctttttggttttcctaacccttcttaaaggggaggaattttaaaggggaggtggttaaaaancaaccaaaaaagggtttgnaaagggnttttgggggaaggntttgggaaaaaaangntttttaaaggna

SEQ ID NO: 718 - DNA, 443 bp, Homo sapiens
  misc_feature 411: n = A,T,C or G
cttagggcgaattggagctccccgcggtggcggccgaggtactgactgtctcaaattcttggatagctgtccctcatgtcacctagctgctgagagctttgtgatcctaacaggtgatgactcagaccgacactgcattggtaggaattccacaaataggtgcctcaatgtgcctagattgaaatatcagcctttcccagactgacctgatgggttgacttcaggtgtggtgtaaacacctacattttaatgtaaacatttcagtgtaatcaatgagaactatcattctgctttaatcaccatgagttctgaaataacaaaggatttgtctgacattcattctaagaaattcattcttacctgactaagaaacttttttaacccggcacaataataaagaaatgacctgtnagtacctgcccgggcggccgctctagaactag

SEQ ID NO: 719 - DNA, 420 bp, Homo sapiens
  misc_feature 113, 130, 198, 213, 229, 263, 265, 320, 385, 396: n = A,T,C or G
tagggcgaattggagctccccgcggtggcggccgaggtactgactgtctcaaattcttggatagctgtccctcatgtcacctagctgctgagagctttgtgatcctaacaggngatgactcagaccgacnctgcattggtaggaattccacaaataggtgcctcaatgtgcctagattgaaatatcagcctttcccanactgacctgatgggntgacttcaggtgtggngtaaacacctacattttaatgtaaacatttcagngnaatcaatgagaactatcattctgctttaatcaccatgagttctgaaataacaaangatttgtctgacattcattctaagaaattcattcttacctgactaagaaacttttttaacccggnacaataataanaaatgacctgtaagtacctgcccg

SEQ ID NO: 720 - DNA, 328 bp, Homo sapiens
ccgggcaggtaccgctgtgtccgggtgggtggtcagaatgctgtgctccaggtgttcacagctgcttcgtggaagaccatgtgctccgatgactggaagggtcactgcgcaaatgttgcctgtgcccaactgggtttcccaagctatgtgagttcagataacctcagagtgagctcgctggaggggcagttccgggaggagtttgtgtccatcgatcacctcttgccagatgacaaggtgactgcattacaccactcagtatatgtgagggaggggatgtgcctctggccacgtggttaccttgcagtgcacagcctgtggtcataga

SEQ ID NO: 721 - DNA, 496 bp, Homo sapiens
  misc_feature 62, 68, 432, 470: n = A,T,C or G
ccgggcaggtaccgctgtgtccgggtgggtggtcagaatgctgtgctccaggtgttcacagntgcttngtggaagaccatgtgctccgatgactggaagggtcactgcgcaaatgttgcctgtgcccaactgggtttcccaagctatgtgagttcagataacctcaaagtgagctcgctggaggggcagttccgggaggagtttgtgtccatcgatcacctcttgccagatgacaaggtgactgcattacaccactcagtatatgtgagggaggggatgtgcctctggccacgtggttaccttgcagtgcacagcctgtggtcatagaaggggctacagctcacgcatcgtgggtggaaacatgtccttgctctccaatggccctggcaggccaacctttagtttcagggctaccacctgtgcgggggcttntgtcattaccccctgtggatattaatgctgcacactgnggttatgacttgtaccttcggccgtt

SEQ ID NO: 722 - DNA, 306 bp, Homo sapiens
  misc_feature 262, 295: n = A,T,C or G
ggagaggaaatgtgtaggggtgagggatgatacaagaaagccaaatcctcatcttctatagtagagagtcagcggataaaacctaaaaacaatacatcaagaaatacttacacttatggaaggaaataccagaagttaaaaggggttacttctgggacatcagacaccagactgcagggaagggctgcctcttgtattaacaagcttccagtataatttgctttttaaaaataggtccatgcattattttaataaaaattangctgggcgtggtggctcaggcctgtaatcccancactttgggag

SEQ ID NO: 723 - DNA, 414 bp, Homo sapiens
attggagctccccgcggtggcggccgcccgggcaggtacttaagcaagctgtgtgacctagagcacagtgctttgagtttttgagtcttagcttctgtgtctataaaatggggttcacacaactcaccttacagggctgtaagattagattacacagaaaatatattttttggctgtgggggctggaagtgttgctgattagcatttgaaatcccatcctgtgggtgagaaaaccccaccttatgacttggtgggaaacaaagccaacctcccactgatgaagctgaaagtagcagaaccttgcttctactgcctcccttgcagctagaggcaggcacaggactagcctgtcaattggatgcaaatgctccaggccttgaatcacaacctggtgacttgcacccaagtctatta

SEQ ID NO: 724 - DNA, 316 bp, Homo sapiens
  misc_feature 169, 233, 242, 261, 275, 288, 297, 305: n = A,T,C or G
ggggccattgagactgccatggaagacttgaaaggtcacgtagctgagacttctggagagaccattcaaggcttctggctcttgacaaagatagaccactggaacaatgagaaggagagaattctactggtcacagacaagactctcttgatctgcaaataccgacttnatcatgctgagttgtgtgcagctgcagcggattcctctgagacgcttgtctatcgcatctgccngggcaagtntcaccttccctgggatgtncccttggacaaganacaagggaggaanggccttaangatcctanctgggggggga

SEQ ID NO: 725 - DNA, 367 bp, Homo sapiens
  misc_feature 6: n = A,T,C or G
tagggngaattggagctccccgcggtggcggcgcccgggccggtacccataaaaattaaaaactattttaaaaaataaattccatttgagccactccttcaaaccacccagagtgggtagacgtctttcgtgcctctaagaagccccatctctattctgcgtctcaccttgcagggctgctcatctgaatcctgaagatggtggacacccatctgctaggactgaaatgaataggacagagggaggtgcagagtgaatggaccatactacctgtcatcttggcaacgtgtgattgaataaaacaacttctttagaagtttgatagagtgatttgataatgtaatttacaagtgatcatttcttttta

SEQ ID NO: 726 - DNA, 375 bp, Homo sapiens
  misc_feature 37: n = A,T,C or G
ggagctccccgcggtggctttttgagtctggacaggnctctgtttttgctttaaagttaagagagctaaataaatgatggtaaaaagataataaaatagaacatgaagggctgtcagtcagtgtaggtatttccatcccctcacttttcaagtgaggtcacggaggctcagagcgataaggagacttgtccaaggccacacaccggctggtgctcaagccgggacttgaacccacgcagtctgactctagagcccaagctcctaactatgacatcctatttgatacactgttttactggagaaacagatcatttgacagacattctttctgttagcaatttgacaactctttccccagttgtctgtacctgcccg

SEQ ID NO: 727 - DNA, 481 bp, Homo sapiens
ctacttagggcgaattggagctccccgcggtggcggccgcccgggcaggtacgcgggctattctcttacagctaggacccagcgttctgggcagaatagcaggcagcgcagtagctactgagattataagtggtaggtttatggagctgtgaccacaactctccacaagccagtgctgtctcatgcaagcactctcagtgtccaagtgctgagtgtgtgagtggtctgggctttgcagggtcggccaagctcttggaagagcaggctttgttagctggggagtcatcgctccatgcaggccctgagaatggagcatcctgagtggactggtagagatggggcatgggtcactctgagggtttgagctacttctgctatttttgaaattctggtttgaactgcaggatcgtgctgagtttggcacagactaatttctctgttggcagcacatgatgtatcaactcatgtgtcagttggtttg

SEQ ID NO: 728 - DNA, 544 bp, Homo sapiens
  misc_feature 210, 330, 375, 445, 457, 464, 472, 479, 484, 500, 509, 518,520, 533: n = A,T,C or G
ccgggcaggtactaccttctctgctacaagtcgagcgaggagccccgcatgagccctgacacctgtgccaccattttggaaaaagctggtctcgataactgggctcttggaaaaacaaaagtgttccttaagtattatcacgtggagcagttaaatctaatgcgaaaggaagctattgacaagcttattttgattcaagcttgtgtcaanagcattcttgtgttcaaggaaggataccaaaaaatacagggaggaaaagggaaaggaaagccgcttataataataccagtcagcttgcaaggagggaccacccttgtcagggaaaacaanaagaaaaggaaaatttggtttggaccattgaaaaaaccccagcanttaaccaacccaatttcaaaaactttcttgattcagggaaatttcgacttaccaagaaaaaacctttggnaaaaatacccanggggggntcctgggnaaagggnaggangggagcccaaaaaaanaatttgganaaccccccnangaccgaccccccnggaaaccccca

SEQ ID NO: 729 - DNA, 491 bp, Homo sapiens
  misc_feature 329, 407: n = A,T,C or G
ccgcccgggcaggtactttcttttttttttttttttttttttacggagtcttgctctgtcacccaggctggagtggaatggtgtgatctcggctcactgtaaccttcgcctcccaggttcacgtgattctcctgcctcagcctccggagtagctgggattacaggtgcacaccaccatgcctggctaattttttgtatttttagtagagacggggtttcaccatgttggccaggctggtcttgaactcctgacctcaagtgatctacccaccttggcctcccaaagtgctgggattataggcatgagccaccacgccaggcccactctntaaattttgaccaccctgccttgagtggtcttctagcaccctaacctctgtctaaccttcgagagctttgcactagcnattcctggggaccagctatggttggtatcttctcaactttctaatttttttaaaaatattattattattattattattttaaaa

SEQ ID NO: 730 - DNA, 351 bp, Homo sapiens
tatagggcgaattggagctccccgcggtggcggccggcccgggcaggtacctgtgtggaaaagaatgcttgcaaagcttgtcaccctcacgagaattcctctgacagacatttgcctttgacagtgaaaacagatattaaagtgaaaggagaagaaaccgaagagcatcagaggggacgactgggttacttaactgttggggagcaatctgaggagttggttaccagagaaactggcgatggcgatcccgtgagcaacatctctcagacccattttaaatgccgggggatacttaatcatgctgaaaaacagcagagccctgaggttttggactacatgttgcagaaagaa

SEQ ID NO: 731 - DNA, 451 bp, Homo sapiens
  misc_feature 76, 121, 173, 209, 276, 310, 369, 376, 383, 384: n = A,T,C or G
ctatagggcgaattggagctccccgcggtggcggccgaggtacactacacctgggacaaatacttttttgtgaagncaggtaaagcctttgcgtgcaatatagcatctctatgcaatgcancaactcctcgtctatcgctacagtaagaaaacagccacgggtcaggtgttgnggctcacacctgtaatcccagcactttgggaggtcnaggtgggtggatcacttgaggctaggattttgagaccagcctgaccaacatggagaaaccccatctntactgaaaatacaaaattcccgggtgtggtggcngcatgcctgtaatctcagctactcgggaggctgaggcaaaagaattgcttgaatctggnaggcggncgtttgnnggtgagccaaaaatcgtgccattgcactccagcctgggcaacaagagcgaactttcgtttcaaaaaa

SEQ ID NO: 732 - DNA, 536 bp, Homo sapiens
  misc_feature 482, 513: n = A,T,C or G
ctatagggcgaattggagctccccgcggtggcggccgcccgggcacggtactagttattttaaattccactcataacttatcggccaaaagtagtcacatggctccacctaatcacaagtggagcgggaagtgcaatcctaccttgcctggggaaggtatagagatagaccagcactaatgactaccacacttcgctaaggtcacataataaataagcatcagacatcaggtgtggtggctcatgtctataatcccagcactttgggaggctgaggcgggcagatcacttgactacaggagttggagatcagcccggacaacatagtgaaacacgtctctactaaaaacacacgcaaaaaaatacgaggcatggtggtgcatgcctgtaatcccagttacctgagaggctgaggcacgagaatcacccttgaacccaggaggcagaggtttgcagtgacccgatattatgtcactgcaagtncagcctgggtgacagagcgagaccttgtctnaaaaaaaaaaaaaaaaaagaaaa

SEQ ID NO: 733 - DNA, 233 bp, Homo sapiens
  misc_feature 20, 133, 155, 170: n = A,T,C or G
cgaccactatagggcgaatnggagctccccgcggtggcggccgcccgggcacggtactgctggttcaagccattaaattacatcacaaaggtttggtttctctgtatatatttctctggggcacttttgctangttggctctatcctgaggcagnctctctcctcgtggnaaccaggtggctctagcagcctcagctttatatctctcaagagtaagtccaccgtcacagagc

SEQ ID NO: 734 - DNA, 390 bp, Homo sapiens
  misc_feature 108, 233, 349: n = A,T,C or G
tatagggcgaattggagctccccgcggtggcggccgcccgggcaggtacacaccaccacacctggctaattaatttaaaaaaaattttttttagagatgggatatctntatgttgcccagactggtctcaaactcctggcctccagcaatcctcccacctcacctcccaaagccctgggactgcaagcatgagccaccatgcccagctatattttctgtaaattgctaatganaatgaaacatgtatgctgtggacagaagccttgttggacctagagcccatgctgggtcctttgccttaataaaacataactctggcattacatatataattaacagcctcaaagancatgtttctttattaaactctgactgtttcagcattatttt

SEQ ID NO: 735 - DNA, 219 bp, Homo sapiens
  misc_feature 107, 111, 156: n = A,T,C or G
gcgaattggagctccccgcgggggcggccgcccgggcaggtactactgtgtcctttagatcactctgccttgatcactctgtcccgtcactctgctatttcacctgncagngaaatacctggtatcgtcctgccaacgtgaagcattgaatgcttnatacgtctccatcctgattgtttaggctttgaatgctgagaagtatctgcactttgttggtca

SEQ ID NO: 736 - DNA, 490 bp, Homo sapiens
  misc_feature 100, 109, 424: n = A,T,C or G
ccttagggcgaattggagctccccgcggtggcggccgaagtacccttaagccctgctcctttgtaaagtctttttggattgtcatcatcaagagtcagtngatctccancttctcagaactcacagggcactctgtctaggcattgctgaccgtctgcagtgtcagatggtgacttctgtatgtgttgtgtttcccgttagactctaaggtttttaaaggcgagactcactcctgcagaagcacataacacaatgccaaactcttatttacggaggtcctggcgcattgtcagcttttggtaaatgcttttcttttgttgaatacttatcttctgtgtgccaagatttgtgttaagtgctagaaaaatgtgggaggtcaccgcagaccctgttctcatggaactgatggtgtgtagtggggtgnggattaacataaataaaatgatgcgcaaatgaacacaaaattcaaattgatgatgtgtacctgccc

SEQ ID NO: 737 - DNA, 443 bp, Homo sapiens
  misc_feature 2, 101: n = A,T,C or G
tntagggcgaattggagctccccgcggtggcggccgaggtacttccctgagcagtcgaagtggatgcccagaccaatggccagtgctaatatcaatgcaangatcccaatgacgatgattggaaaaaacttcaatggcagcagtgacaggatctgtgcagcaacagcatctgcatctggtgcaacaggacttattttcaaatcatcaaggccaaaaagcgatcggaatgagaagggggcttcaacagcaggcggatcattttcccccatggtgactatttcaggacctctgacatccggctccgcctccacctctacctcataattcccgagtcccaaaaatgtagatggcaccacggaagagatagtaggccacagtgttactggcttcccataaacacagccctttcctggctcacacggggcatgacctcccgcgtacct

SEQ ID NO: 738 - DNA, 353 bp, Homo sapiens
  misc_feature 49, 88, 93, 183, 274, 336, 338, 341: n = A,T,C or G
agctccccgcggtggcggccgaggtacatgtagttggatgtcgaggttngattagattctggggttggtttgcttgttttggtggatngtttntgagtcgactttacagagggttgtttatccaccagaaggcacatgtgcttgcctgtgtcttttttgttattgttttgaggcagagcctcnctctgtcttccaggctggaatgtagtggcacaatcttggctcactgcaacctccacctcccaggttcaagtgattctcctgcctcagcctnccaagtagctgggattacaggtgtgtgccaccatgcccagctaatttttgtattttcagtananatngggttttttgcc

SEQ ID NO: 739 - DNA, 292 bp, Homo sapiens
  misc_feature 288: n = A,T,C or G
ctatagggcgaattggagctccccgcggtggcggccgcgcgggcaggtacacttccacgagaagaattaatattgtagtgttaggaaaactagcaatttaactaaacagcatcaagttacaaaccaggaaagtgatttaaaactaaatgctggcttatctttctgaaacaaagcatctaaatttgacagtccaaaatggcacttattgagtgtccgtgacaatacatgctgacaagcagcacacctcttttttgtttttttaagacggcatcttgtgctgtcacccangctg

SEQ ID NO: 740 - DNA, 501 bp, Homo sapiens
  misc_feature 80: n = A,T,C or G
ccgcggtggcggccgcccgggcaggtacctatataaaaattgatttagcttctacactcaagtaattataaacaggtttntcttttgggacatttgacagttatgtgaaaggtgagtcttcgttgtgtagtattgtctgttacactgcaggtgtctagaattgctgatagtgttctccctctaaagtaatgtcacccaaccacttgtaaattgacgataataagacaggaaatcaagaaccaatataaataagcaaacatttgaaaataagagctaaaaatcaaaaataatctctctttttgctgataatactttatacctaaataacctaagatttttttttttttttttgagacagagtcttggctctgtcacccaggctggagtgcagtggtgcaatcccggctcactggaacctccgcctcctgggttcaagcgattctcctgcctcagcctcctgagaagctgggattacaggcatgcccaccgtgcctggctatt

SEQ ID NO: 741 - DNA, 421 bp, Homo sapiens
  misc_feature 270, 284, 304, 305, 336, 394: n = A,T,C or G
tatagggcgaattggagctccccgcggtggcggccgaggtactacagtataaatcatgctcctgctgtctagagcttaccacccaacgagggcttcagataagatcagcaactgccctagagtgtggaactcctatgacaaggtgagcctggggtgtgatggaaacacggcgtgcatggttaccaagccacgcttccagggaaaggggtccgtgcgggaaaaacttcagagaggaaatgacatgtcagtcaataacctgaaagaactggntgagagttaagcancagggaacaagggcacagtnntccacacagctttttggaaagatcatgttgnttatagtgcaaaaaaatactgaatatgggaaacaatttgttattattttttaggagtnttgctttgtcccccaggctggagtgca

SEQ ID NO: 742 - DNA, 284 bp, Homo sapiens
  misc_feature 105: n = A,T,C or G
actactattgggcgaattggagctccccgcggtggcggccgaggtactttggggggaaaaagagttacaatttgcccataaagaatggagagaacagaaatgtancttttatgctgaaaaacaaaatgcaagggcaatccagtttctaattcctgtgccaaagctgctgttcttgatgacctcggtcaaatcatttaaattctctcaatttgttcatataaaagtgctattaacctgcagttccttcaaatactatccaatcaatgttggctacttgattttca

SEQ ID NO: 743 - DNA, 464 bp, Homo sapiens
tatagggcgaattggagctccccgcggtggcggccgaggtattcacagggtatgcataaaccaaatatacaagaatttaatgacagcattatttgcaaacagtgaaagattctgagcaatcaaaaggttcattactacaggcataggtctataaattactactgtatggaatactatgcagccattaaaataatgaggaagagggagagtgccctgtatgcactgacatggaaaggtttcagtatatggtaaaaagcagctcatcttagaacagattttatagtatgaccccacttgtgtggaaatattttgtgatgtgccactcagtgtatacgtattcatgagtgcatatacaagtgtgtgagaagcaatgtaagtaactgtttcacaaggaccccccctttaagaaggcagaggggatcgggggatatagagtgaagggatgatttttgctttttcctcta

SEQ ID NO: 744 - DNA, 244 bp, Homo sapiens
  misc_feature 147: n = A,T,C or G
ccgcggtggcggccgaggtacgcgggaggaaagggctgtgtttatgggaagccagtaacactgtggcctactatctcttccgtggtgccatctacatttttgggactcgggaattatgaggtagaggtggaggcggagccggatgtnagaggtcctgaaatagtcaccatgggggaaaatgatccgcctgctgttgaagcccccttctcattcccgatcgctttttggccttgatgatttgaaa

SEQ ID NO: 745 - DNA, 374 bp, Homo sapiens
  misc_feature 63, 272, 364, 367: n = A,T,C or G
ccgggcaggtacacagtaagtgaagggccaagactgacggctgataggacaggggtgaccagnggtggggagggtagtgggagcagtccatcctggaatctggcattcaaggggcgcattgtctgtgggaggatttaaaaataataaaaccaactaaaggcagtctgctttttatggtcaccaggccgccagcaattctaaatttcagtgataaaatattcctcctcactggacacgagaagctggctttctccttattccccagtaccttnggcccgcttctagaaactaggtgggatcccccccggggctgcagggaatttccgatattcaaagccttatccgaatacccgtcgaccctttnganggggggg

SEQ ID NO: 746 - DNA, 340 bp, Homo sapiens
  misc_feature 11, 47, 61, 120, 123, 130, 166, 196, 212, 228, 271, 272, 291: n = A,T,C or G
cggtaatactngttatccacagcaatcaggggggattaatcgcagcnaaagaacattgttnagcaaaaagggccagtcaacaagggccaggaactcgtaaataaaggcccgcggttgctnggncgttttntcccataagggcttccgcccccccttggacgaggcntcaccaaaaaattcgaccgctcaaagtcangaaggtggcggaaacnccgacagggacctatnaaaggataccaaggccgttttcccccttgggaaggctcccctnnttgccgctctcctgttccngacccttgctcgcttaccggatacctgtcccgccttttctccctttcgg

SEQ ID NO: 747 - DNA, 443 bp, Homo sapiens
  misc_feature 7, 78, 402, 414, 416: n = A,T,C or G
ccgcggnggcggccgaggtacatctttggtgacttttcattcacatttcatggataatttggggaggtggcctgccanccctgaagccctacatccccatacacactctgtgcacatccagtgccctgctccaccatggcagtgcccgcaagggggtcccagatgagaagaagctggctaaagggcccttgtcccctctcagactccttcagcgggctggagtcctccctcgctcgatttcgcccgagagcgttaggggtttctaaatgcaggcgcctttgtgttgtaacgaaacttttagtttaagggaaaatctcttttaagccactgattgttctgacttgctgagtttactcagcagccttatgctggctctgccactgcacaataaaaccaaagcangacagttgcagntnaagcaagggggaacatgttttgcattt

SEQ ID NO: 748 - DNA, 470 bp, Homo sapiens
  misc_feature 325, 331, 338, 339, 342, 357, 358, 359, 361, 362, 363, 364,385, 399, 422, 424, 436, 451, 453, 458, 460: n = A,T,C or G
gcccgggcatggtacctgtgtggaaaagaatgcttgcaaagcttgtcaccctcacgagaattcctgtgacagacatttgcctttgacagtgaaaacagatattaaagtgaaaggagaagaaaccgaagagcatcagaggggacgactgggttacttaactgttggggagcaatctgaggagttggttaccagagaaactggcgatggcgatcccgtgagcaacatctctcagacccattttaaaatgccgggggatacttaatcatgctgaaaaacagcagagcccttgaggtttttggactacatgttgcagaaagaaagaagnaatttntaccttnnccnaaaaataaaaatatnnnannnnggtacctcgggcccggttttnaactagtgggattncccccgggcttgaaggaattcgntnttcaaagccttnttcgatccccgtccnancctcnangggggggggc

SEQ ID NO: 749 - DNA, 346 bp, Homo sapiens
  misc_feature 30, 38, 39, 40, 96, 109, 141, 159, 162, 163, 187, 293, 295: n = A,T,C or G
aggtactttttttttttttttttttttggnctaactgnnnggagtatttcttttacccaagataagtaaaagctacaactcttagtataaatatgngtccaagtgcctnataactgctaaccacagggatcctgagctctnatagcttaaacacacagngtnnattttactggtctacttctcctgnagacctaaaagggcctatagcctcagtagttgacaaaacaacatattaaaattcctcactgatcactaacataacctaaaatccctgcttttgacattagcatggnanacatccttagcaggcctaaatagaatggccttataagtggatccaaagggc

SEQ ID NO: 750 - DNA, 374 bp, Homo sapiens
aggtacatcaccctgctgagggacatccaggacaaggtcaccacactctacaaaggcagtcaactacatgacacattccgcttctgcctggtcaccaacttgacgatggactccgtgttggtcactgtcaaggcattgttctcctccaatttggaccccagcctggtggagcaagtctttctagataagaccctgaatgcctcattccattggctgggctccacctaccagttggtggacatccatgtgacagaaatggagtcatcagtttatcaaccaacaagcagctccagcacccagcacttctacctgaatttcaccatcaccaacctaccatattcccaggacaaagcccagccaggcaccaccaatta

SEQ ID NO: 751 - DNA, 361 bp, Homo sapiens
  misc_feature 25, 26, 104, 179, 180, 338: n = A,T,C or G
gtgtccggaatcctacccggtgtgnngacagtgcctgatagtttcttctgcctttctatcccaaaacgattggtcagtttacccaagtttgcaatgcagtttanaatctcccaggaacatctcttctagtagttgccttagccatcttgtagttgatttgactttttttttttttgctnncagaaagctctatgcttcatatggacttgcataccaattttttgttcatctgttggtcatgatggttagcagagcctgacctcctgttacaatagaatgatcggttcctgggctacagacttgagtctgttttttttgttttttaaaccttcccatgnggcaatttgccatatgcaaaact

SEQ ID NO: 752 - DNA, 377 bp, Homo sapiens
ccgggcaggtacgcgggtgaaaatggaatagttttctaattacagaaagaaaagaagttgaagtgggtttcgccatgttgagcaggctggtctcgaactcctgacctcaggtgatcagctcgcctcagcctcccaaagtgctgggattacaggcatgagccaccacgcctggccaaaaatcttataaataatccccttctaatttcggccagcttaatcacacaccaaattcctttcatgagattaatcttccacaacttctacacttccttaaatctttgattttgtcctatacttctttttttatattagcaatctactttaggacagaaatttactttcctttcctcttgattttgaccaaagtcctctcttat

SEQ ID NO: 753 - DNA, 338 bp, Homo sapiens
tagttttctaattacagaaagaaaagaagttgaagtgggtttcgccatgttgagcaggctggtctcgaactcctgacctcaggtgatcagctcgcctcagcctcccaaagtgctgggattacaggcatgagccaccacgcctggccaaaaatcttataaataatccccttctaatttcggccagcttaatcacacaccaaattcctttcatgagattaatcttccacaacttctacacttccttaaatctttgattttgtcctatacttctttttttatattagcaatctactttaggacagaaatttactttcctttcctcttgattttgaccaaag

SEQ ID NO: 754 - DNA, 376 bp, Homo sapiens
ccgggcaggtacctatatgatgttggccatgctcactcactcctccaaccctcagtttacacatctgcaaaatgagatacttcttttccagtgttgctgtggacattagcaggcacacacatttggtgcttgcacaaatgaggtcctaagaggtgggtccctctcatcttacgtgaggaaactgaagcagattagaaatgacccaaggaaaccactccgagttcagtctggagcccactcccctaggttttaatcatcccccaactcagtccctatctgctgaggttcctggatccagacggttcttaccaaggaactgtctgtcctcaccacatggatggttttcctggcagaggtgtgccctgtgagggggtca

SEQ ID NO: 755 - DNA, 323 bp, Homo sapiens
  misc_feature 12, 23, 28, 37, 40, 41, 57, 192: n = A,T,C or G
gccgaggtacanacaagggggcnactgncatgggggnggnntctggtcttgtagtcngtttggaattttctaagtcagggtggggtggggggactgtgcacgggtcatgtgcagactggaacccatctccccctcggtctgcaagttaaaacaattgggttgtccttctcagcatctgccaatgtctcttantcaatcttggatcaaaagggcgttggaggaggaggctgggagggaaatccagacagttctccgcctctgacatcaggtccagctgttagcatcgtgctgtgggtccctgaacaagaagcaaagtcaggact

SEQ ID NO: 756 - DNA, 358 bp, Homo sapiens
  misc_feature 27, 29: n = A,T,C or G
aggtaccgctgtgtccgggtgggtggngngaatgccgtgctccaggtgttcacagctgcttcgtggaagaccatgtgctccgatgactggaagggtcactacgcaaatgttgcctgtgcccaactgggtttcccaagctatgtaagttcagataacctcagagtgagctcgctggaggggcagttccgggaggagtttgtgtccatcgatcacctcttgccagatgacaaggtgactgcattacaccactcagtatatgtgagggagggatgtgcctctggccacgtggttaccttgcagtgcacagcctgtggtcatagaaggggctacagctcacgcatcgtgggtggaaacatgt

SEQ ID NO: 757 - DNA, 365 bp, Homo sapiens
  misc_feature 29: n = A,T,C or G
aggtacctctggatatgttacactgaganagatacttcatcacttacatgatattgctcccccacaaatttcataacctgaatctagttataaggaaatactatgcaacccaaattgagggacattctgcaaaacaactacctgtaatctttttttttttttttttgagacggagtctcactctgtcgtcaggctggagtgcagtggcgcgatctcagctcactgcaacttctgcccccggggtgcgagcgattcttctgcctcagcctcctgagtagctgggactacaggcacacgccaccacgcccagctaatttttgttggggtttcaccatgttggccaggatggtctccatctcttgacc

SEQ ID NO: 758 - DNA, 420 bp, Homo sapiens
  misc_feature 175, 190, 199, 201, 212, 214, 220, 221, 233, 238, 244, 247,256, 305, 306, 308, 309, 318, 329, 331, 340, 343, 346, 348,350, 356, 359, 363, 366, 371, 373, 375, 377, 378, 384, 387,391, 393, 396, 410: n = A,T,C or G
ccgggcaggtactatggtccccggcaacctccccttcctcctgggaatgctcaaatgggaaggcagcatgaaacggtgaacaggcaatcactggacaaagtcacaagaactgggctttagaaatggttttaccattagcagttgtgacacctcagaagtggcaactctggatctnaataccctacccttnaccctaagnanaggtacctccncnattttnncggggggaaacnttctngggaanttnccctttccnaaaaaggggggggggggctcttttttttttttttggggggggggccccnncnnccccccccnttttttttttntnaaagggggnttnaanananatttcnttnctcnttnttttntnangnnaaaaantcnggtngnggngtttttttttttanaaaaaaaaaa

SEQ ID NO: 759 - DNA, 259 bp, Homo sapiens
  misc_feature 58, 62, 64, 78, 81, 224, 246, 247: n = A,T,C or G
ggcggccgaggtacaaagaaaggacttgatagctattaccttgctgctatgtttgttncttngnctcaccaatcattnttntgtatacctagcactgcaccaggcgctgaggttagagaaataactaaaactgcgcccttcacccctgatggcaggataggcaaggttggcaccatcgtcacagcaggaccctcatcgatgccttggtgtgtgcctggcatggngtttgcagcagtttatcacatnnaatccttacagc

SEQ ID NO: 760 - DNA, 478 bp, Homo sapiens
  misc_feature 403, 408, 410, 416, 430, 448, 453, 462, 467: n = A,T,C or G
aggtactcaggccttactgggatttcctttaagacctctgggaggaagtgtcagtagctgggcaggccttcttggcaagcattcctccctgggttgtggcgggggctcccggcctgctgtgtggcagctgcaggctcctggggacctgaaggaaaagcttaaccgttctcccttcccttgcttggcacttagagcactagttccattccagacataccgattatcttgcctacgtggcatagaggcctaggagcctccctgggaggaagaggcaggccaaggtcttgcctggctgcttttagggggaaagatgtagggaggaagctgccttatgcttggatctgcaacctttgcctggacctgcggagcctattttggccagggggagggagacagaaattanacccnangtattnaggtaatccttttnttgcctttgaacattgcncgggngtactttgnaaaanaaaaaaaaaaa

SEQ ID NO: 761 - DNA, 498 bp, Homo sapiens
  misc_feature 100: n = A,T,C or G
ctagggcgaattggagctccccgcggtggcggccgcccgggcaggtacgcgggtgaaaatggaatagttttctaattacagaaagaaaagaagttggagngggtttcgccatgttgagcaggctggtctcgaactcctgacctcaggtgatcagctcgcctcagcctcccaaagtgctgggattacaggcatgagccaccacgcctggccaaaaatcttataaataatccccttctaatttcggccagcttaatcacacaccaaattcctttcatgagattaatcttccacaacttctacacttccttaaatctttgattttgtcctatacttctttttttatattagcaatctactttaggacagaaatttactttcctttcctcttgattttgaccaaagtcctctcttatgcaaaatgaaaaattactcttttttcaactttctttaccaaaaatacatcctcataactttttttccatctctcctacttactgg

SEQ ID NO: 762 - DNA, 457 bp, Homo sapiens
  misc_feature 98, 104, 107, 122, 128, 149, 163, 171, 218, 223, 242, 246,249, 288, 289, 295, 297, 306, 314, 321, 322, 325, 335, 348,391, 402, 405, 408, 413, 423, 425, 429, 430, 433: n = A,T,C or G
atagggcgaattggagctccccgcggtggcggccgcccgggcaggtacgcgggtgaaaatggaatagttttctaattacagaaagaaaagaagggggngtgggnttntgccatgttgagcangctggnctcgaactcctgacctcaggngatcagctcgcctnagcctccnaaagtgctgggattacaggcatgagccaccacgcctggccaaaaatnttatnaataatccccttctaattncggncancttaatcacacaccaaattcctttcatgagattaaactnncacaantnctacacttncttaaatntttgatnntgncctatacttntttttttatattngcaatctactttaggacagaaatttactttcctttcctcttgnttttgaccaangtnctntcttntgcaaaatgnanaatnnctnttttttcaactttctttaccaaaa

SEQ ID NO: 763 - DNA, 424 bp, Homo sapiens
  misc_feature 13, 66, 82: n = A,T,C or G
ttagggcgattgnagctccccgcggtggcggccgaggtacatgtaatgctcctgaactgtatgctngacacggctgtctacntaggttttgttctgtgtattttatgactatttttttaaaaagtaaacaaaaaagaattagctggaaataccagcacaggcaaacccctggagacagaaagcaggtgagtggttgctggggcttgagcaggaggaagggcgagggactgcagaatggccatgggctttgccttctagcatgatgagaatgttctggaattagacagtggtaacgcttgttcaacactgccagtgtagttaatgtcactgaattatacactttaaatggctaacatgaccaattttatgttatatatattttactaccacaaaaaaactagctggcacctaaaaacattccatt

SEQ ID NO: 764 - DNA, 208 bp, Homo sapiens
  misc_feature 58: n = A,T,C or G
ccgcggtggcggccgaggtacttggatgggttttgtgtgtatgtttgtgtgtgcactngcgtccaccctgttgggcttagtgaactttttgattcagtgatttaaagtttctcatcagatttggaaaattctcaattacttttttctttaaatatttctcttgcccttcccctctctcttcttccaggattccaatttcatcgatgtt

SEQ ID NO: 765 - DNA, 467 bp, Homo sapiens
tacttagggcgaattggagctccccgcggtggcggccgaggtacgcggggggttcaagcgattctcatgcctcagcctcccaagtagctgggactaaaggtatccaccaccacgcctggctaatttttgtatttttagtagagatggggtttcaccatgttgatcaggctggtctcgaactccggcctcaagtgatctgctcgccttggcctcccaaaagtgctgggattacaggcatgagcagctgtgcccagctggataattatttaataaattggggagcataggaagcatagtatttgtgaagtgggtaggcaggtgtgatgggggtaggtgatgttacatttggggcattttgaagttggtggttcttctgagttgagcagtcagtcactcttcatttgctgcacctttatctcattttagccaacagacattgaatacctaccaagtcttaggtatttgca

SEQ ID NO: 766 - DNA, 313 bp, Homo sapiens
  misc_feature 4: n = A,T,C or G
actnctatagggcgaattggagctccccgcggtggcggccgcccgggcaggtacaagaaagaaaacaaataccaagtatttacagatccagagaaagttcacaagaatgggaggatgccagttccaatgctttgtaaagtcaaaaatagccacattgcaaaacaaacaaaaaaaaacgagaacgttcccgagtgtgcctccaaaacataaaggagaaaatcatacagaaaaacctcatgtaagggttggaacttgagcaaccagctatccaaatacagaggggaatcctcgcttagctagggcatggcctgag

SEQ ID NO: 767 - DNA, 289 bp, Homo sapiens
  misc_feature 230, 244, 248, 260, 262, 271: n = A,T,C or G
aggtacacacagtgatttggggtcctttttcctaaaacagcttctttatcaggactttggaattctgggtgagatagaaacactgaaaacagggcggaagttttttcttctggcttcttagtccatggagggctcagcgtggagaggatatgccgtggcattctccctgggagaccacacatgttcccgacagctcagaccccagacccgcacatgcttcttgacagttnaaaccccaaaccgnaggngctcccgacagntnaaaccccanaccccgcgtacctgcccg

SEQ ID NO: 768 - DNA, 337 bp, Homo sapiens
  misc_feature 333: n = A,T,C or G
ccgcggtggcggccgaggtacttaataattcataatttagccatgatagtatctaagctcactttcagaattattgcatacatgccttagggaagaacctatccactaatgcttttaataacttacatagattgtgttgcggcaagtcaagttttaatatagaggaaagggtttatcttatcatagtaaaatagtagtgatgtgttcataatttactatttgcatggtatattatcaaggctgtaaaagcttgaatttgccttttccacatcttcatttcaaattaatttttgtgaggacccagagaagtgggtagaacccaaatgcccatgngggt

SEQ ID NO: 769 - DNA, 293 bp, Homo sapiens
  misc_feature 5, 261, 265, 276, 288, 289, 291, 293: n = A,T,C or G
ggcanggtacaaattcaggggaggatggagcagctgcaagcctggctggcatcccatgccaacaaggtgacccagtagataagtgacaaggtgactgagctgcctggtgctcttgcatagaattttcaagtgttagaaaaatgtctccatgccttgcaatttgtctcttgtggccaagcctaactcagatggaaatgcagaaatcacccgtcttctgcgtcgctcacgctgggagctgtagaccggagcttgttctaattnggcnatttgggttcntcccccccgggnncntn

SEQ ID NO: 770 - DNA, 507 bp, Homo sapiens
  misc_feature 77, 289, 402, 489: n = A,T,C or G
tacttagggcgaattggagctccccgcggtggcggccgcccgggcaggtactttttttttttttttttttttgaggnggagtctcactctgttgaccaggctggagtgcagtggcacaatcttggctcactgcaacctctgcctcccgggttcaaacgggtctcctgcctcagcctcccaagtagctgggactacaggcgcatggtgccactcccggctagtattttgtattttagtagagacgggggttttactgtgttgtccaggctggactcgaactcctgagctnaggcaatccaccagcctcagcctcccaaagtgctggcattacaggcatgagccaccgtgcctggcctctttcatattttttttacacttttcatttcttcttattttaagtgngctggataggggctccagaacagaattcaatagaaagttgtgacagtaggaacccttatcttggtccctgattttaaaggagggttnaaaaaaaaccccccccaa

SEQ ID NO: 771 - DNA, 444 bp, Homo sapiens
  misc_feature 22, 294, 408: n = A,T,C or G
acttagggcgaattggagctcnccgcggtggcggccgcccgggcaggtacttttttttttttttttttttggagagagggggtttcactatgttgcctaggctggtcttgaactcctggcctcaagagatcctcttgcctcatccttccaaagtgctgggattacaagcgggagccactgtgcctggcctagaagatctgttttcttttctctgaataattcttgtgacactgtctctccctccatctctttctgtttctttgtcatttttcccagctatccttttttccttgncttgtcctcttctcccctccatcctaaaacctttgatcacaagctagtttcctttccacatcatctgctcccctctactaaacgctatttcgcccccacctgctttcaagctgngcttgcctctgagcccctctttcaccacggcccaaa

SEQ ID NO: 772 - DNA, 381 bp, Homo sapiens
  misc_feature 1: n = A,T,C or G
nctacttagggcgaattggagctccccgcggtggcggccgaggtacctcatgctagacaaccttatgacttgaaaacaaaataatatttgaaatggaaatggcctcagttccacccctggtgcccacatagcatagtgaacctgcccctgcagcattgcccatgagtgctaagatcctgtgcccatttgcatgtcttccttaaacaaaagaccgccttagtaagaaattagtaaaccagggagataatcaacttatcccccaaaagatttaagcctctcattttgtttaaccttcattggggattttaaatagaaaactagggcccggcagggtggcacatgcctgtaattccagtacctgcccggccgctctagaactag

SEQ ID NO: 773 - DNA, 325 bp, Homo sapiens
tacttagggcgaattggagctccccgcggtggcggccgaggtacatcaccctgctgagggacatccaggacaaggtcaccacactctacaaaggcagtcaactacatgacacatttcgcttctgcctggtcaccaacttgacgatggactccgtgttggtcactgtcaaggcattgttctcctccaatttggaccccagcctggtggagcaagtctttctagataagaccctgaatgcctcattccattggctgggctccacctaccagttggtggacatccatgtgacagaaatggagtcatcagtttatcaaccaacaagcag

SEQ ID NO: 774 - DNA, 355 bp, Homo sapiens
  misc_feature 256, 270: n = A,T,C or G
aggtacgcggggagtgaacgctctcggagaaccctttcccacgaacgtccacttcaaaagaacgcgacggagcattaactctgccactgacccctggcctgccttcgcctcctcctcttcctcctctacctcctcccaggcgcattaccgcctctctgccttcggccagcagtttctatttaatctcaccgccaatgccggatttatcgctccactgttcactgtcaccctcctcgggacgcccggggtgaatcanaccaagttttattncgaagaggaagcggaactcaagcactgtttctacaaaggctatgtcaataccaactccgagcacacggccgctctagaactagtg

SEQ ID NO: 775 - DNA, 462 bp, Homo sapiens
ccgcggtggcggccgcccgggcaggtacactactggcataagagtaaattggtgagaactttctggaggggtagtttggcaatgtgtttccaaaaaatctaaaaattatatttgcctctaatccagcaattatacctctagaaattaatactaaggaaaatcttaagaatataccgtaaaactttagttgtaagaaatttttttgtggccaggcatggtggctcacacctgtaatcccagactttgggagaccaaggtgggcggatctcctgacctcatgatccacccgcctcgacctcccaaagtgctgggattacaggcgtgagcaaattttaaataagaagaaacagtcaacagcatcagacatagtaggtatgtccaacaccataatggctgaaaagtgccccctagtctggcaattagtaggtcattggtttattaataaccggcatgttaaagttg

SEQ ID NO: 776 - DNA, 214 bp, Homo sapiens
ccgcggtggcggccggcaggtacaaatcatacctcccaaggtattgctccattgtgtttttgtgcatttggtttggatttttatggggaattgaagacaagtggatcataaagtgcaaaataaaatgctctagaaatgacagatggggcacaatttccaagaaaattcatctagacagtggcaacactgagaaaaaaaagaaacattcaagaag

SEQ ID NO: 777 - DNA, 408 bp, Homo sapiens
  misc_feature 13, 330, 401: n = A,T,C or G
gaattggagctcnccgcggtggcggccgcccgggcaggtacttttttttttttttttttttgctagagatggggttcaccatgttggccaggctggtctcgaactcctggccacaagtgatccacctgtctcagcccccccaaagtgctgggattacaggtgtgagccaccactcctggcccatgtttaggatttataccaatattattaacttagaaataagtttctaataaattattccacccgaacttagggtaactgaattttaatgctgatgtattaagcaggttcttcctggggtcttttgattctcaagggatccttcactgngggtggacttcaaattaataggaagcaggaaggagccacctgcactgttttcttgactggggatgacaccnaaacctt

SEQ ID NO: 778 - DNA, 275 bp, Homo sapiens
  misc_feature 217, 227, 234, 243, 254: n = A,T,C or G
ccgcggtggcggccgaggtactatgagaatttcaaacaaagaatgaagccataaaacaaaaagactgaatatttggctctgcctggctcccaggctttctactattcttgtgacttggcctcaacaaaatctaaagtgacttgttatttgtgggtcagctttgtcccatccttaccagtcatggctttagacaaaagactcagcaccactcaccctntgggacagtntgactgnggtctgagncccctgcttanatattaggcttaagctcagtt

SEQ ID NO: 779 - DNA, 304 bp, Homo sapiens
cactacttagggcgaattggagctccccgcggtggcggccgaggtactatgagaatttcaaacaaagaatgaagccataaaacaaaaagactgaatatttggctctgcctggctcccaggctttctactattcttgtgacttggcctcaacaaaatctaaagtgacttgttatttgtgggtcagctttgtcccatccttaccagtcatggctttagacaaaagactcagcaccactcaccctctgggacagtctgactgtggtctgaggccccttgcttagatattaggcttcagctcagttcc

SEQ ID NO: 780 - DNA, 287 bp, Homo sapiens
  misc_feature 2: n = A,T,C or G
tnctatagggcgaattggagctccccgcggtggcggccgcccgggcaggtacacacagtcagcatgcgctgtagcaatgtgctttgcagctggaactcctatcaagcatcctaggcaaggcatgcaccccagcgccagagagaatcaggaaggggaaggtgccctgaacctcagacaagaaccccttccagaaaccaccaccaaagccatcactgtgtttccaccctcagacctgtgtctctttagcttcttggtagaaggaaagaagaggagcttgggtggggcag

SEQ ID NO: 781 - DNA, 449 bp, Homo sapiens
  misc_feature 91, 292, 304, 309, 310, 311, 318, 321, 327, 328, 329, 333,335, 336, 337, 343, 347, 358, 359, 360, 363, 364, 365, 374,375, 376, 395, 417: n = A,T,C or G
ctatagggcgaattggagctccccgcggtggcggccgcccgggcacggtaccatggacatgcaccccggccacagagaggcgcacaacttntacagaacacccttccacctggtcttccacagctgcatcagattcctggactgtcacagacatgacttcaaacttgaaagttgcaagatctcctggaacaatttccacaatgcatacaacttcattcttagcctcaagcactgaattagactccatgtctactccccatggccgtataactgtcattggaaccagcctggncactccatcctntggannnttaaacnttnaaaaannnaaancnnncccctnggcntttttaaaaannnggnnncccccgggnnngggaaatttttttttaaanattttttttccccccccccccngggggggggggccccccccccccccttttttt

SEQ ID NO: 782 - DNA, 283 bp, Homo sapiens
  misc_feature 1: n = A,T,C or G
naattgagctccccgcggtggcggccgcccggcaggtacttccctgagcagtcgaagtggatgcccagaccaatggccagtgctaatatcaatgcaatgatcccaatgacgatgattggaaaaaacttcaatggcagcagtgacaggatctgtgcagcaacagcatctgcatctggtgcaacaggacttattttcaaatcatcaaggccaaaaagcgatcggaatgagaagggggcttcaacagcaggcggatcattttcccccatggtgactatttcaggac

SEQ ID NO: 783 - DNA, 246 bp, Homo sapiens
  misc_feature 2, 31, 79: n = A,T,C or G
cnattgagctccccgcggtggcggccgaggnctgatgtcctacagtcctctacctgatctacgttcactggaaagtgtngagtctcagcaggaagcaccttgctctcgtgtccggctaattcgagtgctttacgtaagtagaggaattgctgacttttgggacatttctggtcttgccaaagttcaccttgtagtaaagcccccaaagatacttcccaaatagatgctctcttgaaaataactcag

SEQ ID NO: 784 - DNA, 510 bp, Homo sapiens
  misc_feature 490: n = A,T,C or G
ctacttagggcgattggagctccccgcggtggcggccgaggtacatgtcggcctattttatattctgtttagtgctttcaaccccgaaatccaccttctaacattaatattgatatccatcctctctctcctccaacctctctctctcttgcatttacttttagattttcattactttctttttattctgattcttgtaaatagtataaactagattcttttatttttatttactttttaaatttatgattgacacataataattgtatatatttatggggcacaacgtgatgtttcggtgcatgtatacatagtataatgatcaaattagggtagttaccatatccattactttaaacatttatcatttctttgtggtaacaacattaaaaatctcatctagaatggcgtgaaccctggaggcagagcttgcagtgagacgagatgggcgccactgcctccagactgggcggacgagcgagacctcccntctcaaaaaaaaaaaaaagg

SEQ ID NO: 785 - DNA, 285 bp, Homo sapiens
  misc_feature 74, 90, 91, 147, 175: n = A,T,C or G
gctccccgcggtggcggccggcaggtacgaaatgagagaaatggtttagtaaacgtataagacatcaacatagnaaagtattctataggnntatgtgttggaattacaaagatgaagaaaagatacaggcaagtatttgatatactnaattaaaaatagcaagatgtagagtagncatgtatacagtgatagcaagaacatggatccttaaggacaaaactgaaacataatgcaaaaaaagaaaaatatgcaaattatttttcgtatgatgtaagttgtaaatat

SEQ ID NO: 786 - DNA, 276 bp, Homo sapiens
  misc_feature 39, 44, 69, 95, 166, 210, 217, 237, 251, 252, 260, 264: n = A,T,C or G
tacttagggcgaattggagctccccgcggtggcggccgngtacncgggcctatttctgaataactcagnggcttaaaattatatcccaaagtagnggtatcacagggtttcctgatgaggataaatgggcctgaagtgcttatgggcacccactatgtatcatggnaaaacttgcacgtgtgtgtgtgtgttgagagagagagaaaaaanaataganaaagttggtgagaaaagggnaggctgttttttgnnccgagggntgtntggttgggcttt

SEQ ID NO: 787 - DNA, 302 bp, Homo sapiens
  misc_feature 41, 47, 279: n = A,T,C or G
ctatagggcgaattggagctccccgcggtggcggccgaggnacacantaagtgaagggccaagactgacggctgataggacaggggtgaccagtggtggggagggtagtgggagcagtccatcctggaatctggcattcaaggggcgcattgtctgtggaggatttaaaaataataaaaccaactaaaggcagtctgctttttatggtcaccaggcgccagcaattctaaatttcagtgataaaatattcctcctcactggacacgagaagctggcttntcctattccccagtacctgcccg

SEQ ID NO: 788 - DNA, 423 bp, Homo sapiens
  misc_feature 3, 31, 33, 40, 201, 233, 318, 412, 414, 419: n = A,T,C or G
ggnggcggccgcccggttttggacgcgggtntntgccctnacttttttagcggagcagaggaaacattcataaggaaatatgcgagtagagctcaggagaaaagcaggactagaggcccaagaatcacaggccagaagaagaagctgtagcctcgggaatggaagagctctctgaaggggaaaggggagaacaggaatgtnccaggagccaaggctcatctataagggacttncacatttaggatgtagaagaaggaagcagaagcaggggatgaccagaaatggccccagagatgagatgaaagttaggagagcggngagcaagcctttaggtttcacaagggaaggagggaaagtaggtgttaggtgctgccaagatcagggaaaataagcagaagaccaggccattttnanttgcngtgg

SEQ ID NO: 789 - DNA, 350 bp, Homo sapiens
  misc_feature 238, 290: n = A,T,C or G
ccgcggtggcggccgaggtaccacaatcaactcaatcacaacatattacaacaaaacccttcatctttttccttaacccactgtaacacaaagcagagaatacagattagcttttttatttgtctgtttgacttcatctcttacatacctctatttcagtatctatgatattttcctcttcttatctgttcaatgacagtcttcccttttaatattctaaacttgtcaagcacagcanttaaaaaagtattctcatgtatatattttatctttagagcatcgcataaagnctgatacataggaagttttagatgcatatttacattgggtagatgaatccaggggaaaag

SEQ ID NO: 790 - DNA, 263 bp, Homo sapiens
ccgcggtggcggccgcccgggcaggtactgcccaagagagacgtctcttactgcctcattaagcatttggagctgttaaacacaaatcaaggcaaccagaaagggcatcttggcttcaggctgggcataaccatcccatttgccacataaaagtctagtggctactctgcaccctttctgggtagaagcagagttagtttggtcatgggggcccctgtgggacagtgttgcccagacaggtacctcggccgctctagaactag

SEQ ID NO: 791 - DNA, 463 bp, Homo sapiens
  misc_feature 15, 17, 20, 59, 424: n = A,T,C or G
aacccactatagggntnatnggagctccccgcggtggcggccgccctggcaggtactgnctgtctcaaatttttggatacgctgtccctcatgtcacctagctgctgagagctttgtgatcctaacaggtgatgactcagaccgacactgcattggtaggaattccacaaataggtgcctcaatgtgcctagattgaaatatcagcctttcccagactgacctgatgggttgacttcaggtgtggtgtaaacacctacattttaatgtaaacatttcagtgtaatcaatgagaactatcattctgctttaatcaccatgagttctgaaataacaaaggatttgtctgacattcattctaagaaattcattcttacctgactaagaaactttttaacctggcacaataataagaaatgacctggnaagtacctcggccgctctaaaactaaggtgggatccccc

SEQ ID NO: 792 - DNA, 301 bp, Homo sapiens
  misc_feature 1, 16: n = A,T,C or G
nggcgaattggagctncccgcggtggcggccgcccgggcaggtacgcgggcaaaatgtaagttggtaaaagacattggactccagctatgttctttagaaagaaggtattggactctggccatgttcttcagaaagaacatgcctggctttttcacgatttgatcagtcttcttagaccctgaaccccaccatgaaatggcttccccagacacaacccgagagagttatgctttgtttctcagctaaaatattttgcagatcttaatttcctgggtcattgcatcattttttttttttttt

SEQ ID NO: 793 - DNA, 395 bp, Homo sapiens
  misc_feature 338, 344, 345, 346: n = A,T,C or G
agggcgaattggagctccccgcggtggcggccgcccgggcaggtaccaagtataccttttcatttaaatcattgaacagttcacaatggctgttgtaaagtttttgccttgttactgaaaccatcatctcttggtctatttctatggagttattttttcctagttattggcagtttgcttatcttttatgtgtctaataacttttaattgaatgtagaacattatggatcttatatttttgagaatctgaatgtttaaaattcctttgaagagtttgtgttttcttctggaggcagtttacttactggctgtgagctcagtcctgttgaggctgtttngcgacnnnctgtggctttgtcagggtggggtggtggatcagacatctggtcatcaac

SEQ ID NO: 794 - DNA, 666 bp, Homo sapiens
  misc_feature 3, 20, 21, 64, 65, 69, 75, 77, 86, 87, 91, 92, 97, 98, 112,115, 124, 130, 132, 136, 143, 152, 162, 163, 164, 186, 191,193, 195, 197, 198, 200, 204, 207, 208, 219, 226, 241, 242,247, 251, 252, 253, 259, 260, 264, 269, 270, 274, 277: n = A,T,C or G
  misc_feature 284, 285, 291, 292, 297, 303, 309, 310, 312, 318, 319, 323,324, 326, 330, 331, 332, 354, 361, 376, 389, 400, 405, 411,412, 413, 416, 418, 431, 432, 434, 435, 446, 462, 473, 478,479, 485, 489, 492, 496, 498, 499, 504, 508, 512, 514: n = A,T,C or G
  misc_feature 518, 520, 525, 526, 533, 538, 539, 540, 549, 551, 563, 580,585, 590, 594, 597, 606, 613, 617, 619, 624, 630, 642, 649,650, 652, 664: n = A,T,C or G
acncccggccaaaagggagnncacaggggggggccaatatataaggggggcaaggagggggggnngggnaaagangncaaaccccnncccnnggggnnggggggggaggggnaanaaagaaggngggggngnccangcaaccnaaagggacnaacccaacannnaagcgggggaagggggcacganagaanananannanaggnganncaagaaccaancaagggnggggggggaagggcnncaaangggnnnaaaaannggcncaggnnaccnaanggggggnnggggcnnagaangggggngggggnnanggaaannaaanncnggannnaaccaaggggaagggagggggngggaaancaaggcccccggggncaaaacaaaaagnggggggaaaanacaancggggnnnggngncaggaggggaggnnannagccggcgcgnaaaaaaaaaaaacaanccaggggcaanggggnngggggnggcnaangccncnnggggnaaancccnangggngnacccnnggagggnggggnnngggggggcncngaagggaaaaanaacccccaagggaaaancccanggaangggnaanaaggggggnggcaagngggnancccgnaaaaanaaaggggaaacnggggganngncccaaaaccccngg

SEQ ID NO: 795 - DNA, 362 bp, Homo sapiens
  misc_feature 264, 292, 316, 322, 323, 324, 325, 326, 338: n = A,T,C or G
ccgcggtggcggccgaggtactatctcttaggagaaggctgacttgaaggctgtgaaaaactaagaaaacaccaaccattcaacagtatactagaattcctttcaatgcataatagaaacaagaagggattagaaaagcatgtcataatttccagatagcataattatttacattaaagatccaagagactcagacctagtaaaagattttggccacattgtgacatttgagatcacattaaaaaaaaaaaggaaaaatcaagngatactaacatcaccaattaacatcatnaattagaaaatttatccatcagcngtattnnnnngggctcaatgcnttgtaatgccgcatttcgggaggc

SEQ ID NO: 796 - DNA, 536 bp, Homo sapiens
  misc_feature 25, 37, 41, 43, 46, 51, 58, 62, 67, 71, 75, 77, 79, 98, 108,117, 120, 126, 133, 134, 135, 137, 138, 141, 142, 149, 151,162, 163, 165, 214, 263, 273, 276, 278, 332, 335, 357, 360,364, 367, 377, 383, 385, 416, 430, 442, 451, 452: n = A,T,C or G
  misc_feature 455, 464, 465, 475, 481: n = A,T,C or G
ccccccccggagtttcagcgaaaancccggccgaggnaccncnccnttacncccaggnttanaaacncccnggtntngncccaggagaggcgggggancaccgcgccnggccagcanggncccctnctaaatnnngnngtnnaaggaancnggaccccaaanncncgccccccacgaaaggagcctgggaactaccagggcgtgagctcaccgngcccggccgctctagaacgagaaggaacccccgggctgcaggaaaaacnataacaagcnaancnaaacccgaccaccccaaggggggggcccgggacccagctgtttgggccctcaanacnagggaaaaattgcgcgctaagngcncaancangggccaaaangctggntnccccggaggggaaaaaaggacactcccgcgncacaaattaccacncaaaacataacngaagccggnnaancaataaaannggggaaaaanaccccngggggtggccctaaaaggagggggagccccaaccaccaacaaaataaattggggg

SEQ ID NO: 797 - DNA, 310 bp, Homo sapiens
aggtactatctcttaggagaaggctgacttgaaggctgtgaaaaactaagaaaacaccaaccattcaacagtatactagaattcctttcaatgcataatagaaacaagaagggattagaaaagcatgtcataatttccagatagcataattatttacattaaagatccaagagactcagacctagtaaaagattttggccacattgtgacatttgagatcacattaaaaaaaaaaaggaaaaatcaagtgatactaacatcaccaattaacatcatcaattagaaaatttatccatcagccgggtgtggg

SEQ ID NO: 798 - DNA, 529 bp, Homo sapiens
  misc_feature 26, 27, 54, 55, 137, 139, 324, 331, 332, 333, 353, 369, 376,378, 382, 398, 399, 403, 412, 414, 421, 422, 423, 435, 437,444, 448, 465, 466, 467, 472, 478, 481, 486, 491, 499, 505,506, 514, 516: n = A,T,C or G
gcggccgaggtacaattcaacaattnntggtccaggatcatgaatgggccattnntagttctgtgtgtgcttaaacacatttttttgtggggtgctgtggatgtgtggatgtagccaaaaaaaaccctattgtgggntnggtcctggggcagaaagtctggtgccagagagtggggttctgggggtctgtcttcatagtttggggtagcactaaaatcctgtgagcctttctgggccttggtaacctcccctgtaagttagctgttagataattcagctgggtagcattttatacctggatgatgttctaaagtccagccacanaaggccnnngtctggcagagtgagaattncctttgaagaaccttnaaactgntncccnagagtgacacaggggnncctnggggaaaancnaaaaagnnnttgggaattctntncaaaagnaagncccatttttttttgccnnnatttnggcccncgntaatnccccnccccaagnaaaaannaaaaaaantnttttttttttttt

SEQ ID NO: 799 - DNA, 224 bp, Homo sapiens
  misc_feature 197, 208: n = A,T,C or G
cggtggcggccgcccgggcttggtaccctctgtcacggcttccctttgctggaaaagggaatttcccaaccccgggtgaggcaatgccccgccctgctccgtgggctgcacctgctgtctgtcaagccccaatgagatgaaccctgtacgcgggggcctgggatctcaaaatggcggccccgtgcggaaacagcgtntgggagcaganattgttgcctcctgaa

SEQ ID NO: 800 - DNA, 228 bp, Homo sapiens
  misc_feature 6, 20, 52, 66: n = A,T,C or G
gggcgntttggagctccccncggtggcggccgggcaggtactatctggaacntgtagcttcctttngcactgcagcatgggaagccagagttgatgattcatacaccagcatttacatttttcagcatgaaagtggtatgttcttcaactcacaacccattggccagaaccagtaacatgacttcacctaactgcaaactagctggagaattgtgggagagctcatgg

SEQ ID NO: 801 - DNA, 378 bp, Homo sapiens
  misc_feature 210, 301, 322, 340, 350, 369: n = A,T,C or G
ccgcggtggcggccgaggtaccatttagcacacaatttccatgtcccaaaagcaacccccataaacagtgactattttttatgctgtttttctttgccccaacacttttatcatttgatatgttatatcttgctttttttttttcttttttaatggagtctcactctgtcacccaggctgcagtgcagtggcgcgatcttggctcactgnaacctctgcctcctgggttcaagcaattctcctggggggtggggaggtttgcaagtgatccaagattgcggctcttcactccagactgggngaaagaacgaaactccatctnaaaaaaaaaaaaaaaaanaaagtacctncccgggccggccgctctanaactaggtg

SEQ ID NO: 802 - DNA, 474 bp, Homo sapiens
ccgcggtggcggccgcccgggcaggacgcgggatggtgtcaacttatgtcaggacccatgggccctccccatgcacacagcactcttggaatctcatccttttccatggctctggctcacacttccacagcatttactcctaaatatgccccctgggttcaagggtgattctcgtgcctcagcctctcaggtaactgggattacaggcatgcaccaccatgcctcgtattttttttgtgtgtgtgtttagtagagacgtgtttcactatgttgtccgggctgatctccaactcctgtagtcaagtgatctgcccgcctcagcctcccaaagtgctgggattatagacatgagccaccacacctgatgtctgatgcttatttattatgtgaccttagcgaagtgtgggtagtcattagtgctggtctatctctataccttccccaggcaaggtaggattgcacttcccgtccact

SEQ ID NO: 803 - DNA, 299 bp, Homo sapiens
  misc_feature 252, 292: n = A,T,C or G
aacgaccgcccgggcaggtactaagccaggacctcagttagcactaagcactcttactattgcccccacctggcacaaagcaaactgagatcttagttgggcccatcatgtgtcatctgattgtcttagaagttctttttttctaagacagagttttgctcttttggctcaggctggagtccaatggcacaatctcggcttactgcaacctccgcctcccaggttaaaagcgatcctcccgcctcagccctncgagtagccgggaccacaggcacccgccaccacgcccggntaacctt

SEQ ID NO: 804 - DNA, 488 bp, Homo sapiens
  misc_feature 20, 463: n = A,T,C or G
tactatagggcgaattgganctccccgcggtggcggccgcccgggcaaggtactctctatgactatcaagctcaggcctctccctttttttaaaccaaagtctggcaaccaagagcagcagctccatggcctccttgccccagatcagcctgggtcaggggacatagtgtcattgtttggaaactgcagaccacaaggtgcgggtctatcccacttcctagtgctccccacattccccatcagggcttcctcacgtggacaggtgtgctagtccaggcagttcacttgcagtttccttgtcctcatgcttcggggatgggagccacgcctgaactagagttcaggctggatacatgtgctcacctgctgctcttgtcttcctaagagacagagagtggggcagatggaggagaagaaagtgaggaatgaagtagcatagcattctgccaaaaggggccccagnttcttaatttaagcaaactaagaag

SEQ ID NO: 805 - DNA, 458 bp, Homo sapiens
  misc_feature 340, 402, 456: n = A,T,C or G
ccgggcaggtacaatggactttgacagttcttcccaaacagatcctaattttaaacattaggtttgctttgattcttttccttggggctaagagctcacaaagacttaggttctggtcatggctccagaggccacacattccaggacaaagtctctctacagtcaacgccttagtcccacatctgtaaaatcggaataatcatccctgatccagctatcacattgcagtagagtgagactcaaatgagataatggaagacagtgggaatgatcatttccaacttggcctggctgacccattccttgttctaaagtcagctcaggtttcacctcttccagngaagttgacctggcactttcttttaggatggctactgctcctctgggtgccccggggctcantgtctccccatcaccgcccatggcacacttggagtgactggtcctttactttgntt

SEQ ID NO: 806 - DNA, 298 bp, Homo sapiens
  misc_feature 2, 30, 64: n = A,T,C or G
tncgggcaaggtacattggccccaaagagnaggaattccttgtagaggagcttgtagatgcttnccctccagcggagaagcaggccagagaaacctccgaagcgggcctccgccactttgagagtgtatgaaaccgtcatggtgctgggagcctggggcaggaggtcacaagagttgcccccagggctgtcgtttagttctccagacaacctcccttccactctggtctcacacaccccagccttcaccctgcgtcagtggacaagggggtaggagcctgcagagcagaaaagtacct

SEQ ID NO: 807 - DNA, 321 bp, Homo sapiens
  misc_feature 4, 24, 50, 51, 309: n = A,T,C or G
agcnccaccgcggtggcggccgangtacgcgggatatgtagaacttcacnngtttgaagttggctgattaaatatactaagtattactgaatcactgccctgccttttctgctttctttacagacctgtttagtatacactgtatgtattttttttttttttttgagactccgtctcaaaaaagagaaaattatgggccgggcacagtggttcatgcctgtaattccagcattttgggaggccgaggcaggtggatcacctgaggttgggagttcgagactagcttggccaacatgacgaaaccctgtntgtacctgcccg

SEQ ID NO: 808 - DNA, 362 bp, Homo sapiens
ccgcggtggcggccgaggtacgagacttgtcaccatgtgacatggcagcttcagaaacttagccactgccaaaaaaagagcaggcagggataatgttgtcccattgtccagtcagagagacctgttgagtctctagtttgccagtccccaagagacctttggagttttgctggagccagacatcctgcttagagatgaggaagatcctgctgttccgtggggagctcttgagacacccgtgccaccacccaccttctcctgattgccacttgctgcccttttcccattaccctctcctgactccataaacatcttcaagtcttccctttctccaccccaaaaaatgcccaccttggaaaggg

SEQ ID NO: 809 - DNA, 144 bp, Homo sapiens
  misc_feature 17, 40, 41, 43, 61, 62, 71, 73, 77, 80, 102, 109, 110, 113: n = A,T,C or G
aaattaattggggttgngctaactgcccggttttcaatcnngnaaaccttgtggggcccanntgaattaananaatnggnccacccccccggggaaaagggnggttttnnaanttttggggcctttttccccttttttaaaaaa

SEQ ID NO: 810 - DNA, 264 bp, Homo sapiens
  misc_feature 21, 127, 200, 243, 246: n = A,T,C or G
ccgcggtggcggccgcccggncacggtacgcggggatgtcttctgagagagtcagggcagctgaagactgggtgagggtgagggaagccgctggtgtcctcctcagtcacccgtgagaggactcctntgtggagctaatcaactgcaaggaagattgttcccagtgtccagacctgaaggagtctggacccatagtgcantgagatttggggaaggaaggattccggataggggtgagctttntgntgataagcaaatgtgaac

SEQ ID NO: 811 - DNA, 243 bp, Homo sapiens
  misc_feature 204, 206: n = A,T,C or G
ccgcggtggcggccgcccgggcaggtacgcgggggtgtttatgggaagccagtaacactgtggcctactatctcttccgtggtgccatctacatttttgggactcgggaattatgaggtagaggtggaggcggagccggatgtcagaggtcctgaaatagtcaccatgggggaaaatgatccgcctgctgttgaagcccccttntnattccgatcgctttttggccttgatgatttgaaaata

SEQ ID NO: 812 - DNA, 415 bp, Homo sapiens
  misc_feature 3, 16: n = A,T,C or G
ccntcaggtaccagancttagcagggattttggacaacaaaagctctaaatcctcttgcatcgacacgttcaatttgcactgaccaatctgttggcacagtaactgtttataagctaaatttctacattttggctacaagtatcccaaatccaccttttaaaaaatcctaggtagatgccatctggtgttaatgatttgcacaccccttaaattgaaaatattttaaataaatctcacggttttatatagtatcattaatgtgtctattttaaaaagacaatctgagaataacacttcccctaattgttgtcttaataatgaccaagagctgaggaaaaatgattcacactgttagttgttttgttgttttgctcacgggggaagggggtgaagtactggctgtgcctgggtttg

SEQ ID NO: 813 - DNA, 393 bp, Homo sapiens
ccgggcaggtacatcaccctgctgagggacatccaggacaaggtcaccacactctacaaaggcagtcaactacatgacacattccgcttctgcctggtcaccaacttgacgatggactccgtgtcggtcactgtcaaggcattgttctcctccaatttggaccccagcctggtggagcaagtctttctagataagaccctgaatgcctcattccattggctgggctccacctaccagttggtggacatccatgtggcagaaatggagtcatcagtttatcaaccaacaagcagctccagcacccagcacttctacctgaatttcaccatcaccaacctaccatattcccaggacaaagcccagccaggcaccaccaattaccagaggaacaaa

SEQ ID NO: 814 - DNA, 445 bp, Homo sapiens
ccgcggtggcggccgaggtacattattcatatccagcactccctgcggctgctgctggaggagcagttatccaacaaggactgtttcaacctcatcgcgtttggaagcacaattgaaagctggaggcctgagatggttcccgtgagtcacaacaatttacaaagtgcctggcggtaggttatgggcagagacttcgtggggctgtgtctgagggaaggtttgcaggcattgttttctctgtccccctctccaccaagaagtagctctctagagtccctgaccccaaacagccatgggcagaaatcagaaaacagcttccttctgtctgctgctctccccacctggccatcttcactttatgagagtaatgacatcgactccatcacgtctgagatgggaaaaaggctcttcagctactcccaaaagggtatgccctgggcatggg

SEQ ID NO: 815 - DNA, 437 bp, Homo sapiens
ccgcggtggcggccgaggtactcttttttttttttttttttttgagacagggtttctgttgcccaggctggagtgcagtggcacaatctcagcccactgcagcctccgcctccccagttccaataattctcatgcctcagcctcccaaagtggtgggattacaggcgtgagccactgcgcccggccacctttctatttttctggttaactttctaaatgtttgaaatggcttccagtgaatttcattttattattgggggaaacttccatacttattttctttcttcccaaatctccacaagtatactctcctcccaaaatttagatagttgtatttttctgattattccaaataagagtgctgagaggctaatcacaaagagcaacagccagagatttacaaagtggttctcttactattgaacattttcacttat

SEQ ID NO: 816 - DNA, 336 bp, Homo sapiens
ttagggcgaattggagctccccgcggtggcggccgaggtaccctgcccaggtaagatcactcgtgggtaagaacatgaggttctcacccgtaaggcaggatttttatagaaggaaggtaggtctttcaacctatgtcctccttctgttccacaaagtggaaagccacaagccctacaaaagccttgcaagtcccagaggctgcagccgtatttattcttcaggccaagactctcaggacagagagcacccatgcaccccgcaggctgcaggccatctccctgcatttgggactgtcctgaggatggcggcttcatttttgtccctcctacctctga

SEQ ID NO: 817 - DNA, 403 bp, Homo sapiens
  misc_feature 27, 72, 77, 103: n = A,T,C or G
gaacctagggcgatttggagctacccncggtggcggccgaggtacattttggcaaaccgtgaagggctttcnttttngcaggttggacttcccccccctagtnggcaggattttttttaggggaccacctgagaaaggtctgttaccgtgcataaacctcctttaacaccttttaaaaactcttctgggggccggactcagtggctcatgcctgtaatcccaccactttgggaggctgaggcagatggatcacctgaagtcaggagttcaagaccagcctggccaacatggtgaaaccccgtctctactaaaaatagaaaaattagccaggagtggtggcaggtccctgtaatcccaactacttgggaggctgaggcaggagaattgcttgaacccaggaggc

SEQ ID NO: 818 - DNA, 118 bp, Homo sapiens
  misc_feature 26, 79, 92, 96, 104: n = A,T,C or G
gccaggaaacccgtaaaaagggcccngtttgttggcggtttttttccataagggtttccgccccccttgaccgaggcanttaacaaaaaatngacngcttcaangtcagaaggtgggc

SEQ ID NO: 819 - DNA, 401 bp, Homo sapiens
  misc_feature 50, 52, 293, 294, 295, 314, 345, 364, 367, 377, 381, 382,386, 390: n = A,T,C or G
ccccccggtggcggcccgccgggcaggtactgggaaatgaggcaaaagtntntctcttcactgctagctccttggggaccagcaagcggctctcaagttgcgtggtggcccaactggaaaaaaggcagttcggtgcatcctgggaatatccaggtgaaagtgtgagatttacctagaatagcttctgggcctctggggttttcacgctgtctctggtgaaggtgtccattttagaactgaagcaaaaaggtttcaatccgttccgttttctttgttttagcacttaccccagnnncctccataacaaaggtggngccccttcagggaaattaaatttttttttcntaaaggccttggcattaanccnttttttttgngggnngggnaaanttttttttttt

SEQ ID NO: 820 - DNA, 355 bp, Homo sapiens
  misc_feature 8, 66: n = A,T,C or G
tagggcgntttggagctccccgcggtggcggccgaggtacatcaccctgctgagggacatccaggncaaggtcaccacactctacaaaggcagtcaactacatgacgcattccgcttctgtctggtcaccaacttgacgatggactccgtgttggtcactgtcaaggcattgttctcctccaatttggaccccagcctggtggagcaagtctttctagataagaccctgaatgcctcattccattggctgggctccacctaccagttggtggacatccatgtgacagaaatggagtcatcagtttatcaaccaacaagcagttccagcacccagcactttttacctgaattttac

SEQ ID NO: 821 - DNA, 381 bp, Homo sapiens
  misc_feature 227, 241, 258, 260, 261, 262, 273, 288, 289, 300, 302, 304,317, 319, 321, 322, 323, 325, 326, 328, 331, 332, 345, 350,351, 362, 364: n = A,T,C or G
ccgcggtggcggccgcccgggcaggtacgcgggcatgcaaaactccagattcctatcttctttgggggaaaagcaaattggaagctctgacaatgctgggctttactttcccacatagcaaccatcagttggagctgagacacctctgctctctttagaaagaattattaatgcttcagtctccattattgcttccctaacagtgaggataagttattggcatcaancctggccggtttancttgggggtttattttntnnntttggggcctnaaaaccccggggggnncctttttggcncngnggggggggggaantntnnnannanggnngggggggggtttntctcnnccccccccacntnttttttttttttttttt

SEQ ID NO: 822 - DNA, 422 bp, Homo sapiens
  misc_feature 273, 286, 298, 387: n = A,T,C or G
ccggcaggtacgcggggaggtcatgcccgtgtgagccaggaaagggctgtgtttatgggaagccagtaacactgtggcctactatctcttccgtggtgccatctacatttttgggactcgggaattatgaggtagaggtggaggcggagccggatgtcagaggtcctgaaatagtcaccatgggggaaaatgatccgcctgctgttgaagcccccttctcattccgatcgctttttggccttgatgatttgaaaataagtcctgttgcaccanatgcagatgctgntgctgcacagancctgtcactgctgccattgaagtttttttccaatcatcgtcattgggatcattgcattgatattagcactggccattggtctgggcatncactttcgactgctcagggaagtacctcggccgct

SEQ ID NO: 823 - DNA, 417 bp, Homo sapiens
acactacttagggcgaattggagctccccgcggtggcggccgcccgggcaggtacgtgttagctattatcatcaccctccttgctaggcagagcaggacagtggggaattgatgtttcctcccctccatctcacaggtggggcaggggtgtgctgagaagagaacttgggactcttggcccctgttcaattctctgcttaacctgctaggcaatttgggcctctgaaaattcagtaatcctcatagcaacttagacgtcacctgggcctgtggtccccttcctagcctaggagtcagagcatgaagctccatctgtcacattggtttgttcagagaactacacatgcgttttattttagcagcatacaggttcccacttaggcattgagaggacataggaagctgtttaacttccta

SEQ ID NO: 824 - DNA, 526 bp, Homo sapiens
  misc_feature 508: n = A,T,C or G
atcactacttagggcgaattggagctccccgcggtggcggccgaggtactagttattttaaattccactcataacttatcggccaaaagtagtcacatggctccacctaatcacaagtggagcgggaagtgcaatcctaccttgcctggggaaggtatagagatagaccagcactaatgactaccacacttcgctaaggtcacataataaataagcatcagacatcaggtgtggtggctcatgtctataatcccagcactttgggaggctgaggcgggcagatcacttgactacaggagttggagatcagcccggacaacatagtgaaacacgtctctactaaaaacacacgcaaaaaaatacgaggcatggtggtgcatgcctgtaatcccagttacctgagaggctgaggcacgagaatcacccttgaacccaggaggcagaggttgcagtgaccgatatcatgtcactgcagtccagcctgggtgacagagcgagaccttgtctnaaaaaaaaaaaaaagaaa

SEQ ID NO: 825 - DNA, 316 bp, Homo sapiens
  misc_feature 304: n = A,T,C or G
ccgcggtggcggccgaggtacagatgtatggatctcatagcattgaggggtctttcagattatgttttcaaacccctcactttctcttttcagataagaccacagcgacctgggaaagtgcaacgtcttagccaaagacacagaactatttagcgacactgtctagactctagtttccatgtctcctgacttcagtctagtgttccacccctgccgcccacccctgccccatcctcattcctcctgtaggagaggccagacctttgcctgctgcagcttgtggctcttctcctgccttcagttnttccattgcctg

SEQ ID NO: 826 - DNA, 261 bp, Homo sapiens
  misc_feature 4, 5, 67, 68: n = A,T,C or G
gggnnaattggagctccccgcggtggcggccgcccggcaggtacctgtctgggcaacactgtcccgnnggggcccccatgaccaaactaactctgcttctacccagaaagggtgcagagtggccactagacttttatgtggcaaatgggatggttatgcccagcctgaagccaagatgccctttctggttgccttgatttgtgtttaacagctccaaatgcttaatgaggcagtaagagacgtctctcttgggcagtacct

SEQ ID NO: 827 - DNA, 437 bp, Homo sapiens
  misc_feature 2: n = A,T,C or G
cnaattggagctccccgcggtggcggccgaggtactggtggtgtggctactaccgttacaactgcctgtgcttggacatggaccctctgcaatatgcggcagtttcattcattgccccctacattctacaccaagtagaaatggaaggcaattggatacttcacagacaagatctaagtggagaaggaatgcgtcctgtggctgcagagatccttggagcttggaggggagagcttgagccccactgatgatgacctcccacagctcgccaactcagccctccctaagtccccatcgggggccaattctcactctggggttggggggactccaccatagctcatccatcataggggatgttggtatctactgtgggtttgggtagggcccgatgtgctgaggatggctcccccacaagcaagagatgtgggatttgg

SEQ ID NO: 828 - DNA, 411 bp, Homo sapiens
  misc_feature 209, 217, 223, 238, 347: n = A,T,C or G
ttagggcgaattggagctccccgcggtggcggccgaggtacatcaccctgctgagggacatccaggacaaggtcaccacactctacaaaggcagtcaactacatgacacattccgcttctgcctggtcaccaacttgacgatggactccgtgttggtcactgtcaaggcattgttctcctccaatttggaccccagcctggtggagcangtctttcnagatangaccctgaatgcctnattccattgggctggggcttccacctaccaagttgggtgggacatccatgtgacagaaatggagtcatcagtttatcaaccaacaagcagctccagcacccagcacttntacctgaattttaccatcaccaacctaccatattcccaggacaaagcccagcccggcccccccc

SEQ ID NO: 829 - DNA, 348 bp, Homo sapiens
  misc_feature 21, 194, 234, 284, 287, 292, 303: n = A,T,C or G
cgaattggagctccccgcggnggcggccgaggtacctgatctactcctctctacaacaaccttgtgggtgacgttattatctccatttcacaaatgaggccacagaggttctaaagggtaaatgacgatgatgatgagaggtaagtgataaaacaatgtctcctgaccacaaatcctggaatttaaacataagngtagtaaacatgaactctaggaagcctcctggggcttctncctgtgtctggagcccctgcacatgcccaaaggaagtccttttggttctncgntcagnagagaaagggngcatttcactaaaagggaggtggggaaacaagactggtggtaggg

SEQ ID NO: 830 - DNA, 441 bp, Homo sapiens
ccgcggtggcggccgaggtacattattcatatccagcactccctgcggctgctgctggaggagcagttatccaacaaggactgtttcaacctcatcgcgtttggaagcacaattgaaagctggaggcctgagatggttcccgtgagtcacaacaatttacaaagtgcctggcggtaggttatgggcagagacttcgtggggctgtgtctgagggaaggtttgcaggcattgttttctctgtccccctctccaccaagaagtagctctctagagtccctgaccccaaacagccatgggcagaaatcagaaaacagcttccttctgtctgctgctctccccacctggccatcttcactttatgagagtaatgacatcgactccattcacgtctgagatggaaaaggctctcagctactcccaaaaggtatgccctgggcatgg

SEQ ID NO: 831 - DNA, 192 bp, Homo sapiens
ccgcggtggcggccgaggtacgcgggtaacaggagtctttgctgagtgatcatctgtttattcttttactccacaaatatcgaatgtttacagcgtgcctggcactgagcagggctggggtttcctgaccatatggaccttcctgggtatatctgtggggcttgaatggtgtgtgaccttgtgtcctgcccg

SEQ ID NO: 832 - DNA, 469 bp, Homo sapiens
  misc_feature 10, 298, 308, 343, 348, 373, 384, 394, 396, 399, 406, 424,437, 457, 463: n = A,T,C or G
cgggcaggtncgcgggggtgtttatgggaagccagtaacactgtggcctactatctcttccgtggtgccatctacatttttgggactcgggaattatgaggtagaggtggaggcggagccggatgtcagaggtcctgaaatagtcaccatgggggaaaatgatccgcctgctgttgaagcccccttctcattccgatcgctttttggccttgatgatttgaaaataagtcctgttgcaccagatgcagatgctgttgcttgcacagatcctgtcactgctgccattgaaagttttttncaatcatcgncattgggatcattgcattggatattaacccctggncaatnggcttgggcattcaatttgacttgntaagggaagtncctcggccgntntanaactagngggatcccccggctggangaatttcaatttnaacttattgataccgtccanccttgngggggg

SEQ ID NO: 833 - DNA, 302 bp, Homo sapiens
  misc_feature 6, 52, 53: n = A,T,C or G
accgcngtggcggccgcccgggcaggtacatcaccctgctgagggacttttnnggacaaggtcaccacactctacaaaggcagtcaactacatgacacattccgcttctgcctggtcaccaacttgacgatggactccgtgttggtcactgtcaaggcattgttctcctccaatttggaccccagcctggtggagcaagtctttctagataagaccctgaatgcctcattccattggctgggctccacctaccagttggtggacatccatgtgacagaaatggagtcatcagttttatcaac

SEQ ID NO: 834 - DNA, 363 bp, Homo sapiens
acttagggcgaattggagctccccgcggtggcggccgcgcgggcaggtaccttaccaccccatccccagagcattgcatggggtgtttggcacacagtaggtgctcaatgtaaacgtgtgcactgtggcatgttagagccagacaggatctcatccagcccgttctctgcacccctccctcccctctccaagtagccctgctgtgggttcaagtaaagaggggctggggcgctggtctgattgtgtgggtgatttggggagatctcttcctcttccggaaccccaaaaggttgggacaaacacagcaacaagcccagctccctgaatttcagtgattcatttgtggggataaaggagtgaatg

SEQ ID NO: 835 - DNA, 503 bp, Homo sapiens
ccgcggtggcggccgcccgggcaggtactagttattttaaattccactcataacttatcggccaaaagtagtcacatggctccacctaatcacaagtggagcgggaagtgcaatcctaccttgcctggggaaggtatagagatagaccagcactaatgactaccacacttcgctaaggtcacataataaataagcatcagacatcaggtgtggtggctcatgtctataatcccagcactttgggaggctgaggcgggcagatcacttgactacaggagttggagatcagcccggacaacatagtgaaacacgtctctactaaaaacacacgcaaaaaaatacgaggcatggtggtgcatgcctgtaatcccagttacctgagaggctgaggcacgagaatcacccttgaacccaggaggcagaggttgcagtgaccgatatcatgtcactgcagtccagcctggggtgacagagcgagacctttgtttcaaaaaaaaaagaag

SEQ ID NO: 836 - DNA, 492 bp, Homo sapiens
  misc_feature 2, 5, 27, 453: n = A,T,C or G
gnggnggcggccgaggtactttaacangccatactccagtcccaacaatgttaaatgccaaagcagtgttggtaaaagcctcaaatggtgaaaaggacagaaactcaaacccgcccttgtgccagtaagtaactgttacttatctcacaaagcgcttggctctggaaacaatctaactctgagctgcacgtggagtctacatgggaatgtgcaaagcatgtatttccttttaggtgcagcagaggtaaccgaaattcagataagagaaaaaaaatccagatttcaatgcaagaggtggaagatccacgaagatactcgttactatttggtttctaggagcaggattgccactagatatgatggagaacaaaaatgaagaggtgttgtgtaacaaaacaaaacaaaacaaaacaaaaaagtagaaagaaagagcaacaggccgggccgcagtancttcatgcctgtaatcccagcacttttggggaggcccag

SEQ ID NO: 837 - DNA, 164 bp, Homo sapiens
  misc_feature 1, 14, 19, 33, 37, 77: n = A,T,C or G
nttgcgttgcgctnactgncccgctttccagtncggngtaaacctgtcgtgcccagcctgcattaatgaaatcggcncaacgcgcgggtgagaggccggtttgcgtatttgggccgctcttcccgctttcttcgctcacctgactccgctgcgcctcgggtcgt

SEQ ID NO: 838 - DNA, 188 bp, Homo sapiens
  misc_feature 51, 55: n = A,T,C or G
cgcggtggcggccgaggtactaggcactgaagatacaataagcaatccagnaatncctctttgaagaatttattctgatgaaatagagacaagcctattaaagtattcaaggcaacattacttaaatattttattttattttatttatttttagatggagtctcgctgttgttgaccaggctgaagtg

SEQ ID NO: 839 - DNA, 645 bp, Homo sapiens
  misc_feature 18, 565, 579: n = A,T,C or G
aggtacctgtagtcccanttactttggaggctaaggtgggaggatggcttgtgcccaggaggcggaggtcacagtgagccgagatcacaccactgcactccagcctgggcaatagagccaggccttgtctcataaatgaaatataaaatataaaataaaataaaataaaacgttgttggcaaagatgtattcaaaatagtatgtagaacttacctggaaggtaattttgcaatatttaccaaaatatactttttcatctagtaaggtctccttctcagaatcagtcttaaagccattcaaatacagatttatgattaaagatttaagtccaaaaatgctcattatagcaatatttataataggaaaaattggggaaaaacaattatacatccaacagtagtaagagtgtgactacattatagtattagtatgtaatgggattgtcacagagcaacacacatgtttttgaagaatatttaagggcgtgataaatattaaatgtaaatgtaaattgaaaaaatgatatctgtagattttcattatgcatttctttatgaaatttttngatatacacaaaanaaaatagtcatgcatttgcttcatgacggggacatatttctgagaaatgtgctgttagtcggtttc

SEQ ID NO: 840 - DNA, 497 bp, Homo sapiens
  misc_feature 18, 22, 38, 39, 53, 57, 63, 68, 82, 83, 108, 116, 119, 126,127, 135, 137, 140, 141, 142, 146, 148, 151, 152, 153, 155,167, 170, 171, 190, 193, 195, 196, 218, 230, 242, 243, 253,257, 268, 275, 276, 277, 280, 281, 293, 296, 304, 309: n = A,T,C or G
  misc_feature 312, 313, 315, 316, 317, 324, 328, 329, 330, 334, 336, 338,339, 343, 346, 347, 348, 358, 359, 360, 363, 370, 371, 378,382, 383, 388, 389, 391, 392, 410, 412, 416, 420, 426, 429,431, 432, 433, 443, 447, 458, 459, 460, 463, 467, 470: n = A,T,C or G
  misc_feature 473, 475, 476, 477, 480, 481, 482, 483, 484, 496: n = A,T,C or G
ggcggccgccgggcaggnacancttccgtgggggggcnnaaaaccccccaccnaaancaaaanagcancaaaggaagaattnnttaagggcaggggggggaagccccnaaaaaccnganggcaaannccagagcngnggnnnagcncnagnnncngggaagagcaancannacccttttgtgaggttttnggngnnggagggggggaacccccccganaaaaaacccagnagcccccccacnnaacaggggangaanaagaggaaggnaaaggannnaannaagagccacagnccnggaaacangaaancannannncagacangccnnngaanangnngccnacnnnaaaagaaggnnnggngcgccannggggagnaaannggaannannaaaaaaaaaaaggaaaangngaangaangagganaanannngggggagggnaaanggggcgggggnnnaangccnaanaanannnagnnnnngggggagggccng

SEQ ID NO: 841 - DNA, 345 bp, Homo sapiens
aggtaccttaccaccccatccccagagcattgcatggggtgtttggcacacagtaggtgctcaatgtaaacgtgtgcactgtggcatgttagagccagacaggatctcatccagcccgttctctgcacccctccctcccctctccaagtagccctgctgtgggttcaagtaaagaggggctggggcgctggtctgattgtgtgggtgatttggggagatctcttcctcttccggaaccccaaaaggttgggacaaacacagcaacaagcccagctccctgaatttcagtgattcatttgtgggataaaggagtgaatgataaagtgaaggacgactgtccccgcg

SEQ ID NO: 842 - DNA, 485 bp, Homo sapiens
  misc_feature 15, 60, 100, 103, 109, 113, 135, 139, 148, 157, 199, 208,230, 236, 245, 247: n = A,T,C or G
tagggcgaattgganctccccgcggtggcggccgaggtactcccaaaaggctatgaaatnggggaaaaccccaggtgattcatgcctgcttagctgcagnatntcagtngcantaggtggaaccccaaacccagngcanagtgccagngtctgcttnggtgagatatgagtgtcaagtctcgaaccaagcaacctatcnaaagcctgngacactcctggccacaggcggntggtanaggcatagnanactattgcccaggtgacgtgacttcacagatgctgggaagcctgctgccccatccaatacaatactgcccactgtgcatagaaaccagattccaaagttagagcttcgttttggccatgagtgcaatttcactgcaatgttttatcttactcaactgccagggtcaatttaggtggtagggctaaatctccttctttatattggtccaaatgatttttcctgatgctgcattcccgga

SEQ ID NO: 843 - DNA, 442 bp, Homo sapiens
  misc_feature 396: n = A,T,C or G
ccgcggtggcggccgcccgggcaggtactgtgcttagaccaggaacacagggaggtagagggcagcagagcagggactggcttcagagccagacaggtggctatgtgacttaatgtgtctgaaccctggtatcctagtctattaaatggtataacagcagcttctagtatgtaagttccttgtcgggagaaaaactgttttgctcatggctggagccttagcatgttgcatcatattgaacatgtaatagatgctcaataaatatatttttaagaataaataaatgtaaatgaaaattacttcacagtgtttctgtagagattttataagatatggtatacacaatgcataacataggaactgacgctcaaaaatgccagttacttccatcattgngtcataggcttttatgttcattatcctgctgcatcatcccaaagaa

SEQ ID NO: 844 - DNA, 329 bp, Homo sapiens
  misc_feature 104, 181, 289: n = A,T,C or G
ccgcggtggcggccgaggtacgcggggaggtcatgcccgtgtgagccaggaaagggctgtgtttatgggaagccagtaacactgtggcctactatctcttccgnggtgccatctacatttttgggactcgggaattatgaggtagaggtggaggcggagccggatgtcagaggtcctgaantagtcaccatgggggaaaatgatccgcctgctgttgaagcccccttctcattccgatcgctttttggccttgatgatttgaaaataagtcctgttgcaccagatgcanatgctgttgctgcacagatcctgtcactgctgccattgaa

SEQ ID NO: 845 - DNA, 339 bp, Homo sapiens
ccgcggtggcggccgcccgggcaggtacttctaaccctaagggattcctacagcttttctgcatgttaaatagtctgttttagcttattctcttattacttgtcttggtttttactttgaaagtttgcttaataatcatgggaatattttagattttaaaatacaaaatatacaagctaaacttgagagcagtttttagttgtagaaactgtttcttgaagtaattgacttagcgtttgctctgcctctttcttttcttacctaggtaggtagtggggactccttcaattatctgagcaattcaaatctcagaatgtagtgttgggtaaattgagggtt

SEQ ID NO: 846 - DNA, 337 bp, Homo sapiens
  misc_feature 251: n = A,T,C or G
ccgcggtggcggccgaggtacatcaccctgctgagggacatccaggacaaggtcaccacactctacaaaggcagtcaactacatgacacattccgcttctgcctggtcaccaacttgacgatggactccgtgttggtcactgtcaaggcattgttctcctccaatttggaccccagcctggtggagcaagtctttctagataagaccctgaatgcctcattccattggctgggctccacctaccagttggnggacatccatgtgacagaaatggagtcatcagtttatcaaccaacaagcagctccagcacccagcacttctacctgaatttcacca

SEQ ID NO: 847 - DNA, 210 bp, Homo sapiens
  misc_feature 9, 25, 55, 193, 194: n = A,T,C or G
tggagctcnccgcggtggcggccgnggtactccaagcagtcccaaagtgggagtncttaaaacaccatgggcaggtgaatggctgaccaggtggaggtgcacagtgcaccatgacaagagcagtggaaaatgggtgaatctgagatgcctggaggcgagggggaaagagcacatcacagaggacaacgtccanngggacacccttttata

SEQ ID NO: 848 - DNA, 262 bp, Homo sapiens
ccgcggtggcggctgtggactgaagggtgactggttccactgtggtctccatgggaacaagttgtttctggagtcttccaaggagaatttctcacagtggacctgatctctgggctgatgctgggttccttggagctcatgattttgagagtggtagacatttctgggcttcctggggatgtgcctgctggactgctccccgtctcctctgctggggcaggccacgtggaatttccttgtgctgcctggcttgacatcttta

SEQ ID NO: 849 - DNA, 491 bp, Homo sapiens
  misc_feature 457, 491: n = A,T,C or G
ccgcggtggcggccgaggtacctgaagaatctctcttcagctctcttctcctggaaacttgagtggggcaggaggaaaagcggagctaggtgtcattttaatgaggaacatacttgtctcctccatttatctggccctccctgatggcactccagaattccaatcccacacgattaacaacatagtttcccttttctgcttgaaggtccattctcctctcaatttcaaatcacctgagatacaaagctgcatttccccacaagaaccagttccctctcctttccttcagtgctactgtccttctctcagaccaccaagcttaaaaactccagaggctcaaacagcaaagatggcagcccgctcctccctctggggagttctggcccagggagttttcaaatttctgtaggcggaagaatactagcggggagtggctggagaccccagttggtagggntccacatttgggggaagtgagcccaagctttttn

SEQ ID NO: 850 - DNA, 363 bp, Homo sapiens
ccgggcaggtacatgaaagtaagatcacaaccacaggaaccacacaaaattcaaggcaccagaggagcccagacttggctggcaatgcctgttttggagctattccacatttctggaagtcaatgggaataccggaatatgaaaacactatgaggccgggcacagtggctcacgcctgtaatcccagcactttgggaggccgaggcgggcggatcatgaggtcaggagttcgagactagcctggccaacatagtgaaaccccatctttaataaaaatacaaaaaattagccgggcgtggtggggggtgcctgtaatcccagctactccggcggctgaggcaggagaattgcttgtacctcggc

SEQ ID NO: 851 - DNA, 362 bp, Homo sapiens
ccgggcaggtacttttttcttttttcttttttttttttgagtgggggcggggtttcgccatgttggccaggctggtcttgaatctcgggtgatctgcccgcctcggcctcccagggtgctgggattgcaggcgtgagccaccacgcccggcctcgatatattcttacagtggaatactgctcagaaatactgatgaatcttaaaaaacatgatgtttagcaaaagaaccttggtataaggttcttggtataagggatacatactctatgattccattatatgaaattctagaacaggaaaaactatagtgaaaaacaatcagattagtggtatctggggtagaaagtaggaggagattgatt

SEQ ID NO: 852 - DNA, 264 bp, Homo sapiens
  misc_feature 2, 4, 31, 41, 43, 49, 52, 56, 61, 94, 99, 105, 116, 121,128, 130, 131, 132, 134, 143, 150, 151, 154, 155, 162, 163,168, 171, 174, 177, 180, 184, 185, 187, 188, 189, 192, 194,196, 201, 202, 204, 206, 211, 220, 227, 231, 253, 264: n = A,T,C or G
cnanagggctttttgggggcaaaaccgcggnggcggccgcncnagaacnagngganccctnttggggggggaaaaaaaccccaagcccaccganaccgncgaccncgaggggggtnccggnacccagngnnngncccctaaanagagggnnaanngcgcgcnnggcgnaancanggncanagcnngnnnccngngngaaanngnanccgcncacaatttntcttttntagncgagccgggagcagaaagcccnaagaaaaaagn

SEQ ID NO: 853 - DNA, 353 bp, Homo sapiens
aggtacccacagccctttcttttggaattccctagaaggggtctgtgccacatacaggaagtagggagggtgtctttgcagcatatttcttctcttggagttaactgcgaacgttgcacggcgacctcttgatccattctgtgaaagccccaagcctgtcatgcaataaagacgtccagtttcaccgcagcagggaggccgcatgaaatattccacttgaacaaaaccacttagcagtttacatcaatgcttaccctgtcgcattgaaagtgatgtgaacccacacccaagagcccccaaaccagcacgttgataccaagtttccccagctgcatccaaatcaattccttctt

SEQ ID NO: 854 - DNA, 345 bp, Homo sapiens
  misc_feature 2, 15, 30, 32, 33, 48, 65, 87, 89, 90, 98, 100, 106, 108,124, 128, 130, 131, 132, 133, 134, 135, 136, 137, 138, 139,140, 141, 142, 143, 144, 145, 146, 147, 148, 149, 150, 151,152, 153, 154, 155, 156, 157, 158, 159, 160, 161, 162: n = A,T,C or G
  misc_feature 163, 164, 165, 166, 167, 168, 169, 170, 171, 172, 173, 174,175, 176, 177, 178, 179, 180, 181, 182, 183, 184, 185, 186,187, 188, 189, 190, 191, 192, 193, 194, 195, 196, 197, 198,199, 200, 201, 202, 203, 204, 205, 206, 207, 208, 209: n = A,T,C or G
  misc_feature 226, 229, 238, 242, 253, 258, 265, 275, 279, 284, 290, 294,301, 302, 303, 311, 313, 343: n = A,T,C or G
cntttgggggctaanccgcgggggcagcancnncaccggcagcgcgcnattctttgggggggtgnaaaacccccagacccccgagcncnnccactcgncncaccantntagagactggggccgntccncnnnnnnnnnnnnnnnnnnnnnnnnnnnnnnnnnnnnnnnnnnnnnnnnnnnnnnnnnnnnnnnnnnnnnnnnnnnnnnnnttttttttggggttttnagngaggggaancgcncgcaaaaaaanaatcncggccanaggggggccngggngaaantgttanccgngcacaannncacacaananacgagccgggagcaaaaagaggaaaagccngg

SEQ ID NO: 855 - DNA, 300 bp, Homo sapiens
ccgggcaggtacgcgggctacacacacagttcggatgccaagggtgacaccccattcccttcacaagaggcggttctgtcacaaatcagcactccacccccaccacacctctcagtgaatgaagtgctggtggtctcactcccctggtgacccttagccgtgggatggggtggttacactaaggcttcaagctgagaatggccatcatggcgggaggctgtttgcaaaggcaccttctgtcatcctggggttggctaagtcaactccaccccttcccaaaaaaaaaaaaaaaaagtacct

SEQ ID NO: 856 - DNA, 299 bp, Homo sapiens
  misc_feature 21, 254: n = A,T,C or G
gccaggattcaaaccagggantttgctccagcactccggctcttaacctcaaccgtctgcctctccacaaacaccaggatcaaccaccaagaccaaaaaaacagtctcacaaaccatcaaacattgcacttggtggctcaggaccttagcttcgtcttaaaggtccctgttatgctttttctttttgccccagtgtggagtggtcttcgtgtttgtgagtgcaggggtcaggggttgtgtcttttcttcttgtncccttccaagaggtgacatgtatccttgatactggaagggccctt

SEQ ID NO: 857 - DNA, 360 bp, Homo sapiens
aggtacgcgggcactccagcctaggcaacagagccagattctttttttttttttttaaaaagtcttttaaaaaattcttttattgtgctgattttattgtgtcatgaagtgtaatatcgcatgtaggtatgtgtcaagtatacagagtgtcaggcatacggtgttcagtcataagcagttctggcctttggccctgcactgtttgttggctttttaggtaggaaccttcttagagtaagactgtcatgctaaaattgtagcaatcaaatgtgccccccatacaactcatttgaggttgagattatgttgctagagtggaggagattggagtgttctaaatgctaacagtttgtcttgcct

SEQ ID NO: 858 - DNA, 261 bp, Homo sapiens
  misc_feature 23, 34, 52, 53, 54, 55, 56, 57, 58, 59, 60, 61, 62, 63, 64,65, 66, 67, 68, 69, 70, 71, 72, 73, 74, 75, 76, 77, 78,79, 80, 81, 82, 83, 84, 85, 86, 87, 88, 92, 98, 106, 127,132, 144, 150, 168, 188, 191, 192, 201, 204, 206, 228, 233: n = A,T,C or G
ggcggccgcccgagaacgagggnagcctttgggnggggggaaaaaacccagnnnnnnnnnnnnnnnnnnnnnnnnnnnnnnnnnnnnnaggnacccancgcagagnccccaaaagcgaggggcaagngcgcncagggcggaaanagggcnacagccggggccggagcnaaacaggcacccgcccacanttnnttacaacanacnanccgggagcataaagccgcaaanccagnggagccaaaggagggagcgaacccacag

SEQ ID NO: 859 - DNA, 357 bp, Homo sapiens
ggcaggtacaacctccatcccctgggctcaagcgatcctcccatttcagctccccctgtagctgggactacagacacacaccaccgtggctggctaatttttgtattttttgtagaggcagggttttgccatgttgcccaggctggtcttgaactcctgagctcaagtgatctgcctgcctcggcctcccaaagtgctggcattacaggcatgagccaccatgcctggctgggacattattcaaattgaagtgaggacatgatgttaaaaagttctgggcaagtattttacaagttaaaatacagatgtaagacttgacttgatcaaatgcccagctctgtaatttcacctaaattg

SEQ ID NO: 860 - DNA, 248 bp, Homo sapiens
aggtacaacattgtgaaaattttcctatcatttcctctaaaactctgcaggcatggaggctgtctgctgagatatagcagggaacaatttaaccctttgttttgcacccacaagatgagcattaccaaattcccaacagagacatgctggggctgtgctgtgcctccaccctgccccctccacagccagctccgcgtgtctcagtctgtaactgatagcattccacttcctgcctgtacctccccggc

SEQ ID NO: 861 - DNA, 380 bp, Homo sapiens
  misc_feature 2, 16, 21, 22, 24, 27, 42, 55, 63, 66, 70, 74, 78, 79, 82,84, 87, 91, 110, 122, 123, 128, 131, 132, 135, 137, 143,145, 149, 150, 151, 152, 161, 162, 165, 173, 177, 178, 179,182, 185, 191, 192, 193, 195, 208, 215, 218, 227, 230: n = A,T,C or G
  misc_feature 237, 243, 247, 250, 255, 259, 260, 261, 269, 270, 273, 279,282, 287, 291, 297, 298, 305, 307, 313, 316, 320, 330, 338,339, 343, 345, 351, 354, 358, 363, 369, 370: n = A,T,C or G
cngcggcggccgaggnacacnnanaanaaccttttaaggggnggaaaaacccaanccccccgnccnaccncagngacnngangnatntacnggaaacagggcgcagcccnaggaaggacagnngaagnccnnacngngcaagncnaaannnnaaggaaaannagncccgcgangagnnnccncangctttnnntntgcggggaccagncaggggncgnccccgacanaancagggcncgccgncggnggnagagncacnnngcaggggnnggngaagcngcncccanccanggaccnnggccgcncnagaacnagnggancccccgggcngcaggaanncganancaagcngancganaccgncgaccnngagggggggc

SEQ ID NO: 862 - DNA, 379 bp, Homo sapiens
  misc_feature 32: n = A,T,C or G
aggtactttttttttttttttttttttttggnagagatggggctttaccatgttggccaggctgatctccagctcctgacctcaagtgatccactcgccttggcctcccaaattgctgggattacaggcgtgagccaccgcacccggcccagtcttcatatttataaataaagtcttgtgggaacacagtcacatttattcatttacattttgtaaatagctgccttcaagaggtagagttgaaagtctttaagacaaagatcaggtggcttgcaaaacctaaaacgtctggtcttttacctaaaaagtttgccaaccccaaaacaagaatatattcgattgtaatctttacaaaggtgttggctatatttcagtgtgt

SEQ ID NO: 863 - DNA, 418 bp, Homo sapiens
  misc_feature 1, 11, 17, 104, 109, 120, 122, 190, 195, 395: n = A,T,C or G
nctatagggcnaattgnagctccccgcggtggcggccgaggacaaattcagtcccaatactcaatacgtattatagatgactatgagtgcaaaccttaggatgngattntctgaataatngntctttgtaggatttggttacattatttaaaatgaaaaagatctagttttagtgtgagctcagtaatgntaatnggttaagttcattgcgaatcttgagttttagataagtagttatttttttcaatatcacttctgtttttagtgatattatatcaagaaacaacgtattcaagaaccatggctgacagtgccagatatacttagggataaacatcaaaatgcaattatagttgctataacgttagatactcggaatcaaaatttatttgcangctgacttgataaactaaatgaa

SEQ ID NO: 864 - DNA, 293 bp, Homo sapiens
ttagggcgaattggagctccccgcggtggcggccgcccgggcaggtacaagagtcagcagaaatgtgtgctttaagcagagtcacaggggcctggggctgaactgagtcatttctcaaagatatccctgcctgggatgatgatggctctaattgaagctctggcatcatctggggctttatgagccaagggagataagaagagccacagcaaaacccttgggtctacagtgcaggctgcaaccaaggcagcatttgctagaatatttgtgattatgtgttcaacctacaacct

SEQ ID NO: 865 - DNA, 306 bp, Homo sapiens
ctacttagggcgaattggagctccccgcggtggcggccgcccgggcaggtaccatattatacctttttattgttgttataattattatggggtatttctaattaatatgatgttgaaacctgtttggcaccttctggaagctaccaaaaaaatgacactccattgaagtgcttaaaagctgttctcataagaattctactggcctattgtaaaaaaagaaaaaaaaaaaagaaaaagaagaaagacacaaagaaaataatctaaacaccaaaaactaaacacaattccaatcctttttctgtacct

SEQ ID NO: 866 - DNA, 464 bp, Homo sapiens
  misc_feature 10: n = A,T,C or G
acttagggcnattggagctccccgcggtggcggccgaggtacacggaaatctggacagtgctgcacagattgatacattagcctttgctttttctctttccggataaccttgtaacatattgaaaccttttaaggatgccaagaatgcattattccacaaaaaaacagcagaccaacatatagagtgtttaaaatagcatttctgggcaaattcaaactcttgtggttctaggactcacatctgtttcagtttttcctcagttgtatattgaccagtgttctttattgcaaaaacatatacccgatttagcagtgtcagcgtattttttcttctcatcctggagcgtattcaagatcttcccaatacaagaaaattaataaaaaatttatatataggcagcagcaaaagagccatgttcaaaataagtcattatgggctcaaatagaaagaagacttttaagtt

SEQ ID NO: 867 - DNA, 383 bp, Homo sapiens
ccgcggtggcggccgaggtacataacatgatatcaaggaaatgcttgaaacaaactttcacaataaagtcagaaaaaaactgtaaaaattgtctgcaatccaagaaaaagcacgtgccctgtgtgtagggggaaagagggaaagcacttgcagtgtgactttatgtggtctttccccaagtattgctacgttttgacctttggcccaactgaacaggtgaaatgcccttcacataagtttcaatccccaagaaactagctggaatgcaggggactgtagacacactcctggaccaaatggcatcgactctcagaatccaaaatgggccctgccctcattctgagcttacggccccaagcatattctaaacaaagcttttttaa

SEQ ID NO: 868 - DNA, 297 bp, Homo sapiens
  misc_feature 22, 129, 145, 242: n = A,T,C or G
ctatagggcgaattggagctcnccgcggtggcggccgcccgggcaggtacaggatatcacctgaattattaatgaatgcccaggaagtaattttcttctcattcttctaaaactactgcctttcaaagngcacacacaccgcgtncacatacactgcattcgttgctccagtataaattacatgcatgagcacctttctggcttttaagccaatataatgggctgcaaaatgaagacaccanagtgtatgcatacaaatctcactgtattaaagatgcaggttttctaattgtacct

SEQ ID NO: 869 - DNA, 376 bp, Homo sapiens
  misc_feature 177, 195, 216, 246, 248: n = A,T,C or G
gcgaattggagctccccgcggtggcggccgcccgggcaggtggcgacgcgcgggacaaagggaagcgaagccggagctgcgggcgctttttctgcccgcggtgtctcagattcattcttaaggaactgagaacttaatcttccaaaatgtcaaaaagaccatcttatgccccacctnccaccccagctcctgcancacaaatgcccagcacaccanggtttgtgggatacaatccatacagtcatntngcctacaacaactacaggctgggagggaacccgggcaccaacagccgggtcacggcatcctctggtatcacgattccaaaacccccaaagccaccagataagccgctgatgccctacatgaggtacct

SEQ ID NO: 870 - DNA, 235 bp, Homo sapiens
  misc_feature 159, 175, 188, 215: n = A,T,C or G
gactacttagggcgaattggagctccccgcggtggcggccgccgggcaggtacgcgggggacccggaagtttaaattccgctccctccacgaaagagttgtagtgagtgaaaataaatattaaaacacacggaaatgtattttcctggctgcagcaccngccatcttgcctcggnaggactcattttnaaaaacagcagcttcttgaagccccanaacgcattcctgtgctacgg

SEQ ID NO: 871 - DNA, 301 bp, Homo sapiens
  misc_feature 171, 248, 261, 270, 272, 277, 289, 292: n = A,T,C or G
ccgggcacggtacagagcccaagacaaaagataggcctgtgaggataacatctggtatatctgacccttcccagcatggccaggaggcacagccaggccagggagggcatactgggtttggctttgccctgcagctgttggcctaggtgctgcggtcatacatatgccctnaggcctttccatggctacctacctagaacccagattctttttttttttttgagacggagtctcgctctgtcccccangctggagtgcagnggcgccatntnagctnacttgcaagctncgncttccgggt

SEQ ID NO: 872 - DNA, 377 bp, Homo sapiens
  misc_feature 151, 259: n = A,T,C or G
tatagggcgaattggagctccccgcggtggcggccgaggtaccattccgggtcatccgcagaaattcctcatagatggtaactctgtctactctccgagccagtggcgagaagttacacagggagtccaccccggtgtggtgcctgcttgnggacagacctgaatgttgaaacttgacagtcagaaaaataactcttgatgctgctgtttcggaagagttggttgagcgcatcctcaatattccttttgttcctctggnaattggtggtgcctggctgggctttgtcctgggaatatggtaggttggtgatggtagaaattcaggtacgaagtgctgggtgctggagctgcttgttggttgatgaactgatgactcc

SEQ ID NO: 873 - DNA, 457 bp, Homo sapiens
  misc_feature 25, 392: n = A,T,C or G
actacttagggcgaattggagctcnccgcggtggccgcccgggcaggtacaatgctcactgggaaccaaagtcaggcatggggctgggctttaaggagcacaaacaaaaaggagggactagaaaacttcagaaaggtattggtgggggatgttgcggggggacaggggacagcgaggatgtgggatcccgagatcgtccaaatccctatgtgtagacatatgtgtataaaggcctttaagagactcaggctgatggggtatctgtaataaatcaaacataatataacagcacgtcaagtgataaggggactctggaaaaacaagcagcaaaaggagcagtatcaaactccacagaaattcacaaacatcaagacaccaagaaagctgcattnatttaaatcaaggtgacaggctgggctctgtagctccagcctgtaatcctagcactttgggaggc

SEQ ID NO: 874 - DNA, 469 bp, Homo sapiens
  misc_feature 180, 184, 249, 250, 268, 316, 340, 365, 431: n = A,T,C or G
ctacttagggcgaattggagctccccgcggtggcggccgcccgggcaggtactttttttttttttttttttttttttttgggatggagtctcgctctgtcacccaggctggagtgcaatggcacaatcttggctcactgtaacctacacctcccgggttaaagagattcttctgcctcancctnctgagaagctgggactaccaggggatcccgccccaccccgggtaggttttttgtatttttttagnnagaagacagggttttccncccatattgggcccagggcttaggtctcggaacctcctggacccttgnggatcctgcccacccttgggcctnccaaaaatgctggggattataaggnggggagccactgtgcccgggccaacaataaatttttttaagggttagtcaaacctaacaacaaaantttaaaaggtcaatcagtagttctaacttttttttttt

SEQ ID NO: 875 - DNA, 444 bp, Homo sapiens
  misc_feature 4: n = A,T,C or G
actnctatagggcgaattggagctccccgcggtggcggccgaggtacaaagactttgtaaatgtgattcagggcccccagcacccctgtgtctgcagagtgccttcaaaactcagctgttccggccggtgccaacctgtgaacttcccaccatatcccagaatctgctattccccaaaccacttcccagtttcctttcagtaatctttctgaaggagccaggacaatagggcctgttgtttagtgaatttctttattattttcagcctttaaaatgtaatttccatctcttgcaatgaatttgtttcccttttttttgcttcattttgtttaaattttcaggtatttagctcccctttcatattatttttaaattttttaattacctgttgtaggggtgttcctccagaagcaaagagcaaaattttactgttgtgatgtacct

SEQ ID NO: 876 - DNA, 315 bp, Homo sapiens
ctacttagggcgattggagctccccgcggtggcggccgcccgggcaggacgcgggattgatcaaaagctttgtaaccacaggaaaaaataaactcttccatcccttaaagaatagaatagtttgtccctctcatgggaattgggctgtatgtatattgttcttcctccttagaatttagagatacaagagttctacttagaacttttcatggacacaatttccacaacctttcagatgctgatgtagagctattgggaaagaacttccaaactcaggaagtttgcagagagcagacagctagagataactcggga

SEQ ID NO: 877 - DNA, 491 bp, Homo sapiens
ctacttagggcgaattggagctccccgcggtggcggccgcccgggcaggtacaagtcttaaactgctctgctctttaaaccaaatacatacacacatacacagatatagttagatacagatgtgtgtgcatataaaaatatgacactccttagtaaaatattcctctagacctggggttcacacatccctcctcctgatccgtgctggtgcctactcaggcactactttgcagatttctcttctatgagctaaggtttttctgagctaaggtcaagcggtgacttagcaagttgaacgtgtaatgaaccaaacctgtttttccatggaaccaataataattaatctagagtgagccatttggcctccagaaacaaagagatttccatcacagagtgttggtgaggggtcatgagtaaggcgggggggcagtgagagcaagctgttttattgtgagagtagcaggcaggctgaatgagaaggggtagctgtt

SEQ ID NO: 878 - DNA, 385 bp, Homo sapiens
  misc_feature 25: n = A,T,C or G
ctactatagggcgaattggagctcnccgcggtggcggccgcccgggcagggtaccattccgggtcatccgcagaaattcctcatagatggcaactctgtctactctccgagccagtggcgagaagttacacagggagtccaccccggtgtgggtgcctgttggggacagacctgaatgttgaaacttgacagtcagaaaaataactcttgatgctgctgtttcggaagagttggttgagcgcatcctcaatattccttttgttcctctggtaattggtggtgcctggctgggctttgtcctgggaatatggtaggttggtgatggtgaaattcaggtaggaagtgcctgggtgccccgcgtacctcggccgctctagaactagtg

SEQ ID NO: 879 - DNA, 440 bp, Homo sapiens
  misc_feature 3, 360, 408, 428: n = A,T,C or G
ctncttagggcgaattggagctccccgcggtggcggccgaggtacttttttttttttttttttttggggaaataacaggggagagcaaatttctaaaaacttggggttttatagtaatttctgattttcatgtttagaaaaagaaatcacattaaaaatatgcttttttaaaattttgagataggatacactataatattattgtagtccagaaaatctgtatactataattcctagggaaaaagagaaaattattagtgtcaaaatacctataattcccacagttaccatatacatttttaaaaattgtttaaatacacaaacaatgatgatgctgtcctactagaaatgacaggagcnagagcttttacctttctttcaaaatgcctttaacccctttcattattnccaaggttcaaaatttaaanattctttttttt

SEQ ID NO: 880 - DNA, 432 bp, Homo sapiens
  misc_feature 2: n = A,T,C or G
cnctactatagggcgattggagctccccgcggtggcggccgaggtacaatggcgcaatctcagctcactgcaacctccacctcctgggttcaagcaattctcctgcctcagcctcctgagtagctgggattgcaggcatgtgccaccatgctcggctaattttttgtatttttagtagaaacggggtttcgccatgttggccagctggtctccaactcctaacctcaggtgatccacccgcctcggcctcccaaaatgcatctctggtctttaaatgccctttgctgtatattctataacatcaagtctcagatctggtttgacctcagttggcctcttaatagttttcccctatgaacattctggtctcccagtaagcctgtaagcagctgagactgggaaaccatctcttatatcccacatcgtcccatg

SEQ ID NO: 881 - DNA, 426 bp, Homo sapiens
cttagggcgaattggagctccccgcggtggcggcacactggtaaagagtggcaaggtagcctttgtaaccagatatatctgatctcaaaatcaattttcttaatttaacccacgtcagtcagtcaaatgctaaggctcttcaagctacacttggttcctccaccctctaaaaggtgagaactcaagagagctgggttctttgggaccttatcatatttttcccctccctaggccttgatttcccatttggaaaataaatcagtgagggctttctagttaaaaatgccagttgaagccaggcttggtggcatatacatgtagttccagttactcaggaggctgaagtggggaggatcgcttgagcccaggagtccagtccaggcaacattgcaagatctcatctctaaaaactaaaaaatggaccag

SEQ ID NO: 882 - DNA, 464 bp, Homo sapiens
cttagggcgattggagctccccgcggtggcggccgcccgggcaggtactaatgaattgacaaatggaagaaaatttaaggagagtagcctagagaactcattctagaaactaaataacttaagtcaaaaattatttcctatattgcctcaagccctgcagatagctttgctatgtttgtgtatttgcacattgcactccagcctgggcgacagagactctgtctcaaaaaaataaatggaacaatcacaacagaaacattcccttattcactgaacatttcaaaccctgaaaatgtgtaatgagaaatgacaaatttttaaaagtttaattactaaagaagacaaaaaatgtctattatgaatagaccaattctcaattggtagaggaactttgaactggaaaggaaccctaaagaaatctcctgtctacccctgttattacagattagaacccgaaagtccag

SEQ ID NO: 883 - DNA, 394 bp, Homo sapiens
ccgcggtggcggccgcccgggcaggtactataattataatgatttcagatagaacatgcaattagccttttgaaatccaacttctgtgcaaaattttagtatcagaaaatacgagatttgcagggggaaacatcagtaaactaccattaatgtcaatgcccagttttgacttttgttagcctgacactcccaaacagttgtagaatccgatagatgactgatggcaaaagattgtgaacatgtggaagaaaatcagtgggattcggtgctgatgaataggttgccttcagagtattattgacagacagcttgtggaactaattctttatttttgatgttgtgggaattaacacatcaatggtggttatgggaactaccaatgggttcctacaat

SEQ ID NO: 884 - DNA, 483 bp, Homo sapiens
  misc_feature 476: n = A,T,C or G
cttagggcgattggagctccccgcggtggcggccgaggtactttaattctaaattataagaaaatatacatttgcacttattaatatagaaattcattttgtgtatatttaacatagcttttaaactattttacattagctactttcattatggtttcttgaacttctgaaaaaaattagaaatgtattaaacttatcagtaacataaaaacttattttgtttcacctaacgaatactgcgtttgtaaaaataaatttaatatagaatatatttttaaattaaatatttgaatataaaatagctctaagaaagaagcaaattatcactgaacatatttcttattatttctggctttgaattaatacgtaacttaaattggcttaaatgatccagaatattggaggaatatgatactttcacataatatactatgaacctgttcatataactctggattggctacctaaccttctgntttaatg

SEQ ID NO: 885 - DNA, 483 bp, Homo sapiens
ctcctatagggcgaattggagctccccgcggtggcggccgaggtactaagtcacacccagccagtcaataactgagaaatcaaaataaaataataatttcaaagaattacataaatacagggccttttgagatttttggcaattgtaaacaaaaacgaatggtttttacaattcagtgtaattctacgaatatttatttggcacccatgttaggcactgaggctacacagcagtgaaataggcctagttgttctcaactagagaacatagttggttaatgtagctgcactgaattgtaagctgtttagaagataatataccctgaggctttttaaagtatactattactataaggaagtaaaattattttatacttataaattttgttttggattattcaactgaatttggagtgttcagaattttatgggcggttggggacaaggaagaggtataatgctattttttttccttttctttttt

SEQ ID NO: 886 - DNA, 399 bp, Homo sapiens
  misc_feature 253, 287, 347: n = A,T,C or G
ctactatagggcaattggagctccccgcggtggcggccgcccgggcaggtacttttttttttttttttttttttaaatttccaccggtgccgaggcctcagtggagcctggctggcggcttgttagagcctgcagcctacctgtcctgcataggaatgaagccgggaggagttacatgatatgccctcgttgcaggccggggacacagctaccgcattcagagaccaggaaacagagcaaaagctgttctcanagtgcggctgagcgaggagctacaggggaatggngggggccaagctgcatggaagattgtcccattaacctggctttttaccagggtggtcctntccctaacccctaagaatcacaccctgcatccaaacggcagcaaccccaaaa

SEQ ID NO: 887 - DNA, 415 bp, Homo sapiens
  misc_feature 2, 195, 290, 403: n = A,T,C or G
cnctactatagggcgattggagctccccgcggtggcggccgaggtacttttttttttttttttttttttttaaagctgggatatcttacagaggaaggaaaaattaaccttttttactttctttctcactttttaaatcagccaaagtcaaagcccgtttgccaacctgcatgtccatgcctgtaagcccttctnttggccaaggaagaaaggaagaaagaaaaaagaaacccaggggcctgtatcccctgattaaacacagcacagcactccaggcagacatgcccggnggcggctcctttgcaccattgacctcaggccagacacctcagcgccaacaatgggacctcggccttccggctaggtttgccccaggctgggcaggaaaccagctcggccgctntagaactaggtg

SEQ ID NO: 888 - DNA, 370 bp, Homo sapiens
  misc_feature 279, 286, 345, 356: n = A,T,C or G
ccgcggtggcggccgcccgggcaggtacgcggggagagacattgtggctagccaaccacatggtcagcctcaaagttgagaggctcagtaaccctcctatccctagagaattccaaagtgtggatgtaatttaacctaggaaagccattggtgactatctgtgatcctctggaaagtatgctatgttggggtatatctttgcatccaaagccagaggggaaccacaatggcctagtaaaaccggtgggtcctcaaatgcccacttaagcctctggcctnttggaantttgacccatagtgggccgttcagcttgattagagccggggaaagaaagaaaatattgncattttttttnttgaaaaaaaattt

SEQ ID NO: 889 - DNA, 445 bp, Homo sapiens
  misc_feature 368, 407: n = A,T,C or G
ctacttagggcgaattggagctccccgcggtggcggccgaggtacctggatctatgctgctatgggtggagaatcgacatcctttgaaactggccacaggcagagctaagaggatgactaaaaggtcccttgggtgggtgctaatgagcaggggcccaggaaaacctctgtcttcccggagagccctcttgcatgagtttcggctttgccaagattccagggacttgaggacagctattgagttatggttacgtgactgccacattggggcttggaggcatctggcagatggttgggaatgggctggcaccacactaattaggccacgatgatccagtttgactcagggaaacccagaagtcatagtnctctttgcagaatgacacaaggatgtcaacatgctttgnttgtgtacctcggcccgctctagaactaagtgggatcc

SEQ ID NO: 890 - DNA, 360 bp, Homo sapiens
ccgcggtggcggccgaggtgcatatatatatatacacacacatatatatatttatgtatcttttaaacatataattactctctttaattcatttggacttttcatctaaacttgctctgtttgcacaggtctgttagggtaagatatgttcctaccttgagaaatgttgtgaatatctagcgaaacaccaaacatcctcagctgactaatgtggtatcagactttctggttgcaaggtaggggtgaataaggcaggatggggtgcgggggtggtgctggaagaagacatggcatcaggttgggttttgcaggatactgaaattgtctaggggccttggctgtgcaaagagcctttccgtc

SEQ ID NO: 891 - DNA, 388 bp, Homo sapiens
acttagggcaattggagctccccgcggtggcggccgcgcgggcaggtacgcgggatttctcagatagttatgcgcagctccaggcaccagattctgtgctgggtgcaggcaggacctggagggcgtcctcaagtgttgatctgcagggactgtcttgatctttccagcagtgtcattgtgggcacgtgacctgagctttctgagcctatttccgcatctgtaaagtgctatccacttccacctcctgggctgtcgtgcagatgtaggaaggaattgcactcacacactcagcatgagacaggcgctcagtaaaagcccgtccaggggatatgagatcagtgagggataggaaagcaagggtgggtagaaacagcaaaaccctttccca

SEQ ID NO: 892 - DNA, 422 bp, Homo sapiens
  misc_feature 44, 307, 391: n = A,T,C or G
ctacttagggcgattggagctccccgcggtggcggccgcccggncaggtaccaagcattggacacacaaaaatacaggcagcttcttccctcaaggaggtcacaggtgggtgtgtccatagcaaagctgggaggaagttgtatgaaggagcctgaagacaatggggagctaggggaaagttctgagtagaaaggaacatgtggacaaaggtttgaaatgatgaagactgattaggaagttcatattatgaagcataattcaagctttctctacgatgttcaaatcccatctctcctacttactaganaggtgacattgggccaagttacttatctcctctgctcctgtttatttgtgttcaaaaacagggacctctctcacagtgtgattntgaagactggacaagaaaatgggaggttttg

SEQ ID NO: 893 - DNA, 331 bp, Homo sapiens
ctacttagggcgaattggagctccccgcggtggcggccgaggtacacagtttggaagtttaggcaaaagtcatttcttccctatattttgtcatgcttatctcctgtctctttctgttttacagattagcaataaactccttaaaacccaaaaggtttgggcttctgttcctttcacttgcagtcagacatggagttagtggtagaagaaacagaaggggtaacctgcatggtgacagctactgaggggatggataggaaagcaggctgagtccctggggccagtggttaccaaagccaaggagagggcaaggggagcccagtgggcctgg

SEQ ID NO: 894 - DNA, 462 bp, Homo sapiens
  misc_feature 347, 460: n = A,T,C or G
cttagggcgattggagctccccgcggtggcggccgccgggcaggtacatcaccctgctgagggacatccaggacaaggtcaccacactctacaaaggcagtcaactacacgacacattccgcttctgcctggtcaccaacttgacgatggactccgtgttggtcactgtcaaggcattgttctcctccaatttggaccccagcctggtggagcaagtctttctagataagaccctgaatgcctcattccattggctgggctccacctaccagttggtggacatccatgtgacagaaatggagtcatcagtttatcaaccaacaagcagctccagcacccagcacttntacctgaatttcaccatcaccaacctaccatattcccaggacaaagcccagccagggcaccaccaattaccagaggaacaaaaggaatattgagggatgcgctcaaccaactntt

SEQ ID NO: 895 - DNA, 512 bp, Homo sapiens
  misc_feature 432, 436: n = A,T,C or G
ttagggcgaattggagctccccgcggtggcggccgaggtacaaggagtagtctaaaacaagtgactttactacttattcttctgcatgtccttaccagcttcttaccttcttcaggttgagcatgagatcagcttcacaggggatggggtccttaagggtttttttccatactagtttcagccttaacaatgagttttcaacccttaaacatgaaaaataaatagtgcgaaagaggggaggatggtagaaatgctttaaaattaccttttgtaaattttactttgtttatgttttaattgtgccttgcttatcagggaagtcctacaaacaaagaactccacggcttcttcaagtcttccaagggaacagggtccccctggttcctaaaaatcaatgggaagtaggtttttggtaaccatctactggtcaangggnaaccatttctacctggcggtttattacacctttgctaggcttcttttttctttttcatttttaaaaaataattttt

SEQ ID NO: 896 - DNA, 457 bp, Homo sapiens
  misc_feature 452: n = A,T,C or G
ttagggcgaattggagctccccgcggtggcggccgaggtacagttcatatcccagttctagaatcagttcattttctaaggagtcctggttccttttattggaaaccaaaatctgggcaccaggtgtgctcccattctagtcgttttctgaccacataactgctaacaaagatgcttcactctggctacactgatgtgaactttgaactttagcagaagagctcagctctagagaacaatgagctcctacattaccttttttcctcaaagaataagtaagtctaagcagaaaaaaaatatgcaaagaattttcagtatgaatgaaataagacaaaccatcaggcttgctgtattgtaaaccaacacaatatagttataacagatctgtagaagggatccttagaataagagaggcatttgtcggggggtcatcagggagaatactggatagnatctt

SEQ ID NO: 897 - DNA, 341 bp, Homo sapiens
  misc_feature 148, 152, 175, 216, 218, 220, 266, 282, 314, 323: n = A,T,C or G
tagggcgaattggagctccccgcggtggcggccgaggtactttttttttttttttttttttttttttcttcatggctacatctgaacagctactgagggatatatatgccaactttgggagttgcacagcttttttgaggccattttntaanatgactagggactgtaatttctnttaatttggaatagccacaagttgttgtagccaaggtttgngngngtttttaatacaattcttaaaattttagtaggcttctcatctgtanatagatttgaaggggnggggttgcccctccacacctgtggggtgtttntcgtaaggngggaccagagacttagga

SEQ ID NO: 898 - DNA, 274 bp, Homo sapiens
  misc_feature 7, 15, 131, 217, 229, 260: n = A,T,C or G
ccgcggnggcggccnaggtacaccaaatggattacaagcagcatccagcagaagacagaccccccaaccctgcccaccagggctcacactctacaaaaccctgagggcctagaaatctgtaaatgcatcgncaagcactggggctgatttgcagtaattctctaagcaaggcaaacatgatctagctttgaaggcagcatgaaggcagcgggttggngagaacaatctntccttaagagaagaagaaacctggggcgganggagttttccccgg

SEQ ID NO: 899 - DNA, 269 bp, Homo sapiens
  misc_feature 34: n = A,T,C or G
agctccccgcggtggcggccgaggtacatgttanggtcttgagttaattgctctgtggctgtggatttttatttgatgttctgatctcttccttccagtttgataaattagtgtagaaagtggaagaaaaacatgccggcgcagcctgtgcgctttgtcaggttaacagaatggagtcctgctctggcatcagtcagtgctgttgtccgaaccctctgtggctccttcctccctccctggggcccagagctgcagacgctagaggggta

SEQ ID NO: 900 - DNA, 201 bp, Homo sapiens
  misc_feature 4, 142: n = A,T,C or G
gctncaccgcggtggcggccgcccgggcaggtaccctaaatgttaaactgagggatgagtgaaacaatatcaggattaataaataaacacattcttgaattccatcacttaatagaagtggccatttgaatgctggcaggtnggaagaaaagaggaggacaaagaaccccaaaagtttggcatcataactactgccacaag

SEQ ID NO: 901 - DNA, 402 bp, Homo sapiens
  misc_feature 8: n = A,T,C or G
atagggcnaattggagctccccgcggtggcggccgaggtacttttttttttttttttttttgtatttttagtagagatggggtttcaccgtgttagccaggatggtctcgatctcctgaccttgtgatctgcctgcctcggcctcccaaagtgctgggattacaggcgtgagccaccgcgcctggcctttccagggtattcttttaacgtggtcttatttgcctttttgaatttaagaaaatctatcagcatcatataccaccactggaatataaatttgaaagagagtcctgcagattatatacatgaatctacttaggcctaataaccaagcagtcctcagtggcagatcaatgaaaagtgaaactaaaggcaagtgaagggtaggagagattggccagt

SEQ ID NO: 902 - DNA, 275 bp, Homo sapiens
  misc_feature 238: n = A,T,C or G
ggcaggtacccacctcctcggtcacccacagagccaccaaagattccatgtcccagagcttcccatagcagacctgaaaagtccatgacctgagctttggccatggtagtggagtggaacaggaaatagtccagcagaggagtgtgggggaagggggcaggagaggcacaagaataagggagacctggactctgcctttttgggaaaaggaaccaagctcatagcaatttggctgatnacacaatcagatttttccaggttaagcttcctttctg

SEQ ID NO: 903 - DNA, 356 bp, Homo sapiens
ccgcggtggcggccgaggtaccatctactgaatgcccagttttgatctatttctaaatggagcaaaccaattccatctcctagagctggagactgtatccaggcagtgtgtggacagaacggacaatcttttctgccaagggcctatttgagtggagcacccccacacgggttagacgggtcggcacggggctggtgggtgaggaactcaggggtcagtgcaagctgcagaccctcatttggggaacgctctcagcacaatgctcttacaactacagggtgcactccaaaatggagttcaaggaaaaaaggctaatgagaaataaaatctgaaaaaataacttaaaaagttttgct

SEQ ID NO: 904 - DNA, 332 bp, Homo sapiens
ccgggcaggtacgcgggggccctttggatacctgcactccccatcaccgcactccccatcgtggcacttcccttgttgcagttttatggagtgtgcgtctggctccccaactagacttgaaccgcttgggtgcataactcgggacttgaccatttgcgtctccctacggccagctcagcctccgcacacagggacctgcagagagtggatgtagccactgccccagcgtccctgggctctgaagagaagccattgcccttcaagagccaccctcatttcctgggcactggtttggaaaaaacgaagaaaaagagacacccagctcacctcca

SEQ ID NO: 905 - DNA, 313 bp, Homo sapiens
  misc_feature 36, 261, 267, 268: n = A,T,C or G
ctccaccgcggtggcggccgcccgggcaggtacgcngggcaactcattcatgatattgggagaaaagcaaagcaaaaactgcaacaaaatctcaaaccctttctgcagcagcagatggcaaacagtgatcagaggagaaggacccttccagcattagaagatttccaaaggctgttccagtaggggctgtgggcttctgggagcccagatgccccctgatggtatatttgagtttgtgaggtggaggccaggtggcaaganactgcnngccaatgtcaatgaaaagcctgggaggaaaaagagatttctggga

SEQ ID NO: 906 - DNA, 363 bp, Homo sapiens
aggtactttgctaaccagcattttggctgtgttattggcagttttcaaatttgaattctcttgccatctttttgagagtgcatagacatttaattttaagaaatttatagaattggacttttttgtctctatacatttgtaggtcagatgcacatttgtttcctgtttcatctttctttaagagcaaaaatgtaaagttttgtatgtagaggataattgtatgatgatgataaactaattaggtattacagttttctaacgacagaaatttgtaataattaggtaacttggttcatattaaaatatttgatacataggccgggcatggtgactcatgcctgtaatcccagcactttgagaggc

SEQ ID NO: 907 - DNA, 319 bp, Homo sapiens
  misc_feature 249: n = A,T,C or G
ggcaggtaccacacccatcttaccctcttccctctaggttctgacattcagctatcttggtgggaggctggggagcactattggggatgagggtaaggtggagttttataaagctctccaggtgactcagagaccaccctcattccacctggtcacaaatccctgaatgggaaacaggtactttttttttttttttttttttttgcaaagaattgtaaaatttattgtataagtattgcagcttttcanaatgtcatcattgccactaatgattactgatacacaacaagcagtttcttcaggcctgtggattggcatc

SEQ ID NO: 908 - DNA, 359 bp, Homo sapiens
aggtacttccctgagcagtcgaagtggatgcccagaccaatggccagtgctaatatcaatgcaatgatcccaatgacgatgattggaaaaaacttcaatggcagcagtgacaggatctgtgcagcaacagcatctgcatctggtgcaacaggacttattttcaaatcatcaaggccaaaaagcgatcggaatgagaagggggcttcaacagcaggcggatcattttcccccatggtgactatttcaggacctctgacatccggctccgcctccacctctacctcataattcccgagtcccaaaaatgtagatggcaccacggaagagatagtaggccacagtgttactggcttcccata

SEQ ID NO: 909 - DNA, 369 bp, Homo sapiens
aggtacagcaaattaaacccaataacaggaggaggaaaacacctaattaatataaaaatttcaaggatatgttaaacaaacaaacaattacaagaaactcctgtcaagttaaacagagagagagagagacagggagaaccactaacaggaaagagaaaaagatatacaagctatcccgcagaaattaaaaagagactaagaatattacaaacaactttatttcatttagatgaaatggacaaatttattttaaaacacaattcgccaaaattgacagaagtggaagtagaaaatctatttctgtatttattaaagatactgaatctataattaaaaatatcttcacacagaaaattacagtttcaaatg

SEQ ID NO: 910 - DNA, 339 bp, Homo sapiens
aggtacgatctgaagaaatgaaaggcattgaactttggtgggtaaattgggtcttttccagcaaaggtataaatccttaaaagccaagatcatattgtttgatttctctgggctctctgctggatacagtgccaagtccataactgtataccccatggacactctatgttaaatggagattaatgtgtaagaggtgtttttttttttgttttgttttgttttttaatttggaaaagaagcttaaagaccacaatgggtgtggcattggctcgacccacagatctgcttagtctcagacaggcactttgaaccagtcttttaaaattgcgtcacaacaac

SEQ ID NO: 911 - DNA, 351 bp, Homo sapiens
  misc_feature 111, 126: n = A,T,C or G
aggtacagatcactatggcttgtcttttctcctaactaatgtaaaattcccaataattcataacttgtatgaggacaacagttgtgtgaatctaccctggtccttctgatnatttttaattttttnatttttttttttttggggacagagtcgtgctgttatcgcccgggctggagtgcagtggcatgatctcggctcactgcaacctccacctcccaggttccagcaactctcctgcctcagcttcccgagtagctggaattactggtgcccactaccacacccggctaattttttgtatttttagtagagatggggtttcaccatgttggccaggctggtcttggactc

SEQ ID NO: 912 - DNA, 253 bp, Homo sapiens
aggtacaaattgtcgtttttattcctcttattgggatatcattttaaaaactttattgggtttttattgttgttgtttgatccctaaccctacaaagagccttcctattcccctcgctgttggagcaaaccattataccttacttccagcaagcaaagtgctttgacttcttgcttcagtcatcagccagcaagagggaacaaaactgttcttttgcattttgccgctgagatatggcattgcactgcttata

SEQ ID NO: 913 - DNA, 315 bp, Homo sapiens
  misc_feature 8, 15, 66, 73, 85, 90, 92, 94, 110, 115, 119, 135, 137, 139,160, 167, 176, 181, 209, 217, 222, 231, 259: n = A,T,C or G
tggccagntcaaatnacaaccccccaaccccccccccccccccccacaaacagacaaggacacagntcaccanacaatggatgtncaggnantngatatcagcagatatnttagncctntagataggctaatttnantnagcaaaggaaagaggaggtancattagncagatgggntattnacctctgaattagatggcacttacccancttctggnacagncctgctggnggcgtctagactagtgatcccggctgangatcgattaactatcatccgcgacctcagggggggccggacccacttttgtcctta

SEQ ID NO: 914 - DNA, 293 bp, Homo sapiens
cgaggtacgcgggacactggtgggggagagtccgacgcgcctggctaggagcgccgaccgcagggcctctacggaccttactagaaaaatgaaacctgatgaaactcctatgtttgacccaagtctactcaaagaagtggactggagtcagaatacagctacattttctccagccatttccccaacacatcctggagaaggcttggttttgaggcttcatgcgagaaaggggaatggggaatggctgcttaacggcatgtcttttttttttttgagacggagtcttgctctgt

SEQ ID NO: 915 - DNA, 162 bp, Homo sapiens
cgcccgggcaggtacgcggggacttgacttaaactctggggcccgggaggccgccggttttctccccgcttgccggggtggtcctcttccctttgtcggaccaaagaagtaaacactgtgtggagagggactgcgtgtttggagggaaatgggaatgtacct

SEQ ID NO: 916 - DNA, 508 bp, Homo sapiens
ccccgcgtccgctctctgtcggggtcccctccatctcgctgctgctgaaggccgcgagggcggcggcgatggcggaggcggcgctgttgctgctgcctgaggcggcggcggagcgggacgctagggaaaagctggctctctgggatcggagaccggacacgacggcgccgctgaccgacaggcagacggactcggtattggagctgaaggcggcggcagagaacttgccggtgccagctgagcttccaattgaagacttgtgcagtttaacatcccagtcactgcccattgaactgacttcagtagtgcctgaatctacagaagacattctcttgaagggcttcacttccttaggaatggaagaagaaagaattgaaaccgcacagcagttttttctcatggtttgcaaagctgcaaactcagatggatcaagatgaaggaactaaatataggagcagtgtgatgctatattgaatgatgtaaacagtgctcttcagcatctggagtc

SEQ ID NO: 917 - DNA, 476 bp, Homo sapiens
  misc_feature 283, 357, 363, 432, 435, 450, 460: n = A,T,C or G
ggctgtggccaagaaacgcagggaccgctctctcccccgggctttcgaaatcttcacagacaataaaacctatgtctttaaggccaaggatgagaagaatgcagaagaatggctccagtgcatcaacgtggcagttgcccaagccaaagaaagggaaagtagagaagtaaccacatatctgtagggaatttataagtcagccatgacaattatacaccacaggcattgtattatcattgccaatgtcaagaaaaagagctaaatttaccaagccatggttggntttttactaaataccatgggaatttgttggtcctttaagaagaagggccttaaaatggcagggatttcttagtnaaatgncaatactctaacagctttagtattgactttagaatatatctgatgcccacaaaaattaaataaaagggnttngaggaggtttgcccnaaataagtgnggggcccggaggggaa

SEQ ID NO: 918 - DNA, 428 bp, Homo sapiens
  misc_feature 5: n = A,T,C or G
agtcnccacgcgtccgcggacgcgtgggcgagtgcccagtgaccctttacgggggtagcttttactccgcactctcagcccctgcctcacccctccctcaaggcccggattgaccatttcctgctccagcactccatccctggctgccacctgcttgggagagcacagacggcattggcagtgatcccttcttccattgttctgccctctcagaaaaggaagatagagcaggctgaacatgtcccagacagtaactttggtgtaaatgcttcctgtttttctgccacaagccctttggtcttacccactacctcagagcacactgctaagaaaatgaaagccaccaatgagcccagcctgacacatatgggactgctcgacaggtccactgtcccacgagcagaagctggtcacaaagcttgggaaat

SEQ ID NO: 919 - DNA, 429 bp, Homo sapiens
  misc_feature 390: n = A,T,C or G
gggagtcgaccacgcgtccgcggacgcgtgggcgagtgcccagtgaccctttcacgggggtagcttttactccgcactctcagcccctgcctcacccctccctcaaggcccggattgaccatttcctgctccagcactccatccctggctgccacctgcttgggagagcacagacggcattggcagtgatcccttcttccattgttctgccctctcagaaaaggaagatagagcaggctgaacatgtcccagacagtaactttggtgtaaatgcttcctgtttttctgccacaagccctttggtcttacccactacctcagagcacactgctaagaaaatgaaagccaccaatgagcccagcctgacacatatggactgctcgacaggtncactgtcccacgagcagaagcttgtcacaaagcttggaa

SEQ ID NO: 920 - DNA, 339 bp, Homo sapiens
  misc_feature 167, 198, 284: n = A,T,C or G
agtcgccccgcgtccgcggacgcgtgggcggacgcgtgggcggacgcgtgggcggacgcgtgggggatggatgacagtccaccagaaaaaagttagtggagcggggacaagcagggttgcagagtggaagaaaaatgttcctgtgagaagaaactgtccaaagagtntgaagagaaaagggaacagggtgaatttgangccctacaagaaaaacaggagaccattcaacaggagacgcccagggagcaggtggctttgtgggcctgatgtccaagaaagaagtnctggtggtaaacagagacttgtggattgcaagctactgttgtctttctattgaaa

SEQ ID NO: 921 - DNA, 563 bp, Homo sapiens
  misc_feature 518, 538, 551: n = A,T,C or G
tcggagtcgccacgcgtccggccaggcgtgcctggaaatccgctttcgcagcgccccctcgtagcccgcctccgcccgcagaaggcgttccctggacagagaagcgggcgcgcgggggcgggcgcgtggggccttgccggagaacctgactctccgcagcagcagtggaagccagagtgacgcgttgtgttgaacaccagttttctggagcgctgtgtgttctcaacagctgagcagtctgtttctccaatcaggtttcaaagccacttcaactgcactggcccctgtgggtcactgctgcaccgccctggcccatgtgggtccctgaggagcgacctgccggggccacctggctggacgaaaaagacacactttgggacttaagccgtgagaaaaaaacttcatcagtaagaaacaagtcaatagacaagtaaaagactaggagaaaatatgcataaaacataaaaagtgacttggattcctgatcttggagtatttaaagaattcctataacttanaaaaggtttcaagttttttnaaatgagcaaaanggtttgggtaaa

SEQ ID NO: 922 - DNA, 568 bp, Homo sapiens
  misc_feature 439, 483, 530, 540, 555: n = A,T,C or G
tccgcaggctgggggatcccaaagggtgcgctccagcccccaacccaggcactgggactctggtggcaccctgggtggcaggcaagccttgaaatcaagtgcacgagccttggaaaggaggaccgggagagttatggcatttatgaatgaagaagagaaagagaatcactcggatgggaaaagttaactggattgttcccacctgcatggatcacccgggtaactgcagtgggaccgagggggcgaggctgcgggctgggggatgtgccgggtttccttgtgttgccacgaacccagagagggagaggaagaagatggaaagaaaaaggaaaaagggaaggaaagtaagaggggagagagggggaaaacttgaggatgaaagaagagacagaagaaagaagaagaccttgagagaggggaggagaaaggaaaggaagcnggaaggaggaattggaaagtgaaggaaaggggggaaaccaggcngagaaagaaaagagaaagggggaagggaaagaagaaaggggaaaagnaagggggggnggttgaaaatcaacncgaaaaaaagagg

SEQ ID NO: 923 - DNA, 432 bp, Homo sapiens
  misc_feature 2, 71, 154, 157, 167, 171, 180: n = A,T,C or G
cncgcgtccggctgtgatgaatgaggtctaggaaataatttgcatgtgtcttgggggacacaacagtaacngagaggaaatacattattacagcaacttgcgacgtactaatacctgtcagtgttggcccccgtaaggtatgtaaggcacctgngangtgcccagtnagtnccttggtgnaaggccaacatgtactagttatgtaagtattggtgtctgctttaaaaaaggagacccagacttcacctgtcctctttaaacatttgagaacagtgttactctgagcagttgggccaccttcaccttatccgacagctgactgttggatgtgtccattgtcgccagtttggctgttgcccggacaggacaggacctccattgggcgcagcagcaggtggcagggggtgtggcttgagggtgggtggcaagcgt

SEQ ID NO: 924 - DNA, 472 bp, Homo sapiens
ccccgcgtccgcacagatccttgagctccgctgcaggatagtacagttttaccgcagagggaatctggaacagtggaatcatgtgtctgccctgtgtattgcagtttgtattgccacaagctatatttataccagtgtcacccttttcttgtagaatatactaataaatctgtgccaactctaccttctcacttttacctctgacgtcattctttttttctgaaagaggtaataattctagttttgatagactctgaggattatgtgaacaggacatttttcatttgtgaatttaatgctatactgtcaaggtacttgcttgtgtctgaactctagtgcacttatgattttgtagacccatgtgaaatttaataagatacgttttttttcctttctttggtgtggtagtgcagcaacagtttggtctgcatttgttagaagtttaactcctaacaacccaaagacctattta

SEQ ID NO: 925 - DNA, 486 bp, Homo sapiens
  misc_feature 419: n = A,T,C or G
gcgtccgaccccaaagggagggaccacattgcacacactgtaagaaatgcactttccgaggaaggggatgggggagcccggacacccagagctccccgagttgggggtgcccgtctggagcgcccccgtcagcccctggcggtgggaggtgagagcgagtggtttaagtgcctgattaccaccacccgcccccccctttgtccagctgggacacggaatggccgcgggcctcctccccctcccctccagcctctccaccagcccctccagtcaaccctcatcgccgtgcccccccagagctagagagatggggcccctgcgtggcccgaggggcagagctgggcgtcacttcgcaagcgtcctgccctgccggggcgcgggggtgggctctggggaagccggtgcgccccccacgcctncgctgccagtgccttacattctggagcgacccccctccctggtgcctcccagcgaagggggacccgc

SEQ ID NO: 926 - DNA, 510 bp, Homo sapiens
  misc_feature 435, 437: n = A,T,C or G
agacagctcaagccttgccacttcgggcttctcactgcagctgggcttggacttcggagttttgccattgccagtgggacgtctgagactttctccttcaagtacttggcagatcactctcttagcaggtaggtgccgcagaccctgcgggttaagaggtggggtggggggcagtgcttgccaaggccctaaactgggagcgctgggtgaggggaacaacccactttggagggttctctgagagatagatacaccccatatcctgggcccagctcgtgcacacagctggaggtccagagacccagtcccctctgctccgtcagccaagttccaagaagttgagcagagacccttctgggagcctggcggggtgcagcggcctcccctgcggggcctgtcacccggccgggcgcgtgcaaacgcctctggcgcctntntgcgcgggaggggagataagcgtctgagccagggaaagccgccgggctaaaacccgccttttccgggggcccc

SEQ ID NO: 927 - DNA, 532 bp, Homo sapiens
  misc_feature 328, 426, 516: n = A,T,C or G
cgcgtccggtcatatacaatgtcattgtttgggacccgtttctaaatacatctgctgcctacattcctgctcacacatacgcttgcagctttgaggcaggagagggtagttgtgcttccctaggaagagtgtcttccaaagtgttcttcactctttttgccctgcttggtttcttcatttgtttctttggacacagattctggaaaacagaattattcttcataggctttatcatcatgggattcttcttttatatactgattacaagactgacacctatcaaagtatgatgtgaatctgattctgacagctgtcactggaagcgtcngtggaatgttcttggtagctgtgtggtggccgatttggaatcctctcgatctgcatgctctgtgttggactagtgctgggggtcctcatctcggtcangtgactttctttactccactgggaaacctaaagaattttttcatgatgattgggtgtattctgggtcactttctcttgccataagctatnctcattccagtagttt

SEQ ID NO: 928 - DNA, 428 bp, Homo sapiens
  misc_feature 361: n = A,T,C or G
ccacgcgtccggacgctgcgtggaagcggcggagccggagggaagcaaaggaccgtctgcgctgctgtccccgccccgcgcgctctgcgcccctcgtccctggcggtcgctccgaagctcagccctcttgcctgccccggagctgtcccgggctagccgagaagagagcggccggcaagtttgggcgcgcgcaggcggcgggccgcgggcactgggcgcctcgctggggcggggggaggtggctaccgctcccggcttggcgtcccgcgcgcacttcggcgatggctttttccgccgcggcgacggctgcgcctcggtccccgcggcctcccgcttcttctctcgggactcctgctacctntgtgccgcgccttcaacctaagacgtggacagtcctgcccgagtactctggccccgaggggaagtta

SEQ ID NO: 929 - DNA, 463 bp, Homo sapiens
  misc_feature 10, 437: n = A,T,C or G
cgacggccanggcgcctccgagttccccgccaggactcggagggccaggagggcgcgacctgggtggatatttttgttggacggcgcaactcttggggtggcccgggagcggcggaaaccgagcgagagaaccaggaggcgctgcgcagaaggaggcccgggggctccgaggcgttgaggggctcgatctgcgttctggggttggcagccgagaggccgcggtccctgagtgccagaggtggtggtgttgcttatcttctggaaccccatgcagccagatcccaggcctagcggggctggggcctgctgccgattcctgcccctgcagtcacagtgccctgagggggcaggggacgcggtgatgtacgcctccactgagtgcaaggcggaggtgacgccctcccagcatggcaaccgcaccttcagctacaccctgnagggatcataccaagcaggcctttgg

SEQ ID NO: 930 - DNA, 503 bp, Homo sapiens
  misc_feature 11, 47, 476: n = A,T,C or G
cgtccgctttnagaccggaagacatttaaaagccagtttacgtacangaagcatggttttagattaactgcctgttggtacagctagaaacattgcagccctatcgcttatttatcttgcatgttgctctgctttgctatgaaaaatatcgttttatgataaaacttgttgaattttgatatgtattcggttatactcttagggaaaataatagaaattagagtgagagaaagtgctatgtatattaggctttcagattttatagatataggcttaagggagggtggaggttctttttttaagttgaatgactacttaaatttgttgatgtgaatttaagttttaaagattattattaattaactcttctctttgtctttgcatttaccttcccagatgttccagcctatcattttacttattctcattcttgtattattttcatcactttcttacacaacaatatttaaacttgncttcctttttacactggtttttggtac

SEQ ID NO: 931 - DNA, 317 bp, Homo sapiens
cacgcgtccgtggagtatgtgccatctgccaaagtggaggtggtggaggagcgccaggccatccctctagacgagaacgagggcatctatgtgcaggatgtcaagaccggaaaggtgcgcgctgtgattggaagcacctacatgctgacccaggacgaagtcctgtgggagaaagagctgcctcccggggtggaggagctgctgaacaaggggcaggaccctctggcagacaggggtgagaaggacacagctaagagcctccagcccttggcgccccggaacaagacccgtgtggtcaagctacccgcgtgccccac

SEQ ID NO: 932 - DNA, 476 bp, Homo sapiens
  misc_feature 438, 450: n = A,T,C or G
ggttcgcccacgcgtccgccctgctaccctgggagaagcctcagctttctgggcagagtttgtctccctgtcatttatactctcaggctttatacatttacacagtaagttctccctcctggagggttaaaaggaataatttcaacagggtgaaggcctggcacggtggctcacaactgtaatccaaggactttgggaggctgaggtgggtggatcacctgaggtcaggaatttgagaccagcctggccaacttggtgaaaccctgtctctactaaaaacaaaaattagccaggtgaggtggcacacacctatagccccagctactgggggaggctgaggcaggagaattgcttgaacctgggaggcagaggttacagtgagctgagatggcaccactgcactccagcctaggtgacaaagcagcaagacgcattctnaaaacaaaacancaacaacaacaaaaaacgggaaaaca

SEQ ID NO: 933 - DNA, 411 bp, Homo sapiens
  misc_feature 2: n = A,T,C or G
cncgcgtccggtccactgtcatctcctgggttttctctgctcttttatttggtgatcctggttctttcggccgttcacgtcattgtgtgcacctcagctgaaagttcgtgctacttctgtggcctctcgtggctggcggcaggtggggtgatggtgctggcctcggcgctgctgtgtgtgattgtgtctgttctgaccaacgtgctcgtgggtggaaacaccccaaggaagaaccccatgcatcccagctcaaggtggtcagagctagaccttcttattctgttggggacggcgggccacgtcttgagcctgggcgccagcagcttcgtggaggaggagcaccagacctggtacttccttgtgaacaccctgtgtctagctctgagccaagaaacctacagaaactacttt

SEQ ID NO: 934 - DNA, 478 bp, Homo sapiens
tcgccccgcgtccggttattttacccagaagccggatagagaaaatattacagagaaaatcacatatcacatgggctcgaaagatgtagaggtttttgacaaatgaagaacaaccataacaggtagagggaacaccatgaaccagggcatgaaactgaaagtgcataacatattctagagagagaagggtgtgggcatgagttagggctggaaaaacaggttggaaacagataagtaagggtctcaaatgcaatgtcaaagagcttgcagtttattttccaggcaatgagtaggcagccaaaaaaaaaaagtaaggatgttttttttttttttcccatggcatcatatttaagaggatggatttaaattgtgtgagaccaaagcatagagactagataagagggcgatcattatttcaaaaagaaataatgaagatccaatgaaggaagtgggaaattaaaataggggaagagaggta

SEQ ID NO: 935 - DNA, 506 bp, Homo sapiens
  misc_feature 398, 462, 474, 482, 495: n = A,T,C or G
ccgtccggttttttgtctcagagttcttcaggctgtacaggaaatgtggtgccggcatctgcttctgacggagtctcactctgtcgctcaggctggagtgcagtggcatgatctcggctcactgcaacgtccgcctcctgggttcaagccattcttctgcctcagcctcccgagtaggtgggactacagtggccatgtgtctgagatctaaccaagggaacatgggtggaactgatgtaagccactttgacaccacaaaacctcccatgggttctctctcttcttctctggtgtacttgttggatggagaagatgctgagaaatagtgggaagtcctaggggatggaagaacccaggattctgaatactccattggaccttacgttttggaatcaggnatgatgctggccttcataaaatgagttatggagaaagtccctctttttctggtgtttggaacangttttcagaaangaatttgntacccagcttccntcttttgtacc

SEQ ID NO: 936 - DNA, 443 bp, Homo sapiens
  misc_feature 349, 421: n = A,T,C or G
ccggtgagcgccccgcccgctcagccgccagatcaaccttagcgctggggcgcgggctggggtcgccaggcggtgcgttctgcccgcgcggggctgagagttaggggccggggccggatccggggccgggggtcgcgccgctagccgccagcagcgcagtccgggccgccaccctgcaccctccgccctgtttctgcacccgtctgggttcttgtgccgccgcccgcaagccttcccgagctcagggtggtgagctgcggagacccgtgataattcgttaactaattcaacaaacgggacccttctgtgtgccagaaaccgcaagcagttgctaacccagtgggacaangcggattggaagagcgggaaggtcctggcccagagcaagtgtgacacttccctctttgaccatgaaactctngggtgtctgcattgctgatggc

SEQ ID NO: 937 - DNA, 372 bp, Homo sapiens
  misc_feature 346: n = A,T,C or G
gtccgccggcatgagctgtccatgaaggatgagctgcttcagttctacaccagcgctgcggaggagagtgagcccgagtccgtttgctcaaccccgttgaagaggaatgagtcgtcctcctcagtccagaattactttcatttggattctcttcaaaagaagctgaaagaccttgaagaggagaatgttgtacttcgatccgaggccagccagctgaagacagagaccatcacctatgaggagaaggagcagcagctggtcaatgactgcgtgaaggagctgagggatgccaatgtccagattgctagtatctcagaggaactggccaagaagacggaagatgctntccgccagcaatgaggagatcacaca

SEQ ID NO: 938 - DNA, 510 bp, Homo sapiens
  misc_feature 493: n = A,T,C or G
cccgcgtccggaattccagttgtggatgaaggaaatggtgttatgactgcctcaaggttttgtagcaagtcatagggaaccaaaagaggaatcttgttttcctcagaggtcatgccaactccaactcccgttccctaaactgtctctgagccatagactagtaatggactcttcaagctctaccattaggtatcttttaaagaaagctggttattactatttattcatttttttctcttctgtgcagtgcaaaagatatgaaacatcggctaggtttcctgctgcaaaaatctgattcctgtgaacacaattcttcccacaacaagaaggacaaagtggttatttgccagagagtgagccaagaggaagtcaagaaatgggctgaatcactggaaaacctgattagtcatggaatgtgggctggcagctttcaaagctttcttgaagtctgaatatagtgaggaggaatattgacttctggatcaagctgtgnaagagtacaagaaaatc

SEQ ID NO: 939 - DNA, 483 bp, Homo sapiens
cgtccggccggcgacggcggcagtggcggcccggcctgcaggagcccgacggggtctctgccatgggggagtgacgcgcctgcacccgctgttccgcggcagcggcgagacatgaggagaccccgcgacaggggcagcggcggcggctcgtgagccccgggatggaggagaaatacggcggggacgtgctggccggccccggcggcggcggcggccttgggccggtggacgtacccagcgctcgattaacaaaatatattgtgttactatgtttcactaaatttttgaaggctgtgggacttttcgaatcatatgatctcctaaaagctgttcacattgttcagtttcatttttatattaaaacttgggactgcattttttatggttttgtttcaaaagccattttcttctgggaaaactattaccaaacaccagataattggatcactaaaaattcctggtagaaaagaatttaaagacaaa

SEQ ID NO: 940 - DNA, 478 bp, Homo sapiens
  misc_feature 9, 22: n = A,T,C or G
tccgaaagngtactgccatganccgagataggagacacataagaggacagcagaagccctggccctggggaggcttctcggaaggcctggcttcacaggcaggccacagaaggatatcgcgggcaccgtgcacccaaagcaagatagtggcttcccttttatatccaatctaatcctgattggatgtccctgaggcccctgctggaaacagccataggagagggcccatggcagtaggggaaagaaggaagaaattccctgcaacaaaacttcagctaaactttgatttgtgtattgtttacataataattttaaagggtacataatgtgtaaagagtttggatagaacctctcttcatactatggttttcgtaaaggatctgttgttgttacggattcattttttccctctatttttataaagagcagcagagttgtcttctcaaaacggctgccaagctctgcttcttgggaagat

SEQ ID NO: 941 - DNA, 361 bp, Homo sapiens
  misc_feature 48, 147, 262: n = A,T,C or G
cccggtcgtgcgggtcgggcgcgggcgggcgcggcggcagtggcgctntcaggtgattgactggccagctgcctgaaggagcgccaggtcctccttgctggcaggtggcgaagcccattggggcggcggtgcagacccgcggcggcngctgcggcggtctggctcgggaggcgttcctggggccaaggccatggccccgcggctgcagctggagaaggcggcctggcgctgggcggagacggtgcggcccgaggaggtgtcncaggagcacatcgagaccgcttaccgcatctggctggagccctgcattcgcggcgttgtgcagacgaaactgcaaaggaaatccgaattgcttggttgg

SEQ ID NO: 942 - DNA, 407 bp, Homo sapiens
  misc_feature 76, 78, 79, 88, 99, 137, 142, 193, 251, 263, 268, 276, 278,279, 322, 329, 362, 368, 394: n = A,T,C or G
cacccaccccagatgccgcctggcaccaagcgcagccgccagctgccgcactttccacttgtattgatcacctatnanncccgcgcanaacggctacgnccgagcggaccgcggccagcgcgccagcccttggcacnccctnggagcagaaagggctccgggaggaaactccttgggagcgccctgtccggantgccctttgctctctgcagtgtgatttctttctgttctgggaggaggaggaggaggangaagaggaggangaggnagaacganannctgcccttccagaggttggtgagggagatcgcgcatggatttnaaaaccnacctgaggtttcagagcgcagccatcggttgcnctgcangaggctagcgaagcgtacctggtggntctgttcgaaaga

SEQ ID NO: 943 - DNA, 501 bp, Homo sapiens
gtccggttttgaaacagaaatgtaggcattagacttcctgggcggcagacaaaccaaagagcggaaattcatgcagcctgcaaagccattgaacaagcaaagactcaaaacatcaataaactggttctgtatacagacagtatgtttacgataaatggtaagctttcacatttgatttcttctgtttttccagtaactgtgaagggaaattggtaggaggtgttgtaacagggcaggacccaaatgggaacggggggatgacattggtttgtcaggtaccgagcaaagagtgaggattttggagtctcccttctgctgctctgatgttttccacatgcttatttctttgccaggcactggagatgcagtcaagaagtgggaagtggctcttacttctagtctgtgtgtgtataagtcacttaagatggccgtgttgactgcttctttgggaaatgccctgaataggagcatgtaggggatgcttaccgaggctggggaagg

SEQ ID NO: 944 - DNA, 492 bp, Homo sapiens
  misc_feature 154, 297: n = A,T,C or G
gcggacgcgtgggcggacgcgtgggcggacgcgtgggcgggcccgaccccgagcccgaccccgagcccaagcccgagccggagcccgagcgagaccccgagcccgagcccgagcgcgacccccggtgcggcgcggctaccccggcggaggcggngggcgcggggcgcgctctgaggcccgggggatgcgccgccgcctcgaccatgggcgccgccgcctccaggaggagggcgctgaggagcgaggccatgtcctcggtggcggccaaagtgcgagcagcccgagcgtttggagagnacctgttcccagagtcaccctgagaaccgcaacggccgcagatcacctgctggctgatgcctactctggccacgacgggtcccccgagatgcagccggccccccagaacaagcgccgcctgtccctcgttctccaacggctgctacgagggcaagccttctcagaggaagcccaagcattaggaagcccgcaggc

SEQ ID NO: 945 - DNA, 474 bp, Homo sapiens
  misc_feature 32: n = A,T,C or G
cgcgtccggcacgggggagtctgtggtggccngtttacctgggcatctggctgagaggaagaaaggccaacctgatcctgaggggacccagacatatcctttgcactgtccctagaggggcgatgagctttgcagcattaaaaaatggtgaaggggggaaatattttgaaccaaagaccaaatgttaggccgccgttatatttgcagaagctttgagaaccatgcgtatagcctcctgcattctcccctctcctaggagctcttttgtctctgtccttacgaggcgtcatacagaggcagtggggtgggcacagatgagcagagtggatggttcggtgggtccccacgagggcgagtggtggtcatatgtgatggcaccgtgttcacacaccctcctgtgtacccccccagggtcacccgaagtccccacacgctggctctccacacccctcctgttccagaaagcatgtcccg

SEQ ID NO: 946 - DNA, 363 bp, Homo sapiens
  misc_feature 7: n = A,T,C or G
tcgaccncgcgtccggcactccctctggccggcccagggcgccttcagcccaacctccccagccccacgggcgccacggaacccgctcgatctcgccgccaactggtagacatggagacccctgcctggccccgggtcccgcgccccgagaccgccgtcgctcggacgctcctgctcggctgggtcttcgcccaggtggccggcgcttcaggcactacaaatactgtggcagcatataatttaacttggaaatcaactaatttcaagacaattttggagtgggaacccaaacccgtcaatcaagtctacactgttcaaataagcactaagtcagggagattggaaaagcaaatgcttttacac

SEQ ID NO: 947 - DNA, 484 bp, Homo sapiens
accccgcgtccgcttttgcatctggatcatttttctcttgccccaccatgtaagaagtgcctttcacctcccaccatgaacctgaggcctcccgagtcatgtggaaatcgcccccagccaccccaccccagagggctacgtcctggcagagctgggtttggttagttctgagggctgagctggcccagcagctccagacctccagaccttgcactcacctgtgaacttgactctgcaaactcctccaagatgcgcccaccacactcccagtgaacaacacctacaggagcttggagttctattctcagatacatcagcttccacattcctgtgtgtcccagctggagaagcaagaagtcccagaccatgtgctaagcacacgttggggtggggatgaaatccaattggtggtgtgtgaatccatgctggattcatgaagctgaggcccagaggaggaagctttcttaatcaacttcttaacatg

SEQ ID NO: 948 - DNA, 421 bp, Homo sapiens
  misc_feature 14, 362: n = A,T,C or G
taaaagccatggtnatttgtgcactgtgcagtttcttattagcaaaggtgccaatgttaacagggctacagccaataatgatcatacagtagtgtcgctggcatgtgcaggaggccacctggcagttgttgagcttctcttggctcatggggctgaccctactcatcgactcaaggatggttcaacaatgctcattgaagctgcaaagggtggccatactaatgtagtttcttatctgttggattatccaaataatgttctgtcagttcccaccacagatgtgtctcagctccctccaccttctcaagatcagtctcaggtgccacgtgtgccaacgcatacacttgccatggttgtacctncccaggaacctgacagaacttcacaggagaactctcctgcccttttaggagtgcaaaaa

SEQ ID NO: 949 - DNA, 592 bp, Homo sapiens
  misc_feature 9, 145, 341, 379, 487, 503, 508, 531, 539, 544, 566, 575: n = A,T,C or G
ccacgcgtncggtcggcctgtgcggcgctgcggcggagcgggccatggcagtggggagggggcgagtgtagtgctgcgcggggcaggcgggaggtgatcgagagaggcagggatgggggcgccggagtggagcggttgcggcggnctgggctgctgactgcgcacttggaatagtagcaggcggcggcggcggaacgccaggcagtgtatgttttaactggaaaaagtcttccatgaaaaccgtcacttttaaaaaaataaggtaatgcccattctgttttttcctaaaaaagacctgaaaatgggggggccgaacacattccttaggggcccccggtggnttattgaaatgtgcctttcaagtttttcattaaatgcnctcctggcttattgggcaggaccattccctttgaacaatcctgggggccgggctgggatttcaacaagaattaggcaattcttggaatgggccttccaataaccctgntggggaatttttcccnttttngcccccaaccttgggggaatttnattatttncaagntttggggaagggttacccttcngggggaaangcttaacccaatttttc

SEQ ID NO: 950 - DNA, 436 bp, Homo sapiens
  misc_feature 3: n = A,T,C or G
ttngggagtcgccacgcgtccggccggcgacggcggcaagtggcggcccggcctgcaggagcccgacggggtctctgccatgggggagtgacgcgcctgcacccgctgttccgcggcagcggcgagacatgaggagaccccgcgacaggggcagcggcggcggctcgtgagccccgggatggaggagaaatacggcggggacgtgctggccggccccggcggcggcggcggccttgggccggtggacgtacccagcgctcgattaacaaaatatattgtgttactatgtttcactaaatttttgaaggctgtgggacttttcgaatcatatgatctcctaaaagctgttcacattgttcagttcatttttatattaaaacttgggactgcattttttatggtttttgtttcaaaagccattttcttctgggaaaac

SEQ ID NO: 951 - DNA, 511 bp, Homo sapiens
  misc_feature 1, 2, 16: n = A,T,C or G
nntccggagtcgaccncgcgtccgcggctgctgcctgctctggaggcaggctgggcggtggcggccgagactggcgggggtggacgcccgggccgggctgcgcccgcttcttgcagctgtgaattcctttggacaattgatgatatttatcattgtgcccagtttctacaaataaaagatgggtggattattttctcgatggaggacaaaaccttcaactgtagaagttctagaaagtatagataaggaaattcaagcattggaagaatttagggaaaaaaatcagagattacaaaaattatgggttggaagattaattctgtattcctcagttctctatctgtttacatgcttaattgtatatttgtggtatcttcctgatgaatttacagcaagacttgccatgacactcccattttttgcttttccattgatcatctggagcataagaacagtaattattttcttcttttccaagagaacagaaagaaataatgaagcattggatgga

SEQ ID NO: 952 - DNA, 467 bp, Homo sapiens
  misc_feature 3: n = A,T,C or G
tcnccccgcgccggttttgatacagaatgaaagtgcgtagtattttcattttgtttatttttgccttatacatatagcaagccctcaataaataaatattgaatgaatgaatgagtgagtgaagaatttgtttataacagtctgtcatcttgataacactggaatgtctttggttcttccacttcatcctttatgttttaaacttacacacaccattcttacacgtcactaaaggaaaataccagtatatattggctaaaattttttttttgttgttcaaaactgaaactcaaatgcctaattgggctaggggtcctcttaaaggaggttgatgtttgtcaaatgggttattttttaaaagcagtagataattgcttatttcaaggcaagtaaatgaatttagactaagctgttcataggattcatcattttttcccctctcccaaagtaatttgtaagccgtaaac

SEQ ID NO: 953 - DNA, 490 bp, Homo sapiens
tcgccccgcgtccgtgatttctcagtgttctccttagataccaaatacaaaggacgagggatcaagctcagcgaaagtatcaggcatttaaggtatcaggcagcaatgcggggaaaggtgaattttcttcaatcagcataggatggttagggaagagcatttatcactttggttcttatccttcaagccaggggaaaagcaacagtgaggacatcagagacaaaagcatttatagaactaacaaacacaaacgtttgacaagtgagaaagctttattaaagcacacatacatgtcaggggggtgggaaacaaaagagcaagttacagcccgggatcccaagttatgccttccattacaattgcaatccacaccaaatcaatctttgaaaacattcctccattcggttcatacatacagtagaaaccactgtggctgcccttaatccagtgtgcttataggaaatcagttagcagctgactctgttgaaag

SEQ ID NO: 954 - DNA, 489 bp, Homo sapiens
cgtccggacccttattaagaatatcccaggaagatggtgatgaacagcctcagtttacttttccaccagatgaattcactagcaaaaaaattacaacaaaaatattacagcagattgaggaaccattggcactggtgtgaacaattaaccagcaaatgtccttttctaataccatttgaaactagacagctttatttcacatgtacagcatttggcgcctcaagagcaatagtatggttacagaaccgacgtgaagccactgtggagcgaacgagaaccacaagcagtgttaggcgagatgaccctggagagtttcgagttggtcgtctcaagcatgaaagagtaaaagttccacgtggcgagtcactgatggaatgggctgagaatgtcatgcaaatacatgcagatcggaaatcagttcttgaggttgaatttttaggagaagaaggaactggcttgggacccacattagagttttatgctctggtg

SEQ ID NO: 955 - DNA, 444 bp, Homo sapiens
  misc_feature 10, 199, 315: n = A,T,C or G
accacgcgtncgggcagaaatacggcggcatgttctgcaacgtggagggcgccttcgagagcaaggacgctggatttcgatgccctcagcgtggggcagcggggcgcgaagactcctcggagcggccagggcagcgaccgaggatcggggagtcggcccgggatcgagggggacaccccgcgcaggggccaaggccggnaagagagcagggagcccgcgcccgcctcccccgcccccgccggggtagagatccggagcgccaccggcaaagaggtgttgcagaacctcggccccaaggacaagagtgaccgtctncttatcaagggaggcagaatcgtcaatgatgatcagtccttttatgctgatatttacatggaagatggcttaataaaacaaattggagacaatctgattgttcctggaggagtgaagaccattgaagcc

SEQ ID NO: 956 - DNA, 497 bp, Homo sapiens
  misc_feature 448: n = A,T,C or G
cccgcgtccgctactgtactttgcagtttgatgtttattaacattctttgggcacctagctacaatataactcaattttctgtgaaaaactattaatcatcctattttttccttgtctttaatatgagataaattttataccactgtttctcaaaccatctgttgtgagggacagttttgctttttaatttccaattgtcagagaccaatacttttgtaaaatataattaaaaacaaacataaaaataaacttattagaaaaatgaaataaaagagaaatgaaataagaataattttattattagatttaacagatcaaatattatttcaatactcagatcaaatgtgcaataagacagggttgcaaaaaatgcacactttttttattaaaatcatttatataagtaatttatataaaaataatattacagttgcaactttctggtgnttctcaactatgaccaaacaggagggtacaagtaaaggagcaatcccaa

SEQ ID NO: 957 - DNA, 474 bp, Homo sapiens
  misc_feature 470: n = A,T,C or G
gtcgaccacgcgtccgcagcaaaagtgcctggctgaaggacactgttgacccaaaactggtgaccctcaaccaccgcattgctgccctcacaggccttgatgtccggcctccctatgcagagtatctgcaggtggtgaactatggcatcggaggacactatgagcctcactttgaccatgctacgtcaccaagcagccccctctacagaatgaagtcaggaaaccgagttgcaacatttatgatctatctgagctcggtggaagctggaggagccacagccttcatctatgccaacctcagcgtgcctgtggttaggaatgcagcactgttttggtggaacctgcacaggagtggtgaaggggacagtgacacacttcatgctggctgtcctgtcctggtgggagataagttgggtggccaacaagtggatacatgagtatggacaggaattccgcagaccctgcagctncagc

SEQ ID NO: 958 - DNA, 431 bp, Homo sapiens
gtcgaccacgcgtccgcgccaactccggaggcgcggtgctcggcccgggagcgcgagcgggaggagcagagacccgcagccgggagcccgagcgcgggcgatgcaggctccgcgagcggcacctgcggctcctctaagctacgaccgtcgtctccgcggcagcagcgcgggccccagcagcctcggcagccacagccgctgcagccggggcagcctccgctgctgtcgcctcctctgatgcgcttgccctctcccggccccgggactccgggagaatgtgggtcctaggcatcgcggcaactttttgcggattgttcttgcttccaggctttgcgctgcaaatccagtgctaccagtgtgaagaattccagctgaacaacgactgctcctcccccgagttcattgtgaattgcacggtgaacgttcaagac

SEQ ID NO: 959 - DNA, 410 bp, Homo sapiens
ccacgcgtccgagggtggggaaaggaggagaggaagagcactcccttccctggcccctcatccagcctccggtgctgtaaaacgcaggcgctgggccgcgggcggagctgaggacaggccttggctggtcccaggatgagcgacgagtttggttttagctggggattgtgctggcatcctgcgaagctcctcccagccggtctctctgtgctcggttgtcttggggtggggcccatccgccgaggtggggaccgataggagaagccggtgggttgtacccttacacttgtggagtctcctcttgcctctacctactccgcctttgtccttaaggtttttgcaggccagtgccaaacacacactaactgtcctggcctctccgtgacacaagtctcttcccagccttcctc

SEQ ID NO: 960 - DNA, 449 bp, Homo sapiens
  misc_feature 61, 276, 284, 361, 391, 416, 432, 433: n = A,T,C or G
ccacgcgtccgcggacgcgtggggccgggacaactggtcttatcacggaggctggggccanggcagcccttcggttcgggtgggcccatggaccccagtccaacgccgagggaataggaccatccaaaagcggaaccttcgcctcagaaaaagggtgcgggacccctcctcaccgtgcggtcacgcgtggaccctgccagcagccaggccatggagctctctgatgtcaccctcattgagggtgtgggtaatgaggtgatggtggtggcaggtgtnggttggtngctgattctagccttggtcctagcttggctctctacctacttagcagacagcggtagcaaccagctcctgggcgctnttgtgtcaagcaggcgacacatccgtcctncacctggggcatgtggaccacctgntgggcaggccaaggcnnccccgaagccaactga

SEQ ID NO: 961 - DNA, 462 bp, Homo sapiens
  misc_feature 1: n = A,T,C or G
nccccgcgtccgggaggctccatgttgtcccctcagcgagtggcagcagctgcctcaagaggagcagatgatgccatggagagcagcaagcctggtccagtgcaggttgttttggttcagaaagatcaacattcctttgagctagatgagaaagccttggccagcatcctcttgcaggaccacatccgagatcttgatgtggtggtggtttcagtggctggtgccttccgaaagggcaagtccttcattctggattttatgctacgatacttatattctcagaaggaaagtggccattcaaattggttgggtgacccagaagaaccgttaacaggattttcctggagagggggatctgatccagaaaccactgggattcaaatctggagtgaagttttcactgtggagaagccaggtgggaagaaggtttgcagttgtttctgatggatacccagggggcat

SEQ ID NO: 962 - DNA, 528 bp, Homo sapiens
  misc_feature 421, 505, 511: n = A,T,C or G
gccccgcgtccgcttctccgaatatagcaacgtccagcagtgtccacactgtgggaacctggactaccacttcgtgaagccattttcctccttcaaagttctcgaagcttattgatgaaagctttgctttagtaatagctattttattgatattattactttattacatatcttttatagggaaacattctgtgacattaatttcctttctaatttaaaggagagttactttgttgtatgtgtgccactaaaataggggctgcccttgccctgtcttgattcccgagtgttaatctgtggttttgaccagagcccagatgggtaatcctgtgcatttgggttgggggttcactcttaccaagaatctttgatgcagctttaagatggtggggagatgggggttgaatttagggaaagaatntttgtgggttataaactaagagcttgataggagttggaaggaaactcttactaaaatgttaactttctaaaaaccttcttttanatcttncttgggcctttggaaaa

SEQ ID NO: 963 - DNA, 493 bp, Homo sapiens
  misc_feature 444, 484: n = A,T,C or G
gtgttttggggatgcctttccttaccagattcttctaaagcccagctgcacccacccttaagtgggagataaggcttctgcccgcgggctctgcgttcgtccacccggccccacgtttgctgtggactaaacaggagccactggactagagtacacttgactctcggctctgcggaccaaaaattccaggactaaggaatagcaaggttaggctgaaacagtccacacagggcttgcggtaaacgtcttttcaggagccactcgcccagtgcagtaagtcgtgtacttagttgactcgagcgctccagggagacgcccgaccctactctgcgccgccccggggcaccagctctgcttcctccaggtccactgaggcaggcacgcccagctctgggacaggtcagtaaacaagccacgaaccgcgccagggatcagagaacccanagtccccgccagctgccggcacaagccaatcgcagcgcanccaggcggc

SEQ ID NO: 964 - DNA, 496 bp, Homo sapiens
  misc_feature 80: n = A,T,C or G
gtctaagggatccaggtcctgtgtctcagggacctctgatgggattgaatccaagaggaatgcaggggcctccaggcccncgggagaaccagggtcctgctccccaagggatgattatgggccacccgcctcaagagatgagaggacctcaccctccaggtggactactgggacacggccctcaggaaatgagaggtcctcaggagatccgaggcatgcaggggcctccaccccaaggatcaatgctgggacctccccaggaattgcgagggcctccaggctcacaaagtcagcaggggccgccccagggctctttaggacctccaccccagggtggcatgcaaggaccccccggacctcagggacagcagaacccagcaagagggccacatccatctcaagggccaataccattccagcaacagaaaacgcctctgctaggtgatgggccccgggcccccttcaaccaggaaggacagagcacaggccccccacc

SEQ ID NO: 965 - DNA, 397 bp, Homo sapiens
  misc_feature 196, 223: n = A,T,C or G
tgcgcatgcgcggagcgcggcgcgcgcggcggttgggccgttggctgttcggccctgggatccgccgccactccgcgatcagaccgctctgtgccgcgagccgccgtgagcactcggattcaagccggcgccaacgagtccgggggcatcgcccgcagcggccaagctcatggccggctgagcgggacgccgcctncgcctcagccaccgccgccgccgccgncttcttctcctcagccggcggcggcccgggcccagcaaccatggctgaagactactgggacgggcgcctgcggcgaacaggaggagaaagggaggtcgcgcggcctcattccgggccgccgccccaggcgccgccgcgccggccccgcggctctgaggttgctcgcgcgccccc

SEQ ID NO: 966 - DNA, 248 bp, Homo sapiens
  misc_feature 9, 39, 44, 47, 51, 60, 64, 65, 77, 82, 83, 84, 97, 101, 104,105, 130, 131, 132, 133, 135, 136, 140, 152, 155, 161, 170,180, 181, 185, 203, 209, 214, 225, 226, 227, 228, 232: n = A,T,C or G
tggaaaatnttttggaaaaaattacccttgggaccttgnttttnaancccnaggttcccngttnnggcaaataaaanaatgnnngacccgggatttngggnttnnaaaccgggggtttttaatttccccnnnncnngggncctttttttttnccncccccncaagggggntttgggaaannaaancccccccctttttttttngggggngaaanttccccgggtnnnngccntttttttttttttaaa

SEQ ID NO: 967 - DNA, 479 bp, Homo sapiens
gtccgcgaggctccgcaccagccgcgcttctgtccgcctgcagggcattccagaaagatgaggatatttgctgtctttatattcatgacctactggcatttgctgaacgcatttactgtcacggttcccaaggacctatatgtggtagagtatggtagcaatatgacaattgaatgcaaattcccagtagaaaaacaattagacctggctgcactaattgtctattgggaaatggaggataagaacattattcaatttgtgcatggagaggaagacctgaaggttcagcatagtagctacagacagagggcccggctgttgaaggaccagctctccctgggaaatgctgcacttcagatcacagatgtgaaattgcaggatgcagggggtgtaccgctgcatgatcagctatgggtggtgccgactacaagcgaattactgtgaaagtcaatgccccatacaacaaaatcaaccaaaga

SEQ ID NO: 968 - DNA, 531 bp, Homo sapiens
cgtccgggaactcagcaacggtttcttcatccaggacccgattgctctggtggagagggggggctgctccttcctctccaagactcgggtggtccaggagcacggcgggcgggcggtgatcatctctgacaacgcagttgacaatgacagcttctacgtggagatgatccaggacagtacccagcgcacagctgacatccccgccctcttcctgctcggccgagacggctacatgatccgccgctctctggaacagcatgggctgccatgggccatcatttccatcccagtcaatgtcaccagcatccccacctttgagctgctgcaaccgccctggaccttctggtagaagagtttgtcccacattccagccataagtgactctgagctgggaaggggaaacccaggaattttgctacttggaatttggagatagcatctggggacaagtggagccaggtagaggaaaagggtttggggccgttgctaggctgaaagggaagccacaccactggccttccttccccaggg

SEQ ID NO: 969 - DNA, 498 bp, Homo sapiens
gattggaggagtcacatcccctcttcagccgcagcacccctccctcccatcctctagctcttcccgcggtggtcgcctccctccgaccctgctctcccctcctgggccccgcgcaaagccccctctgttccagctcccgggcctcggctgcctccccgccctcccatcccttcctcttcccagggcctggagcgctcccttacattcctgagatgcccttcctcggggctgtccccctttgcctccccagcatcccatttctaggcctttttcaagacccttccagagcggcccctttccagctccctttctcgtttccatttccaactttgcctcttttgcctctttgttcactttgcttccaagctcccctccctctttcccttcgtcttaccctgctttgatctacgcagccccaaactcaagctccccgctttcaaggtggtgcgaggttgttggggggtgcggaagggcctgccaagtccatttttcgagggg

SEQ ID NO: 970 - DNA, 569 bp, Homo sapiens
  misc_feature 60, 507, 530, 542: n = A,T,C or G
gtccgagatcgcgagccgccgccctttttttttttttttataagattattagtataaaanggggagacgaggttagggccctgggaaaggtgggagatcagccagagacaggtttcccagaacagaatgtctggcctttgtggtgaggagggactgtggtatgagccgcagaagcgggccaggggtaaaccctcctgtgcgtccttccttcagcctggtcctgagggtgaccctttgatcctgggttctccaggtagggctgtgagctgtgagttggatccttttggtgaaatggtctctctcatctggcctgtcactcaatgtggaatagagtgagtgagttctatgggttctaagtcctgctctggaaccataagtaagttatcctctctgggcttcagtttttcatggaaagttgcgttaagaatctagtttaaggccaggcatggtggctcaccgccttgtaatcccagcactttggggaggccaaggaaggtggatcatgangtcaggagatcgagaccatcctngctaacatgatnaaacccgtgtctttacttaaaaaatac

SEQ ID NO: 971 - DNA, 205 bp, Homo sapiens
  misc_feature 58, 116: n = A,T,C or G
cctgccagtggtgagcaccttcggcctccaggtgcctttcttcttcttcgcggccatntgcttggtgagcctggtgttcacaggctgctgtgtgcccgaaaccaaagggacgtccntggagcaaatccgagtcctttttccgcacggggagaaggtccttcttgcgctaggtcaaggtccccgcctggagggggccaaaccccca

SEQ ID NO: 972 - DNA, 342 bp, Homo sapiens
  misc_feature 57: n = A,T,C or G
gcgtccgcggacgcgtgggcggacgcgtgggtcagcctccacctggaagagagctangggccgggcaggccgggcagctgccaccccgcccggcccgacgccccgcatgccccgaagtccctggcgcccacccggccgcggccctgcgtgtgacccgcgggtcgatacctggcagccccagtgctggggcgccgcggccctgctcgcccaggaggagagcgagggccccacactgagtctcttgaagcctcacgtttccctgggggggtgctgcatcgtcgggtgtccctcaccccacctggggaacctctgtcttcaggtcaccccttttcaggggcctgg

SEQ ID NO: 973 - DNA, 431 bp, Homo sapiens
  misc_feature 159, 192, 335, 358: n = A,T,C or G
cgtccgggaccctgctcatggagaacatcagcagctggctgctccttcgctgacgccctgggctacgtgaacctgccgctcacctttttctgccgggcagagctggatagtgagcccgagcgggtggcgtccgtcctggaaaagctgaaggaggactgnaacaacactgagaacaaagaacggaagtccttncagaaggagcttgtgatggccctactgaagatggactgccagggcctggtggtcagactcatccaggactttgtgctcctgaccacggctgtagaggtggcccagcgctggcgggagctggctgagaagctggccaaggtctncaagcagcagatggacgcctacnagtctccccaccggtgacaggaacggggttgtggacagcgaggccatgtggaagcctgcgtatgacttcttac

SEQ ID NO: 974 - DNA, 465 bp, Homo sapiens
  misc_feature 105, 374, 452: n = A,T,C or G
tcaccacgcgtccgcgaagcgtgcaccgctgcgcccccgccggtgagcgcggggagcgccgcaagcccaacgccgggggcagccccgctccggtgcgccgccggncggaggcctcgccggtgcagaaaaaggagaagaaggacaaggagccgggaaaacgagaaggagaagagtgccctagcccgggagcgcagcctcaagaagcgccagtcgctgcccgcctccccacgtgcccgcctctctgccagcaccgcctctgagctcagccccaaatccaaggccaggccatcctctccctccacatcctggcacaggcctgcctccccctgccccagcccagggccaggccacactctgtctccaaagccaccgtncccccgaggcaccactgcatcccccaaggggccgggttcggaggaaggaggaggcaaaggagagccccagcgccgcanggcccgaggacaa

SEQ ID NO: 975 - DNA, 369 bp, Homo sapiens
tccgcagaaacggactttctcatcatgctttcctatggtgggtatgaggggccagctgataccaaccaactggcctgtatctatctatctggatttgacttgaatttttaaaatgtgtatcgtttaaaaaaaaaaatgtttgcaaattttgcacataggatcttgcactgttcattttcagtggggtgagtcttcacactaaaaacacaagcagagctcctgggaaaagagactggaagtggttcaggataaagagatccatggtgggcagggctcttaggtcacagagctctagaagcagctggacttgaacccacaatggcttgtgtaaattcgtaaatttcatggtttctaggaaaagctgcattg

SEQ ID NO: 976 - DNA, 567 bp, Homo sapiens
gcgtccggaagaactgtggaactgcggttggcagacaattttgttacaaatattaaaaggaaagattttgccaatatgaccagcttggtggacctgactctatccaggaatacaataagttttattacacctcatgctttcgctgacctacgaaatttgagggctttgcatttgaatagcaacagattgactaaaattacaaatgatatgttcagtggtctttccaatcttcatcatttgatactgaacaacaatcagctgactttaatttcctctacagcgtttgatgatgtctttgcccttgaggagctggatctgtcctataataatctagaaaccattccttgggatgctgttgagaagatggttagcttgcatacccttagtttggatcacaatatgattgataacattcctaaggggaccttctcccatttgcacaagatgactcggttagatgtgacatcaaataaattgcagaagctaccacctgaccctctctttcagcgagctcaggtactagcaacctcaggaatcataagcccatctacttttgcattaagtttt

SEQ ID NO: 977 - DNA, 537 bp, Homo sapiens
  misc_feature 1, 89, 98: n = A,T,C or G
nctccaacaattatggctcatccttccttttactctgtctcacctcctttaggtgagtacttccttaaataagtgctaaacatacatanacggaactngaaagctttggttagccttgccttaggtaatcagcctagtttacactgtttccagggagtagttgaattactataaaccattagccacttgtctctgcaccatttatcacaccaggacagggtctctcaacctgggcgctactgtcatttggggccaggtgattcttccttgcaggggctgtcctgtaccttgtaggacagcagccctgtcctagaaggtatgtttagcagcattcctggcctctagctacccgatgccagagcatgctccccccgcagtcatgacaatcaaaaaatgtctccagacattgtcaaatgcctcctggggggcagtatttctcaagcacttttaagcaaaggtaagtattcatacaagaaatttagggggaaaaaacattggttaaataaaagctatgtgttcctattcaacaatattttt

SEQ ID NO: 978 - DNA, 444 bp, Homo sapiens
  misc_feature 244, 248, 330, 425: n = A,T,C or G
ccccgcgtccgggtccccgcgactcccggactggagaaaacggctcttgcgatggggcgaagtccgagctgcggcgggcgttggtccgtgcagggaagtgggaatcgttaggttcgttctggacccgccgccccatggcccaggcgtctcgctcaggtagcctgcctccactcgttatcgtgcccccgctgagggcgcaacccgggggcactggggaggagcagtgggagagaagtcgaacggncggncttccgctgggcagagctcagcagtacttggcagcatgggacccagcttccttcctgctcctgatccaaaaggacttacctnctctgttgcatgaggcagaagctttgtatagcctggcctcagaggaaagcttagctctggaagtggagcagcagctgggcctggagatccagaanctgactgcacagatccagc

SEQ ID NO: 979 - DNA, 417 bp, Homo sapiens
  misc_feature 7, 68, 99, 113, 118, 128, 140, 298, 353, 365, 414: n = A,T,C or G
aggctgntacgaagcgagcttgggaggagcagctggcctgcggggcagaggagcatcccgtctaccangtcccaagcggtgtggcccgcgggtcatggncaaaggagaaggcnccganagcggctccncggcggggctgntacccaccagcatcctccaaagcactgaacgcccggcccaggtgaagaaagaaccgaaaaagaagaaacaacagttgtctgtttgcaacaagctttgctatgcacttgggggagccccctaccaggtgacgggctgtgccctgggtttcttccttcanatctacctattggatgtggctcaggtgggccctttctctgccttcatcatcctgnttgtgggccgancctgggatgccatcacagaccccctggtgggcctctgcatcagcaaatnccc

SEQ ID NO: 980 - DNA, 516 bp, Homo sapiens
  misc_feature 29: n = A,T,C or G
accccgcgtccggaaaagaagagtggccngttccaggggtagctccaaaagagactgcagagctgtccgagaccctgacaagggaggcccaaggcaacagttccgcaggagtggaggcagcagagcagaggcctgtggaagatggcgagaggggcatgaagccaacagaagggtggaaatggaccctgaactccgggaaggctcgagaatggacacccagggacatagaggctcaaactcagaaaccagaacctccagagtcagcagagaagcttctggaatctcccggtgtggaggctggagaaggggaggctgagaaggaggaggcgggggctcagggcaggcctctgagagccctgcagaactgctgctctgtgccctcccccctcccaccagaggacgctgggactggaggcctgagacagcaggaagaggaagcagtggagctttcaagcccccaccaccagcccctctgtctcccccacccccagccccaactgccccccaaccttctgg

SEQ ID NO: 981 - DNA, 529 bp, Homo sapiens
  misc_feature 466: n = A,T,C or G
gccccgcgtccgaaaagaatgggtgaaccaatcggcctttgtgaatttattcagtgccttctctgtaccaagcactgggtaaggcacttttgtggagcattagacagtaaccctcaaggagctagagaaccggatgggagacatgagcggtaattaactcacttgttccccagagtttctatttgttttgattttctttttctgtgacttattttcctattttctttcctccatgtaattttcactatggcccaactaatataaacacctggaaattacaaggaaaaaaaattcttcctctaataactttccaaatttgtggaatatttatttgtaatagcagttatcagttatgcttatatagcattaaaaattctcctcctttgactacacacacaaccacagtgtggttctaatcatggagatatcagtaatttttagtaactgaattttgaggacatttctntgtttagcatgtatgcaaactgatatgtaatctgaggttccaaagtcaatttttttctttttt

SEQ ID NO: 982 - DNA, 440 bp, Homo sapiens
  misc_feature 2: n = A,T,C or G
tngggagtcgaccccgcgtccggtttttgtgaggcagtgagacctaaggtaacctttatcaaaaggatggagttgggaaaaggaaaactactcaggactggactgaatgcgttgcatcaagcagtgcatccgatccatggccttgcctggaccgatgggaatcaagttgtcctaactgatttgcggcttcacagtggagaggtcaagtttggggactccaaagtcattggacagtttgaatgtgtctgtgggttgtcctgggccccacctgttgcagatgatacacctgttctactcgctgtccagcatgagaagcatgtcactgtgtggcagctgtgtcccagccctatggagtcaagcaaatggcttgacgtctcagacttgtgagattaggagggatcactacctatccttccccagggctgtgtgtggcacccaaa

SEQ ID NO: 983 - DNA, 442 bp, Homo sapiens
  misc_feature 110: n = A,T,C or G
gtgtcgaccccgcgtccgcgccctgcctgcagttgagattcagatgccttctgacagagttcagcctcttggagagtcttggggattgttggcacctaaacagaatcagngacccgggtgctttgtggccagcagcacagaatcaaacccgcatcccagcattgggccacccatctgagggaggccaaaatcatcacagatgctgctgtgctgcagacagatacatgctagtccagagagccgcccctgagatggctgtgagaaccatgtgtctaaggcgtaagataaggatggaaggctgtccaagttatttggaaggcctcggcagcttgggattagcttgggagcgcagcgctgcaaagtggaaaatatgaaaagaccacacaggcccaagcagtccagaaactgggcaaaaatattctgcagtggggatttatttttt

SEQ ID NO: 984 - DNA, 500 bp, Homo sapiens
  misc_feature 172, 435, 470, 472, 473: n = A,T,C or G
cacgcgtccggagtacggagttgttcctttactggctgaaagatatattcgaattgtaaagatgctttttctcatgcattgaaattatacattatttgtagggaattgcatgcttttttttttttttctcccgagacagggtcttgctctggcgcccaggctggagtacagnggcatgatcttggctcacttcagccttgacttgggctcaagtgatcctcctacctgagccttctgagtaactgggactacaggtgtgcactcctcgcctggctaattttttattttttgtacaggcaggatcttgccaccttgcccaggctggtcttgaactcctgagctcatgccatctgcctgccttagtctcccaaaatgctgggattacaggagtgagccaccatgcccggctggcagttgcatggaagagaacacctntttatggcttaccctctagaatttctaatttatgngnnctgttgaaatttttggtttttttacct

SEQ ID NO: 985 - DNA, 492 bp, Homo sapiens
gtcgaccacgcgtccgctcggcttcctgctgatggtcagggttttggcaactccccggtgtgagaggggtagggagtgctcccggcggcgacggggccgagttcaccagccgccggggcagtagtcgaaggcccggcgcggcatgtcctgggtgccgcggtgcgggcagtgaacgcgcgccgggcgggatgggccggcgccgggcgccagagctgtaccgggctccgttcccgttgtacgcgcttcaggtcgaccccagcactgggctgctcatcgctgcgggcggaggaggcgccgccaagacaggcataaagaatggcgtgcactttctgcagctagagctgattaatgggcgcttgagtgcctccttgctgcactcccatgacacagagacacgggccaccatgaacttggcactggctggtgacatccttgctgcaggggcaggatgcccactgtcagctttctgcgctttcaggcacattaacagca

SEQ ID NO: 986 - DNA, 380 bp, Homo sapiens
cgccacgcgtccgcgtacgcgtgggcgcgaccgagcgtgcggactggcctcccaagcgtggggcgacaagctgccggagctgcaatgggccgcggctggggattcttgtttggcctcctgggcgccgtgtggctgctcagctcgggccacggagaggagcagcccccggagacagcggcacagaggtgcttctgccaggttagtggttacttggatgattgtacctgtgatgttgaaaccattgatagatttaataactacaggcttttcccaagactacaaaaacttcttgaaagtgactactttaggtattacaaggtaaacctgaagaggcccgtgtcctttctggaatgacatcagccagtgtggaagaagggact

SEQ ID NO: 987 - DNA, 468 bp, Homo sapiens
ggtcgccccgcgtccgtagcagttacatctacgaggctattatggattggaggatgagaagggaactgcatgtacctcaacaaggcgtcggtcaacaccgcgaagtttggcaggcttgacaagtggagtttttgaatctataatggttcaagttttgagacaggaagaacagctgagagcaaaagaagaaaaaaggcttcgggagcaggaaagaaaagaagcagaagaagctagtcaaaaggaaatagaagaatgggaaagaaaacttctagctcaagcagctccaacttgtatggagaccatgtgggaaattccagctattgggcatttcctttgtttagctcagcaaattctaaatttgccagaaatagtcttttaccgaactggaaccgttgtcttctgatgcctcagtgtaatgcttttctatcgaaaataatgacttcttatttaagtcctccccatcgcaga

SEQ ID NO: 988 - DNA, 496 bp, Homo sapiens
  misc_feature 1: n = A,T,C or G
nccccgcgtccgagtcccctgtctgtggcaccagacactcccgactgtgcgctgactctccccgcccagccagcagccttttccagagaggctgtggtccatagcctctgttcgttttcactgcaggaccaggcacgaaagttaaaacaaaatgaagattttttctgaatctcataaaacagtgtttgttgtggatcactgcccttatatggcagaatcttgcaggcagcatgtcgagtttgatatgctggtgaagaatagaacccaaggaatcattcctttggcccccatatctaaatcattgtggacttgctcagtagaatcttccatggaatattgtagaataatgtatgatatatttcctttcaaaaagctggtgaattttattgtgagtgactctggagcacatgttttaaattcttggactcaagaagaccaaaatttacaggagctaatggcagcattagcccgctgttgggcctcctaatcctcgggc

SEQ ID NO: 989 - DNA, 474 bp, Homo sapiens
  misc_feature 399: n = A,T,C or G
gtcgcccacgcgtccgttcgttgtctgatggacctgcttgcaaaaggccagctctgttgcattcccaatttttgacaccacctcaaacaccaacgcccggggagagcatggaagatgttcatctcaatgaacccaaacaggagagcagtgctgatctgcttcagaacattatcaacattaagaatgaatgcagccccgtttccctgaacacagttcaagttagctggctgaaccccgtggtggtccctcagagctcccccgcagagcagtgtcaggacttccatggagggcaggtcttttctccacctcagaaatgccaaccattccaagtcaggggctcccaacaaatgatagaccaggcttccctgtaccagtattctccacagaaccagcatgtanagcagcagccacactacacccacaaaccaactctggaatacagtccttttcccatacctccccagtcccccgctt

SEQ ID NO: 990 - DNA, 369 bp, Homo sapiens
  misc_feature 95: n = A,T,C or G
gtccggctgggacctcctcctgttggggtccccatgaacccttcccagttcaacctttcaggacggaacccccagaaacaggcccggacctcctnctctaccacccccaatcgaaagacaatgcctgtggaagacaagtcagaccccccagaggggtctgaggaagccgcagagccccggatggacacaccagaagaccaagatttaccgccctgcccagaggacatcgccaaggaaaaacgcactccagcacctgagcctgagccttgtgaggcgtccgagctgccagcaaagagattgaggagctcagaagagcccacagagaaggaacctccagggcagttacaggtgaaggcccagccgcaggcc

SEQ ID NO: 991 - DNA, 504 bp, Homo sapiens
  misc_feature 1, 501: n = A,T,C or G
ncgcgtccgcttaaatgactcgttatcattttgcaatgaatggaaaatcattctcagtgatactggagcattttcaagaccttgttcctaagttgatgttgcatggcaccgtgtttgcccgtatggcacctgatcagaagacacagttgatagaagcattgcaaaatgttgattattttgttgggatgtgtggtgatggcgcaaatgattgtggtgctttgaagagggcacacggaggcatttccttatcggagctcgaagcttcagtggcatctccctttacctctaagactcctagtatttcctgtgtgccaaaccttatcagggaaggccgtgctgctttaataacttccttctggtgtgtttaaattcatggcattgtacaagcattatccagtcttccaagtgttactctgctgtattctatctttaagtaacctaggagactttccagtttctcttaatttgatctggcaatcttttgggtaagtgggtatttanaat

SEQ ID NO: 992 - DNA, 377 bp, Homo sapiens
ttttcactgcaggaccaggcacgaaagttaaaacaaaattgaagattttttctgaatctcataaaacagtgtttgttgtggatcactgcccttatatggcagaatcttgcaggcagcatgtcgagtttgatatgctggtgaagaatagaacccaaggaatcattcctttggcccccatatctaaatcattgtggacttgctcagtagaatcttccatggaatattgtagaataatgtatgatatatttcctttcaaaaagctggtgaattttattgtgagtgactctggagcacatgttttaaattcttggactcaagaagaccaaaatttacagggagctaatggcagcattagccgctgttgggcctcctaatcc

SEQ ID NO: 993 - DNA, 479 bp, Homo sapiens
  misc_feature 101: n = A,T,C or G
cgcgtccgggcaggagcaccactcaaggagctacaccccttgcatcggcttgaccgccttacctcaggggtgcttatgtttgccaagacagctgcagtctntgagagaattcacgagcaggttcgggaccggcagctggagaaggagtacgtgtgccgggtggaaggggagttccccactgaggaagtgacctgtaaagaacccatcttagtggtgtcttacaaagtaggggtgtgccgtgtagatccccggggcaagccctgtgagacagtgttccagaggctaagctacaatggccagtccagtgtggtacggtgccggccactcacaggccgcacacaccagattcgagtccaccttcagttcttgggccatcccattctcaacgaccccatctacaactcagttgccttggggtccttctcgaggccggggcggctacattcccaagacaaacgaggagttgctacgggacctgg

SEQ ID NO: 994 - DNA, 441 bp, Homo sapiens
acgcgtccgcgaccgctgggcatgcgggtgttggcgcggtatccccgccctgcccagcatctgccccacgtttcttcaggctaaactaccgggatcccgggcttcttcctaaagtaaaactcgctccggaaaggccaacagtccagcggccagacgggcacctgggaacgcgggcctaacgcgtactggagacggagtggcgcccggcactgcgcgcctcctccccgccgggagactgcgtgctaagctcagcaaagccccgctgtggagacggagccatgtcgcccattacctaatgaaactgagaagggagactcagtctctcttctagccccgagcgcaagctctgctggacttggcatcgtccgccctccacgatcccacactccgggttttccccattcccagctcggctgcaaccgagagacagacggaagaaac

SEQ ID NO: 995 - DNA, 319 bp, Homo sapiens
  misc_feature 29, 151, 165, 166: n = A,T,C or G
tcctcctggccctgttaatgtcggggccnggccgggggaggatggcgccctagaacccggccttgctggggtaggggcgggaggggacggggtggggaccggccatgtcggaggtgacccggagtctgctgcagcgctggggcgccagttntaggagaggcgccnnacttcgactcttggggccagctggtggaggcgatagacgagtatcagatattagcaagacatctacaaaaggaggcccaagctcaacacaataattctgaattcacagaagaacaaaagaaaaccataggcaaaattgcaacatgcttggaat

SEQ ID NO: 996 - DNA, 506 bp, Homo sapiens
cgcgtccggcctgagccggcgggtcccctgtgtccgccgcggctgtcgtcccccgctcccgccacttccggggtcgcagtcccgggcatggagccgcgaccgtgaggcgccgctggacccgggacgacctgcccagtccggccgccgccccacgtcccggtctgtgtcccacgcctgcagctggaatggaggctctctggaccctttagaaggcacccctgccctcctgaggtcagctgagcggttaatgcggaaggttaagaaactgcgcctggacaaggagaacaccggaagttggagaagcttctcgctgaattccgagggggctgagaggatggccaccaccgggaccccaacggccgaccgaggcgacgcagccgccacagatgacccggccgcccgctttcaggtgcagaagcactcgtgggacgggctccggagcatcatccacggcagccgcaagtactcgggccttattgtcaacaaggcgccccacgactttcaag

SEQ ID NO: 997 - DNA, 436 bp, Homo sapiens
  misc_feature 37, 337, 364, 370, 379, 380, 409, 411, 413, 425, 428: n = A,T,C or G
gtccggccaggagccaggccgagcgggagctgaccanggcttgactcgggtacagaacgaggcaccagtccccttgcgaaccgaagggcctcgcagtggatggaggaggcccagccctgaggtcaacgccaaccaggctagcctggcacggggcctacagggtgggtaggcgggcgtgccgcagccgtccagggccttccctcaggtcccgggccgaggggcctacgctgcggcccggcaacaaggcccgactcggcccctcgggaccagagccccacccgatcggaaggcggatcctttaccagggccataggccagtgactgggcgggccccttngggcctcccattcggggcccggactanggaacnaggcccggnngaggccccttggcctaccagacccttttntnangccgacagccgncanggaaagat

SEQ ID NO: 998 - DNA, 500 bp, Homo sapiens
  misc_feature 457, 479: n = A,T,C or G
cgtccggcccagagcccgcagcacgccgccgccgcagcctaggtcacctccagcatctagcacaacgtctgcaatggaacaggcgagctgtgaatatttgtggaatgcatgggtggactaaagacctatcacctcactctagaatgcccagcatgttggagcatgaggaccaagaaccatggtgttcctccactcatcagagccgtatcattttgatgcatgcgccaagaaagaaaattcaatcatcagactgaagcaatcaaactccaaatggtgctgtaaactgaaccacacatagacatgccattcttctaaggacccttaagatccaccccaggaggagcgctagctgctgttccccattcgatgccccttttcggcccggaagtagccggaaagattcgcccgccaaaattcccctaaccagcaagttaggtgtggcatcttccacaagcanggagccgttgtaggaaaaaggnggtcttggggaaggtttttcg

SEQ ID NO: 999 - DNA, 503 bp, Homo sapiens
  misc_feature 18: n = A,T,C or G
cccgcgccggcagtttcnatggtgtgtactaatttgagaaaatgaatgtgtatacatacaagagtaagtcagattgttagactcatccctcagtattccatatgttttgtgactgattttacagttctctctacctttctcatttacaaaaaaaaaaaagaaaagaaaatttgattcagcaattcctaaaagtattgtattcagtgacatctttggaaacaccagtttctgttatcaacttcaaataatagtcaagttttatgtatgatctaaagggaaaacaagtttgtttttcaatcctgtgataatttttcttttagaatgaggtgttgcaagaaatggaaaattaaaaaaaccactctgtaacaattttgctgtgcttctttgatttttctctgtttttgtttaatgggtaccttatatttgtacctttacatattgaattcatgaggagaggttatgcacagcctagttatttgacattccagggggtttaaaaaaaa

SEQ ID NO: 1000 - DNA, 465 bp, Homo sapiens
cccgcgtccggcggtggcggtggtggcggtggcggcggtggcggcggcggcgaagggggcggagaggaaggagcgcggcgggaccgggccgggacagcgcgtactttgggctccgggagtcgctccgcgcccgcggttgtagcagctgccgctgcagccatagcagcaggtcagtcattggcaccatgaactggaataaaggtggtcctggcactaagcgaggatttggctttggaggttttgccatcagtgctgggaaaaaggaggaacccaaactcccacagcagtcccacagtgcctttggggcaaccagctcttcttctggatttggaaagtcagctccaccacagcttccttctttctacaaaattggatctaagcgggccaactttgatgaagaaaatgcctattttgaagatgaggaagaagattctagcaacgtttgatttaccttacattcctgct

SEQ ID NO: 1001 - DNA, 435 bp, Homo sapiens
ccggccgccgccgccgccccgccgccaccgcctgggggttggttgaggcggacggcggggtccgggccggagtacgtcgttcccgctgcgctaggggaagcgggcagtcagaaaaatgggtaagaagagtcgagtaaaaactcagaaatctggcactggtgctacagcaactgtgtcaccaaaggaaatcttgaacctgaccagtgagctgctgcagaaatgcagcagtccggcgcctggccaggaagagtgggaagagtatgtgcagatccggactctggttgagaaaatacgaaaaagcaaaaaggtcttgtccgttacttttgatggaaaaagagaagattactttcctgatctaatgaaatgggcctctgaaaatggggcttctgtcgagggtttttgaaatgggttaacttcaaagaagaggggcttttg

SEQ ID NO: 1002 - DNA, 405 bp, Homo sapiens
gtcgaccacgcgtccgacgcaccaaagggcaaatactcggtagcgactcagagggaaagtggggtctctcctgggagagcaggaggctgccagaaaagaactcaggtcaggggtgcataggcggctgaggagtgcgggacgggctgagagttggggtgcctccccgcccgcaggtgggtccgcagatcccgcgggccgcattggcccggctgctgcgggatgccgaggggctgcaggagctggcactggcgccgtgtcacgaatggctgtcagacgaggacctggtgccggtgctggcgcggaatccgcagctgcgggagtgttggcgttgggcggctgcgggcaactgagtcgccgggcgcttggggctttggccgagggcttgcccacgcctgcagcgcctgt

SEQ ID NO: 1003 - DNA, 214 bp, Homo sapiens
  misc_feature 13, 94: n = A,T,C or G
cgcgtccgctttnccttcttggttccacctcaaacatcccttccgaagtgaggctttccctgactggggagcataaagtagcatctctcacatnccatacacccctacaacgaatctatgcaatggccctgctctgccatcgccacctgaaaccatctcaataaacacattttggataaaaaaaaaaaaaaaaaaaaaaaaaaaaaaaaaaagg

SEQ ID NO: 1004 - DNA, 411 bp, Homo sapiens
acgcgtccgttggctgcgaggagcgcccgaaaggtcagaggaaggagctgtgggaagctcgcagcaggtatcggagcttaagccagtggatttgggggccctgggctccctagccggctgcggtgtgagaatggagtgggcaggaaagcagcgggactttcagggctctgggtttgcagagagccgaaatgaccatgactgccaacaagaattccagcatcacccacggagctggtggcactaaagcccctcgggggactctgagcaggtctcagtcagtctctccacctccagttctctccccaccaaggagtcccatctacccgctcagtgatagtgaaacctcagcctggaggtaccccagccactccagctcccggggtgctccttaagggaccggcaccccccact

SEQ ID NO: 1005 - DNA, 429 bp, Homo sapiens
  misc_feature 1, 293, 362, 382, 385: n = A,T,C or G
nccacgcgtccggcagcgctgcgacgggaccgcgcgattcctctcccacgcatctggcccgcgttcctgggcctcggcaccggatcccggcgggggtgtggacccagggcccactctccccggcgcggccagggccccccagcgtgcgagcgcctaggggatgccgagctgctcaagatgaggaggtgcgcggggccggggcggagcagtcgcagttccccgcgtgtgagcccccacccatccctggcgccagcgctttcccgaccactcgggttcggctatgcgggagccgngaggaggaggcttgcagtcgtggacctgagacctcgggaggtcatgctgtcttgcttttaagtggcttnggggaaagtgaaagaaaacnccnaaaattggaggactttgctaccagggacctaacggcaccagtgg

SEQ ID NO: 1006 - DNA, 498 bp, Homo sapiens
  misc_feature 256, 300, 458: n = A,T,C or G
accacgcgtccgggaaaagcccggaagtgccacgggacttcctgtctaaggaagagcctcgtgaagctcctccactggggagtcagtggccttcgttgtatctgccccgcttgtccacctcctagagtgaatccccgcctggaggctgggacactaaccaagaagtggcacatggcatatcacgggagcaatgttgccgctgtacggagagtgctggaccgaggggagctgggagcaggtactgcctccatctgangccgtcctttgaagggagaacctggggtagggttcgaggagccngcgagaactgtgcacctcctcgggaggagcagccccctcctgtgctgctttccccctcccttcaatatgctgggggcggagaccctggcctccaaagtgcaattccgggaccccaaatcccagcggacgcaccaggctttaggtgggcgtcaagttgntgtgtgccccctggcttctacaccccgggacccccttccg

SEQ ID NO: 1007 - DNA, 417 bp, Homo sapiens
tcgccacgcgtccggaaaaatttatgcctttttattcataacccagctgtggaccactgcctgaaaggtttgtacagatgcatgccacagtagatgtccacataataaaattcatagttaccaatgcagttttgatatatcattggattctgtctttgagttgtaggttatttcttagctgcatgttttaaactgaatttgcatagagttgtatgttaatgtttcagttaagagaaaaacttaagatacatgagtcattacataatgggtatgaaatctttataatcacccttccaccctctatggtgtcagtacacatcacgtgtcatagatacttaaaatgtaaatgttaacacttttccttcctgctgaggatgtttagagcctagtgccagacccattcatttccttttgatt

SEQ ID NO: 1008 - DNA, 364 bp, Homo sapiens
  misc_feature 11, 289: n = A,T,C or G
gcgtccgggcngcggagttttgtccataacgtgggcaaccgcgcagctggaggatggcctcactcgggcctgccgcagctggggagcaggcgtcgggggctgaggcggagccgggccccgcggggccgccgccgccgccctcaccgtcctctctggggcccctgctccccctgcagcgggaacctctctacaactggcaggcgaccaaggcgtcgctgaaggagcgcttcgccttcctcttcaactcggactgctgcgatgtgcgcttcgtactgggcaagttggcggngccgccgcccgctgggggcccgcagcgcatccccgcccaccgcttcgtgctggcggccggcagacgccgtctttg

SEQ ID NO: 1009 - DNA, 473 bp, Homo sapiens
  misc_feature 3, 393, 457: n = A,T,C or G
gcnccccgcgtccgttagagctcaggaagttattaggtgcagcctctggagccatactcacgctgcagtgcataatgggaaaattaggagcattaataagaaatttcagtagtgtttgtaaggaaaataagctacttactgagatctgtttcttctattgcatgtttgcttttgagggacagcttctgtcaaaagtgaaatcatcaccagaactgggcctgttaggaagaatagggttttatttactttttatgtcaattaacttcaacaaaaaggccacgctggctgctgtcatgccatctgggtatgcattaaacattaatgatgatcagccttgaggttctatttatcttgatttggctttataaagtttgtcagaatggtgctggaggnccagaagtgctaaggagaaagaagctatgggccaagttaaagaatttgaatgcaaaggccaggnatgggagttttcataa

SEQ ID NO: 1010 - DNA, 407 bp, Homo sapiens
  misc_feature 5: n = A,T,C or G
cgccncgcgtccggtgagccccagcaaggagatcaagatcgtgtctgcctgaggaagcagagccatgacaatcggaaatctaccagctcaatgtcctgcatgtagactaccggaccgtgagcaatctgattctgacgggcccacggacgattgtcatggaagtcatggaggagttagagtgctgagctcctgggcctcccagccctccagtggcctgtgggtgagggaagccagaatgacacaaagcaatgcaaagacaagattgccatgcaaatggatggttttggacatacgagtcttctccgcacatacatgtctaaagttgagttttatacactggaatgtggaagaacccgggtatcatatcttttttaaaaaatgtccagtgtagaaaacatttgggaaac

SEQ ID NO: 1011 - DNA, 459 bp, Homo sapiens
  misc_feature 337, 386, 408: n = A,T,C or G
atttttctaacatgggtttgaacgcttataaccagttttataaaccccttgaacactgcagtgagttatcaaagccactgcctgcaaagtggatgatttaagattttacacgcatgaaaatgagtgtgccatctcctgaccagtgccttttgacttaggtacccagatgccacttgtcagcagcaggatactttttacaacacgaaagcataattattttagaagaagagagtagaagggcagaatagaattcaacttacagaagcaccggagtagtgttgtggttggctgttatctgtccccctgggaggagggactgttttgctcccttgttttngatgttaaacagtagcttaaaggctttcccccccataccaacttacagncaaatgacaaagaaccggtggnggttttcaacagattctacaaacatgcatttttcccttcccactaaatggg

SEQ ID NO: 1012 - DNA, 483 bp, Homo sapiens
  misc_feature 7: n = A,T,C or G
gtcaccncgcgtccgctcgtcctccgtgggcactgatgtcaccgagggccctgctcacccagccccccacactaggctgttccatgcaaatgaggaggaggagccagagaagaaggaggtatcggagctgcgctctgagctatgggagaaggaaatgaagcttacagacatccgcttggaggccctcaactctgcccaccaactggatcagcttcgggagaccatgcacaacatgcagttggaggtggacctgctgaaagcagagaatgaccgactgaaggtagccccaggcccctcatcaggctccactccagggcaggtccctggatcatctgcattatcttccccacgccgctccctaggcctggcactcacccattccttcggccccagtcttgcagacacagacctgtcacccattggatggcatcagtactttgtgggtccaaagaggggaagtgaccttcgggtgggtggtgaagg

SEQ ID NO: 1013 - DNA, 607 bp, Homo sapiens
  misc_feature 155, 162, 200, 204, 257, 269, 294, 298, 315, 329, 350, 406,441, 464, 465, 499, 511, 523, 538, 545, 567, 591, 597: n = A,T,C or G
cgcgtccgaagaaaatgggatccatgaagaacaagaccaagagccacaggatctctttgcaggggatggtatgaatgcatatgtagcctacaaagttacaacacagacaagcttaccattgtctcagaagcaaacagttttgcaggtaaaaaagnaaagatnttagtgactttcttgggtctttattgagaagctttccngagnaagccactctcagaaattggcttcatatgttccctcccgcccccggagtaagnagccctcatagngggattgacataaaagttgaaaagnttgnggaacggaaagaattcnttctttctggcagnaattttctttgaaaaaaaccngaggggcccgctttagaaaaagggtaccctttcaggagggatttgttaaaattcantcctaccccatggtttaacaagggactccttgacngttcagtaagtaggtttctttgnnaaaaaaggaaaggaagctgcccaccgtgcccgtnggggataccccnaagacaattgangttgggtggcttggntcctttnctcaaaggaatggttttcaaancaaaaagcccaccaagattgcccngtccangccaaaaaat

SEQ ID NO: 1014 - DNA, 223 bp, Homo sapiens
  misc_feature 19, 33, 81, 90, 132, 147, 165: n = A,T,C or G
gtcgccccgcgtccgcggncgcgtggggtgctngtcaccagactgcacccttgccagcagcttcgcagctctcgaagtaanttatcgcangatggccggcgcctcacctaggagaaccaggaaggcaggccncgctagaacgacggnattgaattttactattgncaaaacaatcacattcaaattcattccacttaaaacctgaaaacattggaccacacaa

SEQ ID NO: 1015 - DNA, 474 bp, Homo sapiens
agtcgaccacgcgtccgggcggagggagcgtgactgcgctgcgcagggcgctaggaggcattgtcgccgctcaggcccttttgtgagaagcagaccagcctgggggctggcggcaggacacctgtgtctgcatgctgaagaagatgggtgaggccgtggccagagtagcaaggaaggtcaacgagacggtggagagcggctctgacactctggacctggccgagtgcaagctggtctcctttcccattggcatctacaaggtcctgcggaatgtctctggccagatccacctcatcaccctggctaacaacgagcttaagtccctcaccagcaagttcatgaccacattcagtcagctccgagagctccacctggaggggaacttcctacaccgcctccccagcgagggtcagtgccctgcagcacctcaaggccattgacctgtcccggaaaccaagttccaaggactttcct

SEQ ID NO: 1016 - DNA, 480 bp, Homo sapiens
  misc_feature 38, 93, 98, 146, 155, 159, 165, 166, 173, 198, 201, 204,213, 217, 223, 235, 243, 249, 255, 284, 325, 343, 366, 373,400, 406, 439, 440, 454, 463: n = A,T,C or G
cgcgtccgctttcagtgaagaaaagggaattacacatngaatcgacacatcagtaataccgatacagtgaaatgggcctctaataagaatttnagcgngttttctgatgtgccattttttttgtcttttttaaaaatataccatanttataaaantggnaaatanntttttgnacaccatttaaattgacccccttanagnacncttgccgtnatgntgaaangctagacctatngaagctgncttgangatatntgtttttttaaaaaaattttttacaactntacttgttggaaaatataatatgcactataaaatatgatcntatatcctattatctatnatctaaaaacacttccttggacncatttanacgtaaaattaaaaatgggtctttaangaagantaatggggaggccccttttttaaaacctatggnncaatctttttatgncaaaggggnggaccattttattaaaa

SEQ ID NO: 1017 - DNA, 435 bp, Homo sapiens
  misc_feature 5, 362: n = A,T,C or G
gcgtncgctgcgcccgtgggaccggtgaagttctggcgacccggtacagaggggccaggtgtaagcatctctgaagagagacaaagtctggctgaaaactctgggacaacggttgtttacaacccttatgctgccctttccatagagcagcagaggcagaagctgccggtattcaagcttaggaatcatattttatacttgatagaaaattatcagacagtggtgattgttggtgaaacaggatgtgggaagagcacacagattcctcagtaccttgcagaagccggctggacagctgaaggaagagtggtaggagtgacccagcctcgaagagtggctgctgttacacatgatctttcttnccaaaggttgcagggagagtagctgaagaaaggggtgcagtgctgggccaccaggtgggctactgcatccgct

SEQ ID NO: 1018 - DNA, 298 bp, Homo sapiens
  misc_feature 30: n = A,T,C or G
agtcgccccgcgtccggtgggaatctttcnacttcttgatccatctgggagagaagacgtaccattatgtgcccgaattccgaaaagtgtccatagcagctaccatcatctatgcctatgcctggctggttcctcttgcactctggggtttcctcatgtggagaaacagcaaagttatgaacatcgtctcctattcatttctggagattgtgtgtgtctatggatattccctcttcatttatatccccaccgcaatactgtggattatcccccagaaagctgttcgttggattctagt

SEQ ID NO: 1019 - DNA, 467 bp, Homo sapiens
ggagtcgccacgcgtccggtggcacgatcttggcccactgcaagctccgcctcccaggttcacgctattctcccgcctcgggagctgggacaacaggtgcccgccaccacgctcggctaattttttgtatttttagtacagacggagtttcaccgtgttggccaggatggtctcgatctcctgacctcgtgatgcacctgccttgacctcccaaagtgctgggattacaggcgtgagccactgcgcccggccaataatttttttagtttaagttcatttttgtccccgctgatgaaagttacagcagctgcccagtgcctctgtccacacccacctccctggtgtacttgccccctacagcagcagcccagatcctcccctggattaaaattgcaactggtgccctaacccaaaacttgagaaaaaattctctatcacatccactcttctggcatttgtagaatctc

SEQ ID NO: 1020 - DNA, 562 bp, Homo sapiens
  misc_feature 8, 260, 276, 285, 299, 301, 313, 317, 318, 340, 352, 375,464, 490, 493, 515, 525, 552: n = A,T,C or G
gtccggtngatatatatatttacctccttagtaatgcaagaagtgtttgtgggaagcagagaagcaagcaactgtatttcttgttctcacctaagcattactggaggataagccacatcagtctacaaagaggttttcatacaaacataataagatgtaaaatggaccaaaagttgaaagcacattcttgcaagtaagcacctgttactctccaagcaaccatgggtttaccatatttggggattttttgaacacttagncactttcttgctcccnaaggggacntttacaaaaagtgnanacatttttgtantgtnncccgttattaaaaaagctaacnttttgtaacctncttgttttcaaaagggcttggtntttttggacaaattcaaaaatggaaaaatggattttccaccgttttaagcctcaattttaagccccaaggttcccaaaaattttttaangaaaaaagttattcgggtattaggtnggncctgggttaaaaaaccaagaanaaaaccattnaaaacaaagcccattcaaaaattcttntggaaaaaaa

SEQ ID NO: 1021 - DNA, 435 bp, Homo sapiens
cagggagtcgaccccgcgtccgagcatcttggggaatttatattcctttgtgagaaatgttttgatcataagcctagaatgataagtaaaagaaataaagataattctactgcttgttctcacccggttacaaagcatgagtttgaagacaataagtgccttgtccacattttgcgagagacaacagtaaaatactccaaaatacgttcttttcatggtcagtgtcagcttgatttatgtcgacatgaagttcggtatggctgtttaagggaagatgagtgcttttatgcccatagtcttgtggaactgaaagtctggataatgcaaaatgaaacaggtatctcacatgatgctattgctcaagagtctaaacgatattggcagaatttggaagcaaatgtacctggagcgcaggtcttggtaatcaaataatgc

SEQ ID NO: 1022 - DNA, 469 bp, Homo sapiens
  misc_feature 2, 271: n = A,T,C or G
cncgcgtccgcaaagcaaacgacagctcagggggctccaaagacctcattcatagcagcaaaaggaactcaggtagtcaaaatatcagtacacatgggacgtgtcagtttaaaacaggagccccggaagagtcatagtcccagcagtgacacatcaaaactagcagctgaaagggacttgaatgtgaccatcagtcttagtactgatagaccaaagcagcgatcacaggcagtagcaaacgagagggcacaccctgccagcacagcagtgncgaagtctggggaagccatggccttaaacaaaactaagactcagagcaaagaagtcaatgcaaataaacacaaagccaatacgagtcttccttttcctaagttcactgtcaattcaaatcgcttaaggaagcaatctattaatgagacacctttgggaagtttgtcaaaggatgatggagctagaggggctcatgggg

SEQ ID NO: 1023 - DNA, 449 bp, Homo sapiens
  misc_feature 2: n = A,T,C or G
cncgcgtccggccaaccgccgaggagcagtgccctattcagcacagtgcgccagggccactggcagattgttgatcttttactcacccatggagctgatgtcaacatggcagacaagcagggccgcactcccctgatgatggctgcttccgaaggccatctaggaaccgtggactttctgcttgcacaaggtgcctccattgctcttatggacaaagaaggattgacagccctcagctgggcttgtttgaagggccatctctcagtagtacgttctctggtggataacggagctgccacagaccatgctgacaagaatggccgtaccccactggatctggcagctttctatggcgatgctgaggtggtccagttcctggtagatcatggggccatgatcgagcacgttgactacagtggaatgcgccctttggatagggcagtggggtg

SEQ ID NO: 1024 - DNA, 517 bp, Homo sapiens
gtcgccccgcgtccgagaagtcagggagtggaggttctataaggaattaacagctgaggacggaagggtttgtttcccgtttgaacctaaacgcaagtggaaaagaatactcagaatgtatttttctactttacatctgctggggaaggaaatgtgtcaggaagccgctgcatctggtcatttcatcgcatcagaatcacagcagacgtggaagattccatgtggtggggaataaagaaataactttatgctctcctgaaaaacagcgggagcctatgtgtgtgtgcgacactgtaatctcaaggagattcactcagagctgtctcagtccaactcctgcatgaccagatcttcccttagcatcttttctgtgatgaaatattatcttgtgttagagttaggaataggaactaacctgtaggagcatgtccccaaatggacatttgaatggactaacaaaaacaactggaaagactgaatttccgacacaaaggaatgatgggatcaaaaagaaagc

SEQ ID NO: 1025 - DNA, 535 bp, Homo sapiens
  misc_feature 148, 226, 241, 256, 274, 281, 286, 311, 326, 334, 360, 386,406, 447, 450, 484, 501, 508: n = A,T,C or G
ggagtcgacccacgcgtccggtcgacagcctccgccacatcctccacctctcttggtccagcgagcgttgccgggccagggtcaagcggagggctccgacggcgcggacggagcgaagcgccgagccatggcgcaccaaacgggcatncacgccacgggaagaagctgaaggaattctttgccaaggcacgggctggctctgtgcggctcatcaaggttgtgattngaggaccgagcagtntcgtgcctgggtgcncttcgcaagggagccagntaaggcncgctnggggatcagggactattgaacaggnggcccgtggcttgcncacctgcntgggaccgccccaggcaggccctgcntacctggctctaccgcgcttcgactnacaagaaatggctcaggggnctttcgaaatggggcttctttccttcgcccttggttccgcnctngaataaacctcccccccgtggcggcttgaaagantgcctgtaccgccgggncaatgcngggccccacaagtggaaaaaagggaag

SEQ ID NO: 1026 - DNA, 571 bp, Homo sapiens
  misc_feature 109, 230, 243, 271, 283, 293, 296, 305, 346, 386, 513, 525,545: n = A,T,C or G
agggagtcgacccacgcgtccgctcccgccaggcgctttctcggacgccttgcccagcgggccgcccgaccccctgcaccatggaccccgctcgccccctggggctggngattctgctgcttttcctgacggaggctgcactgggcgatgctgctcaggagccaacaggaaattaaccgcggagatctgttctcctgcccctaggactacggaccctgccgggccctacnttctccgtttacntactacgacagggtacaccgcagtagcntgctcgccagtntcctgttacnggngggcctgcngagggggcaaccgcccaaccaattttcttacaccctggggnagggcttgccgaacgaatgccttgcttgggagggattagnaaaaaaaggtttccccaaaagtttgcccggctggcaaggatggaagtgttgggaccgaacccaggatgtgaagggggggttccaccagaaaaaaaggttatttttcttttaatcttaaagtttccantggaacatggtngaaaaaaaatttcttttttncgggtgggggtggttcacccgggaac

SEQ ID NO: 1027 - DNA, 326 bp, Homo sapiens
  misc_feature 231: n = A,T,C or G
cgtccgtagtctctctcgtggcccggaaaaaaaaaagaaagaaggttggggccagtcacccccacatccctttatggaggcttccagatcatggatcctgtcacgcgcatcccggtgaagagagtccaccaacaggctttgtatggggtctcgctctgttgcccaggctggagtgcagtggttcgatatggctcactgcagcctcagcctccctgggatcaagtgatcctntcacctcagcctcccaagtggcagggaccgcaggaaggcctggacgacggcccggacttcctctcagaagaggaccgcggacttaaagcaataaa

SEQ ID NO: 1028 - DNA, 482 bp, Homo sapiens
cgcgtccaaccccttcctcagcctgtcgggagcagagggcagtggcggtggccccaaaggagggaccgctgacaaaggagcctcagccaaccaggaaaaaggctaaatccacccttacccctcctgacccccccaagtggagggaacagatcctggcctgaggggtcctagcctggagcaggcgcctgcgcccagaccctggagagccttgacccagagcctgtgctgaggtccagggagtgtggagagctcctggtgtcgaggactgagactgacaggggagccccctccatctggcccccttccctttccgcactgtccgctttgtgaggctcagaggaaggacagtctgcaagcccgcctaggaggtccatccccagcaaatgttttggaggtccccccagagagcaaagtgggccatggcaagaagtagggggttggttggacctgtcacatgaaatggatcaacacttgaatgggga

SEQ ID NO: 1029 - DNA, 461 bp, Homo sapiens
cgtccggagaagatgggcctcccgggctcagactcacagaaagagctggcctgaccaccaggcacctcactggcactgctgacccatcccagaaacacaatctcagggacccgagcagctccaaggacgagaggatacagcagacacaacctaatagagagggcgcctgcagccttaacctccacggccttcgatacttatgcaagcctggtgttgctcctgtcctcagagtcatcctgcgctcatgccttttcccgaatgggttcacctctggcagttgccgcttcagtcttggccttagcctcatcttgaagtgggtagctggcgggagagggtgggctgcgccccctgctggccctgaggctgcagagttgggagcaggacacctcacctgagtttcattttttttcatgtccaaaccatgcacatactatagtccagaatcaaagcacttttgaaaa

SEQ ID NO: 1030 - DNA, 641 bp, Homo sapiens
  misc_feature 16, 17, 19, 20, 22, 32, 55, 72, 73, 75, 78, 84, 100, 109,544: n = A,T,C or G
cccccccgcttttttnnanncncggggggtgnggcaaaactttttcctagaattngcgccatgttggaaacnntntcncagcancccggctgcacagggngtagcccancctccaggtccacggagtggtgtggacctcccacctcacagctgcctctggcagccaagcctcttttcgcccggccccagcccctctggttgataaacgggtgggcctcctcagcagcgtggctgcctttcaccttgatttccccagggctctcggcaacatcgataaaccaagcctcgcccaccagctgggccctcccccacccagtctgccaggctgggagctggagcttgctgagtcttgaatgcccttctagatggcttctctagaggctctcctggcaagagagggtcccaaggggagccctgcaaagcaaaggctccttgtctggggcgggatagagaatctcgcctctgtctggtgtgttacctactgggggcacaggaacaatttcctcaaggagacagtggcatggagctttgaaagacgaagtangtgttagcaaggaaataaggaggaacgggggttacgggcagaggagaaagcacatgccaagtcagcaaagaaaagtagaattcgaaaaactttttta

SEQ ID NO: 1031 - DNA, 542 bp, Homo sapiens
  misc_feature 499: n = A,T,C or G
ggccagagctactacgccggccgatggcgaggagcccgccccggaggctgaggctctggccgcagcccgggagcggagcagccggttcttgagcggcctggagctggtgaagcagggtgccgaggcgcgcgtgttccgtggccgcttccagggccgcgcggcggtgatcaagcaccgcttccccaagggctaccggcacccggcgctggaggcgcggcttggcagacggcggacggtgcaggaggcccgggcgctcctccgctgtcgccgcgctggaatatctgccccagttgtcttttttgtggactatgcttccaactgcttatatatggaagaaattgaaggctcagtgactgttcgagattatattcagtccactatggagactgaaaaaactccccagggtctctccaacttagccaagacaattgggcaggttttggctcgaatgcacgatgaagacctcattcatggtgatctcaccacctccaacatgctnctgaaacccccctggaacaagctgaacattgtgcttatagact

SEQ ID NO: 1032 - DNA, 509 bp, Homo sapiens
tcgccccgcgtccgcaatttcttttgaatttcgatcacttctacattcccagcttgccacactcttttttgatgaagttgtgaagcagatggtagctgcctttgaaagaagagcatgtaagctgtatggtccagaaacaaatatacctcgggagttaatgcttcatgaagtccatcacacataaaggcaaaaaagaactggtgccacctgcttctgactttagtttgttcacttttaggaagtattttcatgacatgttttcagaagccagaaagcatttgttaaacgcagctttggttataaacctgcaccattgaaaatttgcacatagaatatagactcacttgtacatagaattatttcttcaagtataattcaaaataatatggacattatcatgttctgcattacaataatgggatgtcatcaccattgctagaatactggcatgattcttctgagcagaagttgaaactgtaaatttaaaccttttaattatcaccttacct

SEQ ID NO: 1033 - DNA, 541 bp, Homo sapiens
  misc_feature 1, 479: n = A,T,C or G
ncgcgtccggccttttgttcagcttgccgggcaaccggcccctgctggggactacaagtcccgtaagcctccgcggcggcacgtcctaccctacactgtccagccggctccctttttccccctccccgggggccaagggctccggctgctgcctggcggccaacgggccaggtaggatttccgggagaggctgctgtggaggctgaggaggcggcggcggagatctggaatgaattttctatctgtgaaattgtgaagacgaaaaaagaaaattgtgctagttttgctgttgtactccacattgcagaagttacaatcacagtgcacaaaacagtatctcacctccctaaactggttaatagtggcatggaagatccatttgaggaagcagaccagcccactacagagccaggcatggtcctggacagtgtggaagcaggagacacaacaccttctaccaaaaggaagagcaagttctnaggctttggcaagatctttaagccctggaaatggaggaaaaaaaaaagtagtgataaattta

SEQ ID NO: 1034 - DNA, 494 bp, Homo sapiens
  misc_feature 7, 8, 23: n = A,T,C or G
cgttttnnttcttcccttggatnaatattttctactgaaaagaaatgaaatctcagttccactatgataaaagaaacgaatcaccagtgtctgtcagtgcccccactgctcctcctcataccagcattgacactggtagctgaggaaggggactgctcaatttctaatgtgatctattcaagaagccacatataaaaaggcattgagggctcactgtccagagaattgcttttgtaaatgctccacaacgtatgggcaaaagtttaaggactactgcctgatgtaccaggaatcctgagttctgtgaaaatctgttcattccaaatctgttaagcatttccaaacatccagagaatggtttcactgttgagggtgcatgtggcagaatctgtctctctctgcacctgtcttctgttaccatccctggacagtgacagattttaagccagccaccagaattcttttcgagttaaccatttcttagtttctgtaaa

SEQ ID NO: 1035 - DNA, 354 bp, Homo sapiens
gtcgaccacgcgtccgctctgaccgccgccggctttcacccacctgcccggctcatcacctctgactcctgcgggccttccagccggcgctatctcgcagcccccgaccagctcggcctgctgtcgggcatctctgctgtcctccggctgtagggctacctgcctccctcccggggggtgcactgcgagtccgactctagtgggggcagcgcctagcggactcccaaacccgctcaggtcctgccggcctcaccggcaccgcccaccctccagccggccgcggctctgcgcttgcgcgccggcagcacacagtgttaggggcgcgccctctgctctggacatgcgccgccgtcg

SEQ ID NO: 1036 - DNA, 623 bp, Homo sapiens
  misc_feature 108, 118, 119, 176, 297, 308, 335, 404, 433, 473, 475, 491,584, 586, 593, 607, 613, 619: n = A,T,C or G
gtccgccccgcgtccgggaaaatgccgcagtttgttgccttgaaacctaagagcaatccttggttttgttgctacattatttttccagaccaacacatctaccaagtngaattttatnnactttaatttcataataaagttagtagagtcactcaacttacaaactttatttatgntggctttgggcaaaaaaatcacttataaggcagctctaaatttgccttgataagctaaataaattacttttataacttactaaagcagaacaaacagtgaaactttctaaaatattctatnctggaaatagnggacagggggatcttttatttataatnctcatcaagatgagtgaggttgttcaccaggatattttttatggtttttttttaatttttctccaaagnaattatttttaataggaattcccaaaagnaatcaagaaattagtttttcaaaaataaattttttccagntngataaaaaggaaggtngtttgtaaaattaaatccattattttaccaccttaaaaaatttggggggaataccattctaaagggaaccttttaattctttacctaattcangntaggggngtcttggcaatttngaatanttttcntttt

SEQ ID NO: 1037 - DNA, 586 bp, Homo sapiens
  misc_feature 425, 464, 524, 533, 538, 540, 567, 571: n = A,T,C or G
gcgtccgaaaatatttaggtaatgtcataaaatttattttacctttctcattttctgagaaaataaatgaaaaaaaccctagatattgctttattaccaacagtgtgtaggtttttgtacatatggaaatttgacacaaaaaaatagggaatttgtatagagaagtttccctcttataaaaggactcccatttgattgttcgaaactataaaatgcacttttactttaccatatcttgaaatgacaaaatatcgccctttggaaaacctgactctttgcaccgttgtaaattcccagagtctacctcagttaaccaggccttagttttaggcaaggaatgaattgaattaaaatttcagttcaatcattttatgccagaattttgtttttctttttaaggcaccatccttccctccttggctggntggcccttccctccccatttaacttttctttttttaatnctttgaaaaattgggtttaaaaatatttccaatccttttccttttcctctagccaaagtnggttttgtnatttncnaaataaaagggccctctggtggaaaangggnctggaaattaacctt

SEQ ID NO: 1038 - DNA, 525 bp, Homo sapiens
  misc_feature 5, 30, 31, 510: n = A,T,C or G
cgccncgcgtccgcaagactttgaaaaatnngatcatggttcttctcaaaataccagcatgtctagcatctatcagaattgtgcaatggaggttttgatgtccagttgttcacagtgtagagcttgtggagctttagtttatgatgaagaaattatggctggatggacagcagatgactcaaatttgaatacagcttgtccattctgtaaaagcaacttcttgcctcttctcaatatagaattcaaagatttgagaggttctgcaagctttttcctgaaaccaagtacctctggtgacagtttacaaagtggaagcattccattggcaaatgaatccttggagcacaaacctgtatccagtttagcagaacctgacttgatcaactttatggacttcccaaaacataaccaggatcataactgaagaaacaggctcttgcagttgacccaagtgatgaaataaagagagccagtgggagatgtccaaactattgaaaatttcatctgtgncttaataggtttatc

SEQ ID NO: 1039 - DNA, 517 bp, Homo sapiens
  misc_feature 4: n = A,T,C or G
tganattagcatcacttcgtctactaagaatcttaatagatgtaaaaatatcttttaaaacatatggtaggatgggtaaaatttggcaatactatccaggaagtcactaagtacagatgaactgatttagtcctaattccaagaagtgtgattccacctacttgactagaaatttatacctggtaataactccttgtccttgaagattttcaactaaggaaaactgtttttcagcaggacctgattatgcactgctatctaggtagggtcacttatggttttataatatatttaattggattataatattccttttttcttgtctcttggacaaaatcctagctttactgtaatttaaaaagatgagtttaaaatttcaggctttaaaaacataccaaacattgataaaaatgaaatctagataaaagtattttatcaatgttcagttgcctggattcaataactgtattatggttatgtaaggataatatcttaggaaatcacattatggtattaa

SEQ ID NO: 1040 - DNA, 573 bp, Homo sapiens
gtcgaccccgcgtccggtagcttagttgagtagataatcttttgttgtttcctccttgtaatatacaagccttggcttctgtgacatcatactctcctagatttccccctgtcactgtggcttcttctcagtctctgtccatccctggtgctcctgaaggttctgttctcagccttacacacattacctgggtgatctcattctctgccatgacttcacttgccatatatgtgctgattttccccaaattcctatttctcccgacctttacatctattttatttgcaggtcatatatctaataaggaattgatatccagtgtacatgtagaactcctgtaattcaatacagaaaccaaacagtccaattaataaatggagaagagatttgaatgaacatttttctaaagaacatctcaagctcaagatttcccagataacttttctttcttcaaaatctgcttctgtgtttcctcatctgtaggtggcacagcatacatctgatttcccaagccagaaacctcatagttattcttgactccaggaagaaatattattgagtttttaaaaactc

SEQ ID NO: 1041 - DNA, 534 bp, Homo sapiens
cgaccccgcgtccgtgctgaactgagctcaggtgtgtttttcttccaagctttctagcaaggtttctacttaaaatcacctgtgtgcaagcccaaaggacatttcatctattctaagcagaaaggctgttttgttcattacagtgagtgctgttcatctcatggagtgggaggagcactaaaccaggagacagaggacatggatttggtttccagcttaaccagttaggactctgtcctctgcattctggaaccatgatgcctgcctgcctgcctcacagggctgttgtgaggaccagatgagatgatgtatgttcatacttttggaatctctaatttaaagtcttaatattttgtcttctgagtgtgaggggataaacctggatgtagactattaagcagcataggagaaaagaacaatagaatctaatggactgggtttgcaatctctctctaaatgcactgcttcagacaaagtgaaatccaaaggtgtgaaaaagtatagctgcaaattggaaaaatgtgtttcaagagt

SEQ ID NO: 1042 - DNA, 487 bp, Homo sapiens
  misc_feature 391, 427, 446, 454, 463, 468, 476, 486: n = A,T,C or G
agtcgaccacgcgtccgctctgaccgccgccggctttcaccacctgcccggctcatcacctctgactcctgcgggccttccagccggcgctatctcgcagcccccgaccagctcggcctgctgtcgggcatctctgctgtcctccggctgtagggctacctgctccctcccggggggtgcactgcgagtccgactctagtgggggcagcgcctagcggactcccaaacccgctcaggtcctgccggcctcaccggcaccgcccaccctccagccggccgcggctctgcgcttgcgcgccggcagcacacaagtgttaggggcgcgccctctgctctggacatgcgcgccgtcgcgagcgtctctgggaccggaagtgcgggcgagcgcggntccccgggtctgacaggagcaagctgtgggcaccgnggcggtagttggaggcggnagagggtncgtagccgngccgnctgcccgncatgggcctnc

SEQ ID NO: 1043 - DNA, 543 bp, Homo sapiens
agtcgaccccgcgtccgcaggggcgtgttggccccgcacagattgagccgagttgtcgccccgctgggagaagtgaccctcctgcgcctgaaaagaaatttcatttcaatataggtgactatgcagcctgcaattcaagtatggtttggagaagatctgcctctaagtcctcggagtcctctgactcccagacacggaccaggattggctaatgtttgtcagtacgatgagtggatagctgtgaggcatgaagccactttgttgcccatgcaagaagatctgtcaatctggttatctggtttattaggtattaaagttaaggcagaaaaattattggaagaacttgataatggagtactattatgtcaactgattgatgttcttcaaaacatggtgaaaacatgcaactctgaagaatcagggaattttccaatgagaaaagtgccctgtaagaaagatgctgcatcaggttcattctttgctcgggacaatacccgcaaacttccttcactggtgtagggacattggggttgatgaaactta

SEQ ID NO: 1044 - DNA, 364 bp, Homo sapiens
  misc_feature 336, 351: n = A,T,C or G
acgcgtccgcccacgcgtccggagtcctcctccccgggtgcctgcccgcagcccgctcggcccagagggtgggcgcggggctgcctctaccggctggcggctgtaactcagcgaccttggcccgaaggctctagcaaggacccaccgaccccagccgcggcggccggactttgcccggtgtgtggggcggagcggactgcgtgtccgcggacgggcagcgaagatgttagccttcgctgcaggaccgtggtgaagcctctgggcttcctgaagcccttctccttgatgaaggcttccagcccgcttcaaggcacaccaggatgcacttgccacggnttgccgtgccccctnttcagcagtccct

SEQ ID NO: 1045 - DNA, 361 bp, Homo sapiens
  misc_feature 16, 214, 328, 356: n = A,T,C or G
gtccgcagaattgacnaattcaggaggtgtaaaaataaacagtgttctcttctctaccccaaagccactactgaccaaggtctcttcagtgcactcgctccctctctggctaaggcatgcattagccactacacaagtcattagtgaaagtggtcttttatgcctcccagcagacagacatcaaggatgagttaaccaggagactactcctgtnactgtggagctctggaaggcttggtgggagtgaatttgcccacaccttacaattgtggcaggatccagaagagcctgtctttttatatccattccttgatgtcattggcctttnccaccgatttcattacggtgccacgcantcatg

SEQ ID NO: 1046 - DNA, 752 bp, Homo sapiens
  misc_feature 563, 579, 627, 683, 687, 702, 723, 726: n = A,T,C or G
accacgcgtccgcccacgcgtccgggcgggggcatggactactgacccatgcggggcagcgtccctgtgacctggccgatgaggaagtactgagcctgttggaggaactggcccggaaacaggaggaccttcggaaccaaaaagaagcttcccagagccggggccagagccccaagcgccctctagcagcaaacacagaaggagctctgtgtgtcgtctgagcagtcgcgagaagatttccctccaggacttgtccaaggagcgccggcctggtggggctggggggccccccatccaggacgaggatgagggggaagaaggtcccaccgaaccaccccctgcagaacccagaaccctcaatggcgtctcctccccgccgcaccccagccctaagagtcccgtgcagcttgaagaggcccccttctccaggcgctttggcctcctgaagacagggagttctggtgccctgggtccccctgaaaggcggacagcggagggagcccctggggctgggcttgcaacgctcggctttcttctcctggctggaagggaccttcacttangccaaggagcttcgtnttggcagaattaccccgacccccttcccgaagcttgccggagcccttntgtccttgtctgagggtcaccaagccttcttcctttgcttgggagaacttccttgncttnccttcaggaattccngagcctggattcccagcgaanccnaacgttcccacaggctttcacggggc

SEQ ID NO: 1047 - DNA, 553 bp, Homo sapiens
tgtcgacccacgcgtccgctccccgccgaggcctcctgcaccacctagagccccacccccgaccccaccccgggagggcagagccagaagaaggctcattagacctgggggacccaaagggtctggcctctttgggcagccccagagatgaggggtcagcagaggagagctctggggttggggatgggttagggacgcaagcttgagttctagcccttgctctcattcagctgttgtgtgaccctgggtaagacccttccttgtttgaccctcagctttcccatctgtttaatggtggctttggccaaggcaatccacaaacgtcaaaattccccttcccatcagtacacacaccgatgcacacacactctctctttctctctctctctctctctctcacacacacacacacacacacacacacacacacacactagttagtgccttggatgaggcggggcagtgtgtatatggacccctggacttgctaccttcagggttccatactcgtccctcccctcctggctctgctgtctggagtctggcaagcggg

SEQ ID NO: 1048 - DNA, 343 bp, Homo sapiens
  misc_feature 23, 193, 205, 213, 233, 315: n = A,T,C or G
cgcgtccgccacgcgtccgccgnccgccgcctgcctgggccgggcccgaggatgcggcgcagcgcctcggcggccaggcttgctcccctccggcacgcctgctaacttcccccggtacgtccccgttcgcccgccgggccgccccgtctccccgcgccctacggtcgggtcctccaggagcgccaggcgctgncgccgtgtgccntccgccgntcgcccgcgcgcccgcgctncccgcctgcgcccagcgccccgcgcccgcgcccagtcctcgggcggtcatgctgcccctctgcctcgtggccgacctgctgntggccgccgggcccgggccgagcctggg

SEQ ID NO: 1049 - DNA, 394 bp, Homo sapiens
  misc_feature 1: n = A,T,C or G
nccacgcgtccgcaaggcgctacgtttattgcctcgtcttattcactgacctttgtaatgatacacagtgaattctttttgacaaagagaaatgcagtgtagtatgcagagctgctgttttaatgcctatgcatttactctttcctgatttaggcagaggtggcattttctttattgcatttctctatttttttaatgtaccctaccttcagtattctctttgtaagttggtgacttgcatctgtggccttgaatattttattatcacatgtggcataacagtatccacactttttagttctttatttttttttttttattttgagcaattctcctgcctcagcctcccaaatagctgggattacagggtgcatgccaccacacccagctaatt

SEQ ID NO: 1050 - DNA, 542 bp, Homo sapiens
  misc_feature 406, 409, 469, 488: n = A,T,C or G
cgccccgcgtccgggatggacaagacaaatctcttgtaaaaaaaattacaagtaatttttatagaagctctgccctgagggagggggagcgtgacttctcactccttcagtgtgggctgcacaagtgacttccttccatatgggatcgttataacaaaagactgtaacaagggctatgggagttataagacaggaattgtggacaaaaaccagtgtatatcataacatcacaccttgtaatgttggcagtacagtcactgacctttgataaatgttgatgacatgttgagtaaaggaatgagagaaagaggattgtttatctctgtttttatccttctcagagaaacttagagtaacaaggtgtgttatcagccatgctgatgcctttggtaaactattgtgtganatngggtggtttgaattggtcaagtagaaactggggctgccaggcgcagccggtaagcatttncatgtgagccttagggaanaagtgcattttggtaggagccatcaaaaatagcttcttgatatttcattaaaag

SEQ ID NO: 1051 - DNA, 533 bp, Homo sapiens
  misc_feature 527, 530: n = A,T,C or G
gaccacgcgtccggggctcctgggtgtgcccgcggcctctggcgcgcagcgactcagagaacgtctacgaggtcatccaggacttgcacgtcccgccgcgggaggagagcgcagagcaggtggacgacccaccggagcccgtgtacgcgaacatagagaggcagccccgggccacttcaccgggcgccgctgcagccccccttcccagcccggtgtgggagacgcacacggacgcgggcaccgggcgcccctactactacaacccagacacgggagttaccacctgggagtcgccctttgaggctgccgagggtgccgtcagcccagccacctcccctgcctcggtggacagccacgtgagccttgagaccgagtggggccagtactgggatgaggagagccgcagggtgttcttctacaacccgctgacgggcgagacggcctgggaggacgaggccgagaacgagcccgaggaggagttggagatgcagccgggcctgaagccctggcagcccagggggacccgnggnccc

SEQ ID NO: 1052 - DNA, 584 bp, Homo sapiens
cggctttgccgcaacatgctcaattcccgatcatcgctcaaagtgctaaattttcaggagtgaaaagaaaaagaggaaggaagaaacccctctcaggcaatcatgtacagccacccgaaacaatgaaatgtaatacattcataagacaagtgaaagaagagcatggcagacacacagatgcaactgtgaaagttccttttcttaagaaatgcaaggaagcaggacttcttaattacttacttgaagaaatattagacaaagttcattcaattccagaaaaactcatggatgagactacttcagaatcagactatgaagaaatcgggagtgcactttttgactgtagattgttcgaagacacatttgtaaattttcaagcagcaatagagaaaaaaattcatgcatctcaacaaaggtggcagcagttgaaggaagagattgagctacttcaggacttaaaacaaaccttgtgctcttttcaagaaaataggagatcttatgtcaagttctacatcaatatcatccctgtcttattagggattaccgtttcctaagccaagagtcatgtcaaattgcaatcaggc

SEQ ID NO: 1053 - DNA, 517 bp, Homo sapiens
  misc_feature 498: n = A,T,C or G
gaccccgcgtccgggaggttgaacgttcaggctaagaccgttactgaattggttactaagaagaagccaaaggctgaaggctatgctgagggtgacctcactctctatcaccgtacctcagtcactgacttcctccgagctgccaaccctgttgacttcctctccaaggccagcgaaatcatggtagatgatgaagagttggcacagcatccagctaccactgaggacatacgggtgtgctgtcaggacatcagagtgttggggcgcaaggagctcaggtcgctactaaactggagaacaaaacttcggcgatatgtggccaagaagctgaaagaacaagcaaaggcactggacatcagcctcagctctggagaggaagatgaaggtgatgaggaggactcaacagctggaaccacaaagcagccctctaaggaggaggaggaagaggaggaggaggaacaactgaaccagaccttggcagaaatgaaggcccaggangtggcggaattgaagagga

SEQ ID NO: 1054 - DNA, 606 bp, Homo sapiens
  misc_feature 114, 361, 382, 388, 389, 390, 392, 398, 399, 402, 406, 411,412, 418, 423, 424, 425, 426, 427, 428, 429, 430, 431, 432,433, 434, 435, 436, 437, 438, 439, 440, 441, 442, 443, 444,445, 446, 447, 448, 449, 450, 451, 452, 453, 454, 455: n = A,T,C or G
  misc_feature 456, 457, 458, 459, 460, 461, 462, 463, 464, 465, 466, 467,468, 469, 470, 471, 472, 473, 474, 475, 476, 477, 478, 479,480, 481, 482, 483, 484, 485, 486, 487, 488, 489, 490, 491,492, 493, 494, 495, 496, 497, 498, 499, 500, 501, 502: n = A,T,C or G
  misc_feature 503, 504, 505, 506, 507, 508, 509, 510, 511, 512, 513, 514,515, 516, 517, 518, 519, 520, 521, 522, 523, 524, 525, 526,527, 528, 529, 530, 531, 535, 552, 587: n = A,T,C or G
gtcgaccccgcgtccgcaaggaccatgttgtaccacagcctctgctgagctgagggacacatgtccttggtgaagacctgcacccctggaacctcccaccatcatcacaactgnagtctcatttgcagtggagaaaagaacccgacgtcccacagccagatatacacccagctccatgccagcccttcatgtttaccttttgctttgttaattacatgtcagactcctagagggcctccagactaataggaagcatttctgtaaccaacctgccacccactgattcagaaatggaaatcacattccacaatctatggcttccaccagctagcccaggaaatacttgaaatcagcattcctnaaaaaaaaaaaaaaaaaaaanaaaaannnanaaaaannaanaaanaaaannaaaaanggggnnnnnnnnnnnnnnnnnnnnnnnnnnnnnnnnnnnnnnnnnnnnnnnnnnnnnnnnnnnnnnnnnnnnnnnnnnnnnnnnnnnnnnnnnnnnnnnnnnnnnnnnnnnnnggtncaaataaagcaatagcntccaaatttccaaataaagcattttttttcactgnattctagttggggggttgg

SEQ ID NO: 1055 - DNA, 377 bp, Homo sapiens
ccacgcgtccgctgttcccgacagcatggattagcttccgtgttctgaagttgttcttttcatggtgtctgacaccgagggccgttgttcgtccatcaggcgggattggatggagtcttggtgttttgccttctcagggaccaaaaatgtatcattgactccttaacagtgaccttcctcccaaggacatatccgtgttcatttttcataggttttactcatattcataggtagattctgttaatgtgagttggaaagaaaagaccaatttgtacaccagtcacaccacaagacagtttatcatataaaatacctcaattttttgtattcctcatttccacctcacaattgtactggtgatgaattttaagggtctg

SEQ ID NO: 1056 - DNA, 564 bp, Homo sapiens
  misc_feature 6, 313, 518, 519: n = A,T,C or G
tcgccncgcgtccgggcaaggaaggctctgttaatttatagctgtttagaggggaaagcagtgcagaccacttattaagcccgctgaggactagctttctgtctttcatacatttgggaaagataggaatgactgtttcaaagaagagaggtgcacataatttatgcaggcaagtatgatacttatttcattggttttgtgagtcatatatatacatatatatatatacacatatatatatgacttgaaaattaagatttaatactttaatgttttaagtgtggggggtttgggaaggaaggaatgtaatatntgggatttagccttaggctttaagttttaggctggcaaaagaaatgttattcagtgggtttgaggtttggactactttcttcaaacttagagaattataacaggatggtgtttacctttgttcacctgggatgtccccaagactctagcttcttctatcaagtggttgggtctgatagaagaggtaaaaattgctcttgaaaatnntctacaattatgcaggttctttgataaaattttctggttaaatcc

SEQ ID NO: 1057 - DNA, 419 bp, Homo sapiens
  misc_feature 3, 14, 289, 303, 330, 357, 360, 369, 371, 386, 393: n = A,T,C or G
ccncgcgtccgccncgcgtccgcccaggcctgggccgggccgtgacggcggcgctaggacccggcgggccgcgggtgcggcgaggcctgggcggcctgaggagcgcggaccccggcgctcggctcccggcgccatgtgagggggctcgggggccgcggggggccgggcgctccccgccggaggtgtgaacccacatccctgcccccagggccacctgcaggacgccgacacctacccctcagcagacgccggagagaaatgagtagcaacaaagagcagcggtcagcantgttcgtgatcctntttgccctcatcaccatcctcatcctntacagctccaacagtgccaatgaggtnttncattacggntncctgcggggccgtanccgccgncctgtcaacctcaagaagtggagcat

SEQ ID NO: 1058 - DNA, 219 bp, Homo sapiens
  misc_feature 198, 205, 212: n = A,T,C or G
tggggccgggaggaagtctaacctttgggagactccaagaccgcagctccgaggtcggcgggggtctgggtggccatggaggagccccctgtgcgagaagaggaagaggaggagggagaggaggacgaggagagggactaggttgggcccgagggggcgcttggcaaagaagccccttccagctgaccgccgaggacngtgtatnacatctnctacctg

SEQ ID NO: 1059 - DNA, 459 bp, Homo sapiens
  misc_feature 36, 93, 107, 148, 158, 193, 260, 267: n = A,T,C or G
tggcgatcgctgagaggcacggagggccgaggcggncctgggaggcggcccggaggtggggcgccgctggggccggcccgcacgggcttcatntgagggcgcacggnccgcgaccgagcgtgcggactggcctcccaagcgtggggcngacaagctgncggagctgcaatgggccgcggctggggattcttgnttggcctcctgggcgccgtgtggctgctcagctcgggccacggagaggagcagcccccggagacagnggcacanaggtgcttctgccaggttagtggttacttggatgattgtacctgtgatgtttgaaaccattgatagatttaataactacaggctttttcccaagactacaaaaacttcttgaaagtgactactttaggtattacaaggtaaacctgaagaggcccgtgtcctttttggaatgacatcagccagtgtggaaga

SEQ ID NO: 1060 - DNA, 499 bp, Homo sapiens
  misc_feature 445, 468: n = A,T,C or G
ccacgcgtccggggtgttggtgcggcgctgttggggtcctccgctggctcatggcgccaggcgtgggaggccgagtccccagtggcgagcactggcccgactcggctgggaggactgccgggactccagagtccgcgaggcgctgcgggcgctgcacgccgccagggaaaacaaagaagaagagttaatcgacaaactggaggtggtcacaatgccttccccatcaccaaaaggactgccagtgaagcaatatgctgtgcagtctcagcttcccgtatatgagtggccggatgtgggatctggagaatatgatgttggagtagtggcttcgtttggccgacttttgaatgaggctcttattcttaaatttccctatggcatattgaatgtttcatcccagttgcctcccgagatggcgtggcccagcccctgtaatccatacagntgcttcacggagacacagttacntggagtaacaatttatgcaaattagacctaa

SEQ ID NO: 1061 - DNA, 498 bp, Homo sapiens
gccggttcttagggaggcaggtgctggcctggcctggatcttccccatgttcctgttgctgccttttgatacgcctgattgtcaaccttctgggcatctccctgactgtcctcttcaccctccttctcgttttcatcatagtgccagccatttttggagtctcctttggtatccgcaaactctacatgaaaagtctgttaaaaatctttgcgtgggctaccttgagaatggagcgaggagccaaggagaagaaccaccagctttacaagccctacaccaacggaatcattgcaaaggatcccacttcactagaagaagagatcaaagagattcgtcgaagtggtagtagtaaggctctggacaacactccagagttcgagctctctgacattttctacttttgccggaaaggaatggagaccattatggatgatgaggtgacaaagagattctcagcagaagaactggagtcctggaacctgctgagcagaaccaatt

SEQ ID NO: 1062 - DNA, 487 bp, Homo sapiens
  misc_feature 3, 20, 448, 472, 485: n = A,T,C or G
ccncgcgtccgctttgaatncttatctttgatttaatttacacgccagcattttgccacgttctaaataatatttagctcaactgattcatacgtattaatgaccattctagcaaaggcctacaagtggtgtgggaatcagggaaaggctgcctctttggtatctcaactggtattgattattgctatcaactatttggggagaaaaaatcaaaatgaagccctgtcaaattttagaagtactatctttggtccttcaaacactttgtgatgacaccttaagaaaaataaagttgaagttcaggtcttgccattgccattacagacaaattaggagacttggtttacctgggaacaaatttacttgaatattcagtacctgaaactatgccaaaccaaagagcagctgcagtacattcgttattttaaatgaacaaggtttacaaagnttattttcatctataccgtaaggntggattttttttnaa

SEQ ID NO: 1063 - DNA, 373 bp, Homo sapiens
  misc_feature 18, 241, 333, 341: n = A,T,C or G
gtcaccacgcgtccgccncgcgtccggcgtgcatggaggaacgctgggcacgggcccggcgcgggtcggggggcgcccgaggggcccgggccgagcggcggcgcgcagggcggcagcatccactcgggccgcatcgccgcggtgcacaacgtgccgctgagcgtgctcatccggccgctgccgtccgtgttggaccccgccaaggtgcagagcctcgtggacacgatccgggaggacccanacagcgtgccccccatcgatgtcctctggatcaaaggggcccagggaggtgactacttctactcctttgggggcttgccaccgttacgcggncttaccanaactgcaggcgagaagaccattccccgccaaa

SEQ ID NO: 1064 - DNA, 492 bp, Homo sapiens
  misc_feature 366: n = A,T,C or G
gtgccacgcgtccgccacgcgtccgcctgcccctcgccgcccgccgcctgcctgggccgggccgaggatgcggcgcagcagcctcggcggccaggcttgctcccctccggcacgcctgctaacttcccccgctacgtccccgttcgcccgccgggccgccccgtctccccgcgccctccgggtcgggtcctccaggagcgccaggcgctgccgccgtgtgccctccgccgctcgcccgcgcgcccgcgctccccgcctgcgcccagcgccccgcgcccgcgcccagtcctcgggcggtcatgctgcccctctgcctcgtggccgccctgctgctggccgccgggcccgggccgagcctgggcgacnaagccatccactgcccgccctgctccgaagagaagctggcgcgctgccgcccccccgtgggctgcaaggagctggtgcgagagccgggctgcggctgttgcgccacttgcgccctgggcttgggga

SEQ ID NO: 1065 - DNA, 517 bp, Homo sapiens
  misc_feature 365, 481, 495, 517: n = A,T,C or G
cgcgtccgaacggcatcatcacgcccgccaccatccccagcctgggcccctggggagtcctgcactcaaaccctatggactacgcctggggggccaacggcctggatgccatcatcacacagctcctcaatcagtttgaaaacacaggccccccaccggcagataaagagaaaatccaggccctccccaccgtccccgtcactgaggagcacgtaggctccgggctcgagtgccctgtgtgcaaggacgactacgcgctgggtgagcgtgtgcggcagctgccctgcaaccacctgttccacgacggctgcatcgtgccctggctggagcagcacgacagctgccccgtctgccgaaaaagcctnacgggacaagaacacggccacgaacccccctggcctcactggggtgagcttcttcttcttgtcgtcatcgtccttcttcaagcttggccagcaacgagaacgccacaaggaaactngtgagcccacgttnggccgtcgggaaaacacggggn

SEQ ID NO: 1066 - DNA, 478 bp, Homo sapiens
cgcgtccggcctccagcacatcctgcctgcagagggtctggctagctgccttttcagctctcgagggatagagattctacaacctccctctgtcatcagttccagagccactcccctttgcactagaagttcttgctttcaaagaatgagggtgtgagggagggaggggtcaagaaacagagtgacaggggaaacaggcagaacaagtcagggcaaaggaccccagcatgaatagttgtggaggtggaggtggggaagcagcctcacatctcacacttccttccttctcttaaatgtgagcagctgactccaagccttgtggaaactctagaaggtagaaccagccatctggggaagctggccttacagatgccccgtctggcatagtgggaggttcctgtgctctgagaaccccagtgtgaatctagacattccactgcagcctgggaagaagcctgtgtttttctttaaaaagtct

SEQ ID NO: 1067 - DNA, 421 bp, Homo sapiens
  misc_feature 320, 336, 347, 349, 350: n = A,T,C or G
gcgtccggttcttagggaggcaggtgctggcctggcctggatcttccaccatgttcctgttgctgccttttgatagcctgattgtcaaccttctgggcatctccctgactgtcctcttcaccctccttctcgttttcatcatagtgccagccatttttggagtctcctttggtatccgcaaactctacatgaaaagtctgttaaaaatctttgcgtgggctaccttgagaatggagcgaggagccaaggagaagaaccaccagctttacaagccctacaccaacggaatcattgcaaaggatcccacttcactagaagangagatcaaagagattngtcgaaggggncnnagtaaggctctggacaacactccagagttcgagctctctgacattttctacttttgccggaaaggaatgga

SEQ ID NO: 1068 - DNA, 388 bp, Homo sapiens
  misc_feature 139, 365: n = A,T,C or G
tcgaccccgcgtccggctggttttccgtctggtgaggggttacttccgggtcggacggcgctagctgcagcatcggagtgtggcagtgctgggctggccggcgggctgggctgcggcccgcgcgcggccggcgatgcangggggcaactccggggtccgcaagcgcgaagaggagggcgaccggggctggggctgtggctgcgccgccggccatcgactttcccgccgagggcccggaccccgaatatgacgaatctgatgttccagcagaaatccaggtgttaaaagaacccctacaacaagccaaccttcccttttgcaagtttgcaaaccaactcttgctgggtttctttgctggaagcacnttgagcccactgtgcatgaacca

SEQ ID NO: 1069 - DNA, 524 bp, Homo sapiens
ccgtccgggaggttgaagttcaggctaagaccgttactgaattggttactaagaagaagccaaaggctgaaggctatgctgagggtgacctcactctctatcaccgtacctcagtcactgacttcctccgagctgccaaccctgttgacttcctctccaaggccagcgaaatcatggtagatgatgaagagttggcacagcatccagctaccactgaggacatacgggtgtgctgtcaggacatcagagtgttggggcgcaaggagctcaggtcgctactaaactggagaacaaaacttcggcgatatgtggccaagaagctgaaagaacaagcaaaggcactggacatcagcctcagctctggagaggaagatgaaggtgatgaggaggactcaacagctggaaccacaaagcagccctctaaggaggaggagggaagaggaggagggaggaacaactgaaccagaccttggcagaaatgaaggcccaggaggtggcggaattgaagaggaaagaaaaagaag

SEQ ID NO: 1070 - DNA, 325 bp, Homo sapiens
  misc_feature 316: n = A,T,C or G
gcgtccggtgctggaggaaaatgtttctggggaagatgactcagtcattttgtggcgagacaccctttggtaactcccactgaccagtcttgggagccttcctggaatgatcgtgggctgagcggagatgttttttgcaaaatgaaactgaagctgaaagaaaggagaattcgagtgaaccaagagaaatccaaagacctggggaaggaggacttaagatgaaagtgaagcaagagagggaaggggaaatgaagtgaaaatggcgtgagggtgtgagagaggtttgggttaggaaacatgtttttagtgctatttncaaccaggg

SEQ ID NO: 1071 - DNA, 463 bp, Homo sapiens
  misc_feature 22: n = A,T,C or G
cacgcgtccgggactgatctcnaggaccagcactcttctcccagcccttagggtcctgctcggccaaggccttccctgccatgcgacctgtcagtgtctggcagtggagcccctgggggctgctgctgtgcctgctgtgcagttcgtgcttggggtctccgtccccttccacgggccctgagaagaaggccgggagccaggggcttcggttccggctggctggcttcccaggaagccctacgagggccgcgtggagatacagcgagctggtgaatggggcaccatctgcgatgatgacttcacgctgcaggctgcccacatcctctgccgggagctgggcttcacagaggccacaggctggacccacagtgccaaatatggccctggaacaggccgcatctggctggacaacttgagctgcagtgggaccgagcagagtgtgactgaatgtgcctcccggggc

SEQ ID NO: 1072 - DNA, 491 bp, Homo sapiens
cccgcgtccgcgcgacggccgcggcgcgggaccttaggacccgcgggctccagggctactgtccgtccgccactgcgcgccagcaggtcctggtctccgctctccaacagctgaaaggccggcgcagtgaacacagaaacgaaaaccaagaaatgccttattccacaaacaaagagttgatacttggcatcatggtgggcactgctggaatcagcttgctgctcttgtggtaccacaaggtccgtaaaccagggatagcaatgaagttacctgaatttctttctctgggtaatacatttaattcaataactttgcaagatgaaatacatgatgaccaaggaacaacagtaatctttcaagaaaggcaacttcagatactggagaagttaaacgaattctgacaaatatggaagaactcaaagaggaaatcagatttcttaaagaagctattccaaagctggaggaatatttacaaggatgaacttgggagg

SEQ ID NO: 1073 - DNA, 403 bp, Homo sapiens
  misc_feature 17: n = A,T,C or G
cgcgtccgctgagttcnaggatggttttttcttgggaccagacatgaacaaaagttgacctcatgagcacttcaacctctccagctgccatgctcctccggaggctgcggcgactctcctggggcagcactgctgtccagctcttcatcctaacagtggtgacagtttggcctgctggcccccctggcctgtcaccgacttctacactcttacttctatctgcgccattggcatctgaaccaaatgagccaagagttcctgcagcaaagcttgaaagagggtgaggctgccctccactattttgaggagcttccctctgccaatggctcagtgcccattgtctggcaggccaccccccggccctggctggtgatcaccatcatcactgtggacaggcagcctg

SEQ ID NO: 1074 - DNA, 652 bp, Homo sapiens
  misc_feature 169, 265, 268, 278, 281, 286, 287, 288, 289, 310, 312, 324,336, 346, 349, 350, 355, 357, 358, 384, 392, 398, 399, 405,413, 414, 415, 420, 425, 429, 437, 440, 458, 465, 470, 484,486, 490, 499, 503, 524, 534, 547, 556, 565, 569, 626: n = A,T,C or G
cgtccgtgaaaatccaaagatgtatcatttttatttgaatccatcatgcagtgtacatttcagataatttccttcagtctccagataggagtgtatccaaacatctaattttatgtgcactgtgtatcttatatgaatgttttattttatataccacatgcaaaaatgnccatatgcactatttaaatgttttaaataatatattccttctttataatgctaaatctatatgagtaccatatttttataagtcagtggtctgacnggnttcatttttnaantaacnnnngcttcaaaatgggtattcaangngaaaagggtggntgtgaggagaanatgtgaaagnggnntgggngnnctcttttgcctttgggccaggaattnggggggcnaaaatnnacccanaacctggnnnaaaantaggnccanttgggggnganaggtttcactttggggcncaaaaanaaaancccggggttttttntntttnccaaaatanattntttttgggatttttttttgtnccccccccgnattaaatgggganttggctggngtcttggcncctntcatttgtgccagaccttttttttattaaaaaagaaccttgggaaaggtcttaagtncatttgggaaaaaaaaaaaaaaaaaa

SEQ ID NO: 1075 - DNA, 362 bp, Homo sapiens
  misc_feature 7, 19, 23: n = A,T,C or G
gagccgncccacgcgtccncggncgcgtgggctaccttggaagcagtcatctctcagtcttacatttggagaatgtggatggcatgacatcagaattcctttatataatttaacttcagaatagtctgagatcatcgaagcacgatggtcaagggaattccgtttttgttttagagcaaatatgtttgctgtttgtctttcatcacaaacatcagtggagtttcagcaccttacagagctcagtgaaccccctggtcaccatcaaagttagcacacaacaaagccaaccacgtgtccccctcacagatgacaatggctgaactctgagtgaaaccacctgtatggccgggcacagtggctca

SEQ ID NO: 1076 - DNA, 419 bp, Homo sapiens
  misc_feature 409: n = A,T,C or G
gccccgcgtccgctttttgagaatctctgctctgttcctaggttcagtgctgggtcctgggaatacagcaggacagacctcagcttatctcttcatagaaattatacaaagagaattggggagacagctaagaagaaaacaaagaaataaagcagttacaaattgtgataaagtgcttttgaaggaaagaaggggtctgagacaacaacagggaaggggcctctcttgaaacagtagttgggaaggaggcagacatgcaccagtgatgtggtgacaggtgctctgaaggaggtcaccaggacctgacctctttgaaggatcagaaaatacttccctgaaggactgacatttgagcctagacctgaagggtgagccatcaagctaagacaattggggaagagcattccanggagagggag

SEQ ID NO: 1077 - DNA, 440 bp, Homo sapiens
  misc_feature 97, 106, 107, 274, 365, 375: n = A,T,C or G
cgcgtccgatctttgtctgctttcctataactcagtactgtaactcagtactctgaaatagtttcctttgttaatagagtcacttttatagtactgngcttgaggnnatatacagagtattgtgtccaaatttatcattgcacaaagtgtttttggaaattcttggttactccttagtaaattacctgtaattgggttaaatgctggtagggtttaaaatctgattgctaaagtgaattctctataaagtgagttttgatacatagaaactttncatataattcttaaactcatgtgtcatgtattttcatttatagtttttcatattcattaacatatgttgttccttaccatttacagctcanaattctgcanatgcagatttttgcaaactttgatgcatttggacagtctagtggttcgagtaattttggaggttt

SEQ ID NO: 1078 - DNA, 419 bp, Homo sapiens
  misc_feature 2, 70, 95, 145, 197, 208, 210, 229, 402: n = A,T,C or G
tncgggcggctgcggcgggcgggcaggcgggcaggccggcaggcgggtgcgcggagggctggtacccctnagcaggtgggcggggtgcggttggnggcggcggctgggccgggggctgcccggctgcgctcgggccgtgcgcggnggccgtgcgggcacgccatggacttcaacatgaagaagctggccgtcggacngcgggcatctntnttcacccgggccggtgcanttcacggaggagaaatttggccaggctgagaagacttgagcttgatgcccactttgaaaacccttctggcccgggcagacagcaccaagaactggacaagaagaagatcttgaggcaagacaagaggtgcctgctgcagccccaaccccagtgccccgagtggagggaattanctgtatgaagaagcttg

SEQ ID NO: 1079 - DNA, 573 bp, Homo sapiens
  misc_feature 563: n = A,T,C or G
cacgcgtccgtgctgagcggtcccgaggggaggggcctgaggccgagttccagtcgctgacccctagccagatcaagtccatggagaagggggaaaaggtcttgcctccctgctaccggcaggaacctgccccgaaggacagggaggccaaggtggaaaggcccagcaccctccgtcaggagcagcgtcctcttcccaacgtgagcaccgaacgtgagagaccccagcctgtccaggccttcagcagtgcactgcacgaggctgccccctcccagctcgaggggaagctgccatctcctgatgtcaggcaggacgatggggaagacaccctgttctcggaacccaagtttgcacaggtcaagctcaagtaatgtcgtcttgaagacgggatttgattttctggacaattggtaaaatgtattagaaaaatacaatgaaagaaccctaaaatgttttccaaaatggtgtggtggaggaggataaaaaagggccaccttttcctatgtattttactggtttcttgacactcttttcttaatcatttggaaactggtcaatactgncagatttttt

SEQ ID NO: 1080 - DNA, 534 bp, Homo sapiens
gtaagccaggtgctcccccttcacttcctgtgtgcggagcacgctcgccctgggagtttcactagaaagaaggttgccatgggccagtgggacagcttggatctcaagtgcacgcggatgccccagaatcccaggatctcagctgagctgtttgtggattattagatctgacttaaaagaatattatccagcaatgcaaatgaacaaactataactacacacagctgcatggataaatgtcagaaacatgacgttgaagtgtgagaagccagatgcaaaccgaggactcactgtgcaattctgtgcatgtacagtggccaggagaagggagcactggcttttgctttcatcaggccaaagatgcctttctttgggaatacgttcaagtcccaagaaagacacctcctcggaaggtcggcatctttctccaacctgcattctttggatcgatcaacccgggaggtggagctgggctttgaataccgatcccccgactatgaacctggcagggcaaaagcctgaaagtttgaaaat

SEQ ID NO: 1081 - DNA, 248 bp, Homo sapiens
  misc_feature 189, 201, 244: n = A,T,C or G
tgctctctcacctgttagctgtgtagcattgggcaggttacttaacctgtctgtgcttcatctgtgaaacaggaataacagcattattaaggattgttttaggattggatgggttaatagatgtaaagtcttagaactatattgagcatcccatcaaggcattgtattatattgaaacaatggggtttntttctctttatncttttttaaactatataatgaacacttttgatcttaagtattnctaa

SEQ ID NO: 1082 - DNA, 644 bp, Homo sapiens
  misc_feature 91, 133, 169, 182, 221, 232, 233, 235, 236, 238, 239, 240,241, 242, 244, 322, 340, 385, 413, 481, 482, 487, 509, 518,534, 619, 621: n = A,T,C or G
cccgcgtccggtgaatgttagtattgggtgtgggatgcatcagggacacaggtttgtaaaccatgacaattcaattgtaaaactaaagccnagtgccccctgtagtcccaactgctggggagggtcacttganccctagggggggaaaatgcagtggactggattttgngccctttgcactncaaactgggtgacatagtgaggcccttgtcttctaccanaaaaaaaaaannannannnnnanggtgccgggccgcttagaactaggtcttagaagaaaaaaaccctcccacaaccttccccctgaaccctggaaaacatnaaaatggaatgccaattngtttggttggttaacctttggttttatttgcaagctttataaatngggtttaccaaaattaaaggccaattangccattcaccaaaaattttcacaaaaataaaaggccattttttttttcacctggcatttcttagtttnntgggnttttggtcccaaaacctcatcnaatgggtantcttaatcatgtcctngggatcccccccgggttacccggagccttcggaaattaaatttccttctttccgcttttccttcgcttcacttgacctccgcttngnctcggggtccgtttccgggcttg

SEQ ID NO: 1083 - DNA, 507 bp, Homo sapiens
  misc_feature 7: n = A,T,C or G
tcgaccncgcgtccgtggagggcccatctgccagagcctggagtctgcgaaggccgggacccggttccccggcccacagtgggggtgtgcaaacccgagagaactgggaagtgccgtcagaagcgataactgacgacgtctaatgtctatctgaccgcagtcgctgaaacctctacaacttagttgaccgtaactgccagagccctgccctgaattcctgtccttactccctctttaagattgcgtacccactgcagagtgctgaagacggggtagccaccgaggttgcaaattcgtgaagaatcagcatcatgtttggcagctgagtattggagccaggagcctgccatgaggttttgagaacagagtgctgttttagagctggcagcagcatctcagcccaagagaaggttatattcccagaggatgtcagtcccaaggaccaagtagctgccatcagtttggattctgaaaactaactggcatcaaactgggtgtagaaacatg

SEQ ID NO: 1084 - DNA, 495 bp, Homo sapiens
  misc_feature 126: n = A,T,C or G
cgcgtccggactgtcgctctaaaagaatgaaggaaataataaagtgatagacagggaaggatagaaaagacttaacaatatacatatgttccgtctttgctgttttggagaatgatggataagtangtgtttcctgattctgaagcatagctgaacaatttaattgtggtttaccatctttttggttccctcttcagtaattaacctatcgaaaatctgtcctaaatgtttggactggggcacagttccctccatcgctttgggagaaaatcattaatatggcatactgcagattggagggcaggaccactgagggtgtcatagacattagctctatggaattctgctagcaatttccaagtgacagtgaggaattatggatatatgtttgaggtcattcaagcttcctgagtaccacattccccagctacttagacaccgggttaaaatattaaagatgtcctagttcaacagcttgaattccattgattggat

SEQ ID NO: 1085 - DNA, 383 bp, Homo sapiens
  misc_feature 372, 375, 381: n = A,T,C or G
gaccccgcgtccggcttcctgggttcgaaagaacccagttcaggagtttctgttttagtttgagatcttataggcctgtctcatcaggttggtgtcagcccagctaggattaggcagaattgggtgggggctgtagtgcatctttggcacagcatgtacctgtctgactaattctctgtcttttctttcctgttgcaattcatgggtcttagcatcttctgaatggtgtttagtaggtcatcctgttgatttcctgctagggagtagcatactctggctctgtaccattggccaagggacttaaggataggtgaagggctgcagttttgttaaatggaacaatatgaagagatggcattgtaaaaaaacttntgncaactnaa

SEQ ID NO: 1086 - DNA, 548 bp, Homo sapiens
  misc_feature 548: n = A,T,C or G
tgtcgccccgcgtccgatcaaatcttgatgaaggattgtagatttttgctttttctttttgtttttaaaacttattccaattgctaaattggtagtttttcagtctttataaatacaggattaaaaatatatatacagttatatgaaatgtttattttctatgtgtgtgcatatagttcaatattatgcaataaatttggtgttttaacttaaaactatttcttattgtacttgcagaatggatagcttgcttttagtagaagcattaggtcgtatactcagataatctaatagaaggtcagatttgattcctgcataagaaagtagagcccaagtgctgcagaaatggagaagaaagcaggggcaagggagcagatggcattaaggaagaatgaagtttttgaaggttggggatggacgaaaagggtgtttctcatggagaggggatgctttagcaaaggctcaaacattggggcatatttaggcaagagccaagaaacagtttgaaggggaacatcagaggaaataggccaaattaatagtaaatn

SEQ ID NO: 1087 - DNA, 519 bp, Homo sapiens
  misc_feature 3, 11, 398: n = A,T,C or G
ggngtcgaccncgcgtccggaaatactcaaataatgcaacattacttcccagaaatgaaaatacattgcatctcttattgaaagagccaacagaggcaatgaaaaataaatgtacacatatgtgcacccttaattctttataatgaaccttgagaaatcaaggctttagaaaaatgctgagagacaagaagcttctgagcagcaacactggatgcaggaaaaaaaatggagtaataagtgtaaagttctgaggggaaaaaaaatatcagaacctagaattctaaatttaaccaaactgtcattaaagtaaatgagaaaagtaaattcttttgagaaacgcagagcctagaaaggattactaatcggtaggatcatctttttttgtttgtttgtttggnttggggacagactctcacctctgtcacccaggcctaggtttgcaagtgagcccaggattgtgccactgccctccagccttgggggtgacaggagcaaggacttcatctcaaaaaaaaaaaa

SEQ ID NO: 1088 - DNA, 386 bp, Homo sapiens
tccccctgcccccccaagctgagggaataaactctgcctgtcgggtgccccaccaagggaaataaacatggcctagctgccaagtcatgcctgtagggtgctctctactggcagtttctgggtggtgcatacatctagtctccctagaagagcacagtccagaattgaggaggtacagcagaaacagactgcaggcagagagaggtctcatagagcttggacagggctaggcacagaaagaacaggcagcgtatccagaagggggcagggaatgggtgaagaggttgtgctctagggcagagctgagctctgatctagaaaggacagcaaagatacctggaaggcctcccgattcttgcgttgttggcgtcgctcccgaagccggg

SEQ ID NO: 1089 - DNA, 131 bp, Homo sapiens
  misc_feature 3: n = A,T,C or G
cgntccttgggtaaaagcgtcccagagacgggaagaaatatggtataagcgagaaggcctcataaatctgggctgttaaaaatctaagttaaaaatatgttttaagtcagaaaaaaaaaaaaaaaaaaaaa

SEQ ID NO: 1090 - DNA, 387 bp, Homo sapiens
cgcgcctggtaaaattatataagcttaaaaaaacaaaaacaaaaacacttgctttgaaaagagtctctcagcagcaattttgtccttgcccctacttccacagttccttttcttaccatttcacatctggattactacattggcctctttgcttagactcccaatattcatttgctttccttcaccccattttatggaggactgtcagatcaatcttttaaagataaattttataatgttactactgttgcctattggattagagccctaggggtgctttttgtagtctcactgacagctgacattagtgatttttcaccctcttcttattgctaccctgtgttgatggccagtttccaggtgggcacctgctccacttgctttcat

SEQ ID NO: 1091 - DNA, 628 bp, Homo sapiens
  misc_feature 476, 512, 554, 565, 586, 611: n = A,T,C or G
ggggtatgtgtggttcttccaggaaagtgctgaaaatatcacccaggcctctgcgccacgccctgggagagtacactcctgggctcacgcctctgcattccaaggctgacagctagaaatatactttgtaaaataccaacaacttattcacaaatattccaactatctaccagctccaatgagcttgctgaggatgggtatgaccccagtctaaggggaaagaatctaaaacacaagtaaacctgtttaaaggccagatctccagatggagatccaagcagatggcgcctaaggtttgcccttgaaaactaccaaggaagccacagagagggatctttggaccttctggaaaatggtaaggccccaggtagattatggctcctctgccctggaggctgagccgccctctggttacctcacatcttctggtttcttctgagtgggacttgatctcatttctgcattcacagcaaggnggaactgtctggcaagagcttaaaattaggacctgntggtggggacctttaatagcaggtggagggtttgagatcccntgagatgcccnagattaattcaatagggggangaaagatttggcccaattcaaaagngcttaaaaaaaaatttt

SEQ ID NO: 1092 - DNA, 521 bp, Homo sapiens
  misc_feature 456, 496: n = A,T,C or G
cgcgtccggttctttggttgagcttctttgtatcagtaacaaaaggaagcatcattcagtctttctttgtaacttaatgtaagtctcttttgtacatcctattacttcaaatcattgaagtgaactccattttcacatctgttgggaacaatcatctagcttcttaaatgactcatcttaaaatatgaattttagactgcctaaacattctgagggagtacagtgtgatatagcagaaacaaccggggcttaagaaggatcaaaatgaaaggttttgtgaaggatgtgccagagactgctctctgttcaccaaaaccacattcttctcttcttcctggcatagagccagactagatttccaagctttccttgcaattgagctctcagagttctcgtcattagaatgtgaatgataggccgggcgcagtggctcatgcctgagatcccaacactttnagaggccaaggtgggtggatcacttgaggtccagagttcnagaccagtctggccaacgtggtgaa

SEQ ID NO: 1093 - DNA, 523 bp, Homo sapiens
  misc_feature 45: n = A,T,C or G
cgccccgcgtccgataaaactggatttgatttctttttatgaaangtttcatatgaatgtaacttgattttttactattataatctagataatatgatataagagggctaagaatttttaaattgaatcatatatatgatataatttgatccttcttgtatcttgaagttttgtacttgggatttctggactgataaatgaatcatcacattcttctggtaaatattttcttggagctctgtgtcaactttgatcctttgtctcccaggaaggtgtgacctctcctttgcctgcatacctcaaggccaggggaatatgcctcagtgatgcatttatctttgtatatcaggccgcatgattcccaactttctgccacacttaaattacgttcctccatttcagttttgtcttttctgtctaaagttcagtcaaagagtatcaaaaaattatgtttcagctagactggtgtaatgtataagtttttgtatcttgtattagaggatttcgtagcttttattagagg

SEQ ID NO: 1094 - DNA, 560 bp, Homo sapiens
  misc_feature 529: n = A,T,C or G
gccccgcgtccgatccctagatgacataacagccttacaaaaggacagggaggagtgtctgttcctactctcacatagcggaggaaagttagagcctctcagtctctgtttatgaggactcattaatctcaaataattgatgcatttttcatacattagggtctctgtccatgtgtcttcctgatattgttatagaaatggcttcaggctgctggtaacagatgctgcggaaaaagaatgccttaaacaaagccaggcgcggtgactcacgcctgtgatcccagcactttgggaggctggggtgggaaggatcacttgagcctaggagttagacacctacccagcctgggcaacacggtgagacctcgtctctacaagaaacaaataattggctagatgtcgtggcgcacaagcttgtggtctcggctacttagggggctgaggcgggaggattatttgagcctggggaggtcaaaactgcggtgggctgggattgcgctactgcactccgggctgggagaccgagtangaccctgccttaaaaaaaaaaaaaaaaaaaa

SEQ ID NO: 1095 - DNA, 488 bp, Homo sapiens
agtcgccccgcgtccgctcatacccagtgaatcttcaacagaatctcttaaagatctccaggaagtataagctctcattaatgtttgagttagaagaacttattctgggcctttaatttgttgcatgtgctgtacttaaagcatcccagataattttagcttatattttcatagtgtttatacagagcttgaattggaatggtcctttccttccttgcctcagtacttccttccataatctttcctgccataaccatttattttgccaccatttcttaaacacttatgtggcaggcattatgctagactgtaatatgttttttttaatcccagttgaagtggatgtgggaaggtattagaaagtagaagaaagtatagtctaaaatagagaggaaagaaaggaagagaaaagtgggatatttcaaaaccatttgcgcagaggtagaatgaaattcgccagaatgggaatctccgtatttctttacaat

SEQ ID NO: 1096 - DNA, 466 bp, Homo sapiens
  misc_feature 3, 19, 32, 401, 404, 412, 418, 427, 432, 433, 436, 440: n = A,T,C or G
gtngccccgcgtccgagtnaacagtggtagtnaaattcagggttggtaagtttttccatagaaggccagatggtaaatattgtaggcttgcagaccatgtgggctccacgactcaactctgccacagtagtttgaaagcagccacaaacagccttggtgtgactttgttccagtaaactttctttatagaatgggagaaaatatttgcaaacaatgcattcaacaatggcctgatgtccagaattcatgaggaacttaaaaaactcaacaacaaaaatcaccaaataacatttaaaagtgggcaaaagatatgaatagtcatttttcaaaagaagacataccgaatggccaacaagcatatgaaaaaatactcaacatctctaggctttcagaggcatgcnaantaaaaccnccattngatattatnttacnngancccnaaatgggttttttttaaaaggccaaa

SEQ ID NO: 1097 - DNA, 494 bp, Homo sapiens
  misc_feature 5, 16, 455, 457: n = A,T,C or G
ccccncgcgtccgttnaagtgtgctttggaaaagggaaaaagtcctaagtagatataaaaccctaactaaggaagaaagcaggtagcagtggtggtccaagagaccgtgtagtggatgcaaggaccgctcgtattttacacgctatatttcagcaaagggtggcccatctggcaggaagatggggacatatgtcacatatagagcagttaaggaactagggaaagtggaagactcagaagacctgtctttgacctggtatgttctatctctacagaacctaatatggcttatacatactgccacagaaaggactgaggtagacagtggcaaagacttcctaggagttgaacccctgaaattacataaggagtaggaccccaccagaattctgtctttgtaggctgctgactgcagaagaaacggtgtagcggaggcagggggaagaggagtcagnanagtacactgggaaggaagaaacgggttcttttctctt

SEQ ID NO: 1098 - DNA, 562 bp, Homo sapiens
tcgcccctgggccctcctaaccaaccaggggaggggagaaggacccaattcttttcctttggtgcacgtagcctggacccgttatggacagaggccaaaggaagataacagtgtggtgtccagagatgaaaccaagtggttgatgggcagttctttgagcaaccttgtttatgagcctattgatatgcagatatagaggcatccaatactattgactaatttaaaatcttattcagtgagtcaacactctaaataagcaatggagatggttccattcatttttttgcaagtatcatttttataaacataaatttcctgagatttttgttttcatcttagcctctgtggagctgcttcgtggttatgataagtgctgtgtgatgctcaccttgggaggtctgcgacatatattgaagtcatctctaacctgaagtactgacagactttctggaagaaaaggcttgtaggaggaaacttcagaattctattaaatggtgtaaatgatgaaattatagttgatatatgctagagcatcagtgctgggtattttagaagggatgga

SEQ ID NO: 1099 - DNA, 416 bp, Homo sapiens
cgggcctgttcctagagcctcattggagacattgacaatgccatgaggaccttcctcaactactacactgtatggaagcagtttggggggctcccggaattctacaacattcctcagggatacacagtggagaagcgagagggctacccacttcggccagaacttattgaaagcgcaatgtacctctaccgtgccacgggggatcccaccctcctagaactcggaagagatgctgtggaatccattgaaaaaatcagcaaggtggagtgcggatttgcaacaaaagatcgctttggctgctttgtgaagaatagattgaaagggtcaaaggtgagagccatctcacatccatgcaggaaccaagcaggcaagatataaatatgaaagtagaagaaaatagtctggaagaaaatccc

SEQ ID NO: 1100 - DNA, 483 bp, Homo sapiens
cgcgtccgggagtgcaccccaagatctaacagctgtttcagagctgctcattttagagtgattggtagggagttggtggctcagaggtcctaatcagaatgtgtcctgggttctgaatgactagcagactatcattaaccaaataaattatgggattttgtcttaattatatacatatacatatacacacacatacacatacacatacatgtgtatatattccctaaaacttaataaagctcaaataataaaatcagatttcttaagtattccaattccctttaaaatgtaaatcagattttataattcttttgttcaaaactgtccattggctcccatttcacttaaatcaaaagctagtttttacaataagctaagatagcaaacattattatctatttacttatgagttacttatgtaactcaagcatccaataacactgtagggtgctcaataaaatagttgctgaatggataactttc

SEQ ID NO: 1101 - DNA, 493 bp, Homo sapiens
  misc_feature 28, 475: n = A,T,C or G
tgttttacgacagagcttagtgcagccngttcttgatggctgtgcaatgctttccttttaagagtggagttagcctcgtcataaagcgtgtttttgagtctgttcgaacgggtcaacaacgaagggaagtttcaggcagatcttgtatgcctggccctggtggctgctttcatttccttccagtatcagtgctaaacaggaatgaacatgttcaagccccgtctcacccacctctggcatcttcgccctaactctgccctagaagacctttccttccgtatcgtcaagaaaactgaagttgctgtttcactccttctcccacccagaaacttcgctgcatcttcctggatccctagctccttgcacccatgatcctgtctccttcctcagcccggcttctggctgagcagcctgcacttgctgtcttcactcctacacgctgcccccactcctacacgctgcccctgcgtgcttntcacttctctacccttcc

SEQ ID NO: 1102 - DNA, 398 bp, Homo sapiens
gtccgtatcctatcttcaaattttttaaatatgttcaaaatatctggagggtgagaagttaccaagtttgtatgttttgtttgactcaccatctttattttctgtatatgtagtagctggcaattgcatatattttcttgattaacatattagagactgcttccatcatcttatgtaaacctggaaacaagctgaaactagtcttttctgaagaaccgtgtatcagtgttagatgtgcatcccgttttgtcattccctcagactttgaatacagtcattactctctggaagagaaatgtaagtatattttttgttatctgcagtatggtttaacatgtattaataatacacatatgcagactcactaaagtatccccagtaattagtaaattccaaat

SEQ ID NO: 1103 - DNA, 398 bp, Homo sapiens
  misc_feature 2, 19, 26, 160, 161, 176, 188, 198, 206, 208, 229, 232, 240,333, 346, 357, 366, 378: n = A,T,C or G
anttgggtacccccggccnggccagntgcgcgcggcggggcatgctgctcgtccccccgcgcccccggcccggacacttggcgggtgccacgaggacccgcagcagcacgtgcggtcccccggcgttcctgggcgtgttcggccgccgtgcgcggacctnngcgggagttggggcntggggggcggcngccgttggtncggacagncngggtgcgcacttgggcccccntgnccatggcngcaaaggtggacctgagcacctccaccgactggaaggaggcgaaatcctttctgaagggcctgagtgacaagcagcgggaggaacattacttntgcaaggactttntcaggctgaanaagatcccnacatggaagganatggcgaaaggggtggctgt

SEQ ID NO: 1104 - DNA, 552 bp, Homo sapiens
  misc_feature 5, 535, 536, 541: n = A,T,C or G
tgccncgcgtccgagcatctcaggtaacaatttgagcataactttaaccataacttatgatagcataataacattcattagtaattcagtagccgtatgtgccaggctgtgttaggtgctttatatattgtttaatttttaaaaacttgtggagtgtacagattggtaaggtgacattgtatcacaaagctagtctttgagtccaaagttttgtggttttatgttatgatatacttttatcatggaattgtcttattaaatgttttgccagtggttcttaaagtgtgtttctgacaccagtagcattgacttcacttagaaacctgttagaaatacaaattatttggccccacccaacacttgagtcacaaactttgcagatggggctcaatctgttttaacaagcgcttcatgtaattttgatgcaggcctaagtttttgagccctgcagtatgcatttctatttttaagcaaagatcttggtctttctttttggacattgtagaaataacatgaacctggtttttggtttggnntttgntttggtttggt

SEQ ID NO: 1105 - DNA, 515 bp, Homo sapiens
  misc_feature 101, 435, 460, 469, 479: n = A,T,C or G
acgcgtccgctctggtcaagcaggcggtacttctccttggatgtctcagccacagtgcctatcagggtactgagggagagcacacatggcccgaggccctnggagccctcggaggctgagtcaaaagagtctccctcgaattggtgggcctttagaagacttggcttcttcactggagagctataaagtaaacaccacactgagggccctcgtcccaggaaggccttcagagcattttcatttctgaacacgtcccctcatctttcaagattttctggtcctctaaagctgagaaactacaagcactgaaatgagatgagttttgataaggatggtaatgaagcacaaaagcgttattcacattactcactgactttaatataattttgaaatatttcatacttttgaaaaacaaaatagcctgggcgacaagantgagactccatctcaaaggtaaaanaaatttaanctgggtgccngccgcttgactatgtctagagaaaaaaacttccaca

SEQ ID NO: 1106 - DNA, 444 bp, Homo sapiens
  misc_feature 7, 16, 144: n = A,T,C or G
gacccanagaaaaggngccaaagggcatgtcaagcaattgaagttaagctcatgtttttaaagatccgtttattgagatgattttgaaatgctcctttaccattcataatttaaaaataaagtttaacaatggtttaaattcanaatggattaaaatggagttgggggtggaaagtagagccattcttagtaaatataaataactgaaaagttcttctgaggagactatgtaccgaagttatcattgcatctttcagtataggcagatctctccctcatataaccggatgtttcttggcgcttggaatatcagataaaggtaaagtttaagaaacttctctagcgggggatttagggaacttcttaaaacctagagttaaaagctgttgcgtgtttgttgtgttattttagaccaatcaacttcataggctagactagtctaga

SEQ ID NO: 1107 - DNA, 451 bp, Homo sapiens
  misc_feature 146, 377, 435, 440: n = A,T,C or G
acgcgtccgaaaattcacagggtgtgttggcacacgcctgtaatgccagctactcaggtggctgaggcataagaattgcttgagcctgggaggcagagattgcactgagccgagatcgcgccactatactccagcctgggcaacanacatcctgtctcaaataaattaaattacattaaatgtttaagaagaagtctaaataagattcatatgctgccctccctcagataatgagggaacctggggtacttctgggctactctgggggacaaagtataactattcaaatggcaagttgaattagtacagtctaggagccttggagatggcttcttgaaagaggtagaacctgaaattctccttccttgagggacggncaggatttggccagatggaaaggcaagtggaaggctttgcagggacaagcaatgtaancagancctagaaatgg

SEQ ID NO: 1108 - DNA, 469 bp, Homo sapiens
  misc_feature 17, 35, 457, 458, 463: n = A,T,C or G
tcgaccccgcgtccggngtaattctaggggaaatnatatttctgaacaacaatgttggtttgtgcaggaaaatcaccaaagaacatgactagaaagtgtatagctacagtttccctcttttaaatgggaatagcaaaacatataaagaatattgataggccgggtgcggtggctcacgcctgtaatcccagcactttgggaggccgaggcgggcagatcaagaggtcaggagatcgagaccatcatggctaacacggtgaaaccccgtctctactaaaaaatacaaaaaattagccgggcgtggtggtgggcgcctgtagtcccagctactcgggaggctgaggcaggagaatggcgtgaatccgggaggtggagcttgcagtgagccgagatcgcgccactgcactccagcctgggtgacagagcgagagactctgcctcaaacaaaaaaaaaagnnaaaanaaaaaa

SEQ ID NO: 1109 - DNA, 600 bp, Homo sapiens
  misc_feature 558, 574: n = A,T,C or G
ccgtctctggcttggccaggtttaaattaataaaaatgaagatgaaaataagttgtcagatttaggatgtattttagaaacccaactgataatttgccaactaattggatgcagagagtaagagggagactcaagaacacctctaagatttttaccctgatcaatgggataggtgaaagtacattaatggagattgagaatcctggtggaggtacaagtttaggggtactgaagagtgcttttggacatgtgaattcttagaagcctactagattctccaaatggagacataaaacataattgaatacaaaagtcaggagttcaggagagggctgagctaaagatacaaatttgatagacatgagcatttaaaaaaaactgcatgaaaatactaaagataggctgtcctgcctatggaatagccattctttgatccctttactttcttaataaacttggtttcaccttactctatggacttcccccaaattctttcttgtgtgaggtccaaaaactctctgttggggtctagatcagacccttttcaagtacatcttnctgatgaaccacaaanggattatactaaagagaccccccacc

SEQ ID NO: 1110 - DNA, 276 bp, Homo sapiens
  misc_feature 5, 32: n = A,T,C or G
ccggnaatttgcttattctaattgagacacantggtggggagtgggggtcggggactacacaggtgcattttctgaacatttataaaatgaaaaagatggaggcttggctagaatggttaatccccttttcattcctctaattctatgacaatttttttaaaaaaccaaacacaaccaaaataagagtggacagttgagaattacctttaggttcccatgaccctgaagactgtatttggccttggatccattaaaaaaaaaaaaaaaaaaaaaaa

SEQ ID NO: 1111 - DNA, 580 bp, Homo sapiens
cccacgcgtccgcggccatttctgtatccccctgcctgggtttgctgccctttatgctcctacctcaccaggtacaaggaacatgaagatggctatatgcggctgcagctggttcgctacgagagtgtagagctgacacagcaactgctgcggcaaccacaagagggatcgggcctgggaacgtcgctgaacgagagcagcctgcagggcattattctagaaacagtgccaggggagccaggacgtaaggaagaggaagaggagggcaagggtagcgaagggacagccctctcagcctctcaggacaaccccagttctgtcatccacgtggtgaatcagaccaatgcccaaggccagcaagagattgtctactatgtgctgtctgaagccccaggggagcctcccccagcccctgagccaccttcagggggcatcatggaaaagcttcaaggaatagctgaggagccagagatccagatggtttgaaggccgcagagccagaccatttcttcccaggtctgaaagtttgagccaggcaagtggcagtgcccctagtgggcagccgttgccaatggatgcc

SEQ ID NO: 1112 - DNA, 712 bp, Homo sapiens
  misc_feature 646, 647, 648, 650, 657, 660, 667, 668, 672, 674, 687, 690,691, 698, 699: n = A,T,C or G
cccccgcgtccgtaattttaaagaaccttgttattagaaaatctcagcctaatacaatctgaagttaagagttttagcagcattgtttttctaagtagatttagctatagattttcttctggccaaacaaggaagagtatatgcccttgtaaatgagtcttgttttgttatttaaatagtcagtcaaaacgtagaaatcagtatacgtaaaataaaatgcatgagactattaaatcttttcatatactctacaaataaaatgaaatctgtgtgtggtcctggttgactgggcatctaaagggaatcagaaaagagattgtgaaaagttatatatatatcctcttccttattttagttttgctttttcctattttccataattaagtgccgtttacaaagtggcatcaaaaaattgaagcaggccaggcatggtggctcatgcctgtggtcccagcagtttgggaggctgagggcaggtggatcacttgagatcgggggttcgtgaccagcctggccaacatggtgaaagcccatctctactgggaatataaaaattagcccggcgtggtggcatgtgcctgtggtcgcagctacttgggaggctaagacaggagaattgcttgggccctgggaggggggagttcannngncctggancgncccctgnnctcnanccctggcaaccantgnngacaccnncttaaaaaaaaaa

SEQ ID NO: 1113 - DNA, 565 bp, Homo sapiens
  misc_feature 238, 294, 491: n = A,T,C or G
tcgaccccgcgtccggttttttgtcccagcagtggcatttaaattactgtactttaagacatggaattgctggaggcttggaaacttgagtgcaatttccctagtacgacctccaaggagaatagagcaaaacagtggtaggaaaaactctcaaaattttacccaattgtatgttttctacattgtcagtatctagttttatatagttaatatgtacttctaaaatttctgacagtgnttggtgtataaaacagaccaagctcaagatgtaaagaagattgagaaattccacantcaactaatgcgacttatggtagccaaggaagcccgcaatgttaccatggaaactgagtgaatggtttgaaatgaagactttgtcgtgtacttaggaagtaaatatcttttgaattagagaaagtgttgggacagaaagtactttatgtaactaagtgggctgttcagaagcttagaggtcattttttgtaattttntttttaattactttagaagagctagggatgcaaatgttttcaatttggaaagcctttatttactttttgggaaa

SEQ ID NO: 1114 - DNA, 534 bp, Homo sapiens
  misc_feature 527: n = A,T,C or G
tcgaccccgcgtccgattccttcttcatatattatgtcagaagagtttgagaagaaatggtattaattcttctttaaatgttaggttgactcaccagttaatgcagctatttggtcataaatgtttctttgttaatcactttcgattactaattcaatctgctaggttataggtctattcagattttctctttcttcttgagccactttggtagtttgtgtctttctagtgattcgtccatttcatccaggacagctaatttgttgttagacagttgttcacagtatactcctgtaatccttttgtatttctgtaaagttggtagtaatggctctgctttcatttattattttaataattagtcttccatcttttgctcagtcaatatagtgaaaggcttgatctttcaaataatctatgtttattcattctactgctctccaaacttctattttattgatttatgctctaattatgctctctattatttctttcatactgctagctttggattaggcttattttgncttcttc

SEQ ID NO: 1115 - DNA, 630 bp, Homo sapiens
  misc_feature 33, 590: n = A,T,C or G
gccccgcgtccgggatgactaatgaaagcaatnagcttgaacatttagaaaaaattcatatatgatctaaatttttatattatcatttctgtgccttctaattcctgcatcctgttcaaaacatctttccagacattaacttacacattgtataaaaccgaccaaaatgatttcctaaagttcatgcaaaaaaaaaaaaaaacaacctaattttctgttaatataaaagaaacttcagtttactgaccgtgaaacagactatgtactgacatccagggtaaagtaaaagacttttaaatattggtcattaaaggacaggagctaagctagcaaagcaaaacatctttagcactttgcagatctcaagcagttaaccaggctctgattcccttccactgttttatgaattaattccagttcttttcatgtatctttgaacctaagattatgaagtaatttccctattagggactagaatgacttcagttttttcatttgataaaaatcagaactgctacctttcccttttttaatgatgcaaaatgtagatgagtgcattaagggttgtaaggatctttatcattttatgncattcattgaaaattgaaatgttcattctttttaatggtt

SEQ ID NO: 1116 - DNA, 695 bp, Homo sapiens
  misc_feature 2, 21, 582: n = A,T,C or G
cngctttcgtctcttcctttnaagttgatacccttctttttcttgtcattttgcattgcctgggacctccagaataatgtttcatgaagtagcatgtatccatatctggttcttgactttttcatcattataattgttttctatgggttacttatcagtttaagaatgcttaattcctagatgaactaagagtgtttattacatgttgagatttatggtatgctttttcttcctcaagataatgcattttttgtattatctgttaatgtgataggttatccatttgtgtattttcaatcattgaacaacccttgatttttttggataaactctatttggtcattatgcatcattctataaaccctgctgaatttttcatttgccaacatcttatttcagattcttttaatctgtgtccaacaatgagatttgttttcttttgcaatttgttttgaatttttggtatcagagctatactaaccttataatggaaaatacatatttctcaaacttttacactgatatattcatagtatttttttataatttgaaaaatcttgtcagtatctgtattaaggcctncatttcagttctgctatttcatattgccttaaggtggctatttggctctttaaggaccccgattttgattttgtcatttttaaaataaaccccatttatgctataaaaaaaaa

SEQ ID NO: 1117 - DNA, 439 bp, Homo sapiens
  misc_feature 104, 105, 108, 110: n = A,T,C or G
gccttttatggtgatggaatatgtctcaggaggagagctatttgattatatctgtaagaatggaagggtaagctgttctgctttaattctgtatgtattttgtnnctngncctttatcctttactagcatcaaaatgtcagcaaccaattttaagaggtctatttaataaccagttcccttagtcatatatttgtttagaatcataaactatgtagaactagaaaggatcttaaagattatctccttagcctgtttatacagatgtggatactgagcctcgcggcttatatgattgctcacagtaacgtgatttattaatgacggaattggcttgagcccccagaactcataatcctcagacttatgcttccagggtatacaaatactttgaatatgtatcttaatgtaattaatcgtaccaaatatattattattact

SEQ ID NO: 1118 - DNA, 495 bp, Homo sapiens
gcgtccgttgtcatctatttactttacatatgtcataaacctaacactacatggtcatttttgtttaaacagtcaattaccttttaaagggatttgaataataagtcaaaatctaatacattaactgtgtagttagcatttctggtgctcttctttcttttctgtagatccatacttccatctggcattattttcctactgccagaaggacttcctttaacatttcttgtagtgtagatctgctggtgatgaattctttcagcttttgtaattcttttgtctttgaaaggtattttccctgagtataggttaatagctttttcctttcagtactctaaagatgttgctccaggccaggcgcggtggctcactcctgtaatcccagcactttgggagtcttgaggtgggcagaacacttgaggtcaggagtttgagaccagcctggccaacatggtgaaacccccgtgcttctaaacatattaaagaaaaaaaaga

SEQ ID NO: 1119 - DNA, 526 bp, Homo sapiens
  misc_feature 1, 23, 111: n = A,T,C or G
ncgtgacatgctggctgctagtnagctcccccatgattgtcagcttccgagccctcactagaagcagataccaccccaccaccatgtttcctttaaagcctgcagaactgngaaccaattaaaactcttttctttataaattatccagcctcaagtatttatagcaacacaataatggcctaacacaacctacaactctctatatgtatttgtgtgtatttaaaacatgcaggaaataacacagaatccaaggcacccaaaactcattaaaaaatggaatcaagaattcatatgccattatgaaattagccagtcctaaaatctgacctctctgcattttcacattattctcctctctctatccctgccttcctccctcccttcctccaactgtcagaattgtcctgtaatcaaacatgttcacatcacagcttttcattttctatttccaatcaattgaccagtctagccaagtagcatcctggatcccgtattacatattcctaggacaggaagccagattttt

SEQ ID NO: 1120 - DNA, 515 bp, Homo sapiens
  misc_feature 106: n = A,T,C or G
agctctttagcaggagacaattcttaaacttaaattaaactgaaaaagccacagaaaaaagggtttgacaccctaaagccagtgtccaaatgaacgctacggttgncctcataggtgtgttatgaatgtttaccctgacctcctagaagaaaaggaaaaagaaaggaaagagagagggagaaggtgagggaaggggggaagaaaagaaaggagagaaaagaagacagagaaaaaacagggagggaggaagctggggaaggaaaaagaccatttgctgactccgttgttttatttcccagaatgattcaatacctcaagaagatttcactccagaagtgtacagagttttcctcaacaacctttgccctcgacctgaaattgataacatcttttcagaattgtaagagtacacattttaagccatatctttttcagcttgcattgattctcaggtggctagagcaggacttggagtggtaattggagatggaagaacatcatacactgtgtctaaa

SEQ ID NO: 1121 - DNA, 438 bp, Homo sapiens
  misc_feature 63, 81: n = A,T,C or G
cggccgaggtactataatggtccccatcttaatttgaaagcgtttgagaatcttttaggacangcactgacgaaggcactngaagactccagcttcctgaaaagaagtggcagggacagtggctacggtgacatctggtgtcctgaacgtggagaatttcttgctcctccaaggcaccataagagagaagattcctttgaaagcttggactctttgggctcgaggtcattgacaagctgctcctctgatatcacgttgagaggggggcgtgaaggttttgaaagtgacacagattcggaatttacattcaagatgcaggattataataaagatgatatgtccgtatcgaaggatttcggctgttgagccaaagactgcgttacccttcaatcgttttttacccaacaaaagtagacagccatcctatgtacctgcccg

SEQ ID NO: 1122 - DNA, 445 bp, Homo sapiens
  misc_feature 16, 18, 26: n = A,T,C or G
ccctttcgagcggccntncgggcttntacgcgggggcagcgggaagctcgcagcagctggggaggagccaaagcctcggcgctcacctaagccgcagggagatacacccaactgggagatgaggaaacagcaacccagagaggagaactaacccacacaggatcatttcgcgaaggagcaaggctgaagaaccagacctggactttcttaggacaaacttactgcagcttgaaggagccaaccatggatttgaggcgtgtgaaggaatatttctcctggctctactatcaataccaaatcattagctgctgtgctgttttagagccctgggagcgatctatgtttaacaccatcttactaaccattattgctatggtggtatacactgcctatgtctttattccaatccacattcgcctggcttgggaatttttctcaaaaatat

SEQ ID NO: 1123 - DNA, 504 bp, Homo sapiens
  misc_feature 18: n = A,T,C or G
ccctttcgagcggccgtncgggcaggtaccaaatgaagtgtgaagacaaggccatccaccactttatagagggtgtaaaaataaaccagaaatcaagggagaaagaaaagatgaaagacaactgcaaaaaattgccaaaatgcgactttctaaaaatggagcagattctgaggctttgcatgtcttggcattccttcaggagctgaatgaaaaaatgcaacaagcagatgaagactctgagaggggtttggagtctggaagcctcatcccttcagcatcaagctggaatggggaatgaagaatagagatgtggtgcccactaggctactgctgaaagggagctgaaattcctccaccaagttggtattcaaaatatgtaatgactggtatggcaaaagattggactaagacactggccataccactggacagggttatgttaacacctgaattgctgggtcttgagagagcccaaggagttctgggagagggaccagattgggg

SEQ ID NO: 1124 - DNA, 401 bp, Homo sapiens
  misc_feature 11, 15, 18, 138, 259, 269, 301, 325: n = A,T,C or G
cccttattttnggcnttngtaccaaatgaagtgtgaagacaaggccatccaccactttatagagggtgtaaaaataaaccagaaatcaagggagaaagaaaagatgaaagacaaactgcaaaaaattgccaaaatgcnactttctaaaaatggagcagattctgaggctttgcatgtcttggcattccttcaggagctgaatgaaaaaatgcaacaagcagatgaagactctgagaggggtttggagtctggaagcctnatcccttcancatcaagctggaatggggaatgaagaatgganatgtggtgcccactaggctactgntgaaagggagctgaaattcctccaccaagttggtattcaaaatatgtaatgactggtatggcaaaagattggacta

SEQ ID NO: 1125 - DNA, 455 bp, Homo sapiens
  misc_feature 7, 12, 15, 62, 87, 322: n = A,T,C or G
cccttancgtgntcncggccgaggtaccaaatgaagtgtgaagacaaggccatccaccactntatagagggtgggaaaataaaccanaaatcaagggagaaagaaaagatgaaagacaaactgcaaaaaattgccaaaatgcgactttctaaaaatggagcagattctgaggctttgcatgtcttggcattccttcaggagctgaatgaaaaaatgcaacaagcagatgaagactctgagaggggtttggagtctggaagcctcatcccttcagcgtcaagctggaatggggaatgaagaatagagatgtggtgcccactangctactgctgaaagggagctgaaattcctccaccaagttggtattcaaaatatgtaatggactggtatggcaaaagattggactaagacactggccataccactggacagggttattgttaacacctgaattg

SEQ ID NO: 1126 - DNA, 604 bp, Homo sapiens
  misc_feature 42, 50, 51, 142, 247, 289, 337, 501, 534: n = A,T,C or G
ccctttcgagcggccgcccgggcaggtacttttttttttttntttttttnnggacttgcgacagttccaccttttactctcattggtaaaatctccttttaattattaaaaatattgataaatttattaaattaagtctttnattcttttgtaatcagaagaggacattaatgttgcgtgtcttgactgtcttttttgctttgtagatttattttgtgctaaatgagaacgatatgcatgtttgtgnttgatttttccagaagcagttactttaattctttttttaagngctgattttgtttttgctttaggcattagtttcttcttcctttatagntttttcaaaatcaattaattcctttatttgttttgaaagaagtaaatttggggtaattttttcttatcacgcccaatatgaagagttaaaaaattaccaactgattgcatttctttacttaattttgcaaatcgattttacttcatcaaaaaaaagaatttaanaattaatttaccttgttcaggtcttggaatttncacgccctctaagacgaagagccacttttactctgcgtatctaataaaaattctttggctttttttgctt

SEQ ID NO: 1127 - DNA, 394 bp, Homo sapiens
cccttagcgtggtcgcggccgaggtaccaaatgaagtgtgaagacaaggccatccaccactttatagagggtgtaaaaataaaccagaaatcaagggagaaagaaaagatgaaagacaaactgcaaaaaattgccaaaatgcgactttctaaaaatggagcagattctgaggctttgcatgtcttggcattccttcaggagctgaatgaaaaaatgcaacaagcagatgaagactctgagaggggtttggagtctggaagcctcatcccttcagcatcaagctggaatggggaatgaagaatagagatgtggtgcccactaggctactgctgaaagggagctgaaattcctccaccaagttggtattcaaaatatgtaatgactggtatggcaa

SEQ ID NO: 1128 - DNA, 728 bp, Homo sapiens
  misc_feature 34, 44, 517, 693, 699, 726: n = A,T,C or G
cccttagcgtggtcgcggccgaggtacatgctanaaaacattancacagatacgacagagtgtggtttttttttagaaatgggtaatttctctctccagtatcctttcacttgtatgagatatttctcctctcctgttttcacaaaccaagaaatccccaggtaggccaatcccagaggtgccatttagcagtatgcagcagcccagtttcagcataacaaaacatgccttggtagtggctctctcatgcaaataaaagaaagcttaagaaattcttgttgtaggtggattaggcaaggctgccattcagctggtataagctaaaagtaaaaaatcaaaacgctcaagaaaacggacacaattttggaatgattaaagatgtctttataaagtttttttcaagacttcattctaaatacacagaataaaaaatgggtgtcagctcacttgtaagacaccaaccagattttccttatactgtctcaaaatttaaagatcaatttccccagaaggtgtncaatgcatcataaaatggcccttttttgaggatgggagaggaagggttgggcaggatggaatattaaattgtacatggataaacatgccaagactgttatccaatctagataatttatatacattttgatgacttaaggaaaacaaagcaatcatttggtgacagcctaaaaagcntgaccntatttaacatacttaggaacttttttngg

SEQ ID NO: 1129 - DNA, 622 bp, Homo sapiens
  misc_feature 571, 582: n = A,T,C or G
cgttcaggtaccaaatgaagtgtgaagacaaggccatccaccactttatagagggtgtaaaaataaaccagaaatcaagggagaaagaaaagatgaaagacaaactgcaaaaaattgccaaaatgcgactttctaaaaatggagcagattctgaggctttgcatgtcttggcattccttcaggagctgaatgaaaaaatgcaacaagcagatgaagactctgagaggggtttggagtctggaagcctcatcccttcagcatcaagctggaatggggaatgaagaatagagatgtggtgcccactaggctactgctgaaagggagctgaaattcctccaccaagttggtattcaaaatatgtaatgactggtatggcaaaagattggactaagacactggccataccactggacagggttatgttaacacctgaattgctgggtcttgaagagagcccaaggagttctgggaagagggaccagattggggggtagggtcacgggcttgggtgatagaattatttctcgaatgactttcttgagtgccaatttgaactgtaacatttgcttantcacctttagnggagtaatctcctgggcttggttctatatttatataaaag

SEQ ID NO: 1130 - DNA, 594 bp, Homo sapiens
  misc_feature 191, 208, 223, 238, 284, 285, 303, 308, 336, 373, 386, 392,421, 427, 432, 436, 445, 453, 457, 471, 489, 501, 510, 513,521, 533, 534, 544, 545, 570, 576, 586: n = A,T,C or G
cgggcaggtacagcctctcggcccggctaaacatcatcgtcttggtaggccattaccctaccaactaactaatgttccgcacccccatttttaagtgaagctgtgaagctcctttctattactcatcatgcgataaataactatatccggtattagctattggttccaataagttatccccagtcttaaangtaggttaagtacctcnggccggccaccgggntggagctccaaattngccctataagtgaggtcggatttacgccccgcctcacttggcccgnngttttacaaccgtccgtngactngggaaaacccctgggcgtttaccccaanctttaatccgccttggcagcacaatcccccttttcgnccaggttggcgtnaataancgaaaaaggcccggaaccgaatcggcccntttccnaacangttngcgccagtnctggaatnggcnaaatggggaccccnccccttgttaaccggggngcatttaaaccnccggccggntgntggttggnttaccccccaannggtgacccgnnttcaactttggcaagggcccctaanggccgntttcttttgntttttttc

SEQ ID NO: 1131 - DNA, 465 bp, Homo sapiens
  misc_feature 4, 46, 48, 322, 378, 379, 380, 381, 382, 383, 384, 385, 386,387, 388, 389, 390, 391, 392, 393, 394, 395, 396, 397, 398,399, 400, 401, 402, 403, 404, 405, 406, 407, 408, 409, 410,411, 412, 413, 414, 415, 416, 428, 434: n = A,T,C or G
cgangtacgcggggctttccaaacagcataagaagtgtttgagccntnagtatactgaaggaagggctccctcgagttctggtgtgaagagataaatcaccagaaaaatgatggcatcaaaacaaaaaaagaactcattgtgaataagaaaaaacatctaggcccagtcgaagaatatcagctgctgcttcaggtgacctatagagattccaaggagaaaagagatttgagaaattttctgaagctcttgaagcctccattattatggtcacatgggctaattagaattatcaagagcaaaggccaccacagactgcaacangcctgaatggagtcctgcagtgtacctgcccgggcggccgctcttagaactagtgnnnnnnnnnnnnnnnnnnnnnnnnnnnnnnnnnnnnnnntgatacccggcngacctngaggggggggccccggtacccaaccttttgt

SEQ ID NO: 1132 - DNA, 220 bp, Homo sapiens
  misc_feature 129: n = A,T,C or G
agctcactcaaagggcggtaatacgggttatccacaagaatcaaggggataaccgcaggaaagaaacatgtgagcaaaagggccaagcaaaagggccaggaaccgtaaaaagggcccgcgttgctggcngtttttccatagggctcccgcccccctggaccgaagcatcacaaaaaatcgacgctcaaagttcagaggtgggcgaaaaccccggacaagg

SEQ ID NO: 1133 - DNA, 124 bp, Homo sapiens
  misc_feature 16, 24, 41, 46, 47, 52, 57, 75, 78, 82, 95, 98, 100, 114,115, 116, 119: n = A,T,C or G
cccgggaacaaaagcngcaaccgngccccccctccaggtcnacggnntcganaagcncgaaaaccgaatttttgnagntttnggggacccactanttngngagcgggggccgannnagngcggc

SEQ ID NO: 1134 - DNA, 517 bp, Homo sapiens
  misc_feature 8, 14, 21, 23, 27, 36, 37, 39, 63, 68, 70, 83, 89, 106, 113,118, 119, 128, 132, 138, 142, 158, 160, 175, 184, 202, 210,218, 228, 229, 230, 231, 232, 233, 234, 235, 236, 237, 238,239, 240, 241, 242, 243, 244, 245, 246, 247, 248: n = A,T,C or G
  misc_feature 249, 250, 251, 252, 253, 254, 255, 256, 257, 258, 259, 260,261, 262, 263, 264, 265, 266, 267, 268, 269, 270, 271, 272,273, 274, 275, 276, 277, 278, 279, 280, 281, 282, 283, 284,285, 286, 287, 288, 289, 290, 291, 292, 293, 294, 295: n = A,T,C or G
  misc_feature 296, 297, 298, 299, 300, 301, 302, 303, 304, 305, 306, 307,308, 309, 310, 311, 312, 313, 314, 315, 316, 317, 318, 319,320, 321, 322, 323, 324, 325, 326, 327, 328, 329, 330, 333,345, 351, 357, 370, 380, 389, 390, 392, 394, 395, 400: n = A,T,C or G
  misc_feature 408, 416, 429, 458, 471, 472, 474, 479, 495, 499, 501, 505: n = A,T,C or G
cccccccncgaggncgacggnancganaagcagatnntnaatttttgcagcccgggggatccnggagngngagagcccaccgngggggngcgccaacacccccganagagagncgaannacgcgcgcncacnggccgncganaaacaacggcgagacngngaaaacccgggcganacccaacanaagcgccaggcagcacanaccccaancgccagcnggcgaaacannnnnnnnnnnnnnnnnnnnnnnnnnnnnnnnnnnnnnnnnnnnnnnnnnnnnnnnnnnnnnnnnnnnnnnnnnnnnnnnnnnnnnnnnnnnnnnnnnnnnnnganaccgcgcagcgngaccgnaacacnagccagccgcccnagcgcccgcnccaagcgcnnancnncccanaccaacancgccacgnacggccgggcaanccccggcaagcacaaaaagcgggggggcnccctggaaggggnncncgaanaaaaggcaagacgggnaccncngaanccccaaaaaacc

SEQ ID NO: 1135 - DNA, 695 bp, Homo sapiens
  misc_feature 7, 8, 29, 32, 59, 60, 62, 71, 107, 119, 128, 129, 143, 145,153, 162, 165, 172, 173, 179, 187, 192, 204, 226, 233, 245,254, 262, 270, 283, 288, 297, 304, 325, 333, 336, 358, 365,366, 370, 373, 381, 382, 397, 400, 412, 434, 440, 447: n = A,T,C or G
  misc_feature 452, 455, 480, 488, 551, 556, 561, 586, 590, 597, 598, 610,612, 618, 619, 622, 634, 655, 666, 668, 669, 680: n = A,T,C or G
gggagtnngggagcggccgagggccaaanganccgcgaagacaaggccatccaccactnnanagagggggnaaaaacaaaccagaaaccaagggagaaagaaaagangaaagacaaacngcaaaaaanngccaaaacgcgacnancaaaaaanggagcagangcngaggcanngcaagncacggcanaccgncaggagccgaangaaaaaaagcaacaagcaagangaagacnctgagaggggcncggaggccnggaaaccncatccctncaacaacaaagcnggaangggggaaangaagaancagaagaagggggcgcccacnaggctacngcngaaagggaaccgaaaaaccccncaccaannaggnatncaaaaaannggaaacggaccgggncanggcaaaaaaaanggaaccaagacaccgggcccanaccacnggaccanggggnaanggaaacaccccggaaatggcagggnccccgaanagaaccccaagggagcccagggaagagggacccaagatggggggggaaaggcccaccgggccnggggngaaanaacaaagccaccgagggccaaccgnaagnggccaanngaacccggaacnanaaggcnnaanccaccctgaagngggaggaaaacccccagggcngggggccaaanannaaaaaaaagcngcccaaaacccccaa

SEQ ID NO: 1136 - DNA, 255 bp, Homo sapiens
  misc_feature 1, 26, 34, 39, 64, 70, 79, 82, 85, 92, 99, 109, 111, 120,143, 152, 158, 163, 173, 176, 180, 196, 209, 225, 234: n = A,T,C or G
ntttaattttttgcagcccggggganccaggggnagggngagcccaccgcgggggagcgccaancgcccnacagcgagncgnaanacgcgcngcccacnggcccgccgnanaaacaacgncgagacggggaaaaccccggcgncacccaacngaaacngccangcagcacaanccncaancgccagcgggcggaanagcgaagaggccncgcaccgaacgcccancccaacagnggcgcaacagaaagggcgaaa

SEQ ID NO: 1137 - DNA, 696 bp, Homo sapiens
  misc_feature 7, 11, 22, 25, 29, 40, 50, 51, 62, 65, 66, 68, 70, 73, 76,78, 83, 86, 89, 104, 107, 112, 113, 119, 137, 141, 142,155, 166, 173, 184, 191, 197, 204, 205, 206, 207, 208, 209,210, 211, 212, 213, 214, 215, 216, 217, 218, 219, 220, 221: n = A,T,C or G
  misc_feature 222, 223, 224, 225, 226, 227, 228, 229, 230, 231, 232, 233,234, 235, 236, 237, 238, 239, 240, 241, 242, 243, 244, 245,246, 247, 248, 249, 250, 251, 252, 253, 254, 255, 256, 257,258, 259, 260, 261, 262, 263, 264, 265, 266, 267, 268: n = A,T,C or G
  misc_feature 269, 270, 271, 275, 276, 293, 295, 304, 309, 310, 318, 319,322, 328, 343, 352, 357, 389, 413, 421, 448, 473, 476, 481,482, 492, 498, 500, 512, 515, 529, 536, 538, 543, 544, 547,549, 564, 572, 574, 587, 588, 603, 608, 609, 616, 624: n = A,T,C or G
  misc_feature 626, 633, 634, 654, 672, 680, 682: n = A,T,C or G
tttgcantttnggggacccacnaantggngagcgggcgangaaccacacnnacggcccgagnccnngncnacnggncnagagnganaancacagggacaccgancanccctnncggcanggacccacagcagcaggngganngccataccgagangaaggaagacncagacancgccaaccatncccgagnggaccngcccggnnnnnnnnnnnnnnnnnnnnnnnnnnnnnnnnnnnnnnnnnnnnnnnnnnnnnnnnnnnnnnnnnnnnacgnnaaacaaccggcgagacngngaaaacccnggcgnnacccaacnnaancgccgngcagcacaacccccnacgccagcnggcgnaaaaagcgaagaggccccgcaccgagcgcccntcccaacaggggcgcagcccgaanggcgaaanggggacgcgccctggaagcggcgcaanaaagcgccggcgggagggggggganacncccanncgggaccgcnacaacnangccaagcgcccnaancgcccggcacccanacgctancnacccnnccnanccacgcccacgggancgccggcnanccccggcaagccnnaaaaaacggggggcnccccnnaaggggncccgacanangaggccnnaccggcaccccgacccccanaaaaccaggaaaaagggnggaagggncnacggaagggggccc

SEQ ID NO: 1138 - DNA, 475 bp, Homo sapiens
  misc_feature 113, 462: n = A,T,C or G
cacgcgtccggaaaggaggggaggggtggggcgggccggatctgctcgcaggccgcacccgcctccggctggatgctcagagtctcgccctgatggccagactggagtgcagnggcgtgatctcggctcactgcatcctccacctcctaggttcaagtgattcttccacctcagcctcccctcccaaggagctggcatcacaggacaggcacggagactcacgcctgaaatcctaatactttgggaggccgcggcaggaggatcacctgaacccaggagtttgagaccagcctgccaacatgatgttgttattcatgaggaccaatgggttggcgagacagtactacaatcaacatttagcagtcagttattaaatcttgggagttattcatctattcagcctgaagaatattccagtgtagttagtgatgttgtacttcaagacttactggcatatgtgtnctcaaaacattcc

SEQ ID NO: 1139 - DNA, 542 bp, Homo sapiens
  misc_feature 398: n = A,T,C or G
ttaccccgcgtccgggtaaacaaaacaaagatcgtttgttctggaaacaggtaaaatggtaatcaaatagattgtgttccaggagtgcaaaggtggcttaatattcacaaatcagttgctattgtacaccacctgtagaaaagtaatctggcatgcagaacattcttatggtaaagttaatgttcatttatgatcttagcaaatgatggattgaaagggacttccttaattgcataaacagacttcaacaaacagtatgatgaaatagtgaacatttctcctaagattataaaaataagacaaggatatctgctgtcaatgattttattcagcattgttcagaaggacctaaccagaaaactaatgcaagaaacagaaacaaaaggcataaagattanaaaagaagtaaaattttaaaaaagaaaaagaatataaatctctatttgcatatgccatgagtaaatttggtaagttccctgcataaaagttatgcaaaaagcatttttttgatataccagccaaaaatcaagggaaatggaaaa

SEQ ID NO: 1140 - DNA, 525 bp, Homo sapiens
tagggcgaattggagctccccgcggtggcggccgcccgggcaggtaccaaatgaagtgtgaagacaaggccatccaccactttatagagggtgtaaaaataaaccagaaatcaagggagaaagaaaagatgaaagacaaactgcaaaaaattgccaaaatgcgactttctaaaaatggagcagattctgaggctttgcatgtcttggcattccttcaggagctgaatgaaaaaatgcaacaagcagatgaagactctgagaggggtttggagtctggaagcctcatcccttcagcatcaagctggaatggggaatgaagaatagagatgtggtgcccactaggctactgctgaaagggagctgaaattcctccaccaagttggtattcaaaatatgtaatgactggtatggcaaaagattggactaagacactggccataccactggacagggttatgttaacacctgaattgctgggtcttgagagagcccaaggagttctggggagagggaccagattggggg

SEQ ID NO: 1141 - DNA, 406 bp, Homo sapiens
attggagctccccgcggtggcggccgcccgggcaggtaccaaatgaagtgtgaagacaaggccatccaccactttatagagggtgtaaaaataaaccagaaatcaagggagaaagaaaagatgaaagacaaactgcaaaaaattgccaaaatgcgactttctaaaaatggagcagattctgaggctttgcatgtcttggcattccttcaggagctgaatgaaaaaatgcaacaagcagatgaagactctgagaggggtttggagtctggaagcctcatcccttcagcatcaagctggaatggggaatgaagaatagagatgtggtgcccactaggctactgctgaaagggagctgaaattcctccaccaagttggtattcaaaatatgtaatgactggtatggcaa

SEQ ID NO: 1142 - DNA, 409 bp, Homo sapiens
attggagctccccgcggtggcggccgcccgggcaggtaccaaatgaagtgtgaagacaaggccatccaccactttatagagggtgtaaaaataaaccagaaatcaagggagaaagaaaagatgaaagacaaactgcaaaaaattgccaaaatgcgactttctaaaaatggagcagattctgaggctttgcatgtcttggcattccttcaggagctgaatgaaaaaatgcaacaagcagatgaagactctgagaggggtttggagtctggaagcctcatcccttcagcatcaagctggaatggggaatgaagaatagagatgtggtgcccactaggctactgctgaaagggagctgaaattcctccaccaagttggtattcaaaatatgtaatgactggtatggcaaaag

SEQ ID NO: 1143 - DNA, 575 bp, Homo sapiens
  misc_feature 214, 540, 560: n = A,T,C or G
tagggcgaattggagctccccgcggtggcggccgaggtaccactctatccatcgtggatagagaaactgaagctctctaaagaccctgcagctgggaggtggcagagtcaatggcagccctcagccctatctgccctgacatggcattcctcccatttctcaccaccgaaccctctaaaataacaatgtgtggggtccttggctgagagacttnccttttgggaatcaatctgaatgtatgatgacaaagaaaacaacttttgctttatacaaccttctggttagattcaggcaccaagcaggacacttctttgtggcgctccaagaatctttcaaattcttcatcaccaataacaaatctttctgcttctcttagagcatcttctccacaattctcaccctcaattaagaggcactggaacactttccagcggacagggtttagtgctttgatctgttccgtcatgtcctcttccacgttgaaacgattaatgacagaattttttttggaggcgactctattaatccctacaccacctnctcagcttttgaagggtttncacatgggttctttt

SEQ ID NO: 1144 - DNA, 683 bp, Homo sapiens
  misc_feature 2, 225, 419, 429, 432, 434, 446, 466, 481, 521, 561, 563,584, 628, 659, 660, 663, 664: n = A,T,C or G
gnagctccccgcggtggcggccgaggtacgccaccatgcctggctaatttttgtatttttagtggagacggggtttcaccatgttggccaggctgttctcgaactcctgacctcgtgatccacccacattgtcctcccaagtgctgggattacaggcgtgagccactgtgccatgaggattagtaaagtgcactcatggtaagtaaaaaaatttgttttatgttnatgctgattatatgaaggtcatcatagcttagacacaatcaaaacccatggggaacatctttagaattcatttttctcttttcttacaaaaaaagtaaataggtaaaatggaaaatagaagacaacctatcctatcctggatgagacacacacatatttaaattgaattatagacttaaaatttaagtagggantttttttttntgngnaacaaaagtttncaaaaaacccaaaacttttnagaatcacccagttnttggaaaatatgattatgaaagcagactttttggatgggngcttaatgacatttaggcgacatttaaaatgcccctaggngngggaacacttgaaattgccanctaaattaaaatgacccttttaatttgcctggacaacaaaaaantttccatgattttggctttttttggaacaanngannaagaaaattttttttttag

SEQ ID NO: 1145 - DNA, 355 bp, Homo sapiens
  misc_feature 2, 212: n = A,T,C or G
cnattggagctccccgcggtggcggccgcccgggcaggtaccaaatgaagtgtgaagacaaggccatccaccactttatagagggtgtaaaaataaaccagaaatcaagggagaaagaaaagatgaaagacaaactgcaaaaaattgccaaaatgcgactttctaaaaatggagcagattctgaggctttgcatgtcttggcattccttcangagctgaatgaaaaaatgcaacaagcagatgaagactctgagaggggtttggagtctggaagcctcatcccttcagcatcaagctggaatggggaatgaagaatagagatgtggtgcccactaggctactgctgaaagggagc

SEQ ID NO: 1146 - DNA, 336 bp, Homo sapiens
  misc_feature 20: n = A,T,C or G
ttagggcgaattggagctcnccgcggtggcggccgcccgggcacggtactgtgtcaacatgcaaggccaggtggccgtgaggaatgtcccaatgacaggctctatcagtcatgtcctggtgcagctcccacatgtcttccagaggatggaagctgaaaacctagcttcagtgattgatgccaggtttaacttttttgtgaacaagattttgccacagtatcgtgatgcagtcatgtctcacacgctcatctatatcccctcctactttgacttcgtgcgtcttcgaaattacttcaagaaggaggaattgaattttacccacatctgcgagtacct

SEQ ID NO: 1147 - DNA, 513 bp, Homo sapiens
  misc_feature 366: n = A,T,C or G
ccgcggtggcggccgcccgggcaggtaccaaatgaagtgtgaagacaaggccatccaccactttatagagggtgtaaaaataaaccagaaatcaagggagaaagaaaagatgaaagacaaactgcaaaaaattgccaaaatgcgactttctaaaaatggagcagattctgaggctttgcatgtcttggcattccttcaggagctgaatgaaaaaatgcaacaagcagatgaagactctgagaggggtttggagtctggaagcctcatcccttcagcatcaagctggaatggggaatgaagaatagagatgtggtgcccactaggctactgctgaaagggagctgaaattcctccaccaagttggtnttcaaaatatgtaatgactggtatggcaaaagattggactaagacactggccataccactggacagggttatgttaacacctgaattgctgggtcttgagggagcccaaggagttctgggagagggaccagattggggggtaggtcc

SEQ ID NO: 1148 - DNA, 484 bp, Homo sapiens
  misc_feature 20: n = A,T,C or G
ttagggcgaattggagctcnccgcggtggcggccgcccgggcaggtacgcggggagttctgcgcagcttcccgaggctccgcaccagccgcgcttctgtccgcctgcagggcattccagaaagatgaggatatttgctgtctttatattcatgacctactggcatttgctgaacgcatttactgtcacggttcccaaggacctatatgtggtagagtatggtagcaatatgacaattgaatgcaaattcccagtagaaaaacaattagacctggctgcactaattgtctattgggaaatggaggataagaacattattcaatttgtgcatggagaggaagacctgaaggttcagcatagtagctacagacagagggcccggctgttgaaggaccagctctccctgggaaatgctgcacttcagatcacaagatgtgaaattgcaggatgcagggggtgtaccttggcccgctctagaactagtg

SEQ ID NO: 1149 - DNA, 524 bp, Homo sapiens
tgggcgaattggagctccccgcggtggcggccgcccgggcaggtaccaaatgaagtgtgaagacaaggccatccaccactttatagagggtgtaaaaataaaccagaaatcaagggagaaagaaaagatgaaagacaaactgcaaaaaattgccaaaatgcgactttctaaaaatggagcagattctgaggctttgcatgtcttggcattccttcaggagctgaatgaaaaaatgcaacaagcagatgaagactctgagaggggtttggagtctggaagcctcatcccttcagcatcaagctggaatggggaatgaagaatagagatgtggtgcccactaggctactgctgaaagggagctgaaattcctccaccaagttggtattcaaaatatgtaatgactggtatggcaaaagattggactaagacactggccataccactggacagggttatgttaacacctgaattgctgggtcttgaggggagcccaaggagttctgggagagggaccagattggggg

SEQ ID NO: 1150 - DNA, 237 bp, Homo sapiens
  misc_feature 121, 136, 165: n = A,T,C or G
tatagggcgaattggagctccccgcggtggcggccgcccgggcaggtaccaaatgaagtgtgaagacaaggccatccaccactttatagagggtgtaaaaataaaccagaaatcaaggganaaagaaaagatgaangacaaactgcaaaaaattgccaaaatgcnactttctaaaaatggagcagattctgaggctttgcatgtcttggcattccttcaggagctgaattgaaaaaa

SEQ ID NO: 1151 - DNA, 420 bp, Homo sapiens
cttagggcgaattggagctccccgcggtggcggccgcccgggcaggtaccaaatgaagtgtgaggacaaggccatccaccactttatagagggtgtaaaaataaaccagaaatcaagggagaaagaaaagatgaaagacaaactgcaaaaaattgctaaaatgcgactttctaaaaatggagcagattctgaggctttgcatgtcttggcattccttcaggagctgaatgaaaaaatgcaacaagcagatgaagactctgagaggggtttggagtctggaagcctcatcccttcagcatcaagctggaatggggaacgaagaatagagatgtggtgcccactaggctactgctgaaagggagctgaaattcctccaccaagttggtattcaaaatatgtaatgactggtatggcaaaaga

SEQ ID NO: 1152 - DNA, 393 bp, Homo sapiens
ccgcggtggcggccgcagttacctgacgtatgacaacccagatatcttgaagagggtgtcaggatcaagatcaaatgtgttcatgaggtttaaaacaactgccaaggatggccttttgctgtggaggggagacagccccatgagacccaacagcgacttcatttccttgggccttcgggatggagccctcgtgttcagctataacctgggcagtggtgtggcatccatcatggtgaatggctccttcaacgatggtcggtggcaccgagttaaggccgttagggatggccagtcaggaaagataaccgtggatgactacggagccagaacaggcaaatccccaggcatgatgcggcagcttaacatcaatggagctctgtatgtgggtggaat

SEQ ID NO: 1153 - DNA, 456 bp, Homo sapiens
  misc_feature 3: n = A,T,C or G
gcnaattggagctccccgcggtggcggccgaggtacacgaactaaattttttaaactttatttgctgttaaattctgtgaagtttcagttatctaaaataaatatacacaaatatgaaatataatgtttcagattgcaaggtaatatgtaatagtagtgtttgtaagatactcttgtctaatattaactagtagtattttgatttgtacaatgtcaccctcccagcaacaagaagaacaagctactgaatcagtgtccctttattactatggcatcaaagatttggctactgttttcttctacatgctagtggcgataattattcatgccgtaattcaagagtatatgttggataaaattaacaggcgaatgcacttctccaaaacaaaacacagcaagtttaatgaatctggtcagcttagtgcgttctacctttttgcctgtgtttggggcaca

SEQ ID NO: 1154 - DNA, 507 bp, Homo sapiens
gagctccccgcggtggcggccgaggtaccaaatgaagtgtgaagacaaggccatccaccactttatagagggtgtaaaaataaaccagaaatcaagggagaaagaaaagatgaaagacaaactgcaaaaaattgccaaaatgcgactttctaaaaatggagcagattctgaggctttgcatgtcttggcattccttcaggagctgaatgaaaaaatgcaacaagcagatgaagactctgagaggggtttggagtctggaagcctcatcccttcagcatcaagctggaatggggaatgaagaatagagatgtggtgcccactaggctactgctgaaagggagctgaaattcctccaccaagttggtattcaaaatatgtaatgactggtatggcaaaagattggactaagacactggccataccactggacagggttatgttaacacctgaattgctgggtcttgagagagcccaaggagttctgggagagggaccagattggggggt

SEQ ID NO: 1155 - DNA, 464 bp, Homo sapiens
  misc_feature 224, 231: n = A,T,C or G
tggagctccccgcggtggcggccgaggtaccaaatgaatgtgtgaagacaaggccatccaccactttatagagggtgtaaaaataaaccagaaatcaagggagaaagaaaagatgaaagacaaactgcaaaaaattgccaaaatgcgactttctaaaaatggagcagattctgaggctttgcatgtcttggcatttccttcaggagctgaatgaaaaaatgcancaagcanatgaagactctgagaggggtttggagtctggaagcctcatcccttcagcatcaagctggaatggggaatgaagaatagagatgtggtgcccactaggctactgctgaaagggagctgaaattcctccaccaagttggtattcaaaatatgtaatgactggtatggcaaaagattggactaagacactggccataccactggacagggttatgttaacacctgaattgctgggg

SEQ ID NO: 1156 - DNA, 492 bp, Homo sapiens
ccgcggtggcggccgcccgggcaggtacattggcacgtcacgatgtcttgagtttcattcactaggtggcagcctgcatcgttccactgcaaatgactgaaatcccaaaacacacaatgaggctggctcaggtttgactctatcttggaaaaaaataggaaaacttcatttatggaatagttttgaataaccgtggatatcacaggtccattgacctgagcatttccatttttggaaacgggtagaatgttccccagagtcaacgaggccatgctgataatagtttctggaagggatctctggaattggtctgacccaattaacacacggcctctgatgggaatagatgtattttggggacacattttaatctgatagctgtaaccccttttgagttggcttttgttcactggaatccctttccagtcaatgaatttccgagaaaaattcagaggaagagctgtcggaggcaccagagtgctgatgttttct

SEQ ID NO: 1157 - DNA, 531 bp, Homo sapiens
  misc_feature 482, 529: n = A,T,C or G
atagggcgaattggagctccccgcggtggcggccgcccgggcaggtacgcggggcagtgggaagctcgcagcagctggggaggagccaaagcctcggcgctcacctaagccgcagggagatacacccaactgggagatgaggaaacagcaacccagagaggagaactaacccacacaggatcatttcgtgaaggagcaaggctgaagaaccagacctggactttcttaggacaaacttactgcagcttgaaggagccaaccatggatttgaggcgtgtgaaggaatatttctcctggctctactatcaataccaaatcattagctgctgtgctgttttagagccctgggagcgatctatgtttaacaccatcttactaaccattattgctatgggtgggtatacactgcctatgtctttattccaatccacattcgcctgggcttgggaatttttcttcaaaaatatgtggatatcacaggncctcggcccgctctagaactagtgggatccccccgggcttgcagggnat

SEQ ID NO: 1158 - DNA, 389 bp, Homo sapiens
agggcgaattggagctccccgcggtggcggccgcccgggcaggtacgcggggcagtgggaagctcgcagcagctggggaggagccaaagcctcggcgctcacctaagccgcagggagatacacccaactgggagatgaggaaacagcaacccagagaggagaactaacccacacaggatcatttcgtgaaggagcaaggctgaagaaccagacctggactttcttaggacaaacttactgcagcttgaaggagccaaccatggatttgaggcgtgtgaaggaatatttctcctggctctactatcaataccaaatcattagctgctgtgctgttttagagccctgggagccgatctatgtttaacaccatcttactaaccattattgct

SEQ ID NO: 1159 - DNA, 454 bp, Homo sapiens
gggcgaattggagctccccgcggtggcggccgcccgggcaggtacgcggggcagtgggaagctcgcagcagctggggaggagccaaagcctcggcgctcacctaagccgcagggagatacacccaactgggagatgaggaaacagcaacccagagaggagaactaacccacacaggatcatttcgtgaaggagcaaggctgaagaaccagacctggactttcttaggacaaacttactgcagcttgaaggagccaaccatggatttgaggcgtgtgaaggaatatttctcctggctctactatcaataccaaatcattagctgctgtgctgttttagagccctgggagcgatctatgtttaacaccatcttactaaccattattgctatgggtggtatacactgcctatgtctttattccaatccacattcgcctggcttgggaatttttctca

SEQ ID NO: 1160 - DNA, 312 bp, Homo sapiens
  misc_feature 157, 266, 300: n = A,T,C or G
ccgcggtggcggccgaggtaccaaatgaagtgtgaagacaaggccatccaccactttatagagggtgtaaaaataaaccacaaatcaagggagaaagaaaagatgaaagacaaactgcaaaaaattgccaaaatgcgactttctaaaaatggagcanattctgaggctttgcatgtcttggcattccttcaggagctgaatgaaaaaatgcaacaagcagatgaagactctgagaggggtttggagtctggaagcctcatcccttnagcatcaagctggaatggggaatgaagaataganatgtggtgccca

SEQ ID NO: 1161 - DNA, 329 bp, Homo sapiens
  misc_feature 22: n = A,T,C or G
acttagggcgaattggagctcnccgcggtggcggccgccggaaggtgggtgacgtgcggatcttcttctttttgtggctgtggacacctttcaacactgccttcttggcctttaaagccttcgctttggcttcagctttaggaggggcaggagcccatcgcaaaaccacgctgcggagagaggggcgggtaatgtagcccggttgaacatgaaccagaaggaaaatggttaaagctgagggcactaattccttacaggcccggggacatggagctccaaccagtggatgcatgtagcttcccagaaccgaatgtctgccccgcgtacct

SEQ ID NO: 1162 - DNA, 427 bp, Homo sapiens
  misc_feature 36, 72, 259: n = A,T,C or G
ccgcggtggcggccgaggtaccactctatccatcgnggatagagaaactgaagctctctaaagaccctgcanctgggaggtggcagagtcaatggcagccctcagccctatctgccctgacatggcattcctcccatttctcaccaccgaaccctctaaaataacaatgtgtggggtccttggctgagagacttcccttttgggaatcaatctgaatgtatgatgacaaagaaaacaacttttgctttatacaaccttntggttagattcaggcaccaagcaggacacttctttgtggcgctccaagaatctttcaaattcttcatcaccaataacaaatctttctgcttctcttagagcatcttctccacaattctcaccctcaattaagaggcactggaacactttccagcggacagggtttagt

SEQ ID NO: 1163 - DNA, 463 bp, Homo sapiens
ctatagggcgaattggagctccccgcggtggcggccgaggtaccaaatgaagtgtgaagacaaggccatccaccactttatagagggtgtaaaaataaaccagaaatcaagggagaaagaaaagatgaaagacaaactgcaaaaaattgccaaaatgcgactttctaaaaatggagcagattctgaggctttgcatgtcttggcattccttcaggagctgaatgaaaaaatgcaacaagcagatgaagactctgagaggggtttggagtctggaagcctcatcccttcagcatcaagctggaatggggaatgaagaatagagatgtggtgcccactaggctactgctgaaagggagctgaaattcctccaccaagttggtattcaaaatatgtaatgactggtatggcaaaagattggactaagacactggccataccactggacagggttatgttaacacct

SEQ ID NO: 1164 - DNA, 387 bp, Homo sapiens
  misc_feature 41, 50, 79, 307: n = A,T,C or G
ctatagggcgaattggagctccccgcggtggcggccgcccnggcacggtnccaaatgaacgtgtgaagacaaggccatncaccactttatagagggtgtaaaaataaaccaggaaatcaagggagaaagaaaagatgaaagacaaactgcaaaaaattgccaaaatgcgactttctaaaaatggagcagattctgaggctttgcatgtcttggcattccttcaggagctgaatgaaaaaatgcaacaagcagatgaagactctgagaggggtttggagtctggaagcctcatcccttcagcatcaanctggaatggggaatgaagaatagagatgtggtgcccactaggctactgctgaaagggagctgaaattcctccaccaagtt

SEQ ID NO: 1165 - DNA, 245 bp, Homo sapiens
  misc_feature 54, 92, 110, 129, 135, 155, 156, 171, 175, 186, 201: n = A,T,C or G
ttagggcgaattggagctccccgcggtggcggccgaggtacatcattttctttntcctgtccataaatcttcttccaccacgtggctgtgtncaagactctctgaacctnctctggctcaggaggcttntagatntgtgaattgtctgctcagtnnaactccattaaattnaatntggccaagaantttcttcttaacagnggtattgatgaccattaatccttcaacctaaacctgctcattaa

SEQ ID NO: 1166 - DNA, 200 bp, Homo sapiens
tatagggcgaattggagctccccgcggtggcggccgaggtaccaaatgaagtgtgaagacaaggccatccaccactttatagagggtgtaaaaataaaccagaaatcaagggagaaagaaaagatgaaagacaaactgcaaaaaattgccaaaatgcgactttctaaaaatggagcagattctgaggctttgcatgtctt

SEQ ID NO: 1167 - DNA, 577 bp, Homo sapiens
  misc_feature 115, 466, 516: n = A,T,C or G
tagggcgaattggagctccccgcggtggcggccgcccgggcaggtacaacaagcgtttgtaatgtttcccaaatattagctttgaaatccaaatgtcaagcaggttaaagttcanaaaactataaatgtaattgttaataaaacaatggatgaaaaaagtcattgaaatttttttctacttggattaagaacataaattaaaagtgcaactgcaaaaataatattagtttgataagtaaaataaaacaaactagatatattttgaaaataaaaaacaaatgaaacaaaataaaatttaggtaaagaaaattcaacgtaatttgttgtagctatattttttgtaataattacaaaagtagaaataatagctcataaagcaaaaacaaaatttattctatgttctttttttcagtcaattcagaattttagcttcatatttgaagcatttttttctaattttgtttgngaatttgaatttgtttgcggattttgatttgccataaaaatattatattntatttaattatattaatcttcgtcagctttaattgctcttctttaaaatttgatctgaaat

SEQ ID NO: 1168 - DNA, 651 bp, Homo sapiens
  misc_feature 214, 224, 228, 240, 241, 246, 248, 266, 283, 298, 319, 323,327, 329, 331, 342, 343, 344, 345, 346, 351, 352, 379, 380,416, 418, 420, 423, 427, 428, 429, 433, 445, 456, 467, 470,471, 476, 480, 496, 501, 502, 503, 504, 505, 506, 526: n = A,T,C or G
  misc_feature 544, 553, 554, 557, 561, 568, 578, 581, 593, 595, 603, 614,615, 617, 623, 625, 626, 627, 628, 641: n = A,T,C or G
ccgcggtggcggccgaggtacccttgtcctcttcttcagtgacttaaaacaattccaggatcagaagagaagccaacgtgacatcctcgataaaactggggataagctgaagttctgtctgttcacgaagtggttgaaaaacaatttcgagatccagaagtcccttgatgggttcaccatccaggtgttcacaaaaaatcagagaatctttttnagggggtggncgcnttaacccttttnnggttnantgaaaatcccccccctgnttttttttgagaggttnaaaaatttttttttnaaaaaaaaaaccccccccccngggnattntnanttttttttttnnnnnccccnncaaaaatttttttttaacccccccccnnaaaaaaaaaagggtttttttttttttaaaaaacccncngntcncccnnnccanaaaaaaaaaaangggggtccccnttttttttttnttnnccccngggntttttttttttttttnttctnnnnnnggggggggggaaaaaaaaanaaattttttttttttggnggggggggnngcncccnccccccncggggggggnggnttaaaaaaaaangncccccccngggggggaaannanttttantnnnntcccccccccccngggggggggg

SEQ ID NO: 1169 - DNA, 290 bp, Homo sapiens
  misc_feature 269: n = A,T,C or G
ccgcggtggcggccgcccgggcaggtaccaaatgaagtgtgaagacaaggccatccaccactttatagagggtgtaaaaataaaccagaaatcaagggagaaagaaaagatgaaagacaaactgcaaaaaattgccaaaatgcgactttctaaaaatggagcagattctgaggctttgcatgtcttggcattccttcaggagctgaatgaaaaaatgcaacaagcagatgaagactctgagaggggtttggagtctggaagcctcatcncttcagcatcaactggaatgg

SEQ ID NO: 1170 - DNA, 250 bp, Homo sapiens
  misc_feature 227: n = A,T,C or G
ccgcggtggcggccgcccgggcaggtaccaaatgaagtgtgaagacaaggccatccaccactttatagagggtgtaaaaataaaccagaaatcaagggagaaagaaaagatgaaagacaaactgcaaaaaattgccaaaatgcgactttctaaaaatggagcagattctgaggctttgcatgtcttggcattccttcaggagctgaatgaaaaaatgcaacaagcanatgaagactctgagaggggtttg

SEQ ID NO: 1171 - DNA, 211 bp, Homo sapiens
  misc_feature 2: n = A,T,C or G
gnggcggcccgaggtaccaaatgaagtgtgaagacaaggccatccaccactttatagagggtgtaaaaataaaccagaaatcaagggagaaagaaaagatgaaagacaaactgcaaaaaattgccaaaatgcgactttctaaaaatggagcagattctgaggctttgcatgtcttggcattccttcaggagctgaatgaaaaaatgcaaca

SEQ ID NO: 1172 - DNA, 579 bp, Homo sapiens
ttagggcgaattggagctccccgcggtggcggccgcccgggcaggtaccatctaggtcagtttaagaagagtcagctcagagaaagcaagcataagggaaaatgtcacgtaaactagatcagggaacaaaatcctctccttgtggaaatatcccatgcagtttgttgatacaacttagtatcttattgcctaaaaaaaatttcttatcattgtttcaaaaaagcaaaatcatggaaaatttttgttgtccaggcaaataaaaggtcattttaatttagctgcaatttcagtgttcctcactaggtggcatttaaatgtcgcctgatgtcattaagcaccatccaaaaagtctgcttcataatctattttcaagacttggtgattctgaaagttttggtttttgtgactttgtttctcaggaaaaaaaatattcctacttaaattttaagtctataattcaatttaaatatgtgtgtgtctcatccaggataggataggttgtcttctattttccattttacctatttactttttttgtaagaaaaggagaaaaatgaatttctaaagatggtccccatg

SEQ ID NO: 1173 - DNA, 487 bp, Homo sapiens
aggtaccgctgtgtccgggtgggtggtcagaatgccgtgctccaggtgttcacagctgcttcgtggaagaccatgtgctccgatgactggaagggtcactacgcaaatgttgcctgtgcccaactgggtttcccaagctatgtgagttcagataacctcagagtgagctcgctggaggggcagttccgggaggagtttgtgtccatcgatcacctcttgccagatgacaaggtgactgcattacaccactcagtatatgtgagggagggatgtgcctctggccacgtggttaccttgcagtgcacagcctgtggtcatagaaggggctacagctcacgcatcgtgggtggaaacatgtccttgctctcgcagtggccctggcaggccagccttcagttccagggctaccacctgtgcgggggctctgtcatcacgcccctgtggatcgtcactgctgcacactgtgtttatgacttgtacctgcccg

SEQ ID NO: 1174 - DNA, 488 bp, Homo sapiens
  misc_feature 43, 456: n = A,T,C or G
aggtaccgctgtgtccgggtgggtggtcagaatgccgtgctcnaggtgttcacagctgcttcgtggaagaccatgtgctccgatgactggaagggtcactacgcaaatgttgcctgtgcccaactgggtttcccaagctatgtgagttcagataacctcagagtgagctcgctggaggggcagttccgggaggagtttgtgtccatcgatcacctcttgccagatgacaaggtgactgcattacaccactcagtatatgtgagggagggatgtgcctctggccacgtggttaccttgcagtgcacagcctgtggtcatagaaggggctacagctcacgcatcgtgggtggaaacatgtccttgctctcgcagtggccctggcaggccagccttcagttccagggctaccacctgtgcgggggctctgtcatcacgcccctgtggatcgtcactgcntgcacactgtgtttatgacttgtacctgcccg

SEQ ID NO: 1175 - DNA, 487 bp, Homo sapiens
  misc_feature 42, 43, 455: n = A,T,C or G
aggtaccgctgtgtccgggtgggtggtcagaatgccgtgctnnaggtgttcacagctgcttcgtggaagaccatgtgctccgatgactggaagggtcactacgcaaatgttgcctgtgcccaactgggtttcccaagctatgtgagttcagataacctcagagtgagctcgctggaggggcagttccgggaggagtttgtgtccatcgatcacctcttgccagatgacaaggtgactgcattacaccactcagtatatgtgagggagggatgtgcctctggccacgtggttaccttgcagtgcacagcctgtggtcatagaaggggctacagctcacgcatcgtgggtggaaacatgtccttgctctcgcagtggccctggcaggccagccttcagttccagggctaccacctgtgcgggggctctgtcatcacgcccctgtggatcgtcactgntgcacactgtgtttatgacttgtacctgcccg

SEQ ID NO: 1176 - DNA, 639 bp, Homo sapiens
  misc_feature 39, 455: n = A,T,C or G
ccgggcaggtacaacaagcgtttgtaatgtttcccaaanattagctttgaaatccaaatgtcaagcaattaaagttcaaaaaactataaatgtaattgttaataaaacaatggatgaaaaaagtcattgaaatttttttctacttggattaagaacataaattaaaagtgcaactgcaaaaataatattagtttgataagtaaaataaaacaaactagatatattttgaaaataaaaaacaaatgaaacaaaataaaatttaggtaaagaaaattcaacgtaatttgttgtagctatattttttgtaataattacaaaagtagaaataatagctcataaagcaaaaacaaaatttattctatgttctttttttcagtcaattcagaattttagcttcatatttgaagcatttttttctaattttgtttgtgaatttgaatttgtttgcggatttngatttgccataaaaatattatattttatttaattatattaatcttcgtcagctttaattgctctttctttaacaatttgatctgaaatttgttttggtgttatttcatagtgatcaaattgcatttgataagttccacgacctgatgtcatagaccttaattgtgttgagtatccaaacatttc

SEQ ID NO: 1177 - DNA, 543 bp, Homo sapiens
  misc_feature 88, 107, 118, 160, 166, 169, 192, 195, 205, 216, 256, 295,320, 323, 344, 351, 364, 367, 389, 397, 410, 414, 430, 468,493, 504, 511, 513, 516, 517, 524: n = A,T,C or G
tagggcgaattggactccaccgcggtggcggccgcccgggcaggtacctacggaaatcctaactaccactggcaggaaactgcatatnttctggtttacatgaaganggagggctaanggaaatgcccaaaaccttcagagattgacaccgctgtcattntccatntcngttcctggaatctaccgggagtnttnataagaaganttttgcaaatngagggaagaagcaattgttttcaaactatataactggagnccttaatttataattaggggatatttaatcaaaaatatngtaaaccatggagggccccctcagngtnctggatcaggttcaagaaatngaaatgnttttcacccaagncangaccccggccatgtgggcatgntccgggtncctgggggtggcntcgnctggcttgtggcgaangaacaattaagccccttttaagtttattgaagccctgnggggaaactttaagggggtttccanagttgggggangaagcantnggnnagttggngaagggcattttggggggg

SEQ ID NO: 1178 - DNA, 465 bp, Homo sapiens
ggcgaattggagctccccgcggtggcggccgaggtaccaaatgaagtgtgaagacaaggccatccaccactttatagagggtgtaaaaataaaccagaaatcaagggagaaagaaaagatgaaagacaaactgcaaaaaattgccaaaatgcgactttctaaaaatggagcagattctgaggctttgcatgtcttggcattccttcaggagctgaatgaaaaaatgcaacaagcagatgaagactctgagaggggtttggagtctggaagcctcatcccttcagcatcaagctggaatggggaatgaagaatagagatgtggtgcccactaggctactgctgaaagggagctgaaattcctccaccaagttggtattcaaaatatgtaatgactggtatggcaaaagattggactaagacactggccataccactggacagggttatgttaacacctgaattgct

SEQ ID NO: 1179 - DNA, 433 bp, Homo sapiens
  misc_feature 150: n = A,T,C or G
ccgcggtggcggccgcccgggcaggtaccaaatgaagtgtgaagacaaggccatccaccactttatagagggtgtaaaaataaaccagaaatcaagggagaaagaaaagatgaaagacaaactgcaaaaaattgccaaaatgcgactttntaaaaatggagcagattctgaggctttgcatgtcttggcattccttcaggagctgaatgaaaaaatgcaacaagcagatgaagactctgagaggggtttggagtctggaagcctcatcccttcagcatcaagctggaatggggaatgaagaatagagatgtggtgcccactaggctactgctgaaagggagctgaaattcctccaccaagttggtattcaaaatatgtaatgactggtatggcaaaagattggactaagacactggccataccactggacagg

SEQ ID NO: 1180 - DNA, 407 bp, Homo sapiens
  misc_feature 93, 94: n = A,T,C or G
ccgcggtggcggccgcccgggcaggtacctattgccaggaagataggcagctcatctgtgtcctgtgtccagtcattggggctcaccagggcnnccaactctccaccctagacgaagcctttgaagaattaagaagcaaagactcaggtggactgaaggccgctatgatcgaattggtggaaaggttgaagttcaagagctcagaccctaaagtaactcgggaccaaatgaagatgtttatacagcaggaatttaagaaagttcagaaagtgattgctgatgaggagcagaaggcccttcatctagtggacatccaagaggcaatgaccacagctcatgtgactgagatactggcagacatccaatcccacatggataggttgatgactcaaatggcccaagccaag

SEQ ID NO: 1181 - DNA, 521 bp, Homo sapiens
gggcgaattggagctccccgcggtggcggccgaggtaccaaatgaagtgtgaagacaaggccatccaccactttatagagggtgtaaaaataaaccagaaatcaagggagaaagaaaagatgaaagacaaactgcaaaaaattgccaaaatgcgactttctaaaaatggagcagattctgaggctttgcatgtcttggcattccttcaggagctgaatgaaaaaatgcaacaagcagatgaagactctgagaggggtttggagtctggaagcctcatcccttcagcatcaagctggaatggggaatgaagaatagagatgtggtgcccactaggctactgctgaaagggagctgaaattcctccaccaagttggtattcaaaatatgtaatgactggtatggcaaaagattggactaagacactggccataccactggacagggtttatgttaacacctgaattgctgggtcttgagagagcccaaggagttctgggagagggacccagattgggggggta

SEQ ID NO: 1182 - DNA, 469 bp, Homo sapiens
  misc_feature 323: n = A,T,C or G
gggcgaattggagctccccgcggtggcggccgcccgggcaggtaccaaatgaagtgtgaagacaaggccatccaccactttatagagggtgtaaaaataaaccagaaatcaagggagaaagaaaagatgaaagacaaactgcaaaaaattgccaaaatgcgactttctaaaaatggagcagattctgaggctttgcatgtcttggcattccttcaggagctgaatgaaaaaatgcaacaagcagatgaagactctgagaggggtttggagtctggaagcctcatcccttcagcatcaagctggaatggggaatgaagaatagnagatgtggtgcccactaggctactgctgaaagggagctgaaattcctccaccaagttggtattcaaaatatgtaatgactggtatggcaaaagattggactaagacactggccataccactggacagggttatgttaacacctgaa

SEQ ID NO: 1183 - DNA, 607 bp, Homo sapiens
  misc_feature 582: n = A,T,C or G
tcctatagggcgaattggagctccccgcggtggcggccgaggtaccaaatgaagtgtgaagacaaggccatccaccactttatagagggtgtaaaaataaaccagaaatcaagggagaaagaaaagatgaaagacaaactgcaaaaaattgccaaaatgcgactttctaaaaatggagcagattctgaggctttgcatgtcttggcattccttcaggagctgaatgaaaaaatgcaacaagcagatgaagactctgagaggggtttggagtctggaagcctcatcccttcagcatcaagctggaatggggaatgaagaatagagatgtggtgcccactaggctactgctgaaagggagctgaaattcctccaccaagttggtattcaaaatatgtaatgactggtatggcaaaagattggactaagacactggccataccactggacagggtttatgttaacacctgaattgctgggtcttgagagagcccaaggagttctgggagagggaccagattggggggtaggtcccgggcttggtgatagaaatatttctcgatgactttcttgagtgcaatttgnactgtaacatttgcttaatcacctt

SEQ ID NO: 1184 - DNA, 491 bp, Homo sapiens
  misc_feature 109, 129, 180, 301, 354, 387, 429, 430: n = A,T,C or G
attggagctccccgcggtggcggccgaggtacaagatagtcatctcagtaaaaggtctattatctaacttgccaaacttgtttactgagagccctaaggaactaaaacngccataatgccgtgcacagnttgaaaagcaattagagtaagcaagattagtttttcctcccttccagtttnctcaagcaggcctggctgaaggcccaggagggaaggaaatataagaaccaacaataaaaatagcaatagcaataagaagaatgccatcccatggagcacaccataattctggaaccacctntcccggatcaggcttccattgctcacgatgctcacgctgggcagccgcaactntactttgcagaacctcaccaacttgcccaggtnttctccccggtcttgaagaaatggctctccacctgaaaagtnngatcttctccataccagcttcttaagcaaaagcaatcctctctttgcttcctcaaggggca

SEQ ID NO: 1185 - DNA, 403 bp, Homo sapiens
  misc_feature 9, 282, 312: n = A,T,C or G
tagggcganttggagctccccgcggtggcggccgaggtaccaaatgaagtgtgaagacaaggccatccaccactttatagagggtgtaaaaataaaccagaaatcaagggagaaagaaaagatgaaagacaaactgcaaaaaattgccaaaatgcgactttctaaaaatggagcagattctgaggctttgcatgtcttggcattccttcaggagctgaatgaaaaaatgcaacaagcagatgaagactctgagaggggtttggagtctggaagcctcatccnttcagcatcaagctggaatggggaatgaanaatagagatgtggtgcccactaggctactgctgaaagggagctgaaattcctccaccaagttggtattcaaaatatgtaatgactggtatg

SEQ ID NO: 1186 - DNA, 519 bp, Homo sapiens
gggcgaattggagctccccgcggtggcggccgaggtaccaaatgaagtgtgaagacaaggccatccaccactttatagagggtgtaaaaataaaccagaaatcaagggagaaagaaaagatgaaagacaaactgcaaaaaattgccaaaatgcgactttctaaaaatggagcagattctgaggctttgcatgtcttggcattccttcaggagctgaatgaaaaaatgcaacaagcagatgaagactctgagaggggtttggagtctggaagcctcatcccttcagcatcaagctggaatggggaatgaagaatagagatgtggtgcccactaggctactgctgaaagggagctgaaattcctccaccaagttggtattcaaaatatgtaatgactggtatggcaaaagattggactaagacactggccataccactggacagggttatgttaacacctgaattgctgggtcttgagagagcccaagggagttctgggagagggaccagattggggggta

SEQ ID NO: 1187 - DNA, 504 bp, Homo sapiens
ccgcggtggcggccgcccgggcaggtaccaaatgaagtgtgaagacaaggccatccaccactttatagagggtgtaaaaataaaccagaaatcaagggagaaagaaaagatgaaagacaaactgcaaaaaattgccaaaatgcgactttctaaaaatggagcagattctgaggctttgcatgtcttggcattccttcaggagctgaatgaaaaaatgcaacaagcagatgaagactctgagaggggtttggagtctggaagcctcatcccttcagcatcaagctggaatggggaatgaagaatagagatgtggtgcccactaggctactgctgaaagggagctgaaattcctccaccaagttggtattcaaaatatgtaatgactggtatggcaaaagattggactaagacactggccataccactggacagggttatgttaacacctgaattgctgggtcttgagagagcccaaggagttctgggagagggaccagattgggg

SEQ ID NO: 1188 - DNA, 386 bp, Homo sapiens
  misc_feature 28, 164, 334: n = A,T,C or G
ccgcggtggcggccgaggtacaagatantcatctcagtaaaaggtctattatctaacttgccaaacttgtttactgagagccctaaggaactaaaactgccataatgccgtgcacagcttgaaaagcaattagagtaagcaagattagtttttcctccctttcnaagtcctcagcaggcctggctgaaggcccaggagggaaggaaatataagaaccaacaataaaaatagcaatagcaataagaagaatgccatcccatggagcacaccataattctggaaccacctctcccggatcaggcttccattgctcacgatgctcacgctgggcagncgcaactctactttgcagaacctcaccaacttgcccaggtattctccccggt

SEQ ID NO: 1189 - DNA, 458 bp, Homo sapiens
tacttagggcgaattggagctccccgcggtggcggccgcccgggcaggtaccaaatgaagtgtgaagacaaggccatccaccactttatagagggtgtaaaaataaaccagaaatcaagggaggaagaaaagatgaaagacaaactgcaaaaaattgccaaaatgcgactttctaaaaatggagcagattctgaggctttgcatgtcttggcattccttcaggagctgaatgaaaaaatgcaacaagcagatgaagactctgagaggggtttggagtctggaagcctcatcccttcagcatcaagctggaatggggaatgaagaatagagatgtggtgcccactaggctactgctgaaagggagctgaaattcctccaccaagttggtattcaaaatatgtaatgactggtatggcaaaaagaattggactaaaacactggccatacccactggacag

SEQ ID NO: 1190 - DNA, 348 bp, Homo sapiens
agggcgaattggagctccccgcggtggcggccgcccgggcaggtacatggcgaagctagagactgtaacctgaagattgggacaaattaaagaaaaaaatgtgatttaacacaattacaaaaactgttacgttagggtcaaacaagaaccattttatgaaactgaattacaacaaatgacattatatctaactcttccgggtctccacaacacttatacttacttaagcagcttaaacacttccgagtctccacagcactctgatacttacttaaacagctcttttaacctgccctagtattcttaagtgcagcatatctaattttttttttcctcaagtagtttgaa

SEQ ID NO: 1191 - DNA, 471 bp, Homo sapiens
  misc_feature 40: n = A,T,C or G
tagggcgaattggagctccccgcggtggcggccgcccggncaggtaccaaatgaacgtgtgaagacaaggccatccaccactttatagagggtgtaaaaataaaccagaaatcaagggagaaagaaaagatgaaagacaaactgcaaaaaattgccaaaatgcgactttctaaaaatggagcagattctgaggctttgcatgtcttggcattccttcaggagctgaatgaaaaaatgcaacaagcagatgaagactctgagaggggtttggagtctggaagcctcatcccttcagcatcaagctggaatggggaatgaagaatagagatgtggtgcccactaggctactgctgaaagggagctgaaattcctccaccaagttggtattcaaaatatgtaatgactggtatggcaaaagattggactaagacactggccataccactggacagggttatgttaacacctgaa

SEQ ID NO: 1192 - DNA, 322 bp, Homo sapiens
  misc_feature 67, 89, 107, 178: n = A,T,C or G
cgaattggagctccccgcggtggcggccgcccgggcaggtaccaaatgaagtgtgaagacaaggccntccaccactttatagagggtgnaaaaataaaccagaaatnaagggagaaagaaaagatgaaagacaaactgcaaaaaattgccaaaatgcgactttctaaaaatggagcanattctgaggctttgcatgtcttggcattccttcaggagctgaatgaaaaaatgcaacaagccgatgaagactctgagaggggtttggagtctggaagcctcatcccttcagcatcaagctggaatggggaatgaagaatagaga

SEQ ID NO: 1193 - DNA, 443 bp, Homo sapiens
tgggcgaattggagctccccgcggtggcggccgaggtaccaaatgaagtgtgaagacaaggccatccaccactttatagagggtgtaaaaataaaccagaaatcaagggagaaagaaaagatgaaagacaaactgcaaaaaattgccaaaatgcgactttctaaaaatggagcagattctgaggctttgcatgtcttggcattccttcaggagctgaatggaaaaatgcaacaagcagatgaagactctgagaggggtttggagtctggaagcctcatcccttcagcatcaagctggaatggggaatgaagaatagagatgtggtgcccactaggctactgctgaaagggagctgaaattcctccaccaagttggtattcaaaatatgtaatgactggtatggcaaaagattggactaagacactggccataccactggacag

SEQ ID NO: 1194 - DNA, 433 bp, Homo sapiens
  misc_feature 1, 109, 162, 190, 208, 213, 262, 315, 371, 373: n = A,T,C or G
nggcgaattggagctccccgcggtggcggccgaggtacacataaatcacctggaaccttgttaaaatgcagatcctgactcaggaggtctgagttagagcccaggattncatatttctagccagctccatgatgagctgctggtccgcagatcatgcttgcnggttttgaccagagtcagtgttggttanagtaagaggatgaggcanacatntgggaaaagtccagctggggcaagcatttgaagtctgccttcctaccangtcaaaatcaaggcaacgaccttccatagataactatcaaagcttgagggggngccttgaacccaactcctaaatccctaagacctgcccacctcttgtgtctcctgtntnagcaaacattcccacactcttgcatattgttaaaagtaacctctgcttaccaggcttttg

SEQ ID NO: 1195 - DNA, 306 bp, Homo sapiens
  misc_feature 111, 114: n = A,T,C or G
gcgaattggagctccccgcggtggcggccggcccggggggtgtccgaacaaggcaggttggtgggttaaggtcttaatcttgactcgagatctctctccggagttcacagngtnggcgacgaagccgaagcagctggagcgcgacccggaggagtctgacttctcgttgtcttcataattttcattcgttgctttcttcgtggacttgcggctgggggaggatccccgctggtcgccgagcaggcgggcgggtaaaggtaggccgccgagagcgaggttaggagaggagaggaggccgcagtacct

SEQ ID NO: 1196 - DNA, 367 bp, Homo sapiens
attggagctccccgcggtggcggccgcccgggcaggtacgcggggaggaggcggaagcgcagcgggggcgggaaggttgtagtgccgcgagttgagctcctcttgcctaagtggtcgcgccccctttaagagcagcgattgtaaggagaggcggtcccggtgtcctcgggtcccaggtgattgtgaagtgctgaccaattgccactggacatacttgaaacaaaataggaaaatggcagcaaaccctgtctctaaatcaatcaatcaagcgagccagaatgcagtagtggcctgagagaggcatcctggaacgcagtgcggtctggctaggcttagaagtattcatgtgatttttacctgacaaggg

SEQ ID NO: 1197 - DNA, 356 bp, Homo sapiens
agggcgaattggagctccccgcggtggcggccgcccgggcaggtaccaaatgaagtgtgaagacaaggccatccaccactttatagagggtgtaaaaataaaccagaaatcaagggagaaagaaaagatgaaagacaaactgcaaaaaattgccaaaatgcgactttctaaaaatggagcagattctgaggctttgcatgtcttggcattccttcaggagctgaatgaaaaaatgcaacaagcagatgaagactctgagaggggtttggagtctggaagcctcatcccttcagcatcaagctggaatggggaatgaagaatagagatgtggtgcccactaggctactgctgaaagg

SEQ ID NO: 1198 - DNA, 451 bp, Homo sapiens
atagggcgaattggagctccccgcggtggcggccgcccgggcaggtacgcggggagagcgagcttcggagaagcagtggtgggttccatgtggtggtggagtaggaggcaggtctccgcggtggtttccacaagaaaaatggcacaatgtttctcagaagacaattacataagaatcagcatactttaaattcacagcaaataatcagacaattgatgaaaatacttacccaaacactaattgtagactgtgccttctgaatatgttttgtcataaacttggagtaaggaatcctcacaggcactggacaattcaaaaaacgtaaagtttgtttgttagaatacctgggtgcttttggatagaaaccctcatccatatcctggtaaggcttgaagttgcacaggagttttcatttgtcaaaacccagaaaaccataagctttagatttggg

SEQ ID NO: 1199 - DNA, 299 bp, Homo sapiens
  misc_feature 150, 263, 265, 276: n = A,T,C or G
ccgcggtggcggccgcccgggcaggtaccaaatgaagtgtgaagacaaggccatccaccactttatagagggtgtaaaaataaaccagaaatcaagggagaaagaaaagatgaaagacaaactgcaaaaaattgccaaaatgcgactttntaaaaatggagcagattctgaggctttgcatgtcttggcattccttcaggagctgaatgaaaaaatgcaacaagcagatgaagactttgagaggggtttggagtctggaaccntnatcctttcacnttcaacttgaaatggggaatgaa

SEQ ID NO: 1200 - DNA, 386 bp, Homo sapiens
  misc_feature 43, 114, 155, 178, 234, 281, 336, 338, 353, 373: n = A,T,C or G
agggcgaattggagctccccgcggtggcggccgaggtaccaantgaagtgtgaagacaaggccatccaccactttatagagggtgtaaaaataaaccataaatcaagggagaangaaaagatgaaagacaaactgcaaaaaattgccaaaatgcngactttctaaaaatggagcagantctgaggctttgcatgtcttggcattcttcaagagctgaatgaaaaaatgcaacangcagatgaagactctgagaggggtttggagtctggaagcctcatccnttcagcatcaagctggaatggggaatgaagaatatagatgtggtgcccactaggntnctgctgaaagggagntgaaattcctccaccaagtnggtattcaaaata

SEQ ID NO: 1201 - DNA, 280 bp, Homo sapiens
ttagggcgaattggagctccccgcggtggcggccgcccgggcacggtacgcgggggtaactgaaaatccacaagacagaatagccagatctcagaggagcctggctaagcaaaaccctgcagaacggctgcctaatttacagcaaccatgaggccacttaaggatgcagcaagaaggagccatctgcaatccaggaagaaattccttgccaggaaccaaattggttgtcaccttcatctaggacttctagcctcgagaacttacaaatggtgatgatcat

SEQ ID NO: 1202 - DNA, 413 bp, Homo sapiens
  misc_feature 106, 107, 178, 241: n = A,T,C or G
tatagggcgaattggagctccccgcggtggcggccgaggtaccaaatgaagtgtgaagacaaggccatccaccactttatagagggtgtaaaaataaaccataaannaagggagaaagaaaagatgaaagacaaactgcaaaaaattgccaaaatgcgactttctaaaaatggagcanattctgaggctttgcatgtcttggcattccttcaggagctgaatgaaaaaatgcaacaagcanatgaagactctgagaggggtttggagtctggaagcctcatcccttcagcatcaagctggaatggggaatgaagaatagagatgtggtgcccactaggctactgctgaaagggagctgaaattcctccaccaagttggtattcaaaatatgtaatgactggtatggcaaaaag

SEQ ID NO: 1203 - DNA, 513 bp, Homo sapiens
  misc_feature 344, 404: n = A,T,C or G
agggcgaattggagctccccgcggtggcggccgcccgggcaggtacaatataaaataatacatatgaagccacaatattcaattacagttcaaactagaaattactaactacatgtagctgcttcatttttcgttttgcattttggcccctaattcatatttacaactgatacctgctgagaaaaagatccaaacttttaaactttgtatgttttgtggagggtgcacaatttcttctaatatatcttcaggtgttttaaaatttaatttgtttttaatcataagatatcatcatggccaagagactgggaaaataacaattttattctttctcctaagattgngattttattattccaagatcttatgcttgaattacttagcaagaaggcatgattatgcanaagacagggaaatgaagagaaaagagcgggaatatacgaaaatgaagcttccttaacagagttcatggtggagatggtagacactggtggagtttttttccagacttaa

SEQ ID NO: 1204 - DNA, 358 bp, Homo sapiens
  misc_feature 155: n = A,T,C or G
tcgagcggccgcccgggcaggtacactctaaagaaagccatgaggatgataatccactttgatacttccaatctgctggtcttgctgaactctttggatcatggatatcataagttcgacaaaatattttttttgtagaagcacaaatgtgaagngtcactcgttctgagacttcctcctctgtgaaattccacaatctctttctatttatagacttttccacagcaaacattagtctacgcagagcattttgaaaatcatttgccagttctaaagtagtaataataaatactccaagaactaaaagtccccctggtagcattctggatacctggcaggcatgttctgtggcccattc

SEQ ID NO: 1205 - DNA, 352 bp, Homo sapiens
  misc_feature 1, 2, 4: n = A,T,C or G
nngncctttcgagcggccgcccgggcaggtaccaaatgaagtgtgaagacaaggccatccaccactttatagagggtgtaaaaataaaccagaaatcaagggagaaagaaaagatgaaagacaaactgtaaaaaattgccaaaatgcgactttctaaaaatggagcagattctgaggctttgcatgtcttggcattccttcaggagctgaatgaaaaaatgcaacaagcagatgaagactctgagaggggtttggagtctggaagcctcatcccttcagcatcaagctggaatggggaatgaagaatagagatgtggtgcccactaggctactgctgaaagggagctgaaat

SEQ ID NO: 1206 - DNA, 347 bp, Homo sapiens
  misc_feature 158: n = A,T,C or G
agcgtggtcgcggccgaggtacataaaacattattccttccttggcctaaaaactcatcgccacctacattaaagctaatatgcctgattactgtttttagagaacttattttattagggcagttccaagctcaaaaatacgctaactggcaccttgntagctacataaaaatgcaccctagacccgaaacttactagactcattataaaattttctttaaggtgtccacgcagtccctggtcacacttgaagcagtccggagaaatatcagccctaccccagtaatccccagaaggaacttacacttttttttaatcttttcctacaacttcatattttataaata

SEQ ID NO: 1207 - DNA, 506 bp, Homo sapiens
cccttagcgtggtcgcggccgaggtaccatctaggtcagtttaagaagagtcagctcagagaaagcaagcataagggaaaatgtcacgtaaactagatcagggaacaaaatcctctccttgtggaaatatcccatgcagtttgttgatacaacttagtatcttattgcctaaaaaaaaaatttcttatcattgtttcaaaaaagcaaaatcatggaaaatttttgttgtccaggcaaataaaaggtcattttaatttagctgcaatttcagtgttcctcactaggtggcatttaaatgtcgcctgatgtcattaagcaccatccaaaaagtctgcttcataatctattttcaagacttggtgattctgaaagttttggtttttgtgactttgtttctcaggaaaaaaatattcctacttaaattttaagtctataattcaatttaaatatgtgtgtgtctcatccaggataggatagggttgtcttctattttccattttacctat

SEQ ID NO: 1208 - DNA, 405 bp, Homo sapiens
  misc_feature 92, 166, 229: n = A,T,C or G
ccctttcgagcggcccgcccgggcaggtaccaaatgaagtgtgaagacaaggccatccaccactttatagagggtgtaaaaataaaccaganatcaagggagaaagaaaagatgaaagacaaactgcaaaaaattgccaaaatgcgactttctaaaaatggagcanattctgaggctttgcatgtcttggcattccttcaggagctgaatgaaaaaatgcaacaagcanatgaagactctgagaggggtttggagtctggaagcctcatcccttcagcatcaagctggaatggggaatgaagaatagagatgtggtgcccactaggctactgctgaaagggagctgaaattcctccaccaagttggtattcaaaatatgtaatgactggtatggcaaaagattgg

SEQ ID NO: 1209 - DNA, 406 bp, Homo sapiens
  misc_feature 113, 128, 215, 251, 274, 327, 361, 374: n = A,T,C or G
aggtaccaaatgaagtgtgaagacaaggccatccaccactttatagagggtgtaaaaataaaccagaaatcaagggagaaagaaaagatgaaagacaaactgcaaaaaattgncaaaatgcgactttntaaaaatggagcagattctgaggctttgcatgtcttggcattccttcaggagctgaatgaaaaaatgcaacaagcagatgaagactntgagaggggtttggagtctggaagcctcatcccttnagcatcaagctggaatggggaangaagaatagagatgtggtgcccactaggctactgctgaaagggagctgaaatntccttccacccaagttggtatttcaaaatatgtnattgactggatangggcaaaaaggatttggactaagacactgggc

SEQ ID NO: 1210 - DNA, 317 bp, Homo sapiens
  misc_feature 220, 308: n = A,T,C or G
gcggtggcggccgaggtaccaaatgaagtgtgaagacaacggccatccaccactttatagacgggtgtaaaaataaaccagaaatcaagggagaaagaaaagatgaaagacaaactgcaaaaaattgccaaaatgcgactttctaaaaatggagcataattctgaggctttgcatgtcttggcattccttcaggagctgaatgaaaaaatgcaacaagcngatgaagactctgagaggggtttggagtctggaagcctcatcccttcagcatcaagctggaatggggaatgaagaatagagatgtggngcccactag

SEQ ID NO: 1211 - DNA, 286 bp, Homo sapiens
  misc_feature 7, 23, 46, 82, 95, 111, 123, 129, 135, 172, 188, 191, 203,204, 208, 209, 210, 218, 219, 261, 267: n = A,T,C or G
cggaaanttggggggcccccttncttaagaaaaggccattggcttnccgaaggcgggggccccgccccaagttggttggaantgggggattattnctttggccaagaaaantttccggggggngttttnaagggngggggggggggcccccccgggccccccaaaaggggtnaacccccctggggggnaanagggggggaaanntttnnnaaaccggnnaaaaaacccccccagggggggccccccggggggggaaaaaancccccngggggggaaacccccccgg

SEQ ID NO: 1212 - DNA, 533 bp, Homo sapiens
  misc_feature 5: n = A,T,C or G
gactnctatagggcgaattggagctccccgcggtggcggccgaggtaccaaatgaagtgtgaagacaaggccatccaccactttatagagggtgtaaaaataaaccagaaatcaagggagaaagaaaagatgaaagacaaactgcaaaaaattgccaaaatgcgactttctaaaaatggagcagattctgaggctttgcatgtcttggcattccttcaggagctgaatgaaaaaatgcaacaagcagatgaagactctgagaggggtttggagtctggaagcctcatcccttcagcatcaagctggaatggggaatgaagaatagaagatggtggtgcccactaggctactgctgaaagggagctgaaattcctccccaaggttgggtattcaaaatatgtaatgactgggtatggcaaaagattggactaagacactggccataccactggacagggttatgttaacacctgaattgctgggtcttgagagagcccaaaggagttctgggagagggaccagatgggggggta

SEQ ID NO: 1213 - DNA, 421 bp, Homo sapiens
ccgcggtggcggccgaggtaccaaatgaagtgtgaagacaaggccatccaccactttatagagggtgtaaaaataaaccagaaatcaagggagaaagaaaagatgaaagacaaactgcaaaaaattgccaaaatgcgactttctaaaaatggagcagattctgaggctttgcatgtcttggcattccttcaggagctgaatgaaaaaatgcaacaagcagatgaagactctgagaggggtttggagtctggaagcctcatcccttcagcatcaagctggaatggggaatgaagaatagagatgtggtgcccactaggctactgctgaaagggagctgaaattcctccaccaagttggtattcaaaatatgtaatgactggtatggcaaaagattggactaagacactggccataccactgg

SEQ ID NO: 1214 - DNA, 475 bp, Homo sapiens
tacttagggcgaattggagctccccgcggtggcggccgcccgggcaggtaccaaatgaagtgtgaagacaaggccatccaccactttatagagggtgtaaaaataaaccagaaatcaagggagaaagaaaagatgaaagacaaactgcaaaaaattgtcaaaatgcgactttctaaaaatggagcagattctgaggctttgcatgtcttggcattccttcaggagctgaatgaaaaaatgcaacaagcagatgaagactctgagaggggtttggagtctggaagcctcatcccttcagcatcaagctggaatggggaatgaagaatagagatgtggtgcccactaggctactgctgaaagggagctgaaattcctccaccaagttggtattcaaaatatgtaatgactggtatggcaaaagattggactaagacactggccataccactggacagggttatgttaacacctgaat

SEQ ID NO: 1215 - DNA, 410 bp, Homo sapiens
tacttagggcgattggagctccccgcggtggcggccgaggtaccaaatgaagtgtgaagacaaggccatccaccactttatagagggtgtaaaaataaaccagaaatcaagggagaaagaaaagatgaaagacaaactgcaaaaaattgccaaaatgcgactttctaaaaatggagcagattctgaggctttgcatgtcttggcattccttcaggagctgaatgaaaaaatgcaacaagcagatgaagactctgagaggggtttggagtctggaagcctcatcccttcagcatcaagctggaatggggaatgaagaatagagatgtggtgcccactaggctactgctgaaagggagctgaaattcctccaccaagttggtattcaaaatatgtaatgactggtatggcaa

SEQ ID NO: 1216 - DNA, 524 bp, Homo sapiens
  misc_feature 449, 493: n = A,T,C or G
cactacttagggcgaattggagctccccgcggtggcggccgaggtaccaaatgaagtgtgaagacaaggccatccaccactttatagagggtgtaaaaataaaccagaaatcaagggagaaagaaaagatgaaagacaaactgcaaaaaattgccaaaatgcgaccttctaaaaatggagcagattctgaggctttgcatgtcttggcattccttcaggagctgaatgaaaaaatgcaacaagcagatgaagactctgagaggggtttggagtctggaagcctcatcccttcagcatcaagctggaatggggaatgaagaatagaagattgtggtgcccactaggctactgctgaaagggagctgaaattcctccccaaggttggtattcaaaatatgtaatgactggtatggcaaaagattggactaagacactggccataccactgncagggttatgttaacacctgaattgctgggtcttgagagagccnaaggagttctgggagagggaccagatggggg

SEQ ID NO: 1217 - DNA, 433 bp, Homo sapiens
ccgcggtggcggccgaggtaccaaatgaagtgtgaagacaaggccatccaccactttatagagggtgtaaaaataaaccagaaatcaagggagaaagaaaagatgaaagacaaactgcaaaaaattgccaaaatgcgactttctaaaaatggagcagattctgaggctttgcatgtcttggcattccttcaggagctgaatgaaaaaatgcaacaagcagatgaagactctgagaggggtttggagtctggaagcctcatcccttcagcatcaagctggaatggggaatgaagaatagagatgtggtgcccactaggctactgctgaaagggagctgaaattcctccccaagttggtattcaaaatatgtaatgactggtatggcaaaagattggactaagacactggccataccactggcagggttatgtta

SEQ ID NO: 1218 - DNA, 400 bp, Homo sapiens
  misc_feature 171, 186, 334: n = A,T,C or G
ccgcggtggcggccgaggtacttcttacagtcttcaggaaattcattaaatcagtgcctccagttcctttggcttccagttttgaagggtcttcagaggtcttattctcctttggctgctggcttgcaggaatcaggatgtactgttcctgttggccgagtggagactggngttctcaaacccggnatggtggtcacctttgctccagtcaacgttacaacggaagtaaaatctgtcgaaatgcaccatgaagctttgagtgaagctcttcctggggacaatgtgggcttcaatgtcaagaatgtgtctgtcaaggatgttcgtcggggcaacnttgctggtgacagcaaaaatgacccaccaatggaagcagctggcttcactgctcagggtgattatc

SEQ ID NO: 1219 - DNA, 535 bp, Homo sapiens
  misc_feature 129, 213, 228, 246, 255, 258, 267, 276, 277, 280, 284, 293,297, 300, 302, 312, 315, 316, 317, 334, 336, 338, 356, 359,363, 376, 381, 388, 390, 400, 404, 409, 410, 421, 422, 423,426, 451, 455, 503, 512, 518, 521: n = A,T,C or G
ccgcggtggcggccgcccgggcaggtaccctgatgctacagacgaggacatcacctcacacatggaaagcgaggagttgaatggtgcatacaaggccatccccgttgcccaggacctgaacgcgccttntgattgggacagccgtgggaaggacagttatgaaacgagtcagctggatgaccagagtgctgaaacccacagccacaagcagtncagattatataagcnggaaagcttattgattanaagcaatgngcntttccgatntgattgatnngtnaagnaactttttnaaangtnanccctgaattnccnnnacccaattaaatttttncnancccctttaaaaaattttnctngggntggggcccccccnaaaanttagggnanaaaaaatatnaaanccccnnaaaatattttnnnttnttttctaaaaaaaataaaaaacccncccnttttttggggggggcatttaaaagggggaaaaaaaattccaatttttncccttttcnttttanccnaaaaaaaaaaaaat

SEQ ID NO: 1220 - DNA, 422 bp, Homo sapiens
ccgcggtggcggccgaggtacattggcacgtcacgatgtcttgagtttcattcactaggtggcagcctgcatcgttccactgcaaatgactgaaatcccaaaacacacaatgaggctggctcaggtttgactctatcttggaaaaaaataggaaaacttcatttatggaatagttttgaataaccgtggatatcacaggtccattgacctgagcatttccatttttggaaacgggtagaatgttccccagagtcaacgaggccatgctgataatagtttctggaagggatctctggaattggtctgacccaattaacacacggcctctgatgggaatagatgtattttggggacacattttaatctgatagctgtaaccccttttgagttggcttttgttcactggaatccctttccagtca

SEQ ID NO: 1221 - DNA, 437 bp, Homo sapiens
  misc_feature 8: n = A,T,C or G
atagggcnaattggagctccccgcggtggcggccgaggtaccaaatgaagtgtgaagacaaggccatccaccactttatagagggtgtaaaaataaaccagaaatcaagggagaaagaaaagatgaaagacaaactgcaaaaaattgccaaaatgcgactttctaaaaatggagcagattctgaggctttgcatgtcttggcattccttcaggagctgaatgaaaaaatgcaacaagcagatgaagactctgagaggggtttggagtctggaagcctcatcccttcagcatcaagctggaatggggaatgaagaatagagatgtggtgcccactaggctactgctgaaagggagctgaaattcctccaccaagttggtattcaaaatatgtaatgactgggtatggcaaaagattggactaagacactggccatacc

SEQ ID NO: 1222 - DNA, 416 bp, Homo sapiens
  misc_feature 305: n = A,T,C or G
ccgcggtggcggccgcccgggcaggtaccaaatgaagtgtgaagacaaggccatccaccactttatagagggtgtaaaaataaaccagaaatcaagggagaaagaaaagatgaaagacaaactgcaaaaaattgccaaaatgcgactttctaaaaatggagcagattctgaggctttgcatgtcttggcattccttcaggagctgaatgaaaaaatgcaacaggcagatgaagactctgagaggggtttggagtctggaagcctcatcccttcagcatcaagctggaatggggaatgaagaatgnagatgtggtgcccactaggctactgctgaaagggagctgaaattcctccccaaggttgggtattcaaaatatgtaatgactgggtatggcaaaagattgggactaagacac

SEQ ID NO: 1223 - DNA, 324 bp, Homo sapiens
  misc_feature 65, 219: n = A,T,C or G
cgactcctatagggcgaattggagctccccgcggtggcggccgcccgggcaggtaccaaatgaangtgtgaagacaaggccatccaccactttatagagggtgtaaaaataaaccagaaatcaagggagaaagaaaagatgaaagacaaactgcaaaaaattgccaaaatgcgactttctaaaaatggagcagattctgaggctttgcatgtcttggcnttccttcaggagctgaatgaaaaaatgcaacaagcagatgaagactctgagaggggtttggagtctggaagcctcatcccttcagcatcaagctgggaatggggg

SEQ ID NO: 1224 - DNA, 505 bp, Homo sapiens
  misc_feature 475: n = A,T,C or G
ccgcggtggcggccgcccgggcaggtaccaaatgaagtgtgaagacaaggccatccaccactttatagagggtgtaaaaataaaccagaaatcaagggagaaagaaaagatgaaagacaaactgcaaaaaattgccaaaatgcgactttctaaaaatggagcagattctgaggctttgcatgtcttggcattccttcaggagctgaatgaaaaaatgcaacaagcagatgaagactctgagaggggtttggagtctggaagcctcatcccttcagcatcaagctggaatggggaatgaagaatagagatgtggtgcccactaggctactgctgaaagggagctgaaattcctccaccaagttggtattcaatatgtaatgactggtatggcaaaagattggactaagacactggccataccactggacagggttatgttaacacctggaattgctgggtcttgagagagcccaanggagttctggggagagggaccagattgggg

SEQ ID NO: 1225 - DNA, 507 bp, Homo sapiens
  misc_feature 451, 476, 483: n = A,T,C or G
ccgcggtggcggccgaggtaccaaatgaagtgtgaagacaaggccatccaccactttatagagggtgtaaaaataaaccagaaatcaagggagaaagaaaagatgaaagacaaactgcaaaaaattgccaaaatgcgactttctaaaaatggagcagattctgaggctttgcatgtcttggcattccttcaggagctgaatgaaaaaatgcaacaagcagatgaagactctgagaggggtttggagtctggaagcctcatcccttcagcatcaagctggaatggggaatgaagaacagaagatgtggtgcccactaggctactgctgaaagggagctgaaattcctccaccaaggttgggtattcaaaatatgtaatgactggtatggcaaaagattgggactaaagacactggccataccactggacagggtttatgttaacacctgaantgctggggtcttgagagagcccaangagtttnggagagggccagatgggggggtag

SEQ ID NO: 1226 - DNA, 437 bp, Homo sapiens
aggtaccaaatgaagtgtgaagacaaggccatccaccactttatagagggtgtaaaaataaaccagaaatcaagggagaaagaaaagatgaaagacaaactgcaaaaaattgccaaaatgcgactttctaaaaatggagcagattctgaggctttgcatgtcttggcattccttcaggagctgaatgaaaaaatgcaacaagcagatgaagactctgagaggggtttggagtctggaagcctcatcccttcagcatcaagctggaatggggaatgaagaatagaagatgtggtgcccactaggctactgctgaaagggagctgaaattcctccaccaagttggtattcaaaatatgtaatgactggtatggcaaaagattggactaagacactggccataccactggacagggttatgttaacacctgaattgctgg

SEQ ID NO: 1227 - DNA, 367 bp, Homo sapiens
tagggcgaattggagctccccgcggtggcggccgaggtacttccaggaagtgaagtaaaacctggtcttggttgataggccccaggttggcttggagccattccaggttgagaggcaggagccacagtataattagtaggctgagaagtttgggcagtgtaagtttgtgcaggataattgctcgcctggtactcttggaagtccacctcgttgtccctgttgctgtccaagttgctcatcagcttctggaaagcagcttcacctgtccttttccccaagaagctgggcagctcccgggtcagcagctcctttagttctgacttgttgagcttgaacttgtcaccctctttgcccgagtacctgcccg

SEQ ID NO: 1228 - DNA, 524 bp, Homo sapiens
  misc_feature 448: n = A,T,C or G
actacttagggcgaattggagctccccgcggtggcggccgaggtaccaaatgaagtgtgaagacaaggccatccaccactttatagagggtgtaaaaataaaccagaaatcaagggagaaagaaaagatgaaagacaaactgcaaaaaattgccaaaatgcgactttctaaaaatggagcagattctgaggctttgcatgtcttggcattccttcaggagctgaatgaaaaaatgcaacaagcagatgaagactctgagaggggtttggagtctggaagcctcatcccttcagcatcaagctggaatggggaatgaagaatagaagatgtggtgcccactaggctactgctgaaagggagctgaaattcctccaccaagttggtattcaaaatatgtaatgactgggtatggcaaaagattggactaagacactggccataccactgncagggttatgttaacacctgaattgctgggtcttgagagagcccaaggagttctgggagagggaccaaatgggggg

SEQ ID NO: 1229 - DNA, 425 bp, Homo sapiens
  misc_feature 101, 118: n = A,T,C or G
tagggcgaattggagctccccgcggtggcggccgcccgggcaggtaccaaatgaagtgtgaagacaaggccatccaccactttatagagggtgtaaaaatnaaccagaaatcaagggngaaagaaaagatgaaagacaaactgcaaaaaattgccaaaatgcgactttctaaaaatggagcagattctgaggctttgcatgtcttggcattccttcaggagctgaatgaaaaaatgcaacaagcagatgaagactctgagaggggtttggagtctggaagcctcatcccttcagcatcaagctggaatggggaatgaagaatagagatgtggtgcccactaggctactgctgaaagggagctgaaattcctccaccaagttggtattcaaaatatgtaatgactggtatggcaaaagattggact

SEQ ID NO: 1230 - DNA, 521 bp, Homo sapiens
  misc_feature 197, 215, 218, 224, 231, 238, 240, 245, 246, 249, 252, 253,259, 261, 263, 274, 276, 279, 285, 286, 287, 288, 289, 290,292, 313, 324, 330, 332, 333, 334, 335, 340, 351, 352, 354,356, 357, 359, 360, 363, 366, 370, 371, 374, 382, 394: n = A,T,C or G
  misc_feature 412, 413, 429, 434, 435, 456, 457, 469, 476, 480, 482, 495,498, 502, 503, 506: n = A,T,C or G
tagggcgaattggagctccccgcggtggcggccgcccgggcaggtacgcggggggtcttctagtccggtaaacagagggcctgcccccgacagcttctgcttccgggtcacgccttgacagcggctttcaacccccacctcagcccagcaattcgtttggagcatgtgaacaccttgagccttgatgagttccagtntgtggtatattatgcagngcnttcagngaaaatnctttttntncgggnnttnaannaaaaanantngggtgccatgntnttncccccnnnnnntngggggggggcccccctcaaanggggggggggnactatnannnnccctnttttttggggnncnanntnnacnccntttnnttngggccccnttttttgggggnaaaaaaaccccccccctnnggggggggtattttcnttttnngaaaaaaaaaggccccggggnngacccccccccnggtgggnttananaaaaaaaaaaaantcncccnnttntttttttttttaaaa

SEQ ID NO: 1231 - DNA, 376 bp, Homo sapiens
aggtacgcggggcttttccgtgctacctgcagaggggtccatacggcgttgttctggattcccgtcgtaacttaaagggaaattttcacaatgtccggagcccttgatgtcctgcaaatgaaggaggaggatgtccttaagttccttgcagcaggaacccacttaggtggcaccaatcttgacttccagatggaacagtactcttggaagtccacctcgttgtccctgttgctgtccaagttgctcatcagcttctggaaagcagcttcatctgtccttttccccaagaagctgggcagctcccgggtcagcagctcctttagttctgacttgttgagcttgaacttgtcaccctctttgcccgagtacctgcccg

SEQ ID NO: 1232 - DNA, 255 bp, Homo sapiens
tacttagggcgaattggagctccccgcggtggcggccgcccgggcaggtacgcggggaaacaaaaaggaaccagaggccacttgtatatataggtctcttcagcatttattggtggcagaagaggaagatttctgaagagtgcagctgcctgaaccgagccctgccgaacagctgagaattgcactgcaaccatgagtgagaacaataagaattccttggagagcagcctacggcaactaaaatgccatttcacc

SEQ ID NO: 1233 - DNA, 407 bp, Homo sapiens
  misc_feature 3, 40, 81, 273, 358, 368, 395: n = A,T,C or G
gcnattggagctccccgcggtggcggccgaggtaccaaantgaagtgtgaagacaaggccatccaccactttatagagggngtaaaaataaaccagaaatcaagggagaaagaaaagatgaaagacaaactgcaaaaaattgccaaaatgcgactttctaaaaatggagcagattctgaggctttgcatgtcttggcattccttcaggagctgaatgaaaaaatgcaacaagcagatgaagactctgagaggggtttggagtctggaagcctnatcccttcagcatcaagctggaatggggaatgaagaatagagatgtggtgcccactaggctactgctgaaagggagctgaaattnctccccaagnttggtattcaaaatatgtaatgactgntattggcaaaaa

SEQ ID NO: 1234 - DNA, 538 bp, Homo sapiens
  misc_feature 3, 368, 377, 455, 522: n = A,T,C or G
gcnattggagctccccgcggtggcggccgcccgggcaggtaccaaatgaagtgtgaagacaaggccatccaccactttatagagggtgtaaaaataaaccagaaatcaagggagaaagaaaagatgaaagacaaactgcaaaaaattgccaaaaatgcgactttctaaaaatggagcagattctgaggctttgcatgtcttggcattccttcaggagctgaatgaaaaaatgcaacaagcagatgaagactctgagaggggtttggagtctggaagcctcatcccttcagcatcaagctggaatggggaatgaagaatagagatgtggtgcccactaggctactgctgaaagggagctgaaattcctncccaagttnggtattcaaatatgtaattgctggtatggcaaaagattggactaagacactggccctaccactggacaggggttattntttaaccccctgaatttgcttgggtctttgagagagccccaagggggttttgggagaggggacccanaattggggggtaggtc

SEQ ID NO: 1235 - DNA, 344 bp, Homo sapiens
tggagctccccgcggtggcggccgaggtaccaaatgaagtgtgaagacaagggccatccaccactttatagagggtgtaaaaataaaccagaaatcaagggagaaagaaaagatgaaagacaaactgcaaaaaattgccaaaatgccgactttctaaaaatggagcagattctgaggctttgcatgtcttggcattccttcaggagctgaatgaaaaaatgcaacaagcagatgaagactctgagaggggtttggagtctggaagcctcatcccttcagcatcaagctggaatggggaatgaagaatagaagatgtggtgcccactaggctactgcttgaaagg

SEQ ID NO: 1236 - DNA, 483 bp, Homo sapiens
  misc_feature 28, 75, 95, 115, 150, 160, 163, 195, 206, 235, 256, 264,269, 292, 293, 294, 297, 305, 306, 315, 326, 327, 335, 345,346, 350, 351, 375, 391, 393, 404, 409, 411, 436, 442, 458,459, 462, 481: n = A,T,C or G
tggactccaccgcggtggcggccgaggnacaatacactagaaaccaacataatgtattttttttaaaacctgtgngaaaaaataaatgttccacnagtagggataggggaaaagnaaccaaaagagagaaagagaaaggaatgctggttnatctttgtangtngtaatcgaatggagaaatttgcagtattttanccactattagngaaattttttttttttttgtcaaaatganagactggaacctctgttcaanatgctttnattgnaactctggttttgaagaccgggnnnggnaaagcaannaaaaacgtngggaaaccctnngatggacntaaaggggcnntggnngccaaagggaccttgggggaaaanggtccactttgaatananaagcatggggnggggngnatttttccccccccttttaaaaaanatggtntggaataattttaaannggnatattaaaaaccacctttntt

SEQ ID NO: 1237 - DNA, 435 bp, Homo sapiens
  misc_feature 4: n = A,T,C or G
ggcnaattggagctccccgcggtggcggccgcccgggcaggtactgtgatatccacatattttcgataaaaattccaaagccaggcgaatgtggattggaataaagacataggcagtgtataccaccatagcaataatggttagtaagatggtgttaaacatagatcgctcccagggctctaaaacagcacagcagctaatgatttggtattgatagtagagccaggagaaatattccttcacacgcctcaaatccatggttggctccttcaagctgcagtaagtttgtcctaagaaagtccaggtctggttcttcagccttgctccttcgcgaaatgatcctgtgtgggttagttctcctctctgggttgctgtttcctcatctcccagttgggtgtatctccctgcggcttaggtgagcgccgaggctttggc

SEQ ID NO: 1238 - DNA, 421 bp, Homo sapiens
  misc_feature 6, 65, 66: n = A,T,C or G
agggcnaattggagctccccgcggtggcggccgcccgggcaggtaccaaatgaagtgtgaagacnntggccatccaccactttatagagggtgtaaaaataaaccagaaatcaagggagaaagaaaagatgaaagacaaactgcaaaaaattgccaaaatgcgactttctaaaaatggagcagattctgaggctttgcatgtcttggcattccttcaggagctgaatgaaaaaatgcaacaagcagatgaagactctgagaggggtttggagtctggaagcctcatcccttcagcatcaagctggaatggggaatgaagaatagagatgtggtgcccactaggctactgctgaaagggagctgaaattcctccaccaagttgggtattcaaaatatgtaatgactggtatggcaaaagatt

SEQ ID NO: 1239 - DNA, 520 bp, Homo sapiens
  misc_feature 156, 191, 256, 274, 292, 302, 311, 314, 321, 326, 341, 348,350, 359, 364, 366, 370, 371, 372, 380, 395, 398, 415, 416,429, 431, 446, 458, 461, 487, 488, 496, 505, 515: n = A,T,C or G
agctccaccgcggtggcggccgaggtacgcggggggcagaagaggaagatttttgaagagtgcagctgcctgaaccgagccctgccgaacagctgagaattgcactgcaaccatgagtgagaacaataagaattccttggagagcagcctacgggnaactaaaatgccatttcacctggaacttgatggangggagaaaactccttggaatgattttgaagacaaaagttattttttacccggcactgaagatttncagcaatccgttggaatntcaaaaggcccaccaaanggtgccaacncctacatgngcncttatcntaaanaggcacccctccaanagggggncnaataaacgnagggncnaagnnnccctgggnaaattggcctttacnggntaaaaaaggccttggannggaggttttaaantncctacggccaaaggnaagccattggcntgnaccccaagggccaaggaaaaatccanntaaaaagnttcttgggngtccaccccntgggg

SEQ ID NO: 1240 - DNA, 231 bp, Homo sapiens
agggcgattggagctccccgcggtggcggccgaggtaccaaatgaagtgtgaagacaaggccatccaccactttatagagggtgtaaaaataaaccagaaatcaagggagaaagaaaagatgaaagacaaactgcaaaaaattgccaaaatgcgactttctaaaaatggagcagattctgaggctttgcatgtcttggcatttcctttcagggagcctgaattgaaaaaaa

SEQ ID NO: 1241 - DNA, 368 bp, Homo sapiens
  misc_feature 29: n = A,T,C or G
agctccccgcggtggcggccgcccgggcnggtacgcgggggagacattcctcaattgcttagacatattctgagcctacagcagaggaacctccagtctcagcaccatgaatcaaactgccattctgatttgctgccttatctttctgactctaagtggcattcaaggagtacgggaaggcgaagaaaagaatagagaagatagggaaattagaagataaaaacatacttttagaagaaaaaagataaatttaaacctgaaaagtaggaagcagaagaaaaaagacaagctaggaaacaaaaaagcttaaggggcaaaaattgtaccttcggcccgctctagaactagtgggatcccccgggctgcag

SEQ ID NO: 1242 - DNA, 244 bp, Homo sapiens
tagggcgaattggagctccccgcggtggcggccgcccgggcaggtaccaaatgaagtgtgaagacatggccatccaccactttatagagggtgtaaaaataaaccagaaatcaagggagaaagaaaagatgaaagacaaactgcaaaaaattgccaaaatgccgactttctaaaaatggagcagattctgaggctttgcatgtcttggcattccttcaggagctgaatgaaaaaatgcaacaag

SEQ ID NO: 1243 - DNA, 360 bp, Homo sapiens
  misc_feature 345: n = A,T,C or G
acttagggcgaattggagctccccgcggtggcggccgcccgggcaggtaccaaatgaagtgtgaagacaaggccatccaccactttatagagggtgtaaaaataaaccagaaatcaagggagaaagaaaagatgaaagacaaactgcaaaaaattgccaaaatgcgactttctaaaaatggagcagattctgaggctttgcatgtcttggcattccttcaggagctgaatgaaaaaatgcaacaagcagatgaagactctgagaggggtttggagtctggaagcctcatcccttcagcatcaagctggaatggggaatgaagaatagagatgtggtgcccactangctactgctgaaagg

SEQ ID NO: 1244 - DNA, 390 bp, Homo sapiens
ccgcggtggcggccgaggtaccaaatgaagtgtgaagacaaggccatccaccactttatagagggtgtaaaaataaaccagaaatcaagggagaaagaaaagatgaaagacaaactgcaaaaaattgccaaaatgcgactttctaaaaatggagcagattctgaggctttgcatgtcctggcattccttcaggagctgaatgaaaaaatgcaacaagcagatgaagactctgagaggggtttggagtctggaagcctcatcccttcagcatcaagctggaatggggaatgaagaatagagatgtggtgcccactaggctactgctgaaagggagctgaaattcctccaccaagttggtattcaaaatatgtaatgactggtatggcaaaa

SEQ ID NO: 1245 - DNA, 375 bp, Homo sapiens
  misc_feature 198, 346: n = A,T,C or G
tggtactgctaaagtcatgacagcccaacaggtgatgttttactggatgaaactctgaaacacatcaaagcaactgaacccacagaaactgtccaaacatggatagagctactcactggtgagacctggaaccccttcaaattacagtactgttcctgttggccgagtggagactggtgttctcaaacccggtatggnggtcacctttgctccagtcaacgttacaacggaagtaaaatctgtcgaaatgcaccatgaagctttgagtgaagctcttcctggggacaatgtgggcttcaatgacaagaatgtgtctgtcaaggatgttccgtcgtggcaaccgttnctggtgacagcaaaaaatgaccccaccaa

SEQ ID NO: 1246 - DNA, 209 bp, Homo sapiens
ctatagggcgaattggagctccccgcggtggcggccgcccgggcaggtaccaaatgaagtgtgaagacaaggccatccaccactttatagagggtgtaaaaataaaccagaaatcaagggagaaagaaaagatgaaagacaaactgcaaaaaattgccaaaatgcgactttctaaaaatggagcagattctgaggctttgcatgtcttg

SEQ ID NO: 1247 - DNA, 483 bp, Homo sapiens
  misc_feature 6, 324: n = A,T,C or G
agggcnaattggagctccccgcggtggcggccgcccgggcaggtaccaaatgaagtgtgaagacaaggccatccaccactttatagagggtgtaaaaataaaccagaaatcaagggagaaagaaaagatgaaagacaaactgcaaaaaattgccaaaatgcgactttctaaaaatggagcagattctgaggctttgcatgtcttggcattccttcaggagctgaatgaaaaaatgcaacaagcagatgaagactctgagaggggtttggagtctggaagcctcatcccttcagcatcaagctggaatggggaatgaagaatagnagatgtggtgcccactaggctactgctgaaagggagctgaaattcctccaccaagttggtattcaaaatatgtaatgactggtatggcaaaagattggactaagacactggccataccactggacagggtttattgttaacacctgaattgctggggtc

SEQ ID NO: 1248 - DNA, 395 bp, Homo sapiens
  misc_feature 23, 94, 222, 241, 276, 338, 362: n = A,T,C or G
gagctccccgcggtggcggccgnggtacataaaacattattccttccttgggctaaaaactttttgccacctacattaaagctaatatgcctgnttactgtttttagagaacttattttattagggcagttccaagctcaaaaatacgctaactggcaccttgttagctacataaaaatgcaccctagacccgaaacttactagactcattataaaattttntttaaggtgtccacgcagnccctggtcacacttgaagcagtccggagaaatatnagccctaccccagtaatccccagaaggaacttacacttttttttaatcttttcctacaactncatattttataaataaaaagacanaaatgtcaggcctgtgagctgaagcttagccat

SEQ ID NO: 1249 - DNA, 452 bp, Homo sapiens
  misc_feature 415: n = A,T,C or G
tatagggcgaattggagctccccgcggtggcggccgcccgggcaggtacgcggggagtgggaagctcgcagcagctggggaggagccaaagcctcggcgctcacctaagccgcagggagatacacccaactgggagatgaggaaacagcaacccagagaggagaactaacccacacaggatcatttcgtgaaggagcaaggctgaagaaccagacctggactttcttaggacaaacttactgcagcttgaaggagccaaccatggatttgaggcgtgtgaaggaatatttctcctggctctactatcaataccaaatcattagctgctgtgctgttttagagccctgggagccgatctatgtttaacgccatcttactaaccattattgctatggtggtatacactgcctatgtntttattccaatccacattcgcctggcttgggaatttt

SEQ ID NO: 1250 - DNA, 407 bp, Homo sapiens
  misc_feature 4, 384: n = A,T,C or G
ggcnaattggagctccccgcggtggcggccgaggtaccaaatgaagtgtgaagacaaggccatccaccactttatagagggtgtaaaaataaaccagaaatcaagggagaaagaaaagatgaaagacaaactgcaaaaaattgccaaaatgcgactttctaaaaatggagcagattctgaggctttgcatgtcttggcattccttcaggagctgaatgaaaaaatgcaacaagcagatgaagactctgagaggggtttggagtctggaagcctcatcccttcagcatcaagctggaatggggaatgaagaatagagatgtggtgcccactaggctactgctgaaagggagctgaaattcctccaccaagttggtattcaaaatntgtaatgactggtattggcaaaa

SEQ ID NO: 1251 - DNA, 394 bp, Homo sapiens
  misc_feature 3, 330: n = A,T,C or G
ctnctatagggcgattggagctccccgcggtggcggccgaggtaccaaatgaagtgtgaagacaaggccatccaccactttatagagggtgtaaaaataaaccagaaatcaagggagaaagaaaagatgaaagacaaactgcaaaaaattgccaaaatgcgactttctaaaaatggagcagattctgaggctttgcatgtcttggcattccttcaggagctgaatgaaaaaatgcaacaagcagatgaagactctgagaggggttttggagtctggaagcctcatcccttcagcatcaagctggaatggggaatgaagaatggaagaatngtggtgcccactaggctactgctgaaaggggagcttgaaattcctccaccaaggtttggtattc

SEQ ID NO: 1252 - DNA, 432 bp, Homo sapiens
  misc_feature 403: n = A,T,C or G
tacttagggcgattggagctccccgcggtggcggccgaggtacaatcttgagaaggatttgaaggacaagtttgtggccctgaccatagatgatatctgcttctcgctcaacgacaactcaccaaacatcagatattctgagaacgccgtgaggattgagccaaactccgtgagtctggaagactggttggacttctccagcaccaatgtggagaaggctgacaagcagcggaacaactccctgatgctgaaagccctggtggatcgaatcctgtcccagacagccaatggatctgtgcaagccagtgtgattgtggtggacaccggcattcaagaatgggcctgaagggatcaaagggatgccagggacaagctgggcttgatcatctggcccaaggtattnggaaagagattgcttcccagggaagaaaa

SEQ ID NO: 1253 - DNA, 420 bp, Homo sapiens
  misc_feature 4, 265, 319, 322: n = A,T,C or G
actnagggcgattggagctccccgcggtggcggccgaggtaccaaatgaagtgtgaagacaaggccatccaccactttatagagggtgtaaaaataaaccagaaatcaagggagaaagaaaagatgaaagacaaactgcaaaaaaattgccaaaatgcgactttctaaaaatggagcagattctgaggctttgcatgtcttggcattccttcaggagctgaatgaaaaaatgcaacaagcagatgaagactctgagaggggtttnggagtctggaagcctcatcccttcagcatcaagctggaatggggaatgaagaanggnagattggtggtgcccactaggctactgctgaaagggagctgaaattcctcccccaaggttggtattcaaaaatattgtaatgaactgggtattggcaa

SEQ ID NO: 1254 - DNA, 391 bp, Homo sapiens
  misc_feature 16: n = A,T,C or G
ccgcggtggcggccgnggtacaatgattgtcatctcagtaaaaggtctattatctaacttgccaaacttgtttactgagagccctaaggaactaaaactgccataatgccgtgcacagcttgaaaagcaattagagtaagcaagattagtttttcctcccttccagttcctcagcaggcctggctgaaggcccaggagggaaggaaatataagaaccaacaataaaaatagcaatagcaataagaagaatgccatcccatggagcacaccataattctggaaccacctctcccggatcaggcttccattgctcacgatgctcacgctgggcagccgcaactctactttgcagaacctcaccaacttgcccaggtattctccccggtcttga

SEQ ID NO: 1255 - DNA, 374 bp, Homo sapiens
  misc_feature 216, 335, 339, 354: n = A,T,C or G
ctacttagggcgaattggagctccccgcggtggcggccgcccgggcatggtacgcgggggggtggagagaggcctctagacttcagtttcagtttcctggctctgggcagcagcaagaattcctctgcctcccatcctaccattcactgtcttgccggcagccagctgagagcaatgggaaatggggagtcccagctgtcctcggtgcctgctcanaagctgggttggtttatccaggaatacctgaagccctacgaagaatgtcagacactgatcgacgagatggtgaacaccatctgggacgtcctgcaggaacccgaacagttccccctggngcanggagtggccataggnggctcctatggacggaaaac

SEQ ID NO: 1256 - DNA, 347 bp, Homo sapiens
  misc_feature 51: n = A,T,C or G
tggagctccccgcggtggcggccgaggtaccaaatgaagtgtgaagacaanggccatccaccactttatagagggtgtaaaaataaaccagaaatcaagggagaaagaaaagatgaaagacaaactgcaaaaaattgcccaaaatgcgactttctaaaaatggagcagattctgaggctttgcatgtcttggcattccttcaggagctgaatgaaaaaatgcaacaagcagatgaagactctgagaggggtttggagtctggaagcctcatcccttcagcatcaagctggaatggggaatgaagaatagagatgtggtgcccactaggctactgctgaaagggagct

SEQ ID NO: 1257 - DNA, 363 bp, Homo sapiens
cttagggcgattggagctccccgcggtggcggccgaggtaccaaatgaagtgtgaagacaaggccatccaccactttatagagggtgtaaaaataaaccagaaatcaagggagaaagaaaagatgaaagacaaactgcaaaaaattgcccaaaatgcgactttctaaaaatggagcagattctgaggctttgcatgtcttggcattccttcaggagctgaatgaaaaaatgcaacaagcagatgaagactctgagaggggtttgggagtctggaagcctcatcccttcagcatcaagctggaatggggaatgaagaatagaagatgtggtgcccactaggctactgctgaaagggagctgaaa

SEQ ID NO: 1258 - DNA, 441 bp, Homo sapiens
acttagggcgaattggagctccccgcggtggcggccgcccgggcaggtaccaaatgaagtgtgaagacaaggccatccaccactttatagagggtgtaaaaataaaccagaaatcaagggagaaagaaaagatgaaagacaaactgcaaaaaattgccaaaatgcgactttctaaaaatggagcagattctgaggctttgcatgtcttggcattccttcaggagctgaatgaaaaaatgcaacaagcagatgaagactctgagaggggttttggagtctggaagcctcatcccttcagcatcaagctggaatggggaatgaagaatagaagattgtggtgcccactaggctactgctgaaagggagcctgaaattcctccccaaggttgggtattcaaaaatatgtaatgacttggtatggcaaaaagattgggactaaag

SEQ ID NO: 1259 - DNA, 386 bp, Homo sapiens
  misc_feature 356: n = A,T,C or G
tacttagggcgaattggagctccccgcggtggcggccgcccgggcaggtactctttgttttggcacacttttcctgacaaacagccagtgttctcaatacataaatactagtccacgttaacaacaatagcatatgagaccgctctccgtaaagatgccagattggatgcaaatggactggaaataccttggagggtttcacaaaaataagacaaagggcaaaggaactttgccaaaggagatggagagcaattctttaaagatagtgggagggaggaagcaaagagctcataaatacaagcctcttaaaatgggacgcatttgcctcgcgcctctggggtgtctgcagctcagcnttggtgccccacacgggacacccgactttt

SEQ ID NO: 1260 - DNA, 383 bp, Homo sapiens
  misc_feature 7: n = A,T,C or G
tagggcnaattggagctccccgcggtggcggccgcccgggcaggtaccttcaatgtcattaaccataaatgagcatttacaatctggattaaatgtcacatggtattaagtctacacttagagtaatgcttttactgatttttaaaaatatatgcatatgtttagtgatcgagaaaagtgaaatactggagtactttttttttttttttttttttggcttgatgagtaggtgagtttattgggacttacacacaggtcaatcctgggcggcgacaagacagctctagagatctgagcttcctcccaatgctaaactgctttcatgctaattttctgactgtttacttacccggggtaagagcgatggggactgttttcattgg

SEQ ID NO: 1261 - DNA, 430 bp, Homo sapiens
  misc_feature 2: n = A,T,C or G
tncttagggcgattggagctccccgcggtggcggccgcccgggcaggtaccaaatgaagtgtgaagacaaggccatccaccactttatagagggtgtaaaaataaaccagaaatcaagggagaaagaaaagatgaaagacaaactgcaaaaaattgccaaaatgcgactttctaaaaatggagcagattctgaggctttgcatgtcttggcattccttcaggagctgaatgaaaaaatgcaacaagcagatgaagactctgagaggggttttggagtctggaagcctcatcccttcagcatcaagctggaatggggaatgaagaataggagatgtggtgcccactaggctactgctgaaagggagctgaaattcctccaccaaggttgggtattcaaaatatgtaatgactggtatggcaaaagattggg

SEQ ID NO: 1262 - DNA, 395 bp, Homo sapiens
  misc_feature 25, 108, 348: n = A,T,C or G
tggcggccgccggcaggtacgcggngcagaagaggaagatttctgaagagtgcagctgcctgaaccgagccctgccgaacagctgagaattgcactgcaaccatgagngagaacaataagaattccttggagagcagctacggcaactaaaatgctttcacctggaacttgatgggagggagaaaactccttggatgattttgaagacaaagtattttaccggactgagtttcagaatcgtgaattcaaagccacaatgtgcaacctactgcctatctaaagcacctcaaagggcaaaacgaggcagccctggaatgcttacgtaaagctgaagagttaatccagcangagcatgctgacaaggcagaaatcaaaagtctggtcacctggggaaa

SEQ ID NO: 1263 - DNA, 753 bp, Homo sapiens
  misc_feature 557, 663, 667, 691, 711, 721, 737: n = A,T,C or G
cgaggtacccaggcctgcaaatctcctggcaggatggtcaggaactgctctagcaccagcagttccagaatctgttccttggtatggatctctggcttcagccactgacagcagagctcccggaggcggctcagtgcctcgcgaggtccaggagaatcctggtagcagaactgcctaaaaagctgcctgcagagctcctgcttaaggagttcacttctctgtaagcaagtgtcctgcccatggataaattcttcctcttctatcttcactatcagaagtccttcatcctctggagagttctgggctgcagctttctttggttctgtagccatctctcggacagggctgattccgatcggacacttccggtggaaggactgagcggcgctacacttcaagaattccgtccacagggacttgtgagtctgcgcagaaggcgggatgcctttggactacgattccaagaatccttcctgggtctcttcgggcgcagacttttcgccaaagtcctgaagatctcagggcttgaaggagggggcatccttcttcttcattgnagtagtgtgtcttgctaaataacagaagggactcctgaaaagaaaatgacgttggcccgggcgcgggggcttacgcctgcaagtccacactttgggaggccgaacnggcngatcacgaaggtcaggagatcgangactatctgggttacgcggngacaccctgngtttcttaaaatccanaaaaaaaaaaaaaaaa

SEQ ID NO: 1264 - DNA, 513 bp, Homo sapiens
  misc_feature 157, 289, 334, 352, 366, 370, 382, 383, 384, 401, 412, 417,423, 427, 433, 443, 448, 454, 469, 477, 482, 486, 491: n = A,T,C or G
ggcgaattggactccaccgcggtggcggcccgaggtacagagatttataatgtgctgctctaggtcctatcgggtaaagggatcagcagatgtgaagtcaagagtctcctgtaagatttgactttcttggaaacatattttaatcctgggcctcctntttcaaatcacctatttcttttagttttttgcagtgatactgtgtgttgcttctaacagaggttcagtttcacagcctttccctcaagtgtcttatcctaaaagtaaaacctagatgatctaaggtggtggntttcaacagggtgcaaatttgcctcctatactcgcaacacccagngacagttggctatgtctnggagacatttttgngttntcacacctggannnagggtgggggaggtggngctaatgacancaagntggccntaanccaatnatgctgatanaaatnctacantgcacaaggataggntcccacanaacanaagncttanccaaaccccaaatactaacaat

SEQ ID NO: 1265 - DNA, 570 bp, Homo sapiens
ccgcggtggcggcccgaggtacaagatagtcatctcagtaaaaggtctattatctaacttgccaaacttgtttactgagagccctaaggaactaaaactgccataatgccgtgcacagcttgaaaagcaattagagtaagcaagattagtttttcctccttccagttcctcagcaggcctggctgaaggcccaggagggaaggaaatataagaaccaacaataaaaatagcaatagcaataagaagaatgccatcccatggagcacaccataattctggaaccacctctcccggatcaggcttccattgctcacgatgctcacgctgggcagccgcaactctactttgcagaacctcaccaacttgcccaggtattctccccggtcttgaagaaatggctctccacctgaaaagttgatcttctccataccagcttccttaagcaaaagcaatcctctctttgcttcctcaaggggcagcacaaaggatgttttggctgtgtggaaacagaagcccgcatttgtagttgcactggcgagtgaagtgatagttgacgctggttggggtggt

SEQ ID NO: 1266 - DNA, 479 bp, Homo sapiens
  misc_feature 311, 336, 357, 372, 384, 387, 403, 411, 430, 450, 458, 468: n = A,T,C or G
ccgcggtggcggccgcccgggcaaggtacttgctaactttgacgccagcatctctgaaagatccccatcgaaggccggtcattgcaaatacaggctgttccttttcacccttgatctgcaagacatcaagtggaactgtctctcctttcacaatggcaagtgtggcatcagtaatatgttggactttgtttccactttcggcaaagagggtatgactcaaactactggtctctcccagtgggataaatccaatgggaatcttactgaaggtagcctcatctgttcgtcgaagaacaccaagtaacaacctnctgcagtgtcccatctccttcctgnaacaatggatcacattccggngttttccatcagttncaaggaggtttnttnggcttgggcccttaanaaatctgngcttaaacaaaaaggcccnattccttcccaaataaaaanggaaaaantcgggggccncaatttttttt

SEQ ID NO: 1267 - DNA, 454 bp, Homo sapiens
cactcctatagggcgaattggagctccccgcggtggcggccgaggtaccaaatgaagtgtgaagacaaggccatccaccactttatagagggtgtaaaaataaaccagaaatcaagggagaaagaaaagatgaaagacaaactgcaaaaaattgccaaaatgcgactttctaaaaatggagcagattctgaggctttgcatgtcttggcattccttcaggagctgaatgaaaaaatgcaacaagcagatgaagactctgagaggggtttggagtctggaagcctcatcccttcagcatcaagctggaatggggaatgaagaatagagatgtggtgcccactaggctactgctgaaagggagctgaaattcctccaccaagttggtattcaaaatatgtaatgactgggtatggcaaaagattggactaagacactggccataccactggacagg

SEQ ID NO: 1268 - DNA, 430 bp, Homo sapiens
ggtaccaaatgaagtgtgaagacaaggccatccaccactttatagagggtgtaaaaataaaccagaaatcaagggagaaagaaaagatgaaagacaaactgcaaaaaattgccaaaatgcgactttctaaaaatggagcagattctgaggctttgcatgtcttggcattccttcaggagctgaatgaaaaaatgcaacaagcagatgaagactctgagaggggtttggagtctggaagcctcatcccttcagcatcaagctggaatggggaatgaagaatagagatgtggtgcccactaggctactgctgaaagggagctgaaattcctccaccaagttggtattcaaaatatgtaatgactggtatggcaaaagattggactaagacactggccataccactggacagggttatgttaacacctgaatt

SEQ ID NO: 1269 - DNA, 403 bp, Homo sapiens
ctacttagggcgaattggagctccccgcggtggcggccgcccgggcaggtacttctacagagatcctgaagagattgaaaaagaagagcaggctgctgctgagaaggcagtgaccaaggaggaatttcagggtgaatggactgctcccgctcctgagttcactgctactcagcctgaggttgcagactggtctgaaggtgtactcttggtttatcaatgggacgttccagcaatccacacaagagctctttatccccaacatcactgtgaataatagcggatcctatatgtgccaagcccataactcagccactggcctcaataggaccacagtcacgatgatcacagtctctggaagtgctcctgtcctctcaagctgtggccaccgtcggcatcacgattg

SEQ ID NO: 1270 - DNA, 378 bp, Homo sapiens
aggtaccaaatgaagtgtgaagacaaggccatccaccactttatagagggtgtaaaaataaaccagaaatcaagggagaaagaaaagatgaaagacaaactgcaaaaaattgccaaaatgcgactttctaaaaatggagcagattctgaggctttgcatgtcttggcattccttcaggagctgaatgaaaaaatgcaacaagcagatgaagactctgagaggggtttggagtctggaagcctcatcccttcagcatcaagctggaatggggaatgaagaataggagatgtggtgcccactaggctactgctgaaagggagctgaaattcctccaccaagttggtattcaaaatatgtaatgactggtatggcaaaaga

SEQ ID NO: 1271 - DNA, 315 bp, Homo sapiens
acactacttagggcgaattggagctccccgcggtggcggccgcccgggcaggtacctcatttttattttgaaaaccattcagcacatttatcttatgtaacatgcagagcatatatctatctgtatttttaaaattttcctgttactcattgatacatagtacttccttgatgttgttggagtccgtgagaaacatggcgactcgatcaatgcccatgccccagccagctgtggggggcagcccatattccagggcagtactcaaaggtgatatttgcttttttcaatgcttcaggggaaaaatccttttcttta

SEQ ID NO: 1272 - DNA, 416 bp, Homo sapiens
  misc_feature 56: n = A,T,C or G
taagggcgattggagctccccgcggtggcggccgaggtaccaaatgaagtgtgaangacaaggccatccaccactttatagagggtgtaaaaataaaccagaaatcaagggagaaagaaaagatgaaagacaaactgcaaaaaattgccaaaatgcgactttctaaaaatggagcagattctgaggctttgcatgtcttggcattccttcaggagctgaatgaaaaaatgcaacaagcagatgaagactctgagaggggtttggagtctggaagcctcatcccttcagcatcaagctggaatggggaatgaagaatagagatgtggtgcccactaggctactgctgaaagggagctgaaattcctccaccaaggttggtattcaaaatatgtaatgactgggtatggcaaaagatt

SEQ ID NO: 1273 - DNA, 451 bp, Homo sapiens
aattggagctccccgcggtggcggccgaggtaccgtggtgacgtggttcccaaagatgtcaatgctgccattgccaccatcaaaaccaagcgcagcatccagtttgtggattggtgccccactggcttcaaggttggcatcaactaccagcctcccactgtggtgcctggtggagacctggccaaggtaccaaatgaagtgtgaagacaaggccatccaccactttatagagggtgtaaaaataaaccagaaatcaagggagaaagaaaagatgaaagacaaactgcaaaaaattgccaaaatgcgactttctaaaaatggagcagattctgaggctttgcatgtcttggcattccttcaggagctgaatgaaaaaatgcaacaagcagatgaagactctgagaggggtttggagtctggaagcctcatcccttcagcatcaagctggaat

SEQ ID NO: 1274 - DNA, 454 bp, Homo sapiens
  misc_feature 11, 15, 16, 17, 18: n = A,T,C or G
atccccggcgnggcnnnncgcccgttcaggtactctttgttttggcacacttttcctgacaaacagccagtgttctcaacacataaatactagtccacgttaacaacaatagcatatgagaccgctctccgtaaagatgccagattggatgcaaatggactggaaataccttggagggtttcacaaaaataagacaaagggcaaaggaactttgccaaaggagatggagagcaattctttaaagttagtgggagggaggaagcaaagagctcataaatacaagcctcttaaaatgggacgcatttgcctcgcgcctactgggtgtctgcagctcagcttggtgccccacacaggacaccgactttaagtggctgcctttgcaaggctgagaggccatggaggggttgatgcctgaagtgtcagcgccatctagtggaaacatggggcatggccc

SEQ ID NO: 1275 - DNA, 404 bp, Homo sapiens
  misc_feature 142, 359: n = A,T,C or G
ggagctccccgcggtggcggccgcccgggcaggtaccaaatgaagtgtgaagacaaggccatccaccactttatagagggtgtaaaaataaaccagaaatcaagggagaaagaaaagatgaaagacaaactgcaaaaaattnccaaaatgccgactttctaaaaatggagcagattctgaggctttgcatgtcttggcattccttcaggagctgaatgaaaaaatgcaacaagcagatgaagactctgagaggggtttggagtctggaagcctcatcccttcagcatcaagctggaatggggaatgaagaatagagatgtggtgcccactaggctactgctgaaagggagctgaaattnctccaccaagttggtattcaaaatatgtaatgactggtatggcaa

SEQ ID NO: 1276 - DNA, 643 bp, Homo sapiens
  misc_feature 139, 147, 152, 156, 160, 165, 174, 178, 187, 240, 247, 265,300, 308, 309, 314, 324, 329, 344, 358, 362, 363, 387, 395,399, 402, 407, 411, 417, 418, 419, 450, 474, 488, 491, 542,546, 580, 582, 583, 628, 636: n = A,T,C or G
aggtacaaaattatcatcatttagagttgatttttttcaccagccctgaattttcaaacttgtaatatgctgtttcacaatctttttattaaattacttaatgattccagtctgcaaaatgagccataagactttgctnctgtttgntatangatncatntgganattgggggngggnaaaccatangtaaggttaaacctatccgtcacctgcttcatgtaaaagactccaccatttgnttggatntatttttttctccaggcnactagtaagaaaaaaggtgaacaaaggtggatttncatccctnncaaantgggcccttntggcncaattcttttttcantaatcctatggtanaccnnttttggtagattaccttggtggtngaattttnagcngtnttggnggcntaattnnnaaaaaattctttggggatttaaaatttaaancaaaaaaaccaaaccaaataaaanttctaatccacccntgnggaaaattattttggaaaaggaaaaattttcaggttaaaaaacaaagggantggntggttccttccattaggtttaaaggggaggaggnannattaaaaaaaattaaaaaaattggttcattttaaaacaaggtttngaaatttnaagggaa

SEQ ID NO: 1277 - DNA, 622 bp, Homo sapiens
  misc_feature 112, 157, 169, 178, 184, 193, 273, 279, 282, 285, 287, 298,300, 304, 321, 393, 395, 414, 426, 432, 433, 488, 491, 497,504, 510, 514, 516, 520, 533, 539, 559, 566, 589, 595, 609,613: n = A,T,C or G
aggtacaaaattatcatcatttagagttgatttttttcaccagccctgaattttcaaacttgtaatatgctgtttcacaatctttttattaaattacttaatgattccagtntggcaaatgagccatagacttttgctctgcttgttataagatcanttggaattgggnggggggganaaccantagttaagnctaaatctaatccggtcacttggcttcattgtaaaagaaccccacaattggtctgaattaattttttgcccaggcaccangaaagnaanatngntgtaccaaagntngaantacattccttggcaaantggggccctctttggcccaaatccttttttccaattatccttattggttaaaaccctttttttggttaagtntnaccttgggtggttggaatntttaaagccggncttggnnggccttaattttggtaaaaaatttcttttgggggattttaaaatttaaacccaanaanaaccanaccaaanaaatanttcntnattncaccccttggggnaaattnattttgggaaaaaggaaaanattttcnaagtttaaaaaacccaaaggaantgggtngttcctccaattanggtnttaaaaggg

SEQ ID NO: 1278 - DNA, 441 bp, Homo sapiens
  misc_feature 269, 296, 323, 329, 414, 427, 436: n = A,T,C or G
aggtacatttacacaatattaacactaaaaatctgtgtttttttaaaacaccatagaagtcaaaccacaaaaacccaggatcttgttttaaatgtgtttatgaagactgctgctgagctcaaaagcattgcaggtaatcatgaccacctagatgaaagctggatgtttgaaaactccttcatgtccaatgaatgtaaattttttcacctcatccccaaggtattctcccatactttgttctacttttgaccttctttttttttttgggncacctcttttcatggcataagggcctngacttgagggggtacaggttctttttngtggtntaaaaggaattacttttcattaatgaacctcctccttggtttcctttaatttccctttaaattttccttcaataattggtaaatnattttttttttcntttttaagnggacc

SEQ ID NO: 1279 - DNA, 418 bp, Homo sapiens
  misc_feature 1: n = A,T,C or G
ncttagggcgaattggagctccccgcggtggcggccgaggtaccaaatgaagtgtgaagacaacggccatccaccactttatagagggtgtaaaaataaaccagaaatcaagggagaaagaaaagatgaaagacaaactgcaaaaaattgccaaaatgcgactttctaaaaatggagcagattctgaggctttgcatgtcttggcattccttcaggagctgaatgaaaaaatgcaacaagcagatgaagactctgagaggggtttggagtctggaagcctcatcccttcagcatcaagctggaatggggaatgaagaatagagatgtggtgcccactaggctactgctgaaagggagctgaaattcctccaccaaggttggtattcaaaatatgtaatgactggtatggcaaaagatt

SEQ ID NO: 1280 - DNA, 197 bp, Homo sapiens
  misc_feature 20, 48, 51: n = A,T,C or G
gtggcggccgaggtaccaantgaagtgtgaatgacaatggccatccantantttatagagggtgtaaaaataaaccagaaatcaagggagaaagaaaagatgaaagacaaactgcaaaaaattgccaaaatgcgactttctaaaaatggagcagattctgaggcttttgcatgtcttggcattccttcaggagctga

SEQ ID NO: 1281 - DNA, 358 bp, Homo sapiens
  misc_feature 121: n = A,T,C or G
ccgcggtggcggccgctcgggcaggtaccattcctctacatccatttggtagcagaacctcaagtgtaagcagtcagtgtagcatgaatatgaactggctcagtttatcacttcctgtttngacctgaagcaccacccagctatgcagaagtggtaacagaggaacaaaggcggaacaatcttgcaccagtgagtgcttgtgatgactttgagagagcccttcaaggaccactgtttgcatatatccaggagtttcgattcttgcctccacctctttattcagagattgatccaaatcctgatcagtcagcagatgatagaccatcctgccccttttgttgaaggaacacttggttga

SEQ ID NO: 1282 - DNA, 385 bp, Homo sapiens
gagctccccgcggtggcggccgcccgggcaggtacataaaacattattccttccttggcctaaaaactcatcgccacctacattaaagctaatatgcctgattactgtttttagagaacttattttattagggcagttccaagctcaaaaatacgctaactggcaccttgttagctacataaaaatgcaccctagacccgaaacttactagactcattataaaattttctttaaggtgtccacgcagtccctggtcacacttgaagcagtccggagaaatatcagccctaccccagtaatccccagaaggaacttacacttttttttaatcttttcctacaacttcatattttataaataaaaagacaaaaatgtcaggcctgtg

SEQ ID NO: 1283 - DNA, 497 bp, Homo sapiens
  misc_feature 15, 42, 106, 216, 268, 275, 371, 427, 467, 481, 485: n = A,T,C or G
ggtggcggcgcccgncaggtaccaaatgaagtgtgaagaccnggccatccaccactttatagagggtgtaaaaataaaccagaaatcatgggagaaagaaaagatnaaagacaaactgcaaaaaattgccaaaatgcgactttctaaaaatgagcagattctgaggctttgcatgtcttggcattccttcaggagctgaatgaaaaaatgcaacangcagatgaagactctgagaggggtttggagtctggaagcctcatcccttcancatcaanctggaatggggaatgaagaatagagatgtggtgcccactaggctactgctgaaagggagctgaaattcctccaccaagttggtattcaaaatatgnaatgactggtatggcaaaagattggactaagacactggccataccactggacaggnttatgttaacacctgaattgctgggtcttgagagagcccnaggagttctggganaggnaccacattgggg

SEQ ID NO: 1284 - DNA, 537 bp, Homo sapiens
cgcggtggcggccgcccgggcaggtaccccgggagagcccgcttccccctcctccctgtgctgtctgcacccgaggagagcggcctgcccggaagtgggccaccatatctggaaactacagtctatgctttgaagcgcaaaagggaataaacattaaagactcccccggggacctggaggatggacttttccatggtggccggagcagcagcttacaatgaaaaatcagagactggtgctcttggagaaaactatagttggcaaattcccattaaccacaatgacttcaaaattttaaaaaataatgagcgtcagctgtgtgaagtcctccagaataagtttggctgtatctctaccctggtctctccagttcaggaaggcaacaagcaaatctctgcaagtgttcaaaaaaatgctgactcctaggatagagttatcaagtctggaaagatgacctcaccacacatgctgttgatgctgtggtgaatgcaccaatgaagatcttcttgcatgggggaggcctggccctggccctgg

SEQ ID NO: 1285 - DNA, 418 bp, Homo sapiens
  misc_feature 34, 145: n = A,T,C or G
cgccgggcaggtaccaaatgaagtgtgaagacanggccatccaccactttatagagggtgtaaaaataaaccagaaatcaagggagaaagaaaagatgaaagacaaactgcaaaaaattgccaaaatgcgactttctaaaaatgngcagattctgaggctttgcatgtcttggcattccttcaggagctgaatgaaaaaatgcaacaagcagatgaagactctgagaggggtttggagtctggaagcctcatcccttcagcatcaagctggaatggggaatgaagaatagagatgtggtgcccactaggctactgctgaaagggagctgaaattcctccaccaagttggtattcaaaatatgtaatgactggtatggcaaaagattggactaagacactggccataccactggacagg

SEQ ID NO: 1286 - DNA, 548 bp, Homo sapiens
tcgggcgaattggagctccccgcggtggcggcccgcccgggcaggtacaggtaagatatactggagtcacagagcaatatgcattaacaggatacaacagttcataaaaactgagtaactatgcacacaaatttcttaaacagccacctaaagagaaaatgcacagatgtatggtggaaactgtatctaacactgaaactactacaggactccatcaatgagtccaacttttagtgataaaaaactactgtacactacatgaagaaccatatgtttataattatccaaataaaaatgaagttattaaacttcaagataatatggtaatttgcattgaaccgatgattttacaaaattctgcaaaggtcaaaattttaaaagatggctgaacagtaattgcagcatctaataaaaacgcagctcattaccgagcaaacggttttaattaaaaattcaaaaggaataatcctgacaggagaaataaaaaaatagatgtcaaaagaagataaaattattttcaaaggagtagtaactcaagttttaacacc

SEQ ID NO: 1287 - DNA, 510 bp, Homo sapiens
  misc_feature 159: n = A,T,C or G
ccgcggtggcggccgcccgggcaggtaccaaatgaagtgtgaagacaaggccatccaccactttatagagggtgtaaaaataaaccagaaatcaagggagaaagaaaagatgaaagacaaactgcaaaaaattgccaaaatgcgactttctaaaaatgngcagattctgaggctttgcatgtcttggcattccttcaggagctgaatgaaaaaatgcaacaagcagatgaagactctgagaggggtttggagtctggaagcctcatcccttcagcatcaagctggaatggggaatgaagaatagagatgtggtgcccactaggctactgctgaaagggagctgaaattcctccaccaagttggtattcaaaatatgtaatgactggtatggcaaaagattggactaagacactggccataccactggacagggttatgttaacacctgaattgctgggtcttgagagagcccaaggagttctgggagagggaccagattggggggtaggt

SEQ ID NO: 1288 - DNA, 569 bp, Homo sapiens
  misc_feature 459: n = A,T,C or G
ccgggcaggtacaagatagtcatctcagtaaaaggtctattatctaacttgccaaacttgttcactgagagccctaaggaactaaaactgccataatgccgtgcacagcttgaaaagcaattagagtaagcaagatagtttttcctcccttccagttcctcagcaggcctggctgaaggcccaggagggaaggaaatataagaaccaacaataaaaatagcaatagcaataagaagaatgccatcccatggagcacaccataattctggaaccacctctcccggatcaggcttccattgctcacgatgctcacgctgggcagccgcaactctactttgcagaacctcaccaacttgtccaggtattctccccggtcttgaagaaatggctctccacctgaaaagttgatctttctccataccagcttccttaaagcaaaagcaatcctctctttgcttnctcaaggggcaagcacaaagggatgtttttggctgtgtggaaacagaaagcccgcatttgtagtttgcactggccagtgaagtgatagttgaccctggttggggtggggg

SEQ ID NO: 1289 - DNA, 595 bp, Homo sapiens
  misc_feature 474, 485, 503, 511, 517, 591: n = A,T,C or G
ccgggcaggtaccaaaattgtaagaagaagcttgggaagctgccacctcagtatgccctggagctcctgacggtctatgcttgggagcgagggagcatgaaaacacatttcaacacagcccagggatttcggacggcttggaattagtcataaactaccagcaactctgcatctactggacaaagtattatgactttaaaaaccccattattgaaaagtacacaggaggcaaagtgtttcacatcatagacttcacttccaactccttggaatgttcatttctttggcttacaggagagactagacaggaaggccaggcaatgcttaggcaactaaaatgaggttgggggtaatgctaacgtcaccctcacagggatggccacggggactgttattcgcaagctggttttctaggcctgttagctggaagcatggtgagcaccatttctggacgctcaggccgtgtcgggcttnaagtcatcttncaccacacaggtaccttngggccggntctagnaactagtgggatccccccgggctggcaggaaattcgaatatcaaagctttatcgatacccgtccgaccttcgangggg

SEQ ID NO: 1290 - DNA, 478 bp, Homo sapiens
aggtaccaaatgaagtgtgaagacaaggccatccaccactttatagaggttgtaaaaataaaccagaaatcaagggagaaagaaaagatgaaagacaaactgcaaaaaattgccaaaatgcgactttctaaaaatggacagattctgaggctttgcatgtcttggcattccttcaggagctgaatgaaaaaatgcaacaagcagatgaagactctgagaggggtttggagtctggaagcctcatcccttcagcatcaagctggaatggggaatgaagaatagagatgtggtgcccactaggctactgctgaaagggagctgaaattcctccaccaagttggtattcaaaatatgtaatgactggtatggcaaaagattggactaagacactggccataccactggacagggttatgttaacacctgaattgctgggtcttgagagagcccaaggagttctgggagagggaccagattg

SEQ ID NO: 1291 - DNA, 490 bp, Homo sapiens
  misc_feature 141, 434, 472: n = A,T,C or G
aggtcataaaacattattccttccttggcctaaaaactcatcgccacctacattaaagctaatatgcctgattactgtttttagagaacttattttattagggcagttccaagctcaaaaatcgctaactggcaccttgtngtacataaaaatgcaccctagacccgaaacttactagactcattataaaattttctttaaggtgtccacgcagtccctggtcacacttgaagcagtccggagaaatatcagccctaccccagtaatccccagaaggaacttacacttttttttaatcttttctacaacttcatattttataaataaaaagacaaaaatgtcgggcctgtgagctgaagcttagccattgtaacccctgtgacctgcacatatccgtccaggtggcctgcaggagccaagaagtctggagcagncgaaaaaccacaaagaagtgaaacagccaggtttctgncttaactaattaacccac

SEQ ID NO: 1292 - DNA, 597 bp, Homo sapiens
  misc_feature 238, 468: n = A,T,C or G
gggcgaattggagctccccgcggtggcggccgcccgggcaggtacataaaacattattccttccttggcctaaaaactcatcgccacctacattaaagctaatatgcctgattactgtttttagagaacttattttattagggcagttccaagctcaaaaatacgctactggcaccttgttagctacataaaaatgcaccctagacccgaaacttactagactcattataaaattttntttaagctgtccacgcagtccctggtcacacttgaagcagtccggagaaatatcagccctaccccagtaatccccagaaggaacttacacttttttttaatcttttcctacaacttcatattttataaataaaaagacaaaaatgtcaggcctgtgagctgaagcttagccattgtaacccctgtgacctgcacatatccgtccaggtggcctgcaggagccaagaagtntggagcagccgaaaaaccacaaagaagtgaaacagccagtttctgccttaactaattaacccaccttacgacattccaccattatgactttgtccaccattatgacttgttcctggcctgccccaactg

SEQ ID NO: 1293 - DNA, 491 bp, Homo sapiens
ccgggcaggtaccaaatgaagtgtgaagacaaggccatccaccactttatagagggtgtaaaaataaaccagaaatcaagggagaaagaaaagatgaaagacaaactgcaaaaaattgccaaaatgcgactttctaaaaatgacagattctgaggctttgcatgtcttggcattccttcaggagctgaatgaaaaaatgcaacaagcagatgaagactctgagaggggtttggagtctggaagcctcatcccttcagcatcaagctggaatggggaatgaagaatagagatgtggtgcccactaggctactgctgaaagggagctgaaattcctccaccaagttggtattcaaaatatgtaatgactggtatggcaaaagattggactaagacactggccataccactggacagggttatgttaacacctgaattgctgggtcttgagagagcccaaggagttctgggagagggaccagattggggggtag

SEQ ID NO: 1294 - DNA, 385 bp, Homo sapiens
cgaggtaccgctgtgtccgggtgggtggtcagaatgccgtgctccaggtgttcacagctgcttcgtggaagaccatgtgctccgatgactggaagggtcactacgcaaatgttgcctgtgcccaactgggtttcccaagctatgtagttcagataacctcagagtgagctcgctggaggggcagttccgggaggagtttgtgtccatcgatcacctcttgccagatgacaaggtgactgcattacaccactcagtatatgtgagggagggatgtgcctctggccacgtggttaccttgcagtgcacagcctgtggtcatagaaggggctacagctcacgcatcgtgggtggaaacatgtccttgctctcgcaagtggccctggca

SEQ ID NO: 1295 - DNA, 494 bp, Homo sapiens
cgaggtacctgtgaagacagctacacctggtttcctccctcatgccttgatccccagaactgctaccttcacacggctggagcactcccaagctgtgaatgtcatctcaacaacctcagccagagtgtcaatttctgtgagagaacaaagatttggggcactttcaaaattaatgaaaggtttacaaatgaccttttgaattcatcttctgctatatactccaaatatgcaaatggaattgaaattcaacttaaaaaagcatatgaaagaattcaaggttttgagtcggttcaggtcacccaatttcgaaatggaagcatcgttgctgggtatgaagttgttggctccagcagtgcatctgaactgctgtcagccattgaacatgttgccgagaaggctaagacagcccttcacaagctgtttccattagaaagacggctctttcagagtgttcggaaaagcccagtgtaatgacattgtctttggatttgggt

SEQ ID NO: 1296 - DNA, 311 bp, Homo sapiens
cgaggtacaggagcaaccttctttccaccattactgggaattccaccactatttgctcccccagcccagaatcatgattcttcttcattccattcaaggacttcgggaaaaagtaatcgaaatggtcccgaaaaaggtgtaaatgggtcaataaatggaagtaatacatcatctgtaattggtatcaacacatctgtactttttttttttttttttttttatctaaaagcaacataattatttttcttgcgattttttcaagaactctttttaattgtctaacacctgattctagtgtatagcttctgatt

SEQ ID NO: 1297 - DNA, 409 bp, Homo sapiens
  misc_feature 147: n = A,T,C or G
cgcccgggcaggtaccaaatgaagtgtgaagacaaggccatccaccactttatagagggtgtaaaaataaaccagaaatcaagggagaaagaaaagatgaaagacaaactgcaaaaaattgccaaaatgcgactttctaaaaatganagattctgaggctttgcatgtcttggcattccttcaggagctgaatgaaaaaatgcaacaagcagatgaagactctgagaggggtttggagtctggaagcctcatcccttcagcatcaagctggaatggggaatgaagaatagagatgtggtgcccactaggctactgctgaaagggagctgaaattcctccaccaagttggtattcaaaatatgtaatgactggtatggcaaaagattggactaagacactggccatacca

SEQ ID NO: 1298 - DNA, 502 bp, Homo sapiens
ccgcggtggcggcccgcccgggcaggtaccaaatgaagtgtgaagacaaggccatccaccactttatagagggtgtaaaaataaaccagaaatcaagggagaaagaaaagatgaaagacaaactgcaaaaaattgccaaaatgcgactttctaaaaatggagcagattctgaggctttgcatgtcttggcattccttcaggagctgaatgaaaaaatgcaacaagcagatgaagactctgagaggggtttggagtctggaagcctcatcccttcagcatcaagctggaatggggaatgaagaatagagatgtggtgcccactaggctactgctgaaagggagctgaaattcctccaccaagttggtattcaaaatatgtaatgactggtatggcaaaagattggactaagacactggccataccactggacagggttatgttaacacctgaattgctgggtcttgagagagcccaaggagttctggggagagggaccagatt

SEQ ID NO: 1299 - DNA, 387 bp, Homo sapiens
cgcccgggcaggtaccaaatgaagtgtgaagacaaggccatccaccactttatagagggtgtaaaaataaaccagaaatcaagggagaaagaaaagatgaaagacaaactgcaaaaaattgccaaaatgcgacttttaaaaatggagcagattctgaggctttgcatgtcttggcattccttcaggagctgaatgaaaaaatgcaacaagcagatgaagactctgagaggggtttggagtctggaagcctcatcccttcagcatcaagctggaatggggaatgaagaatagagatgtggtgcccactaggctactgctgaaagggagctgaaattcctccaccaagttggtattcaaaatatgtaatgactggtatggcaaaagatt

SEQ ID NO: 1300 - DNA, 350 bp, Homo sapiens
  misc_feature 3, 212, 290, 299: n = A,T,C or G
cgnccgccaggtaccaaatgaagtgtgaagacaaggccatccaccactttatagagggtgtaaaaataaaccagaaatcaagggagaaagaaaagatgaaagacaaactgcaaaaaattgccaaaatgcgactttctaaaaatggacagattctgaggctttgcatgtcttggcattccttcaggagctgaatgaaaaaatgcaacaagcanatgaagactctgagaggggtttggagtctggaagcctcatcccttcagcatcaagctggaatggggaatgaagaatanaagatgtgntgcccactaggctactgctgaaagggagctgaaattcctccaccaagttgg

SEQ ID NO: 1301 - DNA, 437 bp, Homo sapiens
  misc_feature 2, 21, 202: n = A,T,C or G
cnaattggagctccccgcggnggcggccgaggtacagtatggcttaaaaggctctgccttagattctagaatccagaacattttctccaaagacaatcagggtatgggggagaagttagttccagagaagagagcgagtccagggtagaagggattcttctctcctgagggtctatggtctcccattttttaaagcagcagnggtatctatcccactcatggcctagaggttgcacagagctgtctggcacccgcttctttggcttttctctcctgacacccagcaatgcttactcagagcgttgaaggcggccagcacctcgaaagagattctctgattttttgtgaacacctggatggtgaacccatcaagggacttctggatctcgaaattgtttttcaacccttcgtgaacagacagaacttcagcttatccc

SEQ ID NO: 1302 - DNA, 369 bp, Homo sapiens
ccgggcaggtaccaaatgaagtgtgaagacaaggccatccaccactttatagagggtgtaaaaataaaccagaaatcaagggagaaagaaaagatgaaagacaaactgcaaaaaattgccaaaatgcgactttctaaaaatggagcagattctgaggctttgcatgtcttggcattccttcaggagctgaatgaaaaaatgcaacaagcagatgaagactctgagaggggtttggagtctggaagcctcatcccttcagcatcaagctggaatggggaatgaagaatagagatgtggtgcccactaggctactgctgaaagggagctgaaattcctccaccaagttggtattcaaaatatgtaatgact

SEQ ID NO: 1303 - DNA, 367 bp, Homo sapiens
ccgggcaggtactaccatgccgggccaattttttttttgtttgtagaaatgaggtcttgctatgttgcccaggctggtctcaaactcctggtctcaagcgatccccccgcctcagcctcccgaagtgctgggataaaaggcgtgaaccaccatacccagccagtattatcttttcatttcattttccagttgagtatattattggctacatttgcataccgcacaattgttcattttttaaaaaccaatattttgttttgttctgttgtctacaataaggagaattcagatgataaacttacaaccaatcatggccaagtccacttgaggaattgtctctgtagatttatctgtagactccctaata

SEQ ID NO: 1304 - DNA, 370 bp, Homo sapiens
aggtaccaaatgaagtgtgaagacaaggccatccaccactttatagagagtgtaaaaataaaccagaaatcaagggagaaagaaaagatgaaagacaaactgcaaaaaattgccaaaatgccgactttctaaaaatggagcagattctgaggctttgcatgtcttggcattccttcaggagctgaatgaaaaaatgcaacaagcagatgaagactctgagaggggtttggagtctggaagcctcatcccttcagcatcaagctggaatggggaatgaagaatagagatgtggtgcccactaggctactgctgaaagggagctgaaattcctccaccaagttggtattcaaaatatgtaatgactggtatg

SEQ ID NO: 1305 - DNA, 591 bp, Homo sapiens
  misc_feature 105, 106, 107, 108, 109, 110, 111, 112, 113, 114, 115, 116,117, 118, 119, 120, 121, 122, 123, 124, 125, 126, 127, 128,129, 130, 131, 132, 133, 134, 135, 136, 137, 138, 139, 140,141, 142, 143, 144, 145, 146, 147, 148, 149, 150, 151: n = A,T,C or G
  misc_feature 152, 153, 154, 155, 156, 157, 158, 159, 160, 161, 162, 163,164, 165, 166, 167, 168, 169, 170, 171, 172, 173, 174, 175,176, 177, 178, 179, 180, 181, 182, 183, 184, 185, 186, 187,188, 189, 190, 191, 192, 193, 194, 195, 196, 197, 198: n = A,T,C or G
  misc_feature 199, 201, 202, 203, 204, 205, 206, 207, 208, 209, 210, 211,212, 213, 214, 215, 216, 217, 218, 219, 220, 221, 222, 223,224, 225, 226, 227, 228, 229, 230, 231, 232, 233, 234, 235,236, 237, 238, 239, 240, 241, 242, 243, 244, 245, 246: n = A,T,C or G
  misc_feature 247, 248, 249, 250, 251, 252, 253, 254, 255, 267, 274, 284,285, 286, 287, 288, 289, 290, 291, 292, 293, 294, 295, 296,297, 298, 299, 300, 301, 302, 303, 304, 305, 306, 307, 308,309, 310, 322, 393, 394, 395, 396, 397, 398, 399, 400: n = A,T,C or G
  misc_feature 401, 402, 403, 404, 405, 406, 407, 408, 409, 410, 411, 412,413, 414, 415, 416, 417, 418, 419, 420, 421, 422, 423, 496,538, 549, 555: n = A,T,C or G
aggtattcgacccacgcgcccgtagtttttatctttgaccaaccgaacatgaccaaaaaccaaaagtgcattcaaccttaccaaaaaaaaaaaaaaaaaaaagtnnnnnnnnnnnnnnnnnnnnnnnnnnnnnnnnnnnnnnnnnnnnnnnnnnnnnnnnnnnnnnnnnnnnnnnnnnnnnnnnnnnnnnnnnnnnnnnannnnnnnnnnnnnnnnnnnnnnnnnnnnnnnnnnnnnnnnnnnnnnnnnnnnnnngctgtttcctgngtagaanattgttatcnnnnnnnnnnnnnnnnnnnnnnnnnnnagcccggggagncataaaagtgtaaaagcctgggggtgccttaatgaagtggagctaacctccacatttaatttgcgtttgcnnnnnnnnnnnnnnnnnnnnnnnnnnnnnnnctgtcggtggccagctgcattaatgaaatcgggccaaacgccgcgggggaaagaaggccggtttgcgttattngggccgctcttcccgctttcctcgctcactggactccgctgncgctcgggtcnttaccngcttgcgggccgaagccgggtaattcaagcttcaac

SEQ ID NO: 1306 - DNA, 566 bp, Homo sapiens
  misc_feature 540: n = A,T,C or G
aggtgttagttaccacttcattactggagggcactgtcacaaacttctgactatccagacttgaagctggaagcaaatacaagtctgaggggctctaagctgggaggttctggcctctccctagctctctatggctctacctctctgcttgaagctccctgcactgcactcccattactctgactggggataggaccactgctgacagggccccacctcaacttctttcattgccctcttccaggaaatcccaccctgggatacttcaaagacctcatatgctacaaagatcaaggccacctaatgagtgctctagagatcagcaccaaagatgcttgccagagtcttctctatatgtcctccctcctgtatcaaataagtcaccaagtatagctgactatctccataacatctctccagttgtggccttagttccagccttcatcactctgcattctgaggagctgatatctgtctcctgctgccagcccctcacccccagtcggtctccaacatacttttttttttttttttcggacncgtgggtcgaaagccttgaccctgcc

SEQ ID NO: 1307 - DNA, 188 bp, Homo sapiens
acttttttttttttttttaagctgctccttgaggataagggctaactcacaggcagtgcaccaagagccactataaaaagatccttaatgagcaaaatatatcccctattattttcctacaagttgctttttacttgagtaggaacccttgattgatttttgcggacgcgtgggtcgaagcttgacct

SEQ ID NO: 1308 - DNA, 585 bp, Homo sapiens
  misc_feature 114, 124, 158, 188, 260, 270, 275, 288, 315, 371, 480, 489,507, 508, 540, 569: n = A,T,C or G
acttagggcgaattggagctccccgcggtggcggccgaggtcggccgcacttttttttttttttttttttttttttgccttcaacaaaaaaggaatttattggctcacataagngaaagctganaaatagatctcaattcaggtccaatttgatccanaagttcccaagggctccaatagactccctntcaccctggtacctgcccgggcggccggccgcccgggcaggtgtcaagcttcgacccacgcgtccgtcttancctacaaggnggctnttatgtacatagntgggtaatacatccaattaatgatgtntgacatgctatttttgtagggagaaaatatgtgctaatgatattttgagttaaaanatcttttggggaggatttgctgaaaagttgcacttttgttacaatgcttatgcttggtacaagcttatgctgttttaaattattttaaaaaaataaaatactgtttgtnagaaaccanctggtttagaaaagtttnntatgtgacgataaaactaagaaatttcccttnttattcctagtatttttcagcactccatnaattctattaccctaa

SEQ ID NO: 1309 - DNA, 621 bp, Homo sapiens
  misc_feature 201, 209, 221, 250, 277, 308, 317, 337, 342, 343, 354, 355,356, 367, 384, 396, 406, 414, 418, 419, 425, 427, 432, 455,458, 465, 471, 474, 494, 500, 504, 507, 511, 513, 514, 516,521, 522, 523, 536, 549, 556, 557, 558, 559, 563, 564: n = A,T,C or G
  misc_feature 569, 574, 578, 582, 587, 589, 597, 608: n = A,T,C or G
ctatagggcgaattggagctccccgcggtggcggccgaggtcaagcttcgacccacgcgtccgcaagacccaagagagctgatggtgcagttccagtctcacagaagtctgctggagaatttcctctggattggagaaggtggtcttttcattctactcaggtcttctattgattggataaaggtgcacatacatcatggngggcaatnttttttactcanaggacatctgtgccaatgttattcccatncagaaacaccctccaagttgacacatnaaatttaaccaatacacttttccttatcttnacccaaaanttaaggttaaagaagttttnggatnnccctgaataannnattggccattnggaatgcccactttttnccttttttgggngaaaaaattntaaaattnaccnntttttntnaaaantaaaaaaaacttgttgggcttanggnccacctnggtttncanccttattaattcccagcccntttttngganggncccnanngncaggnnnggattccctttgngccccccgggaantttcaannnntttnngcccnggggntaanaaanaaggngnaaatcctnttttttttcanaaaaaaaaaaaaa

SEQ ID NO: 1310 - DNA, 294 bp, Homo sapiens
gggggggcatttcacgctacttagggcgaattggagctccccgcggtggcggccgcccgggcaggtcgcacttttttttttttttttttttacctagcccatgttaccaatctaaatgaactgtctatgcatagaaaactgctttatgcctaagataattactgggatttaagaaagtgagaaaaaagaataggtgggattgagaaattaggtaaaaacagaagaggccaactaaacccaagtgctgcccttcaagggctctagtaaccggacgcgtgggtcgaagcttgacct

SEQ ID NO: 1311 - DNA, 311 bp, Homo sapiens
actacttagggcgaattggagctccccgcggtggcggccgaggtactttaatcccgtcttacagaagagaaaactgagatttagcaacataaaagtatttcccgtaagtaaacagtagagccaagatcttgacctacgccatctgatacctgagcccatgctataaaagaggagcattagaaatatttgaaagatagaaatgagaactagtcaatatttattttgcttagcactgtattcagtattatggcatcttaaagtagttaagactcaatatttcatcaaaaaagtttaaaatctaatcagagaat

SEQ ID NO: 1312 - DNA, 383 bp, Homo sapiens
  misc_feature 23, 383: n = A,T,C or G
tacttagggcgaattggagctcnccgcggtggcggccgaggtcaagcttcgacccacgcgtccggccacattttcaatttagccatttttctcttattcacctttttctgctaattactctgtaattccactaagaaaagtcaatagataattccaataatgacttcactcctgagaattttattagctgctaacgcttgtctcatcataagcactcatatgttcattgagtaaatatttattgagtatttgctatggtccaggcactgtgctaagtattgaggataaaatggtgattgaaacattttcccttcttgattttaacatctacaaaataaaaagtatgttaatatcaaaaaaaaaaaaaaaaaaaaaaaaaaggn

SEQ ID NO: 1313 - DNA, 502 bp, Homo sapiens
ggcgaattggagctccccgcggtggcggccgaggtaccaaaagcctcactcacaattatttttgagatagctcccaatgagtttaatcactgctatgccaggtgtgtgaggctgctgtgggacaacaatcttgattcctagaagagtcataaatttctagggactacaggctcctgccaccatgcctggctaatttttgtagagatggggtttcaccatgttgcccaagctggtcttgaacttctgagctcaagcgatccacctgcctcagcctcccaaagtgctgggattacaggtgtgggccatcacgcttgccctagagtaatattctctattatcaaggtagaaagttcaacatatattcattagatctactttatagatactgttactcagatcacttatatcgttatatgtattttttgtcttcttaacttcaagtcttggatgagagaagaggtgttttaaatttctctgttatttctagggttctattcatttt

SEQ ID NO: 1314 - DNA, 512 bp, Homo sapiens
ctacttagggcgaattggagctccccgcggtggcggccgaggtacttagatgacaacatcaaaacatactctgatcaccccgagaaagtaaacaaagatgatgaggaattcatagaaagcaataaaatgcatgctattaatggaagaatgtttggaaacctacaaggcctcacaatgcacgtgggagatgaagtcaactggtatctgatgggaatgggcaatgaaatagacttacacactgtacctgcccgggcggccggccgcccgggcaggtccgggcaggtgctgtgagtgctctggcgaagtttggagcccagaatgaagagatgttacccagtatcttggtgttgctgaagaggtgtgtgatggatgatgacaatgaagtaagggaccgagccaccttctacctaaatgtcctggagcagaagcagaaggcccttaatgcaggctatatcctaaatggtctgactgtgtccatccctggtctggagagggctctgcagcaagtacct

SEQ ID NO: 1315 - DNA, 498 bp, Homo sapiens
agggcgaattggagctccccgcggtggcggccgaggtcttcgacccacgcgtccgcagatcagacgtggcgacccgctgaatttaagcatattagtcagcggaggaaaagaaactctgaatccgaccagtgtaggtgattacattagcctttgaagtcaacacaaagtttaaaacacctgcccgggcggccggccgcccgggcaggtgtacaagcttcgacccacgcgtccggctgaagacatccctagggcaggtagcagaatacctaattcaacctagagaggcacaggctgcacgagagtctctcagataaagccccattgaaaataaatttacaatctaaaatttaaaaacccgttaaaaaagcagcacagcatgaggagtcagtagatacactgaaagcaagattagatcttcaagactttcaaactataaaatttagaaaattataataaattatgaaatagaggccctttcatgtcaaaaagtcatgaaag

SEQ ID NO: 1316 - DNA, 306 bp, Homo sapiens
cttagggcgaattggagctccccgcggtggcggccgaggtcttcgacccacgcgtccgcgaaaagatgaggcaacaagtaagagaaaacagcattgagcttagagaattggagaagaaattaaaagcagcttacatgaataaagaaagggcagctcagattgctgaaaaggatgccattaaatatgaacaaatgaaacgtgatgctgaaatagccaaaaccatgatggaagaacacaagagaataataaaggaagagaatgctgcagaagacaaacgaaacaaagcgaaagcacagtacctgcccg

SEQ ID NO: 1317 - DNA, 466 bp, Homo sapiens
cttagggcgaattggagctccccgcggtggcggccgcccgggcaggtacagcgtgcatagggactcttgccttaaggagtgtaaacttgatctgcatttgctgatttgtttttaaaaaaacaagaaatgcatgtttcaaataaaattctctattgtaaataaaattttttctttggatcttggcaaaaaaaaaaaaaaaaaaaagtgcggccggccgcccgggcaggtacacttgttgataagagttttctgaaaacagtctatcaaatataaagaatggtttctatccaagaatcagcagtgagggaagaaatactaaacacctgtcaagaaatcagttattcattttaaaaaataacagaaccagtgctgctctctgtcataaaaaagaacatgtaaaatttatttttataggctttggtaacattatattccccacagaggccttcaatcctacttaaagata

SEQ ID NO: 1318 - DNA, 274 bp, Homo sapiens
aggtcaagcttcgacccacgcgtccggttactagagcccttgaagggcagcacttgggtttagttggcctcttctgtttttacctaatttctcaatcccacctattcttttttctcactttcttaaatcccagtaattatcttaggcataaagcagttttctatgcatagacagttcatttagattggtaacatgggctaggtaaaaaaaaaaaaaaaaaaaaaagtgcgacctgcccgggcggccggccgctcgtgatctagatccccgacct

SEQ ID NO: 1319 - DNA, 461 bp, Homo sapiens
gcgaattggagctccccgcggtggcggccgaggtcaagcttcgacccacgcgtccggtttgggtggaattataatattttagataagatttaagaggattctaattctagctacttgataggaatgcgaatgatgataaggcttttagagttagataagagagagggctagcaccctgatattctgtaattgaaacagagtttcaagtcctttggtcaagtattacccttattccttcaggaatagtagatattttaagattacagataggttatcttatctaatttacctacctattgttgaaattatttaatttgcatttaactgtgttttcacacctgcccgggcggccctcttacctgcttctgaccttatgctcaagaactcccctaactctggccagagctcagctttggcaactctgaccgttgagcagctctcatcccgggtttcctttacgt

SEQ ID NO: 1320 - DNA, 230 bp, Homo sapiens
  misc_feature 210, 222: n = A,T,C or G
acttagggcgaattggagctccccgcggtggcggccgcacttttttttttttttttttttaagctgctccttgaggataagggctaactcacaggcagtgcaccaagagccactataaaaagatccttaatgagcaaaatatatcccctattattttcctacaagttgctttttacttgagtaggaacccttgattgatttttgcggacncgtgggtcgaancttgacct

SEQ ID NO: 1321 - DNA, 472 bp, Homo sapiens
  misc_feature 24, 115, 336: n = A,T,C or G
gggcgaattggagctccccgcggnggcggccgaggtcaagcttcgacccacgcgtccggtttgtttttttcttacggcaactcaaagcaaagagctggaggagccagccattatnattgcttactctcatcgcttagcgccccaggtgggatgtgtttccaaaacacatttttgtatttataaggaaatgtagttaggattaattttattgtcctaattagaactcacattttggttaaatcctcaatttcattaaaaaaaaaaaaaaaaaaagtgcggccggccgcccgggcaggtacaatttaatttttctgcttgcccaagaaacaaagcttntgtggaaccatggaagaagatgaaaatgagactggcaaagaacaaatgctgaatctgaagaagatttgggcaaataatctgcatacttttaattgggaataagatggaaaatatgaatgctaaatcaaatttttta

SEQ ID NO: 1322 - DNA, 435 bp, Homo sapiens
ccgcggtggcggccgaggtacaagcttcgacccacgcgtccgctcacttcatcctcccagcaacctattatgatccattgccacaccaacttgctgatgaggaaagtggggcttaaggaaattaaagagctgttgtgggacttccaaagcagaagacagtaggctttcagaaatttgataaaaatagcactttgcatttcttgaatcttgagctaaatggaaattaatactaaacattctccactggtaaaatagagaataaggatattaacagtaaaagaaaagaagaagaaaaggaaatgtgcttccacagatttagaaacataagtaacaatctaagttaaggctttggcacctgcccgggcggccggccgcccgggcaggttcaaagactaccaaagtatgtatttgattttcacatgcaaacaacttaaa

SEQ ID NO: 1323 - DNA, 561 bp, Homo sapiens
  misc_feature 113, 114: n = A,T,C or G
cttagggcgaattggagctccccgcggtggcggccgaggtcaagcttcgacccacgcgtccgcagaaaccttgccatcattcttactgctggtttgcatctcatttatggtgnntctgggatttcttctcatgaacagaaagattcagtggctgttatatgccttgtcaatttaatgtattgccctatcctctttttgatcaaagatagagactaagactgggaattatgacagaaaaagtcatatttttctttaaatgattttgaaatgttaaaataggccaatatgagtcaaagtgcaaattttttggtgacctgcccggggcggccggccgcccgggcaggtactaagcatttcagttccaggagaataaaagaaattcctatttgaaatgaattcctcatttggaggaaaaaaagcatgcattctagcacaacaagatgaaattatggaatcaaaagtggctccttcccatgtgcagtccctgtcccccgccgccagtcctccacacccaaactgtttctgattggcttttagctttttggtggttttttttttttt

SEQ ID NO: 1324 - DNA, 479 bp, Homo sapiens
  misc_feature 409, 457: n = A,T,C or G
ccgcggtggcggccgcccgggcaggtgcctaatatatttactctctggtcctttacaggaaaagtttgccaacctctggcttagatgatcacctgaggccaaggagcctcgcccttgagcacaagactatgtagtcagtaaagcacaaacaaaattggggctttccctagcaaggttggaaaggcggagaagaaatggatttggataggtagtcaacaatgtctgttttatgttaccacacattttctcgagaaatttcaatcagctctctgagaacagattcatctttaaatgaatgttcataggtaacagcaactcatgcatcaatgttgcaaagtgagctcattttcacattgcttcaggttaggcagaaggtttggtaaagggattaacgtaattgtttccttgntgtttacaaaaagaagtcccagttggcatgccacataaaatcttctgnatctcactcttggttacatttc

SEQ ID NO: 1325 - DNA, 384 bp, Homo sapiens
  misc_feature 377: n = A,T,C or G
ctatagggcgaattggagctccccgcggtggcggccgaggtcacgcgtccgcagaggcccaggctcccaaaccgacaaagtgaaaagagaccagagaggccaagcatattgactggtgctgttcagggcctgctcttttccactcaccacttgttttgctgcttgtcacgaggagagttgttcctgtatgtggctgctctcagatctttccaagcaagccagtcatttgaagaggttttcttttcatgctggagggcaggctaagatcaatgagtggaagagagaaaggctgttttagctcaagttaaaggaacaccttctagccatcaaagccgcccaacagaggcaagggccaccacacatgagagagcgctctntccttaa

SEQ ID NO: 1326 - DNA, 280 bp, Homo sapiens
  misc_feature 15, 28, 61, 130: n = A,T,C or G
gcgaattggagctcnccgcggtggcggncgcccgggcaggtaccaaaataattaccaacantacattatgtacaccatttacaggagggtaacacaaaccttgacaggtagtaacttttcaccccacatnactgaacgcttaacactcctggctgttaattgtcagttcagtgttttaatctgacgcaggcttatgcggaggagaatgttttcatgttacttatactaacattagttcttctatagggtgatagcggacgcgtgggtcgaagcttgacct

SEQ ID NO: 1327 - DNA, 463 bp, Homo sapiens
ttagggcgaattggagctccccgcggtggcggccgaggtacatctgtagcctatgacttgagtctcttgaacttctaggaagaggcaaactacaaactactaggattctgatttcagatataggcattccagaatcttctctttacgagttcacctgctagtataatctccacaacttgaatggccttggttgttctgtaattgctgccaaaatcatcacaagctgtacctgcccgggcggccggccgcccgggcaggtcaagcttcgacccacgcgtccggatgggaattcaggtatgaaagaaaacaggcaaggaggcactgagggagaaagacacagactttatcgctctgtggctcattgttactggaatattctaaaactcttgttcacatgctattatgacttataaagcagcaacagctgaggcgcaccaggacacagcttccatttctttaacgt

SEQ ID NO: 1328 - DNA, 396 bp, Homo sapiens
  misc_feature 18, 380: n = A,T,C or G
agggcgaattggagctcnccgcggtggcggccgaggtcaagcttcgacccacgcgtccgaaaaatgggagacaatttcacatggactttggaaaatatttttttcctttgcattcatctctcaaacttagtttttatctttgaccaaccgaacatgaccaaaaaccaaaagtgcattcaaccttaccaaaaaaaaaaaaaaaaaaagacctgcccgggcggccggccgcccgggcaggtacaagctcgacccacgcgtccgaaataataaagctagaagtaatatttttccttttgtctattttccaaattgactcgatattgatggctacttttgtaagtttttatttaagtttaaagggaatatttattgatcacctntatgtgctcagtacct

SEQ ID NO: 1329 - DNA, 463 bp, Homo sapiens
cttagggcgaattggagctccccgcggtggcggccgaggtgcttcgacccacgcgtccgcttggggatttcgaggaagggttcataagggagattttagctgagaaataccatttgcacagtcaatcacttctgaccaagttatcagaaaaaggagaaaagaatgtctccccactaaatgttctagggtggtgagaaatctagggtggttatctaaatcaacaatatttagatattccaatatctaaatattgttggaaatactctcctgaagtgttcattgaactctaagagagacagcttgtgtatcagtggcagggtttaaggttcattttttattcccatattaatcctttaatatttagacaaatttccttctgagtttaaggataaaatgggatgggttctgcctgggcctggccctcatggggacatcaaagggcaatgttgcaaaaaaaaaaacc

SEQ ID NO: 1330 - DNA, 417 bp, Homo sapiens
aggtcaagcttcgacccacgcgtccgtgaacttttatcaaggcttttgctcttttagacttgagtttatctttataattaaggagaatggtttttaaaatttagttcctctgacaccccaaaattatcaaaataaattatgttgtagtgaatctgtgttttgaaagtcattgataggacttatatgagtcaaaattttatggattataaactaggctttatctggttggaaataattgcaatacaagaagcaactttattaaattagacctaaagtcacaatcttcttctttgctgctttttaaaaattacctattacctttaaaagatcccaaatttagaagaggaattaaaataaaagttaatgcaataaaacacttccacaatattctattacttcaacctctaatcaatgaaa

SEQ ID NO: 1331 - DNA, 460 bp, Homo sapiens
  misc_feature 10, 338: n = A,T,C or G
agggcgaatnggagctccccgcggtggcggccgaggtaccctaaaatttaaagtataataataataaatttttgttttaaaaaaagagtgttgtctttgtcttgtattttctgcagtttgcatgtgatattcttaggtatagattttttttagtatttgtcctgtatattgttattcgagcttctgggatctgtgttttggtgtctatcattaactttggaatattctcagtcattactgcttcaaacattcattctgttgctttttctcttctggtattatcattacacatatatcacaccttttgtaattctcccacagttcatagatattctgtngtatttatttattttttctctttgccttttagttttagagatttctattgacatcacttaaagatgattgatgagttgatgagaattgagagaattgatgagaattgttgatgagaattatt

SEQ ID NO: 1332 - DNA, 310 bp, Homo sapiens
acttagggcgaattggagctccccgcggtggcggccgcccgggcaggtttcctgcatttctaatgaagaaataggctggtcctcaattttgcagaagttgtatcatcataggtcatacctaacattcgtttgtcaagagcaaaaaaacccccttgggttctctggatctcacacagcccacaaaccttcagaatgtggttccttcccgcaggctttgtcacacttaagatccaagaacaaatcagcctggctttaacatggggtagatggcaagaaggataatgcggacgcgtgggtcgaaacttgacct

SEQ ID NO: 1333 - DNA, 483 bp, Homo sapiens
  misc_feature 89, 92: n = A,T,C or G
ccgcggtggcggccgaggtagcggtcgcactttttttttttttttttttttaaatagagatgaggttttgctatgttgcccaggctggnctnctggactcaagcaatctcccacttcaggctaccaaagtgctgggatttacaggcatgagccacctctcccagtctcagttattattttaataaatgagactgaacgtcctcttataaggctcactcccttgttcctactacatttgctctgtttaagtatctctttaaattcttcagttaagcggacgcgtgggtcgaagacctgcccgggcggccggccgcccgggcaggtattaacaggtgcttgcagtttgttgacttttttgaaaaaatcaagttgtaaacttttattacaaattaaaaatgaagttcttaaaaatctcaacttgaccagatatgaaacaatttaaaaacctttaaggcgtattgagaaaaaccaggcttttttaaa

SEQ ID NO: 1334 - DNA, 567 bp, Homo sapiens
  misc_feature 29, 114, 115, 198, 485: n = A,T,C or G
acttagggcgaattggagctccccgcggnggcggccgctcacctgcccgggcggccgctcgaggccgctcacctgcccgggcggccggccgcactttttttttttttttttttnncaaaacaaaacatgcttagcatgcacacttttaccacttttttcgagtggaaagtttattggcaatattaaatttcaccctanataggatatgagaatgttttgataaatcacaatttatagtatattaatgccatgtgagaattttgtttcccaagtaagagctcacatggaacttggtcattaaaccttaaagaaacctttctcacatatctataggcctcaaattgaaataatctataaatgaatttgtagatttctttttagtttaattcctgagtatacagggcaaaagcttatatcctttatataaacttctgctttggtctaaaactgatatatcttcacgttgaggtttcatctgaaatgcnccaccgtttgctgacttgcttcaatatgaatttggatggctataaaattgacctcggccgctctagaactagtgggatcccc

SEQ ID NO: 1335 - DNA, 567 bp, Homo sapiens
  misc_feature 551: n = A,T,C or G
tacttagggcgaattggagctccccgcggtggcggccgcccgggcggccgctcgaggccgcacttttttttttttttttttttggtaaacaggcggggtaagatttgccgagttccttttactttttttaacctttccttatgagcatgcctgtgttgggttgacagtgagggtaataatgacttgttggttgattgtagatattggcggacgcgtgggtcgaatcttgtacctgcccgggcggcccatagtttgtcaaccactggtgtaaaaccttagttatatatgatctgcattttcttgaactgatcattgaaaacttataaacctaacagaaaagccacataatatttagtgtcattatgcaataatcacattgcctttgtgttaatagtcaaatacttacctttggagaatacttacctttggagggaatgtataaaatttctcaggcagagtcctggatataggaaaaagtaatttatgaagtaaacttcagttgcttaatcaaactaatgatagtctaacaactgagcaaggatcctcatctngagaagtgcttaaaat

SEQ ID NO: 1336 - DNA, 442 bp, Homo sapiens
  misc_feature 152: n = A,T,C or G
ccgcggtggcggccgaggtcaagcttcgacccacgcgtccggaagatcctgcggaaggaatatgtttttgctgactccaaagtaagtgacagcaaacttctaaaatgggctgtgaggtagggaggggacacaagcgttttgaggctcgctgngtgccagggagtgtatcattagctcactcaattcccagaacaacccatttcacacctgggaaaggtgaacttagagaagttgaggatcatgttccaggttggcctggatttgagccatcactgtctcaggagtagggaggcttcccactttgcccagctgcctcccagcctcgaggccacatcctttatgacccacatctaactcagccccacacctgggggaaaggctttcagcttctctgggctggacttgggaaatctttgggacactcctgacctgcccgggcggc

SEQ ID NO: 1337 - DNA, 400 bp, Homo sapiens
  misc_feature 91, 92, 286: n = A,T,C or G
ccgcggtggcggccgcccgggcaggtgtccccatgagggccaggcccaggcagaacccatcccattttatccttaaactcagaaggaaatnngtctaaatattaaaggattaatatgggaataaaaaatgaaccttaaaccctgccactgatacacaagctgtctctcttagagttcaatgaacacttcaggagagtatttccaacaatatttagatattggaatatctaaatattgttgatttagataaccaccctagatttctcaccaccctagaacatttagnggggagacattcttttctcctttttctgataacttggtcagaagtgattgactgtgcaaatggtatttctcagctaaaatctcccttatgaacccttcctcgaaatcccaaggt

SEQ ID NO: 1338 - DNA, 475 bp, Homo sapiens
tagggcgaattggagctccccgcggtggcggccgaggtgcttcgacccacgcgtccgcttggggatttcgaggaagggttcataagggagattttagctgagaaataccatttgcacagtcaatcacttctgaccaagttatcagaaaaaggagaaaagaatgtctccccactaaatgttctagggtggtgagaaatctagggtggttatctaaatcaacaatatttagatattccaatatctaaatattgttggaaatactctcctgaagtgttcattgaactctaagagagacagcttgtgtatcagtggcagggtttaaggttcattttttattcccatattaatcctttaatatttagacaaatttccttctgagtttaaggataaaatgggatgggttctgcctgggcctggccctcatggggacatcaaagggcaatgttgcaaaaaaaaaaaaacctgcccgggcggc

SEQ ID NO: 1339 - DNA, 307 bp, Homo sapiens
  misc_feature 116: n = A,T,C or G
cttagggcgaattggagctccccgcggtggcggccgattctctgattagattttaaacttttttgatgaaatattgagtcttaactactttaagatgccataatactgaatacagngctaagcaaaataaatattgactagttctcatttctatctttcaaatatttctaatgctcctcttttatagcatgggctcaggtatcagatggcgtaggtcaagatcttggctctactgtttacttacgggaaatacttttatgttgctaaatctcagttttctcttctgtaagacgggattaaagtacct

SEQ ID NO: 1340 - DNA, 384 bp, Homo sapiens
  misc_feature 109, 116: n = A,T,C or G
tagggcgaattggagctccccgcggtggcggccgcccgggcaggtctactcaagtagtctttaccccctactcaagtagggggtaaagtgtagaacaaggagtttgatntgtgttngctgattgtgaaccatcaattgagataactcactaccttcaggccagccagttacatacttttgaaaagccaagagtgaagcagggttgtttttcatccaattcttggtctttttgttaaaggcagcaataagatagggtggtttcgggcaatcacttagctaattggctctctatagtcatacctggataatatttgtagtcatacctgggataatatttaaagggaagaaactaaacatagtccttaagtaggaaccaactacaat

SEQ ID NO: 1341 - DNA, 510 bp, Homo sapiens
  misc_feature 81, 90: n = A,T,C or G
ccgcggtggcggccgaggtcctagcttgagtcgacccacgcgtccggccgctgttcgtatttcttattctacaacaagggngcagcctanaggcaaaacacatcccattgtcatttttttgtaaataaagttgtattggaacatggccactctcatttgttttctattatttatggctgctttcacttacaacctgagtggttgccacagaaactgtatggcctgcaaagtctaaaatatttactatgtagctttttcttttctttttggagacagtgtgccactctattgcccaggctggagtgcggtggtgtgatcatggctcattgcagcctcaaactcctgggctcaagcaatcctcccgcctcggtctcccaagtagttgggactacaggcatgagccaccatacccggctaatttttttaaagtttttggtagaaatggagttttttaatgttgcccaggctggtcttgaactccctggtcttaaatgacccttttcccatcag

SEQ ID NO: 1342 - DNA, 465 bp, Homo sapiens
  misc_feature 418, 434, 447: n = A,T,C or G
agggcgaattggagctccccgcggtggcggccgaggtcagttatttattgatttaatcattgtaatctccaatagagattacaatagagatctccaacatgatttcatgcatttagaggagaaatatttcctggttaagtggaaaattgtgcggatgtggcttctggaagaccttcattctaaagcagcggacgcgtgggtcgaaacctgcccgggcggccggccgcccgggcaggtctgcaatccagctaggcatgggagggaacaaggaaaacatggaacccaaagggaactgcagcgagagcacaaagattctaggatactgcgagcaaatggggtggaggggtgctctcctgagctacagaaggaatgatctggtggttaagataaaacacaagtcaaacttattcgagttgtncacagtcagcaatggngatctttttgctngtcttgcccattcctgga

SEQ ID NO: 1343 - DNA, 555 bp, Homo sapiens
  misc_feature 112, 485, 532: n = A,T,C or G
ctatagggcgaattggagctccccgcggtggcggccgaggtaccagctttaaaacccatacccctccagggttcttttctgttgctggtgaagtgcactttttaaaagagtnattcataccatcaagatttttgacaagaaaattttagaaaaactgtggaagaaaactgattgctcttagttctagccatgtgtaattgctgaccacctgaaatggtccaaactgagatttgctaaagcataaaatacacaccatatttcaaaggtttttaaaagaatgtaaaacatttcattaatttcggacgcgtgggtcgaagcttgacctgcccgggcggccgaggtggatggacccatccattcaggcagggggtgtggggtgtcccctgtgcttagaaaccacctagcatcataagctgcaacagcactttattgggatctgagtctacagttcacatagggaggtgaagccgtgggagaagcagggngtaaaaaaaaaaaaagggggggggactttacccccctaaggacaggntgctttccaaacctaacaaaaac

SEQ ID NO: 1344 - DNA, 408 bp, Homo sapiens
  misc_feature 225, 256, 397: n = A,T,C or G
ccgcggtggcggccgaggtcaagcttcgacccacgcgtccggtaatttgttgcacactatgtaacaaaacaactgaagatatgtttaataaatattgtacttattggaagtaaaaaaaaaaaaaaaaaaaaaaaaaagtgcggccggccgcactttttttttttttttttgctggggtttttttcttttctttttttttcagctacaggaatttagccaattcanaggaaatcttccccataattatggaactttnttacagattttaccaagtctggtcaacccaataagaaaaagactgaaataacaataacaacttcaacaaataaaaaaacagttaagctaaataaacagatgattgcagaatttatgtgattactgggtacctcggccgctntagaactagtg

SEQ ID NO: 1345 - DNA, 434 bp, Homo sapiens
ccgcggtggcggccgcccgggcaggtaccaagtttgagttgaaacggtatgtgacttccccagctgcaccctgggcagtgactgcatgcatcactgagaggtcctgtctacagcagataaaactccacagatcactcctcctgtaatccctctaagtgctccaaggcagcagaaaggcccagtgcattgaggctggaagcaggagcagagactctgggatatagtgcgaaagtctctttcccctgtagttgggctaatctggaaaaactcaaaaacctggcctgattaccgaggtttcttttatggatatttagtatttagataaaatttttacagtattcttgaaatgaacccaattaaacacatagttctcagtcttgaccacacattaagaatcatctggtagacttctgtaaactaccaatgcctggcca

SEQ ID NO: 1346 - DNA, 292 bp, Homo sapiens
  misc_feature 221: n = A,T,C or G
ccgcggtggcggccgcacttttttttttttttttttttacctgaaaatgcttattctagcttcacatttgattgtttggctaagaagaaaattatttattagacttaattttcctcacgagtttaaagattgcttcagatcttaaacttctaatgaggaaagctgagaagtccaatgccattctgattcttgcaacttacaagtagtctttttttgtctanacgctttcaggaccttcttttttcctcagtcagtgtatccaaaccttcacagtgatatcttttgggtacct

SEQ ID NO: 1347 - DNA, 327 bp, Homo sapiens
  misc_feature 25, 30, 68, 91, 96, 97: n = A,T,C or G
ctccccgcgggggcggccgcccggnaggcnaagcttcgacccacgcgtccgctttaaagggaattctntgtagagtgggaggcgaacacgnctggnncttccaactcaggaattctcgtggctgggctgggtcagcgatggctttgtctctttatgtctaaagtgccctatggcatgctgaaggttacctaaccattctttaaaaggagaatgaccctccatgggaatggccagcctgccaactgtgcaattgaagaagacccgatggatcaaccccatgtcttccttggggagaaagtgcataaaccaggggtccctttttttttt

SEQ ID NO: 1348 - DNA, 190 bp, Homo sapiens
aggtcaagcttcgacccacgcgtccgcaaaaatcaatcaagggttcctactcaagtaaaaagcaacttgtaggaaaataataggggatatattttgctcattaaggatctttttatagtggctcttggtgcactgcctgtgagttagccttatcctcaaggagcagcttaaaaaaaaaaaaaaaaaaagt

SEQ ID NO: 1349 - DNA, 518 bp, Homo sapiens
  misc_feature 498: n = A,T,C or G
gcgcgtatacgactcctatagggcgaattgggagctccccgcggtgggcggcccgaggtacaaactatgtatctgaaacacttctatttggcaattttataacaaatcaaattttaaaaagaacaaaagagattgcagattacttcgcagatacagaataaagcaattgatgaagtgcttaagcaaaagaaacaacaaaaaaagaaaacacactgcttttctttttaaaaataaaatcacattgctatagatcaaatggataatacccttattaaacaaccattccagaatgtcttatagtagcagtgcttttatttgcacttcacttaattttataagactcattttcatgtatatagctctttacccccattgttaacgaataaagtctctcataatttttacacttttaaattttttaaagcaaatgagaaatgatttatgtatcgtggaacctttcccattttggaaccaaaggttttaattctatatttttgnctaatatttctttaaaaaat

SEQ ID NO: 1350 - DNA, 240 bp, Homo sapiens
  misc_feature 155: n = A,T,C or G
ccgcggtggcggcccgcccgggcaggtactatctataaaggaggtttgatgttttcattactgtttttgtaaatatttcagcattatctttaaaaagtaaggacattggccgggtgcggtggctcatacctgtaatcccagcgctttgggaggcnggtgggtggatcacctgaggctagatagttttattcacttggctgtttcaccaaaaaaaaaaaaaaaaaaaaagtgcggccacct

SEQ ID NO: 1351 - DNA, 851 bp, Homo sapiens
  misc_feature 495, 499, 510, 551, 556, 562, 586, 595, 622, 628, 632, 635,645, 659, 663, 669, 670, 705, 723, 730, 735, 747, 751, 762,773, 786, 789, 795, 815, 817, 819, 822, 828, 832, 833, 834: n = A,T,C or G
tatagggcgaattggagctccccgcggtggcggccgaggtactgagcaggattaccatggcaacaacacatcatcagtagggtaaaactaacctgtctcacgacggtctaaacccagtagaaacaaagtgcggccggccgcccgggcaggtgccgcacttttttttttttttttttttagaataggattgaattttattaaaaacaaaaataaatctaaaaagcttccttcagttacaaatatgcacaagaatttctgcattacatcatttgacataaaatgttctgaatgacagaagtagaagtagaacttactaccatttgaagacaggagttgagcgctgaaaaccacacacatttatagaaagaaaccaaagtttcacagggaagacctgtgatctctggctacaggagctgaaattaggaacatgaaagaaacttggagagagaagacattcaatactctaaaatacttcagcaaaaatagtcaaacatntgtnaacaacttggnacaaaactttatatggtggggggtggctatgccggaaaaantcttnactggntattattcacctcaaaaagggggnttttaatgntcacgaatccttcctttaaaataaaanaaagcntggnttntttttctggngtcaagagtaaaangtantagggnntactcagggatggtttggaattttaaaacggggcnttccacccttggtggctngtggcantttancccaaaacggcnaaanaaccggcccgnggtcaacttgnaaaacctggcggnttnaaatanggaccccgggtgggggattnantnagntttganccgnnncttgggggggccggccc

SEQ ID NO: 1352 - DNA, 807 bp, Homo sapiens
  misc_feature 150, 366, 435, 460, 468, 490, 525, 536, 546, 549, 559, 572,573, 577, 612, 617, 627, 636, 661, 682, 687, 689, 699, 702,708, 712, 716, 719, 734, 735, 742, 747, 751, 752, 755, 758,769, 772, 774, 775, 776, 781, 793, 803, 806: n = A,T,C or G
cgaggtcaagcttcgacccacgcgtccggttactagagcccttgaagggcagcacttgggtttagttggcctcttctgtttttacctaatttctcaatcccacctattcttttttctcactttcttaaatcccagtaattatcttagganaagcagttttctatgcatagacagttcatttagattggtaacatgggctaggtaaaaaaaaaaaaaaaaaaaaaaggtgcgacctgcccgggcggccgctcgaggccgcccgggcaggtactatgtcgattcgacagaacattcagaagattctcggccttgccccttcacgagccgccaccaagcaggcaggtggatttcttggcccaccacctncttctgggaagttctcttgaactcaagaactctttattttctatcattctttctagacacacacacatnagactggcaactgttttgtagcaanagccatangtagccttactacttgggcccntttctaggtttgaattatttctaagccttttgggnatgattagagngaaaatggcnccngcaaacttgnaggggcttttggnnccanaatgatttttaataaaaaaaaggggattgaatagntaaantcaagggaanggtttatgnaaaggaaaaaaaaaagcctccttcntggtttaatttacaaaaggtnttttntngggggaccgnctntaaagnactngggnttnccccgcaaggtgggnnggtattnacccntttnnggnttnaaaaaaaaaanttngnnngggtnaaccctggaacngggggggttnggng

SEQ ID NO: 1353 - DNA, 537 bp, Homo sapiens
tatagggcgaattggagctccccgcggtggcggcccgcccggcaggtcttcgacccacgcgtcccggggtttcaaactgaataactcattgttgggtctggatctgtaaaaaggttttgtcactgatgggcaatatggagagaatgtaaaaatatctaacttcaaacagaaaaaagaaacaactggatgaaagctataaacaatagttcagaagattggcgtagaggatttacctacagaacttcaggagattcctaagaaggccttcagtgatcttttcatcaatatcatcaggccttatcattgtttcacatttgcttctctttaccatagggaatataataattatttactggttaacttcctagggagattgcctgcggcttatttaagatccaaattttaaagtaataatttctgttgaagctgcttgtgaggtggttgggtgggcagatagagtgaagccagggacacacactaaatgagcccgggatgtaggcaggttttgatgttttgcttgcttttatccctaacatt

SEQ ID NO: 1354 - DNA, 305 bp, Homo sapiens
tatagggcgaattggagctccccgcggtggcggccgattctctgattagattttaaacttttttgatgaaatattgagtcttaactactttaagatgccataatactgaatacagtgctaagcaaaataaatattgactagttctcatttctatctttcaaatatttctaatgctcctctttaagcatgggctcaggtatcagatggcgtaggtcaagatcttggctctactgtttacttacgggaaatacttttatgttgctaaatctcagttttctcttctgtaagacgggattaaagtacct

SEQ ID NO: 1355 - DNA, 508 bp, Homo sapiens
agctccccgcggtggcggcccgcccgggcaggtcttcgacccacgcgtccggggtttcaaactgaataactcattgttgggtctggatctgtaaaaaggttttgtcactgatgggcaatatggagagaatgtaaaaatatctaacttcaaacagaaaaaagaaacaactggaatgaaaagctataaacaatagttcagaagattggcgtagaggatttacctacagaacttcaggagattcctaagaaggccttcagtgatcttttcatcaatatcatcaggccttatcattgtttcacatttgcttctctttaccatagggaatataataattatttactggttaacttcctagggagattgcctgcggcttatttaagatccaaattttaaagtaataatttctgttgaagctgcttgtgaggtggttgggtgggcagatagagtgaagccagggacacacactaaatgagcccgggatgtaggcaggttttgatggtttgcttgc

SEQ ID NO: 1356 - DNA, 226 bp, Homo sapiens
  misc_feature 141: n = A,T,C or G
cgcccgggcaggtactatctataaaggaggtttgatgttttcattactgtttttgtaaatatttcagcattatctttaaaaagtaaggacattggccgggtgcggtggctcatacctgtaatcccagcgctttgggaggcnggtgggtggatcacctgaggctagatagttttattcacttggctgtttcaccaaaaaaaaaaaaaaaaaaaaagtgcggccacct

SEQ ID NO: 1357 - DNA, 490 bp, Homo sapiens
tatagggcgaattggagctccccgcggtggcggcccgaggtcgcgtcccgagtgtttccactctgtccataaaatgggagctaatattctccaacctgtgtgcctgacatgatggttaaagggattaaacaaaacaatagtttgtaatttattctgtcagagcaaactgctggtaaataaaagggctagtgacgaaaaataaattttaaaaaacctaataaaacaagtttgtaatttataattgtatacaaataaaagatgttacaaaaaaaaaaaaaaaaaaaaaggacctgcccgggcggccggccgcccgggcaggttttatttaacattcaaacttcattaagacatgtgcaatatggcaattttactggggattaaaccctacctaggattgcttgctggggcttagcaacagggtccagttcacacttagcactaattaaatactttattgaataaatacaataccaaacaaaatgcattcaaa

SEQ ID NO: 1358 - DNA, 286 bp, Homo sapiens
ccgcggtggcggccgaggtcaagtttcgacccacgcgtccgcattatccttcttgccatctaccccatgttaaagccaggctgatttgttcttggatcttaagtgtgacaaagcctgcgggaaggaaccacattctgaaggtttgtgggctgtgtgagatccagagaacccaagggggtttttttgctcttgacaaacgaatgttaggtatgacctatgatgatacaacttctgcaaaattgaggaccagcctatttcttcattagaaatgcaggaaacctgcccg

SEQ ID NO: 1359 - DNA, 294 bp, Homo sapiens
  misc_feature 233, 246, 249, 256: n = A,T,C or G
cgcggtggcggccgaggtcaacgcttcgacccacgcgtccgggacctcagaatataaaaatatggtttttttttcagacttactagttttttttgataattcctctacgaatgttgatttaacttagaaatatgtaaatttaatattcaaaaccaaattattttttaaagaggaaaaaaatataaaacctgcccgggcggccggccgcacttttttttttttttttttttttnaaactttaatagngtncggaagntgaataatttatgaaggagaggggtcagggttgattcg

SEQ ID NO: 1360 - DNA, 384 bp, Homo sapiens
  misc_feature 4, 61, 64, 118, 120, 165, 168, 187, 189, 195, 232, 376: n = A,T,C or G
actnctatagggcgaattggagctccccgcggtggcggccgaggtcttgagtcgacccacncgnccggagatgtatactgccactataggaactataagaaaaagtcaaatggaaatntnataaataaaaaccacagtcactataatgaggaaatactttgatanggngtcagtgaactcaaaaatnantcaatngaaactactcaaactaaaactcaaagagaaaaaaaangatgggagataattattttttaagaattggtcatcaaaatgtagcaacaagttcgccttatcctatatcatttgaattttcaaaaaataagctcattatacaatctttaaaatattttgaatagaactgtttcatgtgttattngtgaaaat

SEQ ID NO: 1361 - DNA, 353 bp, Homo sapiens
ccgggcaggtctactcaagtagtctttaccccctactcaagtagggggtaaagtgtagaacaaggagtttgatctgtgttcaactgattgtgaaccatcaattgagataactcactaccttcaggccagccagttacatacttttgaaaagccaagagtgaagcagggttgtttttcatccaattcttggtctttttgttaaaggcagcaataagatagggtggtttcgggcaatcacttagctaattggctctctatagtcatacctggataatatttgtagtcatacctggataatatttaaaggaagaaactaaacatagtccttaagtaggaacaactacaattttaac

SEQ ID NO: 1362 - DNA, 362 bp, Homo sapiens
  misc_feature 292, 329: n = A,T,C or G
actgtttttttttatttgttgaagttgttgttgttatttcagtctttttcttattgggttgaccagacttggtaaaatctgtaagaaagttccataattatggggaagatttcctctgaattggctaaattcctgtagctgaaaaaaaaaaaaaaaacctgcccgggcggccggccgcccgggcaggttacaagcttcgacccacgcgtccgggaaattttaattaaaaataggtgaacattttaaatgacctaatacatatttagtccacattgaaactttggcattttgncattgccattaaaatttttgatggcattaaaattttnatgccattaaaaatttttgatcagtaggtagca

SEQ ID NO: 1363 - DNA, 281 bp, Homo sapiens
  misc_feature 207, 262: n = A,T,C or G
ccgcggtggcggccgaggtaccacggttgtcccctgaaaggtgttgtgtccctcaccagactgggagcacctcaagggcagaacccatgtcatgttcctttttgtatttccagacctgaaactgccagtaaataaaccctaaaagtagaaagaaaaaaaaaaaaaaaaaaagtgcggccgccgcacttttttttttttttttttttnggaaaaccaaacatgctttatttcatttttttcacaatttatttaaacatctcanatatacaaaataggtacct

SEQ ID NO: 1364 - DNA, 422 bp, Homo sapiens
ccgggcaggtcaggagtgtcccaaagatttcccaagtccagcccagagaagctgaaagcctttcccccaggtgtggggctgagttagatgtgggtcataaaggatgtggcctcgaggctgggaggcagctgggcaaagtgggaagcctccctactcctgagacagtgatggctcaaatccaggccaacctggaacatgatcctcaacttctctaagttcacctttcccaggtgtgaaatgggttgttctgggaattgagtgagctaatgatacactccctggcacacagcgagcctcaaaacgcttgtgtcccctccctacctcacagcccattttagaagtttgctgtcacttactttggagtcagcaaaaacatattccttccgcaggatcttccggacgcgtgggtcgaagcttgacct

SEQ ID NO: 1365 - DNA, 533 bp, Homo sapiens
  misc_feature 13, 188, 353, 364, 365, 367, 369, 370, 377, 395, 397, 408,411, 423, 428, 435, 441, 447, 454, 504, 510, 512: n = A,T,C or G
tactatagggcgnattggagctccccgcggtggcggccgaggtcttcgacccacgcgtccgattgattaatacctgtcacagatacattttggtttacaaatcaatgaacaatggagggaactctgtccttaatcttggtacgagacaatgaaccccaggtacttaccccagacaacgacgccgcttnaccatgatgatggacaacaggcaactttttttttggagtttcagcttgcttccaacagggacggtgagtgtgaggtttattcccatttctaagacgatagaagttttcagcctaagccgtattcctaggtaagcagctggattgcagtttttgtcttggaaattntccttaattgnntnanncgttaanattaacaaactagctggntnttaaatttttntcntttacccattanaggtncccccanaaattnaaaatnaaatttntgcaattaatttttgaaccttgccccggggtgggccctggcccccccctngacaangnttttttttttttttttttttt

SEQ ID NO: 1366 - DNA, 299 bp, Homo sapiens
  misc_feature 3: n = A,T,C or G
ctnctatagggcgaattggagctccccgcggtggcggccgcccgggcaggtcttgagtcgacccacgcgtccggagctgctcaatagtgagaatcaggtgatataatgcatgtggaaaaagaatgtgaaaaatctaacactttagattgtatacagtgttttttaaaaagacacaaaaaaactgtcaacatgagaaacataagcaaagttttactcaagacaaacatccacgagtcacaacttcagttattcccagtcttcaaaataacagaagggcaaagcaaaggtaaacatgcaaa

SEQ ID NO: 1367 - DNA, 313 bp, Homo sapiens
  misc_feature 5: n = A,T,C or G
gactnctatagggcgaattggagctccccgcggtggcggccgattctctgattagattttaaacttttttgatgaaatattgagtcttaactactttaagatgccataatactgaatacagtgctaagcaaaataaatattgactagttctcatttctatctttcaaatatttctaatgctcctcttttatagcatgggctcaggcatcagatggcgtaggtcaagatcttggctctactgtttacttacgggaaatacttttatgttgctaaatctcagttttctcttctgtaagacgggattaaagtacct

SEQ ID NO: 1368 - DNA, 462 bp, Homo sapiens
  misc_feature 399, 457: n = A,T,C or G
ccgcggtggcggccgttaaaggaataatctgcagaacatcttgatttacaagggacaaaatgatgcaaattatatgctgtccaacctactggtgaactggatcagaatggtccaaggactgttaaacagaggaagtatttacattctgaaaacttgcggacgcgtgggtcgaagcttgtacacctcggccgaggtaccttctgtcacaaagacccaagcttcctccagcttccaggatagcagtcagccagctggaaaagccgaagggatcagggagccaaaggtgactgggaagctaaagcaacaatcacctaaattacagtcctccaagaaagttgctttcctcaggcagaatgcccctcccaagggcacagacacacaaacaccggctgtgttatncccatccaagactcaggccaccctgaaacctaaggaccatcatcagcccctttggaangggcc

SEQ ID NO: 1369 - DNA, 294 bp, Homo sapiens
  misc_feature 294: n = A,T,C or G
ccgggcaggtcgagcggccgcccgggcaggtttcctgcatttctaatgaagaaataggctggtcctcaattttgcagaagttgtatcatcataggtcatacctaacattcgtttgtcaagagcaaaaaaacccccttgggttctctggatctcacacagcccacaaaccttcagaatgtggttccttcccgcaggctttgtcacacttaagatccaagaacaaatcagcctggctttaacatggggtagatggcaagaaggataatgcggacgcgtgggtcgaaacttgacctn

SEQ ID NO: 1370 - DNA, 161 bp, Homo sapiens
ccgcggtggcggccgcccgggcaggtgtcgacccacgcgtccgacgactcactatagggatctagatcacgagcggccggccgcccgggcaggtacagagatttaaatgaaatcttcgaaagaataaatttgcttttcagtccactgtattttcaaaattt

SEQ ID NO: 1371 - DNA, 395 bp, Homo sapiens
  misc_feature 228, 229, 230, 231, 232, 233, 234, 235, 236, 237, 238, 239,240, 241, 242, 243, 244, 245, 246, 247, 248, 249, 250, 251,280, 335, 357: n = A,T,C or G
ccgcggtggcggccgaggtacttcaaagttattgcacatacacttgtttactttgtatgttttgcaggattaaactttgtataatctttttacaaaatttttttttcagtatgcaagcttgcaagatgaaaataaaacctgtttgcctgataaaaaaaaaaaaaaaaaaaaaaagtgcggccggccgcccgggcaggtcttgagtcgacccacgcgtccgccggagannnnnnnnnnnnnnnnnnnnnnnntgatctagatcacgagcagccgcactttnttttttttttttttttttgacgaattcaggagtcctttattagccggcagccganagacagctagcgctcaaaattntcttggccccgaagaaggagctagattttcttttatac

SEQ ID NO: 1372 - DNA, 601 bp, Homo sapiens
  misc_feature 20, 154, 164, 165, 167, 171, 178, 182, 183, 184, 185, 186,187, 188, 189, 190, 191, 192, 193, 194, 195, 196, 197, 198,199, 200, 201, 202, 203, 204, 205, 206, 207, 208, 209, 210,211, 212, 213, 214, 215, 216, 217, 218, 219, 220, 221: n = A,T,C or G
  misc_feature 222, 223, 224, 226, 228, 240, 253, 260, 273, 276, 281, 288,294, 300, 316, 322, 323, 324, 326, 331, 332, 341, 345, 364,366, 370, 374, 383, 385, 386, 394, 396, 398, 403, 404, 415,420, 421, 424, 427, 433, 434, 435, 436, 437, 444, 452: n = A,T,C or G
  misc_feature 453, 454, 455, 457, 464, 467, 471, 472, 480, 483, 484, 485,487, 488, 489, 490, 497, 498, 499, 500, 501, 502, 509, 510,513, 515, 516, 518, 521, 539, 540, 548, 550, 552, 562, 570,575, 579, 590, 591: n = A,T,C or G
ttagggcgaattggagctcnccgcggtggcggccgaggtacatagcacattacatgtcaaatcccttctcgcccccatggatgacccccctcagataggggtcccttgaccaccatcctccgtgaaatcaatatcccgcacaagagtgctaaanaaaaaaaagnnanaggnctgcctntgtnnnnnnnnnnnnnnnnnnnnnnnnnnnnnnnnnnnnnnnnnnntngntatcaagcttantcgatacccgttnaccttgnggggggggcccgntancccanttttttntttccnttttanggggggggtaaatttngccccnnntnggggnnaaaaaaaangggnaaaaaaattttttttcctngngggnaaanttttttatntnntttttaanananttttnnccaaaaaaatntaaannggnccngggggnnnnntaaaagntaaaaaannnntnggggggnccntttnngggggggnccnnnannnnccaattnnnnnnggggggnncgncnntnttncccttttttttaaaaaannaaaaaaancncngccccccccntatttttnaattnaaanctccccccccnngggggggggg

SEQ ID NO: 1373 - DNA, 408 bp, Homo sapiens
ccgcggtggcggccgcccgggcaggttatagacaatatgctccttaaggtccctttcagtcccgttctatggatctgtgtagtttcgcttcttttttcaatatgctcagaattaggacaccaatgttaatggaagataaggaaactataccacctatcccttatagaagatttgtgcactaactaatatgagccctggaagatcaagccagtagaagatagaagatctatccctgctttatactttggatcatttatttgtgaagatcacaactttcaaagttttattatttcttaggtcttcatggaagttcggggaaattaactggatctacttctagtctaaataagctcagtgttcagagttcagggaatcgcagatctcagtcatcttccctgttggatatgg

SEQ ID NO: 1374 - DNA, 556 bp, Homo sapiens
  misc_feature 258, 276, 283, 294, 305, 308, 342, 345, 373, 378, 382, 391,394, 396, 401, 402, 421, 422, 423, 426, 434, 436, 443, 444,446, 447, 459, 476, 499, 500, 512, 514, 529, 534, 535, 543,544, 545: n = A,T,C or G
tacttagggcgaattggagctccccgcggtggcggccgaggtcaagcttcgacccacgcgtccgaagaagtgctatgtggcgagaaaaaaaagttttaatgtattggagaagttttaaaaaacccagaaaaatgcctttttttttttttttgaacataaactcaagattttattgtcttcataataaaagatgacacttagaactggatcacttggcccttctcttcttatctcctcccagttcaaaatgcttgcatnttttaatagccagcattnttttaanatctgcaggtngggcttaaacnccncttaaagcctttaaacacaaattttttttttggnggnttttaagcccttttttcccggaaaaaantcggntttnaattttggnccnanaaaannaccccttttgttttttttnnnaanaaaaaccncnttttttnntnngggggggaaccntgtcccggggggggggncgtttttaaaaaaaaaagggggnncccccccgggcngngggggattttttttntaaanntttttttnnnccccccccccc

SEQ ID NO: 1375 - DNA, 409 bp, Homo sapiens
  misc_feature 269, 270, 285, 316, 346, 347, 353, 354, 368, 370, 372, 373,378, 385, 387, 391, 396: n = A,T,C or G
ccgcggtggcggccgaggtacttcaaagttattgcacatacacttgtttactttgtatgttttgcaggattaaactttgtataatctttttacaaaatttttttttcagtatgcaagcttgcaagatgaaaataaaacctgtttgcctgattaaaaaaaaaaaaaaaaaaaaaaaaaaaagtgcggcctcgagcggccgcccgggcaggtactctataagaggtgtgggtgtcttgtttggtcaggatgttagaaagtgctgataagtnncatgatcagtgtatnccaaaaggtttttaggaagtatggcaaaaantgttgtattggcttttatggggacatgatnntagtcnncttcctttttaaanangnnttatnttgttcnantggnttaantggtttttaaaaa

SEQ ID NO: 1376 - DNA, 347 bp, Homo sapiens
  misc_feature 8: n = A,T,C or G
tacgactnctatagggcgaattggagctccccgcggtggcggccgaggtcaagcttcgacccacgcgtccggccacattttcaatttagccatttttctcttattcacctttttctgctaattactctgtaattccactaagaaaagtcaatagataattccaataatgacttcactcctgagaattttattagctgctaacgcttgtctcatcataagcactcatatgttcattgagtaaatatttattgagtatttgctatggtccaggcactgtgctaagtattgaggataaaatggtgattgaaacattttcccttcttgattttaacatctacaaaataaaa

SEQ ID NO: 1377 - DNA, 426 bp, Homo sapiens
ccgcggtggcggccgcccgggcaggtaatcacacaacactttcttttccaactgctgcaaagtgcatctacaatatgctattacagatccacttttaaaaggtttcctgtgacattacagcaagcctcttttttcaaacagaggaataatcccaaattcttcctcaaataaactccattccagtaaatggtaaatacataaaaaattacagtaagccagacacttaaaaggacagccaagaagtcttccaacagtttattagaaagaatgtagacatttaaaaaaatccccactgtcatgaacataaattgaggttttcagcccgggtataagctgaatcaaaaaaaggaaataaaaaatccaatagtgtattaaacatttttcactcatttgccatactgacagtgcaaatcaaatctggactaa

SEQ ID NO: 1378 - DNA, 287 bp, Homo sapiens
  misc_feature 110, 196: n = A,T,C or G
ccactggatttgactcagagaggacccccagagggtgtctccatcttccctatttattttcagcccttgagggcttcattgtagatcaaagccaaggcccccaggaaggngacatactcctggaagttcacctcctggtccttgttccggtccaagtcttccatcagccttgcaatttcagcatcctgcagcttcnagccaatggtgagctccttctggatcagctccttcagctccttcttgctcagggtgtgcttgtcaccctccctgccggagatacctgcccg

SEQ ID NO: 1379 - DNA, 402 bp, Homo sapiens
  misc_feature 352: n = A,T,C or G
ctacttagggcgaattggagctccccgcggtggcggccgaggtactccagggatgggaggcacaagttgtgattgggcaaagtttattttctatgtcagcctgtcagtccactgccccattttgcaagacttttttttagccttgacaaaatgtctcagttaagtataaaagtttttccactacttagtccaaaaaaaactattaaatcttaatgaaatagccactctcaaaaaaaaaaaaaaaaaaaaagtgcggccggccgcccgggcaggtcttcgacccacgcgtccgtctttttcttcccaaacatagacttgcaagacatggcctgtatgagaagaaaaagacctnaagaaagcaacgaaaggaacgcaagaacagaatgaagaaagtcaggggga

SEQ ID NO: 1380 - DNA, 319 bp, Homo sapiens
  misc_feature 194, 219, 239, 274: n = A,T,C or G
cttagggcgattggagctccccgcggtggcggccgaggtacatagcacattacagtcaaatcccttctcgcccccatggatgacccccctcagataggggtcccttgaccaccatcctccgtgaaatcaatatcccgcacaagagtgcttaaaaaaaaaaaaaaaaaaaaaaaaaaaaaaaaaagtgcggcctngagcggccgcccgggcaggtacatntattttggattgtatattgngtttgtgtatttacgctttgattcatagtaacttnttatggaattgatttgcattgaacacaaactgtaaataaaaagaa

SEQ ID NO: 1381 - DNA, 397 bp, Homo sapiens
  misc_feature 6: n = A,T,C or G
cgactnctatagggcgaattggagctccccgcggtggcggccgaggtactaatctgtcaaatatactatgaaatgcatagtctccacttaaaatgctgaatgacacacacgttttgcaagcattactgctttccacaaaaactgctgaataggagttccgtccctgccaagatcagtgtttaagagatactttatgatgctgataagtattattggtggtggtggtgttcagaaagtttgtcactcatgcagatgtctgaaatcttgttccgaatccatggaacatagggtggaggccagctccccctttttttagatgatcacatagttctgagcagagatgtggtcctcaccctgcagttcctgcaggagctgctgctgctgggatggctgctgg

SEQ ID NO: 1382 - DNA, 458 bp, Homo sapiens
cctatagggcgaattggagctccccgcggtggcggccgaggtcaagcttcgacccacgcgtccgatttttttaaagtattttctagtcttttctctctctgtggaatggtgaaagagagatgccgtgttttgaaagtaagatgatgaaatgaatttttaattcaagaaacattcagaaacataggaattaaaacttagagaaatgatctaatttccctgttcacacaaactttacactttaatctgatgattggatattttattttagtgaaacatcatcttgttagctaactttaaaaaatggatgtagaatgattaaaggttggtatgatttttttttaatgtatcagtttgaacctagaatattgaattaaaatgctgtctcagtattttaaaagcaaaaaaggaatggaggaaaattgcatcttagaccatttttatatgcagtgtacctgccc

SEQ ID NO: 1383 - DNA, 141 bp, Homo sapiens
cgagggagtctattggagcccttgggaacttctggatcaaattggacctgaattgagatctatttctcagctttcacttatgtgagccaataaattccttttttgttgaaggcaaaaaaaaaaaaaaaaaaaaaaaaaagt

SEQ ID NO: 1384 - DNA, 249 bp, Homo sapiens
  misc_feature 194: n = A,T,C or G
tacttagggcgattggagctccccgcggtggcggccgcacttttttttttttttttttttttttaacgttttaattaaatggatttatttaaaaagactataaaatctgacatcaagagagataaaaaaaaaagacccataagatttaaattgacaaatgtaaaatgattggctacaatgtaaaaatacatttnccagcccccaaacaaaacacaagtatagtaattataaaatttttggacctgcccg

SEQ ID NO: 1385 - DNA, 249 bp, Homo sapiens
  misc_feature 123: n = A,T,C or G
aggtcctagcttgagtcgacccacgcgtccggccgctgttcgtatttcttattctacaacaagggtcagcctacaggcaaaacacatcccattgtcatttttttgtaaataaaggttgtattnggaacatggccactctcatttgttttctattatttatggctgctttcacttacaacctgagtggttgccacagaaactgtatggcctgcaaagtctaaaatatttactatgtagctttttcttttc

SEQ ID NO: 1386 - DNA, 199 bp, Homo sapiens
cttagggcgaattggagctccccgcggtggcggccgaggtcaagcttcgacccacgcgtccgagaagagtttgcaaatgcaacaaaatatttaattaccggttgttaaaactggtttagcacaatttatattttccctctcttgcctttcttaatttgcaataaaaggtattgagccattttttaaatgacatttttga

SEQ ID NO: 1387 - DNA, 200 bp, Homo sapiens
  misc_feature 151, 181: n = A,T,C or G
ctactatagggcgattggagctccccgcggtggcggccgcactttttttttttttttttttttttttttgccttcaacaaaaaaggaatttattggctcacataagtgaaagctgagaaatagatctcaattcaggtccaatttgatccanaagttcccaagggctccaatagactccctntcaccctggtacctgcccg

SEQ ID NO: 1388 - DNA, 471 bp, Homo sapiens
  misc_feature 381, 382: n = A,T,C or G
tagggcgattggagctccccgcggtggcggccgaggtcaagcttcgacccacgcgtccggggaggacctaggcaacggcctgagactccgagactctatgttgaagatgcctggactaacctactgaagataccgtggttttaccaacagccagcaccaataggaagatatgaatgaagccatctgagaccagccatctggcagccaaactgccaactgactgcaaatgcatgaatgatcccactgacaccacgtagagcacaaatgagttgcctccactgagcccagcccaaattgttatcctataaaatcataaaaacataaacagttgttttaagtcaaaaaaaaaaaaaaaaaaaaattaagtgcgacctgcccggnncggccggccgcccgggcaggtacccattaatttgctcagatatagcaggcttaatggttctatattttcaaaagtttttaagaatggtt

SEQ ID NO: 1389 - DNA, 476 bp, Homo sapiens
  misc_feature 190, 192, 244, 270, 402: n = A,T,C or G
ttagggcgattggagctccccgcggtggcggccgcccgggcaggtacaaataagcccaccccactaggaactatgttaaaaaaaaattcaagaaagaatttaagggagattacagtgttactgtgacaccaggaaaacttagaactttgtgtgaaatagactggccagcattagaggtgggttggccatnanaaggaagcctggacaggtcccttgtttcaaaggtatgacacaaggtaacccntaagccaaggcacccagaccagtttncatacatagaaagttacagctgcttttatacccccttgccccgccaacgtagttaagagaacagcagcataagcggctggcagaggcaaggaaagaccagtagagagaaaaaaaggccatctataccaattntaagttaatttagactaaacaaggtcttaatagcaaaggataattgaaatcccaaacttacaaggttttttaac

SEQ ID NO: 1390 - DNA, 390 bp, Homo sapiens
ccgcggtggcggccgaggtcttcgacccacgcgtccgggtttcatgaatggaaacctaagtaaaactaagctcattagtgacagacttgttttcttcttgttattcctccagcaactccctcaccaccacgcctccctgcctaccatccccggaagggtgcttattctttaacaaagagaatctaaaaaaaaaaaaaagtgcggccggccgcccgggcaggtgagaaaacagaccatatttactcacataattcgccttctacctttcacctgcttatgtaataatttaacactgtagaggggacatggaggtgaccggagtatttagtgggttccttgctcctgggctgggcaggttcacaggccccacaggccttgggccccagcatc

SEQ ID NO: 1391 - DNA, 154 bp, Homo sapiens
ccgcggtggcggccgaggtactctgaggtcacgtcaaactatgctttagaaccttcatcttttgctttcttgggctttactttccaaaatggactacaggataatgaggcttttttaaaaaaaaaaaaaaaaaaaaaaaaaaaaaaaaaaaagt

SEQ ID NO: 1392 - DNA, 226 bp, Homo sapiens
  misc_feature 167: n = A,T,C or G
ccgcggtggcggccgcacctgcccgggcggccgctcgaggccgcacttttttttttttttttttttttttttaaaaattcaaaaaattagtttattagcttaatataattaggtcaatggaatcctgttttgatctcaatacttcccatattgcaatatataaatgngacaaattcagctgttttgtggcataaataagtgtctaagctgggcagttagtctaccc

SEQ ID NO: 1393 - DNA, 344 bp, Homo sapiens
  misc_feature 266, 268, 272: n = A,T,C or G
cttagggcgaattggagctccccgcggtggcggccgaggtctttttttttttttttttcttttgaaacaatttttctgaaatttatttctaaaagtcagagacaaaactttaggagtgacacatttatactaagcatacatgcgtgagcaaaaaaaaataagcacagaatacaaaaatgaaatagtaaaattttaatacagtattctgaatacaagtagaataccactagataagaattgtatttacctaagaaatctatgatagngngggnggagataaaccagtttaggatagccacttcactattcacattttaatcagtgctgaccagaagctaaagcaa

SEQ ID NO: 1394 - DNA, 421 bp, Homo sapiens
  misc_feature 28, 37, 199, 230, 242, 279, 367: n = A,T,C or G
acttagggcgattggagctccccgcggnggcggccgnggtacaaataagcccaccccactaggaactatgttaaaaaaaaattcaagaaagaatttaagggagattacagtgttactgtgacaccaggaaaacttagaactttgtgtgaaatagactggccagcattagaggtgggttggccatcagaaggaagcctgnacaggtcccttgtttcaaaggtatgacacanggtaacccgtangccaaggcacccagaccagtttccatacatagaaagntacagctgcttttatacccccttgccccgccaacgtagttaagagaacagcagcataagcggctggcagaggcaaggaaagaccagtngagagaaaaaaaaaggccatctataccaattctaagttaatttagactaaacaa

SEQ ID NO: 1395 - DNA, 357 bp, Homo sapiens
ccgggcaggtacaaaagggttcctctatatgccaactaattccaaatttttacttttactgcaaaaaaacctttttggcatcaaaactccattgtttctctgcactctgacaccatcatttcaaaggggctcacataaatgatcactactgctctctccctaatttttgaaaaaggagttttgagaataaaacagtgcttttattattagccaacacaaagtgtgagaaaatcattcctgagaattaacattttaagctaacagaaattcagtatacttaaaacataattatatttaatgagtcattatttggatctaaaacggacgcgtgggtcgaagacctcggccgctctagaa

SEQ ID NO: 1396 - DNA, 352 bp, Homo sapiens
ccgggcaggtaccagtttgagttgaaacggtatgtgacttccccagctgcgccctgggcagtgactgcatgcatcactgagaggtcctgtctacagcagataaaactccacagatcactcctcctgtaatccctctaagtgctccaaggcagcagaaaggcccagtgcattgaggctggaagcaggagcagagactctgggatatagtgcgaaagtctctttcccctgtagttgggctaatctggaaaaactcaaaaacctggcctgattaccgaggtttcttttatggatatttagtatttagataaaatttttacagtattcttgaaatgaacccaattaaacacatagt

SEQ ID NO: 1397 - DNA, 271 bp, Homo sapiens
aggtactttaatcccgtcttacagaagagaaaactgagatttagcaacataaaagtatttcccgtaagtaaacagtagagccaagatcttgacctacgccatctgatacctgagcccatgctataaaagaggagcattagaaatatttgaaagatagaaatgagaactagtcaatatttattttgcttagcactgtattcagtattatggcatcttaaagtagttaagactcaatatttcatcaaaaaagtttaaaatctaatcagagaat

SEQ ID NO: 1398 - DNA, 347 bp, Homo sapiens
aggtttgagtcgacccacgcgtccggattgatagctctttctcgattccgtgggtggtggtgcatggccgttcttagttggtggagcgatttgtctggttaattccgataacgaacgagactctggcatgctaactagttacgcggacctgcccgggcggccggccgcccgggcaggtgcaagattcctgatcggtatacagtgatgtatttactaaacagagacctgtgcagaaattacatactatccatctagataggttgttacacttttgcctattgatggaatagttccatttatcaagttttatacatcaaaaagcttttgaagttcaccagactgtccat

SEQ ID NO: 1399 - DNA, 330 bp, Homo sapiens
  misc_feature 196, 231, 234, 241, 254, 264, 267, 278, 311: n = A,T,C or G
ccgggcaggtactgtaaatctactgtaatcctgttttgcagaatactgcacgacggagattgagaagtgagagctcttatgacatagataacattgtgattcccatgtcattagtagccccagctaaatttagagaaactccaatataagggaaatacttactcccagggtatggtatactttaccatcttcatanttttttctttcccttcccttcccttaaaaaaactnaantttttcnaaggtggaagaantttttaattnaantggaaagggangcttcccttcttccccagttcccttcttagccnatgggagggggaaaccggg

SEQ ID NO: 1400 - DNA, 286 bp, Homo sapiens
  misc_feature 254: n = A,T,C or G
ccgcggtggcggccgattctctgattagattttaaacttttttgatgaaatattgagtcttaactactttaagatgccataatactgaatacagtgctaagcaaaataaatattgactagttctcatttctatctttcaaatatttctaatgctcctcttttatagcatgggctcaggtatcagatggcgtaggtcaagatcttggctctactgtttacttacgggaaatacttttatgttgctaaatctcagntttctcttctgtaagacgggattaaagtacct

SEQ ID NO: 1401 - DNA, 332 bp, Homo sapiens
  misc_feature 62, 208, 312: n = A,T,C or G
ccgggcaggtaccagtttgagttgaaacggtatgtgacttccccagctgcaccctgggcagngactgcatgcatcactgagaggtcctgtctacagcagataaaactccacagatcactcctcctgtaatccctctaagtgctccaaggcagcagaaaggcccagtgcattgaggctggaagcaggagcagagactctgggatatagngcgaaagtctctttcccctgtagttgggctaatctggaaaaactcaaaaacctggcctgattaccgaggtttcttttatggatatttagtatttagataaaatntttacagtattcttgaaata

SEQ ID NO: 1402 - DNA, 332 bp, Homo sapiens
  misc_feature 297: n = A,T,C or G
aggtactcccatttccctgaaacaagcagccagcaactatctcagaaatgtgtcatttttactggttataattcttaaaaagcttgttttcctaagatatgaaatgcctgccagtatacaaactgctgtaactacttccctttttgcttttagcggggaaaaaatagcttaatgacagcatagaatcatgtagtaaatataattcattttttgaaaggttcagctatatcctcttccatttgtttattttaaatgatctaattgcaaacatgtcatcactcccttgatgtttacctncttgttatgcatttttagcaggctttattgtcacc

SEQ ID NO: 1403 - DNA, 331 bp, Homo sapiens
  misc_feature 235: n = A,T,C or G
aggtcctagcttgagtcgacccacgcgtccgatttttgcctccagactacagatcagaaaactgagactcagaatgtttcaattccttgtttaagatcacaaaactagtttgaggtataatggaaactgaaaaaaaaaaaaaaaaagtgcggccggccgcacttttttttttttttttttcaatattatttatcaaaataaatttattaaaagtattcaaagaccacttcaaagngtagctgccttcaagacagatttttggcactcataacggacactgcagttttcaacaccatagcactcattctatttcacacatcatttttaacaa

SEQ ID NO: 1404 - DNA, 281 bp, Homo sapiens
aggtgttagttaccacttcattactggagggcactgtcacaaacttctgactatccagacttgaagctggaagcaaatacaagtctgaggggctctaagctgggaggttctggcctctccctagctctctatggctctacctctctgcttgaagctccctgcactgcactcccattactctgactggggataggaccactgctgacagggccccaccttcaacttctttcattgctcctcttttcaggaaatccccaccctggggatacttcaaaagacct

SEQ ID NO: 1405 - DNA, 330 bp, Homo sapiens
aggtgattcagcaggtctggggtgggactgagagcttgcatctctaacaagctcccagcgaggctgatcctgttgctccagggaccacaccttgagaaccactggttgggcattgatgaggtcaaccaggagaagcagtgtcccctagaactggcaggagagaaaggacaaggctaagaaacagtgaacaggagtcaagtaaatgcagctgccaacaggcgggggtccttgagttcacattcttggttccaggtgacgtttcctgggagtcaacaacccttctcctatgaaaaagaaaagggccagacacagtggcacacggctgtaacc

SEQ ID NO: 1406 - DNA, 359 bp, Homo sapiens
atagggcgaattggagctccccgcggtggcggccgaggtacatgtccctaaatatttaactgttacttgtaaacttgtgtaatttattatttattttaatcaaaattctgaatatttcatttaaatgaaagttgcaaaaaaaaaaaaaaaaaaaagtgcggcccggccgcccgggcaggtacatacctccttgcacaaatggaggggaattcattttcatcactgggagtgtccttagtgtataaaaaccatgctggtatatggcttcaagttgtaaaaatgaaagtgactttaaaagaaaataggggatggtccaggatctccactgataagactgttttttaagtaactttaaggac

SEQ ID NO: 1407 - DNA, 352 bp, Homo sapiens
aggtactcaatctaatccaaaattttctttcttagcaatctattttctgtatttagaaaaatgttttttatttcaaagagcctctcaaagagcatttcacgtatcttttactgtttttctctccacctccaaggggtctgtctagatcagtgcggacgcgtgggtcgaagacctgcccgggcggccggccgcccgggcaggtactgaggacaaatcagttctctgtgaccagacatgagaaggttgccaatgggctgttgggcgaccaaggccttcccggagtcttcgtcctctatgagctctcgcccatgatggtgaagctgacggagaagcacaggtccttcacccactt

SEQ ID NO: 1408 - DNA, 346 bp, Homo sapiens
  misc_feature 296, 305, 325: n = A,T,C or G
aggtacatatcacacatttccaaatttgagaccactaatgttttttaatttcaaatatgtatataaatatgtattcttatttccaattatttccttggcatgaattcctagaaattgatctatttagtataagtgcttttttagctatatgtccactagtatggtatgagaatgccctgtttatgccagtattatcatcattgaatatattactgctgatgttgtggtaatacatttaaaccaatgtgatggggcaaaaaaattatatttttacttacatctttaaaattactggngatctctgntattgacaagctgggcatanaaaaagtaaattaatagaatt

SEQ ID NO: 1409 - DNA, 346 bp, Homo sapiens
ccgggcaggtcggacgcgtgggtcgaagcttgtacaaaaacccaagtatcacctgaattacaattattcttaaaatttgtccttaaatagcttactcttggaagatttgtttctatgtagacattatggtaaaagttactctgaaactcttttctttagttatctgtttattctgagctcaacaagattgaagtaagttttcgggagctacagaaattaaatcaagaaaagaataatagaggattatattcaattgaagtgctggagctcttctgatattatcaattctccttcatagacattttataaagctcttttatgtgaactcttgcttcatccaggcaag

SEQ ID NO: 1410 - DNA, 356 bp, Homo sapiens
  misc_feature 241, 250, 290: n = A,T,C or G
aggtcttcgacccacgcgtccgttttagatccaaataatgactcattaaatataattatgttttaagtatactgaatttctgttagcttaaaatgttaattctcaggaatgattttctcacactttgtgttggctaataataaaagcactgttttattctcaaaactcctttttcaaaaattagggagagagcagtagtgatcattttatgtgagcccctttgaaatgatggtgtcagagngcagagaancaatgggagttttgatgccaaaaaggttttttttgcagtnaaagtaaaaatttggaattagttggcattatagaggaacccttttttgtacctggcccgggcggcc

SEQ ID NO: 1411 - DNA, 298 bp, Homo sapiens
aggtgattcagcaggtctggggtgggactgagagcttgcatctctaacaagctcccagcgaggctgatcctgttgctccagggaccacaccttgagaaccactggttgggcattgatgaggtcaaccaggagaagcagtgtcccctagaactggcaggagagaaaggacaaggctaagaaacagtgaacaggagtcaagtaaatgcagctgccaacaggcgggggtccttgagttcacattcttggttccaggtgacgtttcctgggagtcaacaacccttctcctatgaaaaagaaa

SEQ ID NO: 1412 - DNA, 346 bp, Homo sapiens
ccgggcaggtgcctaatatatttactctctggtcctttacaggaaaagtttgccaacctctggcttagatgatcacctgaggccaaggagcctcgcccttgagcacaagactatgtagtcagtaaagcacaaacaaaattggggctttccctagcaaggttggaaaggcggagaagaaatggatttggataggtagtcaacaatgtctgttttatgttaccacacattttctcgagaaatttcaatcagctctctgagaacagattcatctttaaatgaatgttcataggtaacagcaactcatgcatcaatgttgcaaagtgagctcattttcacattgcttcag

SEQ ID NO: 1413 - DNA, 233 bp, Homo sapiens
  misc_feature 14, 114, 150, 158, 177, 178, 179, 180, 186, 190, 201, 221,223: n = A,T,C or G
aggtcaagcttcgntccacgcgtccgggaaaaacggggttactagtagccgcccatagcctgcaacctttgcactccactgtgcaatgctggccctgcacgctgggggctgttngcccctggcccccctttggttcctggccccttaaanaacaggcnggttttattaaaccccaannnncccggnttanaaggggaattnaaaaaagggccccggctttngnaaaaaaaaaa

SEQ ID NO: 1414 - DNA, 249 bp, Homo sapiens
  misc_feature 1, 3, 5, 55, 64, 137, 169, 177, 193, 194, 211, 212, 220,228, 230: n = A,T,C or G
ncngnccaggtctactcaagtagtctttaccccctactcaagtagggggtaaagngtagaacanggagttttgatctgtgttcaacatgattgcgaaccatcaattgagataactcactaccttcaggccagccagntacatacttttgaaaagccaagagtgaagcanggttgatnttcatccaattcttgnnctttttgttaaaggcannaataaganagggtggntncgggcaatcacttagctaa

SEQ ID NO: 1415 - DNA, 347 bp, Homo sapiens
aggtcttcgacccacgcgtccgttttagatccaaataatgactcattaaatataattatgttttaagtatactgaatttctgttagcttaaaatgttaattctcaggaatgattttctcacactttgtgttggctaataataaaagcactgttttattctcaaaactcctttttcaaaaattagggagagagcagtagtgatcatttatgtgagcccctttgaaatgatggtgtcagagtgcagagaaacaatggagttttgatgccaaaaaggtttttttgcagtaaaagtaaaaatttggaattagttggcatatagaggaacccttttgtacctgcccgggcgg

SEQ ID NO: 1416 - DNA, 328 bp, Homo sapiens
  misc_feature 127: n = A,T,C or G
aggtgtacaagcttcgacccacgcgtccgggatgagtttgtatgtgtaaagtgcttgaaacagtgcctgccacatactaagtgttggataagtgtttgttattaaaaaaaaaaaaaaaaaaagtgcnggccggccgcccgggcaggtcagatgattgcagaatttatgtgattactgggtactctaatggtaaggagaaattaagaccagctagttgttaatcttaacttttagtcattaaggagaatttccaagacaaaactgcaatccagctgcttacctaggaatacggcttaggctgaaaacttctatcgtcttagaaatggga

SEQ ID NO: 1417 - DNA, 534 bp, Homo sapiens
cttagggcgaattggagctccccgcggtggcggccgaggtacagtaatcctgtgagaaagacaggacagaaaccactgtgcctattttacagatacgaaaactgaggcacaggtaaaggggcttgtctgtagtcccatagctagcagatggctggagccaagactgaggctcgttcttcaatgctgagccagggctccttccgctgcaccacaagaacgctagaccactcgccaccagccttctcattccctcttcctccattctaatcatttctagctggctggcctccacagagcataggaaaacagccagggccgggcacggtggctcatgcctgtaatctcaacactctgggaggccgagccgggtggatcacctgaggtcaggaattcgagaccagcctggccaacatgttaaaaccccatctctactaaaaatataaaaattagccaggcatggtggcgcacacctgtaatcccagctactcaagaggctgaggcaggagaattgcttaaatctgggaggcggaagtt

SEQ ID NO: 1418 - DNA, 582 bp, Homo sapiens
  misc_feature 34, 41, 42, 561: n = A,T,C or G
ttagggcgaattggagctccccgcggtggccggnccgaggnncaaaagagagacaaaagggttctcttggaaacaagaagagtgactccagatgtggcctgaataattgccatgttaagttaatgcaaaagatcagaacagggctacatttgcacaggcagtttctctccgggccgtagttttcactgatgatcacctttcacagcattttccccaaccagcatttcacttagtcttctctatacccagcacctcccccggcacccccggcaagcccactatcacttccgacttccaacgtggcatccgtgagatctgtccacattaggcgaagcaggagaacactgagagcagcaggatgggtttggaaagagcatgcctctggaaacacagcttcctgggaattcacatgaggccagtcctacagagagcaagatgcaccccaggatttcttcattttctaatagatgtgggagtgctccattttccccgacagcgaatttcccctgagaaacgatactagaccctgggtttgcccaccttgtaactcttccttatctnctccttttcatccctaattca

SEQ ID NO: 1419 - DNA, 467 bp, Homo sapiens
ccgcggtggcggccgcccgggcaggtacatcaccctgctgagggacatccaggacaaggtcaccacactctacagaggcagtcaactacatgacacattccgcttctgcctggtcaccaacttgacgatggactccgtgttggtcactgtcaaggcattgttctcctccaatttggaccccagcctggtggagcaagtctttctagataagaccctgaatgcctcattccattggctgggctccacctaccagttggtggacatccatgtgacagaaatggagtcatcagtttatcaaccaacaagcagctccagcacccagcacttctacctgaatttcaccatcaccaacctaccatattcccaggacaaagcccagccaggcaccaccaattaccagaggaacaaaaggaatattgaggatgcgctcaaccaactcttccgaaacagcagcatcaagagttatt

SEQ ID NO: 1420 - DNA, 456 bp, Homo sapiens
ccgcggtggcggccgaggtacactgtaaatagcctttaccaaacgtgtttgacaaggaccataattaacatcacttagtgaattgtgataaagaaaaaaaagccatgatttattcgatgtgattggcttgtttttatgtggcgccaagaacgaacctgtttagcagctgtaaccaatggtacgcgggggaggcgaacaatggcggagctgggcgaagccgatgaagcggagttgcagcgcctggtggccgccgagcagcagaaggcgcagtttactgcacaggtgcatcacttcatggagttatgttgggataaatgtgtggagaagccagggaatcgcctagactctcgcactgaaaattgtctctccagctgtgtagaccgcttcattgacaccactcttgccatcaccagtcggtttgcccagattgtacctgccccggccgctctagaacta

SEQ ID NO: 1421 - DNA, 491 bp, Homo sapiens
  misc_feature 62, 80, 83, 92, 100, 157, 486: n = A,T,C or G
ccccgcggtggcggccgaggtactttgggagaccacccccagctatggttccatacacttanactgcgcccagctacagnttnatacacttnggacaaantatctgataaaatagagaaaaaaatcttatttactatagcattacataataaatttntgagaaaaaaattaaccagggatgtaaaaaacctttacaataaaaaataaataaaaaaggaagatccaaataaattttaaaatattttatgtctttggattgaaagaataaatattaataaagtgccatattatccaaagtgatctatagattcaatacacttcctatcaaaattgcagtatttttttcacagtaatggaaattcaattctaaaatttacatgaaactaaaataaactttgaatagccaaaacagtcttgaggaaaaggaacaaggcagaagaatatcatacttacaatttcaatctatatttgaagactttatagaantaaaa

SEQ ID NO: 1422 - DNA, 274 bp, Homo sapiens
cgggcaggtacgatgggaggacagctttgtagaaaggacattatccagctaatagcaaactttgtggatcccaatccgagatttcccttgctgaaagacaagaaagtatctcatataaaagtgctgtagcaagtatttgtatactccagaaataagcttctgtaattcttagctgccaatgtgttcaggcgtgatgactcggtttctgtttctctgaacatcaatactagggtctgtataatttcaatgcatgccaccagcttcatcaaccctt

SEQ ID NO: 1423 - DNA, 383 bp, Homo sapiens
aggtacaatcagaatgctgcattctccagccataaagatcgctccctcttcttttcaaacatccctgtccctcaaggtctagctcaagacggtcaccttaagaaaagctccctttgtcgagcagtgactccataccaggccctgctttaaacgctttatctgcattatcttacttgattctcgcaatagccctgggtggtaggtgcaattattatctccagtttataaaagaagatactgagggtcagagaagttaagtgaccggctcaaggtgtcacattcagtaagcgttgaaggggcctgtgttggtctgtccttgaagatgccccctaccgactacactttcaatgattttctgccttgaacctggccccatgactaaa

SEQ ID NO: 1424 - DNA, 259 bp, Homo sapiens
  misc_feature 1, 2: n = A,T,C or G
nncaaacctcctatgctttccttggcatcggctacacatcatagtattcattgcctccttgaggtcatcttgcagcttggacagaaactcatttactgaccggctcagctcattctctgccattcgtttcatctcatactcctttcgcttttcagcattgctgacaatgtcccaagctgctcgcaaaaccttgaaggcctcctcagcccggggatgatgatttttgtcaggatgaaccatcactgccagctgtctatag

SEQ ID NO: 1425 - DNA, 456 bp, Homo sapiens
acttagggcgaattggagctccccgcggtggcggccgaggtaccttgaactgatttccccaaatggctctttgtgcagccgcagcagctgttcagacttatgagcagacaggaactgccagagggcaatggtgtgttttaactggcatctgtttaaggcctttaacacgtgaatcgtctgatcacccatttgcaggatgtcttgagtatacacattcagctgcatgtttggatccccaccagctgtgctcagaaaccccagagtgacttctacgacagacagcacttcacaggcatcgctgtaggactgcagctgtccactgatggcactaatgaccgagctggggagggagtcctgggaaatgaaaagcaggagagggatgtctgtgggctgggtttctggcatctcaccacctggtaagagagccgagccccttcactgcccaagccacatgcg

SEQ ID NO: 1426 - DNA, 394 bp, Homo sapiens
cttagggcgaattggagctccccgcggtggcggccgaggtacttgggccaaggctgcaatcagtgattcagccgactgctctttgagtccagatgttgatccagttcttgcttttcaacgagaaggatttggacgtcagagtatgtcagaaaaacgcacaaagcaattttcagatgccagtcaattggatttcgttaaaacacgaaaatcaaaaagcatggatttaggtatagctgacgagactaaactcaatacagtggatgaccagaaagcaggttctcccagcagagatgtgggtccttccctgggtctgaagaagtcaagctcgttggagagtctgcagaccgcagttgccgaggtgactttgaatggggatattcctttccatcgtcca

SEQ ID NO: 1427 - DNA, 523 bp, Homo sapiens
  misc_feature 12: n = A,T,C or G
aattggagctcnccgcggtggcggccgaggtacatcaccctgctgagggacatccaggacaaggtcaccacactctacaaaggcagtcaactacatgacacattccgcttctgcctggtcaccaacttgacgatggactccgtgttggtcactgtcaaggcattgttctcctccaatttggaccccagcctggtggagcaagtctttctagataagaccctgaatgcctcattccattggctgggctccacctaccagttggtggacatccatgtgacagaaatggagtcatcagtttatcaaccaacaagcagctccagcacccagcacttctacctgaatttcaccatcaccaacctaccatattcccaggacaaagcccagccaggcaccaccaattaccagaggaacaaaaggaatattgaggatgcgctcaaccaactcttccgaaacagcagcatcaagagttatttttctgactgtcaagtttcaacattcagggtctgtccccaacaggcaccac

SEQ ID NO: 1428 - DNA, 389 bp, Homo sapiens
aggtacaaatagataccttcaaggagaatgaaaacggggaatatactgagcacttacactcggccagctgccagatcaaagttttcaagcccaaaggtgcagacagaaagcaaaaaacggatagggaaaaaatggagaaacgaacacctcatgaaaaggagaaatatcagccttcctatgagacaaccatactcacagaggtaaaaagatttcttttggtgacaatttcagttcataatttttaatcttaaaaattcatcacttccaaactggtcagaatttacttctcctaagccttgagggacacagtatcacatggattctgtgtccagcggccttaacaggaagattgctttagaatttggcacgaaccatgccactgtctctgt

SEQ ID NO: 1429 - DNA, 399 bp, Homo sapiens
  misc_feature 1, 3, 5, 16, 17, 18, 19, 23, 26, 32, 33, 37, 39, 116, 179: n = A,T,C or G
ncngnccaggtactcnnnnacantgnaaactnntcangngcccatcattgctggatttgtatttaacattatgtttcacccagacaacagctcagagaactgggcaatggctgctnatgtgttgagccggggcatacaggatgaagagggacaatgagagggaatgaattctattctanacaccctgagtttgaggaacctatggaaatgtccaggaggcaactaaatgaaacagcctgtggtagacagaataatggccccaaagatgtctacagcctaatcccaggagcctgtgaaaatgttcccttcgcatggtaaagggatgtggcagatatgattaagctaaggatcttgagatggagagtttatccaggattatccaggtgtgcccagtataat

SEQ ID NO: 1430 - DNA, 214 bp, Homo sapiens
  misc_feature 32, 35, 197: n = A,T,C or G
aggtacgcgggacacagggtcctgtgcaacanggnggactaacagtaacaccgccacgccggcagcaaagctcattttggtccccgccccgttcctctttctctttttaactccttccctctttgcggattctagaacggaacctttttttaattcttcccagtagaaacgtaggaacaatttcgtgaacgcaatcnggagtgcccaacatggc

SEQ ID NO: 1431 - DNA, 469 bp, Homo sapiens
  misc_feature 274, 446: n = A,T,C or G
aggtacccctgtttaacaaggggtaggggccttctgagactgtttcctctacagagtaagggttcgttcagccttttccgtggcctgccaagaactcaactccatgttccctcacttcctgtaattgaccttgtccaggactttctgaccttggagaattcacctttgctctttctgctgcttcgtgcattcttccaccaaatgtcttaactgactgggctcctttccaaactcaagggctttgccaaatgccaccagctcagggaggcctttnctggccatgacacttgaagttgcaacactcccccgcagtctcccgtgccccagatgtaagttccatgagggcaagccctgtgcttttaccaccatatccccagcatcttgagctgtgcctggcccaagaaatatttgttgaatgaatgaatttaaaaggggatattcatganggcttacacattctcaatgggtt

SEQ ID NO: 1432 - DNA, 416 bp, Homo sapiens
  misc_feature 5, 297, 307: n = A,T,C or G
gggcnaattggagctccccgcggtggcggccgcccggcaggtacttttttttttctttttcttttttttttttttttaagtttttgggatcgtgtctcactcctgttgcgcatgcctgtagtcccagctactcaggaggctgaggcaggataattgcttgaacccgggaggtggaggttgcagtgagccgagatcatgccactgcactccagcctgggcaacagagtgagactttgtcttcggaaaaaaaaaaaaaaaagatttggcggatgaaaataaccagaatgaaaatagctngaaaactcancaagcaggaagctccccttctcacccttttgttcccttgccgatagaatcagtcactattagaaaaaatgaaagacgctctgtttaaaacaatgatgacagcagtacct

SEQ ID NO: 1433 - DNA, 318 bp, Homo sapiens
  misc_feature 115, 116, 122, 242, 252, 256, 257, 289, 299: n = A,T,C or G
gcggtggcggccgaggtacttcccttttaagagatgagtcaccgcaactgaaacttctctatttcttttcttttctgattgttctccagaattaggactagtaacagtcctgaanncttgtntttccttatctagaaaactcagtatcttcccttccgtttgtcttaaaatattagtacacgctttctcaagcctagccgattagaaggggctgccgggcttccaccacacctcatcgaggnaatggttttntggnnaaaaagcccatggaaatactgagcccatgccnctcacgttgnaaaagccccgttccttgcc

SEQ ID NO: 1434 - DNA, 580 bp, Homo sapiens
  misc_feature 38, 452, 550, 554, 564: n = A,T,C or G
agctccccgcggtggcgtaacttatctcattttagatnagtttgcaaagagagttggtggctaaggccatagcttagcctcctgacccctaccttcccacgttctttccaagagattctcctcaggaataacacttgcaagggagttcctgatgaagtggattcttgttattctaggaataggcctacatggtgcactggcaatgtgagattatacctcagcattttcaaagagcataaaaatctagagctggggggtttaaaacatgacaaacctaattttaagtaggcagacaaatatttaaatttttcccctacccttgtttctacatcggtccattcagactctgcaccatctggttgggcaggtgctactgtggaagatcttcgttttcgactaccatttggtgattcttgctttaaagtctcaatatcagtaaactgaacagattnccaccaccccttgttttataaatatcacccttaattagtttaagtttcaatctccccatcggaggctagttcctggtgggtcagcatgtacctgcccnggcnggccgtctanaactaagtggatcccc

SEQ ID NO: 1435 - DNA, 414 bp, Homo sapiens
  misc_feature 55: n = A,T,C or G
tacttagggcgaattggagctccccgcggtggcggccgcccgggcaggtactttnttttttttttttttttttttttggagccaaaattgtgtgcattcctactgggaaacacagtggccaaatccttttgaattgtttccttctagagactttaactcttctgactgcaaatcttagtgtcctgtgagtattagttgattaattatacttgctgcttagtgaaatacagccagctataggtatcttctggagtagctcaacacaacttttctcttgctagagtgactcttgctaacagaacccaaagatgcgcacatatacccacaggagctggaggtccctcgcatgctcctctcgtgccagcctttgccttacccttcactctctccctccaggagccgtcggtacctcgg

SEQ ID NO: 1436 - DNA, 604 bp, Homo sapiens
tacttagggcgaattggagctccccgcggtggcggccgaggtacaagatttgtcttgctcacctcttaccaaatccaagaatggtttctatccagtgaatggcaaattcatctgataggtaagggaataatgggtcaaaatggtagcaaacacttctttcaaatttctactaaaagacttgctgttgtttttcttataaaggggcaatttcatcaacatacatcttttaaaggaatctctagaaatttgagtgactttttggccataatcctgtttgatatatttttggtcagctgctcaaaacaaacattctccttgtaaggttatctatctgaaagatactaattcatttaaagcagctgcaggtgaacaacctaaagatgacatgatttgggagaagaggaaggcagattactgaactgacaagtgacccaaagcataattaggtttgtgcacatggtagcatggaggttccacacctaccttctacagcgtattaaaataagaatattgtctttgaaacatcttctagcacctttttaataaaacaaaatttcccatcttcaattctatttttttcccaaatctacctttaaaaaattgt

SEQ ID NO: 1437 - DNA, 353 bp, Homo sapiens
  misc_feature 329, 335, 337: n = A,T,C or G
ccgcggtggcggccgaggtacaataaacagggaatgagaactatttacatggaagtttctttctcatgatgcggtggagaagcctcggccacttggttctgccagatgttcctggggttactgtaaatgggaaggacaggcagagctaaacaaggtaggagaatcgccccccttttttgaatgtttaaagagtttgctgcagtatgctgcattccatgtgtgctgcttacgggagccagggaaactgggattccactaattcaattgtaatacttgcgggggaccctggagttttacgtaacattttgatttgggaaaaaaaaaaaaanaaaaanantgttcctgcccgggcg

SEQ ID NO: 1438 - DNA, 619 bp, Homo sapiens
ctacttagggcgaattggagctccccgcggtggcggccgcccgggcaggtactgccaggcatgctcctgccttgggcagagtgtatatgtgtgagtgcacctgcccttcccacagcctagaacgttcctcctccagacagcacatatggcctgctctctcacttccttaaggtctttattcaaaagtgactttctcagtgaagccctgtctgctcaccctgcgtaaaatttcagctcttctttctatctctcttcccagattttttttctccttcatgttcgttggtgtctaaggtttatcatctatttcgctaatggtcagtagaatgtaacctccacgtaagcaaggagttttgtctgttttgttcatgtctatgtccttagtgcctggagcattccctagtatgcagtaggtgctcaataaatgtcagttggattaatggctgaaagaaaggtcaccgctataaggatggagtcagagaacaaacacagttaattcctggtccactgtttttgcttccactaaattgtatttggtctacggcttctccgcttgccctggaaccctgctcagaacactgctcccttctccttcttcttctccctccggataaattct

SEQ ID NO: 1439 - DNA, 422 bp, Homo sapiens
ccgggcaggtaccgcggggggccgtggtcagagcgagcttcggagaagcagtggtgggttccatgtgatggtggagtaggaggcaggtctccgcggttcatctgtgttgctctaaatgacactgtttcattattttgatggctggagaatatttcctaagtgtatgtatatgaagaagtttcttgatctctttatctgtggatgaacagctactttgaaacatatggtacctctgtggtcagaccatttgccaagcttgtgaggcctcctgttcaggtatacggtattgaaggtcgctatgccacagctctttattctgctgcatcaaaacagaataagctggagcaagtagaaaaggaagttgttgagaagtagcacaaatcctgaaggaacccaaagtggctgcttctgttttgaatccc

SEQ ID NO: 1440 - DNA, 484 bp, Homo sapiens
  misc_feature 46: n = A,T,C or G
acttagggcgaattggagctccccgcggtggcggccgcccgggcanggtacgcgggtgctttcatagccgcggacacaacttgggcccacagttaaccgaggaggaaggcagagcgtgctgagcagagcaccaaggaagagagctcggctagccgggaaggtccgaatggatttatttggtgaggccaaggaacccactgcctccacggtgttcctccaggaggctcctcccttcactaaggcagcaaggagtgcactggtgaggggaagaattgttgtcatcctttctctacgactccaagagaaactttatactggaggaagaatattctaccactttgggatgcttccaaagaaatgggataccaaaggagtgaacttcaggtcattggaagtggccaagctggaggcgacctatggagacatgaccttcagttcttcctgagatcgataaagcaaaaaaaaaaaaaaaaaaaaagtacct

SEQ ID NO: 1441 - DNA, 361 bp, Homo sapiens
acttagggcgaattggagctccccgcggtggcggatattgtcaatgcgcaacatggagagactttaaaacaaatgctagggattagagtatagatcagatagctggcaaatctataggaagggaaaagtaattttaaacacacagcatttgtttcctgctgctctatcacaatagctaggtttttaaataagtaggctttataccaagccataaaaatgaattgctggggctctttgggactagggaaggcgggaaattttagatattgctgttggcttagtgaaaatgcatgcttacccggtcacctgtggctccagcaggaccaggggcacctacagcaccaggagcaccctagtacct

SEQ ID NO: 1442 - DNA, 282 bp, Homo sapiens
atagggcgaattggagctccccgcggtggcggcccgcccgggcaggtaccttattacatatgatttttattagtttctggaggcaaatttaatttttattttaaaatcaaaatctattttaaaagaaatagttctcaaaaagacaacgatgactgggtgtggtggtgtgtgcctgtagttcaggctgctcgggagacagaggcaggagaaccacttgaggccagttcagtctagcctgggtaacatagcaggaccctgtcccttaaataataaaaaatttaa

SEQ ID NO: 1443 - DNA, 418 bp, Homo sapiens
  misc_feature 403, 404, 408, 409, 410: n = A,T,C or G
ccgcggtggcggccgcccgggcaggtactagggtgctcctggtgctgtaggtgcccctggtcctgctggagccacaggtgaccgggtaagcatgcattttcactaagccaacagcaatatctaaaatttcccgccttccctagtcccaaagagccccagcaattcatttttatggcttggtataaagcctacttatttaaaaacctagctattgtgatagagcagcaggaaacaaatgctgtgtgtttaaaattacttttcccttcctatagatttgccagctatctgatctatactctaatccctagcatttgttttaaagtctctccatgttgcgcattaacaatatcctaatgcactgaggcttctcaaagccttcaattattaccaaaaaaaaaaaaanntttnnnaggtacct

SEQ ID NO: 1444 - DNA, 463 bp, Homo sapiens
  misc_feature 155, 175, 199, 210, 241, 426, 452: n = A,T,C or G
ctatagggcgaattggagctccccgcggtggcggccgcccgggcaggtacaaagaccaattccttcctaacctggattccactgtccttggtgaaaactactttgatggaacctaccagatgctttatcttttggttaaaggaactatacctgtngaaattcacactgccacagngatatttgtttctttccaattatntgttgcaacanaagatgacttttatacctctcacaatctggntaaaaatcttgccttgttcctaaagataccaagtgacaaaatccgtatcagcaaaataagagggaagagtctgaggaggaagagatccatgggattcataattgaaatagagattggagaccctcctattcagttcataagcaatggcaccacaggtcagatgcagttatctgaactccaggaanttgctggttctcttggacaagctgtnattttaggaaa

SEQ ID NO: 1445 - DNA, 467 bp, Homo sapiens
  misc_feature 415: n = A,T,C or G
agggcgaattggagctccccgcggtggcggccgaggtacgcggggagagtcactcctgccttcaccatgaagtccagcggcctcttccccttcctggtgctgcttgccctgggaactctggcaccttgggctgtggaaggctctggaaagtgtaagttggagtcactctggtctaatctgggctgcagggtcagaggtggggtctccttgtggtgtgggtgtgtccccttctgtaggctctgatccctcagcttagtttcgggagacctccctgagggtggaatacatgtctggctgggctccaaggtttgtgtggcagtttgagcttctggaaatgcttcctctatgcagccatgctgtcagcccaggtcccactctctctctctctctctctctctctctctctctcatactntgccttctttctttcacctgtctgcgactcttcaaaaaaaaaaaaaaaaaaa

SEQ ID NO: 1446 - DNA, 461 bp, Homo sapiens
  misc_feature 334, 423: n = A,T,C or G
ggcgaattggagctccccgcggtggcggccgcccgggcaggtactcttaatccaagacaaaagaatagctcctttcagagttctcatcatttcttcaccccagccttaatgggtatattccttttccccaggtgtccagagttttccagaattgtcccaaggctcagtccacaccagttcttctccagtgtgctctcctgagaggccaggcacactcaacaattatctagatgagttcccacttctttccaagtgaaggttctgctatcctagcatagtcagaataagttaaattatgtctcttaagaggcactgttccactccttttcaaggngtgtggcatatttgaaatatgtgacttaaaagtctacagtctcttaccaaaagccttgggccaaatacatgtcaaaattcagaattttncagattttagaaaagtgacccatataccatacattgca

SEQ ID NO: 1447 - DNA, 488 bp, Homo sapiens
atagggcgaattggagctccccgcggtggcggccgaggtacatcaccctgctgagggacatccaggacaaggtcaccacactctacaaaggcagtcaactacatgacacattccgcttctgcctggtcaccaacttgacgatggactccgtgttggtcactgtcaaggcattgttctcctccaatttggaccccagcctggtggagcaagtctttctagataagaccctgaatgcctcattccattggctgggctccacctaccagttggtggacatccatgtgacagaaatggagtcatcagtttatcaaccaacaagcagctccagcacccagcacttctacctgaatttcaccatcaccaacctaccatattcccaggacaaagcccagccaggcaccaccaattaccagaggaacaaaaggaatattgaggatgcgctcaaccaactcttccgaaacagcagcatcaagagttatttttctgac

SEQ ID NO: 1448 - DNA, 613 bp, Homo sapiens
  misc_feature 545: n = A,T,C or G
tagggcgaattggagctccccgcggtggcggccgaggtacaaattgtcgtttttattcctcttattgggatatcattttaaaaactttattgggtttttattgttgttgtttgatccctaaccctacaaagagccttcctattcccctcgctgttggagcaaaccattataccttacttccagcaagcaaagtgctttgacttcttgcttcagtcatcagccagcaagagggaacaaaactgttcttttgcattttgccgctgagatatggcattgcactgcttatatgccaagctaatttatagcaagatattgatcaaatatagaaagttgatattcaacctcacaagggctctcaaagtataatctttctatagccaactgctaatgcaaattaaaacatatttcattttaacatgatttcaaaatcagtttttcatactaccctttgctggaagaaactaaaaatatagcaaatgcagaaccacaaacaattcgaatggggtagaaacattgtaaatatttactctttgcaaaccctgggnggtattttattttggcttcatttcaatcattgaagtatattcttattggaaatgtacctgcccggccg

SEQ ID NO: 1449 - DNA, 466 bp, Homo sapiens
ccgcggtggcggccgccgggcaggtacatcaccctgctgagggacatccaggacaaggtcaccacactctacaaaggcagtcaactacatgacacattccgcttctgcctggtcaccaacttgacgatggactccgtgttggtcactgtcaaggcattgttctcctccaatttggaccccagcctggtggagcaagtctttctagataagaccctgaatgcctcattccattggctgggctccacctaccagttggtggacatccatgtgacagaaatggagtcatcagtttatcaaccaacaagcagctccagcacccagcacttctacctgaatttcaccatcaccaacctaccatattcccaggacaaagcccagccaggcaccaccaattaccagaggaacaaaaggaatattgaggatgcgctcaaccaactcttccgaaacagcagcatcaagagttatt

SEQ ID NO: 1450 - DNA, 571 bp, Homo sapiens
  misc_feature 28, 88, 91, 92, 525, 558: n = A,T,C or G
ccgcggtggcggccgaggtacaaattgncgtttttattcctcttattgggatatcattttaaaaactttattgggtttttattgttgntgnntgatccctaaccctacaaagagccttcctattcccctcgctgttggagcaaaccattataccttacttccagcaagcaaagtgctttgacttcttgcttcagtcatcagccagcaagagggaacaaaactgttcttttgcattttgccgctgagatatggcattgcactgcttatatgccaagctaatttatagcaagatattgatcaaatatagaaagttgatattcaacctcacaagggctctcaaagtataatctttctatagccaactgctaatgcaaattaaaacatatttcattttaacatgatttcaaaatcagtttttcatactaccctttgctggaagaaactaaaaatatagcaaatgcagaaccacaaacaattcgaatggggtagaaacattgtaaatatttactctttgcaaaccctggnggtattttattttggcttcatttcaatcattgnagtatattcttat

SEQ ID NO: 1451 - DNA, 454 bp, Homo sapiens
  misc_feature 18, 21, 33, 35, 36, 60, 80, 90, 97, 137, 186, 232, 233, 243,247, 254, 300, 308, 317, 332, 395: n = A,T,C or G
ccccgcggtggcggccgnggnacaaattgtcgntnntattcctcttattgggatatcatnttaaaaactttattgggttnttattgttgntgtgggntccctaaccctacaaagagccttcctattcccctcgctgntggagcaaaccattataccttacttccagcaagcaaagtgctttgactncttgcttcagtcatcagccagcaagagggaacaaaactggtctttnncattttgccnctgngatatgncattgcactgcttatatgccaagctaatttatagcaagatattgancaaatatngaaagttgntattcaacctcacangggctctcaaagtataatctttctatagccaactgctaatgcaaattaaaacatatttcattntaacatgatttcaaaatcagattttcatactaccctttgctggaagaaactaaaaatat

SEQ ID NO: 1452 - DNA, 444 bp, Homo sapiens
  misc_feature 90, 94, 98, 101, 196, 332: n = A,T,C or G
ccccgcggtggcggccgaggtacaaattgtcgtttttattcctcttattgggatatcattttaaaaactttattgggtttttattgttgntgtngggnccntaaccctacaaagagccttcctattcccctcgctgttggagcaaaccattataccttacttccagcaagcaaagtgctttgacttcttgcttcantcatcagccagcaagagggaacaaaactgttcttttgcattttgccgctgagatatggcattgcactgcttatatgccaagctaatttatagcaagatattgatcaaatatagaaagttgatattcaacctcacangggctctcaaagtataatctttctatagccaactgctaatgcaaattaaaacatatttcattttaacatgatttcaaaatcagtttttcatactaccctttgctggaagaaa

SEQ ID NO: 1453 - DNA, 766 bp, Homo sapiens
  misc_feature 4, 13, 20, 22, 23, 33, 45, 48, 67, 69, 72, 81, 82, 84, 93,94, 101, 104, 138, 141, 171, 187, 191, 213, 240, 245, 305,368, 373, 391, 395, 398, 404, 406, 416, 417, 422, 424, 433,462, 474, 483, 488, 506, 511, 517, 532, 533, 536, 546: n = A,T,C or G
  misc_feature 548, 556, 557, 560, 561, 586, 587, 589, 603, 607, 620, 634,637, 645, 646, 653, 654, 655, 672, 688, 692, 693, 695, 696,701, 730, 739, 742, 746: n = A,T,C or G
gaanccccctttngacgaananncgcgaatcgngagctccaccgnggnggcgggcccgagggggacnanganttttcttgnncnttttttttnnaaaaacnggngactatttaatccatctaaaaatacaaatcaggnaanggggggaaccataggaaaatcctccacctntaacaagagccgaagntacngggctttctgcttgctccaaanaaatcccaaagggcttggatagtttgnggaanggggaattatctgtgtcttcaaactaactcccaaggatacctcaaaggacattaaaggtntaccaccaccattctgggggaagaaaaaggggggtttcttgccccttgcttgaaaagccttanaaatngggggaagcctccaaatngccnttngggggngnaaaaaggggnnccctntnaattttttnaaaaaaaaaaaaattgggttccaaaaaanaacccccctttngaaagggancaaangggggggggggccccctnccccnaaggcnaagggggggggcccnnttngggggggccncntggggggnnggnnccccaaaaacccccctaaacaaaanntngggggctgggcccntaangaggagggccccnccagagcccaaaanttnggggtttnnaccccannnaaaattttgggggggtntttttttttacccccntttnngnnccccnccccccttgggggggaaaaaaaacccttnaaaaccccnttntttnaaaacccccccggggggggg

SEQ ID NO: 1454 - DNA, 376 bp, Homo sapiens
  misc_feature 52, 107, 215, 234, 304: n = A,T,C or G
ctacttagggcgaattggagctccccgcggtggcggccgggcaggtactttntttttttttttttttttttataccagattttaaggaaagactgcttgcttctganaaagaattctcggagttgattctctgctccatttgctcctttctcaacctctttagtcctcgttctctgcagtaagaagctagtgacaactggaatttagctcccagngggctttcttccgggtggngcctggacaggctgctcctgctgctaaggcttctggagctgttattgaagatgtcagcttctgccactgnggtctgctttttggagtctgcattggttttgcctcgatctctatcattcttctcattattttcatgaatgaa

SEQ ID NO: 1455 - DNA, 526 bp, Homo sapiens
  misc_feature 18, 32, 38, 74, 79, 80, 81, 92, 226, 288, 301, 319, 427,435, 456, 465, 468: n = A,T,C or G
cgaggtactgacctcgtntgtcccttcccctncaccgntccccacagctttgcacccctttcctccccatacanacacnnnccattttattntttgggccattaccccataccccttattgctgccaaaaccacattgggggcttgggggggggccaaggggccttgggcatgggaccaaggaccacctccccctacccatatccctccccgtgttgtggggtttnggggaaaaaaacctttttggttttttttggggggggtctttttttttcctcggaaattaaanaaaaaaaggattncttacctacaagagaaanaaagaaaaaaaggggtacccttggccccgggggccggggcccggctttcttaaggaacctaaggtggggaattccccccccgggggccttgccaagggaaatttccgnattattcnaaaggcctttaatccggaatnaccccggtncgnacccttcggaggggggggggggcccccggggtaacccccaagcttttttggtttcccc

SEQ ID NO: 1456 - DNA, 497 bp, Homo sapiens
  misc_feature 497: n = A,T,C or G
tacttagggcgaattggagctccccgcggtggcggccgaggtacgcgggagataagaccctgaatgcctcattccattggctgggctccacctaccagttggtggacatccatgtgacagaaatggagtcatcagtttatcaaccaacaagcagctccagcacccagcacttctacctgaatttcaccatcaccaacctaccatattcccgggacaaagcccagccaggcaccaccaattaccagaggaacaaaaggaatattgaggatgcgctcaaccaactcttccgaaacagcagcatcaagagttatttttctgactgtcaagtttcaacattcaggtctgtccccaacaggcaccacaccggggtggactccctgtgtaacttctcgccactggctcggagagtagacagagttgccatctatgaggaatttctgcggatgacccggaatgggtacctgcccgggccggccgcttcggctttagaactagtn

SEQ ID NO: 1457 - DNA, 362 bp, Homo sapiens
  misc_feature 105: n = A,T,C or G
ggagctccccgcggtggcggccgcccgggcaggtacaagtccaaattttaaggaaaatgagtcccgcaatgagtttcctcatgcttcgcctgtgcgtggaccggncagcttctgggtgtgactggagcagggcttgtctccttcttcagaatcactttgcaggggttggcaaagccgctcccatccacgtactctctggacacaataattttggcctattgccatcaaatgcccattttccactgctggaagcaatgtcaaaaaagggctggcccaaaaaaagacccagagctgtcaatacaacactggagacagatgcaactgaataaaccctgttttacccaattgcactatttggtcct

SEQ ID NO: 1458 - DNA, 481 bp, Homo sapiens
  misc_feature 75, 454: n = A,T,C or G
agggcgaattggagctccccgcggtggcggcccgcccggcaggtactggaacagggataagttcttggataaggngccaacatacctataaaagctgatttttgagtaaattattgattctaacatatgtaatggatttggtgtgataattttctgatctttaactataagtgactttttattctccaccagaaaagataaatgactgagaatgtaagtctgcgctctgattaacacaatggagaaacggaaaaactatctctgttaaaaactgattcctgtcattcttctgatatcaaataagaggaaggaaaataaactttttgtgtgtagatagaaaaacatacctgaggccaggtgcagtggatcacgcctgtaatcccagcactttgggaggccaaggcgggcagatcagctgaggtcaggagttcgagaccagcctggccaacatggngaaatcacgtctctactaaaaatacaa

SEQ ID NO: 1459 - DNA, 617 bp, Homo sapiens
  misc_feature 1, 220, 277, 306, 356, 407, 445, 564, 610: n = A,T,C or G
ngggcgaattggagctccacccgcggtggcggccgcccgggcaggtacgcgggggcactcagggagctcagattttgagacagtagctggccgatgctcccagctgaataaagcccttccttctacaaaaaaagaaaaagaaaaaagaaaacaggatatctgaaattaagactgcaggatggagtagttttctgaaaatgacagggtccaaggtgtgacncaccgggaccaagtggctgaactggaatgaagttaagaagccagtaagaaaacatcncggataatatggtggatcagttcaacagnaatgacattatttcacccatggtccccaaagggagggagatgactggagnatttcaaattcttcaaggcaagccctcaatgccagcccagaggattttaangaggggcctattgttgttcccagaaaggaggactctgnggccaaaaccgccaagaatgggatttcaagaatttacttcaaaattcctgtcaggatttctttaaccctgggtggggcttatacccaaaaccccaaaaaaacttttaagccagccttcntactttttggcttaatttttctccctaaagccccaacccttgggcnttttttt

SEQ ID NO: 1460 - DNA, 528 bp, Homo sapiens
attggagctccccgcggtggcggccgccggggcaggtactcagaaatccttccccgaatttacagcacaggcaggatgacctaagaggcagtttacttccctgagacccacagttgggctgttctggaaacacatctgtgaatcatagccaattgccacagagaaaacagaaccaagcctccggtgaggccactccaccccagagaagtctgcagaattccaaggactcggattggatgttcagaattcagcaactggaaagtccttaaaaacaaacaggccaaaccaaatcaatattgctgtttctagatgtcccttctgtggttgagctagttttacagagataaatatattaagacaaggaggtgggggtgttatatgatcaatgatagccattttgaaagagagggaggagtactttttttttttttttttttttccaagcacgtgccactttattgaatgacactgtagacaggtgtgtgggtataaactgctgtatctaggggcaggaccaagggggcaggg

SEQ ID NO: 1461 - DNA, 553 bp, Homo sapiens
  misc_feature 106, 129, 147, 166, 176, 192, 210, 215, 226, 232, 246, 252,270, 323, 333, 353, 384, 409, 432, 456, 497, 498, 499, 508,523, 525, 537, 539, 541, 550: n = A,T,C or G
aggtacgcggggctcaagaataagctgaaatatggccagactatcaggcccatttgtctcccctgcaccgagggaacaactcgagcctttgagggcttcctccaancctacccactttggcccagtcanaccaaaaaaggggaaagnaggcctggcttccccttgncaacaagggnattaattccaaaaagnccttcctggttttttggntggtnccttgaagggnaagggnaggaaaaaaaaagnccttgnaaccttcggggaaggggnagggttccttaacaattcaaaaggaaattgggggggggaataaaaggaaaaanggggccaagnccttggtttggaaggaaggnaggtatggcttcaaattaatggccccccaanggcttaattgaaccaaaaaagggtncaaaaggggaacaattcttcaanaaggggtggggttccacccccccnttcggggttttcccctttttggttaccccttggcccccggnnnccgggcccngccttcctaagaaancntagggttggggnantnccccccccnggg

SEQ ID NO: 1462 - DNA, 573 bp, Homo sapiens
  misc_feature 90, 94, 102, 103, 105, 113, 118, 136, 150, 157, 183, 237,239, 259, 265, 274, 279, 302, 326, 331, 352, 382, 401, 433,435, 440, 442, 444, 445, 454, 457, 478, 487, 490, 498, 526,527, 530, 541, 557, 559: n = A,T,C or G
gcgggcaggtacatggatgggagcagcttcaccaacccctgcaaagtgactctgaagaagacgacaagccctgctccagtcacacccggnaagnctgactgnntnccaccgcnacagnctgaaaggcattgagggnaaaacctcaattcntcggggnacctaaattttttcccctttaaaaanattttttaagtaacctttggccaaccaaggtaaagggggaacttttccaaaacntngaacccctttccctccaagnatttgnaaggaaacntgttntttcccaggttaattaattaccnatttccaaaaggttccaacctttnggaanggggttaagggggaaaccaanaaaaaattttggcttaaccaaggttccctnaattaaaaatttttaaaanggggggttttttttttttatataaaaaagggngntggtntnannccccttttnggnggtcccccctttttttttttnaagaaaaanccntaaggggngggggaaattccccccccccccgggggnnccnttgggccaaangggaaaaatttttccngnatttaatttccaaa

SEQ ID NO: 1463 - DNA, 551 bp, Homo sapiens
  misc_feature 100, 106, 111, 113, 157, 171, 175, 186, 193, 205, 218, 219,236, 303, 304, 323, 326, 350, 352, 362, 371, 382, 387, 388,391, 402, 403, 409, 413, 417, 421, 429, 435, 436, 437, 439,441, 457, 462, 464, 470, 501, 503, 518, 522, 523, 537: n = A,T,C or G
  misc_feature 540, 548: n = A,T,C or G
aggtacgcggggaggcattgaggcagccagcgcaggggcttctgctgagggggcaggcggagcttgaggaaacccgcagataagtttttttctcttttgnaaagantcccncntttaaaataaccaaaaccttacctttaaaaaaaaaattaattangttccaaaattaangggnttttaaccttnaaaaggnaattaatttttnggcctttttaaannccgggtttttaaaaagngttttttttttttaaaaacccggtttaaaaattttttttttaaaaattaaaggccctttttaaaagnnaatttttttttttaaaggnganggaaaaaaaaattttttttttggnanaagtgaaaanctttttttnttaaaaaaatntaaannttntttagtccctnntttttntaanaggngggnaaatgggnggggtnnnananaaggaatttaaaaaantgggntntttttntttaaaaaaaaaaccaaattttatcccttgntnaggggttttttgggnaagnnaatatggaaaaaanaancctttttnctt

SEQ ID NO: 1464 - DNA, 635 bp, Homo sapiens
  misc_feature 104, 105, 111, 127, 172, 186, 236, 241, 245, 249, 250, 255,277, 283, 303, 306, 313, 314, 315, 326, 340, 341, 344, 359,360, 362, 373, 410, 440, 459, 486, 525, 554, 576, 592, 606,607, 616: n = A,T,C or G
tttgagaagccagcgctcacccacccggggtctctgtgcattgacctttgggtgctgacttggagaaaagcacaaacacgaccagtcccatcctgggctcccgnnggccgncctttctttcctaatncttaccgccattttggtattccggacctggccaattttaggtttngggaccttaaaagnaattggaattggaaccttccaagttttttaaaaaagggggaaggggaagnaaccnaaanattnnccttngaacccttggttccttaaaagnccaaanggaaattggggccccccaanagncccttgnnngccaaaaaggnaaaaaaaaaaaagnnccnaacccaacctttggnncnaatttaacccnaatttaaaggggggaaattaccaaggaaaaggggggnccaaggaaggccttttcttgggccccttgngccggggggaatttccttnggccaaaaacccaattttttaacccanttttttttgggtttttttttgggccccctttggcccaanaaaacccttaaccccccccgggcgggttnaccccctttcgggggggccccnggcctttccttaaggnaaaaccttaaaggnnttggggggnaatttccccccccccccgg

SEQ ID NO: 1465 - DNA, 546 bp, Homo sapiens
  misc_feature 97, 113, 118, 130, 136, 141, 170, 184, 187, 195, 201, 225,233, 236, 245, 248, 254, 258, 260, 274, 279, 286, 297, 299,304, 306, 309, 317, 319, 320, 325, 326, 332, 334, 338, 340,341, 344, 345, 350, 351, 353, 357, 361, 365, 367, 368: n = A,T,C or G
  misc_feature 381, 383, 391, 392, 395, 400, 405, 415, 418, 420, 425, 431,433, 437, 438, 452, 457, 460, 465, 477, 478, 479, 480, 482,484, 487, 493, 497, 500, 503, 513: n = A,T,C or G
aggtactttatttttctttttttttttttttgtggatggggacttgtgaatttttctaaaggtgctatttaacatgggaggagagccgtgtgccggnatccagcccaagcccncccgnttcactttttcncacacnctttntttttcaacccttggcaccttctggggcntttactttaaaagnggncccctttntttggncattacattagcagcggaaaacanccttttanttnctttccccnttnattggngaananaacctcccattttnttttnttcaaanaaggagcattngncaaananctncccaaatntnnccttnnaccacngngggncnntannccacnntnctancttnaggngnngccatttgggttncnccctttgnnccnggaanttctncccttttccnttngnttttntccccncngggnngtttttttccaagngaagngancccanaatccttttttnnnncncnaanaaaaangttnaanccnaaaaaaaagngcccaagagttttttttttttttcccccccccc

SEQ ID NO: 1466 - DNA, 517 bp, Homo sapiens
  misc_feature 101, 102, 105, 109, 110, 126, 129, 132, 148, 158, 160, 168,175, 199, 210, 225, 230, 263, 275, 304, 307, 318, 350, 354,359, 383, 409, 416, 427, 434, 449, 460, 464, 471, 475, 488,496, 510: n = A,T,C or G
aggtacactgaaacataaatccgcaagtcaccacacatacaacacccggcaggaaaaaacaaaaacagcaagtttacatgatccctgtaacaggccatggnnctncaanncttcaggaatgccttnccntcncattctggcccaaagntggttgtttncntgggaatnaccaggnaggccaccaattcggtggggcctntcctggggggnggttcaaccaacctncaagncttttaagggcttggttgggggttccccaccangaggccaccttncaattcttgggcttgggggacctaattgnggntggggttgggnttgggaccttccttaaccttccaaaagtaagncaanaagcntgtttaacccaagccaacaatttncaaaaaaccaaggttggtaatttggnaaaccantcctttttttnaaaaatnattccaaaaaagttngaaggaaaaanccanaggaaangggncaaaccattaaanttaaaatnggtttaatccaagnaaaaaag

SEQ ID NO: 1467 - DNA, 652 bp, Homo sapiens
  misc_feature 103, 106, 107, 111, 117, 123, 145, 152, 171, 179, 188, 202,203, 212, 213, 226, 233, 234, 235, 239, 250, 252, 265, 266,278, 279, 280, 286, 289, 290, 291, 301, 305, 310, 312, 316,349, 380, 386, 391, 399, 400, 434, 443, 447, 454, 471: n = A,T,C or G
  misc_feature 479, 485, 486, 487, 529, 543, 551, 584, 589, 592, 600, 637: n = A,T,C or G
ccgggcaggtacttttttttttttttttttataactgaagctttatctggagtgggggaatgggggtgtggtcagttggggcacccaaagacaagccatgccnccnncccnggaaangccgcncagagggttcccttgggcaatntggtatntactggggtatccttcttntgcggttnctttcgggncaatttttccgatnnccacctttnnccttacaaagggnccccaannnttgncctttctccancnccccaaaaggttnngtgccccttttnnnccccgnaannnggaattgttnaagnccttngnaagnggttattggggaggaccattttcctttcctttnccccccccccaaggaaaaaaaaaattttccngtgttnaaggnggtaatgnnaagtaacctccccccaaccaaattggaaaggggnttaaagaantggnttttttnaccttttttccttaccncctttccnccaaannnccttttttccaaaggggggggccctttttcctttcctttaancccaaacctttttnggaaattngggggggggggcccttgggaatttggaaaaaanccggnttnggcccggncctttgggtctttggttttccccaaaaaacccccttngggccaaacccccct

SEQ ID NO: 1468 - DNA, 522 bp, Homo sapiens
  misc_feature 105, 106, 158, 160, 163, 170, 173, 196, 211, 225, 232, 250,259, 266, 280, 308, 342, 359, 374, 391, 458, 492: n = A,T,C or G
aggtacgcgggtggtgaaaaaagaagtagaaatcgtggcccacctccctcttggggtcgtcgccctcgagatgattatccgtaggagggagttcctccacctccnncgccacaatcttcccaaagaaaggggagaaagtcttttcttccttcggcagncncgngtagtcnagnggttcccccttttttccttaggnaggcatttaaggggnaagtaaaggaaggnaggaagnaattccggccttggttcnttcgggggnagtaagnaaaaattccaccanagtcccggtccccggaattcccttttcnttcttaagggggttccttccggttaaggttccgnaattccttaaggggttncaaaatggaaaaagngaaaaattaaggaaagnaaccaaggttttttggccaaaggaagaaaaggttggggtggttaaccccttggccccccggggggcngggccccggctttccttaagaaaaccttagggtngggaaatccccccccccggggggccttggc

SEQ ID NO: 1469 - DNA, 582 bp, Homo sapiens
  misc_feature 91, 108, 110, 111, 112, 119, 153, 173, 183, 194, 202, 204,208, 210, 216, 220, 225, 234, 236, 237, 245, 248, 250, 253,289, 293, 304, 314, 320, 335, 353, 354, 362, 377, 393, 443,450, 468, 492, 507, 535, 546, 553, 558: n = A,T,C or G
ccgggcaggtacttttttttttttttttttataactgaagctttatctggagtgggggaatgggggtgtggtcagttggggcacccaaagnacaactcatgcctcctncnnngaaaggncggcccaagggtccctgggccaatttggttttcntgggatttcttcttttcggntacatcgggncaattttccgntacacctncncctncnaagggncccnaggtntggctttcncnncgcgcaanagntngtncccttttcacccggaatggaatggttaagaccttgnaagnggattttgggnggaccttttncattancttaccccccccaangtaaaaaaatttccggtnntaaggggnaagaaaaggaacccncccaacaattgaaggnggttaaggttgggtattttccttttcctttccccctttccccaaaggccntttttcnaaggggggggcctttttnctttcattaaccaacctttttggnaattggggggggggnccttgggaattgggaaaaaaccggtttncccggcctttntctttgngttcnccaaaaacccccttgggccaaacc

SEQ ID NO: 1470 - DNA, 549 bp, Homo sapiens
  misc_feature 93, 105, 108, 111, 113, 131, 140, 160, 164, 166, 177, 181,192, 205, 218, 250, 256, 292, 303, 318, 326, 328, 330, 339,435, 453, 504, 525, 533: n = A,T,C or G
aggtacgcgggtggtgaaaaaagaagtagaaatcgtggcccacctccctcttggggtcgtcgccctcgagatgattatccgtaggagggagtncctccacctccnccnccncnattcttcccaaagaaagngaagaaagncctttccttcttcggcaagncccngnaggccaggggntgcncccttttttcntaaggaagtattnagggggagtaaangtaagtaaggaaggaattccggccttggttcnttccgngggtaggaaggaaaaaattccaaccaaaggccccgntccccggaatncccttttccttcttnaggggttncntncgggttagnttccggaattccttaaggggttcaaaatggaaaaagggaaaattagggaaagtaaccaggttttttggcaaaaggaaggaaaggttgggggttggntaacccctggccccccgngggcggggcccggcttcctaagaaaccttagggtggggaatccccccccgnggggccttgccaaggggaaanttttccgnaattaattccaaaagg

SEQ ID NO: 1471 - DNA, 649 bp, Homo sapiens
  misc_feature 106, 123, 129, 145, 207, 213, 215, 250, 255, 269, 299, 312,322, 343, 346, 350, 362, 374, 431, 471, 475, 477, 483, 493,494, 496, 499, 501, 502, 503, 504, 505, 507, 508, 510, 544,562, 586, 591: n = A,T,C or G
aggtacaaacgagtcctggccttgtctgtggagacggattacaccttcccacttgctgaaaaggtcaaggccttcttggctgatccatctgcctttgtgggctgcntgccccctggtgggctngcctgncccacccaaccaggcntggcttccctgccttggccttggccttggcaaggctcccccaggccttaaaggggttttggnaaaggncnccaaaggggaaaaggaaggttccgggaaggggaanttccngggaaccgaagggnattaatggggggaattttttggggtccttncttttttggaccntaaaaattcnaaccccaaaaaaaaaaaaggnccnaaanccccccaaaaanccttttttaagnccccaaggttttttttaattttttggccaaaaaaaaaccaaaaggggggaaaaaaanttaaaaaaaaggggggcccttttaaacccttttttccaanttanantataanaataaaatannanaanannnnntnngngggtttaaccccctttgggcccccccgggggggncccgggggccccccgggnttccttaaaggaaaaacccttaangggtnggggggaaattccccccccccccccggggggggcccttgggcccaaagggggaaaaaa

SEQ ID NO: 1472 - DNA, 502 bp, Homo sapiens
  misc_feature 103, 110, 118, 120, 123, 126, 152, 160, 165, 181, 182, 188,196, 204, 210, 218, 224, 226, 238, 252, 261, 265, 267, 281,286, 297, 299, 305, 325, 337, 340, 343, 364, 436, 438, 456,466, 474, 480: n = A,T,C or G
aggtacagagtcttttgcttcctcccacccctagggggaaaaactgctttgtgctttgggaagttgtctctgaaacccggggacagaggaccgcaggacaganctaccgncggggagncncgnggnagggaatgggggcatgcaagtcatgntgagaagnggagngtgatcttacaagcannggaagnacgtatgnggtcccgngtaagnaagtccangtaagngnccccttggaagnaaagtcccaagtancgaccagtnttgngnagtaagtagggtgntgggnaaataggttgnancccatntccgggggtccttggggggnccttgggtaagnccncgnccaaccaactgcttcttcctnccccaatggtttaaaaaattaggccaccccttttttaaggaaaaaaaaaatttttccaaccaaaagggttcncncccaattcccaaccatanaaaaaaaaanatagatanacacanaaaggggaaaaggttacccctt

SEQ ID NO: 1473 - DNA, 592 bp, Homo sapiens
  misc_feature 119, 122, 141, 146, 166, 182, 196, 211, 215, 226, 228, 232,237, 239, 241, 243, 245, 283, 307, 313, 337, 345, 371, 410,421, 513, 517, 552, 558, 559, 561, 563, 573, 587: n = A,T,C or G
aggtactggtgtgtccggaatcctacccactgtgatgacagtgcctgatagtttcttctgcctttctatcccaaaacgattggtcagtttacccaaggtttggcaaatggccagccttnagnaaatcttccccaggggaancaatncttcttttcttaggttaagntttggcccctttaagncccaattccttttnggttaaggttttggnaatntttggaacctntntttnttttntntntntnttgtggccttttccccaggaaaaaggccttcttaatgncctttcaattaatggggaaccttnggccantaaccccaaaattttttttttttngggttttncaatttccttgggtttttgggggttncaatggaatggggtttaaggccaagaaaggcccttgganccccttccccntgggttttaaccaaaattaaggaaaaattggaaattccggggtttttccccttggggggccttaaccaaggaaccttttggaagggttcctnggtntttttttttttttgggtttttttttttaaaaaaancccctnntncncccccaaatngggttggggggccnaaaaa

SEQ ID NO: 1474 - DNA, 560 bp, Homo sapiens
  misc_feature 50, 80, 132, 141, 150, 156, 186, 198, 199, 216, 233, 244,250, 255, 258, 271, 272, 277, 286, 287, 307, 310, 343, 373,376, 383, 385, 388, 398, 444, 448, 449, 470, 505, 549: n = A,T,C or G
cgcggtggcggccgcccgggcaggtactttttctttttttttttttttgnggatggggacttgtgaatttttctaaaggngctatttaacatgggaggagagccgtgttgccggctccagcccagccccgcntgcttcacntttccaccncttttntttctcaccttgccttcttgggcttttctncaagggcccctnntggcctttcttccccgnacccctttggttcttcncttctggaaanaacccncttcnctnccaaccaaacctnngcagnctcccattnnctttccccgggcttcccccntcnccttaaggttcttggttccccttggccggttcnccttcttggttcccccggggtttttcaagnagnaacaaancnttnccccaaaaangccaacaaaaaaggccaaggttttttttttccccccccttaaaagngggnntgggggggaagggggaaaagnccaaaaaaaaggaaccttcttggtacccctttttnggggccccgggcttcttaaagaaaacctaagggtgggggaaatnccccccccccg

SEQ ID NO: 1475 - DNA, 556 bp, Homo sapiens
  misc_feature 109, 117, 134, 137, 157, 175, 186, 199, 201, 217, 249, 269,301, 334, 340, 342, 448, 483: n = A,T,C or G
aggtacttcaatcctgaattaatctttaaacactttcaaatatggagattaatcaccaacttcttattttttgggccagttggattcaattttttatttaaccatgganctctttcntattattcggttacctngtncggaaatggcctaggaaagnaaagggccttctttttcncggaggggttncggggaaccaagncnaggaacctttttggtnaattttttaattggtttccccttttttttggntggggaatttcctttaaatngaacccccaggttccgggaacaagggaattgnaggcccaaagggttcaaaaaagggggaaaaccntttttntnaaaccccccaagggtattggcaagtttgggaccaccattaattaatttttttttttcctttggggaaaagggaatggttaattttttccccccaaaattccaaaancccctggggtggggaaattaaagggaaaattttcntggaaaaaaccaacccaattcttaatttttttggaaaaaggccttaatttttttttttgggaataaccaaccc

SEQ ID NO: 1476 - DNA, 456 bp, Homo sapiens
  misc_feature 61, 63, 112, 118, 135, 143, 154, 165, 170, 175, 181, 183,185, 191, 196, 225, 241, 248, 259, 262, 263, 273, 281, 284,301, 307, 316, 320, 325, 335, 338, 344, 354, 355, 358, 371,391, 397, 399, 404, 407, 409, 410, 414, 424, 430: n = A,T,C or G
aggtacaaaattttattaaaggtctttagagagcaacatccagactccagaatacagctgngnaggagaccctgttatgctgtggggactgggctggggcattggaaaagcncctccntctgggccttcccaacnccctttanttgtttcttgnaagaaatgggnggggntttgnttgggngncnatgatnattanctttcaattcttttttaggggggattttnaccaaccaaaaattgncctttcnaaaccggttgnggnnttccatgtgnccaagggnggnggccttttcttttttangggggncccccaaanttcnttttnaacccccaantanttttgntttttccggnnaangtcccggtgtttntacccggaaaattctccggngggggnancaaanggngnntttnccttggttgngtattnccccaaactaatttaaaaaaaaaaac

SEQ ID NO: 1477 - DNA, 187 bp, Homo sapiens
  misc_feature 119, 120, 144, 150, 151, 161, 179: n = A,T,C or G
cggccgcccgggcaggtactttttttttttttttttttttttgatgaaatgccagggtgaaagggatagccaaataggctaaagcacaagtgccactctaggttaatttcggcaggacnngccccaaataaaagggtcccaccngaccannttacccaatncaacaaccatttcccggntttcgggg

SEQ ID NO: 1478 - DNA, 430 bp, Homo sapiens
aggtaccttaacttgagttacagggctggtccctctcttttcattttttatcccagtaggtgagaccgtccctgctgtgttcggtggctgtggagttgatggcatctttgctccaggtgacacctgcatgctggccagctgagcggcatagagctgctgcaaaacagggaagacaaacattgatctctttaaatgcagctgaaattgagtttcaaaagaaaaaacttaccatattgttagatttctcagacagccttgtaatttctttttcactatttttaaaaaagggagctaagagaaggcaaataataaaacagaaagaaaaaggacaggtatgggagccatagttctgtttctggtccttctagcaacaactttatgatcctggacaaaggatttgatctctttagaattcaagttttttttttta

SEQ ID NO: 1479 - DNA, 465 bp, Homo sapiens
  misc_feature 448, 451: n = A,T,C or G
gggcgaattggagctccccgcggtggcggccgaggtacaaacacctgctaaagacatagcttaataaatatttgttgaatgttgttgaatgaagagcattttcctgctcataaatttctcattacttaacgaatgtagaataaattccttactctggcagactggaatatgtagttacagtttattctagaatttttgcattccccttcttctggttcacttggagaagttcttttccatcctaagtgacccaggtgagtccagtgtcctgctgatttcactgcagggcaggcatgtgatccaggctggccacagtggtcagtgtggacaactgacccttgttcatctgtggagtctaacaaaagtagtgcccccttatcctcggtggttatgttccaagatgcccaagtggatgcctgaaaccgtggatagtacctgcccgggcggncgntctaaaactaagtg

SEQ ID NO: 1480 - DNA, 402 bp, Homo sapiens
ccgcggtggcggccgaggtacttagcattgatcaaagaaatttcaaattaccgatcaattgggtggggagaggaattttcattgtccaagcaccctcagggaacagaagtcaaagcaataacatattcagcaatgcaggtctataatgaagagaacccggaagtttttgtgatcattgacatttaagacaccaaaaaataaaagactcctacgaagaactgtttttgttttcctcttccttttgagaagacactatgaattaaattctacagcttttttttgatatatggaaatttgtagaacagaaatattttagttaaagtgtgactttcagaaagggaaaatcagggcacagccttggtctgtgttccccaaatattcacactttaaagaattcttaac

SEQ ID NO: 1481 - DNA, 509 bp, Homo sapiens
attggagctccccgcggtggcggccgaggtacatgattgtcctttatgcattaaattcatgcttttacatacttgtgtttccttttcatttcgtccttccaaatcattattttaggaatatagagaaaagggttggccaggtgcagtgactcacacctgcaatcccagcactttgggaggtcgaggtgggtggatcacttgaggctaggattttgagaccagcctgaccaacatggagaaaccccatctctactgaaaatacaaaattacccgggtgtggtggcgcatgcctgtaacctcagctactcgggaggctgaggcaaaagaattgcttgaatctgggaggcggaggttgtggtgagccaagatcgtgccattgcactccagcctgggcaacaagagcgaaactccgtctcaaaaaaattaaataaataaggcttatgtgcagttattctcaatgagctaaaaagcttcctgaggctagaaattcttgtcatttttggctggga

SEQ ID NO: 1482 - DNA, 466 bp, Homo sapiens
  misc_feature 78, 233, 250, 283, 307, 343, 364, 378, 390, 392, 413, 415,416, 421, 429, 433, 439, 448: n = A,T,C or G
ccgcggtggcggccgccgggcaggtactatctatttggccttggaaagttactctctaagtcagggcttcttttcttnaactttggtgtgagactccgctggagagccggttagaaaaacacaagtctcgggccccaccccgcagagcccctcattctctagttctgggttggggcccaggagtctgcttttctagcaagcgcccagatgtcactgatgcttacagctctcanaccacagttggagcagngatttttaaaagtcttttcatttgtaaagagtngttctccatgctccaaatgactgngacgactgagaaaatgcatgtatgtaaagtctgcanctggtgacattgtacacactnagcaaatggccttnggtgttactgtnantttatttttactaattatttntnncaccnacaaattngganctgctncaatcggtnggaatttggaaattgggc

SEQ ID NO: 1483 - DNA, 216 bp, Homo sapiens
gctgccatcagctccctaggagctctccctccaggaagggaatgtgtccaccgtcagacactcagacccagcatgtggggacagaggctgatggcctgtctggccattcctctcagttcctctcctcactagcttgtgtccttgtgcaagtcacttaccctctctgaggttcagttccctcctctttgaagtgggtttaataataagtacctgccg

SEQ ID NO: 1484 - DNA, 436 bp, Homo sapiens
ccgcggtggcggccgcccgggcaggtactgccctttcgttagaaggcagtgactcctttctgtgaagccgatttagtgaagtgtcctgtgcagaaaagagtccagggctgtcagttaatttcttccggccactggagttagggtttgaaactctgcagctgcctattgcacttgtgaaaaggtttgtatgttcatcactgctggctggctcagagttgggagtgaatcctccaagggataagcttggagaactttctgaacagtcaatctgtaaaggtgtctgcaatcccaaggccaatggactagattctgaaggctctcggtggacccactgttcctctctgtttattaagctttttgaaggagagagatgagggcaggacatgtgacaacggtgcttttccttatgcttatatcgctctccaacagcatcctt

SEQ ID NO: 1485 - DNA, 437 bp, Homo sapiens
aggtacatgcaagttgcatgattataatgacgtgatcctgggatttaagttgattatgacaggaacagaaggaacttggagattagggacaatgaaaaggtggtagtgaaaggagtgttggagttaagttactagatgtctggaagacagactgtggtggtcagataatgagatagattatggaggggttacagtttttggtaataacgagagagatctaaggtatgactgagagtgaatggatgagaatagcagagaacaaggtcagtggaaaactactcttcaaagaacctatagtcagggtgttgaaagattaaaaattgctaagaattaaatcaggaagtagtgctgcgggaaatgaaatgagcagtgaactaaacttactgagaaatgagaggggatgacccaagggtttgtagattttgtagatgatagca

SEQ ID NO: 1486 - DNA, 362 bp, Homo sapiens
  misc_feature 308: n = A,T,C or G
aggtacatgacatccgacgaaatgagacgccacctaattgatttccgggagtccgcaccaggggccctcagggaagagaccccgcaaagatcctgggagaccaaggtggggaccctggtgagaagagagagttcaggggagtctctcttcattgcccttctgctaacccaagcattaatttgctaagtatttaccaggggagtgggaaaaagagttgagcgggattctcttaggctatgagagagtcaggcagcccccaagataaaataatgaactagaaaatctggaaccttacttctctgggaatnttacctatctggcaccgtgggaagaaagaaaaaaggctactgagtacctgcccg

SEQ ID NO: 1487 - DNA, 504 bp, Homo sapiens
  misc_feature 426: n = A,T,C or G
gcggtggcggccgaggtactgacctctgccagtcagctgcgtaactccaggccctagggtgccccgtctgtccagccagggattgcatggatatgctgtgatctcccttttggttctgattgagttggaccttgtgggaggagaaacatagatgttgatacatgaacacatatgttggagagagaaagttttatcttggcataggacttttaaaacacaaggtaatttttaatcagttttgggaccaaaaaacactcaatatgggaaaaatccaaattctgccaaaatgtctaaagaggtttattctgaaccagtataagtgactgtggtctaggttacacaatttcaagagatcctgataaagcgtgcatgagagagttgggctacagcttggttttacacatttcagggagacaggaattgtanggtaaaattatggcacaggacttttaaaatgaagctgtgaaagtttacagtccatagagaataaaaatctagaagttt

SEQ ID NO: 1488 - DNA, 424 bp, Homo sapiens
  misc_feature 272: n = A,T,C or G
ccgcggtggcggccgaggtacttgacacgacatatggtaaatgaataagacaaaggctctgatggcttctcacagccctgtggatcaaactcagattcttttctagaaccccaaggccctgtcagtctcactagcctctctccagacacaccagcctttttctacctttccaacatcccaagttccttttctcttacaggactacatacactctctcttctgccagaaaccatgttctaccagctaatttccactcaacttttaagtctcanctgaaatgttacttccaaagagaggcctccactgaaccccaagcctggggttcacagcacctgtctccataactacataataatctctctgatgtttaggctgggcatggtggctcacgcctgtaatgccagcactttgggaggccaaggcg

SEQ ID NO: 1489 - DNA, 301 bp, Homo sapiens
  misc_feature 21, 86, 90: n = A,T,C or G
gggcgaattggagctccccgnggtggcggccgggcaggtacccagagttgcgaggagttttttaactgatttagccaggtggcaancatnagtgaatggatgaagaaaggccccttagaatggcaagattacatttacaaagaggtccgagtgacagccagtgagaagaatgagtataaaggatgggttttaactacagacccagtctctgccaatattgtccttgtgaacttccttgaagatggcagcatgtctgtgaccggaattatgggacatgctgtgcagactgttgaaactatga

SEQ ID NO: 1490 - DNA, 440 bp, Homo sapiens
  misc_feature 4, 15, 20, 21, 23, 24, 27, 28, 30, 31, 37, 38, 41, 42, 43,45, 57, 58, 61, 62, 75, 79, 107, 110, 142, 143, 148, 149,287, 310, 318, 334, 335, 344, 367, 373, 375, 377, 381, 394,396, 402, 416, 417, 433, 437: n = A,T,C or G
gatnagctcgatatngaatnncnncanncnngggganncannngnacaagagcggannccnncgcagaggagctncaantttacacactgtttaaatgagggaatangcngcagcgcttggatgtaactgaagaagacagtnngagcnncaaggagggacaaccacgacctatgaggacaccatgccagagaggcctggaccccacgctaggctcagtgcctgttatactcttgggacccagcgctttccttctccatcacgtggcatacttggcattatttgttgnttaaaatattgcccttagttttnacctttcntaaggagacacaaggnngacctttgngacattaacagttgccccaagtngggggnananaaanaatttttgggggngnaaaaancttttggctttttnnaaaaaatttttttttnaaanttt

SEQ ID NO: 1491 - DNA, 345 bp, Homo sapiens
  misc_feature 104: n = A,T,C or G
cttagggcgaattggagctccccgcggtggcggccgaggtacctggtgacccttgctggtgctttcatgttttgtgccgaggcaattagactttgtgctgaatntgtttgtgctgccacctcagggaaggggtggaatgtgcagcgtggtttccatttgacattgttttccctgagagatgggagggctgaacgttacctcttgacaagtcttagtggacagaggggcccggatacccaagcgccttagttcttagggctgggtattagttcattttcacactgctgataaagacatactcgatactgggaagaaaaagaggtttaattggactcccacatggct

SEQ ID NO: 1492 - DNA, 495 bp, Homo sapiens
atagggcgaattggagctccccgcggtggcggccgaggtacctaccctttactttttccccaagaccatctcagggtggagcattctgtctaagagaagaaagataaggaggctcccacccacctctcccaagagcagacattaaacatctttgtgctttgaagagagtgaattttggatagtcttgtgattctcagactaacttccagaattatactttaaccccttccagatatggtccgcctttggcattgtgtgtacctgtgatggggcgtgtggtttccggttgtctcacctttaattgtcaacctccagtgttgactctagaaatatgaggaaagcttttcagtttttaaaattgccatttaaatttagtctattaaaaacaaacctagaggtcttggtgcagttgatttcagagtttattaatttaagtggtcccaaaagtattacatcttttatattctggaagaaaagaactgtgaacaaattaga

SEQ ID NO: 1493 - DNA, 310 bp, Homo sapiens
  misc_feature 22, 46, 137, 139, 261, 293: n = A,T,C or G
ctatagggcgaattggagctcnccgcggtggcggccgcccgggcanggtactgtggaggtcccaggagtgctggtgatgggcacaaagttccgatgggtgaaaccattgacatagagactgcctctgtccaggaggnangggcccagctcgatgatgccatgggtcagtttgctcagctcccagtatagctgctctctgtccagtccagggtttagagggtcaaggcggtgagtgcagatggtgtccacgccggtggctgncccacgtttttcaggcctgagcaaggtcagtntgcagccagagtacctt

SEQ ID NO: 1494 - DNA, 426 bp, Homo sapiens
atagggcgaattggagctccccgcggtggcggccgaggtactaatttgaatttgtaatgagtctgatggtatatttcaattttttgctttgagggactggctgctacattgcagaatatcttatatccctgactgctttccactaaatgtcagtggtgaccccaatccaattattatgacaactgaacatgcttatgcatccctcatgcctttattttttattttgggaaatctttcagcttcagtttttgctgatatttatgtgattctttgttctgcaattcaaatttctgggagccaaacagtctccttggttcagattactgttttttgactagagcttctcgcttcagattctgtcataagattatggcttaacctatggttgtcctttgatttggtgccatatgaaataaaacattattt

SEQ ID NO: 1495 - DNA, 664 bp, Homo sapiens
  misc_feature 87, 315, 327, 358, 364, 367, 377, 378, 393, 397, 401, 402,404, 434, 451, 456, 461, 463, 475, 480, 502, 504, 529, 534,549, 557, 560, 562, 585, 591, 634, 636, 642, 646: n = A,T,C or G
gagctccccgcggtggcggccgcccgggcaaggtacgcggggagtttcacgcgcgtatgctttgcccgccatggccgcagtcaaggngcctttggagttccatgccaagcggtcttggcgccccgaggaggcagtagaagatccggacgaggaggatgaggataatactagtgaagccgagaatgggttctccctggaggaaagtgttacggctcggaggcaccaagcaaggataccttatgctggctactttggatgagaatgagggaagtgatagatggagggcaaaaaaaggagcaatccgattgacctttnaccaaggggganttttggaagcttttttttttaaaaatttttntttttnggngaaatttttnnaaaaacttttttttntttnaaannanattaccccccttttaaaaaaaaaaaatttnccccccaaaaaaaaaanggggnaaaananccccccaaaaanaaaanattaaaaaaaccccccccaaangnttcaaggggcccttttttttttttnggggnaaaaaaaaaaaattnggcccccnccncntttttttgggaggagaggggggncccccnccccctttaaaaaaaaaaaagggcccccccggggggggggggnanttttanaaantttttttttccccccccc

SEQ ID NO: 1496 - DNA, 289 bp, Homo sapiens
  misc_feature 27, 32, 33, 34, 44, 48, 185, 186, 188, 189: n = A,T,C or G
cgggcaggaccatgggaaataagagcnggctnnnggcattctgngtanggagcctgagccaaactctaaagctgtctttataaagggaggtcatgtgatggccagaaattgcctttgcttcatggtgcacttggtggggagtcaggtgtggggtgctgggtttcacatcatcccattttcttttnngnnttcagacctgcaatgcttcttttgcaacccgagaccgtctgcgctcccacctggcctgtcatgaagacaaggtgccctgccaggtgtgtgggaagtacct

SEQ ID NO: 1497 - DNA, 347 bp, Homo sapiens
  misc_feature 11, 28, 35, 36, 44, 55, 90, 97, 116, 119, 159, 187, 189, 243: n = A,T,C or G
aggtacttttngaagtaactggacatgngggaggnnaggggaanggaagtattgntatggactgaactgtgcccccaaaattcatatgtngaagccntgagctctgacatgattgnatntgaagtcctaaagccaggaatgaggaaggctgtgaatgtncattgttccatgcaagaatgactctggngngggctatttagagatcatgagggatactgccccagtttccacaggccagatggnctccaacaaaagccacgggggagtcacccctgcctggcagatctatcgggtcaggaccaccgcccagggggtcctggagaggacagtataggaccaaagaggat

SEQ ID NO: 1498 - DNA, 578 bp, Homo sapiens
  misc_feature 6, 81, 209, 230, 232, 235, 241, 252, 255, 259, 262, 283,285, 290, 307, 310, 312, 314, 320, 323, 325, 326, 328, 332,333, 348, 349, 354, 356, 357, 365, 366, 372, 378, 381, 385,392, 394, 399, 411, 413, 415, 420, 421, 422, 423, 429: n = A,T,C or G
  misc_feature 437, 443, 445, 453, 455, 456, 471, 474, 475, 477, 486, 493,504, 510, 524, 560: n = A,T,C or G
caccgnggtggcgcccgaggtacttggccaagcgctcagatcggcaaggggcaccaagtcttgatctgcccagtgcacagncccacaaccaggtcagcgatgaaggtatcttcagtctcccccgaacgatgagacaccatgacgccccaaccattggcctgggccagcttgcacgcctgaagagactcggtcaccggagccattctggnttgactttttagcaagaaggnanttnaaggantttttttttancgncttnggnaatccttttgggggtggggcncntgggngaaaaactcccccccanccntngngattcnttncnngngggnngaaaaattttttggnnaaaantnncccataanntttttngtgaanaangganttttttnanaaaanccccctggggtntntnttttnnnnaaaaanattttttntcttcncngggggggncnnttttataaaaaaaangannanacccccccnccgtggnggagaaaattnttttanattattttttttcntcccccccccgggccttgggggggggggccccccancccttttttttttttttt

SEQ ID NO: 1499 - DNA, 426 bp, Homo sapiens
  misc_feature 4, 300, 373: n = A,T,C or G
actnctatagggcgaattggagctccccgcggtggcggccgcccgggcaggtacagttaatttgtgtcatcccatcagcaatgaaggtccctatccagggtcctgcttggagcagcatttcatgttcttttgctgttttgtgctttgccgattttggattttatttttcacaaaatttttatttaaaaaactcgtcaccttttggaaatgcccattgccgacttgaatttttttgtatgaagtccctcctgattttgtgtgtgtgtgtctgtgtttaagcaagcgttcggttggtatagnttttttttgtttttttaatttaaattgaaggtagctgcctcctgaaagccagcattaagccagaacacccagnttcaagcaaaagacccacctctctgcagaggcaaagtctactttctggtacct

SEQ ID NO: 1500 - DNA, 521 bp, Homo sapiens
  misc_feature 286, 318, 323, 350, 363, 380, 385, 391, 415, 416, 427, 444,463, 465, 469, 475, 479, 483, 504, 505, 510: n = A,T,C or G
cttagggcgattggagctccccgcggtggcggccgaggtacttttagtagagacggggtttcaccatgtttgccaggctggtctcgaacccctggcctcaagtgatccacccgccgcagactcccagagtgctgggatttcaggtgtgagccactatgcccggcctaatacgtggatttttaaagcttcaggttctggttcagaagtttcctgggtctcattaaaataatgaggcactcagaattggtctaataaaaataacgaccatttctttctacttcagctntttcacaaacttttttaatgaaaatgacaagngaggnccttcagtaggggcattttcagggganaaaaatagcgggnagacctgaaacctgggntaggnagtttntttttattttttgaacaagaagannaattttttcanaagaccctaaaaaattnttttcccaaaaacaaaagngntttntttttntttngggngggacccccttccttttgggnnttttnccttcccccct

SEQ ID NO: 1501 - DNA, 597 bp, Homo sapiens
  misc_feature 27, 196, 198, 204, 227, 245, 260, 265, 275, 280, 281, 282,283, 304, 307, 308, 316, 320, 322, 323, 327, 335, 336, 345,346, 353, 355, 357, 358, 359, 379, 384, 387, 389, 394, 401,402, 403, 406, 407, 409, 419, 422, 423, 429, 432, 434: n = A,T,C or G
  misc_feature 435, 436, 444, 447, 452, 459, 460, 464, 466, 474, 483, 489,495, 499, 501, 504, 505, 519, 536, 541, 557, 564, 565, 567,571, 573, 580, 590: n = A,T,C or G
cactactatagggcgaattggagctcnccgcggtggccggccgcccgggcaggtacgcgggggccactgaccacagctctttcttcagggacagacatggctcagcggatgacaacacagctgctgctccttctagtgtgggtggctgtagtaggggaggctcagacaaggattgcatgggccaggactgagcttntnaatgtntgcatgacccccaagccccacanggaaaaccccgcccccgnggacaatttgttttnaccangtttcccccnttggnnnnaaaaaattccttttttttttnccnncccccccncggngnncccnaagggggnnttttccccnnttttttnantnnnccccccccccccccgggggnggggnggncnccccnctttttnnnaannantttttttttnttnnaaaaanccncnnnttttttanaanggggntcccccnnaatntnggggcccnttatccccngggggntaaaanaaantnttnnccaaaaaggggggnccccctccccctttttnaaaanagggggccccccccgnggggggnngngaantnataaaanttttttttcnccccccc

SEQ ID NO: 1502 - DNA, 624 bp, Homo sapiens
  misc_feature 159, 184, 214, 225, 226, 232, 246, 248, 249, 250, 252, 253,256, 282, 283, 284, 296, 297, 298, 299, 311, 314, 315, 329,330, 360, 362, 363, 365, 367, 375, 376, 378, 403, 406, 416,421, 425, 427, 428, 432, 433, 434, 438, 444, 446, 453: n = A,T,C or G
  misc_feature 454, 455, 456, 459, 460, 461, 462, 465, 468, 469, 470, 473,474, 481, 482, 483, 484, 489, 490, 491, 498, 523, 529, 530,534, 535, 537, 543, 546, 547, 553, 557, 558, 559, 561, 563,564, 565, 568, 570, 572, 573, 574, 575, 577, 580, 582: n = A,T,C or G
  misc_feature 585, 586, 588, 590, 592, 594, 596, 598, 600, 602, 607, 617: n = A,T,C or G
tacttagggcgaattggagctccccgcggtggcggccgcccgggcaggtacattccagcgcagtctgggccccaaagcagtttcacccttacctaacttacctaactcttaatatagcctaaactcactgaaaaataagctaacttcatttcacctttngtagcatacacgtagactcagagtntatactgaaatataatgggaggctgttatnaaaaaaaaccnnccctcnaaaaaaaaaaaatntnnncnnctnaaaaaaaaaaaaaaaaaaaaaaaaannngggggggggggnnnngggttttttttnatnntaaaaaaaaaaatnngggggggggggggggggggggggttttttntnntntnttcccctnnantccggggggggggggggggggggtngtnggtttccttntattntctntnnctannncacncctccnanacccgcnnnngannnnaanatnnnttnnaattatnnnnatttnnnaaaaagnggggggggggggggggggggggttnctttcnntttnnantataantannatagtntctnnngnannnttntntnnnnanatntnggnntncncncntncntncntcttntttataaaanaaaaaaa

SEQ ID NO: 1503 - DNA, 446 bp, Homo sapiens
ccctcgcggtggcgggcgaggtgcatcaccctgctgagggacatccaggacaaggtcaccacactctacaaaggcagtcaactacatgacacattccgcttctgcctggtcaccaacttgacgatggactccgtgttggtcactgtcaaggcattgttctcctccaatttggaccccagcctggtggagcaagtctttctagataagaccctgaatgcctcattccattggctgggctccacctaccagttggtggacatccatgtgacagaaatggagtcatcagtttatcaaccaacaagcagctccagcacccagcacttctacctgaatttcaccatcaccaacctaccatattcccaggacaaagcccagccaggcaccaccaattaccagaggaacaaaaggaatattgaggatgcgctcaaccaactcttcgaaacagc

SEQ ID NO: 1504 - DNA, 528 bp, Homo sapiens
  misc_feature 229, 239, 240, 256, 263, 276, 277, 278, 283, 292, 293, 311,312, 321, 322, 331, 332, 337, 349, 360, 380, 381, 394, 395,414, 417, 439, 448, 449, 458, 462, 464, 466, 469, 489, 508,510, 511: n = A,T,C or G
ccgggcaggtactcttgacaaagcctccccaacaaggtgaaatcactctcggctcaccactggtggcagaaatactctgggcctgtctgttctgaatggtcagtttcactgtaatcctcaggcccttccagtcacccgttgccttggcaatgtcatcaccaactttttttggagacagacccagggggcccgatcttgggggccagggcagaagttggcaccgactttnccttccgggnncccctaaggttaaaanacttttntttttttgggggnnnaaaantttcgggcnnttgggggggggccctttnntttttaaannaaacccccnnttttngggaaaaacccnaaagaaaagtncccccttgggcccccccccnncccaaaaggccgnnaaaaacccccggttttttnggngttttttaaaaaaaaaggaaanccccccgcnncgggaaaantttntnanaantttttttccccccccccccncggggggggggcccggccncnnttttttttttttttttt

SEQ ID NO: 1505 - DNA, 412 bp, Homo sapiens
  misc_feature 327, 341, 389: n = A,T,C or G
acttagggcgaattggagctccccgcggtggcggccgcccgggcaggtacatggtggtaaatgcttaactccacctatataaaaatcaaaaacaggcaaaatgaatcatcagactacagcttacctttagggggtgtgagtagtgactaacaggggtcaagatgaaggtttaaggatgtcgccaggcgcagtggctcacgcctgtaatcccagcactttgggaggccgaggcaggcggatcactgaggtcaggagatcgagaccatcctggctaacacggtgaaaccctgtctctactaaaaatacaaaaaattagccgggcgtggnggtaggcgtctgtngtcccagctactcgggaggctgaggcaggagaatgacgtgaacccagnaggtggaacttgcagtgagccga

SEQ ID NO: 1506 - DNA, 471 bp, Homo sapiens
ccgcggtggcggccgcccgggcaggtaccatttctgcatttattttagcccatggaataactgtgctgagaaaccacagagtcaatcagattcaaaatgttaaaatccttcctgcttggagttttccgtcttcacatcaaagcatttcatgcccgtcagcaactttttaatgcatttgctcctcgtttgcacaatttccatttaaagactttccttggctgacttctctgatgaggtttcctgcttgccaggagagcacgctaatgcagaaattacaaagggggcttcacgtcccttttccggaggacctgatatttcagataatttccagcttcagttttggagaaacgactgttctttgcaccaggggaaaataaactgattttcagtgtaagcaacctttctgcaagtagaatggggactgttgggaatggagatgaagacttcacttcatgttattcatttccttac

SEQ ID NO: 1507 - DNA, 305 bp, Homo sapiens
  misc_feature 270: n = A,T,C or G
ttagggcgaattggagctccccgcggtggcggccgaggtacttttttttttttttttttggttaggttaacagaaacaatggggttatttccggtagtggcaacagcacgaactagttttcttgtggactaatggcccgagagttcctgcgatttgtggattatttcccttagatgcaatcgaccatttcgttccaataagaattaatgctaccacggggcttacaaagaacccctcaagtcttccaaatctgcccatgacatcaacctntgctgcgtaatcggacctgcacccaacccaggttt

SEQ ID NO: 1508 - DNA, 259 bp, Homo sapiens
ccgcggtggcggccgaggtacgcgggagaacagctcagaaggagacccacagtgagcagctcccctgtgtcggcgggcaggtcgtccctcaagtgttcagctctcagcagagaaaaggccctggagagggtgactcctctcagctctcagcagagaagcagccctggagaaggtagcttctgttcgcaggcagattgtccagaggtcctgctgctctcagacggggccctggagaggatagcttctatccataggcagg

SEQ ID NO: 1509 - DNA, 279 bp, Homo sapiens
cactacttagggcgaattggagctccccgcggtggcggccgcccgggcaggtacatagcagtggaagctgcagagggccgaaacaaaaatgaagttttctaccaatgtccagaccaaatggctcgaaatccagctgctattgacatgtttattataggtgctacttttactgactggtttacctcttatgtcaaaaatgttgtatcaggtggcttccccatcatcagagaccaaattttcagatatgttcacgatccagaatgtgtagcaacaactggg

SEQ ID NO: 1510 - DNA, 416 bp, Homo sapiens
  misc_feature 25, 153, 207, 228, 291, 303, 368: n = A,T,C or G
ctcccgcggtggcggccgccgggcnggactttttttttttttttttttttttttaaagatccagactaagacacatcaacaagaaatttccaaataccaggtcaagaatacttcacatgtttctggagggaaagaaaacagttcatatacagngaatcaggaattacaattgcatcagacttatcaacagcatcgggaagataatgngaaaataccttcaaaactctngagggacacaagaagatgctgcctggccacaggagcgagactgctggcctccaatcagtcttntgggcaggcctntgatgcaattacagggctaaggaaccacggtaaccaatgtgccattggctgtgctaaaacccagnggccccaggaagaatcctgttgacactggcttggaacatgaggcttaa

SEQ ID NO: 1511 - DNA, 411 bp, Homo sapiens
  misc_feature 16, 183, 187, 197, 204, 206, 209, 215, 264, 266, 271, 283,284, 297, 323, 355, 389, 394: n = A,T,C or G
cgactactatagggcnattggagctccccgcggtggcggccgcccgggcaaggtactttttttttttttttttttttttttttggcatataatccagtttattaaatacagatgatgggccagacatggtgatagagaaatacagattaagaaaccagatcaaatcctttttaaggaattatntagnggaaaatatntcaactntnttntttacnctactattcattatcttacacttcaaatcttcacctttccattttgacngncgctnttttacttcagnntcctgaaaacatntttccaacagaagttacataaaaatnctaatcttcaaggggctttctaaaatattttnatcacgtcattaaaatcttctttcactaggcaanggttntgtctttatgggggctg

SEQ ID NO: 1512 - DNA, 498 bp, Homo sapiens
  misc_feature 395, 421, 438: n = A,T,C or G
ccgcggtggcggccgcccgggcaggtacgcggggacagaaatggagtcatcagtttatcaaccaacaagcagctccagcacccagcacttctacctgaatttcaccatcaccaacctaccatattcccaggacaaagcccagccaggcaccaccaattaccagaggaacaaaaggaatattgaggatgcgctcaaccaactcttccgaaacagcagcatcaagagttatttttctgactgtcaagtttcaacattcaggtctgtcccaacaggcaccacacccgggggtggactccctgtgtaacttctcgccactggctcggagagtagacagagttgccatctatgagggaatttctgcggatgaccggaaatgggtacctcggccgctctanaactaggtgggatccccccgggctgnaaggaatttcgatatcnagcttatcgatacccgtccgaccctcgagggggggggcccgggtcccagctttttggtcc

SEQ ID NO: 1513 - DNA, 589 bp, Homo sapiens
  misc_feature 1, 25, 34, 46, 52, 53, 56, 57, 58, 63, 70, 72, 82, 86, 89,111, 149, 153, 160, 168, 174, 178, 196, 209, 214, 228, 231,234, 240, 267, 285, 294, 313, 317, 336, 344, 345, 352, 361,362, 387, 389, 413, 414, 416, 425, 428, 429, 446, 451: n = A,T,C or G
  misc_feature 460, 461, 462, 467, 468, 477, 482, 490, 498, 508, 518, 524,525, 526, 534, 536, 539, 558, 560, 569, 571, 576: n = A,T,C or G
nggggccgccgcccccggggccggncaaagcaanggggggccaacnaaggcnnggnnnccccnggggggnanggaaaaacgngggnaanccccgcggcaaccaaaaggggnccaacaacaaaacaagaaccgggaggccccgggggagnccanaaaaaanggcggcanaaaagncccngggggggggggggccccnaaaaaaggagggngggangccaaaaaccagcnacnaancaaaangcggcccgggggggccgcccccaaccngggccccagccttaaagncccaagaanccgcggggaaaaaaccccngggnccggggggccccaagcccngggccaannaaaaaangggaaaaanncggggcccccaacccgcccgcccgngnggggaaaaggaaggggggccgggnncnccgcccggnaannccgggggggccggcccnccggngccccgccnnnccccnncggcgggcnaaccngggaaccngccggccnggccggcccncccggggggncccggnnnaccgggangnggnccgggccgaaggccggggnangcaagccgncnaaccnccaaaaaaggggc

SEQ ID NO: 1514 - DNA, 337 bp, Homo sapiens
  misc_feature 3, 44, 324: n = A,T,C or G
gtnattggagctccccgcggtggcggccgaggtactaagtcttntaaatctggtgtgttttttacacttgcagcacatctcaaatgaaatagcaacatttcacatgcacaagactcacatatcttctgatggctatcttgtcgaatagcacaattctaggaagttcaaaagggggaacaattgcttctcaaattgatgaaggtagagaagaatggtatcagagaaactgattaagcagggacctgggaatctgagttgagttccggggcatgtttgttccctagcaccatgacctacatggcagtgtctcttctcatactattntaagagtccctgg

SEQ ID NO: 1515 - DNA, 460 bp, Homo sapiens
actacttagggcgaattggagctccccgcggtggcggccgaggtacgcgggaggccaagctggactgcataaagattggtatggccttagctcttagccaaacaccttcctgacaccatgagggccagcagcttcttgatcgtggtggtgttcctcatcgctgggatgctggttctagaggcagctgtcacgggagttcctgttaaaggtcaagaccctgtcaaaggccgtgctccattcaatggacaagatcgagcggccgcgggcaggtacttcatgagacaaaatggaaaaaggagaattaaattaaaatgcacaactaatatttatctactacagacataatatttctcagttgtgaactaattactatgcttggaaaatgctagcatcctcataaatattttggttctattgggatacaaaatctgatttcgcaaactttgcaaaggcacatttt

SEQ ID NO: 1516 - DNA, 426 bp, Homo sapiens
  misc_feature 378, 413: n = A,T,C or G
ccgggcacggtacgcgggggcatttatcttcactctgatgagggctcagacttgataacgcccgtggtgccccatccctataggagctggtgagattgcagcctgctgcctcccctccatcagccacagctattggatttcccacccagaatctttaggtaaatgaggtaagtcctgatttttaaaacttcttttgaatctggaatccaaacacctgagtggaaagagaagcctgctttaaactggacagatgaaactagaacagactcttggagacggctggcaggaagtgaagctcaccttacctgggcttacctcactgggtcaaatcagaattttattttggagggcaggttggctactttggatattatctgngaatttcctgcattggctggacttctaatctctgngaatttaaaagcc

SEQ ID NO: 1517 - DNA, 329 bp, Homo sapiens
  misc_feature 103, 136, 200, 320: n = A,T,C or G
ccgcggtggcggccgaggtaccttttagttattgacaaggttaaaatagcactctcagtttttcagtattacagagagcaaatagtttcctctcctgctctgngcagtagcttttccagaactatggacaaaattngatcagaaagaagattgattatttcctcatctttttttcttttttttgagacagagtctctctntgtcccccaggctgaagtgcagcggcatgatctcagctcactgcaacctctgcctcccgggttcaagtgattctcctgcctcagccttctgagtagctgggattacaggcgccgtgccancatgcccgc

SEQ ID NO: 1518 - DNA, 519 bp, Homo sapiens
  misc_feature 110, 111, 117, 119, 121, 125, 131, 168, 175, 178, 182, 183,184, 204, 214, 224, 235, 242, 249, 257, 260, 263, 266, 269,280, 296, 297, 298, 299, 300, 301, 310, 344, 358, 362, 364,365, 370, 374, 385, 386, 390, 405, 416, 428, 429, 430: n = A,T,C or G
  misc_feature 448, 462, 470, 475, 486, 488, 497, 500, 501, 502, 504, 505,506, 507, 508, 509, 510, 511, 512: n = A,T,C or G
ccgcggtggcggccgaggtactttttttttttttttttttttctttctttcttttttttttttttttttttttttttttttttttttttttttttttttttttttggcannaaaaancntnattnccattnggcccaaggcttgttaggaaagtaaaaaaagcccccnattggcnggngggnnnggcttaggcaaaacccctantactttgcanggggccctcnaaaaagcccgngggcccnaaaaagnccttaaanccnccntgnaanagggccccttnaaaaaaaaaccccccnnnnnnaaattttgnggcccccccccggggggggggggggggggggggnggcccccccccccntttntnnaaccncccnccccccccccnnaaangggggggcccccccnaaaaaaaaaangggggggggggnnnggcccccccccccccccnaaaaaaaaaaaaangggggggnggggnttttttttttncnccccccccnccnnncnnnnnnnnnggggggg

SEQ ID NO: 1519 - DNA, 334 bp, Homo sapiens
  misc_feature 7, 34, 214, 251, 286, 334: n = A,T,C or G
ccgggcntggactttttttttttttttttttttncttgcttttggttttttccttcgatatcttcaaaatctgtgtcagaagaaaaatgtgtttctgactcctgtagtagattaaaatcagttggtatttctggagctgctatcatttctttatcatcttctggaacacctcaatgtcagaaatatattcatatatttacgtgggtaaaatggnggcttgccttctttcttctaagacaattcctcacggngggccaagcgccctccgggtgcccctccaaacttntagaagcttcgcctccgccattttataacttacctccccgcgtacctn

SEQ ID NO: 1520 - DNA, 444 bp, Homo sapiens
ccgcggtggcggccgaggtacatcaccctgctgagggacatccaggacaaggtcaccacactctacaaaggcagtcaactacatgacacattccgcttctgcctggtcaccaacttgacgatggactccgtgttggtcactgtcaaggcattgttctcctccaatttggaccccagcctggtggagcaagtctttctagataagaccctgaatgcctcattccattggctgggctccacctaccagttggtggacatccatgtgacagaaatggagtcatcagtttatcaaccaacaagcagctccagcacccagcacttctacctgaatttcaccatcaccaacctaccatattcccaggacaaagcccagccaggcaccaccaattaccagaggaacaaaaggaatattgaggatgcgctcaaccaactcttccgaaacagc

SEQ ID NO: 1521 - DNA, 463 bp, Homo sapiens
ccgcggtggcggccgcccgggcaggtacatcaccctgctgagggacatccaggacaaggtcaccacactctacaaaggcagtcaactacatgacacattccgcttctgcctggtcaccaacttgacgatggactccgtgtcggtcactgtcaaggcattgttctcctccaatttggaccccagcctggtggagcaagtctttctagataagaccctgaatgcctcattccattggctgggctccacctaccagttggtggacatccatgtggcagaaatggagtcatcagtttatcaaccaacaagcagctccagcacccagcacttctacctgaatttcaccatcaccaacctaccatattcccaggacaaagcccagccaggcaccaccaattaccagaggaacaaaaggaatattgaggatgcgctcaaccaactcttccgaaacagcagcatcaagagt

SEQ ID NO: 1522 - DNA, 441 bp, Homo sapiens
  misc_feature 20, 129, 149, 173, 231: n = A,T,C or G
tactatagggcgaattgganctccccgcggtggcggccgaggtactttttttttttttttttttggtggtaattgagctgggaaaaattcagaattgggtcataattaatggtaactaaacagatttgngaatatgggacatctgtggncttgaaaacatcagtatgatttgnccccatatttcttcagcctggacaatagaaacagacaggggaggggggtaaagtgcantaaagtaggctgagtgatgtggtgctagcagctggagtccagagaagttctgacagtgcagggagcagcccctttgttctttggagcactggaagggctgagctgcatctgaggtgttcaagccaccaacaggacagggtagaggactaagtagcacatgtcctccagagcagcttcctgtctttgtgtggtcacatcacatcgggggaa

SEQ ID NO: 1523 - DNA, 440 bp, Homo sapiens
  misc_feature 6, 400: n = A,T,C or G
cgactnctatagggcgaattggagctccccgcggtggcggccgaggtacttttttttttttttttttttttgcttctggtaaaaagaagcatgttacaattttcccccccaattcacataggactctaagaacatattttaaatcagtgcttccatacaggaacgaaatccactattttagaattctaaatcttgttgaaaagcaaccttatctgaagagtaaacaagaagattcaaagttaagtatcagtgcagtccagagcccctaaatgaataaaactgaatgtatcttaaaaataggatttgcacaccagtaagagacttgtttacgattctggggaggagggaagaaactgtaagagggagagaaaagggaagaaaaacaagaagaaaaataatnggaaaaaaaaaaaagaaagaaaggtttgtttagctcaaag

SEQ ID NO: 1524 - DNA, 460 bp, Homo sapiens
  misc_feature 308: n = A,T,C or G
actcctatagggcgaattggagctccccgcggtggcggccgaggtactaattgagcttagtgatattaacttggtaaattaagccagtttgtctctttgctttatctgtcttgtggaatctgtatcagtggaaattaaatagtctttacatttgatgaaccctgtttaggtgttggaaatacccatctatttgttaaaaaggcaaggtcccatgatttagtgaatgggggatacagacagcctttattcaagtaactgaataaacaaaagaattagagagtgtgatgagtttgaataaaaaatatagntcataaaaaccagaaatgtgatagagcatagtggctggaagaaagttacccaagtggcttgggtagtcaatgaagttgactccaacatgcagtagtacgccgggtcctaagatagagattaagtcatggtttaaatgaggaacaatcagtaa

SEQ ID NO: 1525 - DNA, 209 bp, Homo sapiens
ccgcggtggcggccgcccgggcagggtacaccactgtgcctgctttgaatcctttacgaagagaaaaaaaaattaaagaaagcctttagatttatccaatgtttactactgggattgcttaaagtgaggcccctccaacaccagggggttaattcctgtgattgtgaaaggggctacttccaaggcatcttcatgcaggcagccctttg

SEQ ID NO: 1526 - DNA, 345 bp, Homo sapiens
  misc_feature 5, 23, 51, 103, 212, 306, 309: n = A,T,C or G
gagcnccccgcggtggcggccgntgtacttttttttttttttttttgcttnttaattggatgcctggagacaattccatttcaattaccttattggcatgacnagatatacaagggctgccaatgtcaatacattaagactgagcgtgctggagcagcagccagggttcagggcactgctgtgtcatctgcgccacggtgcacaaaggcagnttcaaaagcatttcagcatgatcgcttccctctctccgctcctggggagagaaggatcctgcacaccacaggcaaatcatgctgaaattgaggnggngcctttgggactcccatcccatcacagtcttgggat

SEQ ID NO: 1527 - DNA, 266 bp, Homo sapiens
  misc_feature 263: n = A,T,C or G
tagggcgaattggagctccccgcggtggcggccgaggtacctgtggatattggttgaacaaacaggtgggcaaagtgaggaagataagaagtccatccgttcagtttccccactgcggagggaataacactgtctttccacaggtcacagactgggatgagcaacgggctgaaggcacgtttcccgggaagatctgaactggctgcatctccctttcctctgtcctccatccttctcccaagatggtgaagggggacctggtnctg

SEQ ID NO: 1528 - DNA, 274 bp, Homo sapiens
  misc_feature 22, 160, 179, 270: n = A,T,C or G
aggtacgcgggatggcacatangacatcagctaggcttttgggaatcgtttgtgttctttgtggaaatgtcctttagaagcacccatgaagtagtgtgttcagactgtgcacacagaaaacaggctctgccttcacatgtgagacggtggacttttcctntggacaaaatgacagcatnctggcgactccacagtggagctgagcgccactccctgtagcccgatctgggactgaaacgcttacacctctgccttagaaggagtcccccntgcc

SEQ ID NO: 1529 - DNA, 434 bp, Homo sapiens
  misc_feature 198, 403, 412, 416: n = A,T,C or G
ccgcggtggcggccgcccgggcagggtacgcgggggaattagtccgagtggagagagcgagctgagtggttgtgtggtcgcgtctcggaaaccgggtaggcgcttgcagcatggctgaccaacctgactgaaagagcagatttgcagaatttcaaagaaagctttttttcactattttgacaaaagatgggtggatgngaactattaaccaaccaaagggaatttggggaacctgtaatgaggatctttttgggccagaatccccacaagaaagcaagaagtttaccagggaacattgatttaatggaaagtaagaatgccttgattggttaaattggcaccaatttggactttcccttgaattttcttgacaaatggatgggccaaggaaaaaattggaaangaccccagnaccngttggaaggaaaggaaaa

SEQ ID NO: 1530 - DNA, 532 bp, Homo sapiens
  misc_feature 89, 151, 153, 156, 171, 180, 183, 184, 193, 195, 198, 210,216, 219, 223, 230, 231, 239, 243, 248, 249, 250, 253, 256,257, 259, 268, 270, 273, 275, 282, 286, 291, 293, 329, 333,342, 343, 349, 353, 362, 365, 368, 369, 377, 388, 407: n = A,T,C or G
  misc_feature 420, 422, 423, 424, 425, 430, 433, 434, 435, 439, 452, 470,471, 472, 473, 481, 482, 490, 495, 505, 506: n = A,T,C or G
ccgcggtggcggccgaggtacgcgggtgttcctttttgttcaaagtctatttttattccttgatatttttcttttttttttttttttgnggatggggacttgtgaatttttctaaaggtgctatttaacatgggaggagagcgtgtgcggntncancccaacccgctgctnacttttcanccnnttttcaccngnctntgggtttttaanaccctnggntttntaccccnntcctttgnaaanccctnnnccnaanngnggggcaaananccngngggcccnctanaaaanancttgcggcccctgtcccccggggttttgaggacaantttncccaaagcnnaaaaanagangttttttcnccntcnnctcctggnggggggggggngaaaaaaaaaaaaaaaaantttttttttcccngnnnnggggnggnnncttnaaaaaaaaaaaanaatgtcccccccccccgnnnngtgggcgnnaatttttnttaanaatatttttnnccccccccccccccccccgggggggg

SEQ ID NO: 1531 - DNA, 488 bp, Homo sapiens
  misc_feature 27: n = A,T,C or G
atagggcgaattggagctccccgcggnggcggccgaggtaccattccgggtcatccgcagaaattcctcatagatggcaactctgtctactctccgagccagtggcgagaagttacacagggagtccaccccggtgtggtgcctgttggggacagacctgaatgttgaaacttgacagtcagaaaaataactcttgatgctgctgtttcggaagagttggttgagcgcatcctcaatattccttttgttcctctggtaattggtggtgcctggctgggctttgtcctgggaatatggtaggttggtgatggtgaaattcaggtagaagtgctgggtgctggagctgcttgttggttgataaactgatgactccatttctgtcacatggatgtccaccaactggtaggtggagcccagccaatgggaatgaggcattcagggtcttatctagaaagacttgctccaccaggctggggtccaaattggag

SEQ ID NO: 1532 - DNA, 230 bp, Homo sapiens
tagggcgaattggagctccccgcggtggcggccgcagaaggtcccggcagcacgcacggaagaagacggaccccgcgatgagggcggcggcaaggagcaccttcatgttgcgttcggagaggcgcagcatccacaggccccgcgtacagactggtttggtaaatgctaaacttttgtgtcttttgcctttttaaaggaattgttaacattggaattgagggtatgtacct

SEQ ID NO: 1533 - DNA, 283 bp, Homo sapiens
  misc_feature 273: n = A,T,C or G
aggttttgggcgatcgttttcatacgaaatatttgagatgctttagatgtgtgtgcatgtcagctgccacctgaaagaaaggcctcattaaagattttcactgattaactctttgattgttcttgggatctcagatgggaattcacgctgcttgctgcagagctcttgggctaagtgtattttcttaattactgagaaatgcgtgttatcagtaagcagtgaaaagtcttgaaaaaactaagtaattttaaaaaaaaaaaaaaaaaaaaaaangtcctgcccg

SEQ ID NO: 1534 - DNA, 342 bp, Homo sapiens
  misc_feature 1, 7, 79, 82, 83, 155, 257, 314, 332: n = A,T,C or G
ncgactnctatagggcgaattggagctccccgcggtggcggccgaggtacttttttttttttttttttttttttttggnggnngttttcattttcttctggactggtaatttttacttctggccttggtggtctttgagggtctacatcagcctnatcttgtccactgccagctccttgagactttctttccttgtctaggaccagttgaagctcattattaacctgctgcagctcctcaccattctcctcatcggngcctccatttacacgagcagggcgtgcctgctgctcactgtgatccaaaatctcctngacttgctcaggggcatntgtagcctcc

SEQ ID NO: 1535 - DNA, 471 bp, Homo sapiens
cacttagggcgaattggagctccccgcggtggcggccgcccgggcaggtactttttggtgttttttggaaaagttacatttagatctattctgaagctgttcatttttaacaaataaaatgttacaggtttcacatgatttattcgcaaaaaaaaaaaaaaaaaaaagtactgtctgtgaacagcaaggaaaatatgattacacctaagagatgaaattggcataggcgagaagtcagaaaaataatctatacagcttgcatggttggggagttaggagaggccaaggccacgtgcacgtagagcaagaggtagaagaggcccgggggctagagcgcaccctggtggatagtgtgagaatttcacactggctcaagccttgaagaccaccccaggggtgcgccttagcaacgcacttatgcaagaccccaacaactggcccttgaaaggagctttttactggtgggatgtg

SEQ ID NO: 1536 - DNA, 563 bp, Homo sapiens
  misc_feature 304, 320, 321, 326, 474, 488, 509, 535, 554: n = A,T,C or G
aggtactaatatcccttaatggcagaatgtgataatcatggaattaattattgctaaagtagttttcaaataaaaaaaagaaaaaagaaaacaaaacaaattaaacttgacacaatctgaccaaacacgtgtcaatttacaatttcaaggttattttacaaaatacctacatttacacaataggctcccggcagcatttccagacaaatgttcttttaatttatcctgacatgctataaatgaataaattacactattttaaaaattatcatcagtaagtttttcctttctcatgggggtcaanagcaaaaaagaaaatnnaggcntgccaaaggaaggatttggagaggggaaagccgccacgcaccaccagtataaccttaaaataaacagggagggggctggggggagggggtcaacaaattcacttgaaaccctcacaacaagtggtggatgcctcttccaaaggggggnggaaaaggttcaancttggcttttattaggcccantttcaaaaaaaggtatttttaaaagnaaaaaatggtttttggtanggggaaaaa

SEQ ID NO: 1537 - DNA, 448 bp, Homo sapiens
  misc_feature 1: n = A,T,C or G
ncttagggcgaattggagctccccgcggtggcggccgaggtactttcaaacacctcatgaggctggccagagatgacaccactgccccggatgcaagggggcagccttgctttggaccccgttctgaatctcaggcttcatctattaggcacactgagcagaaacactcctccctgccacttccgagttgcagcaaaaagggtctaactatgatttaaagcaaataattttaaacttcaaattttcattactgtcatacttatgaggaccaaataatgtaatgactaagacatcaaattacatgtaatatgaataaaaccagtaagaaaatgatagttacttataattggatcaacatacaaaaagaacgtcatttggccaaagtaaaacggttaaaaaaatagtgtctataaaatcaccatataaaatcttagtatgtacctgcccg

SEQ ID NO: 1538 - DNA, 497 bp, Homo sapiens
  misc_feature 276, 318, 412, 418, 427, 429, 435, 453, 485: n = A,T,C or G
ccgcggtggcggccgcccgggcatggtacaaaacaaattcaaagggttaagaatttcaagttggtagcttcagagcattaagccccaaatgtggggtcccttctgagcccaggattatgtgtgactgcactggtcacattgccatgaagccagccctggtggttggtagaggggtgggcactggacctaagcagggccaatcagagccattcctggaaatggatatataaatattaggaatgcaaagttatttattttgttagagtttgaacaacngtgatctgtagaaaaccagtcacatttccttaaggatgcatnaataaatatgagctaaatgtaataattagaactttggtttccaagcagattccatgctctaattccctggataggtgaatataataagatgatntatccntgaataagntncttttnctttgcccaaggggacangatggtaaataagggctactaaatcaagttgncctttaaaataa

SEQ ID NO: 1539 - DNA, 247 bp, Homo sapiens
ccgcggtggcggccgcccgggcaggtacaaaacaaattcaaagggttaagaatttcaagttggtagcttcagagcattaagccccaaatgtggggtcccttctgagcccaggattatgtgtgactgcactggtcacattgccatgaagccagccctggtggttggtagaggggtgggcactggacctaagcagggccaatcagagccattcctggaaatggatatataaatattaggaatgcaaagt

SEQ ID NO: 1540 - DNA, 527 bp, Homo sapiens
  misc_feature 430, 487, 501, 505: n = A,T,C or G
gtacttagggcgaattggagctccccgcggtggcggccgaggtacccatggcccttcctttgaaatcattttttcttccaggcccttgcgctccgggcctgggagacagaatgagagacagccccaaggatctgtgatacactttcagggtcattttttccttgtccctgccagtccaggcacaccttttgtgttctctcctgaacatactttctcatttttcacaatatggaaaggctgataatttttcaaacctttaagttctctttccttttgattgaccattttgtctttaaatcatttttcttctcacattttattattataaacattcaagggaaaccaagccattattttgcttagaaatttattcagccagctggggcggtggtggctcacacctgtaatcccagcactttgggaggcccgnggtggggtaagatcaccctgaggtcaaggagtttcgagaccagcctgaccaataatnggtgaaacacttgncttntacttaaaaaataccaaaattt

SEQ ID NO: 1541 - DNA, 217 bp, Homo sapiens
  misc_feature 16, 85, 189: n = A,T,C or G
ggagctaaaccccggnggcggccgaggtacttaccctcaatttcaatgttaacaatttctttaaaaaggcaaaagacacaaaagnttagcatttaccaaaccagtctgtacgcggggcctgtggatgctgcgcctctccgaacgcagcatgaaggtgctccttgccgccgccctcatcgcggggtccgncttcttcctgctgctgccgggaccttct

SEQ ID NO: 1542 - DNA, 537 bp, Homo sapiens
  misc_feature 353, 373, 380, 422, 431, 433, 458, 480, 488, 491, 495, 499,506, 511, 520, 525: n = A,T,C or G
ccgcggtggcggccgaggtacacaaacgagatgctacctaggagaagggtattcttttcactattctttcaaattttctgtatgttcgaacattttcatagtagaaagttggggggaaaatctgtttcataaacatttcctcagcagcagtccagtctattgcattttaattggttgtgatatcattgttttatgcaatacgttctcaacaagtatatcctccggcaaactgaacaaggaccaagtctgttctgcctacagctctgcttcctcatagctgctttccagaacgtgactcttgcaaattatcaagaaaggggaactaatctaagggatcccagatcaacagcctnatgaagaccttaatttatgnttctaanataaaagataggaagttttcaaaaaaagcccctgcttcacanaggatcaanancagggggtgggccctgctgggcttncactgggattttttgagcattnctttcccnggnggcncggnaaggggngtggngtgagcccnagggnggaaaaaaattt

SEQ ID NO: 1543 - DNA, 398 bp, Homo sapiens
ccgcggtggcggccgaggtactccttcgtaaaccatggagagccagcccaatgcacagcagtggatatcatctttctcagagtccagtatcacagaatcacgactttgtccagctgcaggtgcctgcaggtcacactggctaactacttctgtgatgggctcttctttctgaggttctgccaacttgtctactacatagggttgatcatcctgttcaggaaatatttctttcatttgctctgagcttaatattgtaatttgtatttgatctgctgggtctttggagtcaggactggttttatcaagcagtttgatcttctgaggtctggtattgtagtttgctggcccacagaaccttcacgtgtattcacagcctcaatgccataaggaaactcttt

SEQ ID NO: 1544 - DNA, 470 bp, Homo sapiens
ccgcggtggcggccgaggtactccttcgtaaaccatggagagccagcccaatgcacagcagtggatatcatctttctcagagtccagtatcacagaatcaccgactttgtccagctgcaggtgcctgcaggtcacactggctaactacttctgtgatgggctcttctttctgaggttctgccaacttgtctactacatagggttgatcatcctgttcaggaaatatttctttcatttgctctgagcttaatattgtaatttgtatttgatctgctgggtctttggagtcaggactggttttatcaagcagtttgatcttctgaggtctggtattgtagtttgctggcccacagaaccttcacgtgtattcacagcctcaatgccataaggaaactcttttaagaagttctgacagctggtcatgttaggtataagaacagggtgccttatcactggtggatttcatttct

SEQ ID NO: 1545 - DNA, 411 bp, Homo sapiens
  misc_feature 59, 102, 110, 127, 129, 204, 214, 226, 234, 289, 298, 316,326: n = A,T,C or G
cgaggtactttttttttttttttttttttggggagtttgttgtttttaaccaaattatnatagatggaagcattaggcagctgaatgttcatttgccttcanacatcatntcctatttcatttgctngnctcgcattaaaaagaatcatttatcagcaaaagcatcatttatttgtttaaatgacaaggtttagctagcagagnagagtttgcnatgcttttaaanaaataacntttgacttttcttcaagacactacaaaaccatttgttcaaaaaaggctgcccaangtcatttanaagaatatttttcaaaangtctatttcntatttttaaaaaacttgccctttaccaatcttttggttttgaattccacctgggccttttctttttaaccttgaaagggcttaaa

SEQ ID NO: 1546 - DNA, 762 bp, Homo sapiens
  misc_feature 15, 21, 23, 25, 26, 31, 41, 51, 60, 61, 69, 90, 94, 96, 109,111, 120, 134, 141, 142, 145, 154, 157, 158, 161, 163, 167,173, 175, 181, 184, 192, 195, 206, 224, 238, 256, 257, 268,277, 280, 288, 292, 294, 303, 310, 311, 315, 321: n = A,T,C or G
  misc_feature 324, 327, 328, 329, 337, 340, 347, 349, 350, 351, 360, 365,374, 377, 378, 397, 398, 404, 416, 430, 449, 460, 462, 467,468, 485, 499, 501, 505, 522, 523, 525, 533, 550, 558, 559,566, 577, 580, 586, 595, 607, 610, 616, 617, 618, 619: n = A,T,C or G
  misc_feature 620, 621, 622, 625, 626, 630, 631, 632, 643, 647, 651, 656,659, 662, 679, 682, 683, 684, 687, 697, 698, 701, 703, 704,707, 709, 711, 712, 716, 717, 721, 722, 723, 731, 734, 750,753, 754: n = A,T,C or G
ggcggcggccgaggnacaagnancnnttggnggaggggggngaaacccaanacccgaacnngggactgngcagacaagctatatcttaancccncnccgggccagaccncnagcaagggngaggaagcaaaagnccacagnnacnggggcaggnaannggnanaaangagggngnggggcnggntgcggtgnttnacagggggaancccaacaccccgggaggncgaggcaggaggancgcccgagcccaggaggnngagaccagccngggcaacanggngaaacccnggcncnacaaaaaanacaaaannagcngggcanggnggnnngggccagngancccagcnannnggggaggcngaggngggagaaangcnngagcccaggaggcagaggnngcaagngagcccaagaangcgccaccggaacnccagcccaggcaacagaangagaacccggncncacannaaaaaaaaaaagaaaangaaaaagaaaaaangncccnggccgggccgggccggnncnagaaccanggggaaccccccgggcngcaggaannccgaaancaaagccaacnganaccggncaaccccgnggggggggcccnggnacccannnnnnnggnncccnnnaggggaggggnaaanggcncgccnggncgnaacaaggggcaaaagcnggnnnccnggggggaaannggnannccngncnncaanncccnnnaaaaaacnaanccggaagcaaaagggnaannccgggggg

SEQ ID NO: 1547 - DNA, 296 bp, Homo sapiens
  misc_feature 14, 23, 33, 39, 40, 43, 49, 63, 70, 80, 91, 98, 115, 122,144, 146, 155, 161, 165, 172, 173, 174, 193, 199, 200, 201,209, 210, 215, 239, 283, 296: n = A,T,C or G
aacaccaccgcggnggcggccgnccgggcaggnactttnnttngggggntaaaaaaccccccnaaaaacngggccctagnagaaggcaacnttcattncaaacgagggggccccngccccgngaaaaaacggggaacacgacgncnaaggcaganccccgnaagnacctacnnnggacagccggggcaggcgngcaaannntttgggcnnggccncgcaaagcacaaagggggacacanaacccactgcccacggcgcaggagaaaaaaaagaaacagcaaancacgaggggacan

SEQ ID NO: 1548 - DNA, 651 bp, Homo sapiens
  misc_feature 17, 20, 619, 625, 639: n = A,T,C or G
ccgggcaggtacatcanttntgctgagggacatccaggacaaggtcaccacactctacaaaggcagtcaactacatgacacattccgcttctgcctggtcaccaacttgacgatggactccgtgttggtcactgtcaaggcattgttctcctccaatttggaccccagcctggtggagcaagtctttctagataagaccctgaatgcctcattccattggctgggctccacctaccagttggtggacatccatgtgacagaaatggagtcatcagtttatcaaccaacaagcagctccagcacccagcacttctacctgaatttcaccatcaccaacctaccatattcccaggacaaagcccagccaggcaccaccaattaccagaggaacaaaaggaatattgaggatgcggtgagaagggggtgctcaaccaactcttccgaaacagcagcatcaagagttatttttctgactgtcaagtttcaacattcaggtctgtccccaacaggcaccacaccggggtggactccctgtgtaacttctcgccactggctcggagagtagacagagttgccattctatgaggaatttctgcggatgacccggaatggtaccttnggccgnttctagaactaggnggatcccccggg

SEQ ID NO: 1549 - DNA, 321 bp, Homo sapiens
  misc_feature 134: n = A,T,C or G
ccgcggtggcggccgaggtacgcggggcttgcatctctggggccaaggagtggtgggtgagatcttccatggccctggcatgggtgatataagcgggaccggtaaggtggtggagctcttaccagaccctgcanaaccctctccgtggtgttgaacttcctggaaccagggtgttgcatgttttcctcataatgcaggttggtgatggtgaagttgagggtgaacggcaccaggagagggccagcagttgtggggctggggagggaggatggagtccctgacccaaggtccactgtggaggtcccaggagctgaaaaaagt

SEQ ID NO: 1550 - DNA, 365 bp, Homo sapiens
aggtactttacaaacaagtctgaaaaaggagggagtaaagtatggaagaatgatctctggatgttgctactggcctcaaaaaagcagtgctacagatttctgtgtgaagagaatacgctgttcacacattttcctatttccaggcatgaaaatattctattgggtagaagaaataggaaaatctcttatgacaaatgaaagacaggtgcaaacacaccaatccctgtctagcagtataaagcatattgggctcagaatttgtctgttgctagcacctggctttcatactatatccttatcaaataatcagattgaaagtccaaatcattcttaagcaagcaaaaatcctcagtggccatacctca

SEQ ID NO: 1551 - DNA, 227 bp, Homo sapiens
  misc_feature 21, 25, 28, 59, 63, 68, 74, 83, 84, 90, 99, 100, 101, 108,119, 120, 123, 124, 131, 132, 137, 140, 143, 146, 149, 153,155, 156, 157, 160, 162, 164, 169, 170, 172, 173, 175, 180,184, 189, 190, 194, 195, 197, 209, 213, 224, 226: n = A,T,C or G
ggcggccgctctagaactagngganccnttttgcggggggaaaaaaaccccaagcccancganaccgncgaccncgagggggnncccggnacccagcgnnngcccccnaaagagagggnnaanngcgcgcnnggcgnaancanggncanagcngnnnccngngngaaanngnnanccgcncacnttttnntttnncngacgagccgggngcanaacccccaaanana

SEQ ID NO: 1552 - DNA, 370 bp, Homo sapiens
ccgggcaggtacgcgggctgcctggggatggcagccgcgtgcgttccctgtgctgtcctgtagggttgtggtggctttctgatattcaggttggtcccttttccttctttttggatgggctttcgaggttgggagaggaagctcagggatggaactgactaaacatatgtgagatgtttccttgtttgctgctcatggaggtttcatttctgaagtcttttcttgggagggaaaaggatgtgtggatatatgaggtgactctagaaccctcattttatggatgaagaaactgtgattcacagagggagagtgatttgtccagtgtcacgtggggagctggccggggagccagacctcctgtacctcggcc

SEQ ID NO: 1553 - DNA, 438 bp, Homo sapiens
  misc_feature 12: n = A,T,C or G
tactatagggcnattggagctccccgcggtggcggccgcccgggcaggtacatttccatgggccctgttcccattgatgtatactgcttccttactaacagtgagggatgactttcatcagtcttttatcacctgaacagtcttccggccataatgatagtaactataagctgatgcagctgtggtgaaagctgtaaaacaccttttatggaagaaaagaaataaaatgtagttgtcaagtctaaaaaatagtagcaacgggaatcataatgaatacatgcaatgaatttaaaatgtaaaaatgaatttaaaaagtaaaaagggctctgtggtgtaatttttcttaactacaagagtctaaatacactgcttttctttaagagttcattttaattagtaacgtcaaacaaaattattctagataatgagccctacaaa

SEQ ID NO: 1554 - DNA, 416 bp, Homo sapiens
  misc_feature 8, 30: n = A,T,C or G
atcgactnctatagggcgaattggagctcnccgcggtggcggccgcccgggcaggtacgcgggtggccagattaattttccagccaatagaggaaagtttttatatattttttgctaaggtgctggagaggggaaaggatgccacacttcagaagcaggaggacgttgctgtggctgctgcagtcttggagcccctgctcaagctggccctgctggccggcctgaccatcactgtttttggctttgcctattctcagctggctctggatatctacggagggaccatgcttagctcaggatccggtcctgttttgctgcgttcctactgtctctatgttctcctgcttgccatcaatggagtgacagaagtgtttcacatttgctgccatgagcaaagaggaggtcgacaggtacct

SEQ ID NO: 1555 - DNA, 432 bp, Homo sapiens
ccgcggtggcccgcccgggcaggtacagcaaaaaagaaactgagaagcccaaactgctttcttgttaacatccacttatccaaccaatgtggaaacttcttatacttggttccattatgaagttggacaattgctgctatcacacctggcaggtaaaccaatgccaagagagtgatggaaaccattggcaagactttgttgatgaccaggattggaattttataaaaatattgttgatgggaagttgctaaagggtgaattacttccctcagaagagtgtaaagaaaagtcagagatgctataatagcagctattttaattggcaagtgccactgtggaaagagttcctgtgtgtgctgaagttctgaaggacagtcaaattcatcagcatggggctgtttggtgcaaatgcaaaagcacaggtctttttag

SEQ ID NO: 1556 - DNA, 427 bp, Homo sapiens
  misc_feature 20, 405: n = A,T,C or G
atagggcgaattggagctcnccgcggtggcggccgtccacatcccgaaggccatagcgtcgagcaaggtcacatggatggcagcaccttaccactcaggctcaggatattgggatctgttgccaaagccaccacacatttgccactcaattctgtggtttccgcagatgagaaggctgatttgaactgcttcaacacaggatcctgcaggacctcctcctttgccatatgctccttcagcagttctgtctgcacaatccccggccacagagacacacagctgaccccatggcgccgcagctcgtgggcacagtcagcagccagcttgtcacacgcagctttgcccacaccataggggacattgaacatatactgcaggcttcctggggaggagatgaccacgatnagcccctggccagctggtacct

SEQ ID NO: 1557 - DNA, 314 bp, Homo sapiens
  misc_feature 24: n = A,T,C or G
ctacttagggcgaattggagctcnccgcggtggcggccgcccggcaggtacgcggggggtcctggtgctgcggccacaccaccctggggtgctcattgacagagctgccataatgaacttgaaaggacgggaatcaccgagggaagctggggctcccctgcccacaggagaggatccccgttcttcaagcttctctgctcagtgtctactaacgaccgacatttgctaatgtaaataatagtaaattattgagaattctaattcttttacacagtctgtttttaatctattttaattaaataaaatctatgact

SEQ ID NO: 1558 - DNA, 452 bp, Homo sapiens
ccgcggtggcggccgggggccattgagactgccatggaagacttgaaaggtcacgtagctgagacttctggagagaccattcaaggcttctggctcttgacaaagatagaccactggaaccaatgaggaaggagagaattctactggtcacagacaagactctcttgatctgcaaatacgacttcatcatgctgagttgtgtgcagctgcagcggattcctctgagcgctgtctatcgcatctgcctgggcaagttcaccttccctgggatgtccctggacaagagacaaggagaaggccttaggatctactgggggagtccggaggagcagtcccttctgtcccgctggaacccatggtccactgaagttccttatgctactttcactgagcatcctatgaaatacaccagtgagaaattccttgaaatttgcaagttgtctgggttcatg

SEQ ID NO: 1559 - DNA, 471 bp, Homo sapiens
  misc_feature 426, 431: n = A,T,C or G
tacttagggcgaattggagctccccgcggtggcggccgaggtacctccaggcacagctaattttactttttattttcttgagacaggtctcactctgttgcccaggctggtcttgaactcttggcctcaagtgatcctccagccatgagccactgtaaatgtctgggaatgccaacttgaagcccagctggtcagaagttctagaggcccagacttgcaactggtgtctgaagggatggcagtcttggggactgagccctcaacctgagggatctgatgctatttccaggcagatagtgtcagaattaaattggaggataccgcagttagtgtctgctgcagaactgattgcttgcttgctggtaggggggaaatccccacatattgggggggtatttgaagtcttttggtgttgactcttactgngtttngttggtttttcatgtgaagagcagagggaaaagcaaggga

SEQ ID NO: 1560 - DNA, 455 bp, Homo sapiens
  misc_feature 209, 390, 415, 419: n = A,T,C or G
ggcgaattggagctccccgcggtggcggccgaggtactactgacccaacaactgtgactagctggccacgtcattcagggctggtgtggcatttatgtgtgtgtgtgtgtgtgtgtgtttttcctgtttgcccagcagtgcattgtgggttccaagagtgggtagtgtgtgtatgtgtgtgtgtcagagggagacctggcaggcacctntttgagagtagctgtggtcagagctgtttggtcagtgcattatgttgaatgaggtccaggaacccagagccacccagcagacaccactgtggcttgccagctgccaagatggagaagcatgtgcccctgtagagcgtcttcccagaaccagaccccgagccactcgcttcctctgtgctgngacaacattggtgccaggggagatngttnttttttcaaaggggacctactgtagccccttttaat

SEQ ID NO: 1561 - DNA, 374 bp, Homo sapiens
ccactcactatagggctgaattggagctccccgcggtggcggccggaagagcaaccgagatgaaggtgaagatgctgagccggaatccggacaattatgtccgcgaaaccaagttggacttacagagagttccaagaaactatgatcctgctttacatccttttgaggtcccactgagaatatgtaagagctttaaatgctaccaaactggaacgagtatttgcaaaaccattccttgcttcgctggatggtcaccgtgatggagtcaattgcttggcaaagcatccagagaagctggctactgtcctttctggggcgtgtgatggagaggttagaatttggaatctaactcagcggaattgtatccgttacct

SEQ ID NO: 1562 - DNA, 370 bp, Homo sapiens
  misc_feature 6: n = A,T,C or G
gggcgngttggagctccccgcggtggcggccgaggtactcttcctgccttcccccatatactgaagtttgagaggctgggaaggtgcggaatgggaaaaggagcagctgcttatgttcagtttaacattctctgggtttctccatctaggtcttgagttcattctcttcctgtccttttggcttccttgtttaacctggtccctgtttcaggagagaagcctcatcagtgccaagtctgtggggaagaccttctctcagagtggaagcaggaatgtgcatatgagaaagcatcacctgcagctgggagcagcttgggagtcaagagcaggagcaaactgctgagccactaatggggcagtagtttgcttg

SEQ ID NO: 1563 - DNA, 480 bp, Homo sapiens
gggcgaattggagctccccgcggtggcggccgaggtactccttcgtaaaccatggagagccagcccaatgcacagcagtggatatcatctttctcagagtccagtatcacagaatcacgactttgtccagctgcaggtgcctgcaggtcacactggctaactactttgtgatgggctcttctttctgaggttctgccaacttgtctactacatagggttgatcatcctgttcaggaaatatttctttcatttgctctgagcttaatattgtaatttgtatttgatctgctgggtctttggagtcaggactggttttatcagcagtttgatcttctgaggtctggtatgtagtttgctggcccacagaaccttcacgtgtattcacagcctcaatgccataaggaaactcttttagaagttctgacagctggtcatgtaggtataagacaggtgccttatcactgtggatttcatttcttg

SEQ ID NO: 1564 - DNA, 626 bp, Homo sapiens
  misc_feature 590, 623: n = A,T,C or G
ccgcggtggcggccgaggtacaaattgtcgtttttattcctcttattgggatatcattttaaaaactttattgggtttttattgttgttgtttgatccctaaccctacaaagagccttcctattcccctcgctgttggagcaaaccttataccttacttccagcaagcaaagtgctttgacttcttgcttcagtcatcagccagcaagagggaacaaaactgttcttttgcattttgccgctgagatatggcattgcactgcttatatgccaagctaatttatagcaagatattgatcaaatatagaaagttgatattcaacctcacaagggctctcaaagtataatctttctatagccaactgctaatgcaaattaaaacatatttcattttaacatgatttcaaaatcagtttttcatactaccctttgctggaagaaactaaaaatatagcaaatgcagaaccacaaacaattcgaatggggtagaaacattgtaaatatttactctttgcaaaccctggtgggtattttattttggcttcatttcaatcattgaaggtatattcttattggaaatgtacctgcccnggccggccgctctagaactagtggaatcccccnggc

SEQ ID NO: 1565 - DNA, 720 bp, Homo sapiens
  misc_feature 516, 556, 645, 656, 693, 694: n = A,T,C or G
actactataggggcgaattggagctccacccgcggtggcggccgcccgggcaggtactttttggtgttttttggaaaagttacatttagatctattctgaagctgttcatttttaacaaataaaatgttacaggtttcacatgatttattcgcaaaaaaaaaaaaaaaaaaaagtactgtctgtgaacagcaaggaaaatatgattacacctaagagatgaaattggcataggcgagaagtcagaaaaataatctatacagcttgcatggttggggagttaggagaggccaaggccacgtgcacgtagagcaagaggtagaagaggcccgggggctagagcgcaccctggtggatagtgtgagaatttcacactggctcaagccttgaagaccaccccaggggtgcgccttagcaacgcacttatgcaagaccccaacaactggcccttgaaaggagcttttcactggtgggatgtggccctgcttgtattcagaaccatagttttaacaagccancattaaatccacaagtctttgccaaagcactttaagcctnttgacatttattggaattaatttacctgcaaggaaagttcatatatctagctttggtaaccctacattcgggaaaaatgtttccatganataactaaaanccccatgaatgatacaatcttggacaaaacccaaagnnggcataattagcataaaactccaaat

SEQ ID NO: 1566 - DNA, 496 bp, Homo sapiens
  misc_feature 433: n = A,T,C or G
cccgcgtccggcatctcccaacgtgactgacccgccgaccacgacccgcaaagtggtcccgacgacgctcaccaccaccaagccgccagaaacctgtgagagcttcaacagctgtgtttcctgtgtcaacgccaccttgactaataatattacctgcgtctggctagattgccatgaagcaaataagacctattgttcaagtgaattagtaagtaattgtacccagaagaccagtactgactcctgttctgtaatacctaccaccccagtgccaaccaattctacagctaagcctacaactcggccttcctctcctacacctactccctcagttgtcacatcagcaggtgcaacaaataccactgtgactccaacctcacagcctgagcggaagtccacctttgatgcagccagcttcattggaggaatcgtncttgtcttgggtgtgcaggctgtaattttctttctctataaattctgcaaatctaaaagaacg

SEQ ID NO: 1567 - DNA, 482 bp, Homo sapiens
  misc_feature 6: n = A,T,C or G
tcgccncgcgtccgggcaactgcagttggaaaaaaagattcaacttcaaagcagaggatttttgatgaagaaccagctaatggagtgaagatagaaaggtttacaagggatgatccttggttatcttcatgtgaagaagtggatgattgtaaagaccagttggagaagcaacaggaaaaacaagagatacttttgcaggaagtggcattcactcaaaggaaagcagttattcatgagagagtctgcaaaagtgatgaaactggggagaagagtggtctgaattccagtctattttcatccccagttatacccataagaaaccattttcataaacatgtatcacatgctaaaaaatggcatcttaatgctgctgtaaacagtcatcagaagattaatgagaatgagacactatatgaaaataatggaatgtggaaaaccccctcagagcattcaccttattcagtttacaagaacctcaaaca

SEQ ID NO: 1568 - DNA, 252 bp, Homo sapiens
  misc_feature 42, 65, 139, 159: n = A,T,C or G
gctccatgcccttctctgagacggggaccaggggatggcagncatgcacctgacagcctggcccnagaagtcggtgacctttgaggacgtggctgtgtacttcacccaggcggaatgggatggcctgtcccctgcacanaggaccctgtacagggatgngatgctggagaattatgggaatgtggcctccctgggatttccacttctcaaacctgctgtgatctcacaactggagggaggaagtgagctggg

SEQ ID NO: 1569 - DNA, 466 bp, Homo sapiens
cgcgtccgtttctcctggcaccctgtattcatggccttggcgttctgcctctgcatggctgaagccatcctactcttctcacctgaacactccctgttcttcttctgctcccgaaaagcacggatccggctccactgggcagggcagaccctagccatcctctgtgcagctctgggcctgggcttcatcatctccagcaggacccgcagtgagctgcctcatctggtgtcctggcacagctgggtgggagccctgacactgctggccactgctgtccaggcactgtgtgggctctgcctcctttgtccccgggcagccagggtctcaagggtggctcgcctcaagctctaccatctgacatgtggactgggtggtctacctgatggctacagtaacggtgcttctgggcatgtactcagtatggttccaggcccagatcaaaggtgcggcctggtacctgtgcctg

SEQ ID NO: 1570 - DNA, 288 bp, Homo sapiens
cgtccgctaagttccaatattgaaaaatctgtaaaagacctccagcgctgcacagtgtctcttgcacggtatcgagttgtagttaaagaagagatggatgcctccattaagaaaatgaaacaagcctttgctgaattggagagctgtttaatggatcgagaagtggcgttgcttgctgaaatggacaaagtgaaagctgaagcaatggaaattttgctcagccgacaaaagaaggctgaacttctaaagaagatgactcatgtggctgttcaaatgtcagagcagcaa

SEQ ID NO: 1571 - DNA, 369 bp, Homo sapiens
gcagccggccatgcaggccgtcatccgaactgacatggaccaaattatcacctccaaggagcaccttgccagcaagatccgagccttcatcctccccaaggcagaggtgtgcgtgcggaaccatgtccagccctacatcccatccatcctggaggccctgatggtccccaccagccagggcttcactgaggtgcgagatgtcttcttcaaggaggtcacggacatgaacctgaacgtcatcaacgagggccggcattgacaagctgggcgagtacatggagaagctgtcccggcttggcgtaccaccccctgaagatgcagagctgctatgagaagattggagttcgctgcgactggacgggctgcagc

SEQ ID NO: 1572 - DNA, 265 bp, Homo sapiens
  misc_feature 9, 86, 149, 182, 240: n = A,T,C or G
ccgaacaangtggccacccaggtttttaacccaagtctagtggtcatcctattctttccacaccaacatgccaaaagccttacctngaaagaaaatataatttgcaagaagcatcacagtgccggggtctatattctcgatcaggttgntaattttcccatgggttttttgactgataaagncattgatctgcttctgagccatttccaaattctgaaagttggtaaggatggtttcggnactgtaaaagttcttggcatcttcc

SEQ ID NO: 1573 - DNA, 354 bp, Homo sapiens
  misc_feature 8, 11: n = A,T,C or G
cgcgtccnggncggagaagacagtagggatactggatatgggaggagcctctctccaaattgcttatgaagttcctacctcaacctctgtccttcctgcaaagcaggaagaagctgccaagatcctgctggctgagttcaacctgggctgtgatgtgcaacacactgaacacgtgtacagggtttatgtcacaacttttctgggtttcggaggcaactttgcccggcagcgctacgaagaccttgttctgaatgaaactcttaacaaaaacagattgcttggtcagaagacaggtctgagtcccgacaatccatttctggatccctgcctgccagtgggactcacagatgtggt

SEQ ID NO: 1574 - DNA, 359 bp, Homo sapiens
  misc_feature 9, 67, 68, 69, 229: n = A,T,C or G
cgccgtccngtttacttggagtgtccaaaactgcaagcagtagagaaataagacaagctttcaagannntggcattgaagttacatcctgataaaaacccgaataacccaaatgcacatggcgattttttaaaaataaatagagcatatgaagtactcaaagatgaagatctacggaaaaagtatgacaaatatggagaaaagggacttgaggataatcaaggtggccngtatgaaagctggaactattatcgttatgattttggtatttatgatgatgatcctgaaatcataacattggaaagaagagaatttgatgctgctgttaattctggagaactgtggtttgtaaatttttac

SEQ ID NO: 1575 - DNA, 433 bp, Homo sapiens
gaggcgctcaacctaccgaggcgcccacaacctgtccggcctgctgggcttgtccctgcgctacaacagcctctcggagctgcgcgccggccagttcacggggttaatgcagctcacgtggctctatctggatcacaatcacatctgctccgtgcagggggacgcctttcagaaactgcgccgagttaaggaactcacgctgagttccaaccagatcacccaactgcccaacaccaccttccggcccatgcccaacctgcgcagcgtggacctctcgtacaacaagctgcaggcgctcgcgcccgacctcttccacgggctgcggaagctcaccacgctgcatatgcgggccaacgccatccagtttgtgcccgtgcgcatcttccaggactgccgcagccttcaagtttctcgacatcggatacaatcaagc

SEQ ID NO: 1576 - DNA, 349 bp, Homo sapiens
gaccacgcgtccgcgcaccgcttcattgaggctgcaagagcacacgggcacccacgtgctggtccactgcaagatgggcgtcagccgctcagcggccacagtgctggcctatgccatgaagcagtacgaatgcagcctggagcaggccctgcgccacgtgcaggagctccggcccatcgcccgccccaaccctggcttcctgcgccagctgcagatctaccagggcatcctgacggccagccgccagagccatgtctgggagcagaaagtgggtgggggtctccccagaggagcacccagcccctgaagtctctacaccattcccacctcttccgccagaacctgaggg

SEQ ID NO: 1577 - DNA, 590 bp, Homo sapiens
  misc_feature 430, 569: n = A,T,C or G
ctacactcaacttcaccatctccaatctccagtattcaccagatatgggcaagggctcagctacattcaactccaccgagggggtccttcagcacctgctcagacccttgttccagaagagcagcatgggccccttctacttgggttgccaactgatctccctcaggcctgagaaggatggggcagccactggtgtggacaccacctgcacctaccaccctgaccctgtgggccccgggctggacatacagcagctttactgggagctgagtcagctgacccatggtgtcacccaactgggcttctatgtcctggacagggatagcctcttcatcaatggctatgcaccccagaatttatcaatccggggcgagtaccagataaatttccacattgtcaactggaacctcagtaatccagaccccacatnctcagagtacatcaccctgctgagggacatccaggacaaggtcaccacacttttacaaaggcagtcaaactacatgacacattccgcttctgcctggtcaccaacttgacgatggacttccgtgttggtcactgtcaangcattggtcttcttcaatttg

SEQ ID NO: 1578 - DNA, 214 bp, Homo sapiens
  misc_feature 52, 53, 54, 56, 63: n = A,T,C or G
gcggccgccgggcaggtacctaacctacctttaagactgggataactattgnnntncaatagntttataccggatatagttatttatcgcatgatgagtaatagaaaggagcttcacagcttcacttaaaaatgggggtgcggaacattagttagttggtagggtaatggcctaccaagacgatgatgtttagccgggccgagaggctgtacct

SEQ ID NO: 1579 - DNA, 225 bp, Homo sapiens
  misc_feature 57, 65: n = A,T,C or G
ctccccgcggtggcggccgcccgggcaggtacctaacctacctttaagactgggatntctattgntaacaatagctaataccggatatagttatttatcgcatgatgagtaatagaaaggagcttcacagcttcacttaaaaatgggggtgcggaacattagttagttggtagggtaatggcctaccaagacgatgatgtttagccgggccgagaggctgtacct

SEQ ID NO: 1580 - DNA, 223 bp, Homo sapiens
  misc_feature 66, 69: n = A,T,C or G
ctccccgcggtggcggccgaggtacagcctctcggcccggctaaacatcatcgtcttggtaggccnttnccctaccaactaactaatgttccgcacccccatttttaagtgaagctgtgaagctcctttctattactcatcatgcgataaataactatatccggtattagctattgtttccaatagttatcccagtcttaaaggtaggttaggtacctgcccg

SEQ ID NO: 1581 - DNA, 230 bp, Homo sapiens
  misc_feature 66, 73, 74: n = A,T,C or G
ttggagctccccgcggtggcggccgaggtacctaacctacctttaagactgggataactattgttnaacaatnnctaataccggatatagttatttatcgcatgatgagtaatagaaaggagcttcacagcttcacttaaaaatgggggtgcggaacattagttagttggtagggtaatggcctaccaagacgatgatgtttagccgggccgagaggctgtacctgcccg

SEQ ID NO: 1582 - DNA, 205 bp, Homo sapiens
  misc_feature 41, 48: n = A,T,C or G
aggtacaagcctctcggcccggctaaacatcatcgtcttgntaggccnttaccctaccaactaactaatgttccgcacccccatttttaagtgaagctgtgaagctcctttctattactcatcatgcgataaataactatatccggtattagctattgtttccaatagttatcccagtcttaaaggtaggttaggtacctgcccg

SEQ ID NO: 1583 - DNA, 219 bp, Homo sapiens
  misc_feature 57: n = A,T,C or G
ccgcggtggcggccgaggtacagcctctcggcccggctaaacatcatcgtctttttnggccattaccctaccaactaactaatgttccgcacccccatttttaagtgaagctgtgaagctcctttctattactcatcatgcgataaataactatatccggtattagctattgtttccaatagttatcccagtcttaaaggtaggttaggtacctgcccg

SEQ ID NO: 1584 - DNA, 127 bp, Homo sapiens
  misc_feature 8, 13, 89, 101: n = A,T,C or G
tcttcgancacgnttcgggcggcttttccccgggcaaggcttctaaatcgggggggcttccttttagggggttccgaatttaagtggcntataacgggcanccttcgaacccccaaaaaaaactttg

SEQ ID NO: 1585 - DNA, 205 bp, Homo sapiens
  misc_feature 38: n = A,T,C or G
aggtacagcctctcggcccggctaaacatcatcgtctnggtaggccattaccctaccaactaactaatgttccgcacccccatttttaagtgaagctgtgaagctcctttctattactcatcatgcgataaataactatatccggtattagctattgtttccaatagttatcccagtcttaaaggtaggttaggtacctgcccgg

SEQ ID NO: 1586 - DNA, 663 bp, Homo sapiens
  misc_feature 205, 206, 207, 208, 209, 210, 211, 212, 213, 214, 215, 216,217, 218, 219, 220, 221, 222, 223, 224, 225, 226, 227, 228,229, 230, 231, 232, 233, 234, 235, 236, 237, 238, 239, 240,241, 242, 243, 244, 245, 246, 247, 248, 249, 250, 251: n = A,T,C or G
  misc_feature 252, 253, 254, 255, 256, 257, 258, 259, 260, 261, 262, 263,264, 265, 266, 267, 268, 269, 270, 271, 272, 273, 274, 275,276, 277, 278, 279, 280, 281, 282, 283, 284, 285, 286, 287,288, 289, 290, 291, 292, 293, 294, 295, 296, 297, 298: n = A,T,C or G
  misc_feature 299, 300, 301, 302, 303, 304, 305, 306, 307, 308, 309, 310,311, 312, 313, 314, 315, 316, 317, 318, 319, 320, 321, 322,323, 324, 325, 326, 327, 328, 329, 330, 331, 332, 333, 334,335, 336, 337, 338, 339, 340, 341, 342, 343, 344, 349: n = A,T,C or G
  misc_feature 350, 351, 352, 353, 354, 355, 356, 357, 358, 359, 360, 361,362, 363, 364, 365, 366, 367, 368, 369, 370, 371, 372, 373,374, 375, 376, 377, 378, 379, 380, 381, 382, 383, 384, 385,386, 387, 388, 389, 390, 391, 392, 393, 394, 395, 396: n = A,T,C or G
  misc_feature 397, 398, 399, 400, 401, 402, 403, 404, 405, 406, 407, 408,409, 410, 411, 412, 413, 414, 415, 416, 417, 418, 419, 420,421, 422, 423, 424, 425, 426, 427, 428, 429, 430, 431, 432,433, 434, 435, 436, 437, 438, 439, 440, 441, 442, 443: n = A,T,C or G
  misc_feature 444, 445, 446, 447, 448, 449, 450, 451, 452, 453, 454, 455,456, 457, 458, 459, 460, 461, 462, 463, 464, 465, 466, 467,468, 469, 470, 510, 562, 563, 589, 618, 639, 641, 644, 651: n = A,T,C or G
cgggcaggtacctaacctacctttaagactgggataactattggaaacaatagctaataccggatatagttatttatcgcatgatgagtaatagaaaggagcttcacagcttcacttaaaaatgggggtgcggaacattagttagttggtagggtaatggcctaccaagacgatgatgtttagccgggccgagaggctgtacctnnnnnnnnnnnnnnnnnnnnnnnnnnnnnnnnnnnnnnnnnnnnnnnnnnnnnnnnnnnnnnnnnnnnnnnnnnnnnnnnnnnnnnnnnnnnnnnnnnnnnnnnnnnnnnnnnnnnnnnnnnnnnnnnnnnnnnnnnnnntcgcnnnnnnnnnnnnnnnnnnnnnnnnnnnnnnnnnnnnnnnnnnnnnnnnnnnnnnnnnnnnnnnnnnnnnnnnnnnnnnnnnnnnnnnnnnnnnnnnnnnnnnnnnnnnnnnnnnnnnnnnnncgcccaacgtgaaccggttacactttgccaagcgccctancgcccggtccttttcgcttttctttcctttccttttcttcggccacggttcnncccggctttttccccgtcaaggcttntaaattcggggggctttccttttaagggntcccgatttaagtggctttancnggnaaccttngaacccccaaaa

SEQ ID NO: 1587 - DNA, 205 bp, Homo sapiens
aggtacagcctctcggcccggctaaacatcatcgtcttggtaggccattaccctaccaactaactaatgttccgcacccccatttttaagtgaagctgtgaagctcctttctattactcatcatgcgataaataactatatccggtattagctattgtttccaatagttatcccagtcttaaaggtaggttaggtacctgcccgg

SEQ ID NO: 1588 - DNA, 204 bp, Homo sapiens
cgggcaggtacctaacctacctttaagactgggataactattggaaacaatagctaataccggatatagttatttatcgcatgatgagtaatagaaaggagcttcacagcttcacttaaaaatgggggtgcggaacattagttagttggtagggtaatggcctaccaagacgatgatgtttagccgggccgagaggctgtacct

SEQ ID NO: 1589 - DNA, 562 bp, Homo sapiens
  misc_feature 5: n = A,T,C or G
taccncgcgtccggggcccggatgctgggggccaccagggccccggggatgtgctggtcttcatggatgcccactgcgagtgccacccaggttggctggagcccctcctcagcagaatagctggtgacaggagccgggtggtatctccggtgatagatgtgattgactggaagactttccggtattacccctcgaaggacctgcagcgtggggtgttggactggaagctggatttccattgggaacctttgccggagcatgtgaggaaggccctccagtccccaataagccccatcaggagccctgtggtgcccggagaggtggtggccatggacagacattacttccaaaacactggagcgtatgaccctcttatgtcgctgcggggtggtgaaaacctcgaactgtctttcaaggcctggctctgcggtggctccgttgaaatccttccctgctctcgggtagggcacatctaccgaaatcaggatgccccgtccccgtttgaccaggaggccaccttgaggaacaaggttcgcattgctgaagacctggcttggggtca

SEQ ID NO: 1590 - DNA, 323 bp, Homo sapiens
ggcgaattggagctccccgcggtggcggccgaggtactgtgatatccacatatttttgagaaaaattcccaagccaggcgaatgtggattggaataaagacataggcagtgtataccaccatagcaataatggttagtaagatggtgttaaacatagatcgctcccagggctctaaaacagcacagcagctaatgatttggtattgatagtagagccaggagaaatattccttcacacgcctcaaatccatggttggctccttcaagctgcagtaagtttgtcctaagaaagtccaggtctggttcttcagccttgctccttc

SEQ ID NO: 1591 - DNA, 499 bp, Homo sapiens
  misc_feature 441: n = A,T,C or G
ccctttcgagcggccgcccgggcaggtacattttgaatatcaatttctaaatatttacccaaaaatgtatatttaaagtttttaacaacttcttttcaatcttgaaaaagttccctcattttttcttttaaaatcccattaacaatcaatggttcttttaaaatagaataaatatttttttgtccatttaaagaagaatatggatcttggaaaatcatttgaatattttttcttaaaaatagattttgtttttttgttaatttgtttccagaaataacttcatctaataaagtaacttgaccaccgtaagattcatataatctaatcaaagatctaccaactggttgttttaccctggatccagattcaccaattaaacctaaaatttttccttgttggatctaaaattttaccgttatcaacagctttgacaacccaaanttattggaaaaatatttttttaagctttgaacttttaagggtgggttaacttgcatta

SEQ ID NO: 1592 - DNA, 346 bp, Homo sapiens
ctacttagggcgaattggagctccccgcggtggcggccgcccgggcaggtacgcgggggggtttccctgctatgttttgtcacacatcattgctgggagagttcagtgctatccaagtgactccccggggagaggacaactggaaatttatgcctggtgtcttcctggactccgacctatgcacctttttccttggatgattttaacctgtctccttttgctgcaatgaaccataaccatgagtatatcagcttttctaatttttgtgaagtccctcaagtgaattatcaaacctaagggtagttttggggacccccatcacagaagaggtcaaacagggggcagg

SEQ ID NO: 1593 - DNA, 185 bp, Homo sapiens
ccgcggtggcggcccgcccgggcaggtctcttgtctagtatactcaaggcagcctagtaaattattatttatctatacaatactggaaaaacttgtagacaaaaacatgacttgaattgctaaaaaaaaaaaaaaaaaaagagggagaatgaaaacttccggacgcgtgggtcgaagcttgacct

SEQ ID NO: 1594 - DNA, 223 bp, Homo sapiens
  misc_feature 190: n = A,T,C or G
ccgcggtggcggccgcccgggcaggtaggctgtctacactgacatcatccagggcaagctggaccagcgaaaccagctgctggaagtggatttctgcattggccgtgacatccgaaagaaggatatcaataatattgtcaagaccctgcatgaatggtgtgatggctgtgaagcagttctactgggcatngagcagcaagttctgagagccaaccagtacctt

SEQ ID NO: 1595 - DNA, 415 bp, Homo sapiens
  misc_feature 388: n = A,T,C or G
ccgcggtggcggccgcccgggcaggttttttttttttttttctttctgttccttggactagataatctgaaatcaactgtcttcagttttgcagactcttgtgccagctaaaatgttctgttgagccccagaagctaattttcttttcagttattatgattttcagctttagaatttatttttttaatataatttctacctcttttttatattctccatttggtgagacattcacatactttcttccagttttttttagacgtagtttccttgagttctttgagcatatttaaaatagttgatttaaagtatttgtctagttactccaccatctgagtttcctcagggaaaatttctattgcctccttttttcctgtgtgtggtcggnccatacggacgcgtgggtcgaagacct

SEQ ID NO: 1596 - DNA, 128 bp, Homo sapiens
  misc_feature 5, 6, 8, 68, 85: n = A,T,C or G
acttnntnttttttttttttttttttttaagcgcccggcattttctaaataaaatcattttatttggnaaaagggttttaacagntatacctttctagctaaaagaaaagaaatagcgggatgtacct

SEQ ID NO: 1597 - DNA, 367 bp, Homo sapiens
  misc_feature 33: n = A,T,C or G
aggtacgaagagaaaggaatcaaagcctactanctcaaaaaattgtcaaattgcaaatgaggacatctagagaggaagaaaggaaaaaaggaactaaaaaacagaaacaattaacagtaagttcttaactatcaataattattttaaaagtaaatagattaaattatctaatcaaaagacattgaatggctgaatggattaaaaaacaagatcaactatacattgcccatcagagattcattttagctttaaggataaacactggttgaaagtgaaaaaagtcaaggctgggcatggtggctcatgtctataattccagcactttgggaggccaaggtgggcagataatctgaggtcaggagtttga

SEQ ID NO: 1598 - DNA, 385 bp, Homo sapiens
ccgggcaggtaccacctgaagaccctcacactcaacttcaccatctccaatctccagtattcaccagatatgggcaagggctcagctacattcaactccaccgagggggtccttcagcacctgctcagacccttgttccagaagagcagcatgggccccttctacttgggttgccaactgatctccctcaggcctgagaaggatggggcagccactggtgtggacaccaccggcacctaccaccctgaccctgtgggccccgggctggacatacagcagctttactgggagctgagtcagctgacccatggtgtcacccaactgggcttctatgtcctggacagggatagcctcttcatcaatggctatgcaccccagaatttat

SEQ ID NO: 1599 - DNA, 437 bp, Homo sapiens
cttagggcgaattggagctccccgcggtggcggcccgaggtacacaggaccaatgctgcccatccacatggaatttacaaacattctacagcgcaaaaggctccagactttgatgtcagtggatgattctgtggagaggctgtataacatgctcgtggagacgggggagctggagaatacttacatcatttacaccgccgaccatggttaccatattgggcagtttggactggtcaaggggaaatccatgccatatgactttgatattcgtgtgcctttttttattcgtggtccaagtgtagaaccaggatcaatagtcccacagatcgttctcaacattgacttggcccccacgatcctggatattgctgggctcgacacacctcctgatgtggacggcaagtctgtcctcaaacttctggacccagaaaagccag

SEQ ID NO: 1600 - DNA, 555 bp, Homo sapiens
  misc_feature 3, 52, 155, 202, 272, 294, 321, 360, 503, 514, 534: n = A,T,C or G
tcnccgcggtggcggccgcccgggcaggtacgttcactgtctcatataatcncagcctcctgtgtgatagctggtgtcatctccacttacagatgaggaaactgaggataagcagggttgaataacttgctcgagatcacagagccacgggtggngaaacaggatacaaacctggttctgtttgactctaagaccattcatntttcctctgaaactcagtattgcacagtgtagaaatgcagtttttaagacctcccaaagtgacgtgctgngtcactgcccatcattagctanattgagtaaattgctgcttagccccanttgttttgacagaatcaatagcccttgctgaggggccancagcctacggacacaggagcatgcttcatgggcaagaccaccatgcacactcagaggggaagccacaaggcaacctccacgccacttaagatttgtagggctctgaacacatcaccagatacagaccacctacttattttttncactgtaatancaaaggcaggaatctttttnctgtagggtaaagtttggggg

SEQ ID NO: 1601 - DNA, 260 bp, Homo sapiens
ggcaggtacaaggccccaaagaggaggaattccttgtagaggagcttgtagatgcttcccctccagcggagaagcaggccagagaaacctccgaagcgggcctccgccactttgagagtgtatgaaaccgtcatggtgctgggagcctggggcaggaggtcacaagagttgcccccagggctgtcgtttagttctccagacaacctcccttccactctggtctccacaccccagccttcaccctgcgtcaagtggacaag

SEQ ID NO: 1602 - DNA, 361 bp, Homo sapiens
  misc_feature 29, 30, 35, 191, 352: n = A,T,C or G
aggtaccagtggggacttctgaaagaacnntactngtgtcagtggaaaagctggcattttgggaaatgctggtctctctcagtccaggagtcaaggaatatgttgactctctcttaatttttgtagtctcagaggaaacagacattgatgtggaaacagttgtatgccccatggtggaggtggtatccatnggagctgtggccttggttttttctgagtcagctaggacagaggattgtgacccatgtccagaactggtggtttccacattagtcgctgctgtgcttgtggaaggatgcatggcttctatagctgtggtgtcttcatctgttgtcagtatctcatgtgaggnacctgcccg

SEQ ID NO: 1603 - DNA, 350 bp, Homo sapiens
ccgggcaggtactgtgatatccacatatttttgagaaaaattcccaagccaggcgaatgtggattggaataaagacataggcagtgtataccaccatagcaataatggttagtaagatggtgttaaacatagatcgctcccagggctctaaaacagcacagcagctaatgatttggtattgatagtagagccaggagaaatattccttcacacgcctcaaatccatggttggctccttcaggctgcagtaagtttgtcttaagaaagtccaggtctggttcttcagccttgctccttcgcgaaatgatcctgtgtgggttagttctcctctctgggttgctgtttcctca

SEQ ID NO: 1604 - DNA, 534 bp, Homo sapiens
  misc_feature 18, 463, 474, 518: n = A,T,C or G
agggcgaattggagctcnccgcggtggcggccgaggtaccacctgaaggccctcacactcaacttcaccatctccaatctccagtattcaccagatatgggcaagggctcagctacattcaactccaccgagggggtccttcagcacctgctcagacccttgttccagaagagcagcatgggccccttctacttgggttgccaactgatctccctcaggcctgagaaggatggggcagccactggtgtggacaccacctgcacctaccaccctgaccctgtgggccccgggctggacatacagcagctttactgggagctgagtcagctgacccatgggtgtcacccaactgggcttctattgtcctggacagggatagcctcttcatcaatggctatgcaccccaaaatttatcaatccgggggcgaggtacctgccccgggcgggccgcttaaaactaggngggatcccccnggcttgcaggaatttcgatattcaagcttatcgatacccgtccnaccttcgagggggggg

SEQ ID NO: 1605 - DNA, 404 bp, Homo sapiens
  misc_feature 16: n = A,T,C or G
ccgggcaggtaccacntgaagaccctcacactcaacttcaccatctccaatctccagtattcaccagatatgggcaagggctcagctacattcaactccaccgagggggtccttcagcacctgctcagacccttgttccagaagagcagcatgggccccttctacttgggttgccaactgatctccctcaggcctgagaaggatggggcagccactggtgtggacaccacctgcacctaccaccctgaccctgtgggccccgggctggacatacaacagctttactgggagctgagtcagctgacccatggtgtcacccaactgggcttctatgtcctggacagggatagcctcttcatcaatggctatgcaccccagaatttatcaatccggggcgagtacct

SEQ ID NO: 1606 - DNA, 333 bp, Homo sapiens
  misc_feature 20, 21, 22, 23, 45, 56, 60, 64, 81, 100, 110, 124, 134, 136,143, 144, 149, 156, 182, 194, 201, 203, 205, 210, 214, 215,217, 223, 229, 232, 235, 255, 258, 264, 269, 279, 280, 283,285, 293, 301, 302, 304, 310, 320, 324, 328: n = A,T,C or G
cggccgcccgggcaggaacnnnnttttttgggggggggaaaaccnagacggagccncgcncaanggcccaggcgggagtgnaagggcaccagggggggcncaccacaaanaccgccgcccgggngaaagccacncnccggccnnagccnccggagnaacggggggaacaggggcaggccatnttttttttttgnggggggngnanggggngganncnccaggnaaaaancangcnggccagggggggggggaacnccngacctnatgangcacccgccnnggncncccaaaangcggggannanaggggngagccaccgngccnagcngacgg

SEQ ID NO: 1607 - DNA, 305 bp, Homo sapiens
  misc_feature 112, 124, 182, 235, 254, 271, 286, 291: n = A,T,C or G
cgagttaccagaaggagagatcaccaccatcgagatccaccgcactaacccgtacatccagttaggaatcagcatcgttggcggcaatgagacgccactgatcaacatcgtnattcaggaagtntaccgggatggggccatcgccagagatggaaggctccttgccggagaccagattcttnaggtcaacaactgtgatatcatgcaacgtgtcccataactacgcccgggctgncctttcccagccctgcagnaccctgcacctgacagngcttcgggagcggcngcttnggcagtcgtgcaaa

SEQ ID NO: 1608 - DNA, 356 bp, Homo sapiens
  misc_feature 57, 174, 176, 240, 306, 326: n = A,T,C or G
cgagcctttagatggcgtctcctcaggggggccagattgcgatcgcgatgaggcttnggaaccagctccagtcagtgtacaagatggacccgctacggaacgaggaggaggttcgagtgaagatcaaagacttgaatgaacacatttgtttgctgcctatgcgccggctacttngnggatgccaccaccatcacagagtgtcttcatactttctgcaagagttgtattgtgaagtacctncaaactagcaagtactgccccatgtgcaacattaagatccacgagacacagccactgctcaacctnaaactggaccgggtcatgcnggacatcgtgtataagctggtgcctggctt

SEQ ID NO: 1609 - DNA, 504 bp, Homo sapiens
  misc_feature 389, 447: n = A,T,C or G
gcgtccgacgtcccccaggagaatggtagacacagatgaggaaattgtggagatgggcacaaaccgcaaggtgaagaaaacgaacaaacaccgagttgatacggatagtccccgttcccctgagggccgaccccgtgactcccgatgagcgtccagttgcgccgggcatccctgggcctcccagcgtctttcccggaggttcatcgccgcacggcggaaagcgctctcggttccgctttccggccccagcctcccgggcgccctcgcgcggcggctaacgctggtcctcggccgggcgcgctgacgtcatcgtgcgtcagagtgagcccggatggggcggcgggcttcgggagcgcccgggctgatccgagccgagcgggccgtatctncttgtcggcgccgctgattcccggctctgcggaggcctctaggcagccgcgcagcttncgtgtttgctgcgcccgcactgcgatttacaaccctgaagaatcttcctatccctat

SEQ ID NO: 1610 - DNA, 354 bp, Homo sapiens
  misc_feature 150, 162, 188, 308: n = A,T,C or G
cgcgtccggcggcggcggctgaggagggcccggcctgcgagagcctcagtgggagccggctcagccctcggccaccatgtcggcgccgtcggaggaggaggagtactgcgcggctggtgatggaggcgcagccggagtggctgcgcgccnaggtgaagcggntgtcccacgagctggccgagaccacncgtgagaagatccaggcggccgagtacgggctggcggtgctcgaggagaagcaccagctcaagctgcagttcgaggagctcgaggtggactatgaggctatccgcagcgagatggagcanctcaaggaggcctttggacaagcacacacaaaccacaagaaggtgg

SEQ ID NO: 1611 - DNA, 223 bp, Homo sapiens
  misc_feature 26, 120, 167, 181, 204, 210: n = A,T,C or G
cgcgttcgagtctggagacgacgttncgaaatggcacctcgcaaaggggaacggaaaagaaggaatgaacaggtcatcagccttggacctcaggtggctgaaggagagaatgtatttggngtctgccacatctttgcattcttcaatgatacctttgtccatgttantgaactttctggcnagtgagtacttcagaaaggcatnaaacangcctcaaagggac

SEQ ID NO: 1612 - DNA, 423 bp, Homo sapiens
  misc_feature 145, 382, 392, 393: n = A,T,C or G
ccccgcgtccgcccacgcgtccgggctcggctgcaccggggggatcgcgcctggcagaccccagaccgagcagaggcgacccagcgcgctcgggagaggctgcaccgccgcgcccccgcctagcccttccggatcctgcgcgcanaaaagtttcatttgctgtatgccatcctcgagagctgtctaggttaaccgttcgcactctgtgtatataacctcgacagtcttggcacctaacgtgctgtgcgtagctgctcctttggttgaatccccaggcccttgttggggcacaaggtggcaggatgtctcagtggtacgaacttcagcagcttgactcaaaattcctggagcaggttcaccagctttatgatgacagttttcncatggaaatnngacagtacctggcacagtggttagaaaagc

SEQ ID NO: 1613 - DNA, 329 bp, Homo sapiens
  misc_feature 4, 8: n = A,T,C or G
gttnagtngaagttctctaccattgaatcagtgaactagaaagatctgatttggcctgggaccagtgttcaagttggtttggtctttattaaaaatcacaatattccgaaaacaaaaaaacctaggagataaatgtagaggtattgacttttcgtatcttttatcttcacactgaaacaagagctatcctatttgattattaaagtgagctatgtgttaagtgccaggacatttctagcttttgtgagaatgtgtctacatatgagtataataaacccacatgtatacacaattgtctcttatgtactcctacctggcaggagtctttg

SEQ ID NO: 1614 - DNA, 496 bp, Homo sapiens
  misc_feature 364, 410, 420, 441, 460, 468: n = A,T,C or G
cgcgccggtggtgcgatctcggctactgcaacttcagcctcctggattcaggcaacactcctgcctcagcctcccacgtggctgggattacaggtgcctgcccccatggctaattttttgtattttttgtagagatggggtttcaccatgttggctgggctggtctcactctcctgacctcaagcaatctgcctgtctcagcctcccaaagtgctgggattacaggcgtgagccaccgcccccagcctgagcctttttttttttctaatgcatccaaggttaaggggaagacgcaaataacaggactattctaaaaggaaacctgtttgaactctgtgagatcaagtcatcagtctcagtattncacaggcacaccttaatttcattggtaaaagatatatatattttgnctatttttgngcttttgggggcctattttgngcttttttacctttaatgnaagaagancttaataccaaagtggatttttttacca

SEQ ID NO: 1615 - DNA, 491 bp, Homo sapiens
  misc_feature 6: n = A,T,C or G
tcgccncgcgtccgtagaaactcacactagacacacgcagtagtcatacgtcttcacacggtttaggagctactggaccaacattcttgtttttgcttttgtttttttaaataattctagtctggagctaactgtggagcagccaaatagtagctggcatgttgattcaaaccatgggctgaatttgctcataggctgtgcatcagacaaaagcttgaatatttgtgttgtatgcttgttccaaccaccgcttgtgtgagcatttttgtggcttgtacagaaagtacacttttaaattgtctcttgcatcactaaaatttttttaaaatgagcataacaacgaaaggcatccagctgactttttgattccaagattattgattggattgacttttttgcattaaatttttcccagcaaaataaatcatatggcgagtcagggaataaaaaagtcaaaaaggaaacaaatagaagctttttttttttaaaaa

SEQ ID NO: 1616 - DNA, 161 bp, Homo sapiens
  misc_feature 3, 54, 56, 57, 68, 75, 89, 113, 134, 150: n = A,T,C or G
ggncgagcgcgccttgcgggggcggtatcccggcgccctaagaccccacgaccncnngcaccggccgntgctgcnagaccccggcccgngtcggtccgatgtcgccccccggncccggcggaaacgcctccctnctggccaggctgttcnagcacccgctt

SEQ ID NO: 1617 - DNA, 353 bp, Homo sapiens
  misc_feature 17: n = A,T,C or G
tcgccacgcgtccgttnagatgcagaaatgaaaaaaaaacacctttgttttataaatatcaaagtacatgcttaaagccaagtttttatctagtttattctagtacttagcttgcctggaatagctaataaattattcatgtatgtgcttttgaaaatccagagccctatttttacacacttgtgtgaagttggcaaacattttgaaaaatggaaaaaagtttctaataattgggaacaattacattaattaatattttgtaaaatattgaagcttttagccctatgtcaatttgtagattaaaataaattaattataggaaaggaagataacagtgagaaaccaaacattac

SEQ ID NO: 1618 - DNA, 191 bp, Homo sapiens
  misc_feature 42, 79, 87, 109, 110, 111, 118, 139, 154, 155, 161, 169, 178: n = A,T,C or G
cacgcgtccgcccacgcgtccggcgcggcgggagcgggcggngcgagcgggaggcggcggctcacaactgaagcgctgnggcatggngcgcgcctgcctccaggccgannngtacctnatgttcgccttcaacctgctnttctggctgggaggnngtgtgngggctggntgtctggcntcctggcttgggc

SEQ ID NO: 1619 - DNA, 409 bp, Homo sapiens
  misc_feature 35: n = A,T,C or G
tcgccacgcgtccggacctggatgtgagggtgaangggctgtgctgctgggagccacattcctcattgactacatgttctttgagaagcgaggaggcagctgggccctctgccatcaccagttagaggccaccatggtgtgaggagaccatcacctcgaccagaactccagatggtcacctgccctggcccctcctctgggcagcccctttcctccatgtacactgcaggggacagaaggggggccccatccctaccctactccctggccgcctgcccctgtggttcccaaggaagggggtattgtattgagagccgctctcctgctacctcccaccactgtccaacagtccctcggcacacaggcatattaagctttcacacttttcccatgcacttttttccacccc

SEQ ID NO: 1620 - DNA, 398 bp, Homo sapiens
  misc_feature 11, 387: n = A,T,C or G
ggagtcgaccncgcgtccgggggcttgctgggatcatggcggagaatcactgcgagctcctgtcgccggcccggggcggcatcggggcggggctggggggcggcctgtgccgccgctgcagcgctgggctcggcgccctggcccagcgccctggcagcgtgtccaagtgggtccgactcaacgtcggcggcacctacttcctcaccactcggcagaccctgtgccgggacccgaaatccttcctgtaccgcttatgccaggccgatcccgacctggactcagacaaggatgaaacaggcgcctatttaatcgacagagaccccacctactttgggcctgtgctgaactacctgagacacggcaagctggtgattaacaaagacctcncggaggaaggg

SEQ ID NO: 1621 - DNA, 494 bp, Homo sapiens
  misc_feature 378, 381, 396, 479: n = A,T,C or G
gtcgccccgcgtccggggcccgcgggcctcgcctccgccctccgccacctcgagctgcggtagcagcgactcatgagagcgcggccggaggacagatttgataatgggctgcattaaaagtaaagaaaacaaaagtccagccattaaatacagacctgaaaatactccagagcctgtcagtacaagtgtgagccattatggagcagaacccactacagtgtcaccatgtccgtcatcttcagcaaagggaacagcagttaatttcagcagtctttccatgacaccatttggaggatcctcaggggtaacgccttttgggaggtgcatcttcctcattttcagtggtgccaagttcatatcctgctggtttaacagggnggnggtactatattttgnggccttatatgattatgaagctagaactccagaaagacctttcatttaagaagggtgaaagatttcaaataattaacaatacngaaggagattggtgg

SEQ ID NO: 1622 - DNA, 496 bp, Homo sapiens
  misc_feature 475, 478, 486: n = A,T,C or G
ttcgggagtcgccccgcgtccgcttttagaaaaggccaatatacctatcacactttggaagtaaaaatacacactttcgtgtgtacctaaaaaaaaaatcgttgaaaatcaaggccaaaggtagtgcaattttttcattaagatttaaaaaaaagggaatgatagtctttgaaagaaaacagtaggcatccagcactggacaaaacatgggtatcaaagatgaataatctttggagattctggcagtgttttcccagaacaagtcaagtggaaagtggagaaattatctgtataattttggacacatacaatggcagtttatcaaagggttttgttctgtggcctgaatttactggggtcctacctacacattgaacatgttttggctggctttttttttttttttcaacttgccagtttcactttacatggttagtaataaatggtttccacggggtgagttgggataaaattnttnaaaacatnttaaattcca

SEQ ID NO: 1623 - DNA, 324 bp, Homo sapiens
  misc_feature 11: n = A,T,C or G
ggagtcgaccncgcgtccgagccgggccggggcgatgtggagcgcgggccgcggcggggctgcctggccggtgctgttggggctgctgctggcgctgttagtgccgggcggtggtgccgccaagaccggtgcggagctcgtgacctgcgggtcggtgctgaagctgctcaatacgcaccaccgcgtgcggctgcactcgcacgacatcaaatacggatccggcagcggccagcaatcggtgaccggcgtagaggccgtcggacgacgccaatagctactggcggatccgcggcggctcggagggccgggtgcccgcgcgggtcc

SEQ ID NO: 1624 - DNA, 480 bp, Homo sapiens
cgcgtccggggcagccgcgcccgcggagttttccgcccggcgctgacggctgctgcgcccgcggctccccagtgccccgagtgccccgcgggccccgcgagcgggagtgggacccagcccctaggcagaacccaggcgccgcgcccgggacgcccgcggagagagccactcccgcccacgtcccatttcgcccctcgcgtccggagtccccgtggccagatctaaccatgagctaccctggctatcccccgcccccaggtggctacccaccagctgcaccaggtgggtggtccctgggggaggtgctgcctaccctcctccgcccagcatgccccccatcgggctggattaacgtggccacctatgcgggggcaagttcaaccagggactatcttctcgggaatggcggccaacattgtctggggacatttggagggagccaacatgcccaaacctggaccctggggcccctgggggctg

SEQ ID NO: 1625 - DNA, 403 bp, Homo sapiens
cacgcgtccggcgccgctcccgcatctgcacccgcagcccggcggcctcccggcgggagcgagcagatccagtccggcccgcagcgcaactcggtccagtcggggcggcggctgcgggcgcagagcggagatgcagcggcttggggccaccctgctgtgcctgctgctggcggcggcggtccccacggcccccgcgcccgctccgacggcgacctcggctccagtcaagcccggcccggctctcagctacccgcaggaggaggccaccctcaatgaagatgttccgcgaggttgaggaactgatggaggacacgcagcacaaattgcgcgcgcggtggaagagatggaggcagaagaagctgctgctaaagcatcatcaagaagtggaacctggcaaacttac

SEQ ID NO: 1626 - DNA, 413 bp, Homo sapiens
ccacgcgtccggccggggggtgcccccgggacgtagcgccgcggagaggaagcggcaaaggggaccatgcggcgcctgactcgtcggctggttctgccagtcttcggggtgctctggatcacggtgctgctgttcttctgggtaaccaagaggaagttggaggtgcccgacgggacctgaagtgcagacccctaagccttcggacgctgactgggacgacctgtgggaccagtttgatgagcggcggtatctgaatgccaaaaagtggcgcgttggtgacgacccctataaagctgtatgctttcaaccagcgggagagtgaggcgggatctccagcaatcgggccatcccggacactcgccatctggagatgcacatggcttggtgtattggacgggaccttccacccactt

SEQ ID NO: 1627 - DNA, 480 bp, Homo sapiens
  misc_feature 352, 406, 412: n = A,T,C or G
gccacgcgtccgccgcccgcttgcccgtcggtcgctagctcgctcggtgcgcgtcgtcccgctccatggcgctcttcgtgcggctgctggctctcgccctggctctggccctgggccccgccgcgaccctggcgggtcccgccaagtcgccctaccagctggtgctgcagcacaagcaggctccggggccgccagcacggccccaacgtgtgtgctgtgcagaaggttattggcactaataggaagtacttcaccaactgcaagcaagtggtaccaaaggaaaatctgtggcaaatcaacagtcatcagctacgagtgctgtcctggatatgaaaaggtccctgggaaggangggggcttgtccaagcaagccctaccactctcaaacctttacgagaccctgggnagtcgnttggatccaccaccactcaagctgtacaccgaccgcacggagaagctgaggctgaatggggaggggcc

SEQ ID NO: 1628 - DNA, 416 bp, Homo sapiens
  misc_feature 360, 400: n = A,T,C or G
cctaagggcaacaagggcggtcctggccagccgggctttgagggagagcaggggaccagaggtgcacagggcccagctggtcctgctggtcctccagggctgataggagaacaaggcatttctggacctcggggaagcggaggtgccgctggtgctcctggagaacgaggcagaacccggtccactgggaagaaagggtgagcccggagagccaggaccaaaaggaggaatcggcaaccggggccctcgtggggagacgggagatgacgggagagaccggagttggcagtgaaggacgcagaggcaaaaaaggagaaagaggattccctggatacccaggaccaaagggtaacccaggtnaacctgggctaaatggaacaacagggacccaaaggcattnagaggcccgaagggga

SEQ ID NO: 1629 - DNA, 454 bp, Homo sapiens
agtcgccccgcgtccgctgtgcctgaaggagactggttttgtccagaatgtcgaccaaagcaacgttctagaagactctcctctagacagagaccatccttggaaagtgatgaagatgtggaagacagtatgggaggtgaggatgatgaagttgatggcgatgaagaagaaggtcaaagtgaggaggaagagtatgaggtagaacaagatgaagatgactctcaagaagaggaagaagtcagcctacccaaacgaggaagaccacaagttagattgccagttaaaacaagagggaaacttagctcttctttctcaagtcgtggccaacaacaaggaacctggaagatacccttcaaggagtcagcagagcacacccaaaacaactgttttcttctaaaactgggtagaagcctaagaaagataaactctgctcctcctacagaaacaaaatctt

SEQ ID NO: 1630 - DNA, 485 bp, Homo sapiens
  misc_feature 2: n = A,T,C or G
tncgggcctggtgagcaccgccgaggcgcgggccagctcttcgaggttgtgcgcgggagtggcacggcgggccgggccgagcgaggggctaacttcagcggtggcaccgggatcggttgccttgagcctgaaatcatgaccaccccaggaaaagagaactttcgcctgaaaagttacaagaacaaatctctgaatcccgatgagatgcgcaggaggagggaggaagaaggactgcagttacgaaagcagaaaagagaagagcagttattcaagcggagaaatgttgctacagcagaagaagaaacagaagaagaagttatgtcagatggaggctttcatgaggctcaagattaataacatgggagatggcccagggtgggtgtcatcacttctgacatgattgaaatgatattttccaaaagcccagagcaacaagctttcagcaacacaagaaattcaggaagctgctttcaaaaagaacctaa

SEQ ID NO: 1631 - DNA, 442 bp, Homo sapiens
cggagtcaccacgcgtccggggctgccaagggaggaggaagatggcggcgggggcgaggtgaggtgttggcagtggaaaggggttcgggctcggggggcggggggacgcggagcgatggcccgcgccggccgcaggggcggataaaaagccgtcgcgctgcgggagtgggcgggagggagagggggtgtccgagggccacaagagtatgacggggctgtacgagctggtgtggcgggtgctgcacgcgctgctctgtctgcaccgcacgctcacctcctggctccgcgttcggttcggcacctggaactgggatctggcggcgctgctgccgcgccgcctctgcgcggtcctagcgccgctcggcttcacgctccgcaagcccccggcagtcggcaggaaccgccgtcaccaccggcacccgcgcgggggggtcgtgcctgg

SEQ ID NO: 1632 - DNA, 470 bp, Homo sapiens
cgtccgtttgtttaatattttttttctctcttgaacaaaactgagataatttagaaaacaggtgcttaattgcaataaaattactatgaagtatattaaaaatcacgacattgtaaaatctcactttagatcatcaaagaaaaccattgttactatctcctttgagcttaggaaaatgtacaagagaacaaattaaaattgaaaaattgatttcacttagaaaaacttctaggaacagggtgaaccactgattttaatttgcctaattatcttatgacaagtatcaaattaagatgacacttaaaggatccttagcatttaacttaatgatggagaaagagtgctcaataggacagttccccagttaaggggtaatggagatgcccattttcaggaggaccattctaagaagatatttttggattcattaaaaacatttaaataaaaagcccttcttcaagattgggaac

SEQ ID NO: 1633 - DNA, 337 bp, Homo sapiens
cgcgtccgccggcctggtgcacgcggcgcaccgaggcctcccgcaacgccgccgacaaggagcgggcggcgggcggcggcgccggcagcagcgaggacgacgcgcagagccgccgcgacgagcaggacgacgacgacaagggcgactccaaggaaacgcggctgaccctgatggaggaagtgctcctgctgggcctcaaggaccgcgagggttacacatcattttggaatgactgtatatcatctggattacgtggctgtatgttaattgaattagcattgagaggaaggttacaactagaggcttgtggaatgagacgtaaaagtctattaacaag

SEQ ID NO: 1634 - DNA, 281 bp, Homo sapiens
  misc_feature 174: n = A,T,C or G
ccccgcgtcccggttggccgggcggaggtcttcgctgaggcccggggcggggtggcgccacccctgattgcggtgccacggactgctcctgctgggcggagaggacagattttgcaaagcggaggcttgcgacgggtcctgcagggggacagtgaggaaagggcccgcctcgtntccgctcctgggggacccgcagaaataagaatcaaactccacaatgacaacctatttggaattcattcaacaaaaatgaagaacgagaatgggagtcccgatttagt

SEQ ID NO: 1635 - DNA, 481 bp, Homo sapiens
  misc_feature 468, 470, 474, 481: n = A,T,C or G
ccacgcgtccgggcggggccatccaagcaacgctgaaggccttttccagcagctgggagctcccggattgcgtggcacagctgaggggcctctgtgatggctgagctctcttatgtcctatactcacatcagacatgtgatcatagtcccagagacagagttgaggtctcgaagaaaagatccatgatcggctttctcctggggcccctccaattgtttactgttagaaagtgggaatggggtccctagcagacttgcctggaaggagcctattatagaggggttggtttatgttggggagaattgggcctgaatttctccacagaaataagttgccatcctcaggttggccctttcccaagcactgtaagtgagtggggtcaggcaaagccccaaatgaggggttggtttagattctgacagtttgccagccaggccccacctcagcgtctgtcgaacaaacaaagntngggngggtttn

SEQ ID NO: 1636 - DNA, 520 bp, Homo sapiens
  misc_feature 3, 415: n = A,T,C or G
ccncgcgtccgcggacgcgtgggcggacgcgtgggcttctgcagcaagctcaggagagctgctgtcttccctcccgcccaccagcaacgcaccctctgaccctgccacaactactgcaaaggcagacgctgcctcctcactcactgtggatgtgacgccccccactgccaaggcccccaccaccgttgaggacagagtcggcgactccaccccagtcagcgagaagcctgtttctgcggctgtggatgccaatgcttctgagtcaccttaactttgaaccattctttggaattggcgtggtatatttaaccacgggaggcgtgtctggaaacgcaaactatcattaatttcatactaggtttgtaccgtatctgtaggcattcctgtaaataattccaagggggaaaactaaacngggacgtggggttgtatcctgccaggtttgagtgggggctcacacctagggtgagaagtcagaaagcgcttgtattttaaacaaccaaaaagaattgaaagggtg

SEQ ID NO: 1637 - DNA, 408 bp, Homo sapiens
  misc_feature 6: n = A,T,C or G
cgtccnataggcttgcacacttttctaactacatgtttaagtggcagagtccaggctgtcgagtcacggttgggtttgaatctgactccaccagtaactttggttggaaaaaatcacttatcctctttaagcttgattttatttattttattttatgtaagagtgagacagtagtagcttaatagggttgcttttaaattagagtgaacatgaggcatttattcggtgccagacagataactgcctataacaggatgtgatcagcacaagtaacagaaaattagcctggacggtggcttaagcaatggggaatgtttatctcacatagcaaaaaggtctgtaaataggatggttttagagttggggtggggaagccaaaaatgtcatcaggatttccttggaacccgt

SEQ ID NO: 1638 - DNA, 411 bp, Homo sapiens
cgcgtccggattaatacaactcttaaaaaatatagtcaataggttactaagatattgcttagcgttaagtttttaaccgtaattttaatagcttaagattttaagagaaaatatgaagacttagaagagtagcatgaggaaggggaagaaaagaaggggaagaagatcaaagaaggaaagaagaaggggaagaaaagaaggggaagaagatcaaaacccaccatgccccaggctcagcagggagctgctggatgagaaagggcctgaagtcttgcaggactcactggatagaagttattcaactccttcaggttgtcttgaactgactgactcatgccagccctacagaagtgccttttacgtattggagcaacagccgtgttggcttggctgttgacatggatgaaattg

SEQ ID NO: 1639 - DNA, 124 bp, Homo sapiens
  misc_feature 32, 43, 100: n = A,T,C or G
cgcgtccggctccccgcaccccctcgcactcnctctggccggnccagggcggccttcagcccaaccttgcccagccccacgggcgccacggaacccgctngatctcgccgccaactggtagaca

SEQ ID NO: 1640 - DNA, 129 bp, Homo sapiens
  misc_feature 71, 83, 105: n = A,T,C or G
gtcgccacgcgtccggcggccgggccggggcagccgggaagcgggtggggtggtgtgttacccagtagctnctgggacatcgntcgggtacgctccacgccgtcncagccactgctgtggtcgccggtc

SEQ ID NO: 1641 - DNA, 455 bp, Homo sapiens
  misc_feature 430: n = A,T,C or G
cgtccgctcctcccgcctgaggcgagtctgggctcagcctagagctctccggcggcggcgcagcttcagggcagcgcgggctgcagcggcggcggcggttagggctgtgtagggcgaggcctcccccttcctcctcgccatcctactcctccctcctcgtcatcctcccccttcgtcctcctcgccttcctcctcctcgtcaggctcgacccagctgtgagcggcaaagatgggcggcgcccaggccgccgcctgccaggctgtcggggcgtcatggtgccggcgcccatccaagacctggaggccctgcgcgcgctcacggcgctcttcaaaggagcagcggaaccgagaaacagcacccaggactatcttcaaaaggagttctggatatcctaaagaaatctttctatgctgttgagcttgcctgcangagatccatcccaagtggaaaacct

SEQ ID NO: 1642 - DNA, 531 bp, Homo sapiens
  misc_feature 416, 498, 520: n = A,T,C or G
acatttatcatggatgctgaccgggagaaagaaagaaagaaacgggaggagcgggagcgtaagcggcggaaggaggaggaggtgcaacagccaaagttggcagaggagagacggcggcagaatttacaggaggaaaaggaaaggaagttggaatgcctgccccctgaaccttcccctgatgaccctgaaagtgtcaagatcatcttcaaattacctaatgattctcgagtagagagacgattccacttttcacagtctctaacagtaatccacgacttcttattctccttgaaggaaagcccagaaaagtttcaagattgaagccaattttcccaggcgagtgctgccctgcatcccttcagaggagtggcccaatccccctacgctacaggaggccggacttagccaccagaagntctttttgttcaggacctaactgacgaatgacatttttttctttctgtcccctcctaccccagtccctaaaagaaatggggnaaaaaggaaacaacagcagtcntaaaaaaaaaa

SEQ ID NO: 1643 - DNA, 400 bp, Homo sapiens
  misc_feature 385: n = A,T,C or G
cgcgtccggaggggctaagaaggttgtccttgcctaatgctctgatctgtaagtgaatagggcagaacagttcagccttgaggttagaatttagcaggagctatcctgacttaatatccagttgtggggtttgcaaaacaaaacagctgtatgtaatcattgccactagttccatctagaactcctttctagtttgttatttttaaaatgtttatacataaaaccaccaaaatacatagcttcgacaagatggaagtttatttctctctcccataacagtgcagtgatagtcagctggtccaggccaggcaaggggctggtccatgatgtcatcaggcacccaggttcctactggctttgcatgtggccacagttagcaacaaanggaggctgtaaattt

SEQ ID NO: 1644 - DNA, 485 bp, Homo sapiens
cgccacgcgtccggtgatgcggaccccgggcgggcgcagggcgcgggctccggcgccgccgctgcgtcctccccggccgcgggcgagccgctgcagagggagcgtcgcgccggggcggagtgcgggcttgcgcggcaagtgcgcgccgaggtcacgaaatggattggagtgaaccggagaccccgaaaacggaagcgcagggagaaggaagaggtgtttgaaaagcttcttccagaccagctggtcttgcttctggagcatctcttggagcagaagactctgagcccccgaactctgcaaagcctccagaggacataccacctccaggatcaggatgcaagaggttcgccatcggtggtgtgaactcattgttaagcacaagttcacgaaagcctacaaaagtgtggagaggttccttcagggaggatcaggccatggggtgtgtacctctacggggagctgatggttgagtgaggaccccagac

SEQ ID NO: 1645 - DNA, 496 bp, Homo sapiens
  misc_feature 26: n = A,T,C or G
tcgccacgcgtccgggacatcgagtncgggctggctacgaactcctcgggggcgaaggtggcggagagggatgggttccaggacgtcctggcgcccggggaaggctcggcgggacggatttgcggtgcgcagccagtgccgttcgtccctcaggtgcttggcgtgatgatcggggccggagtggcggtggtggtcacggccgtgctcatcctcctggtggtgcggaggctgcgagtgccaaaaaccccagccccggatggcccccggtatcggttccggaagagggacaaagtgctcttctatggccggaagattatgcggaaggtgtcacaatccacctcctccctcgtggatacctctgtctccgccacctcccggccacgcatgaggaagaaactgaagatgctcaacattgccaagaagatcctgcgcatccagaaagagacgcccacgctgcagcggaaggagcccccgcccgcagtgctaggaagctgac

SEQ ID NO: 1646 - DNA, 553 bp, Homo sapiens
  misc_feature 496: n = A,T,C or G
tccgccaagtcctgcgatgatggactcaacaccttccgcgacgaggggccgggttctgcggcgcctgccaaaccgcatacccagcctgcggatgctccggagcttcttcaccgacgggtccttggatagctggggcacctctgaagatgctgacgctccttctaagcgacactcaacctctgacctctcagatgcgaccttcagcgatatcaggagagaaggctggttgtattataagcagattctcaccaagaaggggaaggctgaggaccgggatgacatgctgggctggatcagagcgatccgggagaacagcagggccgagggcgaggaccccggctgtgccaaccaagctctgatcagcaagaagcttaatgattatcgcaaagtgagccatagctctgggcccaaagctgattcctcccccaaaggctctcgcggcctggggggcctcaagtctgagttcctcaagcagagtgcggccacgtggcctcangactcaagacctgcccgcagggagcaaggatgacagtgctgcagcccccaaaacccc

SEQ ID NO: 1647 - DNA, 536 bp, Homo sapiens
  misc_feature 50, 100, 509, 515: n = A,T,C or G
ggtgtcgccccgcgtccggtttcttcctaatttatatttccgatacatangtgtagaacaggaatttgcagaagccatttaagttatcttttgaggtaangctctgatttagcatttattctgataaaatctaatacatcatgggatatatataaagcaacttaattcttgtggtgtagtcttaatagttttgaatgttgactgaatgtctataaaattgtgagtttgtctttgttacattccagtgtttctgcctcttggcatgcttaaagcacggcttacttcatctgctccttacacactaaaatgctgttagtgtgctcaactacagaaatagccgctgctaagttgatgtagattttctacttgaatatttttatggttgtaggaacctcaggagggtcagtgtttactggtttatatatgccttctttttcctgtttgagcttctctctttgaagggattctaacagaacaaaagctgctgatcaccctaagttggaaacagnaaaggngtaattaatataacttaatgc

SEQ ID NO: 1648 - DNA, 500 bp, Homo sapiens
tcaccacgcgtccgaaagtccgtgacatggttccccgtggtggcccgtggcagcccgtggcatggcgtggctcagctgtctgttgaagttgttgcaaggaaaagaggaaacatctcgggcctagttcaaacctttgcctcaaagccatcccccaccagactgcttagcgtctgagatccgcgtgaaaagtcctctgcccacgagagcagggagttggggccacgcagaaatggcctcaaggggactctgctccacgtggggccaggcgtgtgactgacgctgtccgacgaaggcggccacggacggacgccagcacaccgaagtcacgtgccaagtgcctttgattcgttccttctttctaaagacgacagtctttgttgttagcactgaattattgaaaatgtcaaccagattctagaaactgcggtattccagttcttctgacaccggatgggtgcttgggaaccgtttgagccttatagatcatttacattcaattt

SEQ ID NO: 1649 - DNA, 555 bp, Homo sapiens
  misc_feature 2, 551: n = A,T,C or G
cnccacgcgtccggggatccctggggagagtaacagtggccccacatccctcctcctgggagacgctggtgcagggcctcagtggcttgactctcagcctaggcaccaaccagcccgggcctctgcctgaagcggcactccagccacaggagacagaggagaagcgccagcgagagaggcagcaggagagcaaaataatgtttcagaggctgctcaagcagtggttagaggaaaactgagacgtgcacccccatgggatggagacccgaagggactcagacggagccgccgtgttggcagcgcctgggtgtgggcccattttggggaccaaacagcaagctgtggtcggatgagtgccaggacctgtgtaccgggacacgtggggagtcctcccagcatgatgcttgactgacccgaggaaggtcctcatgtttcgtgcctgtcattctcggatggctgtgaggcattccttggcaagggatgcttgcgtaccaagcggtcctaccgcatctacatggcttctgtgatgcatgttgtcgctttcccacccnggat

SEQ ID NO: 1650 - DNA, 509 bp, Homo sapiens
  misc_feature 363, 449, 450, 459: n = A,T,C or G
cgcgtccgagctttgcagggaagaacagagtatgggtcatctcagcccctcatgcctcggaaggctactaccgcctcatgatgagcctgctgaaggacgatgtgtactgtgagctggcggagaggcacatccaacagattgtgctcttccaccaggcaggtgaggaaggaggcaaggtgagaaggatcaccagcgagggccagatcctggagcagcccctggaccctagcctcatccctaagctgatgagcttcctgaagctggagaagggcaagtttggcatggtgctgctgaagaagacgctgcaggtggaggagcgctatccatatcccgttaggctggaagccatgtaccgaggtcatngaccaaggccccatccgtaggatcgagaagatcaggcagaagggctttgtccagaaaatgtaaggcctcttggtgtagagggccanngttggttgnctgagggggaattgacccgttggaagggggaagcaatgaaagggccaaag

SEQ ID NO: 1651 - DNA, 403 bp, Homo sapiens
  misc_feature 284: n = A,T,C or G
cgcgtccgggatgccttgggtctgaaagtcgatgaaggacgcgattacctgcgataagcttcgtggagttggaaataaactatgatacggagatttccgaatggggtaacctaactgagcaaacctcagttgcattttgatgaatccatagtcaaattagcgagacacgttgcgaattgaaacatcttagtagcaacaggaaaagaaaataaataatgatttcgtcagtagtggcgagcgaaagcgaaagagcccaaacctgtaaaaaggggttgtaggacatnttacattgagttacaaaattttatgatagtagaagaagttggaaagcttcaacatagaaggtgatattcctgtataccgaaatcataaaatctcatagatgtatcctgagtagggcggg

SEQ ID NO: 1652 - DNA, 506 bp, Homo sapiens
  misc_feature 7, 492: n = A,T,C or G
gtcgccncgcgtccgcaacattattgagattgtcgtgtatagtcatcgaatatcagccagttcctgtaattttgtgacacgctctctgccaagcccaccaagtatttcctttatagctaaaagttccatagtactaaggaaataaagcaataaagacagtctcagcagccaggattctggctgaaggaaatgatccgccaccctgagggtggtgatggtagtttctacccatacctcagcctcaggcgagtggcttatagcctccattcatggtgcactttatttatggtactaagataaagactgtcaatccattgatttatctcctcctgtcccccatctaaaatacccatgctgcttttctggagtgttgtgggggggttaccagcttgatccactggtgctctttaagaaggcccaagaaaggtctttggggcattgccaaagaaaatcccggatttatgtgggaaaaccctcacttttctctttacnggctggtaccaaga

SEQ ID NO: 1653 - DNA, 483 bp, Homo sapiens
  misc_feature 456: n = A,T,C or G
ccgtccgttttttttttgaacttaccgtaaaatttttttttaaaaagtgcttgtaaaaattaaagaggaataaaaggggggtgaacagccagtacgatagtgcatgcctgaaattccagtgctttgggaggccgaggcaggaggatcgtttgaggccagtagttggagagcagtgtgggcaacgtagcaagaccccatctctacaaaaaatttaaaagttagccgggcatggtgattcacacctggagttccagctgctgtggaggctgaggtgggaggatcgcttgagcccaggaatttgaggctgcagtgagccatgattgcaccaccgcacttcagcctaggtgacagagcaagggtctacctcagaaaaaaaaaaaaaggaggagcaagcacgtgttgatgggtggaaatccagccagaaatgctgaggctgaaaagattgttcccagtttnctggtagccaggggaaaaggggaaatt

SEQ ID NO: 1654 - DNA, 527 bp, Homo sapiens
  misc_feature 29: n = A,T,C or G
cgcgtccgctgacatttcctaggaagctnggaaaaggaaagtgaaggaatggtctaaagaaatgaccattcacactgattttgtctggacagtctggccgcaggttattcatagattattcagcctttgcaggacttggattcagggttttactcagtccctttaccttaggtggaatcttcttaaattgaaatttttggtaaggaattcatttcacaggtagtgtttcagactctgaaagccctgacttggttcttggcttctactgtactagttactagttactggtactgttgccaagcaatctgcttggaatttgtggatccctgctgttccctaatcccaccccctgccctgagacagtgaatgtagtccgtgaagggagtgcctctctgggaccccctgtgttgttacaggctgtgcagtgcaacaattccagcaaaaataccctatccccgcacttagtcattcgtggtaactaacaattttgaaatactcatataaaatgaacaggaaagtggttagtg

SEQ ID NO: 1655 - DNA, 495 bp, Homo sapiens
  misc_feature 478: n = A,T,C or G
gaccacgcgtccggacccagacccggctgacccacctacccgcgatcctgcccatggctgacgggctctttcggcgcagaccctggggtctcgagcagattcgcccggaccccgagtccgaaggcctgtttgacaagcctcccccggaagaccctcccgctgcccgcgggcccaggtcggcgtcggccgcgggcaagaaggctggtcggcgcgcgggcgggagggcgcaggggggccgcgccgggcagcccccgaaggccgcatcgcgccccccgcccaagaaggaggcgcctccactggacgagggctgctatctcgaccattttccgcacctctccatcttcatctacgcagccatcgccttctccatcacctcctgcatctttacctatatccatttacagcttgcctgagtggccagcgcgggacggggtgggcgcaggaccgagcggggagggaaaggggaaaacgggggctnggcattttgtgttttag

SEQ ID NO: 1656 - DNA, 455 bp, Homo sapiens
  misc_feature 2: n = A,T,C or G
cnctaaccccgaactctagatcgtcttgcttgtttgtctgaagaagggaatgaaatagaaagtggaaaaataatattttcagagcatcttcccttaagtaagctacagcaaggcataaaatctggtacataccttcaaggaacatttagagctagcagggaaaattacttggaagctacagtatggattcatggcgacagtgaagaaaataaagagataatcttacagggacttaaacatttaaacagagctgttcacgaagatattgtggctgtggagcttctccccaagagtcagtgggtagcaccatcttctgtggttttacatgatgaaggtcaaaatgaagaagatgtggagaaagaagaagagacagaacgaatgcttaagactgctgtaagcgagaaaatgttgaagcctacaggtaggagttgtaggaataataaaaaggaattgga

SEQ ID NO: 1657 - DNA, 545 bp, Homo sapiens
  misc_feature 440: n = A,T,C or G
cgtccgcggacgcgtgggcggacgcgtgggctggctgtatctatactttccttgagaaaaatcccataaagtggatggacctgtgaagaaaatgtatgcttatggcctagccttcatgtctggctgatgtatcctataaggcagtaagccccttttctagtctctggtaagatgcaagagctcatatccccatcactgacattttagtttggaaataatattgagactgtgctatgaccaacccctgatgttgttttttcttttcaaacttttgcatatgagtagaggaaaagcctaaaagttaagtatttatgtctggggggataccttcaggtgtcttatctgttttatgcaagaatttatgtgttcatctttattcagtgcaaagatttttttttaaattttgtttataattggaggtaacattaagacaactcttnctccacaagaaaacctctaaaattaatattccttaagatttggttttcctttgccttataatattaccttttaattgcatgcaagattgtcatacttttcaaaag

SEQ ID NO: 1658 - DNA, 445 bp, Homo sapiens
gtcgccccgcgtccgtttgatataccactctgataactcatataaaaatatcatcataaaaagcttaatttcatcccttttatgttggttttaaaaggtaaatgcttaccatattttataattgagaactcttacatagtagaatccattctataatacatgtgttgacaaagctttagagaaagtttcctattctcttccatttcccctgcccaaagtgctgacataggcagtgatgaagaatctttaccaagattttcagggtgtacctatgaaattgctttaaatgcactgctggtgtaaataattagcaagcaaaagcgtttctgtgacttcaggtaccagcttaaagagcactagggatggggaacgaatgccaaatcagactccacctagagcaccaggaaacagcttgtccctggtagggaaatggtgttgctgaaag

SEQ ID NO: 1659 - DNA, 509 bp, Homo sapiens
  misc_feature 6, 19, 40, 437, 481: n = A,T,C or G
cgaccncgcgtccggctgntgaccccatgctgagtggccngtggggagcggcgcccggcaggctcttctggggtcgtctgtcctatccgtggattgtatatactcttctctgttaaggagtttttcccaagaagaaaagtatttaaaagaaataccagtgagtgccttaaagttggagaagtaactgcccatgcccagaaataaggatgccagtgcccagaagcagtgagattagtctgtgtccacaagcagaggccccctcgatgggagggagtggcaggcaggagaaggtggcgctgccaggtgcccgggtctattggaggcgccccatctcagacttcctaacacagcctgtgtggaaggcagaacaaagaatgcatgcccagtcagaaatctgttctattctgctccaggaaaatcggaaacctgtgagtcanagtcagagaaacttacccagccacgtattcctgtttcatgggtnctgtagatgttttgagtcaaggaaggta

SEQ ID NO: 1660 - DNA, 439 bp, Homo sapiens
  misc_feature 7, 431: n = A,T,C or G
tcgaccncgcgtccggtgggtccctgccggccggcggcgggcgcagacagcggcgggcgcaggacgtgcactatggctcggggctcgctgcgccggttgctgcggctcctcgtgctggggctctggctggcgttgctgcgctccgtggccggggagcaagcgccaggcaccgccccctgctcccgcggcagctcctggagcgcggacctggacaagtgcatggactgcgcgtcttgcagggcgcgaccgcacagcgacttctgcctgggctgagctgcagcacctcctgcccccttccggctgctttggcccatccttgggggcgctctgagcctgaccttcgtgctggggctgctttctggctttttggtctggagacgatgccgcaggagagaagaagttcaccacccccatagaggagaccggcgganagggctgc

SEQ ID NO: 1661 - DNA, 463 bp, Homo sapiens
  misc_feature 11, 413, 414: n = A,T,C or G
ggtgtcgaccncgcgtccggcgccccgctcgcattgttcgggcgactctcggagcgcgcacagtcggctcgcagcgcggcactacagcggccccggcccggcccccgcccggccccggcgcaggcagttcagattaaagaagctaattgatcaagaaatcaagtctcaggaggagaaggagcaagaaaaggagaaaagggtcaccaccctgaaagaggagctgaccaagctgaagtcttttgctttgatggtggtggatgaacagcaaaggctgacggcacagctcacccttcaaagacagaaaatccaagagctgaccacaaatgcaaaggaaacacataccaaactagcccttgctgaagccagagttcaggaggaagagcagaaggcaaccagactagagaaggaactgnnaacgcagaccacaaaagtttcaccaagaccaagacacaattatggcgaa

SEQ ID NO: 1662 - DNA, 298 bp, Homo sapiens
  misc_feature 236, 275: n = A,T,C or G
gaccacgcgtccggaaggaagggacgggctgagttccccgacgagagacacacccagattttcctgcagcttggggagaggtcctcccaggagccttggtccctcctggcctgccggagtccttagccaggatggaggctgttgtgaacttgtaccaagaggtgatgaagcacgcagatccccggatccagggctaccctctgatggggtcccccttgctaatgacctccattctnctgacctacgtgtacttcgttctctcacttgggcctcgnatcatggctaatcggaagccctt

SEQ ID NO: 1663 - DNA, 477 bp, Homo sapiens
gtcgaccacgcgtccgggctccatccgggctatcctgccgccttagcggctgcttctccccaggatgcgggcagggggcctctctcccactccccacacaccgatttctgagtagcgataggggctggaggcttattttatggggtagggggccgctggtaggcgaagattgtccgagggagagggggaggatgaagccagtgcgtggcggagacttgccagatgttgatgcctaagaagaaccggattgccatttatgaactcctttttaaggagggagtcatggtggccaagaaggatgtccacatgcctaagcacccggagctggcagacaagaatgtgcccaaccttcatgtcatgaaggccatgcagtctctcaagtcccgaggctacgtgaaggaacagtttgcctggagacatttctactggtaccttaccaatgagggtatccagtatctccgtgattaccttcatctg

SEQ ID NO: 1664 - DNA, 468 bp, Homo sapiens
  misc_feature 425: n = A,T,C or G
ccgcgtccgggggttggtacccgagcgccttcccctcacctcaaccagagaagagcatccggttgctttttaaagcttttagcctgccctagcaaggacaaagcatgttagattagagatgcttctgctgatcgcaggggttcttatttgaaaacatctatgatgggggtggggtgggaggagacaggttgtggttatgcaggaaaatcttgtcctaaaaatatatgagtttgggggtaaggggtgggatagccaagcaaaatcagtaattattttaaaatgaacatatgtatttttattaacttttagttaaatacagattttacaacgaggtcagcataagcctaaatctatatagagggctaactcaggcattgtcttgtttatttgtagactggattaaaaacaacctgtcctgttttgtnagttcccagcttctttcgtttagaataaattagaccaaaagaa

SEQ ID NO: 1665 - DNA, 469 bp, Homo sapiens
  misc_feature 5: n = A,T,C or G
gcgtncgcttaatgtcaatgtggcctgggctggaggtctggacccccccatgggggatcctgagtacctggctgctttcaggatagtcgtgatgcccatcgcccgagagttctctccagacctagtcctggtgtctgctggatttgatgctgctgagggtcacccggccccactgggtggctaccatgtttctgccaaatgttttggatacatgacgcagcaactgatgaacctggcaggaggcgcagtggtgctggccttggagggtggccatgacctcacagccatctgtgacgcctctgaggcctgtgtggctgctcttctgggtaacagggtggatcccctttcagaagaaggctggaaacagaaacccaacctcaatgccatccgctctctggaggccgtgatccgggtgcacagtaagtgtggagatgggacactcgctgagctcagactgaaggatcttggt

SEQ ID NO: 1666 - DNA, 437 bp, Homo sapiens
  misc_feature 6, 65: n = A,T,C or G
cgaccncgcgtccggtgtgatgatcgctactgctggagaccgcacagaggagttccacggccacngcagtgaacctcctggggaacttgcccctcaagtgtctggatgttctcctcaccctggagccacatggagactccacggagttcatgggagtgaatatggatgtgattcgtgccctcctcatcttcctagagaagcgtttgcacaagacacacaggctgaaggagagtgtagctcccgtgctgagcgtgctgactgaatgtgcccggatgcaccgcccagccaggaagttcctgaaggcccaggtgctgccccctctgcgggatgtgaggacacggcctgaggttgggggagatgctgcggaacaagcttgtccgcctcatgacacacctggacacaagatgtgaagagggtggctgccgagttcttgtttg

SEQ ID NO: 1667 - DNA, 537 bp, Homo sapiens
  misc_feature 1, 472, 475, 490, 503, 509, 535: n = A,T,C or G
ncgcgtccgacactatttagagagctcccttcccacctctctgcccagccttgttacctcacttctgctctggccatggctgtgaagggcccagccagctccctgttttgatgttctgtgcaacagctccggggtcttgtgactggagatcctcaacaggccctggagccaggactggagtcttggcagctgatgagcagcaccttgccggccaggaggagctgatgctgacgatctccccaacatctgaaggcttaaagaacattgtcgttcttcagccctccttgcttctctcaatacaataagacattgcagaagcaaaagggtggcctctgctccaggcaaggcagctggctctgtctgggggcgtcggcctggggcttgggtgccacgtgctgagattgcatagtcaaaacaagccatttttgccaacaatagcttgtggctcccacatttttctacccttgcactnaanggccagaccactctntgcatggaccaanaccatntttccaaacccatggggctttttttncc

SEQ ID NO: 1668 - DNA, 475 bp, Homo sapiens
  misc_feature 3: n = A,T,C or G
cangaatactgaaaaatgaagcctaaaatgaagtattcaaccaacaaaatttccacagcaaagtggaagaacacagcaagcaaagccttgtgtttcaagctgggaaaatcccaacagaaggccaaagaagtttgccccatgtactttatgaagctccgctctggccttatgataaaaaaggaggcctgttactttaggagagaaaccaccaaaaggccttcactgaaaacaggtagaaagcacaaaagacatctggtactcgctgcctgtcaacagcagtctactgtggagtgctttgcctttggtatatcaaggggtccagaaatatactagagcacttcatgattcaagtatcacaggaatttcacctattacagagtatcttgcttctctaagcacatacaatggatcaatccattacttttgctttggaggatggaaagttatgagatatatgttgaagacttgaaaaaag

SEQ ID NO: 1669 - DNA, 481 bp, Homo sapiens
  misc_feature 8: n = A,T,C or G
gtcgaccncgcgtccgcccgcccatcactgctgttcctccagggccagcactcgggcgaggcaggggagctgccttcggtacataatttgaaggggcactccctcttgggcacatgccggccctgagtgcctcccttgcctcactctgatcctggccccataatgtcctcagtggaaggtgatgggggccggtgctgtggggagagtagaaagaggggttggcatgactaaaaataccagtatgtgtattaagtattttgagaatgaaatgccaaggagtgcctactatatgccagctctaggaatggagtagacagtggacacaagaaggacttacgccctgagcacaggtgccaatggtgacaagactggcaagacgtgagggcatgaatggttcattcaggcagctgctgcagatgtggtcacctggtgccatctgctgctcccttttccacttttctatgtcctccttccaccccaa

SEQ ID NO: 1670 - DNA, 520 bp, Homo sapiens
  misc_feature 6, 404, 476: n = A,T,C or G
cgaccncgcgtccggtctgaagggtctggctggtgagccaggttttaaaggcagccgaggggaccctgggcccccaggaccacctcctgtcatcctgccaggaatgaaagacattaaaggagagaaaggagatgaagggcctatggggctgaaaggatacctgggcgcaaaaggtatccaaggaatgccaggcatcccagggctgtcaggaatccctgggctgcctgggaggcccggccacatcaaaggagtcaagggagacatcggagtccccggcatccccggtttgccaggattccctggggtggctggcccccctggaattacgggattcccaggattcataggaagccggggtgacaaaggtgccccagggagagcaggcctgtatggcgagattggcncgactggtgatttcggtgacatcggggacactataaatttaccaggaagaccaggcctgaagggggagcggngcaccactggaataccaggtctgaagggattctttggagagaag

SEQ ID NO: 1671 - DNA, 506 bp, Homo sapiens
  misc_feature 10: n = A,T,C or G
gagtcgaccncgcgtccgcaactggtgtccagctcggtgcactccaagcgccgttcccgagcggacctcacggccgagatgatcagcgccccgctgggcgacttccgccacaccatgcacgttggccgggccggagacgcctttggggacacctccttcctcaatagcaaggctggcgagcccgacggcgagtccttggacgaacagccctcttcttcatcttccaaacgcagtctcctgtccaggaagttccggggcagcaagcggtcacagtcggtgaccaggggggagcgggagcagcgtgacatgctgggctccctgcgggactcggccctgtttgtcaagaatgccatgtccctgccccagctcaatgagaaggaggccgcggagaagggcaccagtaagctgcccaagagcctgtcatccagccccgtgaagaaggccaatgacgggggagggcggcgatgaggaggcgggcacggaggaaggcagtgccccgtcggaat

SEQ ID NO: 1672 - DNA, 504 bp, Homo sapiens
  misc_feature 17, 26, 411, 414: n = A,T,C or G
cgcgtccgctcgcggcngggcatcgngtacatcctcagcaaccatgggctacgtgcgccagctctcccaggccctggacacatccaacgtgatggtgaagaagcaggtgtttgagctactggctgccctgtgcatctactctcccgagggccacgtgctgaccctggacgccctggaccactacaagacggtgtgcagccagcagtaccgcttcagcattgtcatgaacgagctctccggcagcgacaacgtgccctacgtggtcaccctgcttagcgtgatcaacgccgtcatcttgggccccgaggacctgcgcgcgcgcacccagctgcggaacgagtttatcgggctgcagctgctggacgtcctggctcgcctgcggtgagtccccactgtagcggtcctgccggnttncccctcctgctcccaaggccaggcccacctgccctttggctcccagccacctcacctaagcagcaccttccagatggcaggggaggtggc

SEQ ID NO: 1673 - DNA, 453 bp, Homo sapiens
gtcgaccacgcgtccggccagagctgagtggcagccgcctcccttatgcaggacatgtgctctcggcttcaccagggttctgaccgggtctgcttctgcattcacagcgcctcctggacctgaaggcatctgagtgtgagaccctgttctaactcttagaagtgacattgtaagaggtggtggggaccagctaattggtccaacccagcctgagtgcaccaccctttgaacaaatgtatcagtgatgaaaatttgcctttgccccggcttgcctgtaatcccagcactttgggaggccgaggtgggcggatcacttgaggtcgggagttcaggaccagcctggccagcgtggcgaaaccccgtctctactaaacataaaaaaattagtcaggtgtggcggtgcgtgcctgtggtcccagctattcaggaggctgaggcaccagaattgcttga

SEQ ID NO: 1674 - DNA, 457 bp, Homo sapiens
  misc_feature 42, 46, 212, 245, 256, 262, 266, 312, 362, 365, 367, 380,393, 399, 449: n = A,T,C or G
tgacggcggcccggccgacgggagccggggcggggcggcggnccancgaaggagcgcgcgggcggtctggccccgccccctccccgcccgccttcccggtgaccttcaggggcccgggtggcgggcgcaggcccctgcggcggcggcgggatgttcgtgcaggaggagaagatcttcgcgggcaaggtgctgcggctgcacatttgcgcgtncgacggcgcctagtggctggaggaggccacccnggacacctacngtgganaaanctcaaggagcgcttgcctcaaagcactgtgctcatggggagcttanaagatccccaaaagtataacccatcattaaatttaatcccacgctgcctnaananaaggggtgcttgngtgattgccatgnaccatncttgggaaggaagaaaccattcccaggacccaaaagatgggccctatttnttggatta

SEQ ID NO: 1675 - DNA, 460 bp, Homo sapiens
cacgcgtccgggatcccgtacccgggacagactcggcgccgctggctggcctggcctggtcgtcggcctctgcacccccgccgcgggggttcagcgcgatctcctgcaccgtcgagggggcacccgccagctttggcaagagcttcgcgcagaaatctggctacttcctgtgccttagttctctgggcagcctagagaacccgcaggagaacgtggtggccgatatccagatcgtggtggacaagagccccctgccgctgggcttctcccccgtctgcgaccccatggattccaaggcctctgtgtccaagaagaaacgcatgtgtgtgaagctgttgcccctgggagccacggacacggctgtgtttgatgtccggctgagtgggaagaccaagacagtgcctggataccttcgaataggggacatgggcggctttgccattctggtgcaagaaggcca

SEQ ID NO: 1676 - DNA, 477 bp, Homo sapiens
tccctctgctgatgatggatgcccctaacacctgtgcctaacacccctactgaaccccacagctccagccttagtttttggagtcaagtgttaaaggtttctggccagaggaattggggtcttgccatccctgcaatagcccttttatgggctctgggagacagctttagggaataaatggggattttcccctttttctacccactcctttgcttcctccaagacttacccaactccttccccctcagagaaccaaatagcctgaggaagcaggagagttcctggttatggcagattcttggtgatttggggcttcaagacagtaggtgagagatgctgtcagggacgtatcttcttcataccaaagtcactggtcctttctcagcctctctcgtgcttttctcctaatgaccatatttttgccaaaaattgggaatatgttatctgacagaccagaatatttgaaggtttgggctg

SEQ ID NO: 1677 - DNA, 448 bp, Homo sapiens
  misc_feature 14, 31, 42, 75, 93, 94, 103, 108, 124, 132, 135, 138, 189,326, 336, 350, 351, 358, 377, 442: n = A,T,C or G
gcgccgcggatatncggatcaacctatggtntcaatattgtnagttattcagcataaacagaattatttcccaanacttgatctgaaatattnntaatggtcntactngaaacttatattcttnctgggagngangtntttatcatttttccatggagacaggttctaactctgttgcccaggctgcantgcagtgatgtgatcatagctcactgcagcctgaaactcctgggtgtcaagtgatctctggcctcagcctcccaagtagttggaacttcagatacgtgccaccacaaccagctaatttattttttagagatgaggtntcgctatgtngcccagtctggccnnctagccncaagtgatctggccatctnagccttcagttggagatgtctgatttatgttaatataagaaagctgttgatcgtttatcataaangcattt

SEQ ID NO: 1678 - DNA, 504 bp, Homo sapiens
  misc_feature 4, 7, 307: n = A,T,C or G
gtcnccncgcgtccgctcctccgccggcatgcaactcggcgcccgcggtccatggaccggaacctcgggccgacggacgggaacccgggccgcgatcgccgcctccccgcctcaggctcctcctcctcgctctccgccgcctccgccggactcccgcaggccctgcaccgccgccgccaggctagcggagctgccccgggaagctgggtgacgggttcgcggctgccgccggactgcggcctactccgccgcctctcagtgctattgtccctgggcctggccttgagcgggtccactggggaaggcncgtgtgcgccggctccgcggaagatgccggaccaagccctacagcagatgctggacaagaagttgctgggtttgttttgctactgatgaagatgatagaacagctgaatgggtgaggaccatggcaggtgcaggaggatctacaaaatgggttcaccagggcctgtctacaacgctgggtggatgaaaagcaaagag

SEQ ID NO: 1679 - DNA, 497 bp, Homo sapiens
gcgtccgggcccgcgaccgagcgtgcggactggcctcccaagcgtggggcgacaagctgccggagctgcaatgggccgcggctggggattcttgtttggcctcctgggcgccgtgtggctgctcagctcgggccacggagaggagcagcccccggagacagcggcacagaggtgcttctgccaggttagtggttacttggatgattgtacctgtgatgttgaaaccattgatagatttaataactacaggcttttcccaagactacaaaaacttcttgaaagtgactactttaggtattacaaggtaaacctgaagaggcccgtgtcctttctggaatgacatcagccagtgtggaagaaggggactgtgctgtcaaaccatgtcaatctgatgaagttcctgatggaattaaatctgcgagctacaagtattctgaagaagccaataatctcattgaaggaatgtgaacaagctgaacgacttggaagcagtggat

SEQ ID NO: 1680 - DNA, 424 bp, Homo sapiens
gtccggcgtggggaagggtggggtgagggggcgtggccgcagctagggcggcgaaactctcctcccctcggccccaccgcgtgggacggcgtgaacgtggtgtcggagggatgtcagccttctctgaggcggcgctggagaagaagctgtcggagttgagcaactcgcagcagagcgtgcagaccttgtccctgtggctcattcaccaccgtaaacactcgcggcccatcgtcaccgtgtgggagcgggagctgcggaaagagtggaggtgcaacaaatgagaaattccaattggagattttgtcaaacaggaatttactccaaaccaaacaggaagcttacttttctctacctagccaatgatgtcatacagaacagcaagaggaaggggccagagtttacaaaagattttgcaccagttata

SEQ ID NO: 1681 - DNA, 475 bp, Homo sapiens
ccggcaaagcagggactcctgatttatatgtccctcctcctggcaatcctctcaccccacctcccctgagaacctcagttcttcctaaattgctaaagctgaggggaaagggatgctttgcggcaaaggcgctgctgcctcaagcttgctttacatgcctctctagttcctctcgcactacagagtggtagcgaacaaaagcgttcgccctagaagcgacctgaatggaaaaatctgcacacgaactaatgggtttgtcacggaaagtagggaaccgggtctgcagcattccctggagacagactttctggttggttttcaagggtccaaggcagccatcagcccggctgtgccctcccaccctgcctcccacccagttgattctctctttgtgtaagtttagcccctctgagggtggtggagtgagagcatcccatcagatatatatacgattcatcagtcggcacttaaaaag

SEQ ID NO: 1682 - DNA, 475 bp, Homo sapiens
  misc_feature 6, 44, 322: n = A,T,C or G
tcaccncgcgtccgaaaaacgcagatgatatacctgcaacatcngtcatggctgcgccctgtgctcagaagcaacccgggtggaatattgctggtgcaacagtggcagggcacagtgccactcagtgcctgtcaaaagttgcagcgagccaaggtgtttcaacgggggcacctgccagcaggccctgtacttctcagatttcgtgtgccagtgccccgaaggatttgctgggaagtgctgtgaaatagataccagggccacgtgctacgaggaccagggcatcagctacaggggcacgtggagcacagcggagagtggcgcncgagtgcaccaactggaacagcagccgcgttggcccagaagccctacagcgggcggaggccagacgccatcaggctgggcctggggaaccacaactactgcagaaacccaagatcgagactcaaagccctggtgctacgtctttaaggcgggg

SEQ ID NO: 1683 - DNA, 522 bp, Homo sapiens
  misc_feature 414, 450, 455, 461, 498: n = A,T,C or G
ccgtccgctccttggcaagaacgaaaggtgtgatgaaacctccctgctcggaagggtctccgtggaggtgtcctcatttcacatgctgggttttgcaagcgaggaagccaggcagtggaggaactagagagaggcaggcgtgtgtgtggacaagcgctggagccgcagccctcagactggcacgggaacgccagcgttgggtgttcagattccacgcgtatgtctgggctcactcacagcatggccgagtgtctgcagtgctggtcctgacccttccagagcagcagtggacagatgagataagactgtttcagaaacaaagatggccacagccttcctaacaagcaggtcatctggccatgtctgtattgtaactggtaaaaggcttcaagtcagattgatgatcaagaaaangtcaaaaccccagcccaagattgggaaagcaggttngtggntccaangctttttaaaaaaattatttgaagctcttcattcctntttctgtgagtgtgtctttctctt

SEQ ID NO: 1684 - DNA, 481 bp, Homo sapiens
  misc_feature 1: n = A,T,C or G
ncccatactgggggcccccttcctgcaggccccatcaggtgcagagctgtgggtctggttccaagacactgtcactgatgtggataaatcttggaaggagctcagtaatgtcctctcagggatcttctgcgcctctctcaacttcatcgactccaccaacacagtcactcccactgcctccttcaaacccctgggtctggccaatgacactgaccactactttctgcgctatgctgtgctgccgcgggaggtggtctgcaccgaaaacctcaccccctggaagaagctcttgccctgtagttccaaggcaggcctctctgtgctgctgaaggcagatcgcttgttccacaccagctaccactcccaggcagtgcatatccgccctgtttgcagaaatgcaccgctgtactagcatctcctgggagctgaggcagacctggcaagttgtatttgatgccttcatcacggggcagggaaagaa

SEQ ID NO: 1685 - DNA, 497 bp, Homo sapiens
ccgctggttattacccagctggatggtttccttttaggcaagaaggaggtcatcagcaggctcccaacaataatgccgaagttaacaatgatgggcaaaatgcaaacaacttggaacttgaagaaatggagcgtcttatggatgatgggcttgaagatgagagtggagaagatggaggtgaagatgccagtgcaattcaaaggcctggattaatggcttcagcttggtctttcatcaccaccttctttacttcactaataccagaggggcctccccaggttgccaattgacctgaaaaactgtgccagctacaaggagggtctgacttcaggaaagtggtttaaataacagtgcaatttcaaaaaaatttataactttcttttgatcatcatgtacagaggtgttttttttctttaggcttctcatgcatatgaatattttaagcacgaatggactactaaatatctgagtttttttttttttttttttaaagaatc

SEQ ID NO: 1686 - DNA, 412 bp, Homo sapiens
cgcgccggtttggctgccctgcataagctgctacaaatagaataaagaatttcatacgcctgtatctatcatttagatgcatggaaaaaaatgggctttgcacacaatgggtttggagctgactgggaacaatggaaaaaattacattagctgtggttgtaaagtttttttgtttttggttttgttttttttttcttttttcttttttttttttttaccatcttgtgaaaggtttctgaaactcgataataaaaagcggttggtgtaaattattcttttgtgtcacatttttagaaggaaaaacataaaagaatgtatccttagtactggttcttaaacagcccataaaaacccattggcctgaagcttatatctcaggcctatgcccatcttatagtcttggaagacaaaa

SEQ ID NO: 1687 - DNA, 534 bp, Homo sapiens
  misc_feature 458, 512: n = A,T,C or G
cgcgtccgtgggtctcgccctcaacctgtgcatgtatatgtgtgtctttgtgtgtgtatgtgtgatctctgcctgcaggaccagcccggtggcaccctggatctgaccctgatccgtgcccgcctccaggagaagttgtcacctccctacagctccccacaggagtttgcccaggatgtgggccgcatgttcaagcaattcaacaagttaactgaggacaaggcagacgtgcagtccatcatcggcctgcagcgcttcttcgagacgcgcatgaacgaggccttcggtgacaccaagttctctgctgtgctggtggagcccccgccgatgaagcctgcctggtgcttggcctgaagtttcccaaggaagctgtctggtgggccccttgggtgatgggccccttggagggcttggaagcccccccatgggccaagccccagccctgggcttctggttcntcttgtccctggtcacccccatccccactcccccttgggtgggccttgaacttnccacttcccttgggtggggccc

SEQ ID NO: 1688 - DNA, 258 bp, Homo sapiens
  misc_feature 7, 20, 21, 67, 70, 97, 103, 104, 127, 133, 143, 154, 180,189: n = A,T,C or G
aggaggnttgaaggagttgnnggaggaggaggatggaggcgagggcgagcgagcccagcggggtccnggncgccccgcgggccaaagtcgagccctnccgccnntgggcgagcgcgccagccgcccntttcanaacagttcgncgccacaaaanaaaagaacgggggggtgccgaggttncccattganctcttaaagtggtgcaggtccctgttgagtgcgctgcaccgggccgtgacccgcgcccctgtgcgtccc

SEQ ID NO: 1689 - DNA, 434 bp, Homo sapiens
  misc_feature 238, 243, 412: n = A,T,C or G
ggagtcgaccacgcgtccgcgccggccgccggtgtccggaccgctcgcccccgtttggacccgacttcggttcttctggggtgttgatgctcctaaagcccgagagcacgtgtccagaccctagcctgtacgacgctgactctgcccggtcccagaaccaaagccatgccggggtgtggcctctgaccccacgcggaggggacctcgccttgcgggaccccacctggaacccgacctnccagnctcgcagccggcctgagccgccatgcgcgggaagttgctgccgctggccggcctatacctggtgcagggcctgccctacgggctccagtccggcctcctgccaaatgctgcttgcgtgccggcggcctctcgctgacgcgcgtggggctggccaaggttctgtacgctncgtggcttgcttcaagctggct

SEQ ID NO: 1690 - DNA, 512 bp, Homo sapiens
  misc_feature 2: n = A,T,C or G
cnccccgcgtccgcggacgcgtgggtgcttgctgctgaacctgagctgcaagttggaattgatataatgaagactagttttccaggtcgtggttcaattccagaattctttcatattatgaaaagaaagtttaccaacaaagaatgggaaacaatcagaagctttaaggatgagtggactcagctggatatgttttataggaattgggcacttaaggaaagcttcataaaagccattggtgttggactaggatttgaattgcagcggcttgaatttgatctatctccattaaacttggatataggccaagtttataaagaaacacgtttattcctggatggagaggaagaaaaagaatgggcatttgaggaaagcaaaatagatgagcaccattttgttgcagttgctcttaggaaacccgatgggatctagacatcaggggatgttccatctcaggatgattccaaaccaacccagagggcaatttactattctcaactttaatgatttaa

SEQ ID NO: 1691 - DNA, 481 bp, Homo sapiens
gaccacgcgtccgcccgtccaggagccctaggagtgctacggggggccggagccttgcccgggccgctgccccgtccctggattcggggctggacgcagcaagcggggcgctgtgtccccaagctccccgtcctcggccaggcgggcaccacggcaggggctgagctaccctcatggaagggagaggaccgtaccggatctacgaccctgggggcagcgtgccctcaggagaggcatccgcagcttttgagcgcctagtgaaggagaattcccggctgaaggaaaaaatgcaagggataaagatgttaggggagcttttggaagagtcccagatggaagcgaccaggctccggcagaaggcagaggagctagtgaaggacaacgagctgctcccaccaccttctccctccttgggctccttcgaccccctggctgagctcacaggaaaggactcaaatgtcacagcatcttccacagcccc

SEQ ID NO: 1692 - DNA, 499 bp, Homo sapiens
  misc_feature 31, 41, 229, 318, 470: n = A,T,C or G
acagaatttaggggtgggtgaaagcacttgngctttagctntttcatattaaatatatatctatatttaaacattcatggcatagatgatgatttacagacaatttaaaagttcaagtctgtactgttacagtttgagaatttgtagtattacatcattacataagtcattttagtaacagcctttgtgaaatgaacttgtttactattggagataaccacacttaatnaagaagagacagtgaaagtaccatcataattaacctaaattttttgttatagcagagttttcttgtttaaaaaaaaataaaatcatctngaaaagcattttgtacagttaaaatgtataatgaagcttttgccaaccagactggtgcttagcaaccaaattttttttttaaataaagcttttatggcaggtgggtaaataaggtggccttccaaatatattggtgtcttgatggagagttntttagttgaaatgaatgtgggtcttttct

SEQ ID NO: 1693 - DNA, 486 bp, Homo sapiens
  misc_feature 59, 111, 134, 144, 260, 337, 342, 383, 384, 398, 410, 421,422, 423, 434, 446, 450, 459, 475: n = A,T,C or G
cggttaacatggccgtcaccgacagcctcagccgggctgcgactgtcttggcaactgtnttgctcttgtccttcggcagcgtggccgctagtcatatcgaggatcaagcanaacaattctttatgaagtggccnatcaaacaanctgggcctgttcttggtgtgtacatccccgattctggtattaattatcgacatgttgcaaataccctttctgtttatagaagtgtcaagaggctaggtattcctgacagtcacatntgcccctaatgcttgcagatgatatggcctgtaatccctagaaatcccaaaccagctacagtgttttagttcacaancaatntggaactaaatggtgtatgggagaatgatgtgggaaggtgnnattatagaagtttnttgaggtaaacnggtgggagaannntttttttaccngggtaatttaanctgngggagggantccccaccctaagtancttccttcggg

SEQ ID NO: 1694 - DNA, 442 bp, Homo sapiens
  misc_feature 154, 162: n = A,T,C or G
gtccgcaagatggacgcagctctctgacctacgacactctccggtttgctgagtttgaagattttcctgagacctcagagcccgtttggatactgggtagaaaatacagcattttcacagaaaaggacgagatcttgtctgatgtggcatctanacttttgntttacatacaggaaaaactttccagccattggggggacaggccccacctcggacacaggctggggctgcatgctgcggtgtggacagatgatctttgcccaagccctggtgtgccggcacctaggccgagattggaggtggacacaaaggaagaggcagccagacagctacttcagcgtcctcaacgcattcatcgacaggaaggacagttactactccattcaccagatagcgcaaatgggagttggcgaaggcaagtccatagggccaggtggtacgg

SEQ ID NO: 1695 - DNA, 514 bp, Homo sapiens
  misc_feature 16: n = A,T,C or G
ccccgcgtccgctcgnagctgtccgcggtctgtttggcccgaacggcggcggaggcgctgatcatggcgacattcatctcggtgcagctgaaaaagacctcagaggtggacctggccaagccgctggtgaagttcatccagcagacttacccaagcggcgggggaagagcaggcccagtactgccgcgcggcggaggagctcagcaagctgcgccgcgccgcagtcggtcgtccgctggacaagcacgagggcgcgctcgagacgctcctgagatattatgatcagatttgttctattgaacccaaattcccattttctgaaaatcagatctgcttgacatttacctggaaggatgctttcgataaaggttcactttttggaggctctgtaaaactggctcttgcaagcttaggatatgaaaagagctgtgttgttgttcaattgtgcagccttagctagccaaattgcagcagaacaagaacctggataatgatgaagggattgaaaatcgct

SEQ ID NO: 1696 - DNA, 494 bp, Homo sapiens
ttcgggagtcgaccccgcgtccgggccagccggctcgcccgggggccatggcagcagcggctactgcagccgagggggtccccagtcgggggcctcccggggaagtcattcatctgaatgtgggaggcaagagattcagtacctctcgccagactctcacctggatcccagactccttcttctccagtcttctgagcggacgcatctcgacgctgaaagatgagaccggagcaatcttcatcgacagggaccctacagtcttcgcccccatcctcaacttcctgcgcaccaaagagttggatcccaggggtgtccacggttccagcctcctccatgaagcccagttctatgggctcactcctctggttcgtcgcctgcagcttcgagaggagttggattcgatcttcttgtggaaacgtcctcttcaatggttacctgccgccaccagtgttcccagtgaagcggcggaaccggcacagcctagtggggcctca

SEQ ID NO: 1697 - DNA, 484 bp, Homo sapiens
cgtccgaaggaaggaagggacgggctgagttccccgacgagagacacacccagattttcctgcagcttggggagaggtcctcccaggagccttggtccctcctggcctgccggagtccttagccaggatggaggctgttgtgaacttgtaccaagaggtgatgaagcacgcagatccccggatccagggctaccctctgatggggtcccccttgctaatgacctccattctcctgacctacgtgtacttcgttctctcacttgggcctcgcatcatggctaatcggaagcccttccagctccgtggcttcatgattgtctacaacttctcactggtggcactctccctctacattgtctatgagttcctgatgtcgggctggctgagcacctatacctggcgctgtgaccctgtggactattccaacagccctgaggcacttaggatggttcgggtggcctggctcttcctcttctccaagttc

SEQ ID NO: 1698 - DNA, 480 bp, Homo sapiens
cgcgtccggccgcgcccatggcccgccgctgcccggccgcgcgggcgggcccgccacgccgctgtcgcccacgcgcctgtcgcggctgcaggagaaggaggagctgcgcgagctcaacgaccgcctggcgcactacatcgaccgcgtccgcgcgctggagctggagaacgaccggctcctgctcaagatctcagagaaggaggaggtgaccacgcgcgaggtgagtggcatcaaggcgctgtacgagtcggagctggccgatgcccggagagtcctggatgagacggctcgagagcgtgcccggctgcagatagagattgggaagctgagggcagagttggacgaggtcaacaagagcgccaagaagagggagggcgagcttacggtggcccagggccgtgtgaaggacctggagtccctgttccaccggagccgaggtggagctggcagctgccctcagcgacaagcgcggcctggaga

SEQ ID NO: 1699 - DNA, 477 bp, Homo sapiens
acgcgtccggaagaatctacacttctttgcaccagagtatggagaagtcactaatgtgacaacagcagtggacatctactcctttggcatgtgtgcactggagatggcagtgctggagattcagggcaatggagagtcctcatatgtgccacaggaagccatcagcagtgccatccagcttctagaagacccattacagagggagttcattcaaaagtgcctgcagtctgagcctgctcgcagaccaacagccagagaacttctgttccacccagcattgtttgaagtgccctcgctcaaactccttgcggcccactgcattgtgggacaccaacacatgatcccagagaacgctctagaggagatcaccaaaaacatggatactagtgccgtactggctgaaatcccccaggccctgatctgcgctgtggctgtccctgggacgtgctgcagccctcctgtcccttccccccagtc

SEQ ID NO: 1700 - DNA, 501 bp, Homo sapiens
  misc_feature 488: n = A,T,C or G
gggagtcgccccgcgtccggatttcagttggtggcgtcatagtctcattacagtgtctatcttggcatttaccaatttacttgtcatctttgtcccaactattagggatatctttggttttattggtgcatctgcagcttctatgttgatttttattcttccttctgccttctatatcaagttggtgaagaaagaacctatgaaatctgtacaaaagattggggctttgttcttcctgttaagtggtgtactggtgatgaccggaagcatggccttgattgttttggattgggtacacaatgcacctggaggtggccattaattggcaccactcaaactcaaactcagtccatctgatgccagtgttgagtaaactcaactactatgaaatttcacctaatgttttcagtttcacttccttttgaagtgcagattcctcgctggttcttctgagtgcagaataagtgaacttttttgttttggtttgnttttttaagaaac

SEQ ID NO: 1701 - DNA, 352 bp, Homo sapiens
  misc_feature 124, 133, 140, 142, 150, 151, 154, 175, 179, 241, 256, 276,283, 294, 298, 306, 320: n = A,T,C or G
cccaccgtccgcgcgcggcgcctcgcctcggccggcgcctagcagccgacttagaactggtgcggaccaggggaatccgactgataaattaaaacaaagcatcgcgaaggcccgcggcgggtgntgacgcgantgcgatntnctgcccanngcntcttgaatgtcaaagttgaanaaanccaatgaagcgcgggtaaacggcgggaagtaactaatgacttctcattaagggtagccaaangcccttcgtcatctnaattaagttggaccgcgcantgaaatnggatgaaaccnaganttcccacntgtccctacctacntaatccaaggcggaaaaccacaagccaaaggg

SEQ ID NO: 1702 - DNA, 516 bp, Homo sapiens
cgaccacgcgtccggacagattgatagctctttctcgattccgtgggtggtggtgcatggccgttcttagttggtggagcgatttgtctggttaattccgataacgaacgagactctggcatgctaactagttacgcgaccccgaggtgcctgaccagttctaccgcctgtggctatccctcttcctgcacgccgggatcttgcactgcctggtgtccatctgcttccagatgactgtcctgcgggacctggagaagctggcaggctggcaccgcatagccatcatctacctgctgagtggtgtcaccggcaacctggccagtgccatcttcctgccataccgagcagaggtgggtcctgctggctcccagttcggcatcctggcctgcctcttcgtggagctcttccagagctggcagatcctggcgcggcccttggcgtgccttcttcaagctgctggcttgtggtgctcttcctcttcacctttgggctgctgccgtggattgacaactttgc

SEQ ID NO: 1703 - DNA, 542 bp, Homo sapiens
  misc_feature 56, 158, 213, 286, 299, 309, 311, 344, 352, 369, 403, 426,432, 484, 530: n = A,T,C or G
gatcgacttcgcctgacggaatccaggggtcgtaatatatgtaaactcgcgtccgngctgcgtgcccagagtagtggccgaataccttaacggggctgtgcgcgaggagagcatccactgcaagtcggtcgaggagatcttcgacgctggtgcagaanctggccgaccagtcgggcttggacgtgatccgcattcgcaagcccttccacacangacaaccactagcattcagggccagtaggcaccccttcaccaacaagcttgaccacgtgtcccgcggaactancgcacccccgagnagggttcaangnattccttgcacccagcccagatgccctggcttntggggggncaagtgaccctttgtgnaacccactcattttttatggcaaggtgagcattncctaaaaacccttgaaaaatgangggaanaactttcaaggggttttttacagggcccttggttttttttaaaatccccaanatttggataataaatggaatcctcaaaaacacaagtggaggaaggntcttgaaagggc

SEQ ID NO: 1704 - DNA, 449 bp, Homo sapiens
  misc_feature 192, 232, 366: n = A,T,C or G
tcgaccacgcgtccggccggagaaacttgagccggctgccccgcccacggtgcccgaagccccaaaggctggaattaggggctagaagtctggcacccaccgcctggccaggtgttcgggacgcgaccaggtgggcggtcgccccgccccgggagcgcggcttaatagctgagagcccgggggccaggccgnggctgcggcccaggcaacgccctgagggtggccacgctgncaggtgttccactcccccgggactatgggcaagggcccggggcggggagggcggcaggtgctgacactggagctgcgccggaggtcggggaactcggcctcctaagactgaggacactcgcctgctgggccggncgagctgtgcggtgccctccgggacgcagggggcgctgcagccacgctgggtcaggctccgaagggccctcccaacccgggga

SEQ ID NO: 1705 - DNA, 489 bp, Homo sapiens
cgccacgcgtccggaaagatggaggtgtggggacaggagctgggtgtgctggggactggccgcggacccctaacctgtgtctccggtctccctccgggagcggctcaacccagcccatcgctctggccccgttctggccctgcagggtggtggttgggacgttgaaatgagcgcgcgagtggtacgtcctctctccgcgctcacgcccccctcctcaccgtgtttcccgccaggaccatcagcacgtgcccatcgacatccagaccagcaagctgctcgattggctggtggacagaaggcactgcagcctgaaatggcagagtctggtgctgacgatccgcgagaagatcaatgctgccatccaggacatgccagagagcgaagagatcgcccagctgctgtctgggtcctacattcactactttcactgcctaagaatcctggaccttctcaaaggcacagaggccttccacgaagaatatttttggc

SEQ ID NO: 1706 - DNA, 485 bp, Homo sapiens
  misc_feature 6: n = A,T,C or G
tcgccncgcgtccgctgaagcaagagaatcacttgaacccaggaggtggaggttgcgtgagctaagatcgcgccactgcactccagcctgggcgacaagagtgaaactccgtcttaaaaaagcccatggcaggctgggcgcggtggctcacgcctgtaatcccagcactttgggaggccaaggtgggcggatcacaaggtcaggagatcgagaccatcctggcgaacacggtgaaaccccgtctctactaaaaaaaatacaaaaaaattagccaggcgtggtcgtgggcacctgtagtcccagctactcagggggctgaggcaggagaatggcgtgaatccgggaggcggagcttgcagggagccgagatagtgtcactgcactccagcctgggtgacagagcgagactccgtctcaaaaaacaaaaagcccgtggcaattaatggtaaaggaaacccggcttttagtgtaaagaggtaacataa

SEQ ID NO: 1707 - DNA, 498 bp, Homo sapiens
gcgtccggcctccagcaaagcccattcagtcagctctgcaggctcatcttacaagaataatccctttgccagctcaatctccaaacatggggtttcttctggcagctcttcctcgggaggaacaccagtccagagttctgtttctgggagcctggtccctggcatacagcctccctccgtgggacaggccaccagccgacccgtcccaagttcagcagggaaaaaaatgcctgtttcccagaagttgactctggtagcccctccaggcggtccaaacggagattccagtggtgggacccaggggagtggcaaagttgctgacctcgccgtccctaaagccctctgcagttagtagtgtgacatcgtctacctccttgtcaaaaggaggcgagtggggactgtgctgctggccggctcctctttgatggctttaccctacaaatccagcagcccaaagctgtctggggccatgagctcgaacttcttgggaaattatac

SEQ ID NO: 1708 - DNA, 476 bp, Homo sapiens
cacgcgtccgggaagcggtgcgctccgtcaccacgggagtgcgggaatccgccgtttgcgctgaggcaatggcggcagctgcgccggtggccgcggacgacgatgagcggcggcggcggccgggggctgcactggaggactcccggtcccaggaaggggcaaatggtgaggccgagtcaggtgagctcagccggcttcgggctgagctggcaggcgccctggcagaaatggaaaccatgaaggctgtggcagaggtgagcgagagcacgaaggccgaggctgtggctgcggtgcagcggcagtgccaagaggaggtggcctcgctgcaggccatcctgaaagactccatcagcagctatgaagcccagatcaccgccctgaagcaggagcgacagcagcagcagcagggactgtgaggagaaggagcgggagctgggccgcctgaagcagctgctgtcccgggcctaccccctgga

SEQ ID NO: 1709 - DNA, 430 bp, Homo sapiens
cacgcgtccgcggacgcgtgggtccgcggcggcgtccggggtctccagtagggctgacgctccggtgctcgcacaatcccccgcctcggctggcaacgggcgtccctccactccccgagtccccggcagccgccgccaccccagcgcgccccgatctggccccctgccccgcgaagatggctgccgtacgccgggcccgcagttattgccgctgcctggtgcgcttctccgaccgagaactctgctaagctccgctgcagagacaggcaggagtagacacccggacacccagcacccctccttcggggggcggtgcagagggggcacggagagcccctcgagcgcagcaggccgccccgccagcatggcagaagctgaggaagattgtcattctgatactgtcagagcagatgatgatgaagaaaatgaa

SEQ ID NO: 1710 - DNA, 529 bp, Homo sapiens
acgcgtccggcgagtggccttcccggttggcgcgcgcccggggcggcggcgctggaggagctcgagacggagcctagttatgtctgggaggcgaacgcggtccggaggagccgctcagcgctccgggccaagggccccatctcctactaagcctctgcggaggtcccagcggaaatcaggctctgaactcccgagcatcctccctgaaatctggccgaagacacccagtgcggctgcagtcagaaagcccatcgtcttaaagaggatcgtggcccatgctgtagaggtcccagctgtccaatcacctcgcaggagccctaggatttcctttttcttggagaaagaaaacgagccccctggcagggagcttactaaggaggaccttttcaagacacacagcgtccctgccacccccaccagcactcctgtgccgaaccctgaggccgagtccagctccaaggaaggagagctggacgccagagacttggaaatgtctaagaaagtcaggcgttcctacagccggctggag

SEQ ID NO: 1711 - DNA, 495 bp, Homo sapiens
  misc_feature 2: n = A,T,C or G
cncgcgtccgaaggcacaggcgtcttgctctgttgaagcaagtcagtatccgagaaaactgctgttccctttgttgtgatgaggtagcagacacacaattgaagccatgtggacacagtgacctgtgcatggattgtgccttgcagctggagacctgcccattgtgtcgtaaagaaatagtatctagaatcagacagatttctcatatttcatgacacatgtgaagaggcatcgtggacttttttctactcaattccagccaatgttgaaaagaaaaagaaaaaaaaaactctaatcagttgtacacacattgaaacttatagccatggccagattttatgctaaaaatggtagtttgtcaaagacaaaattctcttagaatctaatccaacttgccagccctgagaaaatcccttttaaggccaagggaaagctgaatgctagcagccaggcctgtggtacttccatgagaaaccatagcaggacaatgccctc

SEQ ID NO: 1712 - DNA, 477 bp, Homo sapiens
ccaccgtccgggcggccagaggtgcgagaaggccgaggagaaggccaaggagattgcgaagatggcagagatgctggtggagctggtccggcggatagagaagagcgagtcgtcgtgagcgcggtcggcggtttccagccaatggattctggtcaactggtggagattggctgacaccctggagaagccgaaaccagagagccttttgttttctcttttttcctgtctatgctctgtctcacttaacactacgttttctgctatggtctgtggttgatgacctcaatatgagtttcgattgttaaccgtgtttttgtttgggaagtaattttgtttgaaaatgctctcacatacaggaattagggcctagattgtaagctcttgcagcagtcacatttgttcccgggctttggtggttattttctaaatttttgaggtgcctttgctatttcttgtgtgacctgatagcttcccctg

SEQ ID NO: 1713 - DNA, 480 bp, Homo sapiens
  misc_feature 402: n = A,T,C or G
gcgtccgagcctctgggggtggatcctgaaaggtggtccagccgcctggccctgcgtgggaccctccacctggcagcagggtctcgctctgtcacacaggctggagtgcagtggtgtgatcttggctcatcgtaacctccacctcccgggttcaagtgattctcatgcctcagcctcccgagtagctgggattacaggtggtgacttccaagagtgactccgtcggaggaaaatgactccccagtcgctgctgcagacgacactgttcctgctgagtctgctcttcctggtccaaggtgcccacggcaggggccacagggaagactttcgcttctgcagccagcggaaccagacacacaggagcagcctccactacaaacccacaccagacctgcgcatctncatcgagaactccgaagaggccctcacagtccatgccccttttccctgcagcccaccctgcttcccgatccttccctg

SEQ ID NO: 1714 - DNA, 451 bp, Homo sapiens
gtcgccacgcgtccgcagaagattgacaaatctgagggccgcttccatgtccagaaccttagccaggtggagcaggatgggcggacggggcatggactccgcagatcttccaagttctgcttgaaggagcacaaagccctcaagacgttaggcatcatcatgggcactttcaccctctgctggctgcccttcttcatcgttaacattgtgcatgtgatccaggataacctcatccgtaaggaagtttacatcctcctaaattggataggctatgtcaattctggtttcaatccccttatctactgccggagcccagatttcaggattgccttccaggagcttctgtgcctgcgcaggtcttctttgaaggcctatggcaatggctactccagcaacggcaacacaggggagcagagtggatatcacgtggaacaggagaaagaaaataaac

SEQ ID NO: 1715 - DNA, 504 bp, Homo sapiens
  misc_feature 19, 32: n = A,T,C or G
cccccgtccgcttttgttnatctaaaggcttnagtcccatttttttatacgttgtattttaaaaacgtttgaaaggagtcttacacctgtatcatgaaaactgaatccttttgaaataccactatatgaagagagagatgaaatttagtgaacagaattggaaaaggtgctcataatttcactatgcaaacttaccccagtctctaaaaaagtaatttagatttaaagttctttgatgtatttgattttctaaatctttatggttatgatttggaataaaatgtgcctaatcctgtgttacattctgttcttaaatctgaatgccttctcatttaattctgaggaaatatcacacaagtgtcttcattgaccttgaagaaatgtatatacagttgccttataaaacaacataaatttagaccataacttttatagagaaagggttttgtcaaatgttttctgaaaatctgagtaattcaaagcatgcctctgccccctttaata

SEQ ID NO: 1716 - DNA, 474 bp, Homo sapiens
  misc_feature 1: n = A,T,C or G
ngtcgccacgcgtccggcgctctcggccgccgccgcctctgcgtgggccggccgggagggcctcgggggactgactgacagagtttcactcctgttacccaggctggaggacaatgatgtgatctcgggtcaccacaacctccgcctcccggattcaagcgattctcatgcctcagcctcccgagtagctcagattacaggcatgtgccaccacgcccggctaattttgtattttcagtcgagacggggtttccccatgttggtcaggctagtcttgaattcccgacctcaggtgatctgttcgcctcggcctcccaaagtgctgggattacaaggcgtgaaccactgcacccggcgaggcattttttactgtctacagaaacttattgtaattcatttttcctcactccaagtagtaagaattataccaaattgaaaagatatgaatgagtatcctaaaaaaagaaaaaggga

SEQ ID NO: 1717 - DNA, 460 bp, Homo sapiens
  misc_feature 8, 19, 413: n = A,T,C or G
ccgaggcnctgataagccntggtaacgggaaacacagctctaacctcacctcattctccaggttacaaaggccatgtgcccctttgaatctggcagagaaagtttcctcgttgtaagtatttgcatctacttcaagccagattcttctgcctctttctcctttccagacccctactctgtgcagtgctgaccacagctagagccaccgccccattgctcaaccagtatttatttccctaaacgacccttcctcatattcccttccctccacctctccttaccaagcacccaaaagaggatttagaactagcagggtggacatcattctggttgtttctacttttctctgcctagcacaaaattgggagaaaactggagcctccatccgcagtcacacgtgtacagatctgggngatttggatgtaggctttttctaacttctctctcagaagcttctaca

SEQ ID NO: 1718 - DNA, 471 bp, Homo sapiens
  misc_feature 148, 159, 183, 199, 235, 236, 242, 252, 357, 363, 369, 382,392, 417: n = A,T,C or G
cggacgcgtgggtgccgccgccgccgtcgctgtcgtagtcgccgccgccgctgccggagaaagagcacgagcggggaagccccagagtgaaatctagcatcctgccggctggtctgcccgcccctccttccttttccccccggccccngtcccctcccnccgcaggtgccatccgtcgccatncgcctctctaccctcncatccccaggtgaggggggtgagttcaggaagcggnnaccccnaggaacccancagggtcaccatttgcagcgcaacatggcaggagctggaggagggaatgatattcagtggcgtttttttcaggtgaaaggagcagtatgatgatgatgtagcagnaagcangatatnatttctacagtanaatttaatcntttctgggagaaattctagcaacangaagataaaaggtgggtagaggttgtcattctttcaacagggagcagggagaac

SEQ ID NO: 1719 - DNA, 617 bp, Homo sapiens
  misc_feature 68, 79, 94, 97, 128, 149, 151, 165, 168, 181, 186, 189, 193,197, 199, 207, 257, 261, 270, 272, 286, 287, 296, 298, 302,313, 318, 320, 350, 355, 356, 379, 382, 386, 390, 396, 402,407, 408, 410, 415, 420, 427, 434, 435, 443, 463: n = A,T,C or G
  misc_feature 471, 475, 482, 490, 493, 500, 501, 516, 524, 537, 547, 563,586, 591, 599, 610: n = A,T,C or G
tccggccggccagcgtcatcaccatcgtcaagtccaccccgggctcggggtctggccccgcccacggnccggaccccgnccacggcccggcacngcngctcctagtgcccgcccccgccatgcctcanccacgccccaccggccatagntnccctcccccaaagngcnctgaggcgcatgncttcntgngacncaangntcccattntctattgcaggcaacatggccattccccgaaactaaaaagcagttggggngggngaaagtacnangtggaaaacccagnnatcaccggnantggngggaaaacaanggccngnagggacacatttccaactttaagctgggcnagtgnntggggaaccaaaaaacctggggnggncccntcantggcanggcccntgagnncncagcncatgngcatttncaggggnngaaccagngggacaagggggacctcaanaaaaatgntggntggggangggcccantcnctgggcnngggggaagaacccgnattctacnagcaaaaggggangggggggacncagcaaaggcaatcangggaagaaggaagataagggtcnaccancgggaatnggcaaagaaangggggaa

SEQ ID NO: 1720 - DNA, 335 bp, Homo sapiens
  misc_feature 5, 44, 144, 150, 239, 292: n = A,T,C or G
ctgangctcgttttcgtgaaattaagcttcagagggaagcccgngaaacacaggagagcgagcgcaagcccccaccatacaagcacatcaaggtgaataagccttacgggaaagtccagatctacacagcggatatttcagaantccctnagtgcaactgcaagcccacagatgagaatccttgtggctttgattcggagtgtctgaacaggatgctgatgtttgagtgccacccgcangtgtgtcccgcgggcgagttctgccagaaccagtgcttcaccaagcgccagtncccagagaccaagatcatcaagacagatggcaaagggtggggc

SEQ ID NO: 1721 - DNA, 513 bp, Homo sapiens
  misc_feature 419, 427, 458, 461, 470, 488: n = A,T,C or G
catggcttctgcgagaaaagtgatttaggcagacggaggttttttctcaatcagaggctttcagtaactctgctgatgcacagagaagagacttcctcagcctgcaggctacaagagccaactgttagtgcaaaaaaggactttaatacaaatttcttattccagaaattttgttccaggtctggacaagctgagaaatttatcattgtttttcgagtttttaagatacccactttttctgagaggtatgggtgtgtgtgcaaggcacacacatacagtctttctgtacatgcatgcatatttatgcatgtacagggaagtatccagacaccaaatttttaataaaatgaattccccaaaggggagtcttgacctgaattaaggctgttgtttatagggaagccagatataattgatgntgaaaaanaaactaatttttatacttaatcaccggcagntancgggggcangggggaaaaagtacaganggggtgtattttttggtttttttct

SEQ ID NO: 1722 - DNA, 284 bp, Homo sapiens
tcgccacgcgtccgctcttaacacagagtctgcagcccctaactgacaccctgtccttcctcctaggaagtgctggactccctggtcagcaatgtcaacattgagctgctcaatgccctccgctaccatatggtgggcaggcgagtcctgactgatgagctgaaacacggcatgaccctcacctctatgtaccagaattccaacatccagatccaccactatcctaatgggattgtaactgtgaactgtgcccggctgctgaaagccgaccaccatgcaaccaa

SEQ ID NO: 1723 - DNA, 315 bp, Homo sapiens
  misc_feature 15: n = A,T,C or G
atccggttcgccccncgtccgggcggccgaggcggaggcagcggcggcgggatggcggacgccaacaaggccgaggtgcccggggccactggtggcgacagcccgcacctgcagcccgcagagccgccgggcgagccgcggcgagagccgcaccccgcggaggcggagaagcagcagccgcagcacagcagcagctccaatggcgttaaaatggagaatgatgaatcagcaaaagaagagaaatctgacttaaaggaaaaatctacaggaagtaagaaggccaatagatttcatccttattcaaaagacaagaat

SEQ ID NO: 1724 - DNA, 446 bp, Homo sapiens
  misc_feature 7: n = A,T,C or G
gtcgccncgcgtccgtgctttttttcgacatactggtttttctttctgtttttcttctctttcttctatttcttgtggatattatggctaataacacaacaagtttagggagtccatggccagaaaacttttgggaggaccttatcatgtccttcactgtatccatggcaatcgggctggtacttggaggatttatttgggctgtgttcatttgtctgtctcgaagaagaagagccagtgctcccatctcacagtggagttcaagcaggagatctaggtcttcttacacccacggcctcaacagaactggattttaccgccacagtggctgtgaacgtcgaagcaacctcagcctggccagtctcaccttccagcgacaagcttccctggaacaagcaaattcctttccaagaaaatcaagtttcagagcttctactttccatccc

SEQ ID NO: 1725 - DNA, 430 bp, Homo sapiens
  misc_feature 4: n = A,T,C or G
aatntgccagcctttattgagctttacaactaacaacctgatagttggcagttaattcacagttacagataatgcttttatttacataaatataccaagtagtaccctcttattgtattcacttcatctattttcttagaatacttgcaatttctaatgaccccttccctttccctcctgctgccctgtccaccctctttccccttctaacatccttagagggatgaaatctcagcatatgttgcaggacaccaaaaggaagaaaacaatcaagcaaataaaataaacagtcaaacaaaccaggagtttaaaacaacaaccccaacaacagaagccttggcaaagaggaatgagtgatcagcaagtgaacacactctatgtcaactctcctttttatccagctgagattttatggtaacctttaatttaa

SEQ ID NO: 1726 - DNA, 477 bp, Homo sapiens
  misc_feature 3: n = A,T,C or G
ccncgcgtccggagccgagagtgtgtggagcagttacagctggaagaccgggtcctctgcctccacagtagatggctgaatcctctatgcgggactggcaaatggcactgtggtcaccttcaacataaagaacaacaaacgacttgagatctttgaatgccatggccctcgggcagtcagctgtcttgctacagctcaggaaggtgcccgaaaactgctggtcgtggggtcttatgactgcacaattagtgtacgcgatgcccggaatggactgctcctcagaactctggagggccatagcaaaaccattctttgcatgaaggtggtgaatgatctcgtgttcagtggctccagtgatcagtcagtccatgctcacaacattcacactggtgagctcgtgcggatctataaaggtcacaatcatgcagtgactggtggtgaatatcctaggaaaagtgatggtgactgcttgcctgg

SEQ ID NO: 1727 - DNA, 429 bp, Homo sapiens
  misc_feature 2, 14: n = A,T,C or G
cncgcgtccggatnaatattttcatccctgaggttaacaattaccatcaaaatgttttgtggagactatgtgcaaggaaccatcttcccagctcccaatttcaatcccataatggatgcccaaatgctaggaggagcactccaaggatttgactgtgacaaagacatgctgatcaacattctgactcagcgctgcaatgcacaaaggatgatgattgcagaggcataccagagcatgtatggccgggacctgattggggatatgagggagcagctttcggatcacttcaaagatgtgatggctggcctcatgtacccaccaccactgtatgatgctcatgagctctggcatgccatgaagggagtaggcactgatgagaattgcctcattgaaatactagcttcaagaacaaatggagaaattttccag

SEQ ID NO: 1728 - DNA, 402 bp, Homo sapiens
tcgaccacgcgtccgatcctggatctggagagagagctctccaagcaaatcaacgtgtgcctctgagccagatgacggggtgggaccccggttagtaaggaccgggcgcccagtggctaaggcggtgccctggtgaccaaggagagccagacctgttgctcaggccgagctcctggttgccagcgagttaccacgggaccagtcgcgtgtatggctgagactcattcccagtttccagggcccggtatttggacactagttgccaagtctggggcctggggattttagggaccagcggttgtgaccatctttcctgagcaccaagggcttccccttttgttgccaaaaaggtagttctcgcgcttgctaggctggcctctcttgcctccccttggccggggc

SEQ ID NO: 1729 - DNA, 481 bp, Homo sapiens
tccgaaacacctgtcattttacacaaatgcgttttgaatgtctgaaagacagctcctgcccttaatttagatgtaaaccatttagtttcaaactaaccacctgataaaatctatcaacattttatcatgaactagagcagatgtctgttatttgatgtctatgttatttgagtttactgtttaataagtgaattcatatcaattaatcctgctaacaaatttgacacttaaggtgattctgaaaatcctttaaacttaaagtagatggaatcttaagtatggggccttttagtgtccgtaaagaaaaactgcatgcaacaaaatatagcaggtcctcacttgttgagattcatggaaattgtgactttaaatgaaatgacatggctgggcatggtggctcacacctgtaatcagcactttgggaggccacggcgggtggatcacgaggtcaggagttcaagaccagcctggccaacatggt

SEQ ID NO: 1730 - DNA, 435 bp, Homo sapiens
  misc_feature 4: n = A,T,C or G
ctgngagttaaattggtccagaaacagttatgaccctctttatactgccaagaaatacgcagtcccagccttggaagcacactgtgtagaatttctcaccaaacatcttagggcagataatgcctttatgttacttactcaggctcgattatttgatgaacctcagcttgctagtctttgtctagatacaatagacaaaagcacaatggatgcaataagtgcagaagggtttactgatattgatatagatacactctgtgcagttttagagagagacacactcagtattcgagaaagtcgactttttggagctgttgtacgctgggcagaagcagaatgtcagagacaacaattacctgtgacttttgggaataaacaaaaagttctaggaaaagcactttccttaatcccggttcccactgatgacaattgagg

SEQ ID NO: 1731 - DNA, 465 bp, Homo sapiens
accccgcgtccgagcagcctccagttgcccctacttagtggcttgccctctgcctgcctcagctgctgcctgaccggctgggggaggcactggcgggaggcctcgggctcccctggaagggcgctgggctggcgggtcagctggtggttcttaggtttccttctgtttgttaaaagggacaatgtggccacttctctgtggaaagggagttggttggggggttgagatggcccgtgttcataactcagtttcctgttttgcacgatgtaaaaaccctgtctttttgcacgatacagccaaaagtattggctgatttcttgctgagtgccctcttagttggtgtgtgaggtcttggtgggctcaggccagctgtttgcgagtgtgggaactcataggttctgtctttgtctcttcctttcacctcattctggtagcagcataaaggttaggcaatcactgggaccc

SEQ ID NO: 1732 - DNA, 462 bp, Homo sapiens
  misc_feature 243, 258, 305, 322, 339, 355, 357, 360, 369, 382, 387, 395,427, 430: n = A,T,C or G
gcaaatcatacattgcattccccaaagcatctgaacgtacttctagaaaacaaaccaaccaaaagggaaaatatgcatgctttttgtaattaactggtgctttgaaaatcttttttaagggagaaaaatctcaaccaaagttatgctcatccagacaagctgacctttgagttaatttcagcacaactcattcttcagtgcctcatgactgaaaacaaaaaacaaaaaaagaaagcatcttcncaatgaagcttccanatagcaccgttttgctaaaagatacattctcattgttttccaacagngatggcttccacataanggttaaacaaactgggngcttggaaataatttntnacnggttacttnttcgcattttttngaacnaaggaaangggattccctttttttaggggggaagaattgnggncaagtttaaaaaaaaaaaaaaaaaaaaaaaaa

SEQ ID NO: 1733 - DNA, 597 bp, Homo sapiens
  misc_feature 263, 270, 272, 276, 278, 280, 281, 282, 299, 301, 311, 313,314, 319, 320, 329, 330, 336, 337, 344, 348, 350, 351, 365,372, 378, 393, 398, 399, 403, 406, 407, 409, 411, 417, 419,422, 431, 442, 443, 444, 445, 455, 457, 459, 464, 485: n = A,T,C or G
  misc_feature 488, 490, 495, 496, 518, 520, 521, 526, 530, 531, 533, 540,547, 549, 553, 563, 564, 566, 567, 569, 570, 571, 572, 576,577, 578, 579, 583, 584, 585: n = A,T,C or G
cgcgtccgaatttaggaagaccccggcgacctgttcctcacccccgcttcgccctcacactttcgggatgtctgcgattcctgctgaggagagcgaccagctgctgatccgaccccttggagctgggcaagaagtaggaagatcatgtattattctcgagttcaaaggaagaaaaataatgctcgactgtgggatccaccctggcctagaaggaatggatgctcttccttatattgatttaattggacccaccttggaattgnacctccnantaantnannncattttcattttggaancntgggggggcntnnccccnnggtttttcnnaaaaannccccttnaaangnnaaaaaatttttttnttttttntcccanaaaaaattttttttnaaaanncccnctnntntnaggggntnttnaaaaaattncccaaaaaaannnncccccctttntntnttttnaaaaaaaaaaaaaaaaaaaanatngnccccnnaatttttttttttatatttttnannaaaanaaanntnttttttnaaaaaantntatnttttttttcnntnnannnngtgnnnncccnnntttttttttttt

SEQ ID NO: 1734 - DNA, 541 bp, Homo sapiens
  misc_feature 318, 321, 336, 339, 366, 371, 378, 379, 380, 382, 384, 389,390, 391, 396, 428, 433, 434, 446, 447, 449, 455, 472, 481,482, 486, 487, 492, 493, 494, 500, 518: n = A,T,C or G
ccacgcgtccgctcccgccaggcgctttctcggacgccttgcccagcgggccgcccgaccccctgcaccatggaccccgctcgccccctggggctgtcgattctgctgcttttcctgacggaggctgcactgggcgatgctgctcaggagccaacaggaaataacgcggagatctgtctcctgcccctagactacggaccctgccgggccctacttctccgttactactacgacaggtacacgcagagctgccgccagttcctgtacgggggctgcgagggcaacgccaacaatttttacaccttgggaaggtttgcnacnattctttgtttggangantaaaaaaaggttcccaaaattttcccnctttnaaaagannntngngaccnnncactngggggggggccccaaaaaaaaatttttttttnttaanncccccccggggnngnaaaaanttttttttggggggggnccccccccnngggnnaaaannnttttanaaaaaatttttttttttntttttccccaaaaaaaaattttt

SEQ ID NO: 1735 - DNA, 234 bp, Homo sapiens
gcgtccgaaaatacaatacacggactctttcgaggccctgtaattggaatgagtccactttaaatcctttaacgaggatccattggagggcacttccagaatacctcctcccccagcgcccgctgccagccccacaccaggtgtgagaaccaaggtctggtggaggcagctccaggcactgcccagtccgacacaacctgcaaaaatccattagagccactgcccccagagatg

SEQ ID NO: 1736 - DNA, 189 bp, Homo sapiens
  misc_feature 121, 138, 143: n = A,T,C or G
cgaacctcctggttccaagtgggagacatggtgctgtcggagctagcggcgcgcctcaactgcgccgagtacaagaactgggtgaaggcgggccactgcctgctactgcttgcgcagctgnctgcagggtttcgtcgnccgcnaggtgctctcctttccacccgcggcctactcgccgcagcccccggc

SEQ ID NO: 1737 - DNA, 266 bp, Homo sapiens
  misc_feature 61, 67, 85, 94, 123, 124, 135, 138, 142, 143, 151, 181, 208,230, 232, 238, 243, 258: n = A,T,C or G
atccttttgcctaaagatgtaaacaaaactcaagacagaaggaatcagggaatatgtgctnttgtgngcatcttgtttacatttngggatcaantgatggcaaaagaagtaatgagaccactnnaaattgttttncanttgnntttaaaanaccagggttcctcattttctttgattttgnaagttttaacaattgaccttcttaagngacattctctttcaaaaaaganangtaaancaggngaaatgaagggtggntggggaaa

SEQ ID NO: 1738 - DNA, 242 bp, Homo sapiens
ccggctcattccctgaggccggcccgcgtcccgtcagggcgccgcgcggggttagcgcggggtcagcggaggtcagcgggggtcagcagcagcggctccgagggcgcggcggacgcaggatgtacacgctgctgtcgggcttgtacaagtacatgtttcagaaggacgagtactgcatcctgatcctgggcctggacaatgctgggaagacgaccttcctggagcagtcgaaaacccgattt

SEQ ID NO: 1739 - DNA, 346 bp, Homo sapiens
  misc_feature 6, 135, 138, 144, 147, 153, 156, 160, 163, 176, 187, 238,263, 273, 289, 309, 320, 328, 329: n = A,T,C or G
gtccgnccacgcgtccgatttcttgtgtgctttgaaaaaagtttcagcttgctgtctcttttagtgttttaaagaagtgttatacaaagcattgtttgcaaaatatagggaggataatgggagtcccactttaanttngggaantcnttgggngancttnttnatccaaggtttantcaagccttcnttttccaacttttaaaaaattttttgttaaaaaagccaccctttgctttangaaaaaatttttaaaaatattttantgttcttgcnaccaaatttgttcttnaaaaaataataaaaacttgntggcaaattcntttggtcnntttaaaaaaaaaaaaaa

SEQ ID NO: 1740 - DNA, 426 bp, Homo sapiens
acgcgtccgcagccatcttgggatctgggcaagtgagcgagctccttcctcaccgggctgactagcctctcctttccctgtccccctccatcgctgctctgcaggaagccagcccccagggccagtcccggaggggctgatccgcatctacagcatgaggttctgcccctattctcacaggacccgcctcgtcctcaaggccaaagacatcagacatgaagtggtcaacattaacctgagaaacaagcctgaatggtactatacaaagcacccttttggccacattcctgtcctggagaccagccaatgtcaactgatctatgaatctgttattgcttgtgagtacctggatgatgcttatccaggaaggaagctgtttccatatgacccttatgaacgagctcgccaaaagatgttattggagct

SEQ ID NO: 1741 - DNA, 377 bp, Homo sapiens
  misc_feature 3, 16, 26, 41, 50, 57, 64, 117, 141, 145, 148, 149, 155,164, 165, 192, 218, 233, 281, 283, 288, 290, 309: n = A,T,C or G
cancgccccggcccgntcaagcagcntaataaagctcatanaggcggacnggcatcngggtctngggatctgcacagcgggactggcatagggccgtctggcactgaaaaccctaancaagaaggtgtgaaaagaaacttnagcnganncgaccngaggcatcnncgccagccagctccgaaagcagaaganggaggcggttctggcatgagaaaganacagctgggctggcnaggataggcccctccttcatcaaggtactggtggtgcccctgcacagnanaattntncctgccagaggccatgcancctgcttcaagatagggacactggaacagatacacttgaatgaattggggaaacaccccagaactttt

SEQ ID NO: 1742 - DNA, 521 bp, Homo sapiens
  misc_feature 17, 102: n = A,T,C or G
cacgcgtccgttttttncaagggtctattgtttcgattagtttccttgcaggaggtagaaggtttcctccatcccgagtaattcatagagtgtttggcttgnctaccttcctcctgactgaagtcacctgatactttttgttttttcaagaaggaagagagaaccctgttgcctcagttactagcaatgatacaattctcaaaatctggtctttttttgtttctttgaaatagtttctccatgttgtgtgacacagcagcccctgtcttatcatagttgtcttccctccaccacctgtaccagagatgttggatatgttggaggtgaaggtgtgcaaggtttttaactaactgttctaattaaaggattctgcaggaaagaacatgggtttacaaaagagaagcttttgtattattagtaattttttttctttgatgaatttatgtgcttagtttggagaatcgagagttggctgggaaaagatttctgaggagttaagggactctggtgctgtttgggaa

SEQ ID NO: 1743 - DNA, 240 bp, Homo sapiens
  misc_feature 18: n = A,T,C or G
gtgattagaagtaagcgntgatgaggctgaagaaaaggaagacaaaactgagtacttggaggaacgaagagtaatgggatatccaataaactgagaatgtttcttcacaatctcctttattcttcgttcctccaagtactcagtttggtcttctttcaggtgtaggaacgtgataaagaagtaagcgatgatgaggctgaagaaaaggaagacaaagaagaagaaaaaaaaaaaaaaagg

SEQ ID NO: 1744 - DNA, 453 bp, Homo sapiens
  misc_feature 63, 67, 154, 321, 381, 394, 416, 437, 441, 443: n = A,T,C or G
cgatttctttgttggacaacccagctggggctaggaatggttcagaaggtttaaggccggaangggnaatgaaggggcccggcgctaaccctctagggacctgttttgcttctgtttaaaccaaatgggcagtctgtcattacacacaccctgngtcttcatatgtggctcgccagtataatggaatgtgcttacaagggccagcaggagtgcctggtcgagacgggagccctggggccaatggcattccgggtacacctgggatcccaggtcgggatggattcaaaggagaaaagggggaatgtctgagggaaagctttnaggagtcctggacacccaactacaagcagtgttcatggagttcattgaattatggcatanatcttgggaaaantgcggagtgtacatttacaaanatgcttttcaaatagttgctntaananttttgttcag

SEQ ID NO: 1745 - DNA, 533 bp, Homo sapiens
ggacgcgtgggtggaaatgtaaacaagaatagactgttcattcctgatggcttttagtctatactaacatattgtttgtcatggcatccgagactgaaaagacccatgctttactgcagacttgtagcactgaatctcttatttccagccttgggtctgggggcattttgcctcgtagctgacagacttcttcagttttccacaattcagcaaaatgactggcttcgtgctctctcagataatgcagtacattgtgtaattggcatgtggtcatgggcggtagtcactggaatcaagaagaagactgactttggagaaatcattttagctggatttttagcctctgttattgatgtagaccacttttttctagctggatccatgtctttaaaggctgctttgactctcccgcgaagacctttccttcactgttctactgtgattcccgttgtggttctgaccctgaaatttactatgcaccttttcaagctcaaagactcatggtgctttcttctgggatggtatttatatcc

SEQ ID NO: 1746 - DNA, 536 bp, Homo sapiens
  misc_feature 10: n = A,T,C or G
gtgaacaggntattgactatggtaaacttattttattgaagttttcaaccggaaaatagtaagtggaatatgatacaactgttattttcagaacatatttctttagggctatttaaaataacctttttaaagggcaaaaactttcaatttgagagaacaaattcctctcctctgtgggaaatattggctgagattttgtatagaataagagacatgtatgtaacatatatttatattcagcataagtctactgcaatcatgtacacatcttagcaagacgagaggattttgtttagtctttgtttatgacttctacagtttcctgtatctagtgttaagttgtaaggaaaaactaaacatgcaatttaaaggtaaacttgataactatttatggaacataagcatacaccaatggttatttctcacagttttcatgcgcatttgtttattgtttacttggattaggctcattaaaaaccataatgctggtcacaattagaatgctaatatttggggaagctatgcagaaaatattt

SEQ ID NO: 1747 - DNA, 478 bp, Homo sapiens
  misc_feature 2, 469: n = A,T,C or G
cntgtgtgccatgtatacctaacgggagtcccagaagacaggagagaaaaaaagaaagaaataaaaagaatatttgaatttaaaattgcttgaaaatgtctcaaatttgatgaaaaatattactctgcacattcaacccatgaactataagttgtataaaatcaaaaagtttcacaccaaggcgtgtcatagccaaactgtcaaaagccaaagacacagaatcttgaaagcagtgagagcaaagcagacaagggatccccaataggattaacagcagatttctcatcagaagccatgcaagccagaaggctatgggagacatactcaaaatgctgaaataaaagactgtcaacaaacatttccacatccagcaaaaatcaaaaacgaaggagaaatctgttgcatgtgagctgaatagaatttgtattctgctgttgttggattgaagtattctttaaatgtcaattanatcaatttg

SEQ ID NO: 1748 - DNA, 515 bp, Homo sapiens
cgatggcaatacatgtactcagatagttacatccctatataaaaagtatgtttacatttaaaaaattagtagataacttcctttctttcaagtgcacaatttcattttgacttgagtcaacttttgttttggaacaaattaagtaagggagctgcccaatcctgtctgatatttcttgaggctgccctctatcattttatctttcccatgggcagagatgttgtaagtgggattcttaatatcaccattcttgggactggtatacataaggcagccgtgaaactggaaagtcattttgatgactgatgtgatacatccagaggtaaaatgcatttaaacatattaaagtatttgccaaagatacaattttcttgctgacataaaaatcacacaaacaagtcccccccaaaccacaactgtctctcaaatagcttaaaaaaattgaaaaacattttaggattttcaagttttctagattttaaaaagatgttcaagctattagagggaatggtaaa

SEQ ID NO: 1749 - DNA, 493 bp, Homo sapiens
  misc_feature 5: n = A,T,C or G
gcccntcccgaccctccagctcatggtgtctggggcctgcggctagactcttggaacattctggaactctctcctttcctggctggggctctgaccacaaactcccctccaggctgcccctgggacatggtggtgatgtgggtgcaggagccagtgtctgttgtcgggactcgcaagtgccctcatcacagccacccccaccacgagtgtctccccagtgcagactcaagttatgcttgaaatgaaaaagtctatctggtagtgggtaaacgtagacctggcactgttccacgcgggcgccccaagcctgccactcctgtgtccctgcctccctgggctcccgagataggcaccactgtatcctccagctccttccttccttcccccaggaacacggaggccaccgagggggctgggcctatcaggaggacacaggctgcagcctggcacccacccctccatcttcaccccacatggaagacttgtcttcaac

SEQ ID NO: 1750 - DNA, 452 bp, Homo sapiens
  misc_feature 212: n = A,T,C or G
gcgtccggattctaaaaaaaaaaaaaaaaaaaaaaaaaaattaattggggtgcctttttgttatagtttctattttctgttttgtaggacaagctgcattttctgtaaatataggtctggactaaaggatacataaagaatgcacaaaatgtcaacatcagcagagatgcccagatctatttatctctaagtatatttgaagtgattgctgnttatatgttgtcattttaaaattgtgtgtcagtaaagctacctgtaaaatttcagtccaaaaaaaataaagctctcagggagacatgaataaaatcaatgaacattagaaaataaaatatagatgcttaccattaacctaccaactcttaatatccttaaattatgtgatatataaagaggactgttacttttttactttctttttttttttttttggctttgctttatttatttggagt

SEQ ID NO: 1751 - DNA, 481 bp, Homo sapiens
gggcatgctcataggcacagctgttggtcagtatgccaataacatcacactttggatctttgcagtcactgcaggcatgttcctctatgtagccttggtggatatgcttccagaaatgttgcatggtgatggtgacaatgaagaacatggcttttgtcctgtggggcaattcatccttcagaatttaggattgctctttggatttgccattatgctggtgattgccctctatgaagataaaattgtgtttgacatccagttttgacctttcccagtaatcactgttgattacgagaatgttaccatgcagctttgcatctgttccttgtactgtatgcacattgctcaaaggaaagtcagtggcttgcactacttacaagtttcatagatttgagcctaaccacaagaggctggtgcttagtactgttttccctgcacgtaggggtcttttaaaaatataaagcttgtgataaagagagga

SEQ ID NO: 1752 - DNA, 478 bp, Homo sapiens
ctggttcagcagccgcccacccacctctgagtctgacctggaacctgccacagatgggccagcctccgagaccactaccctcagcccagaggccaccacctttaatgacaccagaatccctgatgcagctggtggcacggccggcgtgggtaccatgcttctgtcctttgggatcatcacggtgataggcctggctgtggccttggttttgtacatcaggaagaagaagaggctggagaagctacgccaccagctcatgcccatgtacaacttcgaccccacggaggaacaagatgagttggagcaggagctgctggagcatgggcgggacgccgcctctgtacaggctgctacttctgtgcaggccatgcagggcaagactactctgccctcccagggcccactccagagacccagccggcttggtgtttacccgatgtggccaatgccatccatgtgtgagtggcctgggacaagc

SEQ ID NO: 1753 - DNA, 464 bp, Homo sapiens
gtcgccccgcgtccggtgctctcatgtcatctcagagttccagcttatcagaggcatgtagcagggaggcttattccagccataactgggctctacctccagcctccagaagtaatccccaacctgcatatccttgggcaacccgaagaatgaaagaagaagctataaaaccccctttgaaagctttcatgaagcagaggaggatgggtctgaacgactttattcagaagattgccaataactcctatgcatgcaaacaccctgaagttcagtccatcttgaagatctcccaacctcaggagcctgagcttatgaatgccaacccttctcctccaccaagtccttctcagcaaatcaaccttggcccgtcgtccaatcctcatgctaaaccatctgactttcacttcttgaaagtgatcggaaagggcagttttggaaaggttcttctagcaagacacaaggca

SEQ ID NO: 1754 - DNA, 516 bp, Homo sapiens
  misc_feature 322, 324, 337, 381, 385, 412, 427, 432, 437, 447, 448, 451,470, 481: n = A,T,C or G
tcgccccgcgtccggactgatcataaaccatgctggtattgcaccttctggaactatgggcttgagaaaacccccaggatcacttctccttggcttccttattttcttgaggcaggtcgcacgttctacctgcccaagacgtgtgatatcagcttctcagatccagacgacctcctcaacttcaagctggtcatcttgtcctgatgagggcttctacaagagtgggaagtttgtgttcagttttaaggtgggccagggttacccgcatgatccccccaaggtgaagtgtgagacaatggtctatcaccccaacattgacctngngggcaaccgtctngcctcaacatccttcaggagaggactggaaagccagtccttacnatanactccataaattttattgggccttgcnggtattctttttttntttgngagcnccaaaccccnnganggacccccacttggaaccnaagggagggcncgcaagaagggttccttggcaagaaacaaacccgg

SEQ ID NO: 1755 - DNA, 460 bp, Homo sapiens
  misc_feature 56, 83, 102, 111, 115, 144, 147, 152, 202, 222, 225, 232,256, 258, 376, 378, 386, 393, 397, 407: n = A,T,C or G
tccggcccgcccacccgccgccagctaccatggatgatgatatcgccgcgctcgtntgtcgacaacggctccggcatgtgcanggccggctacgcgggcgangatgccccncggnccgttttccctcatcgtggggcgccccangcnccagntgcgtgatggtgggcatgggtcagaaggatttctatgtgggcgacgaggnccagagcaatgagaggcatnctnaccctgnattaccccatcagagcacggcatntntcaccaactgggaccgacattggagaaaatctggcaccacacctttctacaatgagctgcgtgtggctcccgaggagcaccccgtgctgcttgaccgaggcccccctgaacccccaangncaacccgncgagaangatnaccccagatncatgttttgaggacccttttcaacacccccaagcccatggttaccgtttgcct

SEQ ID NO: 1756 - DNA, 476 bp, Homo sapiens
  misc_feature 4, 5, 43, 49, 60, 179, 306, 347, 385, 395, 455: n = A,T,C or G
gcgnnggggccggggctggggtcggggccaggggtcggccggnggcggnggacgggcgtncggtgcctgggctctctccgctccctgaggcgccgctggggagtcgaaccctgatgatgggacctgtgaattcagcggggtgccaagtcgttttctgtgtgggttgagagacaggctgngcagcccactgttgcataggactaactactacaaatcatgctgagaccgagctatttttgctgcttagaggctttgcagccttgagaggaattttgttgtcaggagaataaaaggaggttgtccatnattgactttaagcagcaatcaagtaaaacattgagctcttnagctccgcctttcttgctctgaaaattggaaaaccaanaaggttttgntgttattgtgtgaccccacctgaattataaaccaagatgaacataaccaaaggtggtctnggtgttgtttttcagcaaaac

SEQ ID NO: 1757 - DNA, 468 bp, Homo sapiens
  misc_feature 11, 18, 74, 75, 93, 136, 145, 235, 293, 321, 334, 339, 386,408, 413, 436, 453, 455, 463: n = A,T,C or G
ggatctaccangtgtctngagcagcaggagagagccttcacgctggggctagcaggacttctcggcgagggagnntttaactttggagaactnctcatgcaccctgtgctggagttcctgaggaatactgaccggnagtggctgnttgacaccctctatgccttcaacagtggcaacgttgaggctggttccagactctgaagactgcctggggccagcagcctgattttagcanctaatgaaagcccagccttcttgaggaaacatttcagtttgtttgttgcctcattggnagatgacttttcacaccgaccctggccnattcacaagacanacttnacttttttgaaggaaaaattgccaaaaaagttggcctaaaaaaatcnacaggttgaaatggaagggtgngaagncttttctggggtggattggaaangggcaccctttttcggntnggggggcntgggt

SEQ ID NO: 1758 - DNA, 425 bp, Homo sapiens
  misc_feature 201, 322: n = A,T,C or G
gagccggctggctcgagtggccttcgtcgtcccttggcgccctgggagagtcgctgacgggtggactgacggaccgcctgaggacggccggccagggcggtgaaagcgccagccctatggcgcgggtcgcagtgaggcggaaggccgaggacggccggcggcggcgcccgccccggcgatgcgggccccgcccgtcgcctnaggtgccatttggattgtactttagtggcaccgatgtactctgagtggaggtcactgcatttggtgattcagaatgatcaaggccataccagtgtgctgcacagctatccaaagagcgttngacgagaggtggcaaatgctgtaagtccggcctcttgggcaggtgttaagtaccccttcagtggctggtagtgagaatttgttaaaaactgacaaaagaagta

SEQ ID NO: 1759 - DNA, 490 bp, Homo sapiens
gtcgaccacgcgtccggtctcggcgcccgctgccctctcaccgccccacgcaggatcccggcctggtcaccgggcagtgtgatgcttcccgactgccgcggggacagcgaggcacacacagggcttgggccgcgccggaggccacacggcctggctgagttgctcctggtctcccgcctctcccaggcgacccggaggtagcatttcccaggaggcacgggcccccccagggggatgggcacagccacgccagatggacgagaagaccaagaaagcagaggaaatggccctgagcctcacccgagcagtggcgggcggggatgaacaggtggcaatgaagtgtgccatctggctggcagagcaacgggtgcccctgagtgtgcaactgaagccttgaggtctccccaacgcaggacatcagattcctcatggtgcaaaatggccattccaagcttccatccagccatcacatcacaggaggaagggaaga

SEQ ID NO: 1760 - DNA, 511 bp, Homo sapiens
  misc_feature 426, 438: n = A,T,C or G
ccgatgtctacaagctcgtcaaagactagggtgccctctgcgcctccttaaggatgcagggtgagcatctcctctccacacctgcctggcacccctgggggggtccaggattgaggattcatctacctgccaggcctcaggcccaggacccaggaggcctccccacctaccccagcacacacactccctgccactgttctgcgctttaattgtgggagaagagaggagaggagggctcagcggtggggcagcctgtccggggcgctgacccaccatcaccctgctctgcccagcctcgcgtgacctcagagaggtggggataggggacaccttcagcctccagcatgtgtggccacttgtacccccacccacccttgggggagcatgatgggcaggttgaggggcaggatggagaccaaggggaantcagtgagcagnaggccctggggaagtgtccggtcggggttggacttgagggacagaggggcccaacactttcttgccccttttg

SEQ ID NO: 1761 - DNA, 403 bp, Homo sapiens
  misc_feature 35, 48, 93, 128, 205, 244, 326, 338, 346, 353, 391: n = A,T,C or G
ccgccaggcccaccatcaccaccgcctctggccgncacccccatcttncacctgtgccctcaccaccacactacacagcacaccagccgctgnagggctcccatgggctgagtggggaagcagctttnccctggcctcagttcccaagctaactgccacgtccacccacgcatacacacatgccctcctggacaaggctaacatnccacttagccagcaccctgcacctgctgacgtccccacntcccttggttggtggggacattgcttctctggggctttttggaattggggggcgcccttctctgctcctttcactggttagnctctggctaccnataagcangaggccntgggaaggggtttctcccctgggcccttaaaaaaaggngggccccaaagc

SEQ ID NO: 1762 - DNA, 364 bp, Homo sapiens
  misc_feature 151: n = A,T,C or G
agtcgaccccgcgtccggcaagcgggaccggtaggggccggagcatgcggcggcggcgctcggactgtcccatccgccccgtattgaggcgctgggagcggcggggcgacaggaaagcgatggtgaaagcggggccgtgaggggggcaggngccgggagccggacccgcagtagcggcagcagcggcgccgcctcccagagttcagacccaggaagcggccgggagggcaggagcgaatcgggccgccgccgccatggagctgagagtcgggaacaggtaccggctgggccggaagatcggcagcggctccttcggagacatctatctcggtaccggacattgctgcaggagaagaggttgcca

SEQ ID NO: 1763 - DNA, 502 bp, Homo sapiens
  misc_feature 445, 484: n = A,T,C or G
cgcgtccggggtgatttgagctcatcttgttgagcaaggggagtgaaaccacagaaactgttaaattgaacgtaaataactttggaaaacagttttgacactagaacaaggtcgcttctcttttcctcttctctcccaacctgttaacctagtgctagatagtcagctgctgttgcaggtagaaaagctcaccaatgccacatttgttcattctgttcaacctgttttgacctcccaggcatctgaacaggatgacatcatcttattatatcttactttacacatacgtgtatgtacacacacacacacaatacaagacatttttcctgttttagaaaatatagcccttgtttggattactgctgtctgagcactagaaatttctaatggaaagaggcctctgaatggctaagggaacatctggaaaggaaggaaaatgagcctnaaggtttttggtgcttggtttttggttctttttctttcntggttccttttttggttt

SEQ ID NO: 1764 - DNA, 513 bp, Homo sapiens
agtcgaccccgcgtccgcggacgcgtgggcggacgcgtgggggccctccgggaagatggcggccgtgcaggcggccgaggtgaaagtggatggcagcgagccgaaactgagcaagaagtggtggtaatcattagttccagggtgctctgccatgttgacgcaagctgctgtaaggcttgttagggggtccctgcgcaaaacctcctgggcagagtggggtcacagggaactgcgactgggtcaacttgctcctttcacagcgcctcacaaggacaagtcattttctgatcaaagaagtgagctgaagagacgcctgaaagctgagaagaaagtagcagagaaggaggccaaacagaaagagctcagtgagaaacagctaagccaagccactgctgctgccaccaaccacaccactgataatggtgtgggtcctgaggaagagagccgtggacccaaatcaatactacaaaatcccgcagtcaagcaattcatcagctgaaggtcaatggggaa

SEQ ID NO: 1765 - DNA, 361 bp, Homo sapiens
tcaccccgcgtccgacttgaatcccgtcagcttaaaacttgtgtaagggaatcctgacttttaaaatgtgagggtatttggatctgtgttgaaagtcgtatatttttatctgtgcggtgctgagtgcaggccaccagctcctaaatagaggttccctatatgcgcgtatgacatggtgaataaacacaactctctccactcaggacatccggagcgttatggaccgtggtaggtggtcgttctgtgtgcttgtgaaagtgtccaggcgtgtgcacagccagtgcgcccacttccgggctccttgctccctgctgtactgaagttttggattttgcatccaatcctgtgtgcctgcccttct

SEQ ID NO: 1766 - DNA, 449 bp, Homo sapiens
gtcgaccacgcgtccggctcccgagcctggagagctcggactgcgagtccctggacagcagcaacagtggcttcgggccggaggaagacacggcttacctggatggggtgtcgttgcccgacttcgagctgctcagtgaccctgaggatgaacacttgtgtgccaacctgatgcagctgctgcaggagagcctggcccaggcgcggctgggctctcgacgccctgcgcgcctgctgatgcctagccagttggtaagccaggtgggcaaagaactactgcgcctggcctacagcgagccgtgcggcctgcggggggcgctgctggacgtctgcgtggagcagggcaagagctgccacagcgtgggccagctggcactcgaccccagcctggttgcccaccttccagctgaccctcgtgctgcgcctggactcacgactctggcccaagat

SEQ ID NO: 1767 - DNA, 481 bp, Homo sapiens
  misc_feature 102: n = A,T,C or G
ccggaagagtgctttattgtgaaattatttaaaactgtcctttaaaagaaaaagaggaaacgatgaacaaaaactaatctaattgccaagttagaattcatnatttaatttacctcctatgcaatgattaatgctgcaaaatgtatggttatgttaccgtatattcacaaaagaaatattattacaaggtttcagaggtagccaattgcattcttttggaaatttactgtactgtttcaatgtgttaagtgccttgttgtaaagtaaaattttaagtctagattcattattttcctgacatatatttttcattatgatatctactgtatgctattgtgatagttttatgaaatgcttacattttaatcaaatatgtaaatttcagaagctcttttttcctacccaccagtaccttaatcatttggtttatcacattggattcaaattcaggttccttttttgataaagaggaaatttgttt

SEQ ID NO: 1768 - DNA, 562 bp, Homo sapiens
  misc_feature 101, 220, 276, 290, 295, 296, 320, 324, 334, 339, 341, 344,353, 358, 372, 384, 442, 461, 503, 529: n = A,T,C or G
ccggtgggatagtaaaagagaagacgcggagaagaggagaggacctacaagaacggaggacaggggcgcacgatggtcccggggggagcggaaacaaaggnacgcaaaacggaaaagcgtgtgtaggggagcggaaaaggaaggtcaccacctgtggcctgcgaccgaaatggcgaaaagtcttttgaagacagcctctctgtctggaaggacaaaaatntgctacatcaaacaggattggtcacttttatagtacatcccatggtatgtttatgnagggaaggaagtgnaaaannaacaccttcagcagttttcctggntggnattccattgnacctntnagnaagggaagnacaantggggcatttgggncatttctttacntcttgaaccaattcccaagttaggaatggaaatgcccttttttcaggttgttaattgnatgctacaaacttcttggnaaaaaagttaatttggaatttgggaaaaaatttgggaacaanaggggggaaaaaggcctccatttgtncccggtggggggccaaaaaaataccttttcttc

SEQ ID NO: 1769 - DNA, 130 bp, Homo sapiens
gcgtccgcggacgcgtgggcggacgcgtgggcggacgcgtgggcggacgcgtgggatttgtgtacaaattgaaatgtctgtactgatcctcaaccaataaaatctcagttatgaaaaaaaaaaaaaaagg

SEQ ID NO: 1770 - DNA, 460 bp, Homo sapiens
gtcgcccctcagccgcttcccctcgccatggaggcgaggccgccgccgccgccgcggggctcggagccgcgggccgggcggcggccctgagggctagtggcggcccgaaacgccgccgcggagccgaggcggagccgctgtcctcgtccccagcggtcccgcccaacgcccgactctgtgacacaactaaaaaaaaacaaaggtatttatggaattccactgagtggtaatggatgatgcagttcaaataactaagataagcatggattcctggttcattcttgttctgctcggcagtggtctgatatgtgtcagtgccaacaatgctaccacagttgcaccttctgtaggaattacaagattaattaactcatcaacggcagaaccagttaaagaagaggccaaaacttcaaatccaacttcttcactaacttctctttctgtggcaccaacattcagc

SEQ ID NO: 1771 - DNA, 474 bp, Homo sapiens
  misc_feature 232, 332: n = A,T,C or G
gcgtccgggccacatggccgccgccgccgcttggagctgaagtgccgccgccgccgggcagccacggggaatccgcccgcatcgccgccctcgccggccgggcggccgtggggcccagagcgccggaggccagggctggggcggcaccgcgcagcggccacggggtcccgttagagcagcgcccggcggctatgccgagagcccggagcggccggaggagcagaggggccgncgggagggaggaaacctttctgcgagtacgagccaaccggcagacccgactgaatgctcggattgggaaaatgaaacggaggaagcaagatgaagggcanagggaaggctcctgcatggctgaggatgatgctgtggacatcgagcatgagaacaacaaccgctttgaggagtatgagtggtgtggacagaagcggatacgggccaccactctcctggaaggtggcttccgaggctctggct

SEQ ID NO: 1772 - DNA, 505 bp, Homo sapiens
  misc_feature 2, 22, 49, 57, 107, 115, 153, 165, 168, 170, 172, 234, 245,255, 268, 288, 296, 315, 358, 364, 365, 378, 380, 426, 435,459, 472, 477, 496: n = A,T,C or G
tngatgtgtatatggactgttntgaagggtttttttctttatagcccanttaagttntgtttggctcggtgcatttttcatttatttaattagtaatttaagtaacngtgtttgngtaaaatcattgtgaagtttcaagattcattatgggangagttgatggtncantnangcatgatggtttaacaaattttaacaccaaaaatgttaaatcctgcataaattcaactgtanataataaatanggtgttttcntgtatatgatagnaatgcaattagaagtacctntagtaaantcttttggaatcaccaatncttttttggcttgaaaattgggaaagaatttctgtttataatncctttnnaattaaaccttgngnggggggagggggaaaataaaaaattgcaggaaaaacctgcatgagncaccttaanaacctttaaaagtaagggggcttnccaatctttttantcccnggaaaaccctggttgcctntttttggca

SEQ ID NO: 1773 - DNA, 450 bp, Homo sapiens
cgtccgtttaaaggctctgactcttgatcttgaaagccggacgcggcactggcactcggcttcagtttccactgtgacagatggaggtctcctttcgccccagcccaggtggccaagcccatcctggcctcagaacatgctgagcacattttgtagggtggcacctttttatccaagttactagctacacatcagtgtttaaagagaaaaaagtgacctttcatttttttttttcttgaaacttgaggaaacaagatacatactactgattttttttttttcttaaaactaaatgcatgactgcagagcggtagaggtgtatatttttcatactgtggggcaaagtatttgtgctgctttttggagatggactggaacgtctggtttctgtccccgggcccggcagctaccgtctattttctgtagaaggtgccacagtgagacctggag

SEQ ID NO: 1774 - DNA, 299 bp, Homo sapiens
ccccgcgtccgcttccggttgctaacggttcccaaacagcccccgaaaacgctacgtgagctgggccctgggccagaggcagaaaacggacggaagaaaaggtctggccggagatgggtctcactctgtcacccagactggagtgcagtgagtggtgcgatcatagcttactgcagcctgaaactcctgggctcaagtgatcttctcgcctcagcctcctgagtagctggagctacaggtgtgagctacccagcatggctcatttgagatttctgagtagagaagtaacatgattaaac

SEQ ID NO: 1775 - DNA, 618 bp, Homo sapiens
  misc_feature 574: n = A,T,C or G
ggaacctcccctagatttcagaagatgtatggaaacgcctagatgccctggcagaagtttgctgcaggggcggggctctcatgaagaacctctgctaaggcagtgtggaagggaaatgtggggttggagcccccaaacagagtccttagtggggtgctgcctagtggagctgtgagaagagggccatcatcctccagaccccagaatggtagatccactgacagcttgaactgtgcacctggaagagccgcagacactcaatgccagcccgtgaaagcagccagaagggaggctgtaccctgcaaaaccacaggggcagagctgcccaagactgtgggaacccacctcatgcttcagtgtaacctggatgtgagacctggagtcaaaggagatcattctggagctttaaagtttgactgccatgcaggatttcggacttgcatgggccctgtaacccctttgttttggccaatttctcccgtttggaacggctgtaattacccaatacgtgtatccccatcgtatctaggaagtaactagcttgcttttgtttttacagactcataggtggaanggacttgccttgtctcaaatgagacttttggactgtggactttt

SEQ ID NO: 1776 - DNA, 513 bp, Homo sapiens
  misc_feature 33, 77, 103: n = A,T,C or G
gcgtccggaactttataagaatttatgccgttntacatgaaccgttaagttttgtacttgacgtttctgtttattangctaaattgttcctcaggtgtgtgtntatatatatacatatatatatatatatatatatgtatatatatacacatatatacgtatatatacatatatatgtatatggagtctcgctctgttgcccaggctggagtgcagtggcacgatcccagctcactgcaacctccgcctcccgggttcgggcgattcttctgcctcagcctccctggtagctggggctgcagccatgtgccaccaagcccagctaatttgtatttttggtgggagacagggtttcaccatgttggtgaggctggtctggaactgacctcaagtgatctgcccacctcggcctcccaaggtgttgggattaacaggtgtgaagccaccacgcctgtcccagtatattgtttaacaagtttatttttgggtgaaaaattctctttaatgggaaga

SEQ ID NO: 1777 - DNA, 433 bp, Homo sapiens
ccacgcgtccggcgccccctcccggccgccatgttggctggtgtgtgggtgtcaaactgagccagacgcggcggtggcggcggctccgcgggctacggtcgctcccgcctctcgagcgctgccggtggccgcagcggcgcacccacgccggcccggaggagcagagtgctaagtgctgggtgctcactggtgatgaggcagatgaaggttaccaaacttgtggacaggagcctcatatcagagacgtggacctcactgtagcctggtcatggcttccagcttttcgaatctgaggctccaaaggaggaaatgaccattcagggatcttactccagcttgattacggagactgaaccttcatagggtgcgcacttaccaaggacaggaaggtttctctgtttgaagggctttaaacttataacaaagaaaataa

SEQ ID NO: 1778 - DNA, 405 bp, Homo sapiens
cgcgtccgagacagttcatactggagacaaaccctacaaatgtaatgaatgtggcaaaacctttaaacggaactcaagcctcactgcacatcatataatccatgcaggaaagaaaccatatacatgtgatgtatgtggcaaggtcttttatcagaattcacaacttgtaaggcaccagataattcatactggagagacaccttacaaatgtaatgaatgtggcaaggtcttctttcaacgttcacgtcttgcagggcaccggagaattcatactggagagaaaccctacaaatgtaatgaatgtggcaaggtcttcagtcaacattcacatcttgcagtgcatcagagagttcatactggagagaaaccttacaaatgtaatgaatgtggcaaagcctttaattg

SEQ ID NO: 1779 - DNA, 509 bp, Homo sapiens
  misc_feature 1: n = A,T,C or G
nccccgcgtccgctgttggagcagtagacttctcacatctttttgtcacttcatcgtttgactggacagtaaagctttggacaactaagaataacaagcctttgtattcatttgaagataatgcagactatgtttatgatgttatgtggtcacctacccacccagccctgtttgcctgtgtggatggcatggggagattggatttgtggaatctcaataatgacacagaggtaccaactgccagcatttctgtggagggtaatcctgctcttaatcgtgtgagatggacccattctggcagagagattgctgtgggtgattctgaaggacagattgttatataccgatgtgggagagattgctgttccccgcaatgatgaatgggcacggtttggccgaacacttgcagaaattaatgcaaaccgagctgatgcagaggaggaagcagctacccgaatcctgcttagttcctgaaaaggggagtgtaactagtggattgggaaagggtc

SEQ ID NO: 1780 - DNA, 348 bp, Homo sapiens
  misc_feature 61, 102, 144, 157, 180, 183, 201, 209, 225, 292, 328: n = A,T,C or G
agtaggaaccaagaaaacttcttttgccaactttacaggatatctggtaaactattacatngtcaggccaaacatgctccttgcatttttgttggctgaatntgggtacagagtggttctatacgatggtaataaccaacttgnaatcaaaggaagnattccaacagaaacagatagganaangtcttgagaagatatatnaaggaatntgtcacttgtcacacnatgcccgatcaccgggacacaaattcctgcaagaagggaccacaccggactctattttcctacaagngcaggaaaccttgttcattctaagcatggtttctgnttgcccaggtattcaaaaaa

SEQ ID NO: 1781 - DNA, 167 bp, Homo sapiens
  misc_feature 91, 104, 105, 146, 149: n = A,T,C or G
acccacgcgtccggctgcgttgggcttgcgtgcggctcgctaagactatggcgtccgggcctcattcgacagctactgctgccgcagccgnctcatcggccgcnncaagcgcgggcggctccagctccgggacgacgaccacgacnacnaccacgacgggagggatc

SEQ ID NO: 1782 - DNA, 210 bp, Homo sapiens
  misc_feature 7, 24, 90, 93, 102, 117, 138, 149, 157, 168, 184: n = A,T,C or G
ccgcgtncgtttgtgttgaatggnttgtatacttctttacacaacctatccattacttaaggaatctgctcttattcttctacaaactgntcnggaacaaantgatatcagaaattngataaaagaacttcgaaatgnttgaaggagtngaggaagntcattgaattncatgtttggcaacttngctggaagcagaatcatttgccactg

SEQ ID NO: 1783 - DNA, 410 bp, Homo sapiens
  misc_feature 32, 177, 180: n = A,T,C or G
gtcgaccccgcgtccgggcccgtctacaaggnttgtagataaaatagaaacataccttccttgaaaatgcagaataaattttttaaaggcaggaaggaagtgtttgaaccatgtgtcaacaagctttactgtcaaagcaggcttttggtatgggaagaaaaatacttataaatactngtnttaatatttgctttattaaaatacatttaaaatacagcatttttaaatctctaagctcaacttgaagatataagaacagtaaatttgataaaaatgagaaattacattcccatttctttaacaatttgtaaattccaattatcctgaacatttaacaccatttacatattttattaatcacattttcttaaacatttgataagagatttaatattttgatccaactacca

SEQ ID NO: 1784 - DNA, 486 bp, Homo sapiens
  misc_feature 225, 226, 227, 228, 229, 230, 231, 232, 233, 234, 235, 236,237, 238, 239, 240, 241, 242, 243, 244, 245, 246, 247, 248,249, 250, 251, 252, 253, 254, 255, 256, 257, 258, 259, 260,261, 262, 263, 264, 265, 266, 267, 268, 269, 270, 271: n = A,T,C or G
  misc_feature 272, 273, 274, 275, 276, 277, 278, 279, 280, 281, 282, 283,284, 285, 286, 287, 288, 289, 290, 291, 292, 293, 294, 295,296, 297, 298, 299, 300, 301, 302, 303, 304, 305, 306, 307,308, 309, 310, 311, 312, 313, 314, 315, 316, 317, 318: n = A,T,C or G
  misc_feature 319, 320, 321, 322, 323, 324, 325, 326, 327, 328, 329, 330,331, 332, 333, 334, 335, 336, 337, 338, 339, 340, 341, 342,343, 344, 345, 346, 347, 348, 349, 350, 351, 352, 353, 354,355, 356, 357, 358, 359, 360, 361, 362, 363, 364, 379: n = A,T,C or G
  misc_feature 380, 381, 382, 383, 384, 385, 386, 387, 388, 389, 390, 391,392, 393, 394, 395, 396, 397, 398, 399, 400, 401, 402, 403,442, 462: n = A,T,C or G
gcgtccgcggacgcgtgggtgtggagcctgttacctccgcatttgacacgagtctgctgtgaaccccgcaacctcctccccacctcccatctctccttccaggcccatccctggcccagagcaggagggagggagggacagatggcggtgggtttttgtatctgaatttgctgtcttgaacataaagaatctatctgctgttgaaaaaaaaaaaaaaaaaaaggnnnnnnnnnnnnnnnnnnnnnnnnnnnnnnnnnnnnnnnnnnnnnnnnnnnnnnnnnnnnnnnnnnnnnnnnnnnnnnnnnnnnnnnnnnnnnnnnnnnnnnnnnnnnnnnnnnnnnnnnnnnnnnnnnnnnnnnnnnnntcacaaataaagcannnnnnnnnnnnnnnnnnnnnnnnngtttgtccaaactcatcaatggtatcttatcaatgtctnggatcccccgggtacccgangctcgaatttaatttccttttttc

SEQ ID NO: 1785 - DNA, 529 bp, Homo sapiens
  misc_feature 350: n = A,T,C or G
acgcgtccggcttcgttctcccgtccctccccgcgccttggcgcggggggtcgactagccaagtgaggcgggaggcgactcggacctttccctgcatttcgtttcggccagtgccgggggctacccgccctggggcctgggatccttggggcccgtgaggcccactcttagcggccggggcctaccgcggcccgccgctggccctcatgaggcatagcctgaccaagctgctggcagcctcgggcagcaactccccaacccgcagtgagagcccggagccggctgcaacttgttcgctgccctctgacctgacccgggctgcagcgggggaggaggagacggcggcggcncggatctcccggccgcaagcagcagtttggcgacgaaggagagttggaagccgggagggggggaagcccgcggcggcgtggccgtgcgcgcgccctcccccgaggagatggaggaggaggcgatcgccagccttccgggggaagagacggaaggatatggactttttttctgggctgga

SEQ ID NO: 1786 - DNA, 560 bp, Homo sapiens
  misc_feature 37: n = A,T,C or G
acgcgtccggccaggcagtgatggaatcccggggtcngcaggagagaagggtgaaccaggtctaccaggaagaggattcccagggtttccaggggccaaaggagacaaaggttcaaagggtgaggtgggtttcccaggattagccgggagcccaggaattcctggatccaaaggagagcaaggattcatgggtcctccggggccccagggacagccggggttaccgggatccccaggccatgccacggaggggcccaaaggagaccgcggacctcagggccagcctggcctgccaggacttccgggacccatggggcctccagggcttcctgggattgatggagttaaaggtgacaaaggaaatccaggctggccaggagcacccggtgtcccagggcccaagggagaccctggattccagggcatgcctggtattggtggctctccaggaatcacaggctctaagggtgatatggggcctccaaggagttccaggatttcaaggtccaaaaggtcttcctggcctccagggaattaaaggtgatcaaggcgatcaaagg

SEQ ID NO: 1787 - DNA, 565 bp, Homo sapiens
  misc_feature 95, 97, 122, 142, 157, 169, 201, 220, 306, 329, 330, 331,348, 358, 362, 370, 373, 378, 396, 416, 439, 450, 497, 506,523, 528, 531, 545, 554: n = A,T,C or G
aagctattgtcacacctttgaaaccagttgacaacacttactacaaagaggcagaaaaagaaaatcttgtggaacaagtccattccgtcaaatgntngttcttccctggaagttgaggcagncatatcaagaaaaactccancccagcctcagaganagatctcttaangctttctgctcagaaggattttggaacagaanagaaaagcatcatggtaanaaatgaaagccaagagatgtgcccactcctgttaattcattcgattgaaaattcataccccttctaagaaaaaatgaaaagttttntaaacaacaaaaaagaaagcccnnnaggcaaggaaagggcangtgcttcatnaagnatacctgntgnaaaanaggaaatggcatcttccnccaagaagaaaaagcccaangggtttgtaccatacctggtgcnctttgtatgcncaccctgccaaaggcataaaggttttctaaaaaaagttaccttgagngaagccaangaagcctgggagaaaanagtantgnaaaaaatgcaagcnaaagaaggntgggtgggaag

SEQ ID NO: 1788 - DNA, 508 bp, Homo sapiens
ccccgcgtccgagcaaacataagaaacctgagtcattttgtcatttagagtattctgataaaatctcttgaaaatactgaaatcaaaaggttaatgattttttgttcattctgatttgtcattttattatctgtctagcagaaaaatcaaatgggtaaattagcactttagacagccaacatagtgaaaccctcatctctactaaaagttggcaattaaatctgaatttacagatacagataacagtttatcagaaatcatatttttcctgaagaaaatttaaaattaggagttgtgggcctggtgcggtggcttacgcctgtaatcccagcactttgggaggctgaggtgagcagatcacttgaggtcaggagttcgagaccagcatagccaacatagtgaaaccctcatctctactaaaagtacaaaaattagccaggtgtggtggccgtgtgcctgtagtcccagctactcgggaggctgaggcgggagaatcgtttggaacccg

SEQ ID NO: 1789 - DNA, 475 bp, Homo sapiens
  misc_feature 111: n = A,T,C or G
gaccacgcgtccggtcggcgtctgggcctcgtccccttctctctgtctcccttgcctcccccatcacgtcccctgacaccgacaccccattgctcccacagtctccccagnctccactttggtccccagcgctgtctgcccgaggatttgcctgaaggctgcccccaactctgcacccgccccccgagggccaccgaggaccatgactaagacagatcctgccccgatggccccgccaccccgaggagaggaggaagaagaggaggaggaggatgaacccgtccccgaggcccccagccccacccaggagcgccggcagaagcctgttgtgcacccctcggcacctgcccccctccctaaggactacgctttcaccttcttcgatcccaatgacccggcgtgccaggagatcctgtttgaccctcagaccaccatccccgagctgtttgccattgtgcgccagtgggtgccccaa

SEQ ID NO: 1790 - DNA, 308 bp, Homo sapiens
  misc_feature 126, 136, 182, 189, 217, 226, 249, 276, 295: n = A,T,C or G
cggggtcttcttgctgtgaggtcgcgttccccagtgttacggagggtccttgaggcaaggagtgaaaattgggtctgggggttagtcctggggtggaggtctgggcacgccgggtcggaccccctncatcttcggntttgcacaccccgctttccagcgcggagtccgcggcgggtagggcnggcgtcncgtgcgtgacgtcatccagcggcgcctngcgaggctncagtggccttgacctcccgcggngtgggaggctgcgcggcgatgctgcantttcgtccgggccggggcngcgggcctggctt

SEQ ID NO: 1791 - DNA, 378 bp, Homo sapiens
  misc_feature 79, 158, 289, 320, 322, 327: n = A,T,C or G
gggttatgagaagaacgctcagagcagagcaccgaaagtggccactaccagcatgaagagcccaacaattcaaactggnagaagtgagaaaaacagaatgcagctttcaaggttcgtttcaagcagttggcttgtgggactctgagagatgctgctgnccatgacatgcgggaattatcatgatcaactacccagcttggatttcacccagtggccaactagctttgtgtgggagacggcaagggttggatttttcaaaagagtaaaccagacccgtgaccaaggtgtnaactaagaagtggagtcatgcttcacacggncntatcntgctggcagccattcctgggtctggctgtggtgttaatcttcatgggatcc

SEQ ID NO: 1792 - DNA, 474 bp, Homo sapiens
  misc_feature 11, 68, 74, 90, 91, 92, 102, 122, 139, 141, 166, 171, 172,189, 190, 194, 266, 269, 287, 291, 295, 305, 318, 332, 354,358, 366, 368, 373, 390, 399, 405, 420, 429, 432, 436, 447,449, 454, 460, 470: n = A,T,C or G
gtgctggtttntcttgcagatgctgctgctaggggtggtgggaagcagccgtgggacgcgtggccggnagcggnggtgacagcctgggannncgggggcttntcttccttgtcctcctcctntcctgtctattcccagngnggggcgtggctgacactaaagactntgtanncatcaacccgagtgcannttcnatggaaaatgaaggttgcacgttttcaaaaaatacctaatggtgaaaatgagacaatgatttgctgtattgncanccaaaaaaagcaaagggnattnccantcattgaagntgcaagcattctncaagctgatcttcnaaatgggtctaaacaaaatgtnaagntaagttcntnaggcnagccctttcatggtttngaaatgagntttcgntttttatgtgaaagntggaggccnccntgtngggaaagaaangngtttnttttcnccaggttttnaaaa

SEQ ID NO: 1793 - DNA, 485 bp, Homo sapiens
gtccgttttacaacctagtaataatgtggataaatgtatctacatgacacatgtcaagaccaaaataactgtgaatgacacaccttgctgtaaatgaactgtgctaaccctgactgtgggcttgagaacaaagatgaactctagaactctagcagcctaactgctgcttctcaaataactgtgtgaacagtgagatattactgtttgtttctaaaaatcctactgtgcccagtttccttcactacatgccctgcattttttatttaaatatttagctgtagcgccatcagatatggatgccttctaacaattgctgtttgtaaaataaatcaggatggtagaaagtgattatatggaaaattggaacctggatgagaccttttcgttgaattctgaagagtaatgatgtgaaaattgatacagggcaagagatgattcttttgggttttcttctacttcatgtccagaagagtaagaggggaaaa

SEQ ID NO: 1794 - DNA, 500 bp, Homo sapiens
  misc_feature 2, 378, 392, 431, 477: n = A,T,C or G
tngttgcctgcaatactacactttacaaacaatgttaacactgtgattccttcattgttttaagaagttaacctagggccgggcatggtggctcatacctgtaatcctagcactctgggaggccgaggcaggaggatccctttagcccaggagttaaagaccagcctgggcaacatagggagaccctgtcttttttttgggcagcgtggtgggggataaataaataaaaggaaaaaaaacttagcctagaattagaattaatttaattgaattcatctaaagatgtctctggtgatttttatatgttccgctatataattgatgctttatagttttatcataatccaacaacttcagttatatttaattattggtaanggagtttaagactngaaagactagagtgctttctagtccaaatagagggtcangtgaaaccagctttttgacatcaagattttcattttgagaaggganaagcctgtgggactgggcttaaa

SEQ ID NO: 1795 - DNA, 401 bp, Homo sapiens
  misc_feature 28: n = A,T,C or G
gtccggagaaaactgcaacttgcccagntcctcttctccaccaatagatgcagcatccgcagagccctatggcttccgtgcctcagtgttattcgatacaatgcaacaccatctagccttgaatagagatttgtccacacctggcctggagaaggacagtggagggaagacacctggtgactttagctatgcctatcaaaagcctgaggaaacaaccaggtccccagatgaagaagattatgacttgagttatgagaagaccacccggacctcagatgtgggtggctattactatagaaaatagagagaaccacaaaatctccaagtgacagtggctactcctatgagaccattggggaaaactaccaagacccctgaaggatggtgactattcctatgaa

SEQ ID NO: 1796 - DNA, 416 bp, Homo sapiens
  misc_feature 6: n = A,T,C or G
ccggcntaggcggggggaacacgccgcctgcgctctcttgggaccctagatttgggggaggaggtaacgagaggcggagagggtggctcctcaaatatacacccctcctgtcctccgccaccccacctttgatttctcttccctcaacccagcactccagccccaccccagggtcaatttttgcccccttccatctgagcagtgttaccaggccccagggggaccggaggatcgggggccgggtggggggtcccatggagtactccagcacacgcaggggctccctgcagacagggggggccttcgccctggaagcctggacgccgagatagactttctgagcagcacgctggccgagctgaatggggggtcggggtcatgccgtcacggcgaccagaccgacaggcatatgagcc

SEQ ID NO: 1797 - DNA, 493 bp, Homo sapiens
  misc_feature 8, 9, 13, 448: n = A,T,C or G
tccgattnngccnagggttgcagtttgtagacccctgatctagacccttaagtagccttgtttgtgcctgaagtttacagatgatccccaacttatttttattttatttttttgagatggagtctctctctggagcccaggttggagtacagtggcaagatcttggctcactgcaacctccacattccgggttcaagtaattctcccgcctcagcttcctgagtagctgggattacaggcgtgtgccaccatgccagcttttttgtattttgtatgttagccatgttggcaaggctggcctcaacccctgacctcaagtgatctgcccacctcagcctcccaaagtgctgggattacaggagtgagccaccatgcccgaaccccaacttatgtttgacttacaatgtttggactttatggatggtgcaaatgttatatgcatttcagnagaaactgggcttcaaaattttgaatttttgaatctttttatttt

SEQ ID NO: 1798 - DNA, 484 bp, Homo sapiens
  misc_feature 97, 351, 416, 425, 457: n = A,T,C or G
tccgctgccgaagtcagttccttgtggagccggagctgggcgcggattcgccgaggcaccgaggcactcagaggaggtgagagagcggcggcagacnacaggggaccccgggccggcggcccagagccgagccaagcgtgcccgcgtgtgtccctgcgtgtccgcgaggatgcgtgttcgcgggtgtgtgctgcgttcacaggtgtttctgcggcaggcgccatgtcagaaccggctggggatgtccgtcagaacccatgcggcagcaaggcctgccgccgcctcttcggcccagtggacagcgagcagctgagccgcgactgtgatgcgctaatggcgggctgcatccangaggccccgtgagcgatggaacttcgactttgtcaccgagacaccactgggagggtgaacttttnccttggaancgttttgcgggggccttggcctgcccaagctntaccttttccaacggggccccggcgag

SEQ ID NO: 1799 - DNA, 113 bp, Homo sapiens
  misc_feature 5, 12, 21: n = A,T,C or G
ggcgnagctcgncttcctccncgcccaagttccggcgccgctcttgcgggagcgtgccgcatcaccccgggggcccctacgcgaggatctccggggccgttggcagcagcctg

SEQ ID NO: 1800 - DNA, 247 bp, Homo sapiens
  misc_feature 127, 142, 181, 187, 193, 204, 208, 211: n = A,T,C or G
tcaccccgcgtccgggcgggcgtggggcggtgggaggtagtgaagaagggtcggcggcctggggtcggcgccggcgccggcggccgaggaggcggtaggaaccgcagggcgctcggggaagcaaacngagtgtggaaatacnacctgacccctgcaatccagaccacaagcaccctttatnagcggngctttnagaatatcatnaagnggntttaataaggagcaggtcccaccccctgctgtggaa

SEQ ID NO: 1801 - DNA, 518 bp, Homo sapiens
  misc_feature 461, 462: n = A,T,C or G
gtcgacccacgcgtccgggagcagagtcgactgggagcgaccgagcgggccgccgccgccgccatgaaccccgaatatgactacctgtttaagctgcttttgattggcgactcaggcgtgggcaagtcatgcctgctcctgcggtttgctgatgacacgtacacagagagctacatcagcaccatcggggtggacttcaagatccgaaccatcgagctggatggcaaaactatcaaacttcagatctgggacacagcgggccaggaacggttccggaccatcacttccagctactaccggggggctcatggcatcatcgtggtgtatgacgtcactgaccaggaatcctacgccaacgtgaaagcagtggctgcaggagattgaccgctatgccagccgagaacgtcaataaagctcctggtggggcaacaaagagcggaccctcaccaccaaagaaggtnngtgggaccaacaccacaagccaagggaggtttggcaagacttcttttggggcattc

SEQ ID NO: 1802 - DNA, 494 bp, Homo sapiens
  misc_feature 1: n = A,T,C or G
nccccgcgtccgcggacgcgtgggcggagctgctgtgcagtggaacgcgctgggccgcgggcagcgtcgcctcacgcggagcagagctgagctgaagcgggacccggagcccgagcagccgccgccatggcaatcaaatttctggaagtcatcaagcccttctgtgtcatcctgccggaaattcagaagccagagaggaagattcagtttaaggagaaagtgctgtggaccgctatcaccctctttatcttcttagtgtgctgccagattcccctgtttgggatcatgtcttcagattcagctgaccctttctattggatgagagtgattctagcctctaacagaggcacattgatggagctagggatctctcctattgtcacgtctggccttataatgcaactcttggctggcgccaagataattgaagttggtgacaccccaaaagaccgagctcttcttcaacggagcccaaaagttatttggcatgatca

SEQ ID NO: 1803 - DNA, 507 bp, Homo sapiens
cgcgtccgcgcttctgttacggccagtgcaactctttctacatccccaggcacatccggaaggaggaaggttcctttcagtcctgctccttctgcaagcccaagaaattcactaccatgatggtcacactcaactgccctgaactacagccacctaccaagaagaagagagtcacacgtgtgaagcagtgtcgttgcatatccatcgatttggattaagccaaatccaggtgcacccagcatgtcctaggaatgcagccccaggaagtcccagacctaaaacaaccagattcttacttggcttaaacctagaggccagaagaacccccagctgcctcctggcaggagcctgcttgtgccgtagttcgtgtgcatgaagtgtggatgggtgcctgtgggggtggtttttaggacaccagaagaaaacacagtctcttgctagagagcactccctattttgtaaacatatctgctttaagggggatgtaccagaaacccaccttacccc

SEQ ID NO: 1804 - DNA, 447 bp, Homo sapiens
  misc_feature 408: n = A,T,C or G
cccgcgtccgtagattaaattatgcaagttgcaagaatgtagtaactctgatcagctacaaggaaaggaggaaagagtaaatgaagaaagtcatctaactgaaaaggaatatatagaacattgtaacacccctacaactgattctgattcatctatagcagttaaagcactacaaatagatagctttggtttagttacatgctttcaacaagagtctcttgatgtttctcaaatgatacttggaaaatctcagcaacctgagtcaaaaatgcaatctgaatttataaaagaaaaaagtgctacttgttcaaatgaggaaaaaggtaacttaaacgaggtcagtaataactgaagagaaagaaacagatgggagatcaccctatcttcattactgaaccaaaactaccngttcacaatatacctggattcgacagcataaaagaaacc

SEQ ID NO: 1805 - DNA, 356 bp, Homo sapiens
gcgtccggcagctgaaaggggatttgggcccggaagatccgagtccatccgcggcggggagagggcaagcgggaccggtaggggccggagcagcggcggcggcgctcggactgtcccatccgccccgtattgaggcgctgggagcggcggggcgacaggaaagcgatggtgaaagcggggccgtgaggggggcggagccgggagccggacccgcagtagcggcagcagcggcgccgcctcccagagttcagacccaggaagcggccgggagggcaggagcgaatcgggccgccgccgccatggagctgagagtcgggaacaggtacccggctgggccggaagatcggcagcggctc

SEQ ID NO: 1806 - DNA, 505 bp, Homo sapiens
gtcgccccgcgtccgcacagttgattctgaatttttaaggctttcctaataggctgatcacagagaataatccattttgaaggtataaaactgcactgtatgtctgtcacttgtagctgaactgattcacattttgacaaaagagagaaaatacaaaaatgagttttgcaaatgtaataactttttctgcatatagaactaaataattgaaaaatatgggctatagttctcaaaggtagatagtaaaatcactggctttttccagctgtatgtttttccactgtgcgtgtacacacacactggaaaataattaggctgattttgcaggtcttcattgttagagattctgaagtatttactgtcaattcataggtttcagtttatttaggaaattagtgtttgacagctttttttaaattatttcactgaagctgagattattagtgatcaaagttaaaatttcaatatttaatttctctatatattattaatattaaaatggttt

SEQ ID NO: 1807 - DNA, 413 bp, Homo sapiens
gtcgaccccgcgtccggtactacatcccctgaagaaacatgtgcccaggtgattcgtgaagctaagagaacagcaccaagtatagtgtatgttcctcatatccacgtgtggtgggaaatagttggaccgacacttaaagccacatttaccacattattacagaatattccttcatttgctccagttttactacttgcaacttctgacaaaccccattccgctttgccagaagaggtgcaagaattgtttatccgtgattatggagagatttttaatgtccagttaccggataaagaagaacggacaaaattttttgaagatttaattctaaaacaagctgctaagcctcctatatcaaaaaagaaagcagttttgcaggctttgggaggtactcccagtagcaccaccacctg

SEQ ID NO: 1808 - DNA, 496 bp, Homo sapiens
ccccgcgtccggcctttaaaagaagacttgaattcctatggaacaataaagacacagcagaaaacagggattctcctgtttcagaggaaataaaaatgacctgtcaacaatttatccattatcaccgtgacctctgtatccgaaacattgtcaaagaaagaaggtgtggtgcaaagacttctgctggaactttctgtggctgtgacctggtgagctggctaattgaagtcggccttgcctccgaccgtggtgaagctgtgatatacggagacaggctggtacaagggggagtcatccaacatattaccaacgagtatgaattccgggatgagtacttgttttacagatttcttcaaaagagtcctgaacagagtcctcctgctattaatgcaaacactctccaacaggaaagatataaagaaattgagcattcatccccaccctcacattcccctaagacctaaattatgcaggggagaaccctacatggaatcat

SEQ ID NO: 1809 - DNA, 486 bp, Homo sapiens
  misc_feature 31: n = A,T,C or G
cgcgtccgctggagtgctgctgaggagcgangggcccatctggggtctctggaagtcggtgcccaggcctgaaggatagccccccttgcgcttccctgggctgcggccggccttctcagaacgaagggcagtccttccaccccgcggcgcaggtgaccgctgccatggcttttccccatcggccggacgcccctgagctgcctgacttctccatgctgaagaggctggctcgagaccagctcatctatctgctggagcagcttcctggaaaaaaggatttattcattgaggcagatctcatgagccctttggatcgaattgccaatgtctccatcctgaagcaacacgaagtagacaagctatacaaggtggagaacaagccagccctcagctccaatgaacaattgtgcttcttggtcagaccccgcatcaagaatatgcgatacattgccagtcttgtcaatgctgacaaattggctggccgaa

SEQ ID NO: 1810 - DNA, 284 bp, Homo sapiens
  misc_feature 36: n = A,T,C or G
cgcgtccggtgcatctgaggactggtgggaaggcanggcacaacgggattgacgggctggtgcctcaccagtatatagtggtgcaggatatggatgatacgttttcagacactctgagccaaaaagccgacagtgaggccagcagtgggccagtcacggaagacaagtcctcatccaaggacatgaactccccgacagaccgtcatcctgacggctatttagccaggcaacgaaaaagaggagagccaccccctccagtaaggcgtcctggcaggaccagtgat

SEQ ID NO: 1811 - DNA, 468 bp, Homo sapiens
tcaggagtcgaccccgcgtccggaaggccgatgctgtgggggtgggcgtggagagaattcttctgtgggtcctctggtgttgagtggtcggcttggtgtggtgtgcggaggagctccaggcccgtcggcgcggagtggtctcacgtgtgaaacatggctacagattggctgggaagtattgtgtccatcaattgtggagatagcttgggtgtctatcagggaagagtgtcagctgtggatcaggtcagccagaccatttctctcacccggcctttccataatggagtgaagtgtcttgttccagaagtcaccttcagggcaggtgacattacggagttaaaaattctggagataccaggacctggagacaaccaacattttggagaccttcatcaaacagaattaggcccctctggtgctggctgccaagtgggcatcaatcagaatggcacaggcaagtttgtcaag

SEQ ID NO: 1812 - DNA, 516 bp, Homo sapiens
  misc_feature 18: n = A,T,C or G
ccgcgtccgcccagtccnagtgctggctttccctgtatctgcctctgccaggcaacacttatcatggctcccaatcagcaggagcctccatgctccactttgaacagcctctatgctccagcaatggggcatttgtgaagagtgacttgattaacttttctgaccatgggtataatacagttgcttcagagggcagtggttctgggtgtgatttttacactgtaacattgtatacagtgtcatggataattactatttttttctggtcattaacactcacctactctagtactaggatttcagaccaaggtcctcatgacgcctggatattttagtatctatatccaataatcttttctctcctactgaatatccaggcaaagatgaaatcgttttctttaaaactgtcaaattctgtaaaactcaggagccagttcaagggaacaagcatcttcacaatagatggaatcaagagttaaatgttatagtggcaagcttgtctactgggcaacagac

SEQ ID NO: 1813 - DNA, 449 bp, Homo sapiens
cgcgtccgccgccgcgtccgctcccggtccctggcccctcagcggcatggcgtgcggggcgacgctgaagcggcccatggagttcgaggcggcgctgctgagccccggctccccgaagcggcggcgctgcgcccctctgcccggccccactccgggcctcaggcccccggacgccgagccgccgccgccgtttcagacgcagaccccaccgcagagtctgcagcagcccgccccgcccggcagcgagcggcgccttccaactccggagcaaatttttcagaacataaaacaagaatatagtcgttatcaagaggtggagacatttagaagttgttcttaatcagagtgaaggcttgtgcttcgggaaagtcaacctcactcctcagcactcacagcacctagctcttccaggttcctcatggatgaagaaggaccagcccacatttacc

SEQ ID NO: 1814 - DNA, 481 bp, Homo sapiens
cgcgtccgttgaagaataatattgtatgtgcattttatccattaatgtttcatactttctgagagtataatacccttttaaaagatatttggtataccaatacttttcctggattgaaaactttttttaaactttttaaaatttgggccactctgtatgcatatgtttggtcttgttaaagaggaagaaaggatgtgtgttatactgtacctgtgaatgttgatacagttacaatttatttgacaaggttgtaattctagaatatgcttaataaaatgaaaactggccatgactacagccagaactgttatgagattaacatttctattgagaagcttttgagtaaagtactgtatttgttcatgaagatgactgagatggtaacactttcgtgtagcttaaggaaatggggcagaatttcgtaaatgcctgttgtgcagatgtgttttccctgaatgctttcgtattagtggcgaccagt

SEQ ID NO: 1815 - DNA, 405 bp, Homo sapiens
  misc_feature 105, 178, 182, 184, 190, 195, 196, 214, 228, 234, 237, 248,252, 267, 269, 275, 281, 295, 322, 324, 325, 332, 362, 400: n = A,T,C or G
gtcgccccgcgtccgatttaaactgggtctttataaaagtaaaatggccaacatttaattattttgcaaagcaacctaagagctaaagatgtaatttttcttgcnattgtaaatcttttgtgtctcctgaagacttcccttaaaattagctctgagtgaaaaatcaaaagagacaaangacntnttcgantccanntttaaggctgggggaaantgggttttttagcncaaccnttncaaaagttttntttnggggattcataacancnccaccnaattgnttttttgttgccanacattcatttcaatactagttatattnannaggagtnggtagagaggaaacatttgacttatctggnaaaagcaaacttgtacttaagaataagaataacatggnccatt

SEQ ID NO: 1816 - DNA, 129 bp, Homo sapiens
  misc_feature 33, 37, 103, 110: n = A,T,C or G
tcgaccccgcgtccgctctgctccttgtctccntctncctttttctgtctttgccgggtctctgggtctctgacccccatccggccctcatggctttgggtcnggagctnttgaagcaatgttcatcat

SEQ ID NO: 1817 - DNA, 458 bp, Homo sapiens
ccacgcgtccgggggagccggacgccagagtcccctctccacgccgtgcagctgcgctggggcccccggcgccgacccccgctgctgccgctgctgttgctgctgctgccgccgccacccagggtcgggggcttcaacttagacgcggaggccccagcagtactctcggggcccccgggctccttcttcggattctcagtggagttttaccggccgggaacagactggggtcagtgtgctggtgggagcacccaaggctaataccagccagccaggagtgctgcagggtggtgctgtctacctctgtcctttgggggtgccagccccacacagtgcacccccattgaatttgacagcaaaggctctcggctcctggagtccttactgtccagctcagagggagaggagcctgtggagtacaagtctttgcaagtggtttcggggccaacagttcgagc

SEQ ID NO: 1818 - DNA, 600 bp, Homo sapiens
  misc_feature 104, 144, 160, 170, 184, 226, 238, 243, 255, 264, 270, 305,306, 315, 320, 336, 353, 354, 355, 360, 368, 369, 371, 376,390, 393, 411, 423, 428, 443, 456, 467, 472, 475, 480, 485,499, 536, 540, 548, 565: n = A,T,C or G
tcgacccacgcgtccggtgaaacacaaaaccaaggagtacattaagaagtacatgcagaagtttggggctgtttacaaacccaaagaggacactgaattagagngactgttgggccagggtgggaggatgggtggtcaggtaangacaagactctagggnagaaggaaancctgtgggcctttntgtcccacccctgtcagcactggtgctactgattgatacatnaccctggggggnaattnaaccctgccagnatgtcaacntggaanggccacaaagaagtggaacctcccatctacaaaanngagtttacncttanattttgtagaagcctngtttggccattgttgcnnntaganagtccatnnantaggnggcaagggggcctntantaaaaatgaacccctggnacagaaccttgnacttncacattctttaaaanccctgggagatgntttgctttctntgggncgngttgntttgnttcaagctgctacnaagtaactctcaatggccggcaattatccccaactcncacnaaactccntttttaacccctggcanggaatccttgcaaatttaataattttttaaatggg

SEQ ID NO: 1819 - DNA, 546 bp, Homo sapiens
  misc_feature 29, 261, 424: n = A,T,C or G
gtccggctttagtgaattcttaatagatngtatatataaaagtacattttaatagaaagccagggttttaaggaatttcacatgtataaggtggctccatagctttatttgtaagtaggctggataaatggtgcttaaatggtaatgtactccacttcttcctattggaagattaacattatttaccaagaaggacttaagggagtagggggcgcagattagcattgctcaagagtatgtaaaaaaaaaaaaaaaaaaaangaaccaaaccactggaaataatcaaatgcaaaaaggtaacaaattcataactggaaagcaaagagaagaacaagtatgatttggatgataaagcattgttttaatggtgaaaacttcaccagatcacttaatgtttctaggaggttaacttcaagtgggcaantgggggtttttaggtaggtcagtggccctaagttcctaaagcccacagattagggatctgttaaactgaatggtctgttggaaaggttttgttttaactgcttgggaggctttccttttaag

SEQ ID NO: 1820 - DNA, 550 bp, Homo sapiens
  misc_feature 26, 56, 97, 172, 218, 285, 296, 303, 327, 401, 434, 444,465, 477, 505, 534: n = A,T,C or G
gcgtccgggaaaagtttgccttccangccgaagttaacagaatgatgaaacttatnatcaattcattgtataaaaataaagagattttcctgagagnactgatttcaaatgcttctgatgctttagataagataaggctaatatcactggactgatgaaaaattgctctttnttggaaatggaggaactaacaagtcaaaaattaaagtgtgataagngagaagaaccctgctgcatgtcacagacacctggttgtctggaaatgaccagtagaagagttgggtntaaaaaacctntggtacncattagtccaaatctgggacaagncggagttttttaaaacaaaaattgacttgaaagccaccagggaaagatggctcagttcaaacttttttggaatntggattgggcccagttatggtggtccggttttnctatttcccncctttcccttgtagcagattnaaggtttatttngtcactttcaaaaaacaacaaacaaacngattaccccaagcaacatcttgggggagntcttgacttccaaatg

SEQ ID NO: 1821 - DNA, 528 bp, Homo sapiens
  misc_feature 36: n = A,T,C or G
cgtccgcgggtaaaatgttatggtaagcatgcacangtttgcagtctacagtttttttatgtagcacaaaataggtgtacctttataagtacattcaattttatgatttacatttatcatgtaatttttaaaaaaatccatctatctaggatatgttggatacaaagtctgcttttgctattctttttgcttaaatactcctatcattttctgaattacttggtatttagaactcctagcaccacggggaagaatagaggtatcatcaaacgtggcaaattttctttcaggaataataaagagcatgattccacagcttttctggggatgtttgagattcttttttagtactaagcaaaattctcatcacaggaatgtagcccaggccaatttataactaaatctctattttgttcggatgatgcttctaaaacagcattgataggttaaagaagcttgggtatttttaatttacttcaatgattagctcaattgcttctgggagttttaatcctgtggatatgtcat

SEQ ID NO: 1822 - DNA, 508 bp, Homo sapiens
  misc_feature 383, 427: n = A,T,C or G
gggcgccccgcgtccgctgatctcgggctcctatttcatttacattgtgtgcacaccaacgtaaccagtgggaaaactttagagggtacttaaaccccagaaaattctgaaaccgggctcttgagccgctatcctcgggcctgctcccaccctgtggagtgcactttcgttttcaataaatctctgcttttgttgcttcattctttccttgctttgtttgtgtgtttgtccagttctttgttcaacacgccaagaacctggacactcttcactggtaacatattttggcaagccaaccaggagaaaagaatttctgcttggacactgcatagctgctgggaaaatgaacatcagtgttgatttggaaacgaattatgccgagnttggttctagatgtgggaagagtcactcttggagagaacagtangaaaaaaatgaaggattgtaaactgagaaaaaagcagatgaaagtgtctcacgagctatgtgtgctctgctcaattctggg

SEQ ID NO: 1823 - DNA, 349 bp, Homo sapiens
  misc_feature 30, 49, 68, 69, 71, 83, 91, 109, 124, 137, 148, 171, 189,205, 225, 253, 268: n = A,T,C or G
ccccgcgtccggtcctttggcactgtcatntgtgtccctcgagtgagcntcaccagagctgcagtaanngngcacctactacnggctctgngctgagtccttccagtgngcctctcactgaatnctcaccccactgncatgaggtttnccccatttgactgatgagggtgnagagccagggagccttgntcactggttcattgantacatttacaaatattattnacagagtgggagaagagccgtatagggncttaatgccatggtngggactttggaatttaattcaagtgatgtgggagtacctgccagatggatggagggtgaaataatgcttaagccctcagcc

SEQ ID NO: 1824 - DNA, 366 bp, Homo sapiens
  misc_feature 108, 154, 164, 174, 175, 190, 194, 253, 258, 268, 270, 282,289, 291, 294, 297, 298, 312, 316, 327, 337, 364: n = A,T,C or G
cgcccacgcgtccgcaccggcccgatgagctgcagcggctccggcgcggaccccgaggcggctgccggcctccgccgcctcggccccgggccccgcgcccccggactnggctcccgccgcgctgccctccagcaccgccgcggagaacaaaggncagcccccgnggggacaggnnggggaggacctgggngctnggagcaagcatgctggggggcacagggaccctttggcgggaagccgggccggtagagcncagcntgaagcaggntntgaggagctggntccctgngnatnggnngaggatgggccgcnggangccctctccgngaaggggggngctcaataatcttaaccggggggtttnaa

SEQ ID NO: 1825 - DNA, 438 bp, Homo sapiens
  misc_feature 27, 30, 50, 98, 383, 413: n = A,T,C or G
cgcgtccggctgaaggctcccctgggnttnctggcctcctggggcagaangggagagaaaggcgatgctggcaactccattggaggaggcagaggggnacctggccctccagggctccctgggcccccagggccaaagggagaagcaggtgtccgatggccaggttggccccccagggcagccaggagacaagggggagcgtggagcagctggagaacagggaccagatggccccaagggctccaagggagaaccagggaaaggagagatggtggattacaatggaaacatcaatgaggctctccaggagatccggacgctggccttgatggggcctcctggtcttcctgggcaaattggcccacctggagctccagggattncaggccagaagggggagatttgactgccanggcctttcaggacacgatggggaaa

SEQ ID NO: 1826 - DNA, 484 bp, Homo sapiens
gtcgaccacgcgtccggttttttttttttttgagacagagttttgctcttgttgcccaggctggagtgtgatggctcgatcttggctcaccacaacctctgcctcctgggttcaagcaattctcctgcctcagcctcttgagtagcttggtttataggcgcatgccaccatgcctggctaattttgtgtttttagtagagacagggtttctccatgttggtcaggctggtctcaaactcccaacctcaggtgatctgccctccttggcctcccagagtgctgggattacaggtgtgagccactgtgccgggcccgtcccctccttttttaggcctgaatacaaagtagaagatcactttccttcactgtgctgagaatttctagatactacagttcttactcctctcttccctttgttattcaagtgtgaccaggatggcgggagggggatctgtgtcactgtaggtactgtgcccaggaaggc

SEQ ID NO: 1827 - DNA, 350 bp, Homo sapiens
  misc_feature 6, 325: n = A,T,C or G
cgaccncgcgtccggcactctgttcttccgccgctccgccgtcgcgtttctctgccggtgagcgccccgccccggggcctgagctggacgtcgcaggcctgcgccccccgaccccggctggccccgcttccagctgccgaggcctcgtcgcgccttccccgggaacaaaaggcggggtcgcaatggaagaagagatcgccgcgctggtcattgacaatggctccggcatgtgcaaagctggttttgctggggacgacgctccccgagccgtgtttccttccatcgtcgggcgccccagacaccagggcgtcatggtgggcatggnccagaaggactcctacgtgggcgac

SEQ ID NO: 1828 - DNA, 400 bp, Homo sapiens
  misc_feature 2, 336, 386: n = A,T,C or G
cnccacgcgtccggaccggggaagacgcctcttcgccgcctccgaaaaccgaggcagcgagcgacccccagcatcccgcggcctccgaaggggccgacgccgccgccgcctcgccgccactgctgcgctgcctagtgctcaccggctttggaggctacgacaaggtgaagctgcagagccggccggcagcgcccccggcccctgggcccggccagctgacgctgcgtctgcgggcctgcgggctcaacttcgcagacctcatggctaggcaggggctgtacgaccgtctcccgccgctgcctgtcactccgggcattggagggcgccggggtgttntgatccgcagtgggcgaggggagtcagcgaccgcaaggcaggagaccggntgatggtgttgaac

SEQ ID NO: 1829 - DNA, 524 bp, Homo sapiens
ggtgtcgccccgcgtccgcttgtcttttttgggggtgtgaattttttgcattgttctgatcatattctttatcatgtaatttatgttcttttttactaagtattatgtgtggttattatagattttcacaaagatatattgctggtaatatattttattgtgtagtcttataatttacttaaccttctttcaattgttagaaatttaggctatttccagattttcagtattgtaaataatgctgtgatgaccaattttgtgaataaaatgtttttatgtatttcagattattcccttaggatagtctctcagtgccaagttgtcaaaaacatctctattttgcttatcttcctgctctcttgctgccttagggggtagtaaactgaaacataaagtaaacatgcatacaaataaaaaacataaaacaaaaataagcaacctgatggtaataggtgaaagtggtaacctgttttaactttgaattcttgcccggcgcggtgggctcacgccctgtaatcccagca

SEQ ID NO: 1830 - DNA, 552 bp, Homo sapiens
  misc_feature 32, 191, 241, 337, 357, 383, 423, 487, 497, 504, 505: n = A,T,C or G
cgcgtccggtaaaccagccggagcggcgcggnagcggcaggaccgccgtggcgcctagagtagcagacccggggggagcgcggggcgacgctggctgcagggacccggtgacagcgtgagaggttttgacaagcttgcatcatgcgtgagtataagctagtcgttcttggctcaggaggcgtctggaaagnctgctttgactgtaccaattttgttcaaggaatttttgtagaaaaatacngatcctaccgataggaagattcttatagaaagcaagtttgaaagtaagatgcacaaccagtgtatgctttgaaaaatctttggatacctgccaggnaaccgggagccaatttacanccaatggagggggatttataacatgnaaaaaaatgggacaaagggattttgcatttagtttaattncaatcaccagacacaagttcccaccaattttaaaacgaattttaccaaagaaccctggaggagnaaccaagaanttctttnngaaggtttaaaaaggaaccaccttgaattggaatggtttcccaaatg

SEQ ID NO: 1831 - DNA, 426 bp, Homo sapiens
  misc_feature 422: n = A,T,C or G
ccaattatagactatatagggggaagagcactggatttggagtcaagaaacctggacacttggctccacacttccttagctgggtaactttgggcaaaccgcttggtctctcaagcctaaggttcttcagctataaaatgggaataatacttcactaactacctcacagagttgtggtaagaatataatcagataactggataaaaacactatataaactggaaagcgccgtacaaatgtgagagatcagttttattatcaaatcactgttttccactgcctcttgaatcggctttattctaaccaaccattacatctttctcatcttttggagtatgggtaattgaggcttgggtgtgtcatcagggactgggaagttatttcagctcccatgtaaaaggtgggagaggtggtttgtgggngcag

SEQ ID NO: 1832 - DNA, 382 bp, Homo sapiens
  misc_feature 2, 10: n = A,T,C or G
gngtcgaccncgcgtccgctatttactacctccttatgaggaagtggtgaaccgacctccaactcctcccccaccatacagtgccttccagctacagcagcagcagctgctgcctccacagtgtggccctgcaggtggcagtcccccgggcatcgatcccaccaggggatcccagggggcacagagcagccccttgtctgagcccagcagaagcagcacaagacccccaagcatcgctgaccctgatccctctgacctaccagttgaccgagcagccaccaaagccccagggatggagcccagtggctctgtggctggcctgggggagctggacccgggggccttcctggacaaagatgcagaaatgtagggaggagctgct

SEQ ID NO: 1833 - DNA, 471 bp, Homo sapiens
  misc_feature 4: n = A,T,C or G
gccncgcgtccgtgaaacgcaaaagaaggagctcggaatataagaacgtcagaacgagtgacactaatagtggataacactagatttgttgtagacccatccatttttactgcacagccaaatacaatgttgggcaggatgtttggatctggccgagaacataactttacacgacccaatgagaaaggagagtatgaggtggcagagggaattggttccactgtgtttcgagcgattctggattactataaaacaggaataatccgttgtcctgatggcatatctattcctgaactgagagaagcatgtgactatctttgtatctcttttgaatatagcactattaaatgtagagatctcagtgccctaatgcatgagttatcaaatgatggtgctcgtagacaatttgaattttatctggaagaaatgatcctccctctcatggtagctagtgcccagagtggggaacgg

SEQ ID NO: 1834 - DNA, 476 bp, Homo sapiens
  misc_feature 3: n = A,T,C or G
ccncgcgtccgctttaaccaccataagaaatcagaaaacgcaagataaagttcagcacacagtatgtatggattgcagtagctacagtacatactgttatcgctgtgatgattttgtggttaatgacaccaagctgggactggtacagaaagtcagagaacacttacagaacttggaaaactcagctttcacagctgacaggcataagaaaagaaaacttttggaaaactcaacactaaacagcaagttattaaaagtaaatggaagcaccactgccatttgtgccacaggccttcggaatttggggaacacatgtttcatgaatgccatccttcagtcactcagtaacattgagcagttttggctgttatttcaaagaactgccccgccgtggagttaaggaatgggaaaacagcaggaaggcggacataccacaccaggagccaaggggataacaatgtgtctttggtagaaag

SEQ ID NO: 1835 - DNA, 161 bp, Homo sapiens
  misc_feature 15, 27, 67, 75, 76, 83, 88, 137, 147: n = A,T,C or G
ttactgggcacccanctccatgtgcangacttttcccaacacagccttggccagtcagatggtgtgncagggccnnaggtttncgtancctcttgggtgatagaaaggggcccaggccctgggctggggctcataanggactcaaangaggcaccttgccc

SEQ ID NO: 1836 - DNA, 510 bp, Homo sapiens
  misc_feature 476: n = A,T,C or G
tcgcccgggggccatggcagcagcggctactgcagccgagggggtccccagtcgggggcctcccggggaagtcattcatctgaatgtgggaggcaagagattcagtacctctcgccagactctcacctggatcccagactccttcttctccagtcttctgagcggacgcatctcgacgctgaaagatgagaccggagcaatcttcatcgacagggaccctacagtcttcgcccccatcctcaacttcctgcgcaccaaagagttggatcccaggggtgtccacggttccagcctcctccatgaagcccagttctatgggctcactcctctggttcgtcgcctgcagcttcgagaggagttggatcgatcttcttgtggaaacgtcctcttcaatggttacctgccgccaccagtgttcccagtgaagcggcggaaccggcacagcctagtggggcctcagcagctaggaggacggncagcccctgtccgacggagcaacacgatgccccc

SEQ ID NO: 1837 - DNA, 261 bp, Homo sapiens
  misc_feature 110, 162, 206: n = A,T,C or G
cgcgtccgttctagatcgcgagcggccgcccttttttttttttttatctttctgtttttccactaaaagctccgtttttccatcttcccattactctccctttcctgtgnacactcctgaagacaggcatcctcataaggtgttctgaattaactttagggngttctccaggtactttgcatctttttatatttcttgtaaattgntaatttctaagctccatgattaaagagaattcaccactaaaaaaaaaaaaaaagg

SEQ ID NO: 1838 - DNA, 269 bp, Homo sapiens
  misc_feature 24, 42, 45, 56, 99, 100, 109, 144, 201, 251: n = A,T,C or G
cgcgtccgggctggcgagcgccgncgccggcggagaccgacnctnggccagagccngcccgcggcgcccgggcctggccggctgcttcccgcctcagcnnggcgccccngcctccgtgcgccgcagactttgcctaggcgggcngaagctgaacaagaggtccctcggccctgcacggtccggccgcggtccggagccgangcgcatgagattccccaggaagccatcacactccttcccactgtggtttngggagcatgaaggcgttg

SEQ ID NO: 1839 - DNA, 538 bp, Homo sapiens
  misc_feature 517: n = A,T,C or G
gccccgcgtccgttttattttgcacttttatgggtgacagtttttacgcataacctttgataaaatacactcaagtgacttggacttagatgcttatccttacgtccttggtaccttttttgtattaacaaacactgcaatttatagattacatttgtaggaagttatgcttttttctggtttttgttttactttcaacctaggttataagactgttattctatagctccaacttaaggtgcctttttaattccctacagttttatgggtgttatcagtgctggagaatcatgtagttaatcccaaagtgctgggattacaggcgtgagccaccgcgcccagcctacattcacttctaaagtctatgtaatggtggtcattttttcccttttagaatacattaaatggttgatttggggaggaaaacttattctgaatattaacgggtggtgaaaaggggacagtttttacccttaaagtgcaaaagtggaacatacaaaataagactaaatttttnagaggtaactcaagtaatttc

SEQ ID NO: 1840 - DNA, 363 bp, Homo sapiens
  misc_feature 88, 202, 205, 281, 308, 309, 322: n = A,T,C or G
gtccggccagctgatgccgggagctaactaccgcgccggggccggggccggggccggggcccgacgtccccgcggggcccgggaccgngaggaggacggcgggggcctggagcccgcggccgtggcccgcgacctattgaggggcacatctaacatgtcatttgaggagctgttggaattgcagagccaagtggggactaanacntacaaacaattggtagctggaaatagtcctaagaaacaagcttctagaccacctatccaaaatgcatgtgttgcanataagcacaggcctctggaaatgtcanncaagatccgagtnccatttttacgtcaggttgttcccattagtaaaaaggtagc

SEQ ID NO: 1841 - DNA, 544 bp, Homo sapiens
  misc_feature 11, 94, 139, 207, 352, 375, 383, 385, 409, 429, 434, 447,452, 464, 480, 491, 492, 498, 501, 527: n = A,T,C or G
gcacccgctgngagaggcggtagcggcggcggcggcggtggtatcggcggcagctgtgagggggttccgggaagatggtgctgatcaaggaatnccgggtggttttgccatgttctgttcaggagtatcaggtagggcnagctttactctgtttgcaagaagctttgtaatgaattgagactgggtgggtggagaaggaattgaagntcttaaagaatgaaccttatgagaaggatggagaaaagggacagtttacgcacaaaatctatcacctaaagagcaaagttgcctgcattctgtgaggatgattgctcccgagggctcccttggtgtttcatgagaaaagccctgnaaatgccgtacccctactgtagnaacaattntnaaccgaaatggaatatattgaaangaatgattttccttcaattnaaaantccgaaaacaatnggcanccaaaacccatnactttggggaaccatntaggaaaaaanngtaccnatngggtttttaggattcccaaaaccacnattgggaaaaaaccttg

SEQ ID NO: 1842 - DNA, 501 bp, Homo sapiens
  misc_feature 249, 429, 452, 486: n = A,T,C or G
cccgcgtccggcggagaagactcaaaagagtgtgaagattgctcctggagcagttgtatgtgtagaaagtgaaatcagaggagatgtaactatcggacctcggacagtgatccaccctaaagcaagaattattgcggaagccgggccaatagtgattggcgaagggaacctaatagaagaacaggcccttatcataaattgcttacccagataatatcactcctgacacttgaagatccagtaaccaanaaccctatgattcattggcaccaataaatgttgtttggaagttgggctggtttattcccaaaggcccattgaaagatgggggaggataaaataaatggtcatttgaaatcaaaaagtcaattattgttaggccagaaaatggtaaatatttggaccaagttggcttgcattcatttgggngggctttggttgcaaccttaaantacattttgtaagttcatcccctggagaataccnggtggaatccttaat

SEQ ID NO: 1843 - DNA, 438 bp, Homo sapiens
  misc_feature 6: n = A,T,C or G
cgaccncgcgtccgggggatctgtgcctggcatggggacgagttctggcctccttagggtacggggagagcttggactttggtcctgacgtggtggacgacacaccttcgaagagtggacgttacctcagttgtctgttgttagagtttaatcgatcactcctctgttttgttgtgttctttcccagaaataactttaccaaaggaaagctattttgcgaactatcttctccagcggagatggccaatgtgctttgtaacagagccagactggtttcctatctcccaggattttgctctttagttaaaagggttgtcaatcccaaagccttttcgactgcaggatcatcaggttcggatgagtctcatgtggctgctgcacctccagatatatgctctcgaacagtgtggcctgatgaaactatgggaccctttggac

SEQ ID NO: 1844 - DNA, 219 bp, Homo sapiens
  misc_feature 40, 41, 68, 95: n = A,T,C or G
gggacagagcccccgatccgccagcaccacctgaggattnngaaaccgccccagcgatggaagagggncaggagctggagaggaaagcaatagangaactgcttaaggaggcaaaacgtgggaaaactagagctgaaacaatgggacccatgggttgcttattacagggacaagatacaaactaaaatcagccaaaataagacacaaagattaaagcca

SEQ ID NO: 1845 - DNA, 516 bp, Homo sapiens
  misc_feature 4, 14, 103, 159, 219, 251, 260, 266, 316, 327, 333, 344,368, 384, 458, 494, 498: n = A,T,C or G
cgtncgggacccgncaacatgggccgcgttcgcaccaaaacccgtgaagaaggcggcccgggtcatcatagaaaagtactacacgcgcctgggcaacgacttncacacgaacaagcgcgtgtgcgaggagatcgccattatccccagcaaaaagctccncaacaagatagcaggtttatgtcacgcatcttgatgaagcgaatttcagagaaggcccanttaaggaggtatcttccatcaaagctgcaggnaggagtgangagagnaaaggagtagacaattatgtttcctgaaggtctcagccttgggatcaagngagaattattngaaagntagatccctgnacaactaaaggaaatgcttgaagnctttttggaccttcgncaggttcttgtccaaccctttcaaggttcacttcaggcctacaagttggggattgaaatttttcaaaaacgccntcgggggaaccctgttttgaaaattttttttcttgntagntgccttgtattaattttt

SEQ ID NO: 1846 - DNA, 491 bp, Homo sapiens
gtcgaccccgcgtccgcagcctggcctgtgagaccctcgtggacaacaacctgcgggtcaccaactggaaccgcaagctgggctgcaagtgccagtacaagcacattgtggactggtgtggctgctcccccaacgacttcaagccacaggacttcctccggctgcagcaagtctccagacccaccttcttcgcccggaagttcgagtcgactgtgaaccaggaggtgctggaaatcctggacttccacctgtatggcagctacccccccggcacgccagccctcaaggcctactgggagaacacctacgacgcggctgatggccccagtgggctcagtgatgtcatgctcactgcttacacagccttcgcccgcctcaagcctgcaccatgccgccactgctgcacccccaatgggcaccccactctgcaggtttgagcccaggggctttgccgtccaagcgtgcacctgtatttctatgacgaccatttc

SEQ ID NO: 1847 - DNA, 442 bp, Homo sapiens
  misc_feature 419: n = A,T,C or G
tccgcaagagttatgcttaagaccagccagccttgatagtggcagaacatccactagcaatagcaataataatgcttcactacatgaagtcaaagcaggtgcagttaataaccaaagcaggccacaaagccacagcagtggagaatttagcctgcttcatgaccatgaggcttggtccagcagtggtagcagtccaatccagtacttgaaaagacagaccagatcaagcccagtgctccagcacaaaatatctgaaacactggagagtcgacatcacaagatcaaaactggttcccctggaagtgaaagttgttactctacaacagtttttggaagaaagcaataagcttacctcaagtacagataaagtcctcaagtcaagagaatcttttagatgaagtaatgaaaagtttggctgnctcttctgactttttgggaaaag

SEQ ID NO: 1848 - DNA, 358 bp, Homo sapiens
gcgtccgcgccgggccgctctagccggtgaggccggcgggctctctgtggctgcggctgggaaaccgcgcggaggaggtgcccggccggggaccagccctggtccagcgcctccctctctcagcatggacgaggagagcctggagtcggccttgcagacctaccgtgcgcagctgcagcaggtggagctggccttgggcgccggcctggattcgtctgagcaggctgacctgcgccagctgcagggggacctgaaggagctcatcgagctcaccgaggccagcctggtgtctgtcaggaagagcaggttgttggccgcgctggacgaagagcgcccgggcccgccaggaagatgctga

SEQ ID NO: 1849 - DNA, 435 bp, Homo sapiens
  misc_feature 358: n = A,T,C or G
agtcaccacgcgtccgggttgcactcttcctatagcccagagggcgagagggcctgtggcctgggggaaggaggacgaggttctgcctggatcccagcagtaggacgctgtgccatttgggaacaaaggaatagtctgcctggaatccctgcagatcttggggccggaggccagtccaacccttggagcaggaagaaacgcaaagttgtcaagaaccaagtcgagctgcctcagagccggcccgcagtagctgcagactccgcccgcgacgtgtgcgcgcttctctgggccagagcgagcctgttttgtgctcgggttaagagatttgtcccagctataccatgggcccgcactcggnaaagctggcttgcgtggccgctggtgtggttatcggggctggtgcctgctactgtgtatacagactgcttggggaag

SEQ ID NO: 1850 - DNA, 214 bp, Homo sapiens
  misc_feature 7, 28, 37, 40, 41, 55, 91, 153, 164, 165, 179, 187, 190,193, 196, 200, 203: n = A,T,C or G
tcgaccncgcgtccgctcaggaaccttngagaagatnagnnccccacttagattnttaaggagtaaaaagggctgagttatgcctttaagngctgtcaagaattcacttgggtttgggacatttgctggtgtaatgctagatgcccacagcancataatattgnnctttgtcaaaggtnggtaaatnctntgnttntcancanccctttcccca

SEQ ID NO: 1851 - DNA, 464 bp, Homo sapiens
  misc_feature 349, 363, 427: n = A,T,C or G
agtcaccacgcgtccgcggctggtggtgggctcgggccgctcgccttgcccgtcttcgcttccggaggtcgctactgccgcctcagcggccccggagcgggggcgcccgggggtccttcgcccccggccacggtccccgcgccggggcttcgccgcccccagtgtccgagctggatcgtgcggacgcctggctcctccgaaaagcgcacgagacagccttcctctcctggttccgcaatggcctcctggcatcgggcatcggggtcatctccttcatgcagagtgacatgggtcgggaagcagcatatgaccatcccccgaccttggccctgttgctaccctgcctctnccgcaggcttcttnctgctgggcggcctgtgcgtggtgtggggcaagcgccttgtacccgtgggcctggcggcgcttngaggacccatgcagctgacctggggggccggcctggg

SEQ ID NO: 1852 - DNA, 434 bp, Homo sapiens
gcgtccgctcgctgcagccccgcctgggccacggcaccctcgagcgccagccccgcgccccacccgggagcagcgagccaccggcgcgctccccaggagcccctgcaggcgccggccctggtccagcgcctccctctctcagcatggacgaggagagcctggagtcggccttgcagacctaccgtgcgcagctgcagcaggtggagctgccttgggcgccggcctggattcgtctgagcaggctgacctgcgccagctgcagggggacctgaaggagctcatcgagctcaccgaggccagcctggtgtctgtcaggaagagcaggttgttggccgcgctggacgaagagcgcccgggccgccaggaagatgctgagtaccaggctttccgggaggccatcactgaggcggtggaggcaccagcagcggcccgtg

SEQ ID NO: 1853 - DNA, 490 bp, Homo sapiens
gcgccccgcgtccggaaattgacccctagagaaaatcccattaacttgttaaattagtggaattaacaacaaataaagcatgtttgagacctggcaaaaattcctctggtagtatttataaatagagctgcatgcctctagtatgaaaaccgtatcagttgcaagtgccacttctacaagttactcagtttactctttgtatcagtaactttaaaggttggatgatccttgctggttaaagctaaatctcaacctagcaactaaatgaaaatatttagaatcatcagaatctgaacagactaaaattatcagcgataagcagaatcaagcagggtataagttttatctcaattatttgaaattgactggagttttcttaaagtgtaaagctgaaatttgctaaccatgtttttgatgaacccacagtgcagcattgggttggggttttagatttgaatgactctctgctataattatcatgactttgaaa

SEQ ID NO: 1854 - DNA, 444 bp, Homo sapiens
  misc_feature 126, 224, 362, 364: n = A,T,C or G
tgtcgaccccgcgtccgaacctttgggagactccaagacagcatgctccgaggtcggcgggggtctgggtggccatggaggagccccctgtgcgagaagaggaagaggaggagggagaggaggacnaggagagggacgaggttgggcccgagggggcgctgggcaagagccccttccagctgaccgccgaggacgtgtatgacatctcctacctgttgggccgngagcttatggccctgggcagcgacccccgggtgacgcagctgcagttcaaagtcgtccgcgtcctggagatgctggaggcgctggtgaatgagggcagcctggcgctggaggagctgaagatggatagggaccacctnangaaggaggtggaggggctgcggagacagagccctccggccagcggggaggttgaacctgggcccaaacaaaatggtggtt

SEQ ID NO: 1855 - DNA, 460 bp, Homo sapiens
  misc_feature 105, 110, 132, 133, 139, 151, 162, 186, 209, 234, 239, 243,249, 258, 266, 276, 284, 286, 292, 309, 326, 353, 354, 373,378, 382, 383, 385, 393, 406, 408, 411, 412, 414, 421, 441,445: n = A,T,C or G
tgtctgccgaacaactgaaaactatgcaggttatatcattccaccagcaccaccaagacctgattttttgatgcttcaaggggagaaaactacatgaagcttggngaagngagaagggtcaagtgaccgaanngcaagnaatttcacaaanagaatgaaacnaggcaactggaaagctcgaaatanttttggcaattatttcagagganagcaccagatttgccgtattgcatnggaanttgntacccngtagttccntgttgganatgtcaacantcccctantnttttgnacgaaactaaggaattntagaaatttttgcaatngttcctttacttgggggaaaattattnnaattccaaaggaatctttnagagnttgnntngccgtaanggcaagagagagncnatnntngaaactnaggaagcggaaaccttttgnaaanaacttttctttttta

SEQ ID NO: 1856 - DNA, 467 bp, Homo sapiens
  misc_feature 10, 250, 304, 367, 401, 410: n = A,T,C or G
gagtcgaccncgcgtccggcggcgagcgggactggccattggagtgctccgctgcggagggaggggaccccgactcgagtaagtttgcgagagcactacgcagtcagtcgggggcagcagcaagatgcgaagcgagccgtacagatcccgggctctccgaacgcaacttcgccctgcttgagcgaggctgcggtttccgaggccctctccagccaaggaaaagctacacaaaaagcctggatcactcatngaaccacccctgaagccagtgaaggctctctcgcctcgccctctagcgttcgtnttggagtagcgccaccccggcttcctggggacacaggtttggcaccatggggcccaccagcgncccgctgggcaaggcccaccgcaggctcggtctntgactacgncaactatgatattcattcgtccggcattacaactacacggggaaagctgaatatcag

SEQ ID NO: 1857 - DNA, 528 bp, Homo sapiens
  misc_feature 247, 298, 304, 335, 343, 359, 382, 408, 427, 429, 500, 512: n = A,T,C or G
cgtacgccgagcgccgctccggctgcaccgcgctcgctccgagtttcaggctcgtgctaagctagcgccgtcgtcgtctcccttcagtcgccatcatgattatctaccgggacctcatcagccacgatgagatgttctccgacatctacaagatccgggagatcgcggacgggttgtgcctggaggtggaggggaagatggtcagtaggacagaaaggtaacattgattgactcgcttcaattgggngggaaatgcctccgctgaaaggcccccgagggcgaaagggtacccgaaagncaccangtaatcacttgggtgttccgaatattggttnattgaaanccattcaacccttgcnagggaaaaacaaaggttttttcnaacaaaaaaagaaaagcccttacaanggaaaaggttaccattcananaagaatttaacatttggaaaatttcaaattctaaataggggggaaaaaccttttggaaaggaaaccaggangtaccccagganaaaggaaggtaaaaaa

SEQ ID NO: 1858 - DNA, 441 bp, Homo sapiens
  misc_feature 2: n = A,T,C or G
gngtcgaccccgcgtccggtggagggtcaggagctgccccggatcctctccatgtagttgcgaagctcctcagggtccttcagccccatgtcctcacacacccagcggatgtcctcctcgcctgccacaaggatggactgcacagcaggggcccctacaggctcctcaggtgactgggctggaggggctggcgcaaatgtcacaaactctactcgcttccgccgccccccagcctcctttcgggccagggtgcttgaggagctggtggtgcccccaggagggccaggggccagggtaggggcctcccctcctcccccactctcacaggggcagctcccctcccccttgggcgggccaggggactgccggtccagctggcggctcagttcctcctggtcagtgcccagccagacccagttgtggggctgggggaggttgggg

SEQ ID NO: 1859 - DNA, 326 bp, Homo sapiens
  misc_feature 181, 287, 305: n = A,T,C or G
gcgccccgcgtccggcggcggcggcggcggcagcggcagccagaggactcccagcggctggagcagaagtgttagccggccagagctcccagacccctacccacagccaggcgggacgcgcacagtccctccacgcggaaagaagtaccttcgccggtcaccggctcctgcagggttgcanatatatacagagcttcataatcagcccaagaccacatagagcaaacatgaatgatatttcccaaaaggctgagattaaagaaatgcttgcttctgatgatgaggangatgtatcttctaaagtngaaaaggcttatgttccaaaa

SEQ ID NO: 1860 - DNA, 319 bp, Homo sapiens
  misc_feature 132, 139, 198, 244, 267, 276: n = A,T,C or G
cgaccccgcgtccgacccactgaagacgtctgcgtgagaatagagaccaccgaggccgactcgcgggccgttgcacccaccgccaaggacaaaaggagcccagcgctactagctgcacccgattcctcccantgcttancatgaagaaggccgaaatgggacgattcagtatttccccggatgaagacagcagcagcntacagtttccaacagcgacttcaactacttcctaccctcaccaagncaagcttgctctgaaaagcccanttatgccanaatgtaggatcctgaaaaccaagaaacttttttacttgaaatt

SEQ ID NO: 1861 - DNA, 530 bp, Homo sapiens
  misc_feature 67, 68, 142, 174, 187, 218, 241, 267, 290, 318, 383, 386,393, 425, 429, 499: n = A,T,C or G
gcgtacggcctgttgggctgtctggggggtggccatttagggatcgtggggacggggtccaccccanncaagaaagaacaggcccgtccacaggcccggctctgggccacagtgccccggaagcaggtgtgtccagagtcangcttgaatggctctccccacaaccacccagcnaggcgctggtgcntccttctgcctcatgggaccagtccagcttncagccgctctgggctcgagggtnggtactgaccactttccttcttgagntgggagcattctcttgggggagnctcttccagtgggcacctgcctgggacncttgcccaccggttttcttgtaaaaatcaggaataccggtggcttttagtaaaaggcaagaccanagncgccttncgttgggcaggggaaaagccaagcgtgccggngggnaaggtcactggaaaaaggtggcttgccctaagggggaagtttgggaaaatagtccccctgttccaagaantgcctttgaatttttaaaaacatttttggct

SEQ ID NO: 1862 - DNA, 313 bp, Homo sapiens
  misc_feature 5, 19, 26, 47, 68, 89, 112, 185, 218, 237, 247, 262, 267,268, 273, 292, 306: n = A,T,C or G
caatntacaacgccatgtncacccanatgttccagactaagcgctgntttcgactggcccccaccttnagcaacctgctcctgcagccnaccaccaaccctcatacctcggncagccacaggccttgcggtcaatggggatgtagacaagccttcagagccagcctctgaggagggctctgagtnggaggggagtgagtccagtggacgctcctgtcngaatgagcgcagcatccangagaagcttnaggtcctgatggccnaaggnntgctnccttgctgtgaaagtcttnctggactggcttcngaccaac

SEQ ID NO: 1863 - DNA, 528 bp, Homo sapiens
  misc_feature 1, 212, 234, 265, 329, 374, 414, 425, 435, 436, 462, 509,513: n = A,T,C or G
nggagtcgacccacgcgtccggccgccagaacacaggtgtcgtgaaaactacccctaaaagccaaaatgggaaaggaaaagactcatatcaacattgttcgtcattggacacgtagattcgggcaagtccaccactactggccatctgatctataaatgcggtggcatccgacaaaagaaccattgaaaaatttgagaaggaggctgctganatgggaaagggctccttcaagntatgcctgggtcttggataaacttgaaagcntgagccgtgaaaccgttgggtatcaccatctggatattcttcctttgtggggaaattttggagnaccaggcaagttacctattggtggacttattcatttggatggccnccaagggaccaccaggaggaccttttatcaaaaaaaacantgattacaggnggacatcctnnaggcctggactggtggctggtcctgnattggttgctggctgggtggtttggatggaattttgaaggcctgggntatncttcccaaaagaaat

SEQ ID NO: 1864 - DNA, 473 bp, Homo sapiens
  misc_feature 16, 138, 283, 324, 396, 430: n = A,T,C or G
gcgtccgatggcgtgntgtctcacagaaagttctccgctcccagacatgggtccctcggcttcctgcctcggaagcgcagcagcaggcatcgtgggaaggtgaagagcttccctaaggatgacccatccaagccggtncacctcacaagccttcctgggatacaaggctggcatgactcacatcgtgcgggaagtcgacaggccgggatccaaggtgaacaagaaggaggtggtggaggcctgtgaccatttgtaagagacaccacccatggttgggttgtgnggcaattggtgggcctaccgttgggaaaacccctcgaggcnctccggtaccttcaagacttgtcttttgctggagcacaatcagttgaatgaaatggcaagaagggcggtttnttattaaagtaatttggccattaaaaattctaangaaaggaaagggcctttaccaaagttacctgcaaggaaaatgg

SEQ ID NO: 1865 - DNA, 419 bp, Homo sapiens
  misc_feature 24, 56, 135, 195, 279, 294, 298, 306, 308, 356, 363: n = A,T,C or G
ccggccgggctgggtcccagcacntgaccccagctgcactgctgtacagggctgcncgtcacccgaagtcagaaacgtggcatctcatcggaagaggaggaaggagaggtagacagtgaagtagagctgacatcnagccagaggttggcctcagagcctgaacatgcgccagtcactatctaccttcagctcagnagaatccatcagatggggaggaaggcacagctagtgaacccttcccccagtggccacacctggaagttggctagcaccaacacntgatgagtccgggcncagnatgaagcngngttctgatgaacatgttgactcccaaggggctcaagaaaatccccacntgggacnccactctccttcaggagggtcataccctgggccctggaacccagctccctggccca

SEQ ID NO: 1866 - DNA, 788 bp, Homo sapiens
  misc_feature 60, 507, 551, 622, 634, 644, 663, 665, 688, 712, 726, 733: n = A,T,C or G
ttgcgcccccgccggtgagcgcggggagcgccgcaagcccaacgccgggggcagccccgntccggtgcgccgccggccggaggcctcgccggtgcagaaaaaggagaagaaggacaaggagcgggaaaacgagaaggagaagagtgccctagcccgggagcgcagcctcaagaagcgccagtcgctgcccgcctccccacgtgcccgcctctctgccagcaccgcctctgagctcagccccaaatccaaggccaggccatcctctccctccacatcctggcacaggcctgcctccccctgccccagcccagggccaggccacactctgcctccaaagccaccgtccccccgaggcaccactgcatcccccaaggggcgggttcggaggaaggaggaggcaaaggagagccccagcgccgcagggcccgaggacaagagccagagcaagcgcagggccagtaacgagaaggagtcagcaggcccagccttaccggcacctttggcggngccttggccaacccaagcccggcccaaaaggagcaagcccccgnggagaccccttacagacctggtttctttgacttaaccccaagcccttgttccccggtggaccctagcaaancaatgggccggnaccacaagancgagaagaagccccttggntnttggcttgaaagcggcgccaggncccgggaacaaccggaagccccangagcaagaaccgangctttangcaaaaaaggacaaagccaattgcaaaaggacaacttgcaccggaaggcccaggc

SEQ ID NO: 1867 - DNA, 538 bp, Homo sapiens
  misc_feature 488: n = A,T,C or G
ccccgcgtccgtttaagagttgcatattttactttatttttattaaattaaaagctacagtctggcagcgattccagaacagggtaaggaggttcctcacaggggtcagagaagagcggagaaagacagactgacggagactgagacacaggagagaaaggacaaggttaagggagaactgtatctgatgaacacacacagccggctccatggcgggtgacggggagctcacatcagcccaatttctcctccccggcacccgaagttcagcggtggagcagtatgtgggggcggttaggaatcaagagaccctcccttccccaccctaggtcctttctcggcttggtcgtggagcacagcacataccagaaaaagccaagggcaatggaggggcagggaaaccgggagtatatgtacacggggaggggagaacagagccttggaggtcggcctctgccagaagggaagtggctcacacttgcatttgnaacacttggccagtgggggatgggggaaaggaattgccccttccttttgg

SEQ ID NO: 1868 - DNA, 700 bp, Homo sapiens
  misc_feature 4: n = A,T,C or G
cccncgcgtccgcacacccttcctgtactcagtcctcagtttgcctggtgagagagcagcctcctcccgtgtgctctgccagctggacccagactggccatattaccagtgagaccaaaaagatggaggtggggaggtagctctgaggtctgggaaaccattccagctcctgccagttttaacttgtgtttaattcctggcacagttgtcctggaaatgcctttttctcttgcctgggaaccactagaaggggatgttgtctgtgttggccagggccatgcaaattcaacatcttgtttctgcccttcccccgtgtagctgaggctaggtgttggcattacccagtgcttgttcttcagagagcaaaagcactgctcgtcatgtctgaaatttagtgagtgagctcacccactaggctggtgtttcctgcccgtggctgcacattggaagcaccggggcactttgagaactacagatgcctgggtcccagagcatctaaggtgctctagggtgtgtccaggacacaagccctggttgaggaccactgctatattgtatggcctcttttaaaaaagttaattttacttggaaatgatttcaaagctacagaaaagttgcaagaataaaaactgtacaaatgaggcttaaatattctttggccaaatcacctattaacatttcgttccaaaaaaaaaaaaaa

SEQ ID NO: 1869 - DNA, 700 bp, Homo sapiens
  misc_feature 407, 412, 475, 479, 580, 611, 623, 673, 674, 685, 687: n = A,T,C or G
gggcagcgcctccgacatgaaggctgagctgtcgcaacttattagcgacctgggcgagctcagcttcggcaacgacgtgcgcaccctgcaggccgacttgcgggtgacgcgcctgctgtcaggcgacagcacgggcagcgagagctccatcgagggcgggggccctgacgccacctccgccaccgccggggactcgtcccgccaggccgacggcgccagtgcagacgagccccactcgggctgagctcctccgcgcgtcgccggcgctccaccgtggctacccatccgtggtcccgacaacctccctgtcccttgcccgcccccaggaagggggaaatggggcatttggggcccagacctacacttggagcccaggtccaagcgttccccgaccgctttccctactnccggnccccgctcccgccccaagaacttttggcttttttgcgcgtggggatgcggggagatttgagangggnaaacccccgccaggaaggaagagaagaggcacccctttgggaatgccggtgaagggaaggttggctgaagttcctaagtttaaggcctaaggtgccttggncaggtttcctgtttgtgggggaaacttgggncttgaggagganggggttaaatttcttcttccaacccctgggaagcgggccttgccttgganntgaaatttaantnaaaaaaaaaaaaa

SEQ ID NO: 1870 - DNA, 544 bp, Homo sapiens
  misc_feature 72: n = A,T,C or G
tcttcatcatgggtgccagcatccacctggtgggtgactctgtcaaccaccgcctgctcttcagtggctacnagcaccacctgtctgtccgtgagaaccccatcatcaagaatctcaagccggagacgctgatcgactcctttgagctgctctactattatgatgagtacctgggtcactgcatgtggtacatccccttcttcctcatcctcttcatgtacttcagcggctgctttactgcctctaaagctgagagcttgattccagggcctgccctgctcctggtggcacccagtggcctgtactactggtacctggtcaccgagggccagatcttcatcctcttcatcttcaccttcttcgccatgctggccctcgtcctgcaccagaagcgcaagcgcctcttcctggacagcaacggcctcttcctcttctcctccttcgcactgaccctcttgcttgtggcgctctgggtcgcctggctgtggaatgaccctgttctcaagaagaaagtacccgggtgtcatctacgtcctgagccctg

SEQ ID NO: 1871 - DNA, 684 bp, Homo sapiens
  misc_feature 106, 622, 643: n = A,T,C or G
ccgcgtccggtttgttcgttataggtttaataagtctattgaggaagacctactcctgtgtgaatctttgcaaagtaatgctaccggtgaagaaatattcaactgnatcaacagttttatgcagaaacatgaaattgaatgggaaaaatgtgttgatgtttgtagtgatgcttctagggcagtggatgggaaaattgccgaagctgtcaccttaataaaatatgtggctcccgaaagcaccagtagtcactgcctattatacagacatgcactggcagttaaaataatgcctacatctctaaaaaatgtgctagaccaggcagtacaaatcatcaattatattaaagctcgaccacatcaatccagactattaaaaattttatgtgaggaaatgggtgctcagcacacagcacttcttctaaatacagaggtgaggtggctttctcgaggtaaagttcttgtaagactttttgaacttcgtcgtgaacttttggttttcatggattctggcttttcgactatcttgattggttaacaaaattcatcttggctgctaagacttgcatatcttgcagatatttttactaaattaaaatgaaagttaatttgtcaatgccaaggnaaaaatgtgacccgttttacnagtatttgataaaatgtcgtcattggtaagaaaattggaat

SEQ ID NO: 1872 - DNA, 615 bp, Homo sapiens
tcgacccacgcgtccgcggacgcgtgggtgtgactggcacccaatgccatgcctttatggtcacttggtagtataaaggcatggcatttgttgtgactggcacccaatgtttgattttttttttaaaactatccaattaaaattaaggtctgggagtgttctgtttcccattctttaatactcacctcctcccagactttctacacctgttgcacctcaggcagaggatgttctggacctccccctcttggtccctactagagacctctcaacagatctgtgggcccagtcattgggttttatcagtgcttaatgtgaactaagttttttacttccacagaatacaagccactaccttctgacctccccaccccccaccaacccccatcttttaatatgctgtggggcatagaactccggaatgaccagcatgatattttcagagtcttgtccccggggtattagcacctctttttgaacagggaattgattcaagattggacatggtctcctctgattatcaggtactggggctgagggcattaaaaatagtaagcctccctctcgtcccctgcctcaagaaattgcctcttatttatcaacatctttttcctc

SEQ ID NO: 1873 - DNA, 487 bp, Homo sapiens
  misc_feature 3: n = A,T,C or G
ccncgcgtccggtgttcctccctgagaattagtggtcagacattgcagagggcatcagaagcgggtagatgaaatagcgaaaggaaacaggctagcagaccaaagagctaagtcagcagtaagaaggccccaaggtcccaaaacacttgaggcccctctgatttgggagggctacataagggaaataaagcctcagtattcccctacagagatagaatgggccacctctcgaggtatacttttcaaccctcaggatggttacaatcagaagattgcaaagtacgcttgccagcctccagccaatggaagattcttaaaatcctccactgagcctttcacttaggaaagcataagacatcagtgcatccaaagattgttctcaggagaaaatctactaaaaatggtcaaataggttgttaatactcgtgaaaccctcttaaaaataatccctttaacagatgacttcttccccaccacaatcaaagga

SEQ ID NO: 1874 - DNA, 466 bp, Homo sapiens
acgcgtccgatgaccaggctgccccgcctcctggttctgcccaagttctccctggagactgaagtcgacctcaggaagcccctagagaacctgggaatgaccgacatgttcagacagtttcaggctgacttcacgagtctttcagaccaagagcctctccacgtcgcgcaggcgctgcagaaagtgaagatcgaggtgaacgagagtggcacggtggcctcctcatccacagctgtcatagtctcagcccgcatggcccccgaggagatcatcatggacagacccttcctctttgtggtccggcacaaccccacaggtgagcctggaacccatcacgttccacatcctcccacccattctttctctcaggaactagtcccgacagatgcagacatccctctatccctgagagggctctgggcagggaacccataaccctaccctgcttcctgtcccaagaggaggc

SEQ ID NO: 1875 - DNA, 487 bp, Homo sapiens
agtcgacccacgcgtccgcccacgcgtccgccttcttctgggcactgactgcccttctggtcgcttcagctgctgccttccagggtcttctgctgctgttgccgccaccaccatctgtacccacaggggagttaggatcaggcctccaggtgggagccccaggagcagaggaagaggtggaagagtcctcaccactgcaagagccaccaagccaggcagcaggcaccacccctggtccagaccctaaggcctatcagcttctatcagcccgcagtgcctgcctgctgggcctgttggccgccaccaacgcgctgaccaatggcgtgctgcctgccgtgcagagcttttcctgcttaccctacgggcgtctggcctaccacctggctgtggtgctgggcagtgctgccaatcccctggcctgcttcctggccatgggtgtgctgtgcaggtacacaaggacccccagcccctgtgcgggtggaactca

SEQ ID NO: 1876 - DNA, 468 bp, Homo sapiens
  misc_feature 7, 107: n = A,T,C or G
tcgaccncgcgtccggtcttcgcaggtggccctcgggcccgcagccgctgggtaagggtgatgcctagcctggcttattgcaccttccttttggcggttggcttggngcgaatcttcatcttagcacatttccctcaccaggtgctggctggcctaataactggcgctgtcctgggctggctgatgactccccgagtgcctatggagcgggagctaagcttctatgggttgactgcactggccctcatgctaggcaccagcctcatctattggaccctctttacactgggcctggatctttcttggtccatcagcctagccttcaagtggtgtgagcggcctgagtggatacacgtggatagccggccctttgcctccctgagccgtgactcaggggctgccctgggcctgggcattgccttgcactctccctgctatgcccaggtgccgtcgggcacagctggggaa

SEQ ID NO: 1877 - DNA, 534 bp, Homo sapiens
  misc_feature 455: n = A,T,C or G
accccgcgtccgcccttaagagacaatgattgagaaagagccatgtggcttggctctagaaacgtcattatcattaggaccatcagattttagattaagctgctattgaattaataaaatcccaatgaagcagagttatagggatagatttatagctggcagagtggtatcaaaggagaaaaacagtgaaaaagccaatttcactggttcgttcaatccagcttgttgctaatattagttacccttgttttaatgacagagagtggctggaatctgtagctaggggaggggcaacactgttagatgtgaggaaaggaagtgccaaaaatgcctggacagatggcttgtcccaaggccaggacacacactttaaaatccaacattcacctaagcaagtaattcttaaagatcttacagaaacgcagagtcaattcaggtttataaaggaaggcttnaggggagagaggaaggcctggggggcctggacgaaagaggcctaggacctgaagagactccagcgagtcttcgggaagc

SEQ ID NO: 1878 - DNA, 475 bp, Homo sapiens
agtcgaccacgcgtccgcagcatcgtccgagacttcccagactcccggccagccatcgaggacctcaagtactgcctggagaggacggaccagaggcagcagctgctcgtgtccctcaaggctgccctggagactcggctcctgcatccaggcgtcaacacgtgtgacatcatcaccctctatatctctgccatcaaggcgctgcgcgtgctggacccttccatggtcatcctggaggtggcctgtgagcctatccgccgctacctgaggacgcgggaggacacagtgcggcagattgtggctgggctgacgggggactcggacgggacaggggactgggctgttgaagctgtccaagaccgacccggcgagcctggagacaggccaggacagtgagggatgactcaggcgagccagaggacctggggtcccggaccctgtggatgcccgatcaggggaaagtcgagctccagcc

SEQ ID NO: 1879 - DNA, 458 bp, Homo sapiens
gtccgcacaattgaaaactgggaaaaataatctcgtggttcggtttgttagtttgagacgcagtctcactctgtcgcccaggctagagtacggtggcccaatctcagctcactgcaacctccaacctcccaggttcaagcaattctcttgcctcagcctcccggggtaactggggattacaggcgcgcaccaccacgcccagctaatttttgtgtttttagtagagatgagattttgccatgttggccaggttggtcttgaactcctgacctcaagtgatccacccacctcggcctcccaaagtgctgggattacaggtgtgagccaccgtatctggctctcatattttttatatacagattgaatatccctaatttgaaaacctgaaatctgaaatcttccaaaatccaaaactttttgagcagttacatgatatttgaatgaactgctcataagaa

SEQ ID NO: 1880 - DNA, 472 bp, Homo sapiens
  misc_feature 42, 113, 114, 146, 230, 236, 340, 369, 382, 383, 394, 431,432, 450: n = A,T,C or G
gaggaaaccaaagtgctctgtatcctccagtctccgcgcctncacccagctcaggaacccgcgaaccctctcttgaccactatgagcctcccgtccagccgcgcggcccgtgnnccgggtccttcgggctccttgttgcgcgctgntcgcgctgctgctcctgcttgacgccgccgggggcccctcgccagctgctgggtcctgtctctgctgtgctgacagagctgcgntgcacnttgttaacgcgtttacgctgagagtaaaaccccaaaaccgattggtaaactgcaggttgtttccccgcaggcctcgcagtgctccaaggtgggaaagatggtangctctcccttgaaagaaccgggtaagcanagtttatgtctgnnaccccgggaangcccccttttttcttaaaggaaaaggtgcatcccaannaaaaattttgggaccagntggggaaaaccaaggaaaaaaa

SEQ ID NO: 1881 - DNA, 508 bp, Homo sapiens
gcgtccgccctggctcctccagcaagacctcgtctttgcttgtcctgctcagatgctggtcatcctgggcatgtccccagtgtggactctggactgggaagggggcaggcccctttggacctgcagttggcctcagcagaaggccttgccttgtgtatgtgactccatatcccgggagcagttgacctttgccaaacactttacagttctggaggaggaggtaacatagatgcctgggcctgatggtggggccatacccatgtgtcgcctctcactctggcagcctcagaggccccttgctgctggctcccatctccctcccatttgcagaccaggaaggaagagcaagctgtacaaagggaagcagagcctggggtggggtgtgagcagggtgacccctcatctgaaaggcccaaaccaggggggaagcaccagccttagtgcagccccctctgaccccaccttagaatggaaagccttcacctgcagcccaggccttcctccccgg

SEQ ID NO: 1882 - DNA, 512 bp, Homo sapiens
agtcgccccgcgtccggtgattccagggtgcagaagggattcatattcccagaacgctttaagtgtacacctgcaggataaagagataccggttacattattaaatgattctagggattcactgggggatatttttgttgcttttactttcatggttagagctacaaagaacaagtgatttttttttttttctcccttccccattcagaaacattatacattgggccatttttctttctcccaaagaagattcatggatagtcagactgaactgtgtgcaacaggaaaagtcaaaagggaaaaggcagctgatgaggttcatggttacatgttctacatcatgcagagtagcttgaaatctagtctggagaaaactggatcaagattctagcccactggagttgcaaggaatgagaggcaaaaattctaaagatttgggttatattttcaacttgggggacagagagaaatggagagcaggaattacagttccaacaaacatcatgatagtc

SEQ ID NO: 1883 - DNA, 259 bp, Homo sapiens
  misc_feature 46, 52, 53, 81, 102, 108, 124, 168, 176, 201, 203, 212, 223,241: n = A,T,C or G
ccacgcgtccgactagttctagatcgcgagcggcgccctttttttntttttnncacgcttaattcactttatttttcttgnataaaaaccctatgttgtagncacagntggggcctgagtccgntgcacggagactctggtgtgggtcttgacgaggtggtcaagagnaactcctngatagggagacttgggtgaatacantntccttccanaggtccggggngttcatggtatgctgtanggtccttaaaaaaatggg

SEQ ID NO: 1884 - DNA, 336 bp, Homo sapiens
gtccgaaaaaatgataatgtgcataaaattcaacccagctttcaaagtccagtcaaaatatcagaaatcatgaggtccaatggattttgtttagcaaataccgaaacaatagttattgaccacagtataccaaatggaagagaccagcacctgggcgtggacccaacagagcatttatttgagaatggcagtgagtttccctcagagctggaggacggggacgacccagcagcctacgtcaccaacctgtcatattaccacctggtccccttcgagacagacatttgggactgaacctctctatcaggcctcccccgcctcaagctgttcactgcc

SEQ ID NO: 1885 - DNA, 587 bp, Homo sapiens
  misc_feature 520, 528, 551, 555: n = A,T,C or G
cgcgtccgcacaacaagacactccaattgtgatttgagttgaggatctctgcctgccttcctgccgtccttccttcttccccgatccatgctacttttaggggctgcggagagcagcagcagagctgagtaatgatacagggcaccacggagagaaagtagaaccatttcactcctgggaagatggggtatttcccacttccagcaacgaaataacaaatgaaaagttgcatacttattgatgtattgtatgagccagtagcattttatgtacaaaacagaagtcaatgcaacagtatgtatgtgtgcctgtgtgtgtataaaaataaccattgaagctaacttgctaatgtacttaggcaagccacttcccatctctgggcctcgtctttcctccctctaaaatcaaagagctgaattatgtgatccttgaggtctcttccacttataataccaactgtcttgtcagactggcaaattatattggcctctccttatgtggtgggtttttttgggagggncatagttncttatacacaggacacctgcatnatcnaagggcttttttttctaaaaaaaaaaaaaatg

SEQ ID NO: 1886 - DNA, 419 bp, Homo sapiens
cgtccgctcctgagtagctgggatgacaggcgtgcacctggcagctttttcaaagtgttgatggtaatctgaggcaatctaagggagtcattttttaagtgactttatacagaaagattggtaagagccaaggggtagaagtggcataaatgtctaaagcagggaagtgacagggactttcattgttcttggctgaggagaagcgggagtggctgatggaagcacctaaatgatgcctttgtctgtgggaaggcaaatgatgccccagagctctaaccaaaggttttgcagccgccgaaaaacaggaaagttgggaagcgggggtaggactacactgaatcattaacagtgctgtaaactacccatgtggccattaacaatggacctttgggggagttttcctaaacgatcactctgga

SEQ ID NO: 1887 - DNA, 489 bp, Homo sapiens
cgtcaaacacccgcaggctgtcgatttcatcatcaaagaaatcaagacgataagggcagctcactccccatcgggaagagatccagcaacgcgccgcgcgtggcgtattcgccgtgctccatcacctggtcaacatggcgataaccggcgctgtccagttgggttcgtaatgcatctcgtgacaggcgctgaccttttttcatcaccagcgcatgaccgtggagaaaactgtgtgggcaaacgcgctgcataagcgtattcaccggaacaatcagtacgccacgctgcatcgtcggtagctggtaaagggtggaaaggcgcgaggagataatgtcctgatgaggcgaaaaactgtcgtagggaagagtttcccagtccgccagattcatcaccatttgatcggtaaactggctgatttcatcatgcaaacgcagagcattttgcatatctggtgcaatgagtaccaccggaccggcgtgacgttcggca

SEQ ID NO: 1888 - DNA, 505 bp, Homo sapiens
cgcgtccgtttatttttatgcccctttttgtggataagattctttagataaaatctaaagaattttaagtgactttctccaggtcatgaagattcaatgggtagaattgaatcagaattgaaatgttccagattcatattcttgtgtgtgtttgataaaattcatggcttccaaagtaactgaacacttcctttgggcccttggagggaaaatccatatttttactaattacacttttttttttagacatctggcagttctttgaacttaaacatattctcatggccatagttccaaattaagcccgacgcagttgctaaaaatcttgctgcactgttgaatactaataatgcaacatttattggatgtttttgcattttgatgaccttcatgattcatttataagtctttgtaagtgcttaagtgaccccctcactagtgaaaataataaatgttctatatcatttattattatttgtgtattctctacatgatatattttttt

SEQ ID NO: 1889 - DNA, 520 bp, Homo sapiens
ccgcgtccgggaggatggacgtactggtgtctgagtgctccgcgcggctgctgcagcaggaagaagagattaaatctctgactgctgaaattgacccggttgaaaaactgtggctgtttaggagcttctccaaatttggagcagttacaagaagaaaatttaaaataaagtatcgactgaatattcttcgaaagagtcttcaggcagaaaggaacaaaccaactaaaaatatgattaacattattagccgcctacaagaggtctttggtcatgcaattaaggctgcatatccagatttggaaaatcctcctctgctagtgacaccaagtcagcaggccaagtttggggactatcagtgtaatagtgctatgggtatttctcagatgctcaaaaccaaggaacagaaagttaatccaagagaaattgctgaaaacattaccaaacacctcccagacaatgaatgtattgaaaaagttgaaattgctggtcctggttttattaatgtccacttaagaaagga

SEQ ID NO: 1890 - DNA, 458 bp, Homo sapiens
cgccccgcgtccgctaattataagctttacaagtatttattttataaggcttagacagaattattggagttttaaattaagtgtattggaaaagaaaggatggtatgtgtatgaaatgttaagatcctacgcaacactgctatttttttcctttaatatttgtgctgcataacaaaagccactagactgttactgtcttgtctgtccatgtgttaacagcatttcttaatgatgtatatatggagtggtcttcaatcatagtgaagaatttaaagagaaagtcaattgtattggcatttttaataagaacaaaattagttcgtctaaggggactggctggccacatatttgttccttgcccatatgctttctacttcttgttcttattatgaaattatgaatttgaagcctctgaaatggtgatcagttttcaacatctttcaaaaacaaaattacta

SEQ ID NO: 1891 - DNA, 617 bp, Homo sapiens
  misc_feature 443, 460, 482, 483, 519, 564, 601, 602: n = A,T,C or G
gcgtccgcggctgctgtgtgtgagcagtggacacgtgaggggggggtgggtgagagagacaggcagctcggattcaactaccttagataatatttctgaaaacctaccagccagagggtagggcacaaagatggatgtaatgcactttgggaggccaaggcgggaggattgctttgagcccaggagttcaagaccagcctgggcaacataccaagacccccgtctctttaaaaatatatatattttaaatatacttaaatatatatttctaatatctttaaatatatatatatattttaaagaccaatttatgggagaattgcacacagatgtgaaatgaatgtaatctaatagaagcctaatcagcccccatgttctccactgaaaaatcctcttttttggggggttttctttctttcttttttgaatttgcactggacggnggaccgtcagccatgtncaaggatccccagggggggggnngtcaaaatggctattggaaaattggggtggaaatgnatgcctttttcactttttggataaataaaacatgtaaaaaaatgntttcaaaaaaaattaattaaaattaaattaaattccnnaaaaaaaaaaaaaaa

SEQ ID NO: 1892 - DNA, 300 bp, Homo sapiens
  misc_feature 209: n = A,T,C or G
agaggattcccagggtttccagggggccaaaggagacaaaggttcaaagggtgaggtgggtttcccaggattagccgggagcccaggaattcctggatccaaaggagagcaaggattcatgggtcctccggggccccagggacagcccggggttaccgggatccccaggccatgccacggaggggcccaaaggagaccgcggacctcanggccagcctggcctgccaggacttccgggacccatggggcctccagggcttcctgggattgatggagttaaaaggtgacaaaggaaatcca

SEQ ID NO: 1893 - DNA, 552 bp, Homo sapiens
  misc_feature 24, 491: n = A,T,C or G
tccgccccgcgtccgctttttccnaacaaggagcatccaaagacacagtgacttgagctatagatagtaaaaatcatacgagagttgaactgagtcaggtttaggaagcaagtttggttgcatcaattaagcaggctcttttcaattgactgatgctggggccttcagttttattctcagtatagattgccagtattgttaagagtatccaaaggcctttctagatggagacagaataactgacttgaacatacagtgtgcctgtaagtgtccaggctcagagctggtgaaaacccttctgttgggcgtgtgcagggttaaactcctgaagtaacttgtgaggacttcagtgcttgctggtgtcctgggcagcaccatgaatgcctttaccaagacatgccaagttggatcccccgaatgaagcaagagtggcttgtgggtgtgacccttgctccctgctacacagaagcatcgcaagggctgcctgtgtnggtttccagatgaagggtcttgggtcccggaagctttgtggttgagagctcaagtgggacc

SEQ ID NO: 1894 - DNA, 338 bp, Homo sapiens
gtcaccacgcgtccgcggacgcgtgggcgcacgccggcggcgcggaggccggctctgcgcttcgggccgccccctccccccaccccgctcacacccggcacttacttcggctgtctccgctgccctccagcggagacgcagctcctcaggcgcccggcggtatttgttgggtcggcggcgtcagggattcgcagtggcctgtggtcggcgtcgtccggccactggtgcgcccccgcggcaggcagagctcacgctcctgtcccccggctggtccggggtctgggcgccgcgtcgacggcggctccgcaggacgcgcagaccgggccgcagcccatgcc

SEQ ID NO: 1895 - DNA, 388 bp, Homo sapiens
  misc_feature 1: n = A,T,C or G
nccccgcgtccgatttaaatgccctaaattttaaattcatacctttccatgattcaaaattcaaaagatcccatgggagatggttggaaaatctccacttcatcctccaagccattcaagtttcctttccagaagcaactgctactgcctttcattcatatgttcttctaaagatagtctacatttggaaatgtatgttaaaagcacgtatttttaaaatttttttcctaaatagtaacacattgtatgtctgctgtgtactttgctatttttatttattttagtgtttcttatatagcagatggaatgaatttgaagttcccagggctgaggatccatgccttctttgtttctaagttatctttcccatagcttttcattatctttc

SEQ ID NO: 1896 - DNA, 405 bp, Homo sapiens
  misc_feature 19, 70: n = A,T,C or G
cgacccacgcgtccgcccngcgtccgaggggcaacagcagagcctacagcagggggcacactccaccggntccagccgcctgcacgacctctactggcaggccatgaaaaccctgggagtccagcgccccaagttggagaagaaggatgccaaggagatccccagtgccacccagagccccatcagtaagaagcggaagaaaaagggattcttgccagagacgaagaagcgcaagaaacgcaagtcagaggatggcacgccagcggaggatggcacacctgcagccaccggcgggagccagccccccagcatgggcaggaagaagaggaacaggacaaaggctaaggtcccagcccaggcaaacgggacgccaaccaccaagagtccagcccctggcgcccccac

SEQ ID NO: 1897 - DNA, 549 bp, Homo sapiens
  misc_feature 510, 513, 532, 535: n = A,T,C or G
attatatacttctgaatggcaccttactttttggaaacaaatcttctgttatttacaaaataataatttttaaaaaacataaaaaaaaaatccaaagctgctctcgataatagtcaacatttgcatatatatggaatttcttactttttttctcccaaactctatttaataaacttattttaatgtttgtgtatttcatgtataattgtgatctcaattataaaagtttaattcagcatgtctttgagccaatataattactgcacacccactaaattgggatcagccattataaataatgtagttttagaataataaaacatgacacatatatatatatataaatatatagtatatattggcacatcggtgaaagtttaatatgtgcaggaaggtttttttctttcttcaagttaaaaattattttttgccatatgtaattttggtgttgcaggctggtcgagaggataaaaaatggattttaaatctgggtaccggatggatctttcnggnggttaagaaacacaggggntgnggaccttccttttt

SEQ ID NO: 1898 - DNA, 479 bp, Homo sapiens
  misc_feature 382, 424, 436, 458, 465: n = A,T,C or G
ccgcgtccgaatatagtattttttaatttttgtggggatggattctcaaatacttgtgattttaaaagattctaaagctaaaacacaacttgattttaaaaagaatgattctccttacacaattataaatatttgcagtaaatattttccttataatactgttttgaccccatttaaaaagtattagattatattcctttgatccaatgaaaactgaaccttataaatggttagctgaaagtagaccttattcttgtccttctttagaagagtaaagatttgtcctagggaagatggctgacttcggttcccaacatgccgtatgcatttagactgtagctcctcagccctgtggacacaaaatttggacagcttattaggntaccgttagcaatgctggaccggtttcttcaacactaaagantttcaccgttgnaacagatttcctggttcgtctnatggggnctggtaaaaatggt

SEQ ID NO: 1899 - DNA, 354 bp, Homo sapiens
  misc_feature 195, 273: n = A,T,C or G
gccctggaggctacttgtaaatccttagaagaaaagctggatctggtcacgaacaagcagcacagccccatccaggttcccatggtggccggctcccctctcggggcaacccagacgtgcaacaaagtgcgatgcgctgtgcctgggcgtcggcagaacaccattgtggtgaaggtgccgggccaagaagacagncaccacgaggacggggagagcggctcggaggccagcgactctgtgtccagctgtgggcaggcgggcagtcagagcatngggagcaacgtcacgctcatcaccctgaactcggaagaggactaccccaatggcacctggctgggcgacgagaacaacccc

SEQ ID NO: 1900 - DNA, 330 bp, Homo sapiens
  misc_feature 1: n = A,T,C or G
nccacgcgtccgccccgcgtccgggcccggcgcgcctgctctgggctctccgcgtgccgcatcgctttcttttcttcctctggagcagctatggcggcggcgaagaccctgaaccccaaggccaaggtggccggagcgcaggcggcgctggcgttcaacattagcggggcgcggggtctgcaggacgtgctgaggaccaacctggggcccaaagggaccataaagatggccttcatcccagaataatcactgaaggatttgaagctgtgaaggaaaagcccttcattttttggaagaagtcaaagtaagcagagagatggacaaggaaac

SEQ ID NO: 1901 - DNA, 268 bp, Homo sapiens
ccacgcgtccgccccgcgtccgaaacatgaggttctctctactggtcctcttaactgtggtgttgaggcttatatttgtgtaatttttggtgggtgaaaggaattttgctaagtaaatctcttctgtgtttgaactgaagtctgtattgtaactatgtttaaagtaattgttccagagacaaatatttctagacactttttctttacaaacaaaagcattcggagggagggggatggtgactgagatgagaggggagagctgaacaga

SEQ ID NO: 1902 - DNA, 546 bp, Homo sapiens
  misc_feature 70, 485, 518, 537: n = A,T,C or G
gtcgccccgcgtccgccctccctggcaaataatataataacccgtgaattttcaggaatttaaaaattangcttttttccacttaaaggagaaaaatatttgggactagcagcagaggcagtaagagatgtgaaccttggtgagctctgatacagtgagaagagattatactcatgaaagagaatgttagtgttacagagaagcagccgatagcaaatcgactgtagagacttggcggcggtggcattgccccaggtcgtcagcagtgtggtattatctatgagaacttgagcgacagagtatttcttgatgaatttatagatcatttgagatgttgagttactttagtttagttttgttttgttttttcaaataagtagagactatttgtaaaaaacgaggaaagggaaatgaaatggggcgtgtttgatagcaataaatttggtttctttttaaagaattctaaaaagggtctgagaccctgntagcattaattttttgagtgcccttcctttttncccttcccctccctttttntttttctct

SEQ ID NO: 1903 - DNA, 465 bp, Homo sapiens
gcgtccgccccgcgtccgggaaacccccttcgatgacctccagagcctcccaaacgacgtgatctcttccctgaagaacaggctgaaaaaggtctccacaaccactggggatggtgtggccagagcgttcctcaaggcccaggctgctttcttcggtagctaccgaaacgctctgaaaatcgagccggaggagccgatcactttctgtgaggaagccttcgtgtcccactaccgctccggagccatgaggcagttcctgcagaacgccacacagctgcagctcttcaagcagtttattgatggtcgattagatcttctcaattccggcgaaggtttcagtgatgtttttgaagaggaaatcaacatgggcgagtacgctggcagtgacaaactgtaccatcagtggctctccactgtccggaaagggaagtggagcaattctgaatactgtaaagaccaaagcaa

SEQ ID NO: 1904 - DNA, 358 bp, Homo sapiens
  misc_feature 79, 138, 144, 151, 173, 229, 278, 337: n = A,T,C or G
cgtacggggtgcggttggcggcggcggctgggccgggggctgccggctgcgctcgggccgtgcgcggcggccgtgcggncacgccatggacttcaacatgaagaagctggcgtcggacgcgggcatcttcttcacccnggcggngcagttnacggaggagaaatttggccagnctgagaagactgagcttgatgcccactttgaaaaccttctggcccgggcagacagnaccaagaactggacagagaagatcttgaggcagacagaggttctgctgnagcccaaccccagtgccacgagtggaggagttcctgtatgagaagctggacaggaaggncccctcaagggtcaccaacgg

SEQ ID NO: 1905 - DNA, 560 bp, Homo sapiens
  misc_feature 2: n = A,T,C or G
cncgcgtccggtgcatcttgcccattgatttctaaatgtattaactacttaaattaatcctgaatcttttcccaggcttaagtgggataatgttttattgtagatgcatatttcctggctctacccagtctttctttgaagactttatcatcctattttctgaatccagtggctgactttaatcttctctggaggaactagataatttctagactaatgcttacactcatgatccagattgtaatttctgaactccttcttccaaatagaatcaaaacaagaaaggggaaagcctctcaaagcaactgtgcgttaataatgaaacactctttttttctaatccaaggagggtttcatactttttcttagtttcttgccctcttcccttctgatcaataattgtaatagggaaatttgcaattgtgccaatactcagattcaatactgaactactttcttgcattggaattcaaattccaaggttaacaactagctgtatgtttccaaaacaatcttattggatatggattttcttagggggaaggttccagaaatgattt

SEQ ID NO: 1906 - DNA, 482 bp, Homo sapiens
  misc_feature 3: n = A,T,C or G
gancaggctcaagagcaacatggaggtctgcacttaatcgctcctctccgggggcggccataccgaggaggcgtctcttccgtgcaggcaggctctcctggggacctcagagattctctccagcggcagcggaaaacggacaatgggtggattcgggtccagattctggtaggagggagtttgggatcgagatctggaaaaaagcactagactggaagaggacgcgatggagtcggagccgctggcggggacaaaaaccagaggccggggaaggcgccggtgggaggcaaggcacggatggactttacctgcgcacgcgtcgcagccatctccgcgcacagtggtggccaccgcgactggtgctgaagtgttggccgcgtgccgggcgctccgctgggacccgggttgctggccctgagtctcagctttctcatctgtacggttgggacaagtacagtaaccctctcccgtcaagacgggcc

SEQ ID NO: 1907 - DNA, 539 bp, Homo sapiens
  misc_feature 8, 391, 431, 512: n = A,T,C or G
gtcgaccncgcgtccgaacatcgtcaactacggcatcccagcccaccgtgacatcgacgagtgcatgttgttcgggtcggagatttgcaaggagggcaagtgcgtgaacacgcagcctggctacgagtgctactgcaagcagggcttctactacgacgggaacctgctggaatgcgtggacgtggacgagtgcctggacgagtccaactgccggaacggagtgtgtgagaacacgcgcggcggctaccgctgtgcctgcacgccccctgccgagtacagtcccgcgcagcgccagtgcctgagcccggaagagatgggacgtggacgagtgccaggacccggcagcctgccgccctggccgctgcgtcaacctgccgggctcctaccgtgngaagtgtcgcccgccttgggtgcccgggccctccggccgngattgccagctcccgagagcccggccgagcgtgccccggagcgggccgaacgtgtgctggaaccacgcggaagaggacggnatgtgcccttgccccctggcccgggcc

SEQ ID NO: 1908 - DNA, 371 bp, Homo sapiens
  misc_feature 161, 285, 319, 360: n = A,T,C or G
accacgcgtccgggcggcccggccaggcccccggcacttcctcgtcctcggcccgggtgccctgcccccgtccaggagccctaggagtgctacggggggccggagccttgcccgggccgctgccccgtccctggattcggggctggacgcagcaagcaggngcgctgtgtccccaagctccccgtcctcgggggagcttttggaagagtcccagatggaagcgaccaggctccggcagaaggcagaggagctagtgaaggacaacgagctgctcccaccaccttntccctccttgggctccttcgaccccctggctganctcacaggaaaggactcaaatgtcacagcatctcccacagnccctgcatgcc

SEQ ID NO: 1909 - DNA, 553 bp, Homo sapiens
  misc_feature 512: n = A,T,C or G
acgcgtccggaagggtgttacatgtgtctcttcaatacctttggttttgggaagatctcaggaacggcctgcctcaccgtctatgtacagcccatagtatcccttcactacaaattctctgaagaccacctaaatatcacttgctctgccactgcccgcccagcccccatggtcttctggaaggtccctcggtcagggattgaaaatagtacagtgactctgtctcacccaaatgggaccacgtctgttaccagcatcctccatatcaaagaccctaagaatcaggtggggaaggaggtgatctgccaggtgctgcacctggggactgtgaccgactttaagcaaaccgtcaacaaaggctattggttttcagttccgctattgctaagcattgtttccctggtaattcttctcgtcctaatctcaatcttactgtactgggaaacgtcaccggaatcaggaccgagagccctaaataagtcacacagcacccttgaaaggggattcctggnctacttggatttggcacaagagaaaaagcaggagggaaagg

SEQ ID NO: 1910 - DNA, 441 bp, Homo sapiens
  misc_feature 422: n = A,T,C or G
gcgtccgctagttctagatcgcgagcggctgcccttttttcttttctttttttttttttttgagacacagtctcactctgtcaccaggctagagtgcagtggcacgatctcagctcactgcaacctctgcctcccaggttcaagtaattctcctgcctcagcctcccaagtagctgggactacaggcacgtgccaccacgcccagctaatttttgtatttttagcagagatggggtttcaccacattggccaggatggtctcgatctcaacctcgtgatccacccacctcggtctcccaaagcgctgggattacaggcgtgagccaccgcgccaagccaaggtctgcatttttctttagaactcagaacacccaatagtcctaggcccccatcctcgcatggcagcaagctaaataagcatnttcccactgcgagttgggg

SEQ ID NO: 1911 - DNA, 516 bp, Homo sapiens
gtccgctgagaatggataatctcactgcaggtattccataataggcttggattaaaaccagggacaatgggcagcaataggccataggttaagcagcagcaactagtcaccactggactgtcttcttctccccttccccatatcccacattctcctaaacatgatgtacgtgtagcaacagtcttttaaagtcagatggtcagactaattatttttacaatttaagtgtaagtgatgtacatgaatggactctgtgaatcggaaaacttacgtaacagcagagaatacgtatgttatatggaataacctgagttgaaggtacaattttttttccagctcttttattcctttaactgcttaacaaaagaaagagtctccaaagtttaaaaaacctttgaaaaatatacagcttgatattatttacataaaatatgaatccaggttccaatatcaaacaaacattgctatgtcagaaacacagtggaaggcaggaacgtaactcactgccttttagat

SEQ ID NO: 1912 - DNA, 524 bp, Homo sapiens
  misc_feature 25, 435: n = A,T,C or G
cccgcgtccgctcttttcttctctntaaagtgaattattccttttttttgttttatgtaacgtgtatatattcttagtttttcttgaaatcattgtaatgttaactttgttgtttcaaatatcttggtgattgcttcattatctcttcaacaaaaaaaacctttaattttgccattgaaactgtagaactatgccatgcttttattagaagcagtgctctgtgttaacaacaagaatggtgtaattagaattgggatgtggatatttactgtatgacaacacatttacagttctgtaatgcaaggatgcagtttaaaaatgtgaagtagtgatggtttttgaaataagctttaaaatataggggatcttgaaggctccctggggtaactattttataacttagataaaatggctagtcatatctgtgtggtttgnaaaggttatttttttaatattttaagattacaattttacaaatgtagaaatgagcccaactatttaaattttaaaacagtaaaaacaaa

SEQ ID NO: 1913 - DNA, 489 bp, Homo sapiens
cgacccacgcgtccgctttgaagcaggaaaagacacgtctctagagcaacatggaaaggatccagtatttgttttcaggcaaaagcaagcctccaaaagccccttggttcttctctgtgtgtctcgccccttctgccttgtacaccagactgccggcaagcaagcggggaggtggcgaacagctgggatcctccagtgaaaagtttgctcagcgcgagagatgtcaagaggctgggattgtcgcctatcgggaggtggggagctctctcactcacacttcctgggaaatgaaggagaactaataggcagcccgcatttgcagccagccaacctgggtggtattccttgaagtgaagcgctcataaatcccttctggggccagagccggtttcacaagctgcaggatttgggtggcctgcctgctctttgggagcgggcttgggaagctgaagaaattgaatcaggacctcaggccctttacagactccc

SEQ ID NO: 1914 - DNA, 539 bp, Homo sapiens
cgcgtccgccccgcgtccgctcagaaacccctgccctttcccttcagaaaacgatggcaggcattcctctgagtttacaagcagagactcactccaacccaaactagctgggagttcagaaccatggtggaataaagaaatgtgcatctggtctcttctgttgtttttatttcatatcagattaaatttctttaccatgttggctaagtctaaatattagagatgaggctgtgcctactccctggccagctctgctgatagcctatgatgggttccaatgggaaatgactctttactattaaaagacaaggaaagctctgacttcgtacttctctgatgaatggcaatgtaaatgaacaaggctccatgtgactggagcatggaagtgaatgctactttcttaatttaatctgccctgtcctacctgctcctctgattgttagccatcacataacttattgaatgcttgccatgtgccaggcactgtgctgagtgccatacatacatttcatttaattatccaataatcctacttacta

SEQ ID NO: 1915 - DNA, 338 bp, Homo sapiens
  misc_feature 15: n = A,T,C or G
ccgcgtccgattctntaacatctctgtgaggaaggaatttttatccttattttacagatgaggaagctgtttggagataatttaagtgacttgcctggggaatctagccagtagtagagtactgattaatcaggtgctgacatctgctctgctttgtgtatgtaattcagcagtgcttcaaagatccaagaagctgtagcagatctcaatacactctcctataaaattagtgaataatcaccatgacaaaattggtatggcggaacagtcattatacattatttagactcattccttcttccagtgcccttatgattatttcctacctttaccattgg

SEQ ID NO: 1916 - DNA, 561 bp, Homo sapiens
  misc_feature 3, 403, 447, 520: n = A,T,C or G
ccncgcgtccgccccgcgtccgccccgcgtccgatattgcttcagaaaactgaatgtgtatgtcggtcatattgcctttataaccatgctaatatctatgctttatacatactcaaacttgccttgccttaaaaaaatacatactacatacttaaatcaggaattctagccatctcacagaataccaactaaaactaagtgcattgagatctgagattggtaaacccagattcatttaccacagctgtaattaagtttttagaaactattctctttttggggaaatccattgaagttaatttctgttatcttattagaagaaaatgatgttgatatgtgtttcagattttccatttgaaatcttataattaatttgatttatttactgtaagtaggaggtatnaatgacactcttaaattggaaggaggggtgttttagtgtctgtnttaggtcaaaattagtgattctatttttatcaaaagttttatcctgaagtttcaggaccactcttccttaatnaacttgttaatgggaagcgagccttatgaacatttaaaaat

SEQ ID NO: 1917 - DNA, 428 bp, Homo sapiens
cgcgtccgcagcagtaatcctttaataactggcacgagcactttattcttctggtgagctccctgaatatttatttttctgattataaattttctatattagtagcattttttaattattacttcttcactatagagcatttacttttagtctctagatgtatattttggaatgctgtacttggcataacatagattaaaatcataatgcatgactaaaaactccttggatttatttcccattttaaaatttttagcggtaagttcagatttataatctttctctagacttccatggtctgaatgttgcctgctgaagtagcaacctaaaaagtatcccctgcttatgcttctccagttggccctccatgtccataggcttcgcatctgtgattcagcccactgtgggtcaaaaatatttggggaaaa

SEQ ID NO: 1918 - DNA, 348 bp, Homo sapiens
gcccgcgtccgcatcccttgtataccatcgtagacttcatactggagagaaaccttacaaatgtgaagaatgtgatgaagctttcagtttcaaatcgaaccttgaaagacataggagaattcatactggagagaaaccttacaagtgtaatgattgtggcaagaccttcagtcagacatcatcccttgtataccatcgtagacttcatactggagagaaaccttacaaatgtgaagaatgtgatgaagctttcagtttcaaatcaaaccttgaaagacataggataattcatactggagagaaactttacaagtgtaatgaatgtggcaagacctttagtcggaagtc

SEQ ID NO: 1919 - DNA, 274 bp, Homo sapiens
  misc_feature 1, 6, 27, 74: n = A,T,C or G
ngaccncgcgtccgcgctccgctgccnggggcgggagggaggaatggttgcttcacgccccgggggaagagacnggaagctcggctctgggttgcgggccccggggtctccgcgtggggcgcaccgtccgacccgcccctcccggtgtgcagcgccccgcaccgccccgccttgcctgggagaagcccggcgggacgcgccgggctggagtgggcggttataggctttgagctaggccgcttccgggaggcggagctcacaccccatttccttt

SEQ ID NO: 1920 - DNA, 411 bp, Homo sapiens
gtccgttccttgattcctggaagtccagtgggttctgcagctgaaaaagccctgggtcccagcagcagagagacaggacagaggggatgcttgggcggggagggacggtaacctgcagaacagattccatttttatagaacgagtacacgtttgctaaaacagtcctgctttcccagactggattcccaccacagggacagtcggaactcaggactagctccagcgacatctttcctccgaattcaagccttctatcacaatgtcaaaacagctatttataaagccattttcattgtacttgataacagcacgagtcccaaaacttttagaaataaaataggacattggcttgattgaaaagagggactttttaaaaattgttctttcgtcagaaagccttttggatgact

SEQ ID NO: 1921 - DNA, 519 bp, Homo sapiens
gcgtccgaaaaaaatagcattatacctcttccttgtctcaaccgccatgaaaattctgaacactccaaattcagttgaataatccaaaacaaaatttataagtataaaataattttacttcttatagtaatagtatactttaaaaagcctcagggtatattatcttctaaacagctacaattcagtgcagctacattaaccaactatgttctctagttgagaacaactaggcctatttcactgctgtgtagcctcagtgcctaacatgggtgccaaataaatattcgtagaattacactgaattgtaaaaaccattcgtttttgtttacaattgccaaaaatctcaaaaggccctgtatttatgtaattctttgaaattattattttattttgatttctcagttattgactggtggggtgtgacttagtcataagtactcaatattataaaaacctcaaataattgacttggattttacacaacatccttcccttttctacaagttaaatttttttacc

SEQ ID NO: 1922 - DNA, 488 bp, Homo sapiens
  misc_feature 477: n = A,T,C or G
ttggtattcttggctaatttcttagctacttgaaggttaatttgcaagacttttaaaaccttagaaaagttttaaggttgcaaagttatcaacactggggcagagggtggagaggccaatgcgggtagaaggaggcagttatgtttatattgaaggtgaaatttttctttcatttagaatggaaaacatccccaaatgtatcattataaactagtcagccttgactacacaaaattgacctttaagttgcttgagaaaaacacaatgcaaatcgttcagaagggtcaacatcctttggtgctaaaatcttgtgtatgttttcagaatggctttttctgtatgttatagaataatcactaaaggaaaggtagttgaatttaaagtcatgaagcaagactctttaattcagttattttaaacaagaattaaaaccccaaacatccttggcaggctttgaagcacacagaattttctagnatttcttatta

SEQ ID NO: 1923 - DNA, 524 bp, Homo sapiens
  misc_feature 2, 118, 505, 510: n = A,T,C or G
cnccgccggaacaacaacagaaagctgtgtttgtcttttttctctcaaatatatctcccgtatgagatttcaggtccccatgttttcaccaagcaatctgctatgtcagccaacccancatcactttctacaggaggttatgatttttgccatttactagaggaagatgttttatgaaatcaagttggggtttgaattcaggtgcagtcatcagttctttaggggctgcaatgttttaaaaaaaaataagtcatcagattttaagaaaaaagtgatgatttcttattgatatttttgtaacagaatataggctcttaactgaaaatccagaaccagaaacataaatcttgagtttcttttcatgtacataaaaagcaatagccgttttagtataggatagccctgagcccaaaaagtaatagaaattttctctagatattttaatacagagagtgtatagactgactctaagttaataaatgtgcaaaaatatcttaaaaccatnccctnccctttatttcaac

SEQ ID NO: 1924 - DNA, 437 bp, Homo sapiens
  misc_feature 3, 396, 415: n = A,T,C or G
ccncaaaaaggaaccagaggccacttgtatatatatggtctcttcagcatttattggtggcagaagaggaagatttctgaagagtgcagctgcctgaaccgagccctgccgaacagctgagaattgcactgcaaccatgagtgagaacaataagaattccttggagagcagcctacggcaactaaaatgccatttcacctggaacttgatggagggagaaaactccttggatgattttgaaagacaaagtattttaccggactgagtttcagaatcgtgaattcaaagccacaatgtgcaacctactggcctatctaaagcacctcaaagggcaaaacgaggcaaccctggaatgcttcgtaaagctgaagagttaatccagcaagagcatgctgnccaggcagaaatcaagaantctggtcacctggggaaactat

SEQ ID NO: 1925 - DNA, 469 bp, Homo sapiens
  misc_feature 226, 419, 456: n = A,T,C or G
ccacgcgtccgtccgcctccagcagcatccgcttcagcaaggcctgcctgaagaacgtcttctcggtcctactcatcttcatctacctgctgctcatggctgtggccgtcttcctggtctaccggaccatcacagactttcgtgagaaactcaagcaccctgtcatgtctgtgtcttacaaggaagtggatcgctatgatgccccaggtattgccttgtaccccgntcaggcccaagttgctcaagctgtaagcaccatttacgaggtcattcctcctctgacaagccctggccagccgggtgacatgaattgcaccacccagaggatcaactacacggaccccttctccaatcagactgtgaaatctgccctgattgtccaggggccccgggaagtgaaaaagcgggagctggtcttnctccagttccgcctgaacaagaatagtgaggactttnagccgccattgat

SEQ ID NO: 1926 - DNA, 386 bp, Homo sapiens
  misc_feature 386: n = A,T,C or G
gcgtccggtaagtattttggaattcaaccctcgaattattttttctcatttcagcatagtgataggggatgcaatgaggcttcattattttttatgacctgcccctcatttgctctgatgttccctaaattctgtaatcatatcataacttttgttatgaatagagaggaatgggctcactgaaacctgacactagaaattggtgggtgatgctcataactgcaaacacttagcttattgaagtgcctctatttacatgttctttagttataatatgtatttttctaacagaaatacacgtctgtaattggtatatattatactttgtatgtgtcacaacaaaagctaaacagaggctaaagtctttagcagagaagaatgaattn

SEQ ID NO: 1927 - DNA, 528 bp, Homo sapiens
  misc_feature 99, 125, 137, 176, 210, 214, 230, 291, 376, 382, 418, 428,437, 452, 466, 469, 485: n = A,T,C or G
aactgtttgggaaaatacgttgagggagagaagaccttgggccaagatgctaaatgggaatgcaaaagcttgagctgctctgcaagagaaaataagcangacagagggatttgctctggacaganatggaagagccngggaacagagaagtgtggggaagagataggaaccagcangatggcaggggcaaagggctcaagggtgaggaangccngtgggaccccacagantatggggagataaaggacattgctttgcttttggtggcaccgtaagctccttgactgtctncagcacccagaatctcattaaaagcttatttattgtacctccaaccggcttgtgtgcaatgggggtctttttgtggaaaatcaangagcanacaggttttcatgtgtactgtcaccacgtgggatgngaaccagatngcatggaancaagacgctaaatgnaagagggccataanggntgggatttcccaggcnccttaagaacagcttgtcttttttttttttcctttccaaaaaa

SEQ ID NO: 1928 - DNA, 627 bp, Homo sapiens
  misc_feature 392, 541, 560, 568, 576, 588, 600, 611: n = A,T,C or G
ccgccggtaagttaaagactttaaggacattcaaagtttaaaatagtgttcaaattgcaaaatttggcaatcttcatataaattggtttcttttctaacttttcaaaaactaacattaaatgtcaattataggaaaacatagttggaaatgtaatcatccaaagatcatttttaaaatgaaatttaattagcacatattgaacatttgacttaattgttaaaccccagttttgttttgtttttttaatcagatttttgcacactgattagtttttgtgttgtggcttttgttgctttattattcaaggttttttttttttttcttccccatgggggagattgtcttccaatgtttaactacgtttaaataaataaaaattgaattttattgntcatttatataaaatctgatccttgatgtaatttccaatacagttccaattttatggctttataattacaatgatattttcttctataataaaaaccaaagtaaacatttaaatggggaaactgatatttttcatttatatgaagtatnaagccctctactggggtcnttattggngaatcatnctgccttcaaantggtttcaaaantgggtagaaanaaaacctttttttttg

SEQ ID NO: 1929 - DNA, 518 bp, Homo sapiens
  misc_feature 104, 140, 242, 359, 426, 437, 461, 506: n = A,T,C or G
ccgcacaccctaaagaaaataagtatcccagtcgacatcagtgacagtgatatgatgctgaacatcatcaacagctctattactaccaaagccatcaagtcggnggtcatctttggcttgcaacattgccctggatgctngtcaagatggtacaagtttgaggagaatggtcggaaagagattgacataaaaaaaaatatgcaaagagtggaaaaagatacctgggaggcaatcattggaangacttcctgtgtcttgcgtggagtcatgattaacaaggatgtgacccatccacgtatgcggcgctatatcaagaaccctcgcattgtgctgctaggattcttctctggaataccaangaaaggagaaagccaggactgacatttgagattacacgagaggagggaccttcaccccgaattctcncagaatggagngaaggaagtacatcccagcagctntgtgagggaccattatcccaacctggaaagcccgatgttggtcantcacttggaaaa

SEQ ID NO: 1930 - DNA, 462 bp, Homo sapiens
  misc_feature 79, 115, 143, 150, 184, 226, 228, 238, 322, 324, 328, 351,354, 368, 396, 418, 422, 430, 438, 446, 450: n = A,T,C or G
ttttttttttacaactcaaaaaaagaaatcttttaataaaaattactcataaaaatcctaataaattttaaagagcagngatattccttattacatttataaaagaacatttggnccttttacaaaaagatcccttttaattnaaatacntttcttatttacagattaaacataaaatatcatntacagttgcaaagcatattgcacattacagagcaaagcattngngtatttccgnaagttttcccagagttcccaactctatacttttttttgtaaaaagatttacccttgcttatgcaaaaataaaataagaaatgcnanctgncggttttgctatttaaaaactanaanccaaaataaacctnttaaaaatattattcctctgccttgcanaaaaggaaagtgaagaggggtnttanaaatcagngggggttnccaccagngtcncttgataatttt

SEQ ID NO: 1931 - DNA, 376 bp, Homo sapiens
  misc_feature 124, 232: n = A,T,C or G
cgtccggggaaactttatatggttggggataagaattgaatgcaaattaatgaactagatttgcatttatggagttacctcatcatggagttaccttggtctgtcccacgtcaattaatcttgnttccttattttcatagaccatcctctagaacagtgttttcacactgtgtatcatgatcctataatgcaggggtgtccaagcttttgtcttcccttggctacactggtngaagaattgtcttgggccacacataaaatatactaacactaatgatagctgataagctaaacaaacaaaaaaatcacaaaaaatctcataatgtttttttgagattgtgctgtttttttagttgtgttttcaatggagaaatac

SEQ ID NO: 1932 - DNA, 503 bp, Homo sapiens
  misc_feature 115: n = A,T,C or G
cgtccggcgcgttcgtgcgtcctagttccagtacatgcgtggagggtttacggcagcgtgttctgattctttgcgggacggcgagcgcatttgtgctttgcccgccgcggcctangaggccttttgaggccgcgtagtcggtgtttttgaactgactctacagcttctggcaggccgtgcggcgccctgacccggcctcaccatgttggtgctgtttgaaacgtctgtgggttacgccatctttaaggttctaaatgagaagaaacttcaagaggttgatagtttatggaaagaatttgaaactccagagaaagcaaacaaaatagtaaagctaaaacattttgagaaatttcaggatacagcagaagcattagcagcattcacagctctgatggagggcaaaatcaataagcagctgaaaaaagttctgaagaaaatagtaaaagaagcccatgaaccgctggcagtagctgatgctaaactaggaggggtcataaaggaaa

SEQ ID NO: 1933 - DNA, 308 bp, Homo sapiens
  misc_feature 78, 207, 227, 242, 243: n = A,T,C or G
agggagccgccccgcgtccgccccgcgtccgcggacgcgtgggctaaaacccatcaggcaagatcaccacgcattganatattttcatatcaagataaagtcgcacattttccacaatacattgctaaaataaagaggagaaaggcttaggaagtttttttgcagagagtgctggtaaagaattgagcaagtttgctattgtattgnaatgtttctctcaggtttgntcttcctatcatggnnggtattccatgaataattgagatcagccctatgtaaggtaagatcataatatgggggacaaatgg

SEQ ID NO: 1934 - DNA, 411 bp, Homo sapiens
gcggacgcgtgggctccatctgagctcttgggtgaccagggtgcattgtcaatgagggtaatattttgaaagacatctttattatgagcagtaggtctcaacagtgggcttaaaatgtgcagtaaatcatgctgtaaacagatgtgttgtcatccaggttttgtgccatgtctagagcacaggctgagtagatttagcataattctgaaggaccccaggattttcagaatgataaatgtgcattcgcttccacttacagtcaccagctgcattaacccctaacaagaatcagcctgtcctttgtagctttggaggcaggcatgaacttctcctagatggcatcttccaagagggctatttttgtctacattgaaattctgcttagtgtagccacctgcttcaatgatccta

SEQ ID NO: 1935 - DNA, 513 bp, Homo sapiens
  misc_feature 2, 22, 393, 412, 422, 469, 481, 493, 499, 509: n = A,T,C or G
tngaccacgcgtccgggcgccntctcccagcaatcaagtcttgctccctggcctgccctccggcaccctggagccccgctttccacacagccttgctcctcccggcctggcttgctgcctgcaggcctctcagggtccttcaccgtctctccagtctcggatccggacccgtggatctcagcctcagaccctcctctggccccggccttgccctcgggcacggcccctttcctcttcagccctggggtcctgctccccgagccagaatattgtcctccttggaggtccccaaagaaggagtctcccaagatctcccaacgttggaggggaagtccaagcccagggggaacttgacataccaccaggtacatgcccccagagccgagaaggatncggggggcaagacccccangccgtagggngtcctcccttgggtcctcctgggccatctctgtggggaagggacaanactcgcaacaanccacattctaangatganggcccttttnccct

SEQ ID NO: 1936 - DNA, 440 bp, Homo sapiens
  misc_feature 3, 22, 197: n = A,T,C or G
ccncgcgtccggaaaatatccnaggttgtacgcagcagtggaagttgctctcaagggagtggtattttacactatgctcatggcgacagtcagcaaactcacctgttgaagcaaggaagaagctccatgggcactggtctcagtggtgggaaacgtcctagtcaggaagaggacacacagagtattggtcctaaagnccagagacagagcactaattaggtaaatattttagagctgtatttcttgctttagaagagtatataattaacataaattaagataatttcaaaaatggagcaaatctctattttcaaaccagaaaatcttgaggcattaatttttaagcaatttttacaaactcagttaatttttggtcaagagacatgcatctgtactggagaaattgttgcaccaagttttatattcatctgaaccaatgc

SEQ ID NO: 1937 - DNA, 532 bp, Homo sapiens
  misc_feature 19: n = A,T,C or G
ccccgcgtccgcccctttnctccctgaggactccacagaagatggtatattatgggaaaccttcttgtaaaaacaactatgagaattatattgacatagtgaaatatgtgttcagcgcttacaagagagagtcccctctcatcgtcaacactatgggatgggtttcagaccaggggctcctgcttctcattgatctgatccgattgctgtctcccagccacgtggttcagttccgctctgaccacagtaaatatatgccagaccttaccccgcagtatgtagatgacatggatggcttgtacacaaaaagcaagaccaagatgagaaatcgacgtttcagactcgcagcatttgcagatgctttggaatttgctgatgaagaaaaagagagtccagttgagttcactggacataaactgataggtgtttatacaagactttgcattcagaataactccaagaaataggtaactaaccctcatttggctgaagaattatttttccttccgtcgaaaaagacctgccattctca

SEQ ID NO: 1938 - DNA, 149 bp, Homo sapiens
  misc_feature 112: n = A,T,C or G
gtcgacccacgcgtccgcggacgcgtgggcggacgcgtgggcggacgcgtgggctctcgcactctgttcttccgccgctccgccgtcgcgtttctctgccggtcgcaatggnagaagagatcgccgcgctggtcattgacaatggctcc

SEQ ID NO: 1939 - DNA, 505 bp, Homo sapiens
accacgcgtccgggcgccaggctagggcggcctggccactgagccggggtgcagtggcagcgggagagtacctggcgatggcgatatgagcggtgcgggggtggcggctgggacgcggccccccagctcgccgaccccgggctctcggcgccggcgccagcgcccctctgtgggcgtccagtccttgaggccgcagagcccgcagctcaggcagagcgacccgcagaaacggaacctggacctggagaaaagcctgcagttcctgcagcagcagcactcggagatgctggccaagctccatgaggagatcgagcatctgaagcgggaaaacaagggtgagccggcgcggggccctaggccggccctgcctccccaggcacactcaacactgccgctcccgcagcacagaaacacagccattcaactccagcacacgcctgggctcagggggaacacaggacgatctccattacaagctcataatgaatcagacatcacagaagaa

SEQ ID NO: 1940 - DNA, 469 bp, Homo sapiens
  misc_feature 165, 177, 328, 395, 414, 423: n = A,T,C or G
cgcgtccgtgaaggccagaccgagaggtgccagaagagaacaaacctccatccagacacgcgggcggaaaggctccaggggtccagggccagatggcgccgcctctgcccgactcagaaagagagaaacaagagccggagcagggagaggttgggaagaggcctngacaggccccangcctttggaggaggcgggtgatcttcctgaagatccccagaaagttccagaagcagatggtcagccagctgtccagcctgcaaaggaggacctggggccaggagacaggggcctgcatcctcggccccaggcagtgctgtctgagcagcanaacggcttggcggtgggtggaggggaaaaaggccaaggggggaccgccgccaggcaactccgccggngacacagggcagcccgcanaggacagcnaccacggtggggaagccttccctccagcggagaagccggcttcagg

SEQ ID NO: 1941 - DNA, 431 bp, Homo sapiens
  misc_feature 170: n = A,T,C or G
ccgcgtccgcagaaacatatgtgtagtgtgctgcagcataagatggaagaacttaaagaaggcctgcggcaaagagatgagcttattgagaaacatggcttagttataatccccgatggcactcccaatggtgatgtcagtcatgaaccagtggctggagccatcactgntgtgtctcaaggaagctgctcaggtcttggagtcagcaggagaagggccattagatgtaaggctacgaaaacttgctggagagaaggaagaactactgtcacagattagaaaactgaagcttcagttagaggaggaacgacagaaatgctccaggaatgatggcacagtgggtgacctggcaggactgcagaatggctcagacttgcagttcatcgaaatgcagagagatgccaatagacaaattagccgaataccaattt

SEQ ID NO: 1942 - DNA, 517 bp, Homo sapiens
  misc_feature 167, 170, 171, 188, 196, 199, 219, 371, 419, 434, 441, 451,454, 458, 459, 460, 461, 464, 473, 476, 480, 484, 485, 498,502, 506, 509, 510: n = A,T,C or G
ccgcgtccgctcgcctgccccggtgcacccagtccgctcacccagcccagtccgtccggtcctcaccgcctgccggccggcccaccccccacccgcagccatggacgccatcaagaagaagatgcagatgctgaagctggacaaggagaacgccatcgaccgcgccnagnnagggccgaatccgacangaagcaangcntgaggaccgcttgcaagcangctggaggaggagcagcaggccctccagaagaagctgaaggggacagaggatgaggtggaaaagtattctgaatccgtgaaggaggcccaggagaaactggagcaggccgagaagaaggccactgatgctgaggcagatgtggcctcccttnaccgccgcattagctggtttgaggaggagctggaccgggcccaaggancgcctggctacaagncctgcanaaacttgtangangccnnnnaangccggcctnatnattngccnngaagagggaattnaaangttnttnnaaaaacc

SEQ ID NO: 1943 - DNA, 321 bp, Homo sapiens
  misc_feature 23, 27: n = A,T,C or G
gtccgcttagtttctgcattatnagtnagcataaataataaatccagaaaacgtgctgtatttgttgttgtttcctccatgggctttcccgccatctaatttgatatagacttcatctcccggctccaaatgaagaaccacactgttactggcatagtcgtaattctgatcagcatcttgggcaattgcactagcacgcacctacgtgaaacagacaagaattaggatgcgtaaatgagaattctcaagttttcttttttgccattcatgtagcatcacaagctgacttgctgccatagtacagaatttagcatagcaaag

SEQ ID NO: 1944 - DNA, 440 bp, Homo sapiens
gcgtccggctgcgggcggtcggggctccgggccggggcggcggcgccatcttgtgcccggggccggtggggaggccggggagggggccccggggggcgcaggggactacgggaacggcctggagtctgaggaactggagcctgaggagcccccggcagccaagaggaggaggaggagccgggactggtcgagggtgacccgggggacggcgccattgaggacccggagctggaagctatcaaagctcgagtcagggagatggaggaagaagctgagaagctaaaggagctacagaacgaggtagagaagcagatgaatatgagtccacctccaggcaatgctggcccggtgatcatgtccattgaggagaagatggaggctgatgcccgttccatctatgttggcaatgtggactatggtgcaacagcagaagagctgga

SEQ ID NO: 1945 - DNA, 426 bp, Homo sapiens
  misc_feature 159, 179, 183, 185, 211, 234, 236, 241, 243, 244, 247, 257,265, 267, 268, 275, 284, 286, 411, 420: n = A,T,C or G
cccacgcgtccggcaaaccgggaaaggagaggatcccggagccggtgagaattctctgttttttctctaccatcctttccaggccttttcctcacctaatgagtcgtagagacgagggcccaaaaagtctgtaaaggtggctggtgaaagattaagtgntccaagggccctacattccnggangnggttcgggataaaagagaactagtcntgggaacaatgtaagtgggaacntnaaggnannggnaaagcggccnataaaggngnncggaggncccaatggnantaaagcggaccctgtgtaggtatagagttgagtcaagtggagtcactgcctcttgtccctcttggtcagcgtgatggccagaggcctgggggccccccactgggtgggccgtggggactgctgancctgggccnacttgg

SEQ ID NO: 1946 - DNA, 396 bp, Homo sapiens
  misc_feature 238, 244, 246, 255, 257, 262, 264, 270, 271, 272, 274, 279,282, 283, 288, 291, 292, 297, 298, 299, 304, 305, 381, 387: n = A,T,C or G
acgcgtccggccgggagtggtggtgggcacctgtaatcccagttactcgggaggctgaggcaagagaatctcttgagctcaggaggcagaggttgcagtgagctgagattgcgccactgcactccagcctgggtgacagagggagactccgtcccaaaaaaaagaaaaagagaaacagctgtcacctcccgcaggacccaaatcctctctctgagcaccgtcatccaccacatggctnggcctngnttccaagancnagtcnancctttnnngncttanttnnaggtngannccgcnnntttcnncccaaaggagacagcccctgctcctagatgcccttggcctccgcagtgcagcccccaggtgtcctgactgaagcanaggccntagccccat

SEQ ID NO: 1947 - DNA, 411 bp, Homo sapiens
  misc_feature 1: n = A,T,C or G
ncgcgtccgaagtggatgaaaattggtaccatggggaagtcaatggaatccatggctttttccccaccaactttgtgcagattattaaaccgttacctcagcccccacctcagtgcaaagcactttatgactttgaagtgaaagacaaggaagcagacaaagattgccttccatttgcaaaggatgatgttctgactgtgatccgaagagtggatgaaaactgggctgaaggaatgctggcagacaaaataggaatatttccaatttcatatgttgagtttaactcggctgctaagcagctgatagaatgggataagcctcctgtgccaggagttgatgctggagaatgttcctcggcagcagcccagagcagcactgccccaaagcactccgacaccaagaagaacacca

SEQ ID NO: 1948 - DNA, 402 bp, Homo sapiens
  misc_feature 143, 144, 148, 149, 153, 154, 157, 158, 160, 162, 164, 165,174, 183, 190, 194, 201, 206, 214, 219, 221, 223, 224, 226,228, 233, 239, 241, 242, 244, 246, 251: n = A,T,C or G
cgcgtccgagtatttgaagtgatgctggctcagaccgctcccactatgcaaaatgtaacccatacatggattctccacaatcaataggttttgctgaactgctgagccttggcagtgggcgcctttgaggcttagaagtgccnnaagnntctnncanncngntnncatgctttntttttttgncgcactnttancagtcancaaanaaaatccnggggngntnntnanccccnaaggcncnngntnccacngttcagtgaaacttgcttcagaggcagaaagaagcaggtttccaagcaacaatcagtgctccacacatgcatgcatatgcgctagaacttctatttgatcagttgcatgaaggagctaaagctcttgatgtaggatctgggaagtggaatc

SEQ ID NO: 1949 - DNA, 514 bp, Homo sapiens
  misc_feature 445, 472, 482: n = A,T,C or G
ccacgcgtccggagagaatgggccgcgcgcgcccgcggccggggaaagcctgtcgggaacccgggagagcctggcccagggccccgacgccgcaaccaccgacgaactcagctctctcgggtctgactcggaggccaacggcttcgccgagcgccgcatcgacaagttcggcttcatcgtgggctcgcagggcgccgagggcgcgctggaggaagtacccctggaggtgctgaggcagagggagtccaagtggctggacatgctcaacaactgggacaaatggatggccaagaagcacaaaaagattcgtctgcggtgccaaaagggcatcccgccttctctgcggggccgtgcttggcagtacctgtcaggaggcaaggtgaagttacagcagaaccctggaaagtttgacgagctggacatgtcccctggggaccccaagtgnttggacgtgatggaaccgtgacctgcnccggcagttnccattcatgaagagtttttgtgtccggggggg

SEQ ID NO: 1950 - DNA, 475 bp, Homo sapiens
  misc_feature 1, 56, 104, 168, 169, 171, 184, 230, 244, 273, 308, 340,341, 364, 384, 415, 464: n = A,T,C or G
ngcgtccggctttacaacgggcaaatactggaaaccatcggaggcaaacagctcanagtcttcgtatatcgtacagctgtctgcattgaaaattcatgcatggngaaagggagtaagcaagggagaaacggtgcgattcacatataccgcgagatcatcaagccagcnnanaaatccctccatngaaaagttaaaacaaggataagcgctttagcacctttctcagcctncttgaagcttgcanaacttgaaaagaagcttcctgacacaacnctggagactgggacattatttgtgccaaccaaatngatgcttttaaaggggaatgacctagttgaannaaaaaaggaaatttcttgatacngggaccaaaaaaatggctcntttcaaaaaacaattccatttcctttatttnacccctggaccaccccaagggaagtttttttcaatttggggaaaaaagnggaatttttgg

SEQ ID NO: 1951 - DNA, 446 bp, Homo sapiens
  misc_feature 5, 422: n = A,T,C or G
caatncttgaaccaggaaggcggaggttgtcgggggctgagattgcaccactgtgctccagcctgggcgacagagggagtccctttctcaaaaaaataataataaaaataaagatggcagtaggaaggtttcagcttgagatgctgtcttttcttctgtttttatgcataaatacaacgaagacgggagaggagatggaaagcaaagatgattaagtgaaataattgtgggaaacaatagagggatagactttgcttataggggatgtggacagagcagaaaaatgggaggaatggggaggattcagttagagaaggaagaaaccggtccaaggggctggggctttaggccctggggcctccagtgcccgtataaggctgtggcagaagccctgcccatttccgttcctttcactccctatnttcacccttacacctcccaaaaac

SEQ ID NO: 1952 - DNA, 418 bp, Homo sapiens
  misc_feature 256, 325, 348, 354, 360, 363, 366, 374, 408: n = A,T,C or G
ccgcgtccgggttttttggccttattttcctggcttttccttctccaaactttgaggcgtgatttcattcattgaagaatcaatacatattttgtttcaaaatgtttgaaacaaaagacatagatggtagacttttattaaaacatatatggatgtggaaagcacatatattaatgcagtcatcccttttcaggtgggaagagagcaaaccagttgattttttaattcatccttagtacacagagaatatcttttnctcaaggaatataccctggttggagctttaaaaaagaatggttttgggaaccatttcatttttcccaanaaggttgctattcttggggtaantggggnataccngantgntttttccnggggggttttggtggtggggggtaaaattggggntttttttttt

SEQ ID NO: 1953 - DNA, 493 bp, Homo sapiens
  misc_feature 23: n = A,T,C or G
gcgccgaggggtgtaatgcattngcagcaagagctatgagaaataactttagacattatttcattgaaccttcccaactgaaattattttatgatgttataacatggatagtaactcaagtagcaataagttacacagttgtgccatttgtgcttctttctataaaaccatcactcacgttttacagctcctggtattattgcctgcacattcttggtatcttagtattattgttgttgccagtgaaaaaaactcaaagaagaaagaatacacatgaaaacattcagctctcacaatccaaaaagtttgatgaaggagaaaattctttgggacagaacagtttttttacaacaaacaatgtttgcaatcagaatcaagaaatagcctcgagacattcatcactaaagcagtgatcgggaaggctctgagggctgtttttttttttgatgttaacagaaaccaatcttagcaccttttcaaggggtttgagttt

SEQ ID NO: 1954 - DNA, 500 bp, Homo sapiens
tcgccccgcgtccggttaaaactgcctctttagatgtggatgccttaatgctgtaacacatttgaaaacattggcaatacttaagttgctgccatgattacagatggaattattggctaccaaagagacgcaattgatgatgagaagcatgattcttgcttccatataaccaaagttaatcttaattgcaatttgactccgtttccttggtagggatagactttcttcagattccaagtgctctcttaaatggcaaattaagttaaagaatactactgctccattcccctcacttattctccagttaattgcttgtcagttccatttcaagaaagcagtggatgttccaggtttgattcagttttcctgtgcacactattgccaaatttttttttagcaaagattctgcactggaacgtagacagttggaaacagtactacctactagagggtatggggtttctctttctccccgctttcacctctttcttttccaattc

SEQ ID NO: 1955 - DNA, 293 bp, Homo sapiens
  misc_feature 3: n = A,T,C or G
ccncgcgtccggctctgcccagtcacccggtctcctccggcttccctccggccaacagcgcgctcaggctcgcctcaggcccctccaacggaacaggagtcgaggggcagtgaggccgggatgcgtgcgagcgcggggcgcggctggcgctgggccgtgggggcggggcggcgtgcgtgccagcggccgtgcgattctgtgaggcctgctctgcgccggcggggaagcgcgggcgacgctacgctggacgtccttacctgccggaggagagaaagtgccgtcagctgtagggg

SEQ ID NO: 1956 - DNA, 360 bp, Homo sapiens
  misc_feature 309: n = A,T,C or G
gcgtccgcggacgcgtgggcggacgcgtgggcggacgcgtgggcggacgcgtgggcggacgcgtgggcggacgcgtgggcggacgcgtgggcggacgcgtgggagaatgtgctataccccagaaattccatcgatctgtcatgggccccaaaggttccagaatccagcagattactcgggatttcagtgttcaaattaaattcccagacagagaggagaacgcagttcacagtacagagccagttgtccaggagaatggggacgaagctggggaggggagagaggctaaagattgtgaccccggctctncaaggaggtgtgacatcatcatcatctctggccggaaagaaaagtgtgagg

SEQ ID NO: 1957 - DNA, 523 bp, Homo sapiens
  misc_feature 462, 502: n = A,T,C or G
ccacgcgtccgctggaggcactggacgagatgctgacgcacgacatcgccaagctcatgcccctgctgcggcaggaggagctggagagcaccgaggtgggcgtgcaggggggcgcttttgagggcacccacatgggcccgtttgtggagcggggacctgacgaggccatggaggacggcgaggagggctcggacgacgaggccgagtgggtggtgaccaaggacaagtccaaatacgacgagatcttctacaacctggcgcctgccgacggcaagctgagcggctccaaggccaagacctggatggtggggaccaagctccccaactcagtgctggggcgcatctggaagctcagcgatgtggaccgcgacggcatgctggatgatgaagagttcgcgctggccagccacctcatcgaggccaagctggaaggccacgggctgcccgccaacctgccccgtngcctggtgccaccctccaagcgacgccacaagggctccgncgagtgagccgggcccccctt

SEQ ID NO: 1958 - DNA, 493 bp, Homo sapiens
acgcgtccgcctggctaacatggccgaaaggtcgtattctccgggggaggacggaggcccggagaggagggggtggagtgcctggttttccagtcaggcggccggagggcagccctcaagaacggccctgaccgcccgcggggtgaggggccctttctgggcaggacccgccccttggtcccgcagagccttggtacttggacctgaaccttgctccgagagggagtcctcgcggacgtcagccaagattccagaatgactactatcttgacttacccctttaaaaatcttcccactgcatcaaaatgggccctcagattttccataagacctctgagctgttcctcccagctacgagctgccccagctgtccagaccaaaacgaagaagacgttagccaaacccaatataaggaatgttgtggtggtggatggtgttcgcactccatttttgctgtctggcacttcatataaagacctgatgccacatgatt

SEQ ID NO: 1959 - DNA, 295 bp, Homo sapiens
ccacgcgtccgggggacatggtggtgagcaggacagaattcctgtcctcatgagtcttacattctagaaggaaggagcagataaaatctaaataaggttatgagattgtgacgaagcgtccgattacacctcaacaagaaggcaactgacaaacagccttatagcaagctcccaggtgtctctcttctgaaaccactgaaaggggtagatcctaacttaatcaacaacctggaaacattctttgaattggattatcccaaacctttatttttcttcggtagcaccaatgaaaaga

SEQ ID NO: 1960 - DNA, 355 bp, Homo sapiens
  misc_feature 64, 83, 90, 100, 101, 102, 109, 139, 147, 149, 155, 157,221, 276: n = A,T,C or G
tccggtgcagccgggctagcttctcctgcatctcccgaacgtgctccagctgctcaaaggagcnttccttccctggaacgaancccctgnctgaaccctnnnaaagagncctggaaccctggaaccctggaaccatggncccagccntnccccangnactgggccctacagccctatccacacacccgctgaaaccagcccccaggactcaccgaaggccngggggcggccagagtggaaatcattgagcaggttcaggagtcccccctccatctnatagacatcagtcacctcggtcaggaaggagtgctgcaggggcgtgcctgcagagccgcttccacctccagccaggact

SEQ ID NO: 1961 - DNA, 346 bp, Homo sapiens
  misc_feature 1, 3, 82, 150: n = A,T,C or G
ngncgcggttctcgtctcctcccggccggcggagcgagtggaggctgcagcccagctcgtctcggcgcccgcgtcgccgtcncgaagccccccgccccgcttccgccgcgtcggaatgagctcccggaaagtgctggccattcaggcccnaaagcggaggccgaaaagagagaaacatccgaaaaaaaatcaagcagaagattgagctgctgatgtcagttaactctgagaagtcgtcctcttcagaaaggccggagcctcaacagaaagctcctttagttcctcctcctccaccgccaccaccaccaccaccgccacctttgccagaccccacacccccggagcc

SEQ ID NO: 1962 - DNA, 361 bp, Homo sapiens
  misc_feature 14, 15: n = A,T,C or G
cgcccacgcgtccnncccgcgtccgggagaagatggaagcagtgcccgacgtagagcgcaaggaggacaagcccgaggggcagtcacctgtgaaggctgagtggcccagcgaaaccccggtgctgtgccagcagtgtggcggcaagcctggcgtcaccttcaccagtgccaagggcgaggtcttctccgtactggagtttgcaccctcaaatcattcttttaagaaaattgagttccagcctccagaagccaagaagttcttcagcacagtgcggaaggagatggcgctgctggctacctcactgcctgagggcatcatggtcaagacttttgaagatagaatggacctcttctcagctct

SEQ ID NO: 1963 - DNA, 351 bp, Homo sapiens
  misc_feature 9, 63, 225: n = A,T,C or G
tccgcgggngcgtgggcggccactcatttgcattatcttaaatcacaaataattacttaattngctggagtgtgtgctttgcaacttttataccagagtaaaatttgtatttaaaacaaaaaataagaatgcccatcactaggagaaacactcctcacagaaaacacacacacacacacacacacacaatttaaaaactgagtaaatttaaatgtatgaaaggcnccacaaattgatttcaacaaataaatttcatttctctagctacttatgtctggccttattttgagcgttacaattttattgccttcatttgcctatttagactgatgtagtttgatatgatgaagt

SEQ ID NO: 1964 - DNA, 380 bp, Homo sapiens
  misc_feature 3, 11: n = A,T,C or G
ctntagggagncgacccacgcgtccgccccgcgtccggttagttctacctggtgcccatgttctgattgtgtgtgggattgcatggtgtcctgattgcatctaggtggagcggatggaatgtgctgggccactgttgggtggagagcagcacattcttacagaggagatggagcgttatgagcatagtatgtggataggtatcttcacctgcccgcccctgagtcagcctccttgacttgatagcttgaagaatccttttccactgaaatagaggataattaattgacacatctgaaatccccaatcaatcaatcaagagaaaggtagaactaaaaactccttaacttactgttgcttacacccctgaaagtctgttttt

SEQ ID NO: 1965 - DNA, 339 bp, Homo sapiens
  misc_feature 74, 79, 80, 82, 90, 137, 138, 140, 142, 143, 144, 145, 146,147, 148, 152, 153, 158: n = A,T,C or G
cgtccggcgccctccagccccgtccgggagtccccggcccgctgcggtgccgggagtacctccaaccccctgcnccccnnanggaggccnaggggcttagccaccagggctcggaagtgggggccgaatccggtgcnngncnnnnnnnaggnnagcanagccggagttggggagactggttgctgaaaagccaggagtcaaaatgactgagcgctttgactgccaccattgcaacgaatctctctttggcaagaagtacatcctgcgggaggagagcccctactgcgtggtgtgctttgagaccctgttcgccaacacctgcgaggagtgtgggaagcc

SEQ ID NO: 1966 - DNA, 355 bp, Homo sapiens
  misc_feature 95, 156, 157, 158, 159: n = A,T,C or G
cccacgcgtccggtgcactcaacagaacggcccttcaaatgtgagaaatgtgaggcagctttcgccacgaaggatcggctgcgggcgcacacagnacgacacgaggagaaagtgccatgtcacgtgtgtggcaagatgctgagctcggcttatatnnnngaccacatgaaggtgcacagccagggtcctcaccatgtctgtgagctctgcaacaaaggcttcaccacggcagcatacctgcgcatccacgcggtgaaggaccacgggctccaggccccgcgggctgaccgcatcctgtgcaagctgtgcagcgtgcactgcaagacccctgcccagctggccggccacatgcaga

SEQ ID NO: 1967 - DNA, 363 bp, Homo sapiens
  misc_feature 3, 84, 157, 158, 159, 160, 163, 164, 165, 166, 167, 169,170, 171, 177, 178, 180: n = A,T,C or G
cgncccacgcgtccggcggtgccgcggggatggcgggagccggagctggagccggagctcgcggcggagcgggggcgggggtcnaggctcgagctcgcgatccaccgcccgcgcaccgcgcacatcctcgccaccctcggcctgcggctcagccctnnnnccnnnnnannnatggcnngntcagggggcctggggtctggggacaacgccccgaccactgaggctcttttcgtggcactgggcgcgggcgtgacggcgctcagccatcccctgctctacgtgaagctgctcatccaggtgggtcatgagccgatgccccccacccttgggaccaatgtgctggggaggaaggtcctctatctg

SEQ ID NO: 1968 - DNA, 540 bp, Homo sapiens
  misc_feature 406, 417, 420, 426, 427, 453, 454, 455, 456, 473, 480, 483,485, 490, 500, 512, 514, 520, 521, 530: n = A,T,C or G
gcgtccgggcgtgtaaaccagccggagcggcgcggcagcggcaaggaccgccgtggcgcctagagtagccgacccggggggagcgcggggcgacgctggctgcagggacccggtgacagcgtgagaggttcgcagagtactaggttttgacaagcttgcatcatgcgtgagtataagctagtcgttcttggctcaggaggcgttggaaagtctgctttgactgtacaatttgttcaaggaatttttgtagaaaaatacgatcctaccgatagaagattcttatagaaagcaagttgaagtagatgcacaacagtgtatgcttgaaatcttggatactgcaggaacggagcaatttacagcaatgaggggatttatacatgaaaaatggacagggatttgcattagnttatttcattncangcccanncccaattttacgtttaaaaaacctgnnnnaaaaaaatttttttggntaaaaanccntnttgtntccccaaaantttttttggggnanaaaaannggccctccnaaaaaaaaaa

SEQ ID NO: 1969 - DNA, 217 bp, Homo sapiens
  misc_feature 127, 129, 155, 167, 168, 176, 196, 199, 202: n = A,T,C or G
cccacgcgtccgcacgccagtgcctccctttacctactaatgaggcaaaactttgagattgggaataactttgccagggttaaaatgcaggtaacaatgtcactatcctccttggtgggcacatctnanaattttaatgaagaattcttaagacngtctttctaaannactatttngtacattatgcttgaagaanatntgngaattgagggaaaca

SEQ ID NO: 1970 - DNA, 328 bp, Homo sapiens
  misc_feature 168, 169, 196, 213, 247, 283, 287: n = A,T,C or G
gcgtccggttttccaactgcagctttttaatggttaaccttcatctaattttttttctcccactggtttatagatcctctgacttgtgtgtgtttatagcttttgtttcgcggggttgtggtgaggaaggggtgatggcatgcggagttctttatcttcagtgagaannggccctgcccgcctgagagccagcttncgcgttggaggcaccgngttcagagagctgctgagcgccaccctctacccngctgacagacaacacagacctgtgccgaaggctaanttgnggctttttacgaccctaccccaccccctgttttcaggggtt

SEQ ID NO: 1971 - DNA, 519 bp, Homo sapiens
  misc_feature 479: n = A,T,C or G
cgtccggtgagattctccgtaatgggcggggacagagtgccctgcaggagattctgggcaaggttatccaggatgtgctagaagacaaagtgctcagcgtccacacagaccctgtccacctctataagaactggatcaaccagactgaggcccagacagggcaagcgcagccatctcccatatgatgtcaccccggagcaggccttgagccaccccgaggtccagagacgactggacatcgccctacgcaacctcctcgccatgactgataagttccttttagccatcacctcatctgtggaccaaattccgtatgggatgcgatatgtggccaaagtcctgaaggcaactctggcagagaaattccctgacgccacagacagcgaggtctataagggtggtcgggaaccttcctgtactaccgcttcctgaaccacttgtggtggctcctgacgccttcacattgtggccatggcaanctggtggagccctggctgccccccagcgccatgccctggg

SEQ ID NO: 1972 - DNA, 235 bp, Homo sapiens
  misc_feature 172, 179: n = A,T,C or G
gaggggagggaaatttatttctctgcttttctattatacaagttgtttacagaaactgcaaattaaaaaattacactggcatttgcagtccttaaaataaattaaaagttctcaacttttttttttttgctaaacatttttttaagtatgagtcctttgtttaaaaagaaanagattanaacagaaaatattttctataaataatacatgtattttggttttagtgctcccgccc

SEQ ID NO: 1973 - DNA, 374 bp, Homo sapiens
  misc_feature 75, 77, 238: n = A,T,C or G
gccgacccacgcgtccgacatccccaggcacatccggaaggaggaaggttcctttcagtcctgctccttctgcangnccaagaaattcactaccatgatggtcacactcaactgccctgaactacagccacctaccaagaagaagagagtcacacgtgtgaagcagtgtcgttgcatatccatcgatttggattaagccaaatccaggtgcacccagcatgtcctaggaatgcagccncaggaagtcccagacctaaaacaaccagattcttacttggcttaaacctagaggccagaagaacccccagctgcctcctggcaggagcctgcttgtgcgtagttcgtgtgcatgagtgtggatgggtgcctgtggg

SEQ ID NO: 1974 - DNA, 320 bp, Homo sapiens
cgcgtccgccgagagaagaggtacggtcgaagcccggagccaggccgagcgggagctgaccaggcttgactcgggtacagaacgaggcaccagtccccttgcgaaccgaagggcctcgcagtggatggaggaggcccagccctgaggtcaacgccaaccaggctagcctggcacggggcctacagggtgggtaggcgggcgtgccgcagccgtccagggccttccctcaggtcccgggccgaggggcctacgctgcggcccggcaacaaggcccgactcggcccctcgggaccagagccccacccgatcggaagcggatc

SEQ ID NO: 1975 - DNA, 496 bp, Homo sapiens
  misc_feature 13, 16, 17, 31, 32, 44, 53, 58, 65, 72, 73, 83, 84, 120,143, 232, 240, 241, 294, 320, 348, 371, 396, 414, 418, 436,451, 456, 458, 475, 477, 482, 485: n = A,T,C or G
ggcctcagggggnagnnatcctgcaaagacnnacatgagcccanaggggaaanagagncacctgngagtacnngcctttgggnntgaccttggctctcagcacaagatatttacagcctntgagcttgatattctagaattgntacagagatagctctggaaaagaaatagactagaaggataaagggaaggaatcatagcttatgaaggtttttactctgcatcagaccgntttctagnnctatgacttaacgtcctataggctgtaaggttctctgcgtgaacacttctttnctggcctcctttctgccccattcctntttaaactcagttgctgagtttattatnccctgtgcatccctgggcattgntcattcacatatggaaacaattcanggaggaccctttgcctantttnctttatcctcttgaattntggatgggaaaaatnttaantncttttggccgcctgcantnggggnaantattgggcctt

SEQ ID NO: 1976 - DNA, 523 bp, Homo sapiens
  misc_feature 274, 279, 281, 284, 288, 289, 290, 292, 293, 296, 312, 313,314, 317, 325, 331, 334, 335, 342, 343, 345, 346, 349, 351,362, 366, 367, 370, 374, 382, 388, 398, 400, 404, 407, 411,413, 418, 419, 420, 427, 428, 441, 442, 443, 446, 447: n = A,T,C or G
  misc_feature 451, 458, 459, 466, 472, 484, 494, 502, 511: n = A,T,C or G
cgccccgcgtccgcgttgaacagctttaagaacaatgtgaatgaaatcttagcaacttggttagtaatctgaaaagtctattaatgtatacttgaaattctgtttgtataaaaatgcattttcccctttattttaacactgtgtaaaagaacattatgcatgtgagtggtttgagaattaaatggtttaatactcaaaaaaaaaaaaaaaaaaaaaaaaaaaaaaaaaaaaaaaaaaaaaaaaaaaaaaaaaaaaaaaaaaaaaaaaaaaaaanggggngnccnttannntnnttnaaaaaaaaaccccccnnnccnccccctgnacccgnaannaaaaaannannccntnggggggggaancctnnttnttgncccttaanaggggncccaaaaaancnattnccncccnantttcnnnaaaaaannctttttttccccnnnttnnaagnggggggnnggcccanccccanaaggggtttttnaaaggggggnaacccccnggtccccgnccccaaaaaaaa

SEQ ID NO: 1977 - DNA, 351 bp, Homo sapiens
  misc_feature 5: n = A,T,C or G
cgccncgcgtccgggctgccgtaacaatcgccacaaacctggtgacttaaataacaaatatttattttctcgtagctctggaagccggaagtccaaaaccaataacttggcagggctgtgctccctctgggagatctcggggagcctccttgctacatgttccgcttctggggacttctggtggtgtttccctggagggccaaggcctccgggcggcccgtgcattcggtgaacacctccaaagagctctgagtcacaaagccttgggaaactttattttattctttctaggacattatcagtagtcccgaggagacatcaattacaaaacaaaaaaaaaaaaaaaaaaaa

SEQ ID NO: 1978 - DNA, 495 bp, Homo sapiens
  misc_feature 237, 334, 359: n = A,T,C or G
cgtcccgacagtcagccgcatcttcttttgcgtcgccagccgagccacatcgctgaggacaccatgggggaagggtgaagggtcgggagtcaacgggatttgggcggtatttgggcgccctgggtcaccaaggggctggcttttaaacttctgggtaaaaggtgggatattggtttgccaatcaaatgacccccttcatttggaccctcaaactaccatgggtttacaatggttccnaatatgaattccacccaatgggcaaaattcccatgggcacccgtcaaagggcttgagaaacggggaaagcttggtcaatcaaatgggaaaattcccnatcaccatctttccaggagccgagnatccctccaaaatcaaagtgggggcgatgctgggcgccttgaggtaccgtcgttgggaagtccacttggccgttctttcacccaaccattgggaagaaagggctgggggcctcattttgcagggggggggagccaa

SEQ ID NO: 1979 - DNA, 297 bp, Homo sapiens
  misc_feature 150, 186: n = A,T,C or G
gagtgtagttacttcggtcttgcctcactgggaggccacgttggtgacgatgcacacgaagccccggtacttgtccaggttaaccatgtgcccgtccgatgtccttggcggaaaactcgtgcatggagcgcgcacagcgccagtcgtccngggacgcgcacgggtcctgggacttgggacattcgnggatctccggtcgcaagctgcggggacaaggcttcttccgccggcgccgcgccctcctgcgcctgcacgctggggccttccgccgccgaggggctcgcggccgctagacta

SEQ ID NO: 1980 - DNA, 538 bp, Homo sapiens
  misc_feature 407, 512: n = A,T,C or G
cgcgtccgatcggaagtggcgctcgtgcattcaacttgttcccgctcatggaacccctctttaaaaagacgcagggcacctgtgagcgcaggagcgagcctaaggccacccagcggcagcgcccgtgtcctgggcactcagcgtgctgggcagagcaggtgcgatggccccagtcctagcagccctcgcccatgtcctgtgcccttacatggctcccggactgtgcagggagccgatacgtttgctgatagcaatactggaaccacccgggtgcgatggcagtgaggagactgcccagtgcctttggggctgtgcttgcaataaagaaagaatttcctggaaaggcagtctgcaaaagagggaacccggtgactcagaaagacaggatgttttggtaatttaccccnaaatgtgccatccaccatagtgctttttcctcttgcccttcggcttgtttgaatctcacaattatggtatttaattctcaaagaaatatgtatctgttagcccgnttggtgacacttatacagatgattaa

SEQ ID NO: 1981 - DNA, 484 bp, Homo sapiens
  misc_feature 2, 317, 480, 481: n = A,T,C or G
cncgcgtccggtcgaagcgaggacgtggtgggtcctctggtgcgaaattccggatttccttgggtcttccggtaggagctgtaatcaattgtgctgacaacacaggagccaaaaacctgtatatcatctccgtgaaggggatcaaggggacggctgaacagacttcccgctgctggtgtggggtgacatggtgatggccacagtcaagaaaggcaaaccagagctcagaaaaaaggtacatccagcagtggtcattcgacaacgaaagtcataccgtagaaaagatggcgtgtttctttattttgaagataatgcangaagtcataggtgaacaataaaggccgagatgaaaaggttctggccattacaggacccagtagcaaagggagtgtgcagacttgtgggcccccggattgcatccaatgctggcaagcattgcatggattcttccagtatatttgtaaaaaaaaaaaaaaaaannaaa

SEQ ID NO: 1982 - DNA, 280 bp, Homo sapiens
  misc_feature 126, 251, 273, 274, 276, 279: n = A,T,C or G
gcgtccgtggtaacgattggccctaagaagcccctgcctgacccgtgagcattgtggaacccaaagatgagatactgcccaccacccccatcttcagaacagaagggtggggaagccagagcccgnctgccatgccccagccagtccccacagcataacagggtctccttggcaagctgtattctggagtctggatgttgctctctaaagacctttaataaaattttgtacactggactttaaagtattgntcacaagggttatgcaattccnngncang

SEQ ID NO: 1983 - DNA, 615 bp, Homo sapiens
  misc_feature 112, 128, 356, 365, 368, 372, 373, 485, 599: n = A,T,C or G
ccccgcgtccgtgacaatcgagtagtactcccgattgaagcccccattcgtataataattacatcacaaggacgtcttggcacttcatgaagcctggtccccacattagggntttaaaaaaaccaggnatggcaatttccccgggaccggtctaaaaccaaaacccacttttcaaccggcttaccacggacccgggggggtatacttacgggtcaaatggcttctggaaatctggtgggaggcaaaccacaagttttcatgcccatcgtcctaagaattaattcccctaaaaatctttgaaatagggcccgtatttaccctatagcaccccctctaccccctctaggagccaaaanaaaaaaaanaanaaannaaagtgcggcccgctagacttaggtctaggaggaaaaaaacctttccacacctttcccctggaacctggaaacataaaaatgaatgcaaattgtttggttgttaactttggnttattggcaggcttataaatgggtttaccaaaataaaaggccaataggcatcaccaaaaattttcaacaaaataaaaggcatttttttttttaactggcatttcttagtttggnggggttttggtcccaa

SEQ ID NO: 1984 - DNA, 381 bp, Homo sapiens
  misc_feature 338, 339, 340, 341, 344, 351: n = A,T,C or G
ccgaaagaatatctgtgtgcttagggaggaaactttttgatctgcagaaaagccagaagacatctaggacatccataaaaattcatcagagagcattttactactgagctgcaaagggaaaaacttaaaatgggatatgaaaagtgaagaaagtgatcatagggagaaaaaccatttcagatgacaagagcacctcaaaggcagcagcctcaaggagcagccatggccccagacttgtcgcacggatgcagaaaacttaatggaggaggctgaggtcagaatgggaagagtttttaaaaaataaaaaggggagctaatatgtgagggaccaaaaaaannnncanaaaaaanaaagtgccggcccgctagactagtctagag

SEQ ID NO: 1985 - DNA, 592 bp, Homo sapiens
  misc_feature 185, 231, 361, 530: n = A,T,C or G
aagcttcctggttcaaatgtgccatttcccgggttgatgctgccacactttgtagagagtttagcaacacaagtgtgcttaagtcaggcggtagggaaatccctcactaaaagcaggaagaaaggttccaattcaaaaggtgcccaatggataggaagtcaaacaaggaaagggttaaatggttnggaaaaccacaaatcagggtggtgggatttgggtgcttacttttgnaacaaaaaagggtcccccctggtgggtctttttggttcaaacaattggtacaaattggtaagaaacttcttgtccaaaccacttaaatttatttttggtctttggaggtttttacttacaaaggatggangactattgggaatccccggcatgccctggaattcactaaaagccaaagggggtcttgtaaggccaacgctgcttcttctggaggactttccatttccttttctggattgggcaacaccgtgcaggctcatggacaaatctggtagggataacaaattcagtggtgggantttccacttcttttttcaagtcctttcatgttaaaaggaattttaagaacacccacatacaa

SEQ ID NO: 1986 - DNA, 417 bp, Homo sapiens
  misc_feature 2, 388, 402, 414, 417: n = A,T,C or G
gngtcgaccacgcgtccggagcagcagccatggccctacgctaccctatggccgtgggcctcaacaagggccacaaagtgaccaagaacgtgagcaagcccaggcacagccgacgccgcgggcgtctgaccaaacacaccaagttcgtgcgggacatgattcgggaggtgtgtggctttgccccgtacgagcggcgcgccatggagttactgaaggtctccaaggacaaacgggccctcaaatttatcaagaaaagggtggggacgcacatccgcgccaagaggaagcgggaggagctgagcaacgtactggccgccatgaggaaagctgctgccaagaaagactgagcccctcccctgccctctccctgaaataaagaacagcttgnccggataaaaaatnaaaaaaaaaaanaan

SEQ ID NO: 1987 - DNA, 534 bp, Homo sapiens
  misc_feature 375, 465, 520: n = A,T,C or G
gccacgcgtccgcagggaacgtgattagtgaaaggaagataaacgtggatgttactccaaaacttcgtttaatgaatgcttaaagaattcaaattttatctgcctctcttgtaatttggatctcttcttaatgtacatagtgctaacatgaagacctttttctgcactatatgcaaacagggtaactaactaaaacaaagccactttcaatcttcaatccttgaaggtatatctaggtttatgacagtaattgtgtttacattttatggtgcctagtattgacaaaatgttatttccctacattaaacatgactccatagaccttttcatttgtggggtttttatttcctatgatgtatactgccactaaccttncaaaaattacttagtattgcaaagtcagggaatcatcagggaacgtttagcttggccaaaatacttggtctggttttaaaaaccctgtcnaggtctaccaaacctgttcaaggtctacccaattttaaggggcaaatttgggggnaaaaaggaaaaaat

SEQ ID NO: 1988 - DNA, 502 bp, Homo sapiens
  misc_feature 11, 488: n = A,T,C or G
ggtgtcgaccncgcgtccgcgagtcccgcgttctctccttgaatccactcgccagcccgccgccctctgccgccgcaccctgcacacccgcccctctcctgtgccaggcaaggtgaccccatggcaaggcgcaagccagaagggtccagcttcaacatgacccacctgtccatggctatggccttttcctttcccccagttgccagtgggcaactccaccctcagctgggcaacacccagcaccagacagagttaggaaaggaacttgctactaccagcaccatgccctaccaatatccagcactgaccccggagcagaagaagggaagctgtctgacatcgctcaccgcatcgtggcacctggcaaggggcatcctggctgcagatgagtccactgggagcattgccaagcggctgcagtccattggcaccgagaacacccgaggagaaccggcgcttctaccgccagctgctgctgacagctgacnacccgggtgaaccc

SEQ ID NO: 1989 - DNA, 555 bp, Homo sapiens
  misc_feature 21: n = A,T,C or G
cgtccgacaacatttggcatnagggttgtatctgttggtggaggacacaacgccaaaaggaaatgggatttcctggttaggcctgcggcttggcagatgattgttatgggaaagacactgagtctgtttaggcaatttcttcctctttactaataaagtgttcctattttgaaagcaatgctgagttgtggacatgtgtataaaccgtaatgctgtaagttaggcctctcttgtctagaatctcagcctcttcatactctctcccccttttttgccatattattttccttatcactaactatatattttacctgtctcacttactatctgtctctcctctcagagtgttactccaggagggcagagataactgtttagtccaggctgtgcctttcggtgctcaaaataatgcctgggtgcaaaataaatatatcttgaatgaaataatgaagtaatctttaaaatggtgctccgagcataattttctatagtaacacatagtttgcaattagttgtctctttcagggataatggaaattggtcaacataagaaaa

SEQ ID NO: 1990 - DNA, 550 bp, Homo sapiens
  misc_feature 1, 34: n = A,T,C or G
nccccgcgtccgaatttgttttatggattgaatnatgtctcctctaaaaagatttattgatgttctaaccctccatgtctcgtattgtaaccttatttggaatagggttgttgcagaagtaattagttacattaagatgaagtcatgctggagtagggtgagcccctaatctaagaggactggtgtccttataggaagaggaaaatgccacatgaagagagagagagatgcccaaggaggtgtcatgctgcaatgagggcagagattggaactgtgcagctgcatgccaaggaacaccaaagatttcagcaaactactggaagctaggaaaaagcaaagaattcccctaaatatttcagtgggagcatagccctgccaacaccttatttcagatttctatcctccacaactatgaggcaataagctctgctgttttaagctcctcagtgtgaactatttttgtcatggcagccttaggaaactaacacaatttacaaacagattaagttcactaatcaaaagacagcccttgcaattggggttttttttt

SEQ ID NO: 1991 - DNA, 371 bp, Homo sapiens
ccgcgtccggcgggtgagccgctggcgcgccgggccgggcgggggattggctgagggcgacgcgagagaggggagacccggactgaggagaggacggggtggagggtcccggccggaggctagcctgaggagaccgggggcggaggggagacccgggccgcggaggaaagggatggaggagaggaagccgccgggcgccagcgggacccccgggctgaggggagaggcgccccaggccgggtgaaaagtggccgaggagacctgggctgggctggcaagtcccggaccggggaggaggggagcagccctccgatgtgagggatcgcagaggaatgagcttcgttctggattaaaaaaaaaaaaaaaaaaaa

SEQ ID NO: 1992 - DNA, 518 bp, Homo sapiens
  misc_feature 29, 79, 137, 141, 149, 157, 166, 230, 256, 288, 291, 293,296, 299, 300, 302, 304, 307, 308, 317, 319, 324, 325, 327,330, 331, 345, 346, 347, 351, 352, 359, 363, 366, 439, 447,481, 493, 497: n = A,T,C or G
gtcaccacgcgtccgcagcgcacgccccntgccctgagaacaggaaagggcccggaagggctgactcaccgggccgacnctcacacgaaaatgggatgcactttatttgctggtgcaaaggcaggtgagggtgcctnctgngtgaccgntggccctnctgcctggnggcgctgaagggaaggagccagtgagcctgaccccgggaggggccgtccccgtgtgccgcgttnggcggggccccacgcggctcccccangcccgggtctggggccccaggctttcccctgnctngnggncgnncntnccnngctttgggntncttgnntnggnntttttaatgccagnnntcannacataantgcnttntgaaagaggttccagctatcacttgtaaccatatatatatacatatatattctatctacaaagtgtttatttncaaagatntttcaacggtgaattcagtccccggccgcccttntgaccatctgtncccngtccttgtccccgccccgggg

SEQ ID NO: 1993 - DNA, 571 bp, Homo sapiens
  misc_feature 3, 6: n = A,T,C or G
tcnccncgcgtccttgatattttgagaaaaatcatgtgagtcattttttctgtttctcttttctcttaacgattatcactgtaattctgaatctgaaaggtaaaacaattagtcaaaatattattgccatcattctacctgtgttatgaaactacttattcatagttaattctcattaacacttacatttccataaagaaaactcaagtattaataaaagagactttactggcttaagagggctgtgaaagatttttgatagtgaatcatgaccctaagggagagatttgtgtgataaaagtattgtatataatagatcagcgatttttgtaaggcaaacagaatttgtaagttggcagatcttcctaagttgcaaaatgtaatgatgagcttggtgggagaagaatgagtcgttcttggaatacctatgtgcagccactacccatctcaatgtcaccttgtttgcattcttggatagcttgtatatgtagtagtttgatgaataatttaaagaaaaacacctaaaatttgaaaaatgattgtagggatcaaaaaaggcagatgaaattac

SEQ ID NO: 1994 - DNA, 368 bp, Homo sapiens
  misc_feature 23, 34, 40: n = A,T,C or G
cacgcgtccgctgacctgacccnttcctgatccnaggccnggtggttgtcttattgcaccatactccttgcttcctgatgctgggcaatgaggcagatagcactgggtgtgagaatgatcaaggatctggaccccaaagaatagactggatggaaagacaaactgcacaggcagatgtttgcctcataatagtcgtaagtggagtcctggaatttggacaagtgctgttgggatatagtcaacttattctttgagtaatgtgactaaaggaaaaaactttgattaaaaaaaaaaaaaaaaaaaaaaagtgcggcggccgggcgcgccggggtgggcggcgagcggagccggccggagcgggccgggca

SEQ ID NO: 1995 - DNA, 579 bp, Homo sapiens
  misc_feature 7: n = A,T,C or G
tccgacnaaggaacaaaagcgaaacacacaaaccagcctcaacttacacttggttactcaaaagaacaagagtcaatggtacttgtcctagcgttttggaagaggaaaacaggaacccaccaaaccaaccaatcaaccaaacaaagaaaaaattccacaatgaaagaatgtattttgtctttttgcattttggtgtataagccatcaatattcagcaaaatgattcctttctttaaaaaaaaaaaatgtggaggaaagtagaaatttaccaaggttgttggcccagggcgttaaattcacagatttttttaacgagaaaaacacacagaagaagctacctcaggtgtttttacctcagcaccttgctcttgtgtttcccttagagattttgtaaagctgatagttggagcatttttttatttttttaataaaaatgagttggaaaaaaaataagatatcaactgccagcctggaggaaggtgacagtccaagtgtgcaacagctgttctgaattgtcttccgctagccaagaacctatatggccttcttttggacaaaccttgaaaatgtttatttaaa

SEQ ID NO: 1996 - DNA, 495 bp, Homo sapiens
acgcgtccgaagaggtatatcccataccttttccccaaattcccttgtcattaattttccaattatgcttcttccaagtgcctgaccatccagccaaaccattggctacagcccatgaatcagtatacaatggcgctactggtcatttctctttccatacaaagtgcacaacctggtatactcttcaaagttctgcccactgggaagatttgccttcaccactgtccttcagggataggggctatagagctgcagctgtccactttcaggtggtgcctgcatatcgtgcataaccatctgtgaaccaagccctagtcttgtcttcctctgtcaactgatcatagggaactccccatgaggccatcagtgcaggctaagggaaagaaggcaaggtggcaggagtggagaccatggacatttgagctactttcttaggtaacttacttgtgtcttcaggacctgctcaagccagatcacatatataccactttaatt

SEQ ID NO: 1997 - DNA, 463 bp, Homo sapiens
  misc_feature 5, 463: n = A,T,C or G
cgccncgcgtccgctacacttaaggatgaagagaggaaaaatctacagtgtaggcacagaaatgcctagaaatgagagaaaaaaaaaacaggagcgcatactgcctcagaaacaccaagagtagtttgggaagaaaggagtcaacaataacaactatcaaaggaatgaatggccaacagtgtagcctcaagtagggtagtgtgagtagttgatagaccaaaaatcctcagcaaaatactagcgaacagattcaacagcatactgaatggattatacaccatggccaagtgggatttatcccaggaatacaaaggtagttcagcattagaaaatcaatcaatgccaacacacctcattaacagaaaaagtaaagaactgcatacatgatcccacaattgatgctgaaaaggcatgacaaaatccaacatgctttcatgatttaaaaaaaaaaaaaaaaaaaaan

SEQ ID NO: 1998 - DNA, 477 bp, Homo sapiens
ccacgcgtccgcacacttgaccccagagatcacgccactgtcagctgccctggctcaaacaattgcccagggaatggcacctccacctgtctccatggctcctgtggctgtatctgtggctcctgtggcccctgtggctgtatcgatggcccaacccttggcaggaatcacaatgagccacaccaccactcccatggtgacttaccctatcgcttcccagagcatgcgcatcacggccatgccacactgatggggctaatggacactcccctggtatagcctcgcagggctggggtcagggggcccttgcccactcacctagccttccccatccctgtctgaagggctcccttgagaactaggacaagagactacaaggagtatgtcctgaggaggggttgggatggtgtggttttctctcacctcccttttatgagggtcctcttgtccatcttcaagcctcacagtggggggctt

SEQ ID NO: 1999 - DNA, 275 bp, Homo sapiens
  misc_feature 1, 2, 173: n = A,T,C or G
nnggcaggagaggttcaaatgcattgcatcaacctactatagaggagctcaaggtaatggggctgggtgaagtggggtaggtgggtctcagagtgcacatggcttctcatatggagctggaaggattggggaaatgagcagtagtgtcttccctgtcaacctggggctgtttntgccactcttccagccatcatcattgtcttcaacctgaatgatgtggcatctctggaacataccaagtaagtgagcatcctgcaatataatgggaggctccg

SEQ ID NO: 2000 - DNA, 403 bp, Homo sapiens
acgcctccagcctgggcaatagaatgaatgagactccatctcaaaaataaataaataaataaaatactgagaaaaagaatctttattgtttcctgtaaaataaattttccttttagcaaagctcttttccctttgactctcgccgcctagatttcggtaccaggaccacacatttttaaagatgctcctcaccgccgtacagctcctgtacagcccagaaagctccgtgcgcacgaagctcatccagctcccggtggtctacgtgatgctcatgcagcactcgctgtttctgccgactctactgacgtctgacggagaggagagcccggacagccaagtaaaaggtgacccctcaccccagcccttccattccgtatccagattttatctcctgatttcctta

SEQ ID NO: 2001 - DNA, 564 bp, Homo sapiens
  misc_feature 435, 535: n = A,T,C or G
cccgcgtccgccgagatggcgcccctgcactccagcctgggtgacagagtgagaccttgcgtttaaaaaaaaaaaaaaaggaaaaggaaaaaaaagttctactgtgggtaaaatgctatcatgctatcaaacagcatcacatgctacagagaagtcttgtgaaaggatgtcagtgtggcaaacttcattgtcttttaagaaattgccacagctatcgtaatcttcaaccaccaccaccctgatgagtcagtagccatcgttaacgttggcgtaagaccctccaccagcaaaaagattgttagcatttttttagcagtgatgtatttatcaattatacataatgctattgtacacttcttaatagactatggtatagtgtaaccataatttatgcactgggaaaccaacaaattcatgagattcgctttattgtanttgctctggaattgagcctgcccgtgtttcttgaggtatacctgtgtattaggtatgttccttgtatataaaaccccattttttagggtaggaaactaangcttagagtttgagccaatttttcccata

SEQ ID NO: 2002 - DNA, 684 bp, Homo sapiens
  misc_feature 110, 339, 406, 408, 432, 444, 448, 457, 489, 491, 494, 516,518, 533, 539, 543, 564, 565, 569, 575, 587, 588, 597, 611,621, 633, 644, 659: n = A,T,C or G
cgtccgcactgttcaaaccctgtcatgctttaaaactgatgcgagatgattttgttttttgcataatcaatacttaagggtgcaatcaactgttagtaattgtgcagtanagtaaagccctgtggtgtatcaactactagttaagagtctcagttgatttctgtaatgtttgacctaataatagcccgtttcgtctctgacccaacagaggaagcacagatcaaatcaccttggagtggtcaccagggggacagggagccccccaccaatgtatcaatgggtgatttatgatgccttctgccctttggcgagtgaatgggtttcccataggggaagttnggcctccctccgtgagctttggaaaatgtttttctaatagacacaggggaggccagtttttgttttnanagcaattattttttcccaaattcntctgttttgggnggtnggaacctgnggggcccccggggtttctggttttcctttttncngcnggaaaattctcctggctaaaanantcccttttttttttnggtttnccanaagccctttttataaatgcannatantgaatngcttggggaacnnaaaataaantttttttttcccantcaaaaaaanaaaaaaaaaaanaaaaaaaaaanggcggggccccttanatttttttaaaaaaaaaaaaccccc

SEQ ID NO: 2003 - DNA, 381 bp, Homo sapiens
  misc_feature 3: n = A,T,C or G
ttnccatccctcaggtgctgagaaccaaagtgcctagagaagggcaggaggaggatgacgacgatgaggaagacgatgctgacgaggaggctcccaagcccgaccattttgttcaggaccctgcagtgctgagagagaaggcagaagccaggcgcatggcctttctcgccaagaaagggtaccggcatgacagctcaacagcagtggccggcagcccccgaggccatgggcagagccgcgagacaacccaggaacgcaggaagaaggaagccaacaaggcgacaagagccaaccacaaccggagaaccatggccgaccgcaagaggagcaaaggcatgatcccatcctgagacctggtgcagggccagtggggaggcaagc

SEQ ID NO: 2004 - DNA, 394 bp, Homo sapiens
  misc_feature 2: n = A,T,C or G
tncacattttcctcctaagcacatgggtcattctcaaggagagaccatatgttaggtcacaaacattcaaaaaattgaaatattatcaagcaactactctgaccacaatgatgtaaaactagaaatcaaaaccaagaggaattttagaaactatagaagcacatggaaattaaacaatctgtttcttaatgaccagtgagccaatgaaaaaatcaagaagaaatttgcaaattgtttgaaagaagttataatggaaacacactatactaaaacctataaaacagcaaaagcaggactaagaggaaaatgtatagctattaaagtgcctacatttttaaaaaatgaaaaaactttagataaatcacttatctatgaatttgaaaaaaaaaaaaaa

SEQ ID NO: 2005 - DNA, 464 bp, Homo sapiens
  misc_feature 12: n = A,T,C or G
cgggaagctttnttttaattaagctgaaaccgaagctttaattttaatttaaatagttccatgtgcccatattggacagtatagctccagggtttattaaaccaccattcctggtgataggatagagcccagcacaaactaatctgggcaacaaatcaaagggcacaagtcgcatgtaggttccaaactcagtacattttagagaaaaggagtttgattatgtagtagaaggaagaactgcctggtgggactcatgatcttcctttaagagcaaggctcaaagacctggggagttttgatttgatgctatgatgtctcctggggctcagaatattatgaaatgaggagtgaatctctgagtgaaaagaactcaagctgcttgttgcattgcggaatgtctctaagaggtagagaggcgtctgttaagtggctttgtatgaaggtttcagaaggtaagatgagcc

SEQ ID NO: 2006 - DNA, 359 bp, Homo sapiens
  misc_feature 1, 87, 175, 176, 330: n = A,T,C or G
ncatttaactgtaatagatatagaacgtatccttcaataaccaacaacaaatgcttgtttccaacaggctctgatggttgtatatanggaaaccttgataccaatacgtccagctgacccagaaaaaaatcagagcttagttaaatcactgctgctcaaggctgttgtatctggnnacgctcgaaatggagttgcactcactgccctggatcaggatcacgtcgcagtcctaggaagtccactagcagcttctaagggtaactgacatccaattcattaagaaggcctttgtatgtttccttcacggtgtaccttttagtcttccttttntttttcatttcattattacccagactaat

SEQ ID NO: 2007 - DNA, 538 bp, Homo sapiens
  misc_feature 494, 509, 524: n = A,T,C or G
gtccggccctgcactagggactggggaggacatggagaataatatatgtaccagcacagacagacaggcagcttctggagccagactgtctgtgtgatcttgggtaagtaatctagcctaaccatagagatgataacaattgtacctgccacaggctcatggggctattgtgatggtgaaatgtaaagatgtaaagtatagagaaaggatgtaaaactgcccgacatatagtaagggccatttaaaagatgcctgttattgtccctcttcttgagagcatattaagggctcaaatctagccagagtctggcgggtacagaggtaaacaaataatggcaggttggttaagtactggacaccagtgatgtccaaggtctctaggatgccctggagaaataatgaactcttctaagattgtttggaaggggatttataaaggacatctaggctgggttttgagtgaggtatggggagttcgctggtcaagaatgtangaattacaaaagcanaaagtgccttatttnaaaaaaaaaaaaaa

SEQ ID NO: 2008 - DNA, 342 bp, Homo sapiens
  misc_feature 1: n = A,T,C or G
nccccgcgtccggaaaatattttagaaagcaccttgaagattagtatttttatgtaacttctgttggagagatgtcttcaggagactgaagtagaagagcgactgtcaaaatggaaagtcccagagacatccaatttatgtaaatcaacatcacctgaattcagaatctcatccagatttcaacaaagacttctgaatgccaacaaagaagaggactgaatttacagactctcactctaacaatatatgctgttcaatttgaaaacagaataaaattattttggcagaaaaaaaaaaaaaaaaaaaaaaaaaaaaaaaaaaaaaaaaaaaaaaaaaaaaaaa

SEQ ID NO: 2009 - DNA, 462 bp, Homo sapiens
  misc_feature 8: n = A,T,C or G
agagtgtncagctggctttcctcacttgggaaaaggggtactgccagtctaagcagcctcctctgtactcagccaggacacccagcgcgtgggacctgtttgtgtctgttttgcttccttgggaacggcacagtcactcaccctgccatttgcggaaatgacctggtgcactttgactgttaagcaatgcgttattgctgtagtcaaggttagtgcaagcaaggaaacattcccagtaaggtatttgtttccattttctgtctgtgcttctgtcagaaacttgctaggactttagtggccaataaaaaagaaattctagcttgatcgacccacgcgtccggtaatgattgatgaggacatgactgcccgaattagcatggctgatgtcaagttctctttccaatgtcctggtcgcatgtatgcacctgcctgggtagcccccgaagctctgcagaagaagcc

SEQ ID NO: 2010 - DNA, 593 bp, Homo sapiens
gcgtccgacaaacataatgatccgtgacagtgaccttaatatataaatgtgtgtgttgtgattgttctactgaccagccatttcctgtctccctcttcttatgcctccctgttaaattagacacaacaacattgaaatcagaccaattaataaccctacagtggtctctgagagaggctaacagctaatcctcttgtgctaaacagccaaattgtgaatgcaaaggaaaagttctcaaaggaaattaaaagtgctactccagtgaacacatgaatgataagaaagtgaaacagtccgggcgtggtgggtcacgcctgtagtcccagcactttgggaggctgaggtgggtggatcacctgaggtcaggagctcaagaccagcctggccaacatagtgaaaccctgtctctactaaaaatacaaaaattagctgagtgtggtggtgcacacttgtaatcccagacactcgggaagctaaggccgagagaatcacttgaaccccagaggtggacattgcaagtgagctgagattgtgccacttgcacttcaacctgggtaacagagagagactctgtctcaaaaaaaaaaaaaaaa

SEQ ID NO: 2011 - DNA, 475 bp, Homo sapiens
  misc_feature 36: n = A,T,C or G
gtctattaacatacggagctgaatctgccgcagctngaaatgctcaagaaccagctggaccaggaagtggagttcttgtccacgtccattgctcagctcaaagtggtacagaccaagtatgtggaagccaaggactgtctgaacgtgctgaacaagagcaacgagggtatggggtaggcgggtgagggtaacctaaagtggcgaacctgcttctctcgtcccacctcctaacccagtttttcttacctgaaacgagaaaatccattacatatcgtataccgcttcatgaaccctttgcatgttgcctgcctagaattgaaaagtacaggacattcctctgctcctattgcccctgtttccgttcttttcacactgtctgtgggtgctgtgccctgttggaactctctttaacgtcttaccgttggagccgcttaccttcccaggtgttgtcttcattggctttcacaagggaaaa

SEQ ID NO: 2012 - DNA, 507 bp, Homo sapiens
  misc_feature 1, 383, 506: n = A,T,C or G
nggcagctgctttgtctgggagggggctttgtgtcgagtctccctgaatgagcagggctggcgacagttgtcaaaacacatggtgcttggtcagagcccccgtagaagccccttgtcctccgcatggcctccgcctgcacccggggcgtggaatgtgctcttgtgtgtccctggctgtctgcttgcttctacactggcccctgcagatggagggggtggggtacaggggttcctataagaagcagacacttggggtttttcccaggccctgttgcaggagggtgcgtgggctggtttccctgaaggcgcctgggccgtgttggtgttaactgatctgagatcttctgtggccctgatgtctatgagcatgccccaacttgcanggggctgagtagcccgggcaccaccaggaggcttgcgtgccctgtgcttgggtgtacccatgccctgtcagcatcgttggtctgttaggggtcagggacttcggcttcttgtttaataccctnc

SEQ ID NO: 2013 - DNA, 437 bp, Homo sapiens
  misc_feature 405, 419, 422, 423, 436: n = A,T,C or G
aagtcggacgcgtctcagttccttaaagctgttggtccaaggctaccctcagttccttgccacatgggcttctccaacaaggccatttacattaacaaagccaatgagaaagagagttaccgggcatggtcgctcacacctcttaatcccagcactttgggagcccgaggcgggtggatcacttgaggttaggagttcgagaccagcctggccaatatgctgaaaccccgtatctactaaaaatacaaaaaaattagcctggcatggtggtgggcacctgtaatcccagctactcaggaagctgaagcaggagaatcacttgaacttgggagtcgtaggttgcagtgagccaagatcgagccattccactccagcctgtgcaacaagagcgagattccatctcanacaaaaaaaagatnaannaaaaaaaaaaaant

SEQ ID NO: 2014 - DNA, 694 bp, Homo sapiens
  misc_feature 352, 354, 355, 359, 364, 372, 373, 374, 375, 376, 377, 378,379, 380, 381, 382, 383, 384, 385, 386, 387, 388, 389, 390,391, 392, 393, 394, 395, 396, 397, 398, 399, 400, 401, 402,403, 404, 405, 406, 407, 408, 409, 410, 411, 412, 413: n = A,T,C or G
  misc_feature 414, 415, 416, 417, 418, 419, 420, 421, 422, 423, 424, 425,426, 427, 428, 429, 430, 431, 432, 433, 434, 435, 436, 437,438, 439, 440, 441, 442, 443, 444, 445, 446, 447, 448, 449,450, 451, 452, 453, 454, 455, 456, 457, 458, 459, 460: n = A,T,C or G
  misc_feature 461, 462, 463, 464, 465, 466, 467, 468, 469, 470, 471, 472,473, 474, 475, 476, 477, 478, 479, 480, 481, 482, 483, 484,485, 486, 487, 488, 489, 490, 491, 492, 493, 494, 495, 496,497, 498, 499, 500, 501, 502, 503, 504, 505, 506, 507: n = A,T,C or G
  misc_feature 508, 509, 510, 511, 512, 513, 514, 515, 516, 517, 518, 519,531, 538, 557, 571, 572, 573, 577, 598, 607, 625, 653, 663,666, 671: n = A,T,C or G
tcctattcctctcttgagtttatgcacatctctataaatcattagttttctattttattacataaaattcttttagaaaatgcaaatagtgaactttgtgaatggatttttccatactcatctacaattcctccattttaaatgactacttttattttttaatttaaaaaatctacttcagtatcatgagtaggtcttacatcagtgatgggttctttttgtagtgagacatacaaatctgatgttaatgtttgctcttagaagtcatactccatggtcttcaaagaccaaaaaatgaggttttgcttttgtaatcaggaaaaaaaaaattaatgaaccttaaaaaaaaaanannaaanaacangtgcggcnnnnnnnnnnnnnnnnnnnnnnnnnnnnnnnnnnnnnnnnnnnnnnnnnnnnnnnnnnnnnnnnnnnnnnnnnnnnnnnnnnnnnnnnnnnnnnnnnnnnnnnnnnnnnnnnnnnnnnnnnnnnnnnnnnnnnnnnnnnnnnnnnnnngcattttttttnactgcantctaagttggggggttggnccaaactcatcaannnatcntaatcatggctgggatccccngggtcccgngcctcggaaattaaattnccttttttccggttttccttggggtttnaaacctttgnggngaaantttttttttgggggggggggggg

SEQ ID NO: 2015 - DNA, 538 bp, Homo sapiens
  misc_feature 107, 468: n = A,T,C or G
cgcgtcctgagaggtcaggccggtcctgggggcagcaagcccggccacactccccaccgcgaccggggctctgggctcgcttcctgcttcagtttccccaagctccngatgagactccgctactaccaccacgtcgataacgcaaacctagagggactcagggtaaactgaggcactcaaactgccgaggagctccgcctcccgagagacatttaatccggggggatttgcaggaaacttctaaattaagggtagcggctgctgcagctgagggggggcacaccggtccctgcgcccgggcagctgccgtgagctcacgccccgaaatagccccaggggccccagccgcagctgccactgggtccggctgtcactcagaggaagcacggagcccccagcccaagggtcccctccccttcgcatcgcggggtttttccagccgaccgtcggccactttttcctccgacngctggcagggaagagggggattgggggccgggaccccaagggaggcggtccccaatgggtgggccaaggg

SEQ ID NO: 2016 - DNA, 500 bp, Homo sapiens
acgcgtccgcacacccccaggtgcccgcgctggccccccaggcgtggtggcctgcacggaggggaccacttacgtctgctccgtctgcccagcaaagtttgaccaaatcgagcagttcaacgaccacatgaggatgcatgtgtctgacggataagtagtatctttctctctttcttatgaacaaaacaaaacaacaacaaaaaacaaacaaacaaaaaagctatggcactagaatttaagaaatgttttggtttcatttttactttctgtttttgtttttgtttcgtttcattttgtactacatgaagaactgttttttgcctgctggtacattacatttccggaggcttgggtgaataatagttttcccagtctccctcggatggtggccttaaggcctggtagtgcttcaagaggtccactggttggatctctagctactggcctctaaatacaacccttcttttacaaaaaaatcttttaaaaaaaaaaaaaaaaaa

SEQ ID NO: 2017 - DNA, 699 bp, Homo sapiens
  misc_feature 472, 489, 491, 495, 518, 522, 569, 584, 630, 633, 645, 649,669, 678, 685: n = A,T,C or G
cgctccgcagcatcaagagttatttttctgactgtcaagtttcaacattcaggtctgtccccaacaggcaccacaccggggtggactccctgtgtaacttctcgccactggctcggagagtagacagagttgccatctatgaggaatttctgcggatgacccggaatggtacccagctgcagaacttcaccctggacaggagcagtgtccttgtggatgggtattctcccaacagaaatgagcccttaactgggaattctgaccttcccttctgggctgtcatcctcatcggcttggcaggactcctgggactcatcacatgcctgatctgcggtgtcctggtgaccaccccgcccggcggaagaaggaaggagaatacaaccgtccagcaacagtgcccaggctactaccaagtcacacctagacctggaggatctgcaatgactggaacttgcccgtgcctggggtgccntttccccaaccagggtncnaaanaactttggctggggcaagaaatnaaancatatttggtccggaaaaaaaaaaaaaaaaaaaagggccggcccttnaactaagtctaaaanaaaaaaactttcaaaaccttcccctggaacctgaaacataaaatgnatngcaatggtgggnggtnaacctgggttaatttggcancctttttanttaaaanttggggggggggtt

SEQ ID NO: 2018 - DNA, 703 bp, Homo sapiens
  misc_feature 86, 258, 332, 395, 461, 483, 539, 548, 553, 554, 555, 570,580, 590, 592, 604, 606, 608, 631, 634, 654, 656, 660, 664,682, 683, 688, 695: n = A,T,C or G
cggatcaagaccatcctggctacagtgaaaccccgtttctactagaactacaaaaaattagccgggcgtggtggcaggcacctatngtcccagctactcgggaagctgaggcaggagaatggcgtgaacctgggaggtggaggtgcagtgagccaagatggcaccagtgcactccagcctgggcgacagaggtagactctgtctcagaaaaaaaaaaaaaaaaaaaatcagtcactggatttgggcccaccctacctncatatgacctcatgttaacttgatgacatctgcaaagaccccattcccaaaaaggtcaccttcaccagtaagtngggggttaggacttgaatatagctttttggttgatgtaattcaacccacagcactgccttttncattccatgttatgttttttgagatttttgagatttgccaaatatatgaagctataaattatcagngaaaataaataatttcaaaatntaagctgttgaaaactctaaattatttttaagcctttaaaagaaatggatttttgnagacaaggncccgnnngggcttcaatgcctntaatccccancacttttgananggctgattgggngngnggattccaccttgagggtttagnggntttcaaagaccaagcctggncnctancggnggttgaaaacccctggtnnttctnacccttnaaaaaaaa

SEQ ID NO: 2019 - DNA, 702 bp, Homo sapiens
  misc_feature 591, 651, 686, 694: n = A,T,C or G
gtttttttatttctactgtcaaatgatgtgcaaaaccttttactggttgcatggaaatcagccaagttttataatccttaaatcttaatgttcctcaaagcttggattaaatacatatggatgttactctcttgcaccaaattatcttgatacattcaaatttgtctggttaaaaaataggtggtagatattgaggccaagaatattgcaaaatacatgaagcttcatgcacttaaagaagtatttttagaataagaatttgcatacttacctagtgaaacttttctagaattatttttcactctaagtcatgtatgtttctctttgattatttgcatgttatgtttaataagctactagcaaaataaaacgagttgacccacgccgtccggacacaagaaaggaatataattcatacactattgcatttttaataaatcttttgaaatttgcagaattaagattgtattgtgtattttcggttaaatgataattgaatgtaaatatttaagatgcagcaccatattttataacccagctttaggcatttcttcatattttaagggaaaccccccacctccttcttttaanggcgcttcttgctctctgaaatgccctgctaaatgccttctcttaattatttggaataanggtaggtttttgggggaaaattttaaaaaaaaaangggggggnaaaaaaaa

SEQ ID NO: 2020 - DNA, 525 bp, Homo sapiens
  misc_feature 8, 104, 109: n = A,T,C or G
aatttttnataatctgaattatcacaaaaagataaggatttttaaagttatttggagggagtgtacacattgtttatttaatagtgagggctattatacaagcnggtcnatgtaaaataatccctttatatgtatgagcatagttaatttggtaaacaacagacaattacatactgtgatcataaggactttagtatcagttaccatatagcaggtactctttagtcaggatatacctatataggtgctaaattaaaaatcaaccttatatctcaaatttacttcctagtagagtgtaacgctgccataattgcaagcctaattatggggttgtccatactgcagtcccatcagtactcatacaccaaagggtcgggcctgtgaagactggaaaaagaataaaatatcttttgattgagatactacaagcaaaaatgactttctggctaccattactgcaaagaacaaaactcaactgaaaacaatatgtagcaattaaaaagtctcattatcttcaaaacacac

SEQ ID NO: 2021 - DNA, 733 bp, Homo sapiens
  misc_feature 296, 338, 348, 380, 390, 418, 424, 463, 464, 474, 493, 496,498, 499, 500, 501, 502, 503, 504, 505, 510, 511, 513, 514,515, 516, 517, 518, 519, 521, 530, 534, 537, 552, 554, 567,609, 614, 624, 641, 650, 660, 663, 666, 673, 699, 710: n = A,T,C or G
cccgcgtcccggaactcttacccataaccctaatgatgcaagtcatatgggggaacactttgtaaatggtcaggataaaaaccaaatctgggtgccagatcccagcactactttttattactggagaaatgggggggatagaaaattctactttgaattatttagttttttttaaagagtgggttgtgtttgtgcttctcccacctttcaagcatttatagaacatgctgccccacatacaaagtcaagaccacttacttttatgtgacactagtagtttggggttaatggtttgngtaaagaacaagctgcatatgagtaaaggttaccccaacccncagtgaggangaaagatgttcacatactgggaactgtcctgncaaataaatntggcccctattgggctctgttttaattnggaagngggcaaaagtaacctcttgctttggggcaactatttggnntcaaaattanaaaccttttagacccaaanttnannnnnnnnaaaanngnnnnnnnanggggccggncccnttngaccttagtttttananaaaaaaaaacctnccacaccttccccttggaaccctgaaacaataaaaaggaaangccanttgggggggngggtaaaccttggtttnattggcacnctttataaanggnttnccaaaanaaaaggcaatttgcctttccccaaanttttcccaaanaaaaaaagggccttttttttttt

SEQ ID NO: 2022 - DNA, 506 bp, Homo sapiens
  misc_feature 114: n = A,T,C or G
accacgcgtccggtctgcagaggcccgggcctgggcacaaagggagagaggcctccattgtcccgcaggggccaaaatgcagaccgtgcatccccggtgacctcggggaccgtnctctgatcagcaggattttcttggactctggggtccttgtcctgctcaggcatccctgccctgctctccttgagggccctcaacactatcttccctggacacaagtctggggacagccgggtgttgaggaccccaaaggggtgactacctgctcctgggccccacagagtccttgtgctcagtgtagtggctgagctgggggatgccctggaattcggagcacacagcactggcttactgtggtacctgtgcagtgaaattggagacagaatcaccaggatggaacacaggtcttgcaggatcacggaaaaccttttagagttgtcttgacaccacttgatgttgagtgtccgggtgtttgtaggatggcctgcactcagtccaggggcagg

SEQ ID NO: 2023 - DNA, 380 bp, Homo sapiens
cgcgtccgcttgaccctgtattttgggagtcgaacggagaatggaaactgaaagtggaaatcaggaaaaggtaatggaagaagaaagcactgaaaagaaaaaagaagttgaaaaaaagaaacggtcacgagttaaacaggtgcttgcagatattgctaagcaagtggacttctggtttggggatgcaaatcttcacaaggatagatttcttcgagaacagatagaaaaatctagagatggatatgttgatatatcactacttgtgtcttttaacaaaatgaaaaaattgactactgatgggaagttaattgccagagcattgagaagttcagctgttgtagagcttgatttggaaggcaccagaatccggaggaaaaaac

SEQ ID NO: 2024 - DNA, 465 bp, Homo sapiens
  misc_feature 100: n = A,T,C or G
cgcgtccgcagactttccctctgcaataaatcctgtaacaaaattgcactcgcaccccttacgtttatacaaatttttaaaataaataataactagaaangcaagaggaaaccaaacccaaaattattagaagaaaagaaatgataaagattggggcagaaattaatgaattgatactaaaaatagtacaaaagatggatgaaagaaaaagttgtttttttttttttaaaagataagcaaaatcaacaaacctttagccggactgtaaaagagagaatatccatatgaataaaatcagagatgaaaaaggagtcattacatctgataacacagaaattcaaaatattttagagactattatgagcaactatatgcagtaaattggaaaacttagaagaaatggatgaattccgagacacataaaaacataccaagattgaaccatgaagaaatccaaaacttgaa

SEQ ID NO: 2025 - DNA, 463 bp, Homo sapiens
  misc_feature 93, 228, 267, 409, 411, 430: n = A,T,C or G
aattatcctggtgtggtggcgtgtgcctgtaatcccagctacgctggaggctgaggcatgagactcgcttgaatccaggaggcagaggttgcnttaagctgagaccacaccactgcactgcagcctgggtgacagagcaagactccgtctcaaaaaaaaaataagctattgatgggctatatattgttaagctatagggtgtggttacagtgtccagtgtagcattgntcgattaatttatagcctcttgtggcaacagcaagcagnttccagagatgaatacacagcttgagtaggcaggggggagtaggacatgacggctgcctcatcttaacaccttgggcctgataatttaaaaggactcacagtcctcagataaacatgactttcttttctcatgaggaaacananaaggtggctaaagggtatntctttctctcatgatcccaaacctatcaggttt

SEQ ID NO: 2026 - DNA, 540 bp, Homo sapiens
  misc_feature 4: n = A,T,C or G
accncgcgtccgggtgctgtaccagaccagaggccagctccatgtcctccgcgtcggcaatgatacccactgccaaccaacaaaaattggctgcaaccatcccctaccaggacccggcccctacagggtgaagttcctggtgatgaatgacgaaggacccgtggtgaaaccaagtggtccagcgacactcgcctgcagcaagcccaggcacttcgggctgtccccggcccccagagcccgggcaccgtggtcatcatcgccatcctgtctatcctcctggccgtcctcctcacggtcctcctggctgtgctcatatacacctgcttcaacagctgcaggagcacttccctatcaggcccagaggaggcagggagtgtgagaagatacaccacgcacctcgcgttcagcactcctgccgagggggcttctgaggggttccagaggggcccacgtgtccctccacctcctccctggcccaggctgcagagcctgagctgggacacgccctgaagcttctggaccctgagagagattggttct

SEQ ID NO: 2027 - DNA, 328 bp, Homo sapiens
gctgctagaaaaggttagactaactgggagttcataatttgtcttggagatttaagaaagtttttgaagaggttttctgtgttgagatgaagaggaagattgagacaaagcacaatggagagtaggggagagagcacttcagaatgtttgaaggtgctaagaggaagtgcttgacacacgggaggaactgagaaagaaggctagggccatcggctggagggacaggacaggtggagatgtaagcatgggcctccagaccatggtaaggccactggatctttactttaatgcatttgtgcatgtgattaaaaaaaaaaaaaaaaaaaaa

SEQ ID NO: 2028 - DNA, 382 bp, Homo sapiens
  misc_feature 75, 250: n = A,T,C or G
ccccgcgtccgaaaaagacatatgtacaagtctatttcctatagcactatttgtaatacctagcactatttgtantatctaaagactgtaaacaacgcaggtgcccacaaagggaaaatggtttgacaaacttacgaacatccttttaaaggagtactagacaggtcaaaaaggaatgaagaatgtatatattactatggagtgaatcttcagggtatatgactaagtgaaaaaatgcaaggtgaagtantatgtaacatatggtacagtttacttaagagagaaatacagatgtatatacacattacctaaagcaaaatgaggaccctactgggctgccatcccagctggactgctgctgtggagctcagcatcaagtact

SEQ ID NO: 2029 - DNA, 395 bp, Homo sapiens
  misc_feature 114, 115: n = A,T,C or G
cgccccgcgtccggagagagctgtctttgcagttactaggtttcatcaaacttgtttttttcagtatggtaggtttaaaaatggggatacatttttgtttttatttgcattttnnaatattttcttaggttagttggctacttaaatttctttttctgaaaactttgtatttatagccttttaaaattcttattgacttgcctgaactatttgtaaattacagaaattagccctttgtcgtatgtgttgcaggtgcttttccagtttgccagtggtcattcattttggtttatggtacttttgatagaccagaatctttgacttttatttagtgagatttatccatctttttctgtgtggcatcttggtattatagcattaatattctcttttct

SEQ ID NO: 2030 - DNA, 329 bp, Homo sapiens
  misc_feature 112, 117: n = A,T,C or G
ccacgcgtccggttgggacggcaccaggcgaggtgttgagttggctcggctcaaggttcttcggggtgtgagctggcatgaggacctgttggaagtgggatccaggcctggngcagnctcccagctgcctcgatttgtgcgtgtgaacactctcaagacctgctccgtttatgtagttatttcaagagacaaggtttctcctatcagggtcgggcttccaggctggatggagtgccctggcgcgatctcggctcaccgcaacctctgcctcctgggttcaagcgattctcctgcttcagccttctgagcagctgggattatgaaggggt

SEQ ID NO: 2031 - DNA, 513 bp, Homo sapiens
  misc_feature 1, 110: n = A,T,C or G
nccccgcgtccggctcaaggaggtgattaaaagaatgtgtaatttagtatttttaagatgtttagagttttaaaaacttacgttgttgctgtcattgtatttaaatagtnataaagaatataaactgatataagtaattttttttaaattcttcagatataatgaagatctggaacttgaagatgccattcatacagccatcttaaccctaaaggaaagctttgaagggcaaatgacagaggataacatagaagttggaatctgcaatgaagctggatttaggaggcttactccaactgaagttaaggattacttggctgccatagcataacaatgaagtgactgaaaaatccagaatttcagataatctatctacttaaacatgtttaaagtatgttttgttttgcagactttttgcatacttatttctacatggtttaaatcgactgtttttaaaatgacacttataaatcctaataaactgttaaacccaaaaaaaaaaaaaaaaaaaaa

SEQ ID NO: 2032 - DNA, 546 bp, Homo sapiens
  misc_feature 6, 64, 303, 540: n = A,T,C or G
cgaccncgcgtccggcgttctacccttccggcccgtgttctatccgccgcctccaccttccatncggcgccggctttcggcgcgacggtcgccgcgttccatcgtcgcgcggcccttcgggcgcccgagcccgcaatgtcgggccccaacggagacctggggatgccggtggaggcgggagcggaaggcgaggaggacggcttcggggaagcagaatacgctgccatcaactccatgctggaccagatcaactcctgtctggaccacctggaggagaagaatgaccacctccacgcccgcctncaggagctgctggagtccaaccggcagacacgcctggagttccagcagcagctcggggaggcccccagtgatgccagcccctaggctccaagagcccccaaccgggacccaaccctgcctccctgggctaggctctggcctgggcactcaccccctggcttagacaccttctcaagggctggccttcagggacccctggtgggtctgctgcctgggccacccttctgcctgggcctncccttg

SEQ ID NO: 2033 - DNA, 322 bp, Homo sapiens
  misc_feature 26, 102, 156, 223, 259, 262, 287: n = A,T,C or G
cgaccacgcgtccgctacctcaaggncctgggcaccgagcgggcctacaaatccgcactggactacaccaaacgaagtctggggattttcattgacctccanaagaaagagaaggaggcgcatgcctggctgcaagcagggaagatctattacatnttgcggcagagcgagctggtggacctctacattcaggtggcacagaacgtggccctgtacacaggcnaccccaacctgggtgctggagctgtttgaggcggcntgnagacatcttcttcgacggggcctgngagcgggagaaagctgtgtccttctaccgggaccg

SEQ ID NO: 2034 - DNA, 753 bp, Homo sapiens
  misc_feature 13, 15, 25, 28, 36, 40, 49, 54, 56, 64, 65, 67, 73, 74, 75,76, 81, 84, 85, 86, 89, 92, 111, 112, 113, 115, 117, 119,124, 126, 127, 129, 136, 142, 152, 153, 154, 157, 166, 167,176, 191, 202, 207, 208, 209, 217, 227, 228, 236, 237: n = A,T,C or G
  misc_feature 243, 244, 259, 261, 263, 265, 268, 283, 284, 285, 292, 293,297, 302, 304, 307, 308, 311, 313, 315, 317, 319, 326, 345,351, 352, 359, 360, 361, 381, 385, 389, 392, 396, 402, 404,409, 415, 418, 425, 426, 427, 428, 429, 432, 435, 437: n = A,T,C or G
  misc_feature 445, 449, 454, 458, 459, 460, 461, 479, 482, 494, 495, 496,497, 510, 511, 512, 515, 516, 518, 519, 520, 522, 523, 548,549, 550, 551, 564, 567, 571, 573, 580, 588, 592, 595, 606,608, 609, 625, 626, 627, 631, 637, 639, 641, 643, 644: n = A,T,C or G
  misc_feature 646, 649, 651, 652, 653, 655, 660, 676, 680, 684, 685, 687,692, 695, 696, 699, 701, 702, 705, 707, 709, 711, 716, 717,723, 728, 732, 733, 739, 740, 742, 745: n = A,T,C or G
gggggggaggggngnaaaaaaaagnganggacaaanaaanagaaaaaanaagananaagaaagnnanaaacannnnaaaanacnnnggnaancggagaaaagaaaagaaannngnananagaanannangaggggncaaggnagaagaaaannnganagaaggggnnaaagggggncgggagaaaagaagnaaaaaaaaaanaaaannngaaaaaangggaaaaatnnggggaaannggaaannaaagaaaaaaaaaanancngnggnaaaaaaaaaaaggannnaaaaaanngggnaaaananggnnaangnanananaaaaagngggggggaggggggagggnaagggnngaaaaannngaaagaaaaaagaaagaaanaaangaanaanaganggagangnaaggnaaaaanaanaaaaagnnnnnaanaanangaaagggnaagnaaaangggnnnnaaaagaaaaaaaaaaagnggnaaaaaaaaaaannnnggaaaaaaaaaannnggnnannnannccaaaaagaaaaaaaaaaaaagggnnnnaaggggaaaaaanaanaaananaaaaaanggggaggnggcnggnaaaaaaaaaangnnaaaaaaaaaaaaaaannnaaanaaaaananananngnaanannnanaaaanaaaaaaaaaaagaaanaagngggnngnaaaanacnnaanannganangnanaaaanngggaanaaaanaaannaaaagnnanaangaaaaaaa

SEQ ID NO: 2035 - DNA, 708 bp, Homo sapiens
  misc_feature 627, 642: n = A,T,C or G
ccccccgcgtccgcgtttttatgtgtgtatgtacaaaacaaaatacctttttgaaattacataagtgatacatgcttattgtgaaagagttggataatacaatatactgtaaagaagatgaaaaccactcataaattccaacctgtaaatactttcgtgttcatattttggcatctaatgtatcctttatgtatatttaaatatatattttattcaagtataggatcatgtacctccctgttttataattttcttttttaatttttcagtgtattgtggacatcttttctcatcaacaaatacatcccacaatgttcatttttgtgcctcattataccatggaatagtgacatcctagtatgtttaagacattccttattaatgaacaattaggctacttccaatttttaattataaaggacattttgaaggacttccttgtacatattattctattgctttatcatctttttgggataatttcatgtagtatatttccagttatttaaatgagaaagtacatggtttataacaaatggtatttaacgtccaagtcactgctatctaaaggggtaatttttaaggtataaaataatttggcttataaaaaatcgtgggaaaaatatnctagaaatatttaangattaacttctaaattgtaaattggcatatttaatgatagaattcaaaaaaaaaaaaaaaaaaaaa

SEQ ID NO: 2036 - DNA, 765 bp, Homo sapiens
  misc_feature 623, 691, 697, 702, 711, 719, 742: n = A,T,C or G
cgcgtccggaagaaattgtgcaccctcccaaaacatacaaagtttaaaagtttggatctttttctcagcaggtatcagttgtaaataatgaattaggggccaaaatgcaaaacgaaaaatgaagcagctacatgtagttagtaatttctagtttgaactgtaattgaatattgtggcttcatatgtattattttatattgtacttttttcattattgatggtttggactttaataagagaaattccatagtttttaatatcccagaagtgagacaatttgaacagtgtattctagaaaacaatacactaactgaacagaagtgaatgcttatatatattatgatagccttaaacctttttcctctaatgccttaactgtcaaataattataaccttttaaagcataggactatagtcagcatgctagactgagaggtaaacactgatgcaattagaacaggtactgatgctgtcagtgtttaacactatgtttagctgtgtttatgctataaaagtgcaatattagacactagctagtactgctgcctcatgtaactccaaagaaaacaggatttcattaagtgcattgaatgtggctatttctctaaagttactcatattgncctttgcttgaatgcaatgcccgtgcagattatgtggctgctatttttattttctgggcattactttnacaccntaaanggagaagcnaacatttncttcttcactgactggcaatggncctttactgcaataggaagaaaa

SEQ ID NO: 2037 - DNA, 526 bp, Homo sapiens
ccccgcgtccggctgggcttaagggatctttcccaggtagctgggactgcaggcatatgccactgtgcccagctgctcccttagtcttgactatgtatttttttttttttggttgttttattaggatagagtcctaagaatggcattactgggttaataggtatgaacattagatctttaatacatacagtcgaattacttttcataaagccatatacctttttatattcccaccgatactatccctatcactaagtattaacttattttcatctttgccaatatgatcatccaaagtgaggcagaggttgcagtgagccaaggtcacaccactgtgctctagcctgggtgccagagtgagactgtgtgtcaaaagaaaaaaaaaggggggggtgccgggtgcggtggctcacgcctgttattccagcgctttgggaggccgaggtgggcggatcacctgagtttgggagtttgagaccagcctgaccaacatggagaaaccctgtctctactaaaaatacaaaat

SEQ ID NO: 2038 - DNA, 812 bp, Homo sapiens
  misc_feature 616, 689, 692, 731, 739, 757, 760, 779: n = A,T,C or G
gtcgaccccgcgtcccggacgcgtgggtcggccatgaacaagttttcaagtatcagttgatttatgatataggcttatccatttggttataaaatcatatgtttattacataatcattgacaaatagtttctgtataataactggcagagtagctctaaaacatatgcaaggaaataaataaagaaaaaacttacaataaagagagtaactcatattttaacagttttgtgaaaaaaatagaaaatattttatgtagcttatagtacatatatttttttacaacagaagaatcgcattctgattttccatatggatcatttccctatgttgctagaccagtacactggcaacctggtcatacagcttttcttgtcaagttgaggaaggtcaaaccacaacttaactgagtactccagatgacagtaactgacttgaagatggaaaaatatcaaaatagaactttatattgaaaatcactgcttccatagattggcatttttagctattactatgacttatataacttatacatataattttgaaaataacaactaaaagatgtataacatagccaaaactgcttaaaccatccattttgaccacttgtcttgcagntagttttgacattttgtaggttaatggattccaaattggtttaagtgggccatctcattcttcactttctggnaanccactccatagatttggcttttcttcaggaaaattaagnttcctttncctttatttggattgganggncattggcctactggaaaanaaatatgcctttttagggttaaaaaaaaaaaaa

SEQ ID NO: 2039 - DNA, 500 bp, Homo sapiens
  misc_feature 8, 481, 484, 489, 492, 493, 494, 495, 496, 497, 498, 499,500: n = A,T,C or G
gtcgaccncgcatccgaccacgcgtccgccagacctcacgtcaaccggctgcaccccactttccagcctgcgccccagatctgcagccttcgcccctagatacacccgcctggtgatgaggcgctcctcgcgttccttccgggctccaggtgtccgtgagcctcccttccgccctggcctccggtctctgccttgctcgtgcttctaccaccacccttcccctcccaacccggtggatcctctcgtctcccccagtctccagtgcaccggctttccctcgtcctctgcgcagtccatctcagctcatctctccaattcaatgccatcatctctcctcaccatctctcggtgccctggaatgtttgctgtcaagatgtcccctgtgaaacccacaaacgcttgcgatttggcctccttgttttattttgtgtagtcctacaacgtcttgttactaccccctattacaacacttataactcanaangaaanagnnnnnnnnn

SEQ ID NO: 2040 - DNA, 614 bp, Homo sapiens
  misc_feature 114: n = A,T,C or G
cgtccgcggagatccggcacactgcggaccgctggcgcgtgtccctggatgtcaaccacttcgccccggacgagctgacggtcaagaccaaggatggcgtggtggagatcaccngcaagcacgaggagcggcaggacgagcatggctacatctcccggtgcttcacgcggaaatacacgctgccccccggtgtggaccccacccaagtttcctcctccctgtcccctgagggcacactgaccgtggaggcccccatgcccaagctagccacgcagtccaacgagatcaccatcccagtcaccttcgagtcgcgggcccagcttgggggcccagaagctgcaaaatccgatgagactgccgccaagtaaagcccctagcttgagtcgacccacgcgtccgatttaaatatttgtcccattgtttgtgattaggatgtaagctttgtggaatgtaattaaccctgctttacgaagtcaccatattataataggaaaaacactgcctaggaggcaaagagatctgaattccagttctgatgctgccactgtgtaaggaagtagttttataaaccatgggcaaatcatcttgagctttctcatctgtaaagttagggg

SEQ ID NO: 2041 - DNA, 733 bp, Homo sapiens
  misc_feature 7, 32, 49, 63, 64, 74, 82, 86, 107, 141, 185, 186, 293, 341,355, 365, 370, 448, 450, 453, 456, 471, 476, 490, 512, 515,520, 525, 531, 574, 579, 612, 613, 616, 622, 625, 627, 631,632, 658, 665, 679, 703, 706, 717: n = A,T,C or G
tcgaccncgcgtccgaaaaaccaaaacctgantgagatcttggaaccgntgtgcgccggccgnncctctcccangggaccanccanccccgcgcggtggccgactgnataggcgggactgcgcttcgaggcttaaggacgncagatcggaggcatcgtgtgttgtctgtgcggagaagccaaaanngtgattacgtttatttgcaagaccgttcatgttgttttcagttcatggtatgattaaaacccgatcctttgttaccatgcccttaggtacgaaaaaataattgtttngatatttggcagtcacccaaaaatatccaaaaagccatgaaacagtanaggtaaacaagtangaagtgaaantaatnttcgtcctttgttttctttctggaggtgctcaaaacaccctctcaaaccatttttctcagcatagaaccaagtgtggncnggntancagctaatatttacnagggnagaaacgaaccctngcgatatttagtcactttgttnccngggancacanaaaatnttgaacaaacacatgagaactgtcaccgatctctgtattgatnaccanggatacccgtgaattttatgtaatattaatctnnggnaggcangantntttnntaggtatttgccttttccaaggtgcnctttccntaccaaaggaaaanggttattttaaaaacttttaccanaanaaaggggatgncttattttttggtcct

SEQ ID NO: 2042 - DNA, 374 bp, Homo sapiens
  misc_feature 1: n = A,T,C or G
nggacttggtttgaacgcgttttccccaaagtttatgtgttggaaacttgacccccaatgcagcagtgttggaaggtgcctactaggtggtgtctgggtcatgggggtatgaccctcatggatggataaatgccatgactgaggcggtgggctccttataaaagaatgagtttgggtgaaacctcgtctctactaaaaatacaaaaattagctgggtgtggtggcacatacctgtaatcccagctactcgggaggctgaggcagaatggcttgaaccagggagtcggaggttgcggtgagcagagatcgcaccactgcactccagcctgatgacggagcaagactccgtctcaaaaaaaaaaaaaaaaaaaaaa

SEQ ID NO: 2043 - DNA, 473 bp, Homo sapiens
gagaagcctgggggtcctggctgaactgggctgggtgaagggggccccctgacccccttggggtccgggctgggctgggtgaggggcggtttccgacccccagccaggttcccaggcaggatgagctggggttggggtggctaggccgtgggccttgggagctgggcagtctgggctgggctgggctgggcagggcgccacatggaagctggaggagcaacgggagcgctgggcgtggggtgcaaattgcccagtgccttctgtttcccaggcagctctgtggccatggatatgttccagaaggtagagaagatcggagagggcacctatggggtggtgtacaaggccaagaacagggagacagggcagctggtggccctgaagaagatcagactggatttggagatggaggggggtcccaagcactgccatcagggagatctcgctgctcaaggaactgaagcaccccaaca

SEQ ID NO: 2044 - DNA, 511 bp, Homo sapiens
acactcatcaattaggttttatttttatttctttcctctacccccagaaacaagcctgttaattttttttccttctcctctggcgactgtgtgatgaatcctttcttgcgtgatcaggttgcggatagacttgtaagggtgtttgctgcatacagtgtaagcattgtgaccgccaataaacttcaatggtttctactgaaaaaaaaaaaaaaaaaaaaaggacgcgtctacttcccactgggtccctcccacaacacatggaaattcaagatgagatctgagtggggacacagccaaaccaaatcaaaaggatatacaaaataaccagaaaacaatgaacaaaatgacaggaataagttctcacctatcaataataactttgaatatgtgttaaattacctacctaaaagatagagacaggcttaatggataaaaaatgactcaacaaccgtctacaagaaactcacttcacttgtaaagacacacacagactgaaagtgaagggattgaa

SEQ ID NO: 2045 - DNA, 552 bp, Homo sapiens
  misc_feature 4, 408, 463, 475, 487, 539: n = A,T,C or G
gccncgcgtccgtgagaatacacaagggggcacgcttccagtagatgtgttggggaaggaggagggcagaggggacaggggacaggattcagctttgtggtgggtcctgagggttcctaccaggggtagccaggatctgggaaacagatcagcgactctagtctgaagtggctgcctggttcgggggctgccttcagcaagattcaggcaggagagacggaaatagccaccttccaggcgtgagtcctggagataaaaatggattttaacctaggactgccgggagctggccctccgcggctgctcagactagggctgtgtgtgctggctctcgcctgtttccggtgtctaactggcttgtttctctttatggcttggcttcattccgacctggggtggggccacatncaacccactgcccactggctgtccgtctggcctgcccccgcggtttcaaccacantggtgaaacaanccttgcaagatntacaactcgcaacaccgggtcaagcaatcagctgcattccggaccggtgtgnaagaccgaagggg

SEQ ID NO: 2046 - DNA, 554 bp, Homo sapiens
  misc_feature 345, 450, 497, 516: n = A,T,C or G
ccccccgaatatcttatccttaacattaaattgaattttttgcaaatgatcaaaaggtcattccgagtaaattctgttgtatagtgcagatgatcaagctgagtatttgccatgtttttattttagaaaagagatgttgctataacataagtaaatacgattctcgtatgtggcagataaatttacttgtaatctgctctagagtgaaattattttttacatataagcattgtcatcattctaaggattattgaataatgaatataaaatgttcttgtgtatttgtgtatgtgtatataattttttgaaagtttctttatcctattgacccttctcataaacagnagcatatatatattatatgtagtagaatttatataggaacattgtctttttcccagtaatgctgattctaaactagttatgtcaatttcatgtaacatgacattnagaatagtggggtgctaaatatatttagaaatgatttccaaaattgntgtatttctaacatagaangatatttgtcattttaaaataatgtaaagaaaaaatgc

SEQ ID NO: 2047 - DNA, 377 bp, Homo sapiens
gcacccctccctgttgacacagcctggatccagagttcagcagaccttgagacaatgaaaacaaacttagtaataatcatttttcaatcattgcagtaattattgatttggacaaaaatcaattgacgtcaaaaccttaaagtgacgtttctctgcctatggagtgggtcattcttttattcctttagtttcataataaattttcttttacttaaaaaaacttatagtttgatgaagagtgagatatatacctcatctcaaagaatcttcacacacacacttattaattacaaaaggaaaatcagtaattttgcagtggagacatatggccaactccaccttacccaagtggctgaaagtcactgcaccagtaatgg

SEQ ID NO: 2048 - DNA, 588 bp, Homo sapiens
  misc_feature 10, 42, 62, 69, 72, 74, 93, 103, 104, 107, 109, 110, 112,114, 115, 117, 121, 123, 125, 135, 141, 143, 171, 178, 181,189, 196, 198, 201, 222, 223, 224, 226, 230, 237, 248, 252,257, 321, 337, 361, 362, 424, 435, 440, 455, 456, 484: n = A,T,C or G
  misc_feature 490, 494, 507, 517, 528, 547, 558, 570, 574: n = A,T,C or G
agaaaagccnagccaacagctcttaaaatcagaaaaaacaangggagtccttccttgtctcntctgtgntcncnggccttgtctctgagactntctgtgcccnnaancnntntnntngctntnanctgattctanttttgntncccatggaatctgtcctaagactggggntttttgncanatgacagncttgccngnacncaaatatcataacagcatttnnnancganttttgcngatcaagtaanatanttgcntgacaatgacagctttttaactctttcaaagtcacctaaaagctattattgcaggaggatttangaagtcacattcattnaacacccaagtgctatgggtgaannattcatgatagcttggcccacaaggtcatgaattgaggagggaatcttgcttttcaaaaaancaatggaatgntcccnccactgaaaaagggnnatacgttttaatattttggacccttcanaaaggntaangaaaaaaacccanggttctttcnaaaaagttagngaataagggggaacttaantttcatggaanacaagcccattntttnaaaaaaaaaaaaaa

SEQ ID NO: 2049 - DNA, 224 bp, Homo sapiens
  misc_feature 2: n = A,T,C or G
cntacgaacgtctgaaacgtggaggaaccttcagttctgggaactccctgcccctttcccggaaaattcatgagtaatccacctgtttagcatataatcaagaagtaaccataggcatagtatatcaagcagcccacactgctgctttgcctatggggtagccacttttattcctttactttttattaaacttgctttcacttaaaaaaaaaaaaaaaaaaaaa

SEQ ID NO: 2050 - DNA, 447 bp, Homo sapiens
  misc_feature 4, 342, 395, 408, 415, 417, 446: n = A,T,C or G
cgcntccgaaatccaatcctaatgaaagagattgataagtgtgactacaaaaggtttaaaacttttttcatagcaaattatctcagaaactaaattaaaagacaagggagaccaggtgcagtggctcacgctgtaatcccagcactttgggaggccgagggaggtgcattgttctagcccaggagttcgagaccagcctgggcaacatggtgaagccctgtctctacccaaaatacaaaaattagccaggcgtggtggcttatgcctgcagtcccagctacttgggaggctgaggtaagaggatggcttgagcccaggaaatcaagggtgcagtgagctgcnattatgattgtgccactgcactctagcctgcatgtccaagtgaatcctacatnaaaataaaaagtncaaaaananaaaaaatgtgccggcccgctagactagtnt

SEQ ID NO: 2051 - DNA, 580 bp, Homo sapiens
  misc_feature 103, 326, 364, 421, 424, 429, 432, 437, 440, 461, 507, 544: n = A,T,C or G
ccacgcctccggaaatgcctctctccagagtcggaccctcacctccttcctggaactgcctttggccccagaaccatgagacaatccccaccctgagaagctncgatcactgggaggagagagaaagcctccagctttgggattcaggcttcagaagtttttagcagcctttgctcattggagaggtggggaggataagtctataaggaatcctatttccccagctctcccacagagaggacaaaagaagtcttcacaccgttgtggaactttcctgcaacttctggatgcagacaagcctcagagcagactgttctggctccagngaatatcggctgccaagctgtgagcatccagggatccncgtctgcctggctttcctgaaagtcagaaggcgccttggtcatactgtgtggggtgngtnggatnttnagttntgntctcttttctttttccttttnttaacagcttggcggagtagccaacacccctgacagcaattgtgcngcacttggcttaattcacaccctatgaataatttttnatatttcaacttggaaaaggtggttaagaaactttt

SEQ ID NO: 2052 - DNA, 445 bp, Homo sapiens
  misc_feature 16: n = A,T,C or G
gatggactgtgtcatncaggacggccctgctgcattggcaccaagggcaggtgtgagatcacctcccgggagtactgtgacttcatgaggggctacttccatgaggaggccacgctctgctctcaggtaggtctgcagagtgtccgtcgttcccctcccccagctactgtgatgctgatatgctgctctgcgcaggtgcactgcatggatgatgtgtgtgggctcctgccttttctcaaccccgaggtgcctgaccagttctaccgcctgtggctatccctcttcctgcacgccgggatcttgcactgcctggtgtccatctgcttccagatgactgtcctgcgggacctggagaagctggcaggctggcaccgcatagccatcatctacctgctgagtggtgtcaccggcaacctggccagtgccatcttcctgccataccgag

SEQ ID NO: 2053 - DNA, 543 bp, Homo sapiens
  misc_feature 1, 5, 174, 494: n = A,T,C or G
ncgcntccgggcagagcccccggagcctggccagcccttccggcagctccaaagccacaggcaagccccgaggctgggatggccggcccaggagggaggaggacgacgtacctcccgaggagaagaggctgcggctggggctggaagggggaagcgcacagcccgaggactgcnaaggacggggaggacgcgccgcggccaggcagggaggagaccggcacccagacaggtggcgacggcagaggaacacagtggctcacgcctgtaatcccagcactttggcaggtcgaggctggcggatcgcctggggtcaggagttcgagaccaggctggccaacatggcgaaactgtctctgctaaaaatacggaagttggctgggagtgatggcacgcacctgtaatcccagctgcttgggaagctgaggcaggagaatcgtttgaagcggggaaagcgaggtttgcagtcagcttgagatcacaccactgcacttcanccacctggggtgacatgagcgacacttctgttttcaaaaataaaccgaa

SEQ ID NO: 2054 - DNA, 416 bp, Homo sapiens
ctgtgtaggacagactctctttgactccctaggatttaccccagtgcctagcatgtttcacagcttagaggaaaacaacatttgttgactgacttttgatctccattttttggtgagatgcagtggcttacacctgtaatcccagcactttgggaggctgaagcgggcggattacttgaggctaggaattcaagatcagcctggacaacatggcaaaaaataccaaaaataaaaaaaaataaataaataaaaaatttagccagacatggtggcaggcacctgtggtcccagctacttgggaagccaaatcgcttaaacctatgaggtgggaggttgcagtgagccaagattgcaccactgcactccagccttggtgacagagtgagaccctgcctcaaaaaaaaaaaaaaaaaaaa

SEQ ID NO: 2055 - DNA, 203 bp, Homo sapiens
  misc_feature 191, 192, 198, 199, 203: n = A,T,C or G
tcgaccccgcgtccgggaatttggggtggaatgtgatgagattaaaatgtagctttggtataacttcatgtgtatttcaaaatatactgaacgtcaacatgatttgaataaagaaaatgtattttctacttgaaccacataacactgttatttaaaacagttttctgcagtctaaaaaaaaaaaaaaaaannaacaannaatn

SEQ ID NO: 2056 - DNA, 477 bp, Homo sapiens
  misc_feature 46, 83, 85, 211, 288, 333, 341, 343, 358, 368, 369, 375,398, 419, 423, 433, 448: n = A,T,C or G
cgtccggcagaatggctcccgcaaagaagggtggcgagaagaaaangggccgttctgccatcaacgaagtggtaacccgagantncaccatcaacattcacaagcgcatccatggagtgggcttcaagaagccgtgcacctcgggcactcaaagagattcggaaatttgccatgaaggagatgggaactccagatgtgcgcattgacaccnaggctcaacaaagctgtctgggccaaaggaataaaggaatgtgccattcccgaattccgtgtgcgggttgtccaganaaccgtaaatgagggatggaagattcaccaaaattaagctatatncctttggntnccctatgtacctggntaccactttnnaaaaantttaccagaccaggtccaatggngggatggagaacctaaatcgnttgntcggccggantcaaaattaaggttnttaaaatttgccaaaaaaaaaaaaaaaaa

SEQ ID NO: 2057 - DNA, 509 bp, Homo sapiens
  misc_feature 4, 181, 486, 491: n = A,T,C or G
cgcntccggagagagcccagggatgccttatggtcagaacaaatttatagacaacaaaagggaagtgaccgtgcagaaatcagaagtgaggtacagaaacagctggactgattacagctcaacatttgccttttttgaacaaatctgaacactcagcagtgtatgagtggttgaccgtatnggctgctgtgattggccagacctcagctattgttacaggcacatactcttaagtcaggttttcaatcctatctgactataaagttaggttacagtttgtcctcatggactcaaatttagaagtatggcgtccttctcaggccatatttagttcagtttaacaagtgcatatggcttctgacaaaggtgtggcccctttaggactccaaagacgctgtcacttacatggtattcagggaagacacagaggatctgtgagcagcctgcagccaaagcttttgagatcatattgagatttttttgtantatangaggaggggttctggctc

SEQ ID NO: 2058 - DNA, 280 bp, Homo sapiens
cggaagcatcgacctgcgagctcacagagctgggagcagagcacccacgcacaccccgaatggctatggaagctgcagggcgccagggacactgggagtccctgctctcatggcaaagcagggacgggggacttaaaagccaccaacaggaaaatcggggaaaaaagggaagatggtggtaacagttggacactatttcttggcaaaaccgtggaaaaacacgttctacaccagcaggtggcaaattgtggccgccatctgtgtttgcaaataaagttta

SEQ ID NO: 2059 - DNA, 204 bp, Homo sapiens
  misc_feature 126, 178, 195: n = A,T,C or G
cccctacaatgagctgtcccgcctcagtggcctgcgaaccctcaacctccacaacaacctcatctcctccgaaggcctgcctgacgaggccttcgagtccctcacccagctgcagcacctctgcgnggctcacaacaagctctcagtggcccctcagttactgcccccgtccctccgngtcgcggatctggctgncaaccaagt

SEQ ID NO: 2060 - DNA, 382 bp, Homo sapiens
  misc_feature 54, 85, 185, 344: n = A,T,C or G
acccacgcgtccgccgattttccaggtgccgtctgtcacccctttctttgactnggaaagggaactccctgaccccttgcacttnccgagtgaggcaatgcctcgccctgcttcagctcgcacatggtgcgcgcacccactgacctgcgcccactgtctggcactccgtagtgagatgaacccgntacctcagatggaaatgcagaaatcacccatcttctgcgtcactcaagctgggagctgtagaccggagctgttcctattcggccatcttggctcctccgctctatttgcagttcttaaagggctattgtactctctgggattgtacgaacttggactgnattggaactgcaacagaaaatcttccaggcaagtgcca

SEQ ID NO: 2061 - DNA, 513 bp, Homo sapiens
  misc_feature 155: n = A,T,C or G
ccctttcgagcggcccgcccgggcaggtactttcattcagtgtacgagggaaaaaagcatgtattgggccaccggaagacaagctaataaataggctggaagtaatattctaccagcaggaactcaacagctccagttaaatgctttgatatagnggctcctttgcagagccaaaacaagatttattaaatttccttcaaactgtttatctttaaaacaaatataaggttttaattatactgctgaagcaaatgtgaatgccaaagactatgttttgcagttttgctttcctcccaataaatattaatgtatgtaattctagagggtaaaaatgtaaataggtttggacaatatttgcacccttgtttgtgttatgaaaaaaatttttccaaggcgagctagagagaaagatgtttggcatgccaaattaacttgcatgtttgttaaaaaaacaaacacatgtttttgaaaagaaaccagatctgaacgtgtatttgttgaagttttgcaaaa

SEQ ID NO: 2062 - DNA, 531 bp, Homo sapiens
  misc_feature 13, 27, 135, 136, 141, 142, 143, 145, 146, 147, 148, 155,160, 163, 164, 167, 170, 171, 172, 175, 177, 178, 179, 183,187, 191, 194, 195, 197, 198, 205, 206, 207, 209, 210, 211,215, 219, 220, 223, 225, 226, 227, 237, 246, 251, 253: n = A,T,C or G
  misc_feature 257, 259, 270, 271, 279, 281, 288, 289, 291, 292, 294, 295,302, 303, 307, 308, 310, 313, 314, 315, 316, 323, 324, 325,326, 327, 333, 346, 350, 354, 359, 364, 374, 382, 386, 405,420, 427, 441, 442, 445, 447, 448, 451, 463, 469, 470: n = A,T,C or G
  misc_feature 477, 484, 488, 489, 513, 514: n = A,T,C or G
ccctttcgagcgnccgcccgggcaggnactttttttttttttttttttttttttttttttttttttttttttttttttttttttttttttttttttttttttttttttttttttttttttttttaaaaaaaaaannaaaannntnnnnttttttnggccnttnnttnaannnaancnnntttntttngggnttnntnnaaaaaannnannnaaancccnnccngnnntttttagggnaaaaaaaanttttncngggntnaaaaaaaattnntttttggntnccaaaanntnngnnaaaaaannaaannanccnnnnttttttnnnnnggggcnccccctttttttncccntggnggggnggggnaaaaaggggntttttttngganccgaaaaaaaacgggaaanttatcccttttttgnggggccntaaacttttttttnnccncnnttnttttttaaaaancccccnnccctttntccctgntggnnccctttttggcccggggaaacccnnttttttttttttttttt

SEQ ID NO: 2063 - DNA, 440 bp, Homo sapiens
  misc_feature 19, 61, 68, 69, 70, 72, 85, 101, 127, 179, 298, 313, 322,328, 338, 381, 384, 402: n = A,T,C or G
aagggaaaatgtcacgtanactagatcagggaacaaaatcctctccttgtggaaatatccnatgcagnnngntgatacaacttantatcttattgcctaanaaaaaaatttcttatcattgtttcanaaaagcaaaatcatggaaaatttttgttgtccaggcaaataaaaggtcattntaatttagctgcaatttcagtgttcctcactaggtggcatttaaatgtcccctgatgtcattaagcaccatccaaaaagtctgcttcataatctattttcaagacttggtgattctganagttttggtttttgngactttgtntctcangaaaaaaaanattcctacttaaattttaagtctataattcaatttaaatatgntgnggcgtctcatccaggatnggataggttgtcttctattttccattttacctatttac

SEQ ID NO: 2064 - DNA, 555 bp, Homo sapiens
  misc_feature 13, 14, 20, 21, 22: n = A,T,C or G
ccctttcgagcgnncgcccnnncaggtacagacttagaaattatctaaagatttcatctttttacctcatatttcttaggaatttaatggttatatgttgtctttttttcctatgtcttttggctcaagcaacatgtatatcagtgttgactttttctttcttagatctagtttaaaaaaaaaaccacataacaattctttgaagaaaggaagggattaaataatttttttccctaacactttcttgaaggtcaggggctttatctatgaaaaagtagtaaataagttctttgtaacctgtgtgaagcagcagccagccttaaagtagtccattcttgctaatggttagaacagtgaatactaagtggaattgtttgggctgcttttaagtttctcttaatcaaaattactaagatgatagaattcaagaacttggtacatgtattacttggtggtatcgataatcatttaaaagtaaaagactctgtcatgcatttttccccatttctttttttttccctgtctccggggccaacccaagtgggtcttcatttt

SEQ ID NO: 2065 - DNA, 601 bp, Homo sapiens
  misc_feature 28, 32, 90, 385, 422, 425, 429, 432, 481, 557, 588: n = A,T,C or G
cccttagcgtggtcgcggccgaggtacncggngtccaagatggcggatgaagccacgcgacgtgttgtgtctgagatcccggtgctgaanactaacgccggaccccgagatcgtgagttgtgggtgcagcgactgaaggaggaatatcagtcccttatccggtatgtggagaacaacaagaatgctgacaacgattggttccgactggagtccaacaaggaaggaactcggtggtttggaaaataacatctgggcctgctggagaaaaagaaagattacaaacttcgttgcatatgactaccgtaaaaaacaagaatacctcaaagctcttcggaagaaggctcttgaaaaaaatccagatgaattctactacaaaatgactcgngttaaactccaggatggagtactttaatttttttttnttnatanttnccaggaacattttctaattatgttatataaatgggtatgtgatatgtgngctatttgtgtgctaatgtcctaagtgaagttctgcagaccatctgggtcaaagtgcatttcgcatgatccaaaanatgaagaaccacttgtttgtcacgggagacnagggaaaaaaaaa

SEQ ID NO: 2066 - DNA, 114 bp, Homo sapiens
  misc_feature 16, 17, 19, 21, 32, 34, 45, 61, 81: n = A,T,C or G
cttagcgaggtcacgnncnangaacgcggggngntcaggaagatntctgaagagtgcagcngcctgaaccgagccctgccnaacagctgacaattgcactgcaaccatgagtga

SEQ ID NO: 2067 - DNA, 463 bp, Homo sapiens
  misc_feature 10, 93, 216, 242, 332, 380, 408, 413, 427, 454: n = A,T,C or G
catgcagaantcctcgctggagtttcataaggccaatgagtgccaggagcgccctgttgagtgtaagttctgcaaactggacatgcagctcancaagctggagctccacgagtcctactgtggcagccggacagagctctgccaaggctgtggccagttcatcatgcaccgcatgctcgcccagcacagagatgtctgtcggagtgaacaggcccngctcgggaaaggggaaagaatttcangctcctgaaagggaaatctactgtcattattgcaaccaaatgattccagaaaataagtatttccaccatatgggattcccagaccatgangccaaagtaattcctaatccccacacacaggaatggcatgggacctgngattttgagttttcaaggggccgtaagnttttnattcttcacacctncaaattacccgaccccaaaaaaaaaanaaaaaaaaa

SEQ ID NO: 2068 - DNA, 520 bp, Homo sapiens
  misc_feature 30, 147, 156, 180, 233, 245, 400, 412, 427, 429, 444, 445,453, 502: n = A,T,C or G
cccttagcgtggtcgcggccgaggtacttntccgatttcaagaactgatgaaattagaaaaaacacctacagaacattggatagcctggagcagaccattaaacagctcgaaaatacaatcagtgaaatgagtcccaaagccctagntgatacctnatgttcttccaacagagattctgnagcaagttcatcccacatagcccaagaggcctctccccgacccttgctagttncggatgaaggtnccactgccctagagccccctacgtcgataccttcagcttcacgtaagggctccagcggggccccacagacgagcaggatgcctgtccccatgagtgccaagaacagacccggaaccctggacaaacccggcaagcagtccaaactgcaagaaccncgccaatatcgncagggctaatggaantnctaagaaatcttggnnggggactnttaaagcctactttcccctacttacctgcttctaaagattccaaggccnttcttccaaacttttggg

SEQ ID NO: 2069 - DNA, 639 bp, Homo sapiens
  misc_feature 36, 37, 177, 211, 531, 550, 576, 620, 622: n = A,T,C or G
ccctttcgagcggccgcccgggcaggttcatggatnngagcagcttcaccaacccctgcaaagtgactctgaagaagacgacaagccctgctccagtcacacccggaagctgactggtccacgcacagctgaagcatgaggaaactcatcgcgggactaattttccttaaaatttanacttgcacagtaaggacttcaactgaccttcctnagactgagaactgtttccagtatatacatcaagtcactgagagaacatcaccaccctgaagccagagactaacactgcaggactcagcaggactatttaagaaacaactgaggcatcagaccaactttccccacaagtcctcggatctttcctgccatgctgatgccatatattccaacgtgatcaacctggctccccagaaggaggacgactttgctgtctacaccaacatgcccccttttcatcaccccaagaggacattgccagaccaagtgggaatatgtcttccattgtatttccaactgatggggaaagcctanatgaagatgctcaagaagnggggggtcaagaccctgaccccagcntgaatctttggcattaccctttgctttaaatttaatgtggtggngntttaaaaaaaaaaaaaa

SEQ ID NO: 2070 - DNA, 310 bp, Homo sapiens
  misc_feature 54, 61, 63, 64, 71, 73, 84, 90, 91, 93, 99, 108, 110, 112,118, 124, 135, 139, 144, 148, 153, 161, 163, 168, 176, 178,183, 190, 195, 200, 201, 210, 213, 219, 230, 232, 235, 237,251, 269, 273, 278, 280, 281, 283, 285, 289, 295, 302: n = A,T,C or G
ccctttcgagcggccgcccgggcaggtactttttttttttttttttttttttcngcggggngnnctacttnanaatctttggcnggtttnncngttttnggttttctnancncttggnctggtncatttggtttngaanaatcngttncttcngatttttnancaaanggtttttngncaaanggttttngaaanctttnnccttcttcngtngaagtngtgggtttttnanaananaaaaattggggttnatcattttttctaggccngaangtttngnncntncctntttcanaatctanattaatac

SEQ ID NO: 2071 - DNA, 176 bp, Homo sapiens
  misc_feature 28, 30, 36: n = A,T,C or G
ccctttcgagcggccgcccgggcaggtncnggttancagacccacaacacgaagctcctgccttttaagactacaaagaggcagctcaaaattagactgcacaggtaagcgaggaactgcagtctaagcctggactctgccttctgccctccccccgcgtactcaagcaataaaat

SEQ ID NO: 2072 - DNA, 540 bp, Homo sapiens
  misc_feature 28, 31, 43, 47, 50, 63, 73, 82, 122, 123, 125, 128, 139,159, 238, 323, 399, 411, 416, 422, 432, 454, 537: n = A,T,C or G
ccctttcgagcggccgcccgggcaggtnctntttttttttttntttngcngagtgagctactntaggatcttntgctggttntacagtttttggttttcttagcactttgtcttgttcattnngnttngaagaatctgnttcttctgattttttaacanaaggttttttgacaaatggtttttgaaaacttttaccttcttctgttgaagttgttggttttttagaagagaaaaattngtgtttatcattttttctaggtctgaaagttttgcgcattcctctttcagaatctagattaataactaaaaatcttaaaacttgntttttgagaatatttactcttctgacaaattcttcgattaaactttcctcagattttaagttagctaaaacaaaanttccttgtttgngtttnttaatntcgaatgctnactctgtatctttcaagttttncaattttttcgatgtcttagcatcaaaaacagattttaaaacgtcttcaaattacttttaaatctgttcctgcagctaaaacngtc

SEQ ID NO: 2073 - DNA, 400 bp, Homo sapiens
  misc_feature 15, 377: n = A,T,C or G
cccttagcgtggtcncggccgaggtacgtgcttatacaagatgtcaattatgtggtcgtccacatgctgtattacgtaaatttaaaatttgtagaatttgcttccgtgaactagctcacaaaggacaaataccaggtattaagaaagcgagttgataatatgataatcacagatccaatagcagatatgatcacaagaatcaaaaatgccttcacacgtaaacacaaaaatgttattattcctcattctaagaaaaaagaaagaatcttacaaatcttcttagatgaaggatatataaaaggatttactgtatctggtgaagttaaaaaagaaattaatgttgagcttaaatacaaaggaaatacaagttcaattgntggaattaaaagagtttccaagc

SEQ ID NO: 2074 - DNA, 517 bp, Homo sapiens
  misc_feature 14, 415, 460: n = A,T,C or G
ccctttcgagcggncgcccgggcaggtgggcaggtacttcagcaagtcctctttctcctcagcagtaagctcagccggcaggtgcctgaccagaagggttcggtcgccccgaggcggggaaagcgaggaggagctcgtgcatccccttgatatcgcaagcggctgctcgggagctgccattttccttggagaagcaaaaacagaaatcgtgggaagaagtctcagtcaaaatcgcggcatcaacacaagctgggagaaatattttttccgcctcgcgctaaggattctggaaaccaggaaataccgagaaagaaagtcaccttctcgcgagaactgcgccaccgaaaagcggcaacccttcgaagactcttcggggaagggcgcggtgctaatgatttaaattccaaggggtctncggaaagacttacaaagccaaaaattggcccaaaagatgtgcganggttaacacaagttgtcaatcaaagaaaggaaacaggaaccccaacccctttaagga

SEQ ID NO: 2075 - DNA, 445 bp, Homo sapiens
ccgcccgggcaggtacaaattgagctctctattcataacctcaatgtatgtattcctgcccattaatatactttgcaccagcaaaagcgatttccaacatatgtgttttggaggtaattaagtaactctgtataaaaataaatgcacttttccctcctttccccagtgaatggaaaacttccatactttcaaaataataataaaaaaataatttttaagagcaacagccctcaactctttgctggtgcctgccatactgcctttcttcactccattcttagctctgctagtttcttcttgtatgtcatgataaaaagggaatgtgggtgtgtaacttttgtgtatgtcccgtttccaaatttccctctccaaaaagccaaccaaataaacaaacaaacaaacgaaaaaaacagtgcaacaaaacacaaatagcattccaacagtt

SEQ ID NO: 2076 - DNA, 580 bp, Homo sapiens
tttcgagcggccgcccgggcaggcacataaaacattattccttccttggcctaaaaactcatcgccacctacattaaagctaatatgcctgattactgtttttagagaacttattttattagggcagttccaagctcaaaaatacgctaactggcaccttgttagctacataaaaatgcaccctagacccgaaacttactagactcattataaaattttctttaaggtgtccacgcagtccctggtcacacttgaagcagtccggagaaatatcagccctaccccagtaatccccagaaggaacttacacttttttttaatcttttcctacaacttcatattttataaataaaaagacaaaaatgtcaggcctgtgagctgaagcttagccattgtaacccctgtgacctgcacatatccgtccaggtggcctgcaggagccaagaagtctgggagcagcccgaaaaaccacaaagaagtgaaacaagccagttcctgccttaactaattaacccaccttacgacattccaccattatgacttgtccaccattatgacttgttcctgccctgccccaact

SEQ ID NO: 2077 - DNA, 361 bp, Homo sapiens
  misc_feature 31, 36, 45, 50, 55, 56, 57, 212, 268, 270, 282, 285, 321,336, 340, 361: n = A,T,C or G
ccctttcgagcggccgcccgggcaggtttangtcanagtcttctnttctnttctnnntgagatggagtcttgctctgttgccagactggagtgcagtggtgcgatctgggctcactgcaatctccacctcccgggttcaagcgattctcctgcctcagcctcccgagtaactgggactacagggtgcgcgccaccaagcccagctcattttngtatttatagtagagatggggtttcacgatgttggctagggatgggtctcgatctntnggtcagagtctnttnctgtaaaatatccttgggtaaaagaagcaattttanactgtaaactgatgncaanatgctttaagggaagaaggcn

SEQ ID NO: 2078 - DNA, 119 bp, Homo sapiens
  misc_feature 7, 34: n = A,T,C or G
tcccttnctttctcgcacgttcggccggcttttncccgtcaagctctaaaatcgggggggctccctttaggggttccgaatttaagtggctttacgggaaccttcgaaccccaaaaaaa

SEQ ID NO: 2079 - DNA, 283 bp, Homo sapiens
  misc_feature 28: n = A,T,C or G
ccctttcgagcggccgcccgggcaggtncagggtctgtcagaaactgttggaatcttacataaagtcaagtctcagaaatgtccgatgcttcaccatattcttatattctatgcaattgttgtctgtgcactaatcatctcgaccttctacatgagatacagaattaatactctggaggagcagctggggttactaacctccattgtggacacccataatactgaacaggcagcaccatctggcctgaggtcacaagtacctcggccgcgaccacgctaaggg

SEQ ID NO: 2080 - DNA, 431 bp, Homo sapiens
  misc_feature 4, 54, 68, 88, 101, 117, 144, 234, 387: n = A,T,C or G
accntataacggccgcagtgtgctggaattcgccctttcgagcggccgcccggncaggtacgcggggntggttccaacttttctgctnatctgggaggtgntgggcgcggacagtcnagatgtcagagaaaaagcagccggtanacttaggtctgttagaggaagacgacgagtttgaagagttccctgccgaagactgggctggcttagatgaagatgaaggatgcacatgtnctgggaggataattgggatgaatgacaatgtagagggatgacttctctaatcagttaactgagctgaaactagagaaacatgggttataagatgggagacttcatagccatccagaagaagtgctgaagtaaacctaaaacttgaccctgctnaaatacattgtaggggcaagaagaacccaaggaatggggacact

SEQ ID NO: 2081 - DNA, 414 bp, Homo sapiens
  misc_feature 36, 80, 92, 95, 116, 130, 215, 217, 223, 230, 237, 238, 247,268, 289, 291, 306, 309, 312, 324, 330, 331, 332, 333, 338,339, 343, 365, 372, 374, 375: n = A,T,C or G
ccctttcgagcggccgcccgggcaggtacgcggggnaagtgtcggcgccgccactgtccggccacagcctaacgctcttngctgtcgtttgnggnctcgcgcagggcggccccggntctggtgtttggcngtcggaattaaacaaccaccatgtccgagcaaaaaggcaaagaccaagaccaccatagaagcgcccttagcgtgcaacatccaangngttagncatgttngaccaanncacagattngaggagttcaaaagaggcctncaacatgagttgatcaagaanangagatggcttcattnganaanggaaaaatgccncaaggnnnngcctnngctnactctaggggaaataaaccccnacctgantnngaaaatcttgaatggcccatggatgaaatgaggccccca

SEQ ID NO: 2082 - DNA, 485 bp, Homo sapiens
  misc_feature 36: n = A,T,C or G
cccttagcgtggtcgcggccgaggtactgtgatatntcacatatttttgagaaaaattcccaagccaggcgaatgtggattggaataaagacataggcagtgtataccaccatagcaataatggttagtaagatggtgttaaacatagatcgctcccagggctctaaaacagcacagcagctaatgatttggtattgatagtagagccaggagaaatattccttcacacgcctcaaatccatggttggctccttcaagctgcagtaagtttgtcctaagaaagtccaggtctggttcttcagccttgctccttcgcgaaatgatcctgtgtgggttagttctcctctctgggttgctgtttcctcatctcccagttgggtgtatctccctgcggcttaggtgagcgccgaggctttggctcctccccagctgctgcgagcttccgctgcccccgcgtacctgcccgggcggccgctcgaaaaggg

SEQ ID NO: 2083 - DNA, 121 bp, Homo sapiens
  misc_feature 21, 24, 80, 96, 98, 102: n = A,T,C or G
cgggcaggtaccaaagccttntgnccccattttccatcatacgaatagtattccctgttgctaagccgatgatacattanccttttcccaataggngngagnggatggactgaatggagaa

SEQ ID NO: 2084 - DNA, 289 bp, Homo sapiens
  misc_feature 24, 94, 108, 142, 146, 150, 164, 176, 186, 198, 213, 239: n = A,T,C or G
cgctcactgcccgctttccaagtncgggaaaacctgtcggtgccagcttgcataaatgaaatcggccaaccgcgccgggggaagagggcggttngcagtaattgggcngctcattccagcttcctccgcttcactggacttngganggcnctcgggtccgtacnggctggcgggcngagccggggnatcaagctcaanttcaaaaggccgggnaaataccgggataacccaccaagaantcaaggggggataaacgcaagggaaaggaacatggtgaagccaaaaaggg

SEQ ID NO: 2085 - DNA, 153 bp, Homo sapiens
  misc_feature 1, 3, 6, 8, 14, 33, 41, 43, 47, 56, 61, 62, 71, 116, 125,134, 145, 151: n = A,T,C or G
ncngancngggagnggggagagcccgcggaggngccccaancncccnaaagcgagncgcannacgcgcgcncacgggccgcgaaagacaacgcaagacggggaaaaccccgccgcnacccaacanaaccgccgngcaagcacaanccccanag

SEQ ID NO: 2086 - DNA, 258 bp, Homo sapiens
  misc_feature 4, 5, 12, 17, 29, 51, 62, 105, 157, 158, 190, 215: n = A,T,C or G
tttnnagttttnggganccactagttctngagcggcgaggtacttatcaanaatggggtccntaaagacataatctttgccagtagatgcagagttgctggtagnttatgactaattccaagaccgtccgaaatccctgggctgtgttgaaatgtgnnttcatgctccctcgctcccaagcatagaccgncaggagctccagggcatactgaggnggcaagcttccaagcttcttcttacaattttggacctgcccgg

SEQ ID NO: 2087 - DNA, 166 bp, Homo sapiens
  misc_feature 5, 32: n = A,T,C or G
ccggncaggtacactcggaaatggaaggcgangtttgagtctttcttcatctcggtatggaaatccacctgcagctgtgggtccatgacgaaagggatgatcggtgtccctgtgattatcacacaagaaccagtagacaaggacacaggccgtgtgtgtggtacct

SEQ ID NO: 2088 - DNA, 375 bp, Homo sapiens
  misc_feature 2, 28, 31, 56, 63, 65, 66, 67, 68, 69, 70, 71, 72, 73, 74,75, 76, 77, 78, 79, 80, 81, 82, 83, 84, 85, 86, 87, 88,89, 90, 91, 92, 93, 94, 95, 96, 97, 98, 99, 100, 101, 102,103, 104, 105, 106, 107, 108, 109, 110, 111, 112, 113, 114: n = A,T,C or G
  misc_feature 115, 116, 117, 118, 119, 120, 121, 122, 123, 124, 125, 126,127, 128, 129, 130, 131, 132, 133, 134, 135, 136, 137, 138,139, 140, 141, 142, 143, 144, 145, 146, 147, 148, 149, 150,151, 152, 153, 154, 155, 157, 158, 159, 160, 161, 162: n = A,T,C or G
  misc_feature 163, 164, 165, 166, 167, 168, 169, 170, 171, 172, 173, 174,175, 176, 177, 178, 179, 180, 181, 182, 183, 184, 185, 186,187, 188, 189, 190, 191, 192, 193, 194, 195, 196, 197, 198,199, 200, 201, 202, 203, 204, 205, 206, 207, 208, 209: n = A,T,C or G
  misc_feature 210, 211, 212, 213, 214, 215, 216, 217, 218, 219, 220, 221,222, 223, 224, 225, 226, 227, 228, 229, 230, 231, 232, 233,234, 235, 236, 237, 238, 239, 240, 241, 242, 243, 244, 245,246, 247, 248, 250, 251, 252, 253, 254, 255, 256, 257: n = A,T,C or G
  misc_feature 258, 259, 260, 261, 262, 263, 264, 265, 266, 267, 268, 269,270, 271, 272, 273, 274, 275, 276, 277, 278, 279, 280, 281,282, 283, 284, 285, 286, 287, 288, 289, 290, 291, 292, 293,294, 295, 296, 297, 298, 299, 300, 301, 302, 303, 304: n = A,T,C or G
  misc_feature 305, 306, 307, 308, 309, 310, 311, 312, 313, 314, 315, 316,317, 318, 332, 344, 348, 366: n = A,T,C or G
cnggactcacgcggcggcgggaaatgtnatncgatcacaattccacacacataccnccgggantnnnnnnnnnnnnnnnnnnnnnnnnnnnnnnnnnnnnnnnnnnnnnnnnnnnnnnnnnnnnnnnnnnnnnnnnnnnnnnnnnnnnnnnnnnnannnnnnnnnnnnnnnnnnnnnnnnnnnnnnnnnnnnnnnnnnnnnnnnnnnnnnnnnnnnnnnnnnnnnnnnnnnnnnnnnnnnnnnnnnnnannnnnnnnnnnnnnnnnnnnnnnnnnnnnnnnnnnnnnnnnnnnnnnnnnnnnnnnnnnnnnnnnnnnnatcagggggataangcaggaaagaanatgnggagcaaaaaggccaagnaaaaaggcc

SEQ ID NO: 2089 - DNA, 685 bp, Homo sapiens
  misc_feature 4, 15, 17, 19, 20, 23, 41, 59, 64, 73, 74, 97, 98, 99, 109,124, 130, 142, 147, 158, 163, 164, 181, 231, 254, 256, 276,277, 278, 279, 280, 281, 282, 283, 284, 285, 286, 287, 288,289, 290, 291, 292, 293, 294, 295, 296, 297, 298, 299: n = A,T,C or G
  misc_feature 300, 301, 302, 303, 304, 305, 306, 307, 308, 309, 310, 311,312, 313, 314, 315, 316, 317, 318, 319, 320, 321, 322, 323,324, 325, 326, 327, 337, 342, 347, 349, 358, 359, 362, 365,384, 391, 397, 413, 431, 433, 440, 441, 442, 449, 454: n = A,T,C or G
  misc_feature 470, 471, 477, 492, 502, 511, 521, 527, 533, 534, 543, 545,553, 563, 570, 582, 597, 623, 633, 634, 635, 638, 639, 645,657, 659, 673: n = A,T,C or G
tttnggggacccacnantnnggngagcggggccaccgcggnggagccccaacccgcccnacagngaggcgcannacgcgcgcccactggccgacgannnacaacgacgngacggggaaaacccnggcggnacccaacaaaancgccnggcagcacaanccccnntcgccagcgggcggaanaagcgaagaggcccgcaccgaacagcccctcccaacaagaggcgcagccngaaaggcgaaagggacgcgcccngnaagcggcgcacaaaacgcgnnnnnnnnnnnnnnnnnnnnnnnnnnnnnnnnnnnnnnnnnnnnnnnnnnnnagcgcccgcnccctncgcgnancaacccctnnccntcncgccacggacgcccggctntccccgncaagcnctaaaaacgggggccncccacaaagggggccgananaagagcnnnaacgggnacccncgaccccaaaaaaacnnggaaanaaggggggaaggggncaacgcaagnggggccaancgccccgganaaaacnggagannaccgccccncngaacgganggaagaccancggcccnaaaaaaaggggncccacggggccaaancagggaacaacacacaaaccccaaanccggggccannnccnntggaancaaaaaaggganangagccgaacaccgncccaatggggga

SEQ ID NO: 2090 - DNA, 254 bp, Homo sapiens
  misc_feature 1, 10, 24, 29, 30, 63, 64, 109, 112, 128, 212, 217, 234: n = A,T,C or G
nattgcgaantgggccgctcttcncgctnnctcgctcactgactccgcttgcgctcggtccgnncggctgccggcgagcgggtatcaagctcactcaaaggcgggaaanacngttattccacaagaancaagggggaataaaccgccagggaaaagaaacaatggtgaacaaaaaggcccagcaaaaagggccaaggaaacccgaaaaaaangcccncggttggctggcgtttnttccaataaggctccggccc

SEQ ID NO: 2091 - DNA, 515 bp, Homo sapiens
  misc_feature 7, 11, 13, 15, 18, 19, 23, 25, 45, 416, 442, 498, 499: n = A,T,C or G
cccttantttngncnttnncgangnaccacacacataggtagccngcattcatggaacaggcaccgtgggctgggctgcaccacaccatctttccatgtgttatctctttctagagacttcttgaaaattggtaggattatcatatcatatgttcttggaaacatctgttgactatttctgtacatcatggctcggacttgggtcaagctcttggcaccaatgtcctggcatgagtgttggatgccagcaatcaggtaagggacaaatttgtggattgaccctttgtcctgcacagcaccagacactccctgggccactttgattttgtcaagcttcactgaaatatctgttctggctgctgaggtgcttgtcccatggcatcgaagagaacccataccgcgatatttctttagcncggatcccatcggaaaaagaaagtantcaccagggggccctaagtgggtggcagccaggaagagagccccatcatggactgnnggaggccccaaggggc

SEQ ID NO: 2092 - DNA, 715 bp, Homo sapiens
  misc_feature 61, 71, 289, 362, 363, 364, 365, 366, 367, 368, 369, 370,371, 372, 373, 374, 375, 376, 377, 378, 379, 380, 381, 382,383, 384, 385, 386, 387, 388, 389, 390, 391, 392, 393, 394,395, 396, 397, 398, 399, 400, 401, 402, 403, 404, 405: n = A,T,C or G
  misc_feature 406, 407, 408, 409, 410, 411, 412, 413, 414, 415, 416, 417,418, 419, 420, 421, 422, 423, 424, 425, 426, 427, 428, 429,430, 431, 432, 433, 434, 435, 436, 437, 438, 439, 440, 441,442, 443, 444, 445, 446, 447, 448, 449, 450, 451, 452: n = A,T,C or G
  misc_feature 453, 454, 455, 456, 457, 458, 459, 460, 461, 462, 463, 464,465, 466, 467, 468, 469, 470, 471, 472, 473, 474, 475, 476,477, 478, 479, 663, 670, 686, 697: n = A,T,C or G
ggagctccccgcggtggcggccgaggtacatttttaaagagttgttttttggccgggcgcnttggctcatncctgtaatcccagcactttgggaggccgaggtgggcggatcacgaggtctggagtttgagaccatcctggctaacacagtgaaatcccgtctctactaaaaatacaaaaaattagccaggcgtggtggctggcacctgtagtcccagctacttgggaggctgaggcaggagaatggcgtgaacctggaaggaagaggttgcagtgagccaagattgcncccctgcactccagcctgggcaacagagcaagactccatctcaaaaaaaaaaaaaaaaaaagtacctgcccgnnnnnnnnnnnnnnnnnnnnnnnnnnnnnnnnnnnnnnnnnnnnnnnnnnnnnnnnnnnnnnnnnnnnnnnnnnnnnnnnnnnnnnnnnnnnnnnnnnnnnnnnnnnnnnnnnnnnnngttaattgcgccccttggcgtaatcatggtcataagctgtttcctgtgtgaaaattgttattccgctcacaattccacaccaacatacgagcccgggagcattaaagtgtaaaagcctggggtgcctaaatgaggggagctaactcaacatttaattgcggtgcgcctcacttgcccgcttttncaattcngggaaaccttgcgtgnccagcttgcanttaatgaaatcggcccac

SEQ ID NO: 2093 - DNA, 340 bp, Homo sapiens
  misc_feature 17, 57, 62, 108, 142, 168, 181, 198, 256: n = A,T,C or G
ccccgcgtccgcctcgnaaattgttgatgctctttcccctccccgaggtctcgcatncaaancctggtgggctggccttgtgtggctgcttctccaggcctggtcagnacccagcaggctcagggtctgctcctgatgctgngctctgggacaggcacgccactgtgngaaacactaagcnaggtaatcgagcatttngtgatcacagactccagcttcctggtccacccagcatgtagtcagcactctgaccttnacaccagagctccacagcggctaggagttgacttcctgtgtcatgacctcaggaaataaatttccttgactttaaaaaaaaaaa

SEQ ID NO: 2094 - DNA, 527 bp, Homo sapiens
  misc_feature 23, 37, 46, 95, 112, 158, 188, 200, 219, 238, 244, 256, 262,278, 288, 292, 300, 306, 307, 308, 314, 316, 342, 388, 397,400, 413, 416, 463, 492, 507, 509: n = A,T,C or G
ttctgctgagacgcgtgtggctncctccccgcaacanccaaaatgntgaagctgatcgagagcaaggaagcttttcaggaggccctggccgccgngggagacaagcttgtcntggtggacttctctgctacgtggtgtggaccttgcaaaatgatcangcccttcttccattccctctgtgacaagtnttccaatgtggngttccttgaagtggatgtngatgactgccaggatgttnctgcanactgtgaattcnaatgcntgccagaccttccagntctataaaangggncaaaaggngggggnnntctacngngctaacaaggaaaagcttgaagcctntattactgaatatgcctaatcatgctctgaaaagtgggaccagctnccaagctgnttnaaacctcgtaccnttnttaatttgctaaaaactatgaaagtgtggagaggctatcccaactgncatctgattattagtgacaataaaaaaantaattctaccccttnanaaaaaaaaaaaaaaaaaa

SEQ ID NO: 2095 - DNA, 142 bp, Homo sapiens
  misc_feature 14, 17, 25, 40, 77, 85, 138: n = A,T,C or G
tgtgtagcacctgnggngtccttgngtgattattcttgtncgaggtacttagggcaagtcacatgccctccatcccntggctcanagatgaagagtaaatccaaaacatgtgcctcgctcttggtcactaactgctgncctg

SEQ ID NO: 2096 - DNA, 145 bp, Homo sapiens
  misc_feature 28, 39, 51, 81, 85, 95, 113, 128, 130, 137: n = A,T,C or G
tcgagcggccgcccgggcaggtactttnttaatgccttngttggagtcctnatcctcatctttaaaaaaaaaaaaaacagnttancctaagccanattcactttttttagttnacaaaaaggattaantngccacantgtgattt

SEQ ID NO: 2097 - DNA, 326 bp, Homo sapiens
  misc_feature 4, 5, 44, 56, 59, 61, 68, 87, 93, 95, 119, 124, 135, 137,143, 151, 161, 165, 174, 205, 218, 226, 227, 229, 233, 250,254, 261, 265, 274, 285, 286, 309, 311, 312: n = A,T,C or G
attnncccttaatcatctcacgccccatgtatgattctcaaagngcctagcgtgancancngtccctnagaccacaccaatttcttnatgtcncnctcaagaaagccaaaatgacaatnataangccatctcaancncaatancctaccanaaccaccccncggncttatctanacttcaactcaaactctctgcctccttactntctggggagcttnaaaaccanntnactnataactttaaaaacctntctntaaaatntcanaaaccacancctcaccattnncacaaccacccccaacaccaaanannttcccaaaacaacc

SEQ ID NO: 2098 - DNA, 355 bp, Homo sapiens
  misc_feature 163: n = A,T,C or G
cccttagcgtggtcgcggccgaggtacaccaagaccaattgctaaaatcttggattatggaaaatttaagtatgaaagaaagaaaaaacaaaaagttgaaaaagaaaaacaatctttcacaaacaatagagaaattcgtttatcttttggaatcaatttaagngatataaaaatcaaagcaaaaaaagccaaagaatttttattagataacgacagagtaaaagtggctcttcgtcttagagggcgtgaaaatacaagacctgaacaaggtaaattaattttaaattctttttttgatgaagtaaaatcgattgcaaaattaagtaaagaaatgcaatcagttggtaatttttta

SEQ ID NO: 2099 - DNA, 350 bp, Homo sapiens
  misc_feature 1, 3, 8: n = A,T,C or G
ngnccttncgagcggccgcccgggcaggtacaaattgagctctctattcataacctcaatgtatgtattcctgcccattaatatactttgcaccagcaaaagcgatttccaacatatgtgttttggaggtaattaagtaactctgtataaaaataaatgcacttttccctcctttccccagtgaatggaaaacttccatactttcaaaataataataaaaaaataatttttaagagcaacagccctcaactctttgctggtgcctgccatactgcctttcttcactccattcttagctctgctagtttcttcttgtatgtcatgataaaaagggaatgtggggtgtgtaa

SEQ ID NO: 2100 - DNA, 320 bp, Homo sapiens
  misc_feature 1: n = A,T,C or G
nccttagcgtggtcgcggccgaggtacactggaggctggagcctgcagatggcatggctctgcggctcaccttgctgcagttggtggtggtgacagagactgcagcttgactgtagtgaatttggaaattatctgtctggaagctctgagtttatcttgggacctcaagaggagaggatcacccaactcacagcaatcaaactccaaatggtgctataaactgaaccacacatggacacgtcagtcttccgaggacccttagatcaaccccaggaggagccctagctgctgttccccattcgacgcccctttccagcagg

SEQ ID NO: 2101 - DNA, 378 bp, Homo sapiens
  misc_feature 1, 20, 37, 53, 55, 65, 97, 123, 124, 127, 130, 131, 142,150, 192, 197, 207, 208, 215, 219, 220, 221, 222, 223, 224,225, 226, 227, 228, 229, 230, 231, 232, 233, 234, 235, 236,237, 238, 239, 240, 241, 242, 243, 245, 261, 264, 267: n = A,T,C or G
  misc_feature 279, 287, 291, 292, 293, 295, 297, 302, 313, 321, 322, 323,324, 325, 326, 327, 328, 339, 340, 341, 342, 343, 344, 345,346, 347, 360, 369: n = A,T,C or G
naggggcgggaattttgggngggcccccctttcttanaatgcattgcttccgnanggcccggggnccccccccccagtggtggatgggatattcttnccaaaaattggggggggccctttttnnggnccnnaaaaaaccccnggggccgncccggggccaaggttaccttggacttggaaaaatttggggcnttttnttttgggggnnccttttncccnnnnnnnnnnnnnnnnnnnnnnnnnangggcccccggggtttnttnccnttttcccaaaanaggccccntttnnngngnggggngggttgggggnaaaaaaannnnnnnnttttttttttnnnnnnnnnccccccccccccnttaaaaaanaaaaaaaaa

SEQ ID NO: 2102 - DNA, 312 bp, Homo sapiens
  misc_feature 125, 126, 128, 131, 142, 148, 151, 154, 156, 160, 162, 163,169, 176, 179, 180, 189, 190, 191, 193, 194, 200, 204, 207,211, 212, 216, 217, 218, 219, 220, 223, 224, 226, 230, 232,237, 243, 245, 246, 248, 256, 259, 269, 270, 274, 275: n = A,T,C or G
  misc_feature 281, 287, 288, 291: n = A,T,C or G
ccctttcgagcggccgcccgggcaggcacttatttttttttttttttttttttttcttttttttttttttttttttttttttttttttttttttttttttttttttttttttttttttttttttnntnaanaaaaaaaaaantttttnttnaantngggncnnaaactntttaacnaannaaaaaaaannntnntaaaangttntcnaagnngggnnnnnccnnanaggnanaaaangaaaangnntnattttttnttnaaaaaaaaanntttnntaaaantgttgnnggngggggtaggttaaaaaaaaaa

SEQ ID NO: 2103 - DNA, 268 bp, Homo sapiens
  misc_feature 216, 241: n = A,T,C or G
ccctttcgagcggccgcccgggcaggtactctgtctctgtagtctctccattctaaagtttaatttggaaaggtctgtcctgaattatcaaagtaagaatactcagatttccataagctcttctcacctcctcttagcccaactcaaactccatcagaccttctcaccttgattttgagctggaatgtttcaatgagcaaaataaattagacaaangttaaaaaaaaaaaaaaaaaaaaangtacctcggccgcgaccacgctaaggg

SEQ ID NO: 2104 - DNA, 362 bp, Homo sapiens
  misc_feature 133, 135: n = A,T,C or G
cccttagcgtggtcgcggccgaggtacctgaccccggtcctcaaggaatcaaagtttaaggaaacaggtgtaattaccccagaagagtttgtggcagctggagatcacctagtccaccactgtccaacatggnantgggctacaggggaagaattgaaagtgaaggcatacctaccaacaggcaaacaatttttggtaaccaaaaatgtgccgtgctataagcggtgcaaacagatggaatattcagatgaattggaagctatcattgaagaagatgatggtgatggcggatgggtagatacatatcacaacacaggtattacaggaataacggaagcccgttaaagagatcacactggaaa

SEQ ID NO: 2105 - DNA, 303 bp, Homo sapiens
  misc_feature 13, 51, 79, 86, 89, 91, 93, 98, 108, 125, 148, 160, 222,234, 237, 253, 255, 258, 263, 265, 279, 282, 289: n = A,T,C or G
cccttagcgtggncgcggccgaggcactttttttttttttttttttttttngctttttttttttttttttttttttttnttttttnttntncntttcnattttttatnctttttttttttttttnaatggccaggctcccaacatttnaaaaaaactgcnccccccaatgggtgaacaaagtaaagagtagtaacctaaagttcacctgagtaagccactgnggagccttaagnggngaggtcttccaatttnanagngatgngncttcaacttgtatnatnattttangcggaaaaacataa

SEQ ID NO: 2106 - DNA, 190 bp, Homo sapiens
  misc_feature 31, 120, 127, 144, 166: n = A,T,C or G
tcggcgtcgcgacccccgaggacctcctctnctcgctctgtggcatacactagtcctgggcactcaaccgcggagagcccccgaccccggggtagcggctgagcctcagccgggaccggnaccggancccgcgcggagcatgtnatccgggctgggggcagctggnacagtgggctgggttggccctcct

SEQ ID NO: 2107 - DNA, 713 bp, Homo sapiens
  misc_feature 52, 56, 109, 151, 195, 231, 285, 309, 315, 324, 332, 335,341, 353, 360, 361, 362, 366, 371, 372, 388, 397, 399, 403,405, 414, 430, 432, 441, 444, 473, 475, 478, 488, 491, 496,525, 528, 530, 536, 541, 560, 564, 567, 577, 588, 595: n = A,T,C or G
  misc_feature 603, 616, 625, 630, 635, 639, 646, 652, 692: n = A,T,C or G
aatttgtgtgtttgtgtttgtttggggtttttgtttttatttcttacattanagtncatattttctgggatttaaattataggtgtattttcctattctcttgagaagnagactaaacagtctttgcaatgatgacggatgcacacagaanaaaacattagaagacattactttctatcctctcatgtggttgancattcttacacgccaaatgactaaattggtgtttcntaggaaggagcagctgtcacttacaatgtgaaaatattaatgttttaggccagngggccaaaccttcaagggggcctngttggncaatttatngtcccctnatncttttnaaaaatttgaanggttcannnaaanttgtnnaaccaccaacaaaacnccccctttnancatngngggggcaanggggttggggaccttngngaccttaantgnattggccaattaccgccttggggccttgntnaangccttcaacnccnaaaanaattggcccaccaattggggggtcttttngtnanaccttntttgnaccaaccaacaaccttaancttngancttcacaaanggcttggggcnagggtancaacaacnttcaaggtttatnccggcttcncaaangggcncttnaaccttntttggngaatttgaaggcttaaaaaccttggccatggaaatcccanctttaagggcccaatcccctt

SEQ ID NO: 2108 - DNA, 470 bp, Homo sapiens
accacgcgtccgagctcgctcagcactcccaggtccttagcactcccaggtcgtagctggcgcagtcagtaggaactgtaactatgtctctgatgcaccacgtgtttagacacagcacagtccttttttctgttcctacggtggaagtagtttctctttgggcatgctgacagcactttttcatagcctcaccgatgagccctttctgcgggagtgactccatgcctgtatacagagtatttatacagatgttttagcatcttcatatgcggtgttaacccctagttctgtacagcatattctgttcaagtatttttttacaagcttgtgctgtaggcacatgccttctgctgcagaagtggacacccgtggcacacccaccccgccccagtggggtgccatgccttcctgggacattgccacttctgccctggaactcatgcaggtacgtagtagctgctattgccaga

SEQ ID NO: 2109 - DNA, 632 bp, Homo sapiens
  misc_feature 1, 225, 260, 266, 284, 293, 310, 317, 339, 364, 370, 378,384, 389, 404, 415, 439, 445, 446, 468, 469, 481, 498, 506,528, 534, 539, 554, 568, 579, 590: n = A,T,C or G
ncgcctatcacatagtcaaacccagtccctggccactgacaggagctctgtcagctttcttaataacgtccggcttaatcatatgatttcacttctactctatcaccctactaacactaggcctactaaccaacacactaaccttatatcaatgatgacagtgacatcgtactgagaaagcacataccaaggccaccaccacaatactcccgtccaaaaaaagcncttccggtaccggaattaacaacatattttatcanttctcnaaaaagttattctttttntttattcgngccttcttcttgagcantttttanccacatctaaaggccctcagcnccacaacaacacctggctttaaggnggggcncaatttgnacccancccanacaagggcgattcancccccccctgnaacccccccattagtaaaggtacncccctnncttaaaaacaacccttcttggnnatttaactttgncaatccttgggggggtnaaacaaantcaaccctggaaggcttcaccnacaagnccctncattaaaattaaatngaccccgaaaaaancaaaaccaaantcccaaaggcnccctgcctcattcaccaatacctaacttagggttacccttat

SEQ ID NO: 2110 - DNA, 572 bp, Homo sapiens
  misc_feature 24, 140, 234, 236, 263, 303, 316, 319, 395, 397, 474, 490,513: n = A,T,C or G
cgtccgggacctttatgtcttgtnaagatgtctaggcctggccgggcgcggtggctcacacctgtaatcccagcactttgggaggccgaggcgggtggatcacgagggcaggagtttgagaccagcctgatcaacatggngaaaccccgtctctactaaaaatacaaaaattagccgggcatcgtggcacatgcctgtaatcccagctactcgggaggccgaggcaagagaatngnttgaacccaggaggtggaagttgcagngagccaaaatcacgccactgcactccagcctgggcagcanagtgagactccgnctnaaaaacaaaacaaaacaaaaaagcaaaaccagatgtctaggccaatgataattatttttgatgcattgtggattangntcttttgttaaccccactgtcttggggaatgatgcctgctgggaaattgagttttttgactgaaacatggaaccttnctgctttttttctggntcctatgaaggttttggaacatntgaaaacacaaaaactcaccttgaaatttgagcaggtcgatgatggcaaaaaattattt

SEQ ID NO: 2111 - DNA, 273 bp, Homo sapiens
  misc_feature 123, 187, 191, 201, 221, 227, 250, 255, 257, 272: n = A,T,C or G
gcgtccgctgatctgctttgggacggcctttatatacttcctcctttccaggccttccaccaccagtgaccactattcgacatctggcccactctcagtcatcctcctgcttatgcttgtctnctccttgaaggcttcccactgcatgtaggacaaaggtcagattttgtaacaggccaggcctggncttnatagtctggnatccactaatttatggtctnagtctnatcccttggaggattacctctgnccttngnaagctctgtgctccng

SEQ ID NO: 2112 - DNA, 648 bp, Homo sapiens
  misc_feature 65, 151, 236, 252, 266, 279, 296, 297, 308, 325, 327, 370,375, 387, 402, 405, 409, 416, 429, 443, 451, 464, 468, 491,517, 540, 561, 570, 608, 613, 628, 635: n = A,T,C or G
ttcataacaattctcctacaaatcaccttaattctgacattcatggccacagaactaattatatnctacattctatttgaaaccacccttatccccaccctaattatcaggtactaaatgaggcagccaagcaaaacgccttaacgcaagnacttactttctattctacacactaaccggctctctacccctactcatcatactaagcgcacacctacaaacaacacaggctcacntaaacatcacagctanctaacacttcacgngaccaaaaaaacntaacaacccacctgggnnccccacagcanttaccctgggcctagcnantggcatatataagcgcttttatggaccaaaaaatacccccttnttatnggggtctacacncttattgacttcccncanaagncccatgntttgaaagccccncatttgcaaggggntcaaatangtcctttgcacgncagntaccttccttaaaaactagggcnggctatggggcaataaaataccgggntttaactccccatttcttcaaanaccccttaaacgggaaattancataagccntaccccatttccctcattattaatcccttatgggggcnataantcataacaaaggccntaaacantgcctcccgacaa

SEQ ID NO: 2113 - DNA, 378 bp, Homo sapiens
  misc_feature 78, 86, 107, 112, 178, 200, 228, 324, 325: n = A,T,C or G
ttggagctccccgcggtggcggccgaggtacctgctactttttaaacaatttcaactgcagctctctttcactaagtnagatgggnaaagcatgccatttctgtttncttgngatttttactttttagaaacacacatgcttccactgccatctgacacttctccacacgctttcatnttgtaaacctgaattctatttngagtacctatcaaatactttctggaggnggggcacgctccgctcggtcatgatgctgatccacttgggaacatcagttcctttcctcttcactccagcgtcatagagatcccgagcatcttggnnaatcagttcataatcaatgacagagccatcctctgctcttctaccctttgcca

SEQ ID NO: 2114 - DNA, 312 bp, Homo sapiens
  misc_feature 17, 20, 32, 39, 44, 45, 46, 48, 49, 50, 55, 56, 57, 59, 60,62, 63, 64, 67, 79, 82, 83, 109, 115, 117, 135, 144, 156,160, 201, 209, 210, 214, 220, 239, 248, 251, 268, 271, 282,291, 292, 295, 300: n = A,T,C or G
gtggggggggggggggnaanctcgttgggacncgccccnaattnnnannnaaccnnngnncnnnctngagggcgaaggnatnnataagcttgaggggggggggctgganaccgangnatccactagttctagagngggccgccnaccggggtgggngctncagctttttgttccctttagtggaggggttaattgcggcgnttgggcgnnaatnatgggncattaggtggtttcctggngtggaaatngtnatccggggggggaggtncanacaaaatagcngagcccggnnagnataanagtgtaaaagcc

SEQ ID NO: 2115 - DNA, 169 bp, Homo sapiens
  misc_feature 74, 75, 95, 105, 107, 108, 132, 135, 136, 142, 143, 147,148, 154, 160, 167, 168, 169: n = A,T,C or G
gctccccgcggtggcggccgcccgggcaggtacctgttgtgtccctttctcttcaaagatcctgagcaaaacanngatacgctttccattacctnatgggggggncnnggacccagctcttggcattgctanggnnggctannatcnngccacntgaggntgtggannn

SEQ ID NO: 2116 - DNA, 319 bp, Homo sapiens
  misc_feature 19, 57, 91, 105, 106, 118, 154, 180, 206, 234, 272, 277,279, 303: n = A,T,C or G
ctaactcacattaatttgngtatgcgctcactgccccgctttccagtcgggaaaacnctggtcgtgccagcctgcattaatgaaatcggcncaaccgccgccggnngagagggccggntttgcgtatatgggcagctcttccgctttcctcggntcacttgactcgcttgcgctcgggtncgtttcgggcttgcgggcgaaggcgngtattcaggctcactcaaagggcgggtnaatacgggttattccaacaagaattcaggggggataancgcangnaaagaaccattgttgaagccaaanagggcccaagcaaaaa

SEQ ID NO: 2117 - DNA, 293 bp, Homo sapiens
  misc_feature 41, 50, 75, 92, 121, 122, 123, 124, 125, 126, 127, 128, 129,130, 131, 132, 133, 134, 135, 136, 137, 138, 139, 140, 141,142, 143, 144, 145, 146, 147, 148, 149, 191, 202, 245, 257,258, 280: n = A,T,C or G
acctgtcgtgccagctgccattaaatgaatcgggccaaacncgccggggnagagggcggtttgcggtattggggncgcctcttcccgctttnctcgctcactgactcgctgcgcctcggtnnnnnnnnnnnnnnnnnnnnnnnnnnnnncttcacttcaaagggcgggtaattaccggtttatccaccagnaatcagggggnataaccgcaagggaaagaacattgtgaagccaaaagggcccancaaaaaggccanngaacccgtaaaaaagggccgcngtttgcttggccg

SEQ ID NO: 2118 - DNA, 421 bp, Homo sapiens
  misc_feature 63, 121, 137: n = A,T,C or G
ccgcggtggcggccgccacgctggttttgcatcttcaggagacgctcgtagccctcgcgcttntcctcggccagttcgcggaagaagtggctcacgccttccagagccacatcatcgcggncgaaatagaagcccanagagaggtaggtgtaggaggcctgcaggtacaacttgttggcctacataaaacacctagatggtaacaacgaggcagccctggaatgcttacggcaagctgaagagttaatccagcaagaacatgctgaccaagcagaaatcagaagtctagtcacttggggaaactacgcctgggtctactatcacttgggcagactctcagatgctcagatttatgtagataaggtgaaacaaacctgcaagaaattttcaaatccatacagtattgagtattctgaacttg

SEQ ID NO: 2119 - DNA, 228 bp, Homo sapiens
ggagctccccgcggtggcggccgaggtacctaacctacctttaagactgggataactattggaaacaatagctaataccggatatagttatttatcgcatgatgagtaatagaaaggagcttcacagcttcacttaaaaatgggggtgcggaacattagttagttggtaggggtaatggcctaccaagacgatgatgtttagccgggccgagaggctgtacctgcccg

SEQ ID NO: 2120 - DNA, 492 bp, Homo sapiens
  misc_feature 106, 140, 144, 305, 315, 327, 366, 400, 403, 428, 455: n = A,T,C or G
tgcccgggcaggtacttttttttttttttttttttttttgggatggagtcttgctctgttgcccaggctggagtgcaggggcgcaatcttggctcactgcaacctnttccttccaggttcacgccattctcctgcctcancctnccaagtagctgggactacaggtgccagccaccacgcctgggctaattttttgtatttttagtagagacgggatttcacttgtgttagccagggatggtctcaaactccagactctcgtgatccgcccacctttggcctcccaaagtgctggggaattacanggcatgagcncacttgcgcccnggccaaaaaaacaaactttttttaaaaaaatggtacctnggctcgctctaagaactaggggggatcccccggngcntgcagggaattccgatatcaaagcnttatcgattacccggtctgaacccttngagggggggggggcccgggtaccccagcttttttggt

SEQ ID NO: 2121 - DNA, 344 bp, Homo sapiens
  misc_feature 54, 273, 325: n = A,T,C or G
ggtaccttgtctggagaatgcagtgacagcaccggcccatgcttgagaacccangcggctgtgcagagggcagccgaccactatagccagcagatggcccagcaactgaggctccccacagacacgctccaggagctgctggacgtgcatgcagcctgtgagagggaagccattgcagtcttcatggagcactccttcaaggatgaaaaccatgaattccagaagaagcttgtggacaccatagagaaaaagaagggagactttgtgctgcanaatgaagaggcatctgccaaatattgccaggctgagcttaagcggctttcanagcacctgacagaaagcat

SEQ ID NO: 2122 - DNA, 161 bp, Homo sapiens
  misc_feature 4, 34, 76, 77, 116, 121, 153: n = A,T,C or G
ggcnaattggagctccccgcggtggcggccgccnggccaggtacccttggaagatgggaaaggtgagggaaatatnngaagcagggtcagaacatccactaagaacatagcacctnagtanagcttacattatatgagccagggtagagttantactgaat

SEQ ID NO: 2123 - DNA, 557 bp, Homo sapiens
  misc_feature 24, 231, 313, 314, 315, 316, 317, 318, 319, 320, 321, 322,323, 324, 325, 326, 327, 328, 329, 330, 331, 332, 333, 334,335, 336, 337, 338, 339, 340, 341, 342, 346, 377, 378, 393,397, 398, 399, 400, 401, 402, 403, 404, 405, 406, 407: n = A,T,C or G
  misc_feature 408, 409, 410, 411, 412, 413, 414, 415, 416, 417, 418, 419,420, 421, 422, 423, 424, 425, 426, 427, 428, 429, 430, 431,432, 433, 434, 435, 436, 437, 438, 439, 440, 441, 442, 443,444, 445, 446, 447, 453, 460, 465, 475, 481, 493, 495: n = A,T,C or G
  misc_feature 517, 530, 539: n = A,T,C or G
tactatagggcgaattggagctcnccgcggtggcggccgaggtacttttttttttttttttttttgcaactcgagacgttagtttactccagagtcatggagacagtgaatggagtgtgtgtgtgtgtgtgcgtgtgcgtgagtgagagagagagagaggaagaagggagggagggatggttacaggagtgtgggaaaagtcaacaggaaaaggagggaaggttcgctgtnaactgacagaaactgtgacatcacaggcatgtgcggagtccccgcccccccaggcactgtgccaaggccagtacctgcccgnnnnnnnnnnnnnnnnnnnnnnnnnnnnnncggnctgcagggaattctgatatttaaagcttatnnataccgacaacctcngagnnnnnnnnnnnnnnnnnnnnnnnnnnnnnnnnnnnnnnnnnnnnnnnnnnncgcttngccgtantcatngccaatagcntgtttnctgtgtgaaaantngtttattcccgctcacaatttncacacaacatacnaacccgggnagcataaaagtgtaaaag

SEQ ID NO: 2124 - DNA, 462 bp, Homo sapiens
  misc_feature 15: n = A,T,C or G
gcgaattggatctcnccgcggtggcggccgaggtacctttttaaatctagcccagtataaacattagcctgcttaatatttagacatttataggtagaattctgagcactcaactcatgtttggcattttaaagtaaaaacaagtgtgacttcgaggaccaaagaaattgtcagctatacatttatctttatgaactcatttatattcctttttaatgactcgttgttctaacatttcctagaagtgttcttataaaggtctaatgtatccacaggctgttgtcttattagtaaatgcaaagtaatgactttgtctgttttactctagtctttagtactggttgtcaggattcagccgaatggcttgcctcagagggtcaatggcgttctgagatggtggccagttgtccagacggtagcttgctattgccagtccagaggtgaattctgggttctttggct

SEQ ID NO: 2125 - DNA, 256 bp, Homo sapiens
gcgcgaattggagctccccgcggtggcggccgaggtactggtgaaagttcttgatgagggtctcaatggccctctccacatcactgaattcctgagcatcctctgcgttggctgaccgacactgtcccatggtgcccactgtgtctggtcctttggtgagagttctgttgtcctatagctggccccagaggagctgatggctcatgatctgttggcagccgctgagacaagacaggaggccccgcgtacctgcccg

SEQ ID NO: 2126 - DNA, 180 bp, Homo sapiens
  misc_feature 70, 72, 86, 90, 103, 110, 127, 134, 148, 150, 153: n = A,T,C or G
ccgcggtggcggccgaggtacccggtgcgcataagaggaagatttctgaagagtgcagctgcctgaaccnanccctgccgaacagntganaattgcactgcanccatgantgagaacaattagaatnccttggngggcagcctacggnanctnaaatgccatttaacctggaacttgatg

SEQ ID NO: 2127 - DNA, 450 bp, Homo sapiens
  misc_feature 40, 104, 126, 134, 145, 149, 161, 202, 239, 242, 269, 276,286, 292, 301, 302, 308, 309, 319, 356, 359, 363, 387, 395,401, 402, 404, 408, 410, 416, 429: n = A,T,C or G
aattggagctccccgcggtggcggccgaggtactcacgangtcatatgttatttacaattgggtttgtgtgggatgggaagtagggcggatgagccagtacttntgcaatgaagatgcaatagtcnttgtcctntcccactgtcncctntttcctcacccnatggcagcttacatgacctattcccaaagggtccaccgagncctgaactcagcttcatcaccaacattcctcgccttnagnaagaattcaacactgtataagggagtngaggcanagacttgggncagggngagggtggnnaacacnnaagcacactntcttgtcatcaacccaagttcagagacaaggcctccncanatgnggaagatgatgcccttagacaccncaacctgnttgtcnncnttcntngaagcncaaagcagcctgnatctcaactgaagagaagggg

SEQ ID NO: 2128 - DNA, 538 bp, Homo sapiens
  misc_feature 447: n = A,T,C or G
tatagggcgaattggagctccccgcggtggcggccgcccgggcaggtacggggaatggaatggaatggaatgcaatggaatggaatcttccggaatggaatggaatggaatggaacggaatggaacggaatggaacggaatggaatggaatggaatggaatgcaatggaatggaatcttccggaatggaatggaatggaatggaatcaacccgagtgcaatggaatggagtggaatggaatggaatggaatggaacaacccgaatggaatcgaatgtaatggagttgaatagaatcaatccgaatgtaatggaatggaatggaaccggaatggaattgaatggaatggaatggaatgcaatggaatggaatcaacccgagtgcaatggaatggagaggaatggaatggaatggaagggagactacccgaatggaatggaatgtaatngagtgtaagggaattgaatagaatcaatcccaatgtaatggaatggaatggaatggaatgcaatggaatggaatctttccgaatggaattg

SEQ ID NO: 2129 - DNA, 291 bp, Homo sapiens
  misc_feature 42, 48, 56, 68, 156: n = A,T,C or G
atagggcgaattggagctccccgcggtggcggccgaggtacncggggnactgaaantccacacgacanaatagccagatctcagaggagcctggctaagcaaaaccctgcagaacggctgcctaatttacagcacccatgaggaaaggccacttanggatgcagcaagaaggagccatctgcaatccaggaagaaattccttgccaggaaccaaattggttgtcaccttcatctaggacttctagcctcgagaacttacaaatggtgatgatcatcaggtcaaggatagtc

SEQ ID NO: 2130 - DNA, 349 bp, Homo sapiens
  misc_feature 134: n = A,T,C or G
tagggcgaattggagctccccgcggtggcggccgaggtacgcggggaactgaaaatccacaagacagaatagccagatctcagaggagcctggctaagcaaaaccctgcagaacggctgcctaatttacagcanccatgaggaaaggccacttaaggatgcagcaagaaggagccatctgcaatccaggaagaaattccttgccaggaaccaaattggttgtcaccttcatctaggacttctagcctcgagaacttacaaatggtgatgatcatcaggtcaaggatagtctggagcaattgagatgtcactttacatggggagttatccattgatgacgatgaaatgcc

SEQ ID NO: 2131 - DNA, 698 bp, Homo sapiens
  misc_feature 321, 330, 332, 366, 371, 375, 393, 404, 405, 409, 412, 413,415, 416, 421, 426, 428, 432, 437, 439, 440, 444, 461, 463,471, 481, 482, 489, 492, 497, 506, 527, 540, 547, 549, 558,559, 582, 584, 603, 604, 605, 617, 618, 622, 623, 624: n = A,T,C or G
  misc_feature 625, 632, 634, 639, 643, 651, 652, 654, 657, 659, 666, 671,674, 675, 677, 681, 691: n = A,T,C or G
agggcgaattggagctccccgcggtggcggccgcccgggcaggtactatcattaatgtattatatacactgatactttaaaacttgtgtggaaaaaactaacttataattttgtatcacacaccctggatatgtgttctgtttctaagcgacatttgtgagagattattgtaaaatgagagcgagcaaataaaacttaatttaatctttgcagatacatacttatgggaaatttgaacaaatgagtgaaactctgtgtttttagtaggctgtgataaacatttccgggcactttgcaaaaggactttcttttttgccgggngctttaatnanttaataaaaatttttttaaaagttaaaaaaaatngtggnaaanaaaacttttttttttttntttttaaaaannaggnttnnannaaacnttttntntttngccgnannaaancccccccccccggtttncnggggaaanaaaaaaaatnngggcccnccnttttntttttttcnggggggggggggggggggggntttttttttttgngaaaagngntgttttttnnccccccccccccctctttttaananaaaaaaattaattgggggnnntttttttttttnnattnnnnacccccncnaattnggtnttttttanntnaananccccccnggccnttnntnatanatgccccccnccccccc

SEQ ID NO: 2132 - DNA, 255 bp, Homo sapiens
  misc_feature 46, 69, 208: n = A,T,C or G
gaggtggttacattcgtcgaaggacaccagctgcggaatttgcggntttggcagattgaaatcatggcnggtccagaaagtgatgcgcaataccagttcactggtattaaaaaatatttcaactcttatactctcacaggtagaatgaactgtgtacagaatccattctcattctttacttgctacattatgaccatgaggagggcanagtagaggtgaactctctgtatacttgctgaaagtcttcttgtacct

SEQ ID NO: 2133 - DNA, 623 bp, Homo sapiens
  misc_feature 299, 337, 356, 375, 388, 393, 394, 400, 410, 411, 412, 413,414, 422, 430, 444, 446, 467, 468, 480, 484, 495, 496, 526,529, 532, 534, 535, 536, 549, 550, 554, 556, 557, 566, 579,582, 585, 588, 595, 596, 604, 605, 606, 611: n = A,T,C or G
gcgaattggagctccccgcggtggcggccgcccgggcaggtactttcagtaagagatggggtttcactatgttggtcactatggtcttgatctcttgatctcgtgatctacccaccttgggttcccaaaatgttgggattacaggtgtgagccactgcaccaggcaaactgcgatcttttagtggtgcctcttctctcttttgacttaaggatgttgtcccttaaggaaacctggaggctactactgtgatacactacttgagagatggattgttgctctttcttctacagtcttacanggagtagattataaagacggaagatgttaccatttgcnttaattgttggaagctganagcttttaatttttggttncaactgtttttgnggganntcccgnaaaaattttnnnnnaatttttntttttttngggaaaagggggcncntttttaaaaacaggggggggnngaaaaaatttgngggnggggggccccnnccaaaaaaaaaaaaaaaagggggttttttnttnccngnnnccggggggggggnngggncnntttttaaancctttttttttgnttnccnccnaaaaaannaacccctnnnggggngttttttttttt

SEQ ID NO: 2134 - DNA, 464 bp, Homo sapiens
  misc_feature 161, 208, 223, 364, 409, 425, 445, 447, 463: n = A,T,C or G
ccgggcaggtacaagagatagaaagaccagtccttgctgaaagacaagtctgaatgctccactttttcaattctctctccattcttcagtaagtcaacttcaatgtcggatggatgaaacccagacacatagcaattcaggaaatttgactttccattctntgctggatgacgtgagtaaacctgaatctttggagtacaggacaatnaagactactcctatntgcggaacaactagctttctatttagttctagaatgttgaaactgaccgattggctgacataaaagtcacattttacaaaaaagtgtctccaaatgctttgactaggggaaaaaccccttttcaattagagggagccattntgcaacaaatttcccacaaataattcgcttattccaaggggcaanggcaccatttgatatngggaaatttttttgtttttngngccaaaatttaagggna

SEQ ID NO: 2135 - DNA, 409 bp, Homo sapiens
cgaattggagctccccgcggtggcggccgaggtaccccaagactcagcactagtctgatgacctgctaattcactgacagcatagggctgtctgttgtttttgcgcaagttggtgtgaacaaagttcacaatatctggtcgaataggagccttgaatacagcaggcaaagtgacatttttgccagatgactcccccttttcggagtaccttgttcaaaaaacaccgctgagtcacttccaggtgctgttaagttttctttagtgaagatgtctataccagagggagcatagttccagatgatttcctcagcggcaatgtagtagtgtctaacatgcttcccacggatattatccttttgatgaagactttgttacactcctggacctggaaaaaggcttgcaaaccggc

SEQ ID NO: 2136 - DNA, 330 bp, Homo sapiens
  misc_feature 2, 182, 230, 236, 246, 247, 311: n = A,T,C or G
tngggcgaattggagctccccgcggtggcggccgcccgggcaggtacctgaatgtagaaacaatgaggatggacctggtttaataatggaagaacagcacaagtgttcttcgaagagccttgaacataaaacacagacacctcctgtggaggagaatgtaactcaaaaaattagtgcctggnaaatttgggctgatgagctttctggatcctaagccacctaccgaattnttgganggttggctgnnggtgtggggaaacacaagtcttttccaatttttacaaaacgaaccaattgaccccagggacttntttggtttattgggtgggg

SEQ ID NO: 2137 - DNA, 195 bp, Homo sapiens
  misc_feature 16, 17, 20, 22, 26, 30, 56, 79, 89, 96, 119, 126, 172: n = A,T,C or G
ccgcggtggcggccgnngtncncggngccngaagaggaagatttctgaagagtgcngctgtctgaaccgagccctgccnaacagctgangaattgnactgcaaccatgactgagaacantaagaantccttggagagcaccctacggcaactaaaatgccatttcaccttgnaacttgatggaggggagaaaact

SEQ ID NO: 2138 - DNA, 130 bp, Homo sapiens
  misc_feature 37, 39, 52, 58, 59, 61, 62, 76, 78, 94, 97, 101, 109, 112,116, 129: n = A,T,C or G
cttagggcgaattggagctccccgcggtggcggccgncnggccaggtaccanatgaanngnnaagacaaggccatncnccactttatagagggngtnaaantaaaccanagntccngggagaaagaaang

SEQ ID NO: 2139 - DNA, 547 bp, Homo sapiens
  misc_feature 39, 73, 77, 143, 214, 266, 272, 275, 320, 330, 344, 366,374, 382, 384, 399, 408, 411, 417, 430, 436, 440, 462, 497,500: n = A,T,C or G
ccgggcaggtacttttttttttttttttttttttgtttnatcatatttaggttatttattaatgaaaggtatntganattttcaggaatacaaattttgcaccctgatgacctcaaatgcgtgcaacaagatgtttaatacangaaaataacacaaaaactgttgttacagtggttagaatttttaactttaaaaaaccatgaatttgtattgntttaattgcacaataaaataatgttgatatatacttaagcttaaattaattncaacanggnaaacattttccaacccagaggtgtggcctgatgttggggttcaantctggacttntattttttgggtancacactcaacttttgaattgtnttaagggnttatttcnanccattctaactctangaaaaaatnttnaaattncgtttcccaaagncattanccgnggaattttttgttgattttctncaagaaaaaatttttcgggaggttaaaaggaaggngtntaatatcacttaattatcccaacattttctaaagggggggggaaaac

SEQ ID NO: 2140 - DNA, 398 bp, Homo sapiens
  misc_feature 110: n = A,T,C or G
gcgaattggagctccccgcggtggcggccgaggtaccttatcagctaattgggctcctttgaaatgctgaggatctgcttacgcaggttaactctttgaggaagggggtngggtaagtagcccttaatgtcttgtaaatcaaggggccagatggcgttcgtcaggctttcccagctaagggagagtctactcatatgggaaacaagcctaggtaattaaggagacaaaaagggaaaatttaaaaatagggttagtaaaaacaaggttaaaatagggttagtaaaaaaacaaggtcaggcattacaaaaggattctcctgtctcagcctccactgggattacaggctcgcaccaccaagcccagttaacttttgtatttttagtacctgcccgggcggc

SEQ ID NO: 2141 - DNA, 146 bp, Homo sapiens
  misc_feature 61, 63: n = A,T,C or G
gggcgaattggagctccccgcggtggcggccgaggtacttttttttttttttttttttttntnagcaagcacgtgcactttattgaatgacactgtaaacaggtgtgtgggtataaactgctgtatctaggggcaggaccaagggg

SEQ ID NO: 2142 - DNA, 529 bp, Homo sapiens
tggagctccccgcggtggcggccgcccgggcaggtactcttacccttgtccctctcctaaagggagcacaaggaaactgaagagactgaaaaagaagagagtttgtagctgcaaaagaatagggatagcaaggaaacccagaactgcattcccctaagtggggccatcccatgtgattgaattgtccatagcttgcctatggtgagaaatgtgcatgctccgtgagctggtctcttgaaacaggacttatgcttcctctatattctggttaaattttccaaacacataagttcactgagcacagatttcttatccagagacaagtagaatctaaccgcagactgttggcagagtttccaggcacttagccatgttcccttcctgactcaaatccccaaaggccttcactctcactgagaatcacactactgtcccatagataaggcaggcattgaagcacctgtcgtgatcctctaggggggagaatgaaaggttattttcctgcattgcatcatcatagcttttaata

SEQ ID NO: 2143 - DNA, 157 bp, Homo sapiens
  misc_feature 33, 36, 39, 40, 41, 60, 63, 103, 111, 116: n = A,T,C or G
aggcgaattggagctccccgcggtggcggccgnggngcnnngctctacagaatagaggcnatnctttagcttaagcctgtctgctgaccagagaatggaattntgcgtggnctcanggaacaaaaggaaactaggcagggaaggggaagaaaagtgc

SEQ ID NO: 2144 - DNA, 528 bp, Homo sapiens
  misc_feature 4, 32, 35, 40, 106, 112, 113, 116, 149, 182, 195, 199, 237,292, 330, 332, 339, 372, 374, 396, 440, 443, 444, 445, 466,478, 489, 493, 499, 504, 507, 509, 513, 515, 521: n = A,T,C or G
ggcnaattggagctccccgcggtggcggccgnggnacttnttttttttttttttttttttttttataactgataattctttattactaaaggtttatttacatagngtttanngcntaataaaaaataaattacaatacaaaagtgctntttaggaaggagacactaaacaacaggcccatnttaccccttgctntttngccaagacataagctacaaattttgccggaaaaactgnccatacatttttaactacttcttcattattcttatggaccatcatccaggacatntgtttgaagaaatatccagttataatattttcaaaggntngaattgngaagaaaaaaatataaaatgtgattaaaggatntntagccttcagatgtaatttacngggtttaaaaattggcccctttaaaacttttgcttttttagacnagnnntaaaaaggcacaatggagacnccatattgttantggattttcanaacngggggntcttntgngnaatncntaccanttttttt

SEQ ID NO: 2145 - DNA, 438 bp, Homo sapiens
  misc_feature 7, 11, 14, 18, 39, 43, 44, 77, 89, 99, 175, 179, 207, 210,212, 222, 239, 262, 291, 359, 377, 419, 424: n = A,T,C or G
aggcacnagangantttnctttttttttttttttttttnctgnnatacaaagagcagatttttattgaacttgggcnataactatattnccatacaatntaaatattcatgaatagtttcccaagtctggagcgaccacatagggagaaaatgtaaatgtctcaatttttggttncacnaaaatgttttttttatatcaaaatttgnttntnaaagcttggnggattagcttaaaaaanaaaaaaaagtttccttgaaatcngggaaacaagacattttaaatgaatcaancaaaatttcaaattaaaaaaattatgaaaatattatcctcattagtttcatttagtgcccatggaaanttaattattctctctgcnttgatctttggggggacaagtttcaatggaaagcctgtcagnttaanttcattaaaagttt

SEQ ID NO: 2146 - DNA, 660 bp, Homo sapiens
  misc_feature 422, 435, 444, 445, 449, 516, 576, 584, 589, 613, 620, 635,636: n = A,T,C or G
gctccccgcggtggcggccgaggtacaaaggaataaaaatgttacaacctaaaaaaacaaaacaccgtaaaacatttagagtaaaacatgacaaacgtgctgcttttagaggaaaagaagtttcatttgaagaatttggacttcaagctacaacatctcaatgaataagtgcaagacaaattgaatcatgcaaggattgccgattacaagaagaatgggtcgtgaaggacacgttaacataagaatcttccctcatctatctcttactaaaaagcctattggagttagaatgggatctggtaaaggttcagctgaaaaatgagtagctgttgttaaagaaaatacagttatgtttgaagttggtggagttaaagaagaaatagcttcgtgatgcacttcgtttaggtggacacaaactaccntgttaaatggaangaataattnngcangggaggaataatggaattcaaagatttaaagaaaaaaactactgagcattttagaaccgttattaanttgaatattaaatcagagctttttaccccttcgttttagaaattaaacctcaaccaactnggatcatncctcnaaaattcaaacaaggttagaaaanggttttncccggaatttttacnncaatttagccacccaaaaaaaaaa

SEQ ID NO: 2147 - DNA, 286 bp, Homo sapiens
  misc_feature 26, 33, 36, 40, 77, 113, 156, 164, 175, 179, 191, 204, 212,215, 216, 235, 239, 242, 261, 263, 274: n = A,T,C or G
tccccgcggggcggccgaggtacatntgcctgnctncctnctgtccttcctttttattataaggatacatttatagnaccccatagaaggaaaagataaatttcataggctgntaaaagaggctaggcctaagttataatgcctcctcctcacagnccaatttncccaaggggcnttancaccagagcagnttttctagcttgnggacaatnccnncaggcttgagtgataatgncccngtngcggtagctctccacttgntnaaggaccaaanacaccttagcag

SEQ ID NO: 2148 - DNA, 416 bp, Homo sapiens
  misc_feature 225: n = A,T,C or G
gggcgaattggagctccccgcggtggcggccgcccgggcaggtacttttttttttttttttttttttgactttatatataatactttattttatacaattcagtatatcatgttaacatatttcacttttaattttatgatatgtgtgacatatttttaattttatggattcaattatactatcataatttttttaaagtttgtatctttcattaataaggaggntccttattaatggattttttttcctgtagcttctgagaacacatttttagatacccggcttctagttatacctgaagctccacagtgtagacatgttttggccaaccttgttttatcggtgtatgaaatttgtgctaataggatggatccaattgtcattacattagaaaactaaatgggaaacatttctt

SEQ ID NO: 2149 - DNA, 451 bp, Homo sapiens
  misc_feature 322, 352, 408, 430, 439: n = A,T,C or G
tcctatagggcgaattggagctccccgcggtggcggccgcccgggcaggtacttttttttttttttttttttttgactttatatataatactttattttatacaattcagtatatcatgttaacatatttcacttttaattttatgatatgtgtgacatatttttaattttatggattcaattatactatcataatttttttaaagtttgtatctttcattaataaggaggttccttattaatggattttttttcctgtagcttctgagaacacatttttagatacccggcttctagttatacctgaagctccacagtgtanacatgttttggccaaccttgttttatcggngtatgaaatttgtgctaataggatggatccaattgtcattacattagaaactaatngggaacatttttttttacattnggggcaacntaccaaaatttt

SEQ ID NO: 2150 - DNA, 568 bp, Homo sapiens
  misc_feature 41: n = A,T,C or G
ccgggcaggtacacgggcaaaggggcttgagaaggcccggnggcgaagccgaagagaagcaactgtgccccggagaagagaagctcgcccattccagactgggaaccagctttcagtgaagatggcagggccagaactgttgctcgactccaacatccgcctctgggtggtcttacccatcgttatcatcactttcttcgtaggcatgatccgccactacgtgtccatcctgctgcagagcgacaagaagctcacccaggaacaagtatctgacagtcaagtcctaattcgaagcagagtcctcagggaaaatggaaaatacattcccaaacagtctttcttgacacgaaaatattatttcaacaacccagaggatggatttttcaaaaaaactaaacggaaggtagtgccaccttctcctatgactgatcctactatgttgacagacatgatgaaagggaatgtaacaaatgtcctccctatgattcttattggtggatggatcaacatgacattctcaggctttgtcacaaccaaggtccatttccactgacccttcgttttaagc

SEQ ID NO: 2151 - DNA, 273 bp, Homo sapiens
  misc_feature 19, 21, 25, 27, 29, 32, 37, 39, 40, 42, 45, 50, 73, 74, 95,104, 126, 139, 196, 205, 213, 232, 235: n = A,T,C or G
ccgggcaggtacgcggggnantgcnananacncaaancnngntantacantgcatcaaacatgttcaagattnnccaattgacgggattggattnaaagatatnccaccacttttagcaagatggngaagtgctaaatnacacaattaatcaactggctgagttagctaaagatgcatatgttattataggtccanacgcaagangtttcttncttgggacacctactgcanctnttttaaaaaaaccttttattatggtaagaaaacctaaa

SEQ ID NO: 2152 - DNA, 204 bp, Homo sapiens
  misc_feature 41, 42: n = A,T,C or G
aggtacagcctctcggcccggctaaacatcatcgtcttggnnggccattaccctaccaactaactaatgttccgcacccccatttttaagtgaagctgtgaagctcctttctattactcatcatgcgataaataactatatccggtattagctattgtttccaatagttatcccagtcttaaaggtaggttaggtacctgcccg

SEQ ID NO: 2153 - DNA, 619 bp, Homo sapiens
  misc_feature 43: n = A,T,C or G
aggtacacttctagcacctagcagagagaggcttcactacatnatgcttcctgacatctctccctttgaagagcagtcagactcctgctttgctcttcagacttaatttgggggtttaacaggtgaggttgctgggggaactcttttacaacatctctctgaaagaatccgggctgccagtttcatttggtttgggtgtcagtagcatgatggaaagacaaaaaaacacaacttgacatctgcagaaatgggttcaaattttacctgcaactcaccaattctgtggccttggttcagcaattaaactccctaaaattcagttttttctttgtaaaatggggttatgaacagtaccaaatgaagtgtgaagacaaggccatccaccactttatagagggtgtaaaaataaaccagaaatcaagggagaaagaaaagatgaaagacaaactgcaaaaaattgccaaaatgcgactttctaaaaatggagcagattctgaggctttgcatgtcttggcattccttcaggagctgaatgaaaaaatgcaacaagcagatgaagactctgagaggggtttggagtctggaagcctcatcccttcagcatcaagctggaatgggg

SEQ ID NO: 2154 - DNA, 138 bp, Homo sapiens
  misc_feature 2, 54, 60, 77, 78, 80, 82, 90, 101, 103, 115: n = A,T,C or G
gncgaattggagctccccgcggtggcggccgcccggccaggtactgtgcacgtnggttanaggctgcgtggcagganngngntcagattntcccctgcacngnaattgggctttnagggggaaatggtggggccatct

SEQ ID NO: 2155 - DNA, 226 bp, Homo sapiens
  misc_feature 38, 175, 176, 177, 203, 206: n = A,T,C or G
gagctccccgccgtggcggccgcccgggcaaggtacangtgtgtgtgggtgaaatggagatttggaattgaactctctgcctgtaaatgttccccaaataattgttgtgtgtatgataccgtgtataataaaagtattcttgttagaatctgaaaaaaaaaaaatgtaaaaaaannntaaaataaaggttccttggcccgctntanaactagttggatcccccggg

SEQ ID NO: 2156 - DNA, 496 bp, Homo sapiens
  misc_feature 15, 304, 365, 370, 409, 411, 416, 423, 442, 447, 453, 469,472, 478, 483: n = A,T,C or G
cggccgcccgggcanggtacgcggggacacaagacatcatcttgaaggaaggatggctttggccagaccaagaccgagacttggagacctgattgagatttctcgctttggctatgcacactgggccatctacgtgggagatggctatgtggtccatctggctccggcaagtcactggtgcagtcacgacagtaggtgtggcagcaggcctgctggctgccgcaagccttgtggggatcctgctggccagaagcaagcgggaaaggcaataaatccaagaaattgtcccaacaaccaccaattnttacggaggaatattatttagccagcaaggagtggagttttggtttacttgattttactgnttttntggttcatggaatctttatttttaattggagttaaaaancncaggnaaatgtnttttggaaattgcaccttnttatngaattntttttaaagacacaanttngggctnttccnaaaaaaaaaaaaa

SEQ ID NO: 2157 - DNA, 268 bp, Homo sapiens
ccgggcaggtaccatttggagtttaattgcttcgctccgatgaatgaattcctggccaatgcaccaaaatgatacggctccgatgactggaggaacaccagggtccttggtctcgcaccagtttagataaaatgacacagacacacatgtaatggttttaaggagtggagagtttattaggcaagaaggaaggaagaagaaaacagctcccccatacagagacagagggaggggggattagaacaaacagaaacttccccgcgtacct

SEQ ID NO: 2158 - DNA, 531 bp, Homo sapiens
  misc_feature 127, 216, 267, 286, 296, 321, 325, 338, 369, 379, 380, 386,389, 409, 455, 458, 463, 465, 484, 500, 506: n = A,T,C or G
ccgggcaggtacagcgtcatataggctttgcctttaatgatctcttacggttagaaaacacaataaaaacaaactgttcggctactggacaggttgtatattaccagatcatcactagccagatgtnacgttggcacatttgaagtcctttattgaaattcataaataaaagaattgttctttctttgtggttttaataagagttcaaggaattgntcagagtcttgtaaaatgttattttaataatcccttttaaattttttatcntgttgctgtttaccctctntgaaatatgnattttattttagatttgcctaatgnccanttcatttcaaggnaaaattgcccaaagaggggtatttccccttngggggaaaanngggggnccntctttaccaagtggtaaaanttttttttccctcccttttaaccctttttgctttaatcattccaantgnggcangnaaatttttttcctttaatncccctttggttgaagnggcaangttttgtttggaaccttggaagttt

SEQ ID NO: 2159 - DNA, 374 bp, Homo sapiens
tagggcgaattggagctccccgcggtggcggccgcccgggcaggtacccatcctacccggcctgggctgacccatggggaaggctggctaatttcagtgcttctgcttggttgttcagggccatttcaggtttgggtgttttctggggatgttaacatgggattcaggctcaactcacaagaaacttttccatctcatgatggatgctgttgggcatgtccaatgtatgacttcatgagttacacagatgctaattcgtaggggcacttggaatcacatggttgttttgtgtcccatggtcaagcattctatcttatcagggcctacagtaacatgccaaaagttgcttccaacatatttctctgctttggatg

SEQ ID NO: 2160 - DNA, 294 bp, Homo sapiens
  misc_feature 272: n = A,T,C or G
agctccccgcggtggcggccgcccgggcaggtacatccccagtcgtggccctctggacaagtggcgggccctgcactcatgagggcttccaatgtgctgcccccctcttaatactcattgtcaatttgagaaaaaggacatatgagtttttgcatttattaatgaaacttcctttgaaaaactgctttgaattatgatctctgattcattgtccattttactaccaaatattaactaaggccttattaatttttatataaattatatcttgncctaaaaaaaaaaaaaaaaaaa

SEQ ID NO: 2161 - DNA, 189 bp, Homo sapiens
  misc_feature 152, 156, 159, 163, 166, 168, 171, 180, 182, 184, 185, 189: n = A,T,C or G
attggagctccccgcggtggcggccgcccgggcaggtacccacgtaaagacgttaggtcaaggtgtagcccatgaggtggcaagaaatgggctacattttctaccccagaaaactacgatagcccttatgaaacttaagggtcgttgaaaanaaangantcanaantntanaaaaaaatnangnncctn

SEQ ID NO: 2162 - DNA, 332 bp, Homo sapiens
  misc_feature 1, 6, 31, 74, 107, 109, 119, 125, 138, 147, 173, 176, 186,193, 199, 217, 237, 240, 241, 247, 250, 261, 265, 269, 270,275, 281, 289, 314, 320, 321, 323, 325: n = A,T,C or G
nccggncaggtacgcggggcacagcggcttncttgatccttgccacccgcgactgaacaccgacagcagcatgnctcaccatgaagttgctgatggtcctaatgctngnggtccctttnccaacnactgtttacgcanggcttctgncatgctccctttatttggagaattgngantttttcaagnacaattncaattncaccaagttgttctaatnacctgaaatatccaacaganacnntttttnaangaagttttcantaanaccnnacaantggccnactttacnaaaattggccattattattgaaatntgtaanngnanattgttt

SEQ ID NO: 2163 - DNA, 520 bp, Homo sapiens
  misc_feature 455, 473, 488, 495, 510: n = A,T,C or G
gactacttagggcgaattggagctccccgcggtggcggccgaggtacgggacaacacaaattactgcaactccaacaactatggcaataacaatcacagcaatgacccaaacatccaaactgtcaagtattccttcctcaggtttaggatatcctggataatttgagactggaggcttgtaagtaggcctaggacctgaggcactggacgctggagattttgtagtggaagaagtcgacactttaagacactttggaactgggggatcccaagtacttgtggaaggtggacaccatcacatccagggccttctccagagggcacgccatgacagcagtcaggatcaaaccaagaaagaagaagcgcttaggagagaggggttgtagagagggggaaagaattcccgcgtaccttgccccgggcggcccgctctagaactaggtgggattcccccnggcttgccgggaattccnattttcaaagctttntcggatnacccggcgacccttncaaggggggg

SEQ ID NO: 2164 - DNA, 500 bp, Homo sapiens
  misc_feature 23, 76, 103, 105, 167, 195, 287, 310, 314, 326, 346, 385,411, 419, 426, 432, 436, 449, 450, 463, 479, 480, 485, 486,488, 489: n = A,T,C or G
actatagggcgaattggagctcnccgcggtggcggccgaggtacttttttttttttttttttttttgcgagatggngtcttgctctgttgcccaagctggagngnaggggcgcaatcttggctcactgcaacctcttccttccaggttcacgccattctcctgcctnagcctcccaagtagctgggactacaggngccagccaccacgcctggctaattttttgtatttttagtagagacgggatttcactgtgttagccaggatggtctcaaactccagacctggngatccgcccacctggggctcccnaagngctgggattacnggcatgagccactgggcccnggcaaaaaaacaactttttaaaaaatggaccctggcccngggcggggccgtttttaaaaactaangggggatnccccccnggcctngcangggaatttccaannatcaaagcttttntttggataacccgccnnccccnntnnggggggggggg

SEQ ID NO: 2165 - DNA, 499 bp, Homo sapiens
  misc_feature 96, 107, 114, 179, 219, 221, 256, 260, 266, 271, 285, 298,325, 327, 348, 360, 364, 420, 422, 435, 494, 495: n = A,T,C or G
aggtacaagatagtcatctcagtaaaaggtctattatctaacttgccaaacttgtttactgagagccctaaggaactaaaactgccataatgccgngcacagcttgnaaagcanttagagtaagcaagattagtttttcctcccttccagttcctcagcaggcctggctgaaggcccangagggaaggaaatataagaaccaacaataaaaatagcaantngcaataaggaagaatgccatccccatggtaggcancacncaatanatttntggaaacccacctnttcccgggatcanggcctttccatttgctcaccggatgcntnaccgcctggggccgggcccgncttctaagaacntagntgggatccccccggggcttggcaagggaaaatttctaataattcaaagcctttaantnggaataccccgtncggaaccccttccgagggggggggggggcccccgggttacccccaaggctttttttggnnttcc

SEQ ID NO: 2166 - DNA, 132 bp, Homo sapiens
  misc_feature 17, 67, 98, 112: n = A,T,C or G
ccgggcaggtacgcggngacgaagttccggtccaggtctctgacttcgggcttgttcgctggtggcngtcggagccgagccggactggtcaggatgancacggacgtgcagntcgccatcttcgacaacatg

SEQ ID NO: 2167 - DNA, 408 bp, Homo sapiens
  misc_feature 31, 130, 141, 148, 149, 169, 172, 178, 181, 195, 229, 249,273, 274, 286, 297, 304, 314, 340, 362, 395: n = A,T,C or G
aggtactcctgggcaacagcgagactccgtntcaaaaaaaaaaaaaaaaaaagaaaccatttattttaaaaatgattagattgctatgcctcaactcatagaagatgaacccttcaagaaaacgtgaagnaggaaccgggngggccannaaatgaaaacaggcaagtanagntattanttnggaaaaacattttntcaacaccaaatgttaaaaagactttccttttgntaaaacctgggattatgagnaagaactttttcaattggggttannttctagggatanactcaagtatntttgcanccaccttaanaaaacttgccattagaaaaaacctgnaaaaggtttattgtttcccagnataacttttccgttgttttacccaaattttttntttaagaactttg

SEQ ID NO: 2168 - DNA, 483 bp, Homo sapiens
  misc_feature 226, 231, 236, 240, 254, 284, 288, 298, 341, 387, 459, 481: n = A,T,C or G
aggtactccagggcttcattcatatttccttccaatttgtagacgaacccaaggaggctcaagctttccagatctaatgcctttctccgaagtttccttaaaaccaatttcttcaaagaatttgatacttttatccctttgttaatgatagccctgttctatttttatagctttttaaataatggataatttgcattgactgtcagatttcttttgaaattcctgnaaacncgacncatnagttggaaaattgntatgtctctgcattgttttcttctaccacntggntttcatcgcnattaaacaattttttttgaaaaaatttctctttcaagcctttntctgtggattggcctgccttctaatattaccaatttccttggccangggttcttaggatgtagcccaccctcaaaaatgtggggccttttttttttcccacctggcaagaattcaaanaatcggaaaaataatggggccntg

SEQ ID NO: 2169 - DNA, 541 bp, Homo sapiens
  misc_feature 14, 36, 37, 50, 60, 91, 108, 138, 150, 161, 177, 181, 187,192, 216, 235, 244, 252, 258, 263, 268, 274, 276, 280, 289,297, 299, 305, 317, 326, 329, 347, 354, 368, 371, 375, 387,391, 392, 406, 407, 412, 422, 429, 430, 437, 445, 452: n = A,T,C or G
  misc_feature 453, 455, 457, 461, 462, 474, 475, 480, 489, 490, 507, 513,514, 532: n = A,T,C or G
cgaggtacattttnaaagagttgttttttggccggnnttcagtggctcangcctgaaatnccagcactttgggaggccgaggtgggcggancacgagggctggagatngagaccatcctggctaacaaaagaagaaancccgtctctacnaaaaatacaanaaaattagccaggcgngggnggctgngcacnctagtaggccccaggcctactttnggcaggcctgagtgcaggnagtaatggnccgcgcanccctgncaagngaaantaaggntntgcnggtcggagncccaaagnantgcggnccccttgccacncccaaggcnctngggccaaaccagaaggcnaaagganctccctattcctcnaanaacncaagatataccncaanngcgagggaggtttnnggttncttacctcanttgggcnncaaattnataagggntcaatannancnaggnntaaccaataaannacccncacaggggnntcctttaaccaaacccntaaaanncacctggggtcaagtccnaaataaaaa

SEQ ID NO: 2170 - DNA, 266 bp, Homo sapiens
  misc_feature 71, 95, 103, 114, 123, 148, 175, 185, 193, 228, 237, 239: n = A,T,C or G
gggcgaattggagctccccgcggtggcggccgcccggccaggtacctgctgggagaagtttctgaacaacnatatctgggatacacagaaaagtntggaagangagaaagaaangcctaaatnggaatgagatccaagactaaacgcnagagctagattgagccgcatttgaaanctccttcccnttggggcnttggcagagggggagaaaaggcttcaaaggaactnggtggcatnancacccccctcccccaatgaggacacct

SEQ ID NO: 2171 - DNA, 645 bp, Homo sapiens
  misc_feature 174, 213, 336, 414, 419, 424, 489, 496, 509, 511, 512, 519,524, 547, 548, 556, 563, 566, 580, 589, 592, 623, 626, 628: n = A,T,C or G
gggcgaattggagctccccgcggtggcggccgcccgggcaggtactcactgagctcaagacacacttggtgcttgcagtgctgatacctgctctttgccggcccccgcgtaccatcccatgtggaatctgtgagtgtcctcttaagtagcgtgggctagccaatctgctcgttnatgggtgtatttgtaaactccgaattccatatgtaatanggatgcaagtctaagcgtttcatgtggacataaatgtatctaaataaaactttccctagcactgtggctgacctcacccttacttttatactttagtatgaaactgatgagaactttggtagngagtattttttttatatatatacatatatatgtatctatctatatatatatctcaagcatctttcaggtctttgtgtngtggnttttnttaaagcccctgttgtaaaaaaaattactattgtgggatgggcagtctctcacatcacagatgtngaaaagnataatttttatantnngtatttncaaanaaaataaaatctggggaaaggtnncattcctntactggnggnccaaaaaatcaatnggttttgtntgnccaaaaaaaaatattaaaattaaaaatatanttntnttgaacttaaaaaaaaa

SEQ ID NO: 2172 - DNA, 452 bp, Homo sapiens
  misc_feature 51, 63, 72, 78, 81, 142, 184, 185, 196, 197, 201, 219, 221,222, 225, 234, 259, 271, 288, 307, 344, 375, 383, 401, 409,416, 426, 427, 438, 443: n = A,T,C or G
agggtacatttttaaagagttgttttttggccgggcgcagtggctcatgcntgtaatcccagnactttgggnggccgnggngggcggatcacgaggtctggagtttgagaccatcctggctaacacagtgaaatcccgtctntactaaaaatacaaaaaaatttagccaggcgtggtgggctgnnaaccagtagtnncagntacttgggaggctgaggnannganaatgggccntgaacctggaaggaagaggttgcantgagccaaaaantgcgccccttgcaactncagccttgggcaacaagancaagactcccatctcaagaaaaaaaaaacaaataagnaaaagtaccttgcccgggcggcccgctctanaaactagnggatccccccggggctgnagggaaantctatancaaagcttanngaattccgccnacctnggagggggg

SEQ ID NO: 2173 - DNA, 420 bp, Homo sapiens
gggcgaattggagctccccgcggtggcggccgaggtactatcccagccccccaggttcgcctaatagtcttggctacttccctacagctgctaatcttagcggtgtccctccacagcctggcacggtggtcagaatgcagggcctggcctacaatactggagttaaggaaattcttaacttcttccaaggttaccagtatgcaaccgaggatggacttatacacacaaatgaccaggccaggactctacccaaagaatgggtttgtatttaagggccccagcagttagaacatcctcagaaaagaagtgtttgaaagatgtatggtgatcttgaaacctccagacacaagaaaacttctagcaaattcaggggaagtttgtctacactcaggctgcagtattttcagcaaacttgattgg

SEQ ID NO: 2174 - DNA, 463 bp, Homo sapiens
ccgcggtggcggccgaggtacgcggggactcgcgtcggttggcgactcccggacgtaggtagtttgttgggccgggttctgaggccttgcttctctttacttttccactctaggccacgatgccgcagtacgcgggggggtgaagaaggggccggccttcaagcaacagcgacgcaagatggcagccaccacgggctcgggagtaaaagtccctcgcaatttccgactgttggaagaactcgaagaaggccagaaaggagtaggagatggcacagttagctggggtctagaagatgacgaagacatgacacttacaagatggacagggatgataattgggcctccaagaacaatttatgaaaaccgaatatacagccttaaaatagaatgtgggacctaaatacccagaagcacccccctttgtaagatttgtaacaaaaattaatatgaatggagtaaatag

SEQ ID NO: 2175 - DNA, 295 bp, Homo sapiens
  misc_feature 81: n = A,T,C or G
ccgcggtggcggccgaggtaccttaaagtcctcctggctctgaagcttcataagatgcgtgaagaaggtgaagaggaaggngaaggagtcgagcggccgcccgggcaggtacttttttttttttttttttttttttttggggtttatcatatttaggttatttattaatgaaaatatatgacattttcaggaatacaaattttgcaccctgtgacctcaaatgcgtgcaacaagatgtttaatacagaaaataacacaaaaactgttgttacaggggttagaatttttaacttta

SEQ ID NO: 2176 - DNA, 297 bp, Homo sapiens
ccgcggtggcggccgaggtacttcttacagtcttcaggaaattcattaaatcagtgcctccagttcctttggcttccagttttgaagggtcttcagaggtcttattctcctttggctgctggcttgcaggaatcaggatgtactgttcctgttggccgagtggagactggtgttctcaaacccggtatggtggtcacctttgctccagtcaacgttacaacggaagtaaaatctgtcgaaatgcaccatgaagctttgagtgaagctcttcctggggacaatgtgggcttcaatgtc

SEQ ID NO: 2177 - DNA, 499 bp, Homo sapiens
  misc_feature 171, 172, 175, 179, 182, 186, 192, 194, 197, 202, 205, 207,213, 222, 225, 231, 232, 233, 240, 242, 243, 247, 253, 254,270, 274, 289, 310, 323, 337, 354, 358, 375, 378, 379, 383,386, 394, 395, 400, 401, 408, 413, 419, 420, 432, 438: n = A,T,C or G
  misc_feature 440, 443, 448, 452, 459, 469, 470, 474, 480, 482, 488: n = A,T,C or G
ccgcggtggcggccgcccgggcaggtacttgtagagtggtgctgctttaattcataaatcacaaataaaagccaattagctctataactaaaaaaaaaaaaaaaaaaaaaaaaaaaaaaaaaaaaaaaaaaaaaaaggaaaaaaaaaaaaaaaaaaaaaaaaaggtccggnncantcgnggnggcntaaccncnctnggggnggntntagggntggaaaacnctnaaaatnnntgttttnanngggntaaagnnttgaaattttgccagntttntaaagtcattaaagncaaaagtttttttaaggggtnttttttttttaanaaaacccattaacnttccattgggcctttanaaanggcccccgggggttttnggnnaaanttntttttttnnccccnnttttttntgaanaaaaannggggcccccaantttttngntgnccccncccncccccanttgggggggnngggngggganancccccnttttttttttt

SEQ ID NO: 2178 - DNA, 359 bp, Homo sapiens
  misc_feature 135, 222, 244, 265, 276, 290, 292, 299, 300: n = A,T,C or G
gggcgaattggagctccccgcggtggcggccgcccgggcaggtacttttttttttttttttttttttttttttgccaattgttatttagtttttatttcataatcataaacttaactctgcaatccagctaggcntgggagggaacaaggaaaacatggaacccaaagggaactgcagcgagagcacaaagattctaggatactgcgagcaaatggggtggnggggtgctctcctgagctacanaaggaatgatctggtggcaanaaattaaccantgcttttattatcnangcacttnncactatgcactttttctgaaatatttttgtaacacttttttgtatttttgccatttgaa

SEQ ID NO: 2179 - DNA, 370 bp, Homo sapiens
  misc_feature 83, 170, 192, 199, 214, 232, 297, 314, 319, 344, 352: n = A,T,C or G
ccgggcaggtacaaatgatgaaacggaaagacaaaggaaattttccatttttgaagaaaaagtgttcagtgttaatggagccnggggaaaccacatggactttggtcagctctatcagttcttaaacaccaaaggatgtggggatgttttccagatgttctttggtgtanaaggacaatgacatcaagagtngttgaangtatcttgccactgntggccttttgattttttntcccactttttcttgaaagattaagtaattttattttagttccattctagaatgttggggagtgnggcacaagaaaaaatantatanctgaaatgcatctgttaaaaatgtnatgattgnaagcataactgagtttca

SEQ ID NO: 2180 - DNA, 422 bp, Homo sapiens
tagggcgaattggagctccccgcggtggcggccgagtagcatgccaggaaaggaagagactgggatggttttttatctgtcgctttcttaaatcaagggccgccgggccggagatggatggagggaccggggatttgggaactcgaaaacgagctgagggaagggagcctgtggaaatagactggagtctgggtagtgtcgtttcctagagaatggtctcgaagtaacttctcggtaaagtcttcacggaatttccagaccacgcttgcccactgggaggcttttaggacccgagacgtgtgcaggcttttccagccaaaatgaagtttaatccctttgtgacttccgaccgaagcaagaatcgcaaaaggcatttcaatgcaccttcccacattcgaaggaagattatgtcttcccctctt

SEQ ID NO: 2181 - DNA, 230 bp, Homo sapiens
  misc_feature 15, 122, 142: n = A,T,C or G
ttttttttttttttngttacataaattaacccatttattataggccagtgatgtctcaaagagtagaggagcgtctactggtctttcaactccttcagtcttctgatggcggactttaccgngacagcggaagtggtattgnacctgattttatttccagttttcatccgaatccactggggaatgggacgattttgcttttgtttcttggccaggaatcgcttaatcct

SEQ ID NO: 2182 - DNA, 142 bp, Homo sapiens
  misc_feature 67: n = A,T,C or G
aggtactcatcggccagcacggagatgcacaggttaaatggtttaccatcctgaaagggcatattgnggcatgtcacctcatactgccaagccccattcacgcggctgttcatgaccacccaatgaccaaagtacctgcccg

SEQ ID NO: 2183 - DNA, 188 bp, Homo sapiens
  misc_feature 90, 154: n = A,T,C or G
tagggcgaattggagctccccgcggtggcggccgaggtacgcgggggggcccgaagcgtttactttgaaaaaattaagagtgttcaaagnaggcccgagccgcctggataccgcaggtaggaataatggaataaggaccgcggttctattttgntggttttcggaactgaggccatgattaagaggga

SEQ ID NO: 2184 - DNA, 496 bp, Homo sapiens
aggtacgcggggactcgcgtcggttggcgactcccggacgtaggtagtttgttgggccgggttctgaggccttgcttctctttacttttccactctaggccacgatgccgcagtacgcgggggggtgaagaaggggccggccttcaagcaacagcgacgcaagatggcagccaccacgggctcgggagtaaaagtccctcgcaatttccgactgttggaagaactcgaagaaggccagaaaggagtaggagatggcacagttagctggggtctagaagatgacgaagacatgacacttacaagatggacagggatgataattgggcctccaagaacaatttatgaaaaccgaatatacagccttaaaatagaatgtggacctaaatacccagaagcacccccctttgtaagatttgtaacaaaaattaatatgaatggagtaaatagttctaatggagtggtggacccaagagccatatcagtgctagcaaaaatg

SEQ ID NO: 2185 - DNA, 303 bp, Homo sapiens
  misc_feature 7, 57, 60, 263: n = A,T,C or G
ccgcggnggcggccgcccgggccggtacgcggggaactgaaaatccacaagacagantanccagatctcagaggagcctggctaagcaaaaccctgcagaacggctgcctaatttacagcaaccatgaggaaaggccacttaaggatgcagcaagaaggagccatctgcaatccaggaagaaattccttgccaggaaccaaattggttgtcaccttcatctaggacttctagcctcgagaacttacaaatggtgatgatcatnaggtcaaggatagtctggagcaattgagatgtcactttac

SEQ ID NO: 2186 - DNA, 340 bp, Homo sapiens
  misc_feature 55, 59, 101, 129, 239, 242, 251, 263, 269, 304: n = A,T,C or G
ccgcggtggcggccgcccgggcaggtacttttttttttttttttttttttttttngggnaaagaaacctttaatgaggattcaaggttaataaggaagacncagagggccagcactcagccccaacctnctcacgtgtaccaagaaaaataaagaagaggctgcagaatatgctaaacttttggccaagagaatgaaggaggctaaggagaagcgccaggaacaaattgcgaagagacncanactttcctntctgcgagcttntacttntaagtctgaatccagtcagaaataagattttttgngtaacaaataaataagatcagagtcggtaaaaaaaa

SEQ ID NO: 2187 - DNA, 428 bp, Homo sapiens
ccgcggtggcggccgcccgggcaggtacaaagactattgtagagactatccgggttagtttgcaagggaagccaatgatgagtaatttgaaagaaattcacctggtgagcaatgaggaccctactgttgctgcctttaaagctgcttcagaattcatcctagggaagagtgagctgggacaagaaaccaccccttctttcaatgcaatggtcgtgaacaacctgaccctccagattgtccagggccacattgaatggcagacggcagatgtaattgttaattctgtaaacccacatgatattacagttggacctgtggcaaagtcaattctacaacaagcaggagttgaaatgaaatcggaatttcttgccacaaaggctaaacagtttcaacggtcccagttggtacctcggccgctctagaactag

SEQ ID NO: 2188 - DNA, 555 bp, Homo sapiens
ctatagggcgaattggagctccccgcggtggcggccgcccgggcaggtacccaggacaaatctctccacttggaaggagatcccaatccttctgcagccccaacatccacctgcgcacctaggaaaatgcccaaaaggatttcaatatccaaacaactggcttcagtgaaagctctgaggaagtgctcagatctggaaaaagctattgccaccactgctctgattttcagaaattcttctgactctgatggtaaacttgaaaaagctattgccaaagatctgctgcaaacccaatttaggaatttcgcagagggacaagaaaccaagccaaaatacagagagatcctttctgaacttgatgagcacacagaaaataagctagattttgaagacttcatgatcttgctcttaagcatcactgtcatgtcagatctgctacaaaatatacggaatgtaaaaattatgaaatgaacagttttaaatatgctgtataaaataatggcaaaagacagtgttattaaaatgtttccatctcaaaaaaaaaaaaaaaaaaaa

SEQ ID NO: 2189 - DNA, 497 bp, Homo sapiens
ctatagggcgaattggagctccccgcggtggcggccgaggtacaaaagttgaaagtcacaaaaccatagaaaagtctcagtttcctactgtagaattcttggcatttcagtagtcacagttaaacttgttctaggtttttcagatgctcttttccaggacttcatatgttttgatatttttaaaaattctttctttcaacttttttgattataagccttgcttgcttcgatttgggatttaggcatcgttgtcctttattttctttcagggcaataatcacttctattttgtcacagttgttacttgggtacctaaaacccgaagaaccttctgtaagaagtgtggcaagcatcagcctcacaaagtgacacagtataagaagggcaaggattctttgtatgcccagggaaggaggcgctatgatcggaagcagagtggctatggtgggcagacaaagccaattttccggaagaaggctaaagaccacaaagaaaga

SEQ ID NO: 2190 - DNA, 311 bp, Homo sapiens
  misc_feature 19, 64, 66, 71, 107, 127, 154, 185, 189, 190, 193, 194, 198,205, 233, 239, 247, 266, 271, 275, 276, 283, 284, 286, 294,299: n = A,T,C or G
ccgcggtggcggccgaggnacttttttttttttttttttttttttttctttttttttttttgcnancacanaggtcagcaacaagtttattttgcagctagcaaggnaacagggtagggcatggttncatgtttaggtcaacttcctttgtcgnggttgattggtttgtctttatgggggggggngggnnagnngaantccaatntgaatcccacagaaaccaggggctgtanaaacanaacctganaagaacgagcactcaaccnagctnactnnggttcannanaaaaaatnccaanaaggaaagccaa

SEQ ID NO: 2191 - DNA, 521 bp, Homo sapiens
  misc_feature 203, 207, 212, 214, 227, 228, 230, 231, 239, 250, 258, 262,264, 266, 283, 285, 303, 322, 328, 337, 338, 346, 349, 350,352, 353, 355, 371, 375, 389, 394, 395, 396, 397, 399, 400,410, 429, 432, 434, 449, 450, 451, 452, 461, 467, 468: n = A,T,C or G
  misc_feature 474, 475, 476, 483, 498, 521: n = A,T,C or G
ccgcggtggcggccgaggtacaaagataagtcatctcagtaaaaggtctattatctaacttgccaaacttgtttactgagagccctaaggaactaaaactgccataatgccgtgcacagcttgaaaagcaattagagtaagcaagattagtttttcctcccttccagttcctcagcaggcctggctgaaggcccaggagggangganttttnanaccccctttaaanntnnctttcgcnttaagaagagnccccccgngggngncnccctttttttttggaancncccttttccccgggaatnagggttttttttttttttnaaaaantcccccccnngggggggnccnncnntntttttttttttttttngaancccccccccccccnggttnnnncnntccttctttnacaaaaaaaaaaaaaattnccncncccccaaaaaaaaannnnttttttttntccccnncccccnnntttttanaaaaaaaaaaaaaanttttttttttttttttttttttn

SEQ ID NO: 2192 - DNA, 498 bp, Homo sapiens
tagggcgaattggagctccccgcggtggcggccgcccgggcaggtacgcgggggccgagagaagcagtagtcaataaagagagtgccgtatttcgcagattggagctgagctgtggctgccagaagatagcgaacgaatggaaactgaaagtggaaatcaggaaaaggtaatggaagaagaaagcactgaaaagaaaaaagaagttgaaaaaaagaaacggtcacgagtaaacaggtgcttgcagatattgctaagcaagtggacttctggtttggggatgcaaatcttcacaaggatagatttcttcgagaacagatagaaaaatctagagatggatatgttgatatatcactacttgtgtcttttaacaaaatgaaaaaattgactactgatgggaagttaattgccagagcattgagaagttcagctgttgtagagcttgatttggaaggcaccagaatccggaggaaaaaacctctgggggaaagaccaaagga

SEQ ID NO: 2193 - DNA, 482 bp, Homo sapiens
ctatagggcgaattggagctccccgcggtggcggccgaggtactgtccatgggtccacaaaatcctcttcagcttctgtggcatctgggccatgattactggtaggtgctgggttccctggaggacagtcagccttgtaatcctcccccgcggcagctttgtagctcatttttatgacaccaacatctttactgcagaatcaatttcatcccaggttgtggaagacactgcagaggtggccactggtcacgctgggcagttgagctgctgagagtcccccgcgtactatcttcactctttttttttcagaagccaatgttctctaaatctgcagcttcattccacagctttacagaatcataatctcttgaatatatttccaatgttattaaaaaataaaaaatcatacaagatatatttagcacattaaaacttaagaggttacagtataactgtccagacctccaggtacctgcccgggc

SEQ ID NO: 2194 - DNA, 778 bp, Homo sapiens
  misc_feature 43, 49, 83, 118, 130, 134, 178, 227, 234, 307, 312, 323,325, 327, 342, 346, 350, 351, 359, 389, 391, 427, 435, 460,463, 471, 496, 515, 523, 525, 549, 560, 565, 573, 604, 647,650, 661, 664, 670, 701, 730, 732, 741, 744, 745, 753: n = A,T,C or G
gtggcggccgcccgccaggtacatttttaaagagttgtttttnggccgngcgcagtggctcatgcctgtaatcccagcacttngggaggccgaggtgggcggatcacgaggtctggantttgagaccatnctgnctaacacagtgaatcccgtctctactaaaaatacaaaaaattanccaggcgtggtggctggcacctgtagtcccagctacttgggaggctgangcagganaatggcgtgaacctggaaggaagaggttgcagtgagccaagattgcgcccctgcactccagcctgggcaacanagcangactccatctnananaaaaaaaaaaaaaancaangagnngttttctnatgttcattatagggcattacagttacatngnccgaaggtcttacaactaatcactgggtagcaatanatgcttcnggcccacatgatgctgattagttcncanttttcatncagttgacaatattaacccccattnctccctccctgcccaaggntcataaantngtgactgcctaacaaccaaaattnggaaggcccantcttnattttcantcagacttcttggaacctgaaagattaaacnttttggctaaccctggaaatatctttttatctcacttatagcnttnaaggccattgnatnaaaacntgatttcttggaaagggccatacccataaantcaaggggggtttttcctgaaaagtaaangnttccaaatnaannccaaacantttcaaccccaaaaaaaaaaaaaaa

SEQ ID NO: 2195 - DNA, 639 bp, Homo sapiens
  misc_feature 139, 582, 616: n = A,T,C or G
aggtacactgaacaccaaggctctcactcttgagtctagggcaccatatatataaagggagttcggaacttgtcaaggcaatcctattgttcgtagtcaaatcacactgaaatccggaggcctggtgtgagaacctacnagcggacaccgggcatttaatattttttgcacacccacacagccagggccaaagtggtcaaggcactctcctaacacagacaggatcttctgagttgcaattctttctgaaggaacatttttcacttgaaattccatcagaaaatttcctgagatcttgtgagcgctgaggtttctggtttcatctagatccaaaaacatgtccaaatcacatcctaacttcccaaaagtgttgactgaggagccaaagggtctgactatgcagtctggaaaataccccggcggccatgtcttcaataagagaacaggtgagatatcggagcttaagtgttctcctctgttagctggaactccttcaagaagagtgttcaagcttgatccgtctatactttctgcataacaaagtaattcaaaaagctgcttgtttgaaccgtggcaactgantacttgacccgtaccttgccccgggcgggccctntaagaactagtggatcccccggc

SEQ ID NO: 2196 - DNA, 689 bp, Homo sapiens
  misc_feature 462, 488, 533, 580, 582, 626, 645, 653, 670, 675, 679: n = A,T,C or G
cgcccgggcaggtacagtggtccttttcagagttggacttctagactcacctgttctcactccctgttttaattcaacccagccatgcaatgccaaataatagaattgctccctaccagctgaacagggaggagtctgtgcagtctgacacttgttgttgaacatggctaaatacaatgggtatcgctgagactaagttgtagaaattaacaaatgtgctgcttggttaaaatggctacactcatctgactcattctttattctattttagttggtttgtatcttgcctaaggtgcgtagtccaactcttggtattaccctcctaatagtcatactagtagtcatactccctggtgtagtgtattctctaaaagctttaaatgtctgcatgcagccagccatcaaatagtgaatggtctctctttggctggaattaccaaaactcagagaaaatgtgtcatnaggaggaacatcataaccccatgganggaaaaaagccccccaaatgggtgggaactggataataagcactnatgctttaagaattgggcacacttctcacctaaggtgagcgcattgngnccagggggtgcttaaatgcttacatacctccaactggaaatggntaagggaagaagattgatnccaatttnaaaaaaaaatttaaaancccantttnaaaaaaaaaa

SEQ ID NO: 2197 - DNA, 361 bp, Homo sapiens
cgcccggcaggtacgcgggggtggagagaggcctctagacttcagtttcagtttcctggctctgggcagcagcaagaattcctctgccccccatcctaccattcactgtcttgccggcagccagctgagagcaatgggaaatgggagtcccagctgtcctcggtgcctgctcagaagctgggttggtttatccaggaatacctgaagccctacgaagaatgtcagacactgatcgacgagatggtgaacaccatctgtgacgtcctgcaggaacccgaacagttccccctggtgcagggagtggccataggtggctcctatggacggaaaacagtcttaagaggcaactccgatggtacct

SEQ ID NO: 2198 - DNA, 604 bp, Homo sapiens
  misc_feature 499, 507, 510, 513, 519, 520, 526, 533, 556, 558, 562, 587,603: n = A,T,C or G
ccgggcaggtaccaaaattgtaagaagaagcttgggaagctgccacctcagtatgccctggagctcctgacggtctatgcttgggagcgagggagcatgaaaacacatttcaacacagcccagggatttcggacggcttggaattagtcataaactaccagcaactctgcatctactggacaaagtattatgactttaaaaaccccattattgaaaagtacacaggaggcaaagtgtttcacattatagacttcacttccaactccttggaatgttcatttctttggcttacaggagagactagacaggaaggccaggcaatgcttaggcaactaaaatgaggttgggggtaatgctaacgtcaccctcacagggatggccacggggactgttattcgcaagctggttttctaggcctgttagctggaagcatggtgagcaccaatttctgggacgctcaaggccgtgtcggggcttcaagtcatcttcaccacaccangtaccttnggncgnttctannaactantgggatncccccgggctgtagggaaatttnantttnaagccttattcgattacccgttgancctctggggggggggnc

SEQ ID NO: 2199 - DNA, 270 bp, Homo sapiens
  misc_feature 28, 30, 60, 73, 87, 143, 163, 167, 170, 173, 193, 196, 205,207, 210, 211, 213, 217, 220, 231, 241, 242, 243: n = A,T,C or G
ccgcggtggcggcccgaggtacaagatngncatctcagtaaaaggtctattatctaactngccaaacttgttnactgagagccctanggaactaaaactgccataatgccgtgcacagcttgaaaagcaattagagtaagcangattagtttttcctcccttncagnctnagnaggcctggctgaaggcccanganggaaggaantntannanccancantaaaaatagcnatatgcaatnnnaagaatgccatcccatggagcacacca

SEQ ID NO: 2200 - DNA, 382 bp, Homo sapiens
agggcgaattggagctccccgcggtggcggccgcccgggcaggtacacaatttttagaatagttgatgtctttaagatggatattttacaatttcagtaaaaaaaatacaacatgaagctgctgctgtcacagatcactgtagtaaaaagatataaatgcaataccatgtcgtagaacaatatatatatcctctgatattttacaaactttgtactgtgtccaacagctgaaggaatttgaggggaagactttagtgtcagtcaccaaagaaggcctggaacttccagaggatgaagaagagaaaaagaagcaggaagagaaaaaaacaaagtttgagaacctctgcaaaatcatgaaagacatattggagaaaaaagttga

SEQ ID NO: 2201 - DNA, 515 bp, Homo sapiens
  misc_feature 17, 18, 109, 110, 115, 117: n = A,T,C or G
gctccaccgttttggcnnccgaggccccttgtcctcttcttcagtgacttaaaacaattccaggatcagaagagaagccattttgacatcctcgataaaactggggatnngctgnanttctgtctgttcacgaagtggttgaaaaacaatttcgagatccagaagtcttgatgggttcaccatccaggtgttcacaaaaaatcagagaatctctttcgaggtgctggccgccttcaacgctctgagtaagcattgctgggtgtcaggagagaaaagccaaagaagcgggtgccagacagctctgtgcaacctctaggccatgagtgggatagataccactgctgctttaaaaaatgggagaccatagaccctcaggagaaaagaatcccttctaccctggactcgctctcttctctggaactaacttctcccccataccctgattgtctttggagaaaatgttctggattctagaatctaaggcagagccttttaagccatactgtacctgcccg

SEQ ID NO: 2202 - DNA, 374 bp, Homo sapiens
aggtacagacagggtttcttcatgttggtcaggctggactcgaactcctggtctcaactgcctcagcctcccaaagtgctggattataggcatgagataccgtgcctggcctccatcactgattctatgtatgcacatgactccttttttacttttacttaggaggcttaaaacacaattattcattcaatataattataaagcagagtctttgttaatttctgaacttggtaaaaacattttttatattttatctatagctcattaatttaggtatcaaaaatgtgttttagtttaggtagcccaagctgccaattgtttgatatcatcatcctcttcttctgccctctgggaagatgctgctcgggatcgac

SEQ ID NO: 2203 - DNA, 522 bp, Homo sapiens
  misc_feature 522: n = A,T,C or G
ccgggcaggtactccaaagattcaggtttactcacgtcatccagcagagaatggaaagtcaaatttcctgaattgctatgtgtctgggtttcatccatccgacattgaagttgacttactgaagaatggagagagaattgaaaaagtggagcattcagacttgtctttcagcaaggactggtctttctatctcttgtacactgtatgcatcatcagtccaaagtttttcagagttctatgtgactggttgaggaaacactgcttgaatttccccatagcctctgcagcggcatcactgtctatgaactcttgaagaagctctttgtattcaggtatagatatgtcggaattgatggtcttttcaaccatgtcctccaggagtttgcagccagaatctgcatagcagtgcaggaggagggccgccagcatgaggaccatcagcagcttcatggcgaggcggctgctgtctgtgttcagtcgtgtgtggcagggatcaaggaagttgctgtccccgcgtacctn

SEQ ID NO: 2204 - DNA, 109 bp, Homo sapiens
  misc_feature 50, 77, 79, 84: n = A,T,C or G
ctatagggcgaattggagctccccgcggtggcggccgaggtactggttgncaggattcaagccgaatggcttgcctnanagggncaatggcgttctgagatggtggcca

SEQ ID NO: 2205 - DNA, 645 bp, Homo sapiens
  misc_feature 350, 375, 386, 461, 474, 475, 481, 503, 511, 517, 530, 555,561, 566, 573, 589, 593, 621: n = A,T,C or G
acactactatagggtgaattggagctccccgcggtggcggccgaggtactcttggtttatcaatgggacgttccagcaatccacacaagagctctttatccccaacatcactgtgaataatagcggatcctatatgtgccaagcccataactcagccactggcctcaataggaccacagtcacgatgatcacagtctctggaagtgctcctgtcctctcagctgtggccaccgtcggcatcacgattggagtgctggccagggtggctctgatatagcagccctggtgtattttcgatatttcaggaagactggcagattggaccagaccctgaattcttctagctcctncaatcccattttatcccatggaacncttaaaacaangggttggttttggttcctgaagcccttttttgctggggaatggggcaccttaatggaaaatttaaaggggaaaanccctcaggcctgnngggggnggggccccttcacagccttttncttaactnagaaancggggaaaattgnaaaccattgggggagaaaatggacnacttcncactnttggacnggtttttttccaaaantgtnaaaacaagaattctttattaatggaaanggggttttaccccccttttaaatt

SEQ ID NO: 2206 - DNA, 521 bp, Homo sapiens
  misc_feature 31, 44, 56, 271, 514: n = A,T,C or G
ccactataggtttatgggaactccccgcggnggcctcacttttnaccttctggaanccgcccaccactttcaagctcactattgaatccacgccgttcaatgtcacagaggggaaggaggtgcttctacttgtccacaatctgccccagcatctttttggctacagctggtacagctttcttcgtcctccatgctaagagatgtaaaagcttaagggtcaaacaataccaattgtataggcttcaaaaaccatctaagttagggcattctntagttttagctaagatacacctggaacactgacaagtcatcacttacatagaataatgtgaagtaaattttttgaaaaataaattttagtggaacaatcctgaaggataacaccagaagaatagcaggttaccagtaaggggtcagccaatttgttccagtcacttttgaatccatgttctataatctaaaaattattctctttccctaagctgagagcttcctatcatgtcagtatctatgntatgaag

SEQ ID NO: 2207 - DNA, 468 bp, Homo sapiens
  misc_feature 81, 84, 93, 117, 125, 134, 138, 139, 140, 141, 142, 143,144, 145, 146, 147, 148, 149, 150, 151, 152, 153, 154, 155,156, 157, 158, 159, 160, 161, 162, 163, 164, 165, 166, 167,168, 169, 170, 171, 172, 173, 174, 175, 176, 177, 178: n = A,T,C or G
  misc_feature 179, 180, 181, 182, 183, 184, 185, 186, 187, 188, 189, 190,191, 192, 193, 194, 195, 196, 197, 198, 199, 200, 201, 202,203, 204, 205, 206, 207, 208, 209, 210, 211, 212, 213, 214,215, 216, 217, 218, 219, 220, 221, 222, 223, 224, 225: n = A,T,C or G
  misc_feature 226, 227, 228, 229, 230, 231, 232, 233, 234, 235, 236, 237,238, 239, 240, 241, 242, 243, 244, 245, 246, 247, 248, 249,250, 251, 252, 253, 254, 255, 256, 257, 258, 259, 260, 261,262, 263, 264, 265, 266, 267, 270, 284, 294, 297, 298: n = A,T,C or G
  misc_feature 313, 317, 324, 325, 326, 334, 339, 369, 416, 424, 433, 441,449, 463: n = A,T,C or G
ggcgccgaaagcgaagaaggaagcttcagcccctccaaaagctgaagccaaagcgaaggctttaaaggccaagaaggcagnggngaaaggggnccacagccacaaaaagaagaaganccgcacgncacccaccntccnnnnnnnnnnnnnnnnnnnnnnnnnnnnnnnnnnnnnnnnnnnnnnnnnnnnnnnnnnnnnnnnnnnnnnnnnnnnnnnnnnnnnnnnnnnnnnnnnnnnnnnnnnnnnnnnnnnnnnnnnnnnnnnnnnctngggcggaaaacaanggcaaaagcnggnncccgggggggaaaangggnaacccgnnncacaaaanccacnacaacaaaccgagcccgggagcaaaaaagngggaaaagccccgggggggggcccaaaggaggggaggccaaccccanaataaaanggggggggngccccacnggcccccnttccaaaccggggnaaaac

SEQ ID NO: 2208 - DNA, 307 bp, Homo sapiens
  misc_feature 10, 11, 16: n = A,T,C or G
ggcgaattgnngctcnttcgcggtggcggccgaggtactgagagaggtggtggacatacttacagagcaactgcgtgacattcagctggagaattacacacccaaggaacccctcaccctgcaggccaggatgccttgtgagcagaaagctgaaggacacagcagtggatcttggcagttcagtttcggtgggcagatcttcctcctctttgactcagagaagagaatgtggacaacggttcatcctggagccagaaagatgaaagaaaagtgggagaatgacaaggttgtggccatgtccttcatt

SEQ ID NO: 2209 - DNA, 703 bp, Homo sapiens
  misc_feature 18, 34, 36, 38, 42, 46, 51, 52, 62, 63, 64, 65, 66, 67, 68,69, 70, 71, 72, 73, 74, 75, 76, 77, 78, 79, 80, 81, 82,83, 84, 85, 86, 87, 88, 89, 90, 91, 92, 93, 94, 95, 96,97, 98, 99, 100, 101, 102, 103, 104, 105, 106, 107, 108,109: n = A,T,C or G
  misc_feature 110, 111, 112, 113, 114, 115, 116, 117, 118, 119, 120, 121,122, 123, 124, 125, 126, 127, 128, 129, 130, 131, 132, 133,134, 135, 136, 137, 138, 139, 140, 141, 142, 143, 144, 145,146, 147, 148, 149, 150, 151, 152, 153, 158, 167, 168: n = A,T,C or G
  misc_feature 171, 175, 181, 199, 250, 255, 260, 263, 273, 278, 280, 283,289, 290, 302, 305, 313, 328, 339, 340, 343, 358, 363, 376,392, 393, 394, 395, 413, 418, 419, 420, 421, 428, 429, 431,440, 450, 454, 455, 456, 457, 458, 459, 478, 479, 480: n = A,T,C or G
  misc_feature 481, 483, 484, 485, 496, 497, 506, 507, 508, 511, 513, 514,515, 519, 522, 527, 550, 551, 552, 555, 566, 568, 589, 622,626, 642, 655, 656, 657, 658, 659, 660, 670, 671, 672, 673,684, 686, 687: n = A,T,C or G
aaatcccgcggcggccgntctagaattaggggancncntttnaccncaggnnttttgaaccnnnnnnnnnnnnnnnnnnnnnnnnnnnnnnnnnnnnnnnnnnnnnnnnnnnnnnnnnnnnnnnnnnnnnnnnnnnnnnnnnnnnnnnnnnnnagggnaaagagggnnccngggngaaaanggggaaccgcgcacaaanccacacaacaaaccgagccgggagcaaaaaggggaaagccccggggggccnaaagnggggngcnaacccaaaanaaaangnggnggggcnnaaagggcccggnttnccagggcnggggaaaaacccggncggggccaacnnggnaaaaaaaaggaaaanggggnccaaccccccccnaaaaaaagggcccggnnnngggggaaaaagggggggnggccnnnnaccgggnnanccccggggnaaaaaaaaanaaannnnnngggggccccgggggggggnnnngnnngggggggggannggggggggnnnaangnnnaaanccnaaaanggggggggggaaaaagggggggnnnccncaaaaaaaaanangggggggaaaaccccgggggnaaaaaaaaaaggggggggaaaaagggccccccnaaangggggggggaaccccnaaaaaagggggcnnnnnngggggggggnnnnaaaaaaggggncnncccccccggggggggg

SEQ ID NO: 2210 - DNA, 393 bp, Homo sapiens
  misc_feature 3, 9, 21, 24, 25, 36, 37, 38, 47, 48, 52, 81, 86, 91, 92,98, 101, 125, 127, 136, 153, 186, 194, 217, 218, 228, 236,246, 251, 252, 280, 288, 296, 299, 307, 319, 322, 331, 332,337, 343, 347, 361, 366, 368, 369, 370, 392: n = A,T,C or G
aanccccgngggggcggccgnggnncccccgacggnnncaaccccgnngtanaaaacccccaggaacagaagagaaggggncgggncaagnncgaaancgngggggaaaagcagaagacccgacngnccacgaagnggcgcgaaaaacaaaancgagaaccagaaggcccgggaggggaacaccanccaggggnccacaaaaaaacagagaagcccnngcgaggggcnggccgccngcaacgcgcngagcnnaaaggaaaaccccagcccccggaaccancgagagcncaaaaganccngggaaaanacaaaggccagnccnggggagaanngcagnccgcancacngaaccccagcaganagggngnnnggacaaccggccccggaaaaana

SEQ ID NO: 2211 - DNA, 424 bp, Homo sapiens
  misc_feature 24, 31, 51, 75, 155, 163, 175, 176, 180, 181, 182, 186, 187,189, 191, 192, 195, 200, 203, 204, 205, 206, 207, 209, 210,225, 233, 235, 236, 240, 242, 250, 252, 259, 266, 269, 270,271, 279, 280, 285, 288, 295, 301, 306, 310, 311: n = A,T,C or G
  misc_feature 312, 314, 315, 317, 319, 320, 321, 327, 342, 343, 348, 349,350, 351, 352, 353, 354, 363, 370, 371, 377, 381, 382, 385,391, 395, 405, 408, 409, 410: n = A,T,C or G
tactatagggcgaattggagctcnccgcggnggcggccgcccgggcagggnactttttttttttttttttttggnggtttttttttttttttttttttttttttttttttttttttttttttttttttttttttttttttttttttttttttttnaaaaaaanagccaatttttnnaaannnaaanntncnnggntaaanggnnnnngnnaaaaatttggggggnaaaagggntnntttnancccactgngnggggcancccttanaannngggggaannccccnggnaaaaaanggggcnggggncccnnntnngnannnttcccngggggggggccccannaaaannnnnnnccccggggnggggggnnccccantttnnccnaaaaanctangtccccgggnccnnnaaaaaaaagggggc

SEQ ID NO: 2212 - DNA, 422 bp, Homo sapiens
  misc_feature 224, 236, 240, 253, 270, 291, 302, 324, 342, 352, 370, 395,401: n = A,T,C or G
ccgggcaggtacccgggtggttaaacttcgcaaaatgcctagatattatcctactgaagatgtgcctcgaaagctgttgagccacggcaaaaaacccttcagtcagcaccgtgatgaaaacttgcggagccagcatttacccccgggaccattctgatcatcctcacttggacgccacaaggggcaaggagggtggttttcctgaagcagcttggctagttggncttatttaactntgtngacctggaccctnttggttccctcaattcngaggttccctcttaccgaagnaacacacccangaaaaattttggtccatttgcncaccttttcaacccaaanaattcggatnttcaaggcaaattgttanaaataaatcccccaaaaaacaatcnttaacntggaatggcctttacttttca

SEQ ID NO: 2213 - DNA, 413 bp, Homo sapiens
  misc_feature 52, 100, 146, 177, 295, 312: n = A,T,C or G
ccgcggtggcggccgcccgggcaggtactttttttttttttttttttttttnaccggaaattgtcttttatttttctttgctggggttcaaggtcatttntttaatcaaacctcagagttggatatagagtcatcaaaagaaaaancattcttcttcctctctgtttccctaaaaanaaaacagtcacaggagactttccttttttcttaattgttctcatctcatctttaattattgctgctgctgttatgtgtttatgtttccctttttttttaagttttgagggtagatcgngtcactgggcgtaaganactgagaaatcaggtagcttcactggctggtaggggacttttgcttttgaaacgtcacaggctgtcttcctttggatgtaatgggacgtcctgatgaccca

SEQ ID NO: 2214 - DNA, 273 bp, Homo sapiens
  misc_feature 79, 110, 140, 150, 160, 219, 221, 239, 256, 261: n = A,T,C or G
acttagggcgattggagctccccgcggtggcggccgcccgggcaggtactttttttttttttttttttttttttttttnattagggttgaaaaggtaagtcctatattanatacataggggctggtagtcttatcctctntataaatacncactttttgncactgccccttccctgccatgcagagtccccatggctgaatctccctatgtctccaagngngcgtcacttgctgtcctntgggctgggtcccatgngctgngcccacagtctt

SEQ ID NO: 2215 - DNA, 493 bp, Homo sapiens
  misc_feature 42, 101, 112, 113, 145, 162, 218, 231, 234, 256, 268, 271,287, 297, 336, 340, 351, 361, 375, 381, 419, 422, 426, 431,435, 450, 455, 470: n = A,T,C or G
ccgggcaggtacaatacactagaaaccaacataatgtatttntttaaaacctgtgtgaaaaaataaatgttccaccagtagggataggggaaaagtaaccnaaagagagaannggagaaagggaatgctggtttatcttttgtangattgtaattcgaatgngagaaattttgcagtattttagccacttattaagggaatttttttttttgtaaaantggaagacctganacntctgttcaaaatggcttttcantggaacccttgngtnttggagaccggttagngaaaaggcanacaaaaaccgtgggtaaccctggtggacctaaaggggcnctgngtgccaagggnaccttggggnaaattggtccattngattantaggaatgggtggggggtttttttcccccccctttttnagnaaantggtnttgnggattattttaaagntgganttttaaaaaacaccntttttttttaaacttcccggaaa

SEQ ID NO: 2216 - DNA, 439 bp, Homo sapiens
  misc_feature 148, 149, 153, 212, 222, 251, 265, 268, 309, 314, 330, 363,392, 394, 399, 410: n = A,T,C or G
ccgggcaggtacttttttttttttttttttttttttttttatacattaaatatttattaatgttttgggaatgttgtgtatcagtaattatacctagtaaaaagaaagatccacatccaaattttccagaaaaccgggtggccaggtnngggnggaagaagagcattttaaaaaccaaaaccaaaacaagggaaaagctaaaaaggagtttnttccaaatantcctgaattcattaggagggttggaattnacattttttcaggnctntattccccccaaagttgaaattttttaaggggaccttgganaaagnctttattacccccatntgaaaaacaatgcctgccaatggatttaccctntttttcacggttcttccagggttcccaantnaccgnttgtcctggtnaatccctttttgggccctttttttttttt

SEQ ID NO: 2217 - DNA, 479 bp, Homo sapiens
  misc_feature 450: n = A,T,C or G
ttagggcgaattggagctccccgcggtggcggccgaggtacagagagctgtgtgcatgctgagcaacaccacagccattgctgaggcctgggctcgcctggaccacaagtttgacctgatgtatgccaagcgtgcctttgttcactggtacgggaaggattcctgccagggtgattctgggggtccgctggtatgtggagaccacctccgaggccttgtgtcatggggtaacatcccctgtggatcaaaggagaagccaggagtctacaccaacgtctgcagatacacgaactggatccaaaaaaccattcaggccaagtgaccctgacatgtgacatctacctcccgacctaccaccccactggctggttccaggaacgtctctcacctagaccttgcctcccctcctctcctgcccagctctgaccctgatgcttaataaacgcagcnacgtggagggtcctgattctcccttgggt

SEQ ID NO: 2218 - DNA, 436 bp, Homo sapiens
  misc_feature 268, 276, 296, 310, 322, 341, 345, 357, 361, 364, 365, 386,388, 393, 394, 400, 411, 412, 424, 426, 427: n = A,T,C or G
ccgcggtggcggccgcccgggcaaggtactttttttttttttttttttttgggatggagtcttgctctgttgcccaggctggagtgcaggggcgcaatcttggctcactgcaacctcttccttccaggttcacgccattctcctgcctcagcctcccaagtagctgggactacaggtgccagccaccacgcctggctaattttttgtatttttagtagagacgggatttcactgtgttagccaggatggtctcaaactccagacctcntgatccgnccaccttggcctccaaaagngctggggattacanggcatgagccantgggccccggccaaaaaanaaanttttttaaaaanggcnccnngccccttttaaaaattggggngnccccnngggggngggggaaaatnnaaaaaaaatttntnnccccccccc

SEQ ID NO: 2219 - DNA, 191 bp, Homo sapiens
  misc_feature 180: n = A,T,C or G
ggcggccgaggtcggcccactgggactgagatacggcccagactcctacgggaggcacgcatgtaaggaattttccacaatgagcgaaagcttgatggagcgacacagcgtgcaggatgaagttcttcggaatgtaaactgctgttataagggaaaaaaaaaaaaaaaaaaaaaaaaaangtacctgcccg

SEQ ID NO: 2220 - DNA, 582 bp, Homo sapiens
  misc_feature 6, 63, 65, 66, 70, 73, 103, 107, 109, 122, 141, 144, 174,180, 208, 261, 266, 273, 291, 296, 301, 308, 315, 317, 324,331, 348, 353, 356, 359, 364, 369, 383, 396, 397, 398, 400,411, 412, 414, 434, 440, 447, 452, 454, 458, 460, 466: n = A,T,C or G
  misc_feature 468, 469, 471, 472, 473, 480, 481, 482, 483, 484, 485, 486,488, 500, 528, 529, 530, 534, 536, 537, 538, 544, 545, 546,547, 548, 550, 556, 557, 560, 561, 562, 563, 564: n = A,T,C or G
cgactnctatagggcgaattggagctccccgcggtggcggccgcccgggcaggtacttttttntnntttnttnttttttttttttcccggccatattccattntttnanaacttgaattgcnctgccatccacaaaggctngcncggttttatccacattaaaatcaaactgtnggagcnccaggactatttcattattgcttttgtngggaacaactgatctaactgcataaatctttttccttgacattcacatgagtnttggngtttcanccctttttgcttttaagnggaanaggcnaatttcnggaaaananggggganccttttncctttttaccccaaaantcccnaanggnaaaanccttnttttttttttaaantttttttcccccnnntncccaaaaaaanngntttttttttttttttttttnttgtgnggggggnggggngngggnanaaaaananncnnnttttttnnnnnnntnttttttttttanaaaaaaaaaaaaaaaaaaaaaaaaaaannngggngnnntttttnnnnnanaaaatnnatnnnnntttttttttttttttttt

SEQ ID NO: 2221 - DNA, 381 bp, Homo sapiens
  misc_feature 307: n = A,T,C or G
cactacttagggcgattggagctccccgcggtggcggccgcccgggcaggtactctttgttttggcacacttttcctgacaaacagccagtgttctcaacacataaatactagtccacgttaacaacaatagcatatgagaccgctctccgtaaagatgccagattggatgcaaatggactggaaataccttggagggtttcacaaaaataagacaaagggcaaaggaactttgccaaaggagatggagagcaattctttaaagttagtgggagggaggaagcaaagagctcataaatacaagcctnttaaaatgggacgcatttgcctcgcgcctactggggtgtctgcagctcagcttggtgccccacacaggacaccg

SEQ ID NO: 2222 - DNA, 321 bp, Homo sapiens
tagggcgaattggagctccccgcggtggcggccgcgccggaagtctctactgaggaaagctatgaggatactctgttcgtaagctcccggtgaattttgttccacagactcggaagaaaggttggataagagttcactggagattgacaagtacctggaggagcccctcacccaagtgcgcatcttaacggcattggtggaagctggggtcagaaaagagaaatgaccatttggaggggcggggcctcctagaagaaccttcttagacaatggggggaggatgggactttgttttttccaagaataaacttcaactcctgt

SEQ ID NO: 2223 - DNA, 585 bp, Homo sapiens
cgaggtacttcccaccacagtgttgaaagggagagcaaagtcttatggataaaccctcctttcttttggggacacatggctctcacttgagaagctcacctgtgctgaatgtccacatggtcactaaacatgttatccttaaacccccgatgcctgagttgaaagggctctctcttattaggttttcatgggaacatgaggcagcaaatctattgctaagactttaccaggctcaaatcatctgaggctgatagatatttgacttggtaagacttaagtaaggctctggctcccaggggcataagcaacagtttcttgaatgtgccatctgagaagggagacccaggttatgaagttttcctttgaacacattggtcttttctcaaagttcctgccttgctagactgttagctctttgaggacagggactatgtcttatcaatcactattattttcctgttacctagcatgggacaagtaccacctgctggggatcactctctaggatcacccctccatccacaatttcatccacaagccaagaacaagccccttcatgttctccagcagtgctcgcttttctac

SEQ ID NO: 2224 - DNA, 410 bp, Homo sapiens
  misc_feature 6, 29, 52, 58, 76, 190, 236, 243, 272: n = A,T,C or G
tcactntagggcgaattggagctccccgnggtggcggcccgcccgggcaggnactttntttttttttttttttttnctttttttttttttttttttttttggccttttttaatatctttatttgacaaaataaaagtcagcaacctatctcgatttccaattttttgtggtgtttgaaattccaattganacctaaagcatagctctggccttggagagatttccaggagagtcanagcccanaagggagcaggatccaggaggccctcatntcccagcactccagctgagccagccgggttatggaacatcactgagcaattaaaatattatcaacagacaaaaaaagtttattgaatacaaaactcaaaggcatcaacagtcctgggcccaagagatccatggcagga

SEQ ID NO: 2225 - DNA, 586 bp, Homo sapiens
  misc_feature 413, 474, 484, 541, 572: n = A,T,C or G
gggcgaattggagctccccgcggtggcggccgaggtacctgggctctttcaggtcccccttcctctgcagactcagcctccaggctgtttagctctcccagatagctgcccctgccacgcaggccaggagtcttcacactcaggcaccaggcctggtccaggaggagctgtggcacagtcgtggttcaagtgtccacatgcacctgttagtccctgagaggtggtgggaatggctgcttcattcctcgaggatgcccgggccccacctgggcttgtctttctgtttagagggaagtgtaacatatctgccatgaggaacataaattcatgtaaagccattttctcttaaacaaaacaaaactttctaagtacaatttgttacaaataacgcagacttcaaaaacaaaaaaatnacaacccaaacaaaccaaaatttaaatgatcagaattggcaagcacaaagaaaacgccctntcctgacttntattgtgggcagttctgaacgcccccagaaaatttgtgccaaagagttttagaaaantaaatattccaataaaagtaaacactatacnccaccaaaacaggc

SEQ ID NO: 2226 - DNA, 411 bp, Homo sapiens
  misc_feature 9, 261, 281, 290, 318, 348, 361: n = A,T,C or G
ggcgaattngagctccccgcggtggcggccgcccgggcaggtacttttttttttttttttttttttttctaactttatatataatactttattttatacaattcagtatatcatgttaacatatttcacttttaattttatgatatgtgtgacatatttttaattttatggattcaattatactatcataatttttttaaagtttgtatctttcattaataaggaggttccttattaatggattttttttcctgtagcttntgagaacacatttttagatncccggcttntagttatacctgaagctccacagtgtanacatgttttggccaaccttgttttatcggngtatgaaatttgngctaataggagggatccaattgtcattacattagaaaactaaatgggaaa

SEQ ID NO: 2227 - DNA, 417 bp, Homo sapiens
ccgggcaggtacgcggggcccttctagaggcaggcagagggaagagaaagggtctgttgtttttctctcctgtttctcgctccctctctgctgatcacaaagctgctgaccgggtcagaaagtcctgatggaaatccaccagcgctgggcaggcccctcctcctccagggagcttgtccttgcctaatttttcttcgtcctgatgagaacaaaaaagagagagagaagaaaagaaaaaccacaaacttcctttgaaaaccagcttgtagtcagggcccggagcgcatgccatagactcggcgactcaggaatcctgaagactctctgagcgacctggagcaccttgggctgtgtccctgcctgccttcaccctcctccagtgcccccagtactaaggaatctttctgttttggggtt

SEQ ID NO: 2228 - DNA, 381 bp, Homo sapiens
ccgcggtggcggccgcccgggcaggtacgcggggacacaagacatcatcttgaaggaaggatggctttggccagaccaagaccaagacttggagacctgattgagatttctcgctttggctatgcacactgggccatctacgtgggagatggctatgtggtccatctggctccggcaagtgaaattgctggagctggtgcggccagtgtcctgtctgccctgaccaacaaagccatagtgaagaaggaactgctgtctgtggtggctgggggagacaactacagggtcaataacaagcacgatgacagatacacaccactgccttccaacaaaatcgtcaagcgggcagaggagttggtggggcagggagttgccttattc

SEQ ID NO: 2229 - DNA, 139 bp, Homo sapiens
  misc_feature 52, 91, 113, 123: n = A,T,C or G
tatagggcgaattggagctccccgcggtggcggccgcccggccaggtactanaagatattgatcctagtcaattaggcattgtagactgtnatgaccacttaataaaaaattntggacctgangctcacgagcatccag

SEQ ID NO: 2230 - DNA, 195 bp, Homo sapiens
  misc_feature 1, 20, 36, 48, 49, 52, 53, 69, 77, 89, 135, 136, 168: n = A,T,C or G
ntagggcgaattggagctcnccgcggtggcggccgnggtacctgcagnnctnntacacctacctctctntgggcttntatttcgaccgngatgatgtggctctggaaggcgtgagccactttttccgcgaattgnncgaggagaagccgcagagggctacgagcagtntcctgaagatgcaaaaccagcagtggc

SEQ ID NO: 2231 - DNA, 503 bp, Homo sapiens
  misc_feature 321, 340, 349, 360, 379, 383, 399, 482: n = A,T,C or G
ttagggcgattggagctccccgcggtggcggccgcccgggcaggtacgtttcagagtttcataagacacagtctcaacaggagtttttttaataaatgctctatctctagttccagaaactgaattccaagaagctacactgaggataattcagctctgatattgtgattactgtgatgttctttcattcatacagtaagtatctgcccaatacgtaactaccgagatctattgcttcctacataattagacaagctccttacacatatgggcccatgcccggcacatagcaggcacttaacaaggggttgcttaactacnggaaggaataatataattngcctttccntttttaactgntttaccctttttctatacnttgntatattttggaaaacnacatgcttgcaaaactaaaaatctaacatgcattactaactttataaaagatccttcagtatttttcaaaaagggaaaaaatnattaaaaccaatcccccaaat

SEQ ID NO: 2232 - DNA, 447 bp, Homo sapiens
tacttagggcgaattggagctcaccgcggtggcggccgcagagcttaagagacccttcagcttctcggtgtaggtcaccagtcatgtcacgctcacaaccctttcgcctccctctaggtcaggcaccgcatccaagttaagcaaccgacgccggctccttggtgtcccaacaaggtctagtagaaaagcaactttataattcgtttcacagatttgattaagagccaactgagtagtgggccttgtgctagggctccgagggcccaaggaccccatggaaccagatttagtcgctgacctctaggagctcacaggtgagtgactccccccgcgtacctcggccgctctagaactaggtgggatcccccggggctgcaggaattccgatatcaagcttatcgaatacccgtcgaccttcgaggggggggccccggtacccaagctttt

SEQ ID NO: 2233 - DNA, 243 bp, Homo sapiens
  misc_feature 15, 44, 133, 157, 167: n = A,T,C or G
ccgggcaggtaccgntgtgtccgggtgggtggtcagaatgccgngctccaggtgttcacagctgcttcgtggaagaccatgtgctccgatgactggaagggtcactacgcaaatgttgcctgtgcccaactgngtttcccaagctatgtgagttcanataacctcanagtgagctcgctggaggggcagttccgggaggagtttgtgtccatcgatcacctcttgccagatgacaaggtgact

SEQ ID NO: 2234 - DNA, 265 bp, Homo sapiens
  misc_feature 8: n = A,T,C or G
atagggcnaattggagctccccgcggtggcggccgcccgggcaggtacattggcacgtcacgatgtcttgagtttcattcactaggtggcagcctgcatcgttccactgcaaatgactgaaatcccaaaacacacaatgaggctggctcaggtttgactctatcttggaaaaaaataggaaaacttcatttatggaatagttttgaataaccgtggatatcacaggtccattgacctgagcatttccatttttggaaacgggtag

SEQ ID NO: 2235 - DNA, 196 bp, Homo sapiens
tacttagggcgattggagctccccgcggtggcggccgtcatcacacgtgacaggatgtcaatgacaatcctccagagtttactgccatgacgttttatggtgaagttcctgagaacagggtagacatcatagtagctaatctaactgcgaccgataaggatcaaccccatacaccagcctggaacgcagtgtacct

SEQ ID NO: 2236 - DNA, 281 bp, Homo sapiens
  misc_feature 249, 258: n = A,T,C or G
tatagggcgaattggagctccccgcggtggcggccgcccgggcaggtacaatatgaacctgtgctttgcagcaggccaacttgtaaagctgttctcaacccactttgtcaggttgattatcgagcaaaactttgggcctgtaattttctgttttcaaagaaatcagtttcctccagcttatggaggcatatctgaggtgaatcaacctgccgaattgatgccccagttttctacaattgagtacgcggngacagcggnttccttgatccttgccacccgcg

SEQ ID NO: 2237 - DNA, 295 bp, Homo sapiens
  misc_feature 4, 45, 47, 84, 91, 123, 126, 135, 149, 154, 164, 173, 181,203, 217, 223, 227, 233, 237, 253, 277: n = A,T,C or G
ggcnaattggagctccccgcggtggcggccgcccgggcgggtacncngggccctgtgctgtctgcaccgaggagagcggcctgncggaagngggccaccatatctggaaactacagtctatgnttngaagcgcanaagggaataaacanttaangactcccccngggacctgnaggatggncttttccatgggggccggagcngcagcttacaatgnaaaatnacanactggngctnttggagaaaactatanttggcataattcccattaaccacnatgacttcaaaattttaa

SEQ ID NO: 2238 - DNA, 222 bp, Homo sapiens
  misc_feature 207: n = A,T,C or G
cactacttagggcgaattggagctccccgcggtggcggccgcccgggcaggtactcctgaaatggcttctgcagagatggacctatgccggggacagcacacctggactcaaaaggcagggattggataggaagaggaataaaatataaaaatcagagaactgctgaaattctgtgacccctttttagttaaaaaaaaaaaaaaaangaaataaaagtacct

SEQ ID NO: 2239 - DNA, 453 bp, Homo sapiens
  misc_feature 320, 323, 332, 333, 334, 335, 363, 373, 393, 405, 428: n = A,T,C or G
ggtacatttttaaagaggttgttttttggccgggcgcagtggctcatgcctgtaatcccagcactttgggaggccgaggtgggcggatcacgaggtctggagtttgagaccatcctggctaacacagtgaaatcccgtctctactaaaaatacaaaaaattagccaggcgtggtggctggcacctgtagtcccagctacttgggaggctgaggcaggagaatggcgtgaacctggaaggaagaggttgcagtgagccaagattgcgcccctgcactccagcctgggcaacagagcaagactccatcccaaaaaaaaaaanttnaaaaaaaannnnggtaccttgcccggggcggccgctctanaaactaaggnggggatccccccgggcttgnaagggaatttcnatattcaaagctttattcgaatnccgttcgaccttcgagggggggggg

SEQ ID NO: 2240 - DNA, 431 bp, Homo sapiens
  misc_feature 26, 39, 40, 291, 353, 420: n = A,T,C or G
cggtggcggccgcccgggcaggtacntggggaaggcgcnncgtgcgtcagcttgacagcagaagcaggaggagagctggcgggaagacatgcaccccttgaagacccagagagaggccgtctgtctaccgcgtagcagttacatcagactgagacacttcctgtttacaggagactataaaattcctgccccgtgctcatttggggctgacgccattttagacctcagcccatctgcacccaggcgctcactgaaacagtgtgttgctccacaccgccttgttttgcttgntggcgcgctctcagggttccgaccaatccaagagccttgcagaaagcattaacgtgcttttntctttggcaagagtttttctttgctctgatcttggagaccatccctctgcctagggggaaaacatangggaatacaga

SEQ ID NO: 2241 - DNA, 431 bp, Homo sapiens
atagggcgaattggagctccccgcggtggcggccgcccgggcaggtacaccatgttaagagatagcaatgcaaccgcagccaagatgtctttagatgtaatgattgaactctacagaaggaacatctggaatgatgcaaaaactgtcaatgttatcacaactgcatgtttctctaaggtcaccaagatattagttgccgctttgacattctttcttgggaaagatgaagatgaaaaacaggacagtgactccgaatctgaggatgatggaccaacagcaagagacctgctagtaccctctcttccagcacccaggccagtattgagatcgattctctctatgaaggaatcgacttctatacctccattacccgtgcccgatttgaagaactgaatgctgacctgtttccgtggcaccctggacccagtaga

SEQ ID NO: 2242 - DNA, 357 bp, Homo sapiens
  misc_feature 7: n = A,T,C or G
tagggcnaattggagctccccgcggtggcggccgcccgggcaggtacagtggcgtgggcctgctttcccgccagtgcccactcaaagtttcttacggcataggccgatgaggagcatgatcaggaaggccgggtgattgtggctgaatttgactcgtttgtgctggtaacagcatatgtacccttgtcctcttcttcagtgacttaaaacaattccaggatcagaagagaagccaacgtgacatcctcgataaaactggggataagctgaagttctgtctgttcaccgaagtggttgaaaaacaatttcgagatccagaagtcccttgatgggttcaccatcaggtgttcacaaaaa

SEQ ID NO: 2243 - DNA, 238 bp, Homo sapiens
  misc_feature 44, 201, 238: n = A,T,C or G
tacttagggcgaattggagctccccgcggtggcggccgcccggncaggtaccttcacctgctttggagaaatcctgaatgtgtccccagaaatgagacgagaagtcttctcctgatcaaaggtcttttcttgattgaagggttcgtggtttcacaggcttcaaggaaagaagccatggacctcagtggtgagtgttacagntccattagagaaacatgcagacccccccgcgtacctn

SEQ ID NO: 2244 - DNA, 304 bp, Homo sapiens
  misc_feature 37, 38, 43, 45, 65, 131, 170, 237: n = A,T,C or G
gccgccgggcaggtactttcccttccctagaaaagcnngactngncgctaacggtgaaggaccanggcaggcgtccctgagtggtctgacacctttgaaacgtgagtgaataatcagagaggtgtccctgnaatgataaacaccaaggaaaggctgccttcccagtctgngaccaagcgccagagttttgggtccacggataaaacgtgtctcgtttgtctctaccagaaaatgaanggaatttgaaattaagagaagggagagattaaaaaaaaaaaaagaaaaaaaaaaagtacctcggccg

SEQ ID NO: 2245 - DNA, 258 bp, Homo sapiens
aggtacgcttcgacccacgcgtccgagaaaagactattaattatttgtgcctttaaaggttaattatttcaaccttaaaagaatcttataagaacccattaataaaaaagaatgcaaatatattgcccaaaaaaatacacaaattattgtctttcatataggggaggaaataaatatgtttcatctgaattgtctgaagtaagtcatgaatggagtcagggtaaaaaaaaaaaaaaaaaaagtgcggccacctgcccg

SEQ ID NO: 2246 - DNA, 340 bp, Homo sapiens
ccgggcaggtcaagcttcgacccacgcgtccgcgaatactgcatactgtttaaggtagtatataagtttatgagagaagtggagagctttcttccttgaaaagtcggtatttgttgagataccatttgcctcacagagaggtgttccccactcccatccccattgccagataataaatattttgagaaaagtgacctaaaacagctgaaatcttaggtgcatctgtctgcagacctccttaagcaggctgtatcttacaattcccttactgcactgggtaagtgttaacttagtttttgttgtttgctcttttgctttaaatattctccaaattacacct

SEQ ID NO: 2247 - DNA, 490 bp, Homo sapiens
  misc_feature 16, 42, 73, 232, 237, 266, 272, 301, 304, 326, 329, 332,345, 365, 369, 375, 376, 379, 385, 397, 406, 408, 426, 433,439, 441, 459, 460, 474, 476: n = A,T,C or G
aggtgtacaagcttcnacccacgcgtccgaaagattcttggntgagcatggtggctcatgtctgtcatctcancaatttgggaggcaagggcaggaggatagtttgagcccatgagtttgagaccagcctggacaacatagtgagaccccatctcagcaaaaaaaaaaaaaaaaaaaaaaaaaaaaaagtgcggccggccgcactttttttttttttttttttgctcaatanaagtntggaataattccaggtaatttaaagcatntttttnaattggtgtaagctgctccatgaagtcanctngctcctctaattgggatggttnttnatnacacggcatgttntaagagtttgatgacaggancatnagtgtnnggncccagnacccccttctgngcggacttntnggcatcctcccttcaaanctcaatncttttnanggggccctgaggaaagtnntttattaaaagggntntttgcaaatttttg

SEQ ID NO: 2248 - DNA, 123 bp, Homo sapiens
  misc_feature 60: n = A,T,C or G
aggtcactttttttttttttttttaaaataattcttttaattattgatgctttgaataanaagtccattttactaaatttagtataaattatcggacgcgtgggtcgaagcttgacctgcccg

SEQ ID NO: 2249 - DNA, 433 bp, Homo sapiens
ggcgaattggagctccccgcggtggcggccgaggtactcactgacacgtttctcttgacactgagatggtcgcaaacaaaacaccgttcttgcctggatgaagcaagagttcacataaaagagctttataaaatgtctatgaaggagaattgataatatcagaagagctccagcacttcaattgaatataatcctctattattcttttcttgatttaatttctgtagctcccgaaaacttacttcaatcttgttgagctcagaataaacagatatctaaagaaaagagtttcagagtaacttttaccataatgtctacatagaaacaaatcttccaagagtaagctatttaaggacaaattttaagaataattgtaattcaggtgatacttgggtttttgtacaagcttcgacccacgcgtccgacctgcccg

SEQ ID NO: 2250 - DNA, 130 bp, Homo sapiens
ccgggcaggtcaagcttcgacccacgcgtccgataatttatactaaatttagtaaaatggacttcttattcaaagcatcaataattaaaagaattattttaaaaaaaaaaaaaaaaaaaaaaagtgacct

SEQ ID NO: 2251 - DNA, 487 bp, Homo sapiens
  misc_feature 35, 56, 95, 122, 145, 171, 188, 219, 364, 414, 426, 469, 470: n = A,T,C or G
tgagctaactcacattaattgccgttgcgctcacntgcccgctttccagacggggnaaacctgtcgtgccagcctgcattaaatggaatcggctnaacgcgcgggggtaggaggcgagttangccgtattgggccgctcttccgntttcctccgctcactggacttcgctngccgcttcgggtccgtntcgggctgcggccgaggcggttatcagcttnactcaaaaggccgggtaatacgggttatccaccagaaaatcaagggggataaacggcagggaaaagaaacatgtggaggcaaaaaggccagcaaaaaggcccagggaacccgtaaaaaaggccccgttgcctgggcggttttttncattaggcttcccgccccccctggacgaagcattcacaaaaaatccgacngcttcaaagttnagaaggtgggcgaaaaccccgaacaagggactaattaaagganncccagggcgttttcccc

SEQ ID NO: 2252 - DNA, 239 bp, Homo sapiens
  misc_feature 59, 104, 109, 150, 163, 181: n = A,T,C or G
aggtcttcgacccacgcgtccgattttactctgtgtattcgtggtggtgggttatagtntaccaagttgtccaaaatggataattcatgtgagataggcaagancaagngttgtatcccaataccatttggtgaaaaagttgaacttcanaaaggataagtantttgccaagatcacctgncaacctgcatagtcaaatttgagatggaactcagctactccaatatctgtatttgcag

SEQ ID NO: 2253 - DNA, 640 bp, Homo sapiens
  misc_feature 100, 359, 373, 402, 403, 404, 405, 406, 407, 408, 409, 410,411, 412, 413, 414, 415, 416, 417, 418, 419, 420, 421, 422,423, 424, 425, 426, 427, 428, 429, 430, 431, 432, 433, 434,435, 436, 437, 438, 439, 444, 445, 446, 447, 448, 449: n = A,T,C or G
  misc_feature 450, 451, 452, 453, 454, 455, 456, 457, 458, 459, 460, 461,462, 463, 464, 465, 466, 467, 468, 469, 470, 471, 472, 473,474, 475, 476, 477, 478, 479, 480, 481, 482, 483, 484, 485,486, 487, 488, 489, 490, 491, 492, 493, 494, 495, 496: n = A,T,C or G
  misc_feature 497, 498, 499, 500, 501, 502, 503, 504, 505, 506, 507, 508,509, 510, 511, 512, 513, 514, 515, 516, 517, 518, 519, 520,521, 522, 523, 558, 559, 560, 561, 562, 563, 564, 565, 566,567, 568, 569, 570, 571, 572, 573, 574, 575, 576, 577: n = A,T,C or G
  misc_feature 578, 579, 580, 581, 598, 601: n = A,T,C or G
ccgggcaggtttttttttttttttttgcaacattgccctttgatgtccccatgagggccaggcccaggcagaacccatcccattttatccttaaactcanaaggaaatttgtctaaatattaaaggattaatatgggaataaaaaatgaaccttaaaccctgccactgatacacaagctgtctctcttagagttcaatgaacacttcaggagagtatttccaacaatatttagatattggaatatctaaatattgttgatttagataaccaccctagatttctcaccaccctagaacatttagtggggagacattcttttctcctttttctgataacttggtcagaagtgattgactgngcaaatggtatttntccggacgcgtgggtcgaagcttgacctnnnnnnnnnnnnnnnnnnnnnnnnnnnnnnnnnnnnnngaatnnnnnnnnnnnnnnnnnnnnnnnnnnnnnnnnnnnnnnnnnnnnnnnnnnnnnnnnnnnnnnnnnnnnnnnnnnnnnnnnattgcgcgctttggccgtaaatcatggtcatagcnnnnnnnnnnnnnnnnnnnnnnnntccgctcacaaaatttncancacaacataccgagcccgggagccataaaagtgtaaaag

SEQ ID NO: 2254 - DNA, 590 bp, Homo sapiens
  misc_feature 15, 16, 32, 39, 41, 42, 43, 44, 68, 211, 213, 214, 218, 221,244, 255, 256, 262, 439, 455, 457, 463, 485, 505, 512, 513,518, 520, 521, 529, 530, 536, 540, 541, 542, 546, 556, 574,575, 576, 588: n = A,T,C or G
aggtacatgtgccanntttgttatatctttanctatatncnnnnctacttgcccctgatcatctatgngtagacaataattagtaaggtcaaatttttcacaaactcctccttcagctgctagcaagtaatcaagagctagtctattttgatagatagcatttctcatcagagtctcttgccaggcaagaacagtcaaggcttgagtggtntnnttantgnctgcattctaaaactgcttggcnccatatgacanngccgancatgtagatgggggttcgatatccccatgagacatcttgtgcccaagtggcaggtccatagtattgtaagattttttcagggggccattcatcgtctttccaatcacctatggctatgcttcatttttcacaggaagcacagactgggaagcccagaagtttacctgtttttatggncccctaaaaaaaaaananggttcnatgggtgccaaatttacacagnttacctggcccacttgattnagggaannttttnanncattaagnnccgaancccnnngggnatcaaaaagntttggcccctggcccggnnngggcccggcccncc

SEQ ID NO: 2255 - DNA, 252 bp, Homo sapiens
acctgcccgggtggccgctcgaggccgcccgggcaggttttatttaacattcaaacttcattaagacatgtgcaatatggcaattttactggggattaaaccctacctaggattgcttgctggggcttagcaacagggtccagttcacacttagcactaattaaatactttattgaataaatacaataccaaacaaaatgcattcaaatgccggacgcgtgggtcgactcaagctaggtcggacgcgtacct

SEQ ID NO: 2256 - DNA, 647 bp, Homo sapiens
  misc_feature 321, 327, 343, 346, 360, 365, 388, 395, 403, 478, 502, 520,526, 567, 571, 581, 605, 607, 608, 611, 630: n = A,T,C or G
acttttttttttttttttttttttaaaaattcaaaaaattagtttattagcttaatataattaggtcaatggaatcctgttttgatctcaatacttcccatattgcaatatataaatgtgacaaattcagctgttttgcggcatagataagtgtctaagctgggcagttagtctacccgtttatagttcatgttcttcatggctttgcagcatttgtcactttctatgatgtgttcaaagaccagaaaaggccacacttgacctgtcagctggtccttgaacagctgtaggtttttttttttttgagacagagtctccctntgttgnccaggctggagtgcantancgcaacctcgactnactgnaacctctgcctccaggttcaagngattctnctcctcanactcctgagtagctgggattacaggcccatgccaccatgcccggctgatttttatatttttagtagagatggggnttcaccatgttggccaggctggtnttgaaaaccctcggccgnttctanaaactagtgggatccccccgggcttgcaagggaaatttccnattnttcaaaagcnttaatcggataccccgtccaaccntnnganggggggggggccccgggancccccagctttttggtt

SEQ ID NO: 2257 - DNA, 399 bp, Homo sapiens
  misc_feature 219, 260, 269, 270, 276, 281, 287, 291, 293, 294, 312, 313,316, 341, 342, 343, 352, 353, 358, 371, 379, 380, 391: n = A,T,C or G
agggcgaattggagctccccgcggtggcggccgcccggcaggacctcagattaaaaatattgctgaggtcagacgccacaattttcatgactttcttcagaagtagcacattttcgtgacttccgctgtcctctgaaaaacaaagttatttggaacatgttcatgcaaaagtgattctgaccaagtctaaatcgagcttttctactgacatgaaactgntggaaaactgatcttattttataagaaagtgttttcccctnagggggggnngtgtgntttcngaacancccncnnattattttttcccccggnnccntataaaatattggggtccccccccnnncgggggggnnggggnattttaaaaattntttttttnntcccccccccnctgggggg

SEQ ID NO: 2258 - DNA, 250 bp, Homo sapiens
  misc_feature 16, 213: n = A,T,C or G
ggcgaattggagctcnccgcggtggcggccgaggtgtacaaagcttcgacccacgcgtccgagcagaacttggcagcaacagaggaagggcccctggagccggctgtcgtggatgcctttaatcaagcctggcatttggttgctcacgaatgtcccaactacttccgctaggcccatcatggctcaggctgcccaaggcttttctgtcacctnttttgttctctcacactgaccaagtcttacctgcccg

SEQ ID NO: 2259 - DNA, 161 bp, Homo sapiens
  misc_feature 14, 86: n = A,T,C or G
cgaattggagctcnccgcggtggcggccgcccgggcaggtcttcgacccacgcgtccgtagtaataggaattaactgacccctttnggatgggggagagcatcaggctggggtcaggtaagtgtaaatggccttctgagcatgctcttctaggctgactcc

SEQ ID NO: 2260 - DNA, 349 bp, Homo sapiens
ccccgcggtggcggccgcccgggcaggtacaattagttatcaattcatgggctatggccactggtttgctggatggtcagggacttggaaggaacatgactggaaaattggtgacaaaacggtctgtggaagaggtatatacacagatctttctgaatgggtgaaaaatgtgaggatatttgtgtctcatatgaatgcccccaaagaatgacttcagcagaagaggattttaataaccaagtagataggatgacctgttcagcccctttctccaaccatgcaggtaactgcccaatgagctcatgaataaagtggccatggtggcaggggttgttcggacgccgtggtt

SEQ ID NO: 2261 - DNA, 372 bp, Homo sapiens
  misc_feature 31, 33, 37, 40, 42, 219, 257, 270, 352, 362: n = A,T,C or G
tggcgaattggactccccgctgtggcggggngncggncgncngagtaagacttcgtctcaaaaaaaacaaaaacaaaaacaaaaacaaagaagttagcctggttgggcatggtggctcatatctgtaatcctagcactttgggaggcccactggggatcatttgaggccaagaaattttgagaccgaagcctgggcaacgttagttgaaccctcatctnttacccaaaaaaaaaaaaaaaaaaaaaaaagttgccgngcccgcttcttantaaactaagttggattcccccccggggcctggcaggggaaaatttcgaatattcaaaggctttattctgaataccccgttcngacccttcgnaggggggggg

SEQ ID NO: 2262 - DNA, 198 bp, Homo sapiens
  misc_feature 79, 101, 111, 136, 162, 164, 167, 168, 175, 180, 184, 186,188: n = A,T,C or G
aggtggacttgattcataaccaaccaacccaggctgtcatgctaaaaaaaagggcagaatctttgctgctgaactactngcatagggttgactaccattgntcctttagtnttagtttgggctagcaaaaaggtgngtcctttgccatgtaaataaaagccntntcnnggtaatnaaaanggtntntntttttaactt

SEQ ID NO: 2263 - DNA, 246 bp, Homo sapiens
  misc_feature 204: n = A,T,C or G
cgaattggagctccccgcggtggcggccgaggtctcccaaagtgctggaatcacaggaatgagccaccacacccagccaaattgggcacaaatttaaaatttgacttttattaatgatatggtaaagagatctagcttggtcatgacacccttgtgttatacggtgacaggcaaatcatttaaaaatatctaaactataatttnctgtagttcacatgaattggatattcttgaagcggacgcgtg

SEQ ID NO: 2264 - DNA, 232 bp, Homo sapiens
  misc_feature 206: n = A,T,C or G
ggcgaattggagctccccgcggtggcggccgaggtacattttttggggggagagacacagatttttacactaatatatggacctagcttgaggcaattttaatcccctgcactaggcaggtaataataaaggttgagttttccaaaaaaaaaaaaaaaaaaaaaagtgcggccacctgcccgggcggccggccgcccgggcaggtntcgggcccgagaagacctcctttttc

SEQ ID NO: 2265 - DNA, 309 bp, Homo sapiens
  misc_feature 56, 69, 97, 104, 105, 122, 148, 163, 177, 196, 210, 277,279, 290: n = A,T,C or G
aattggagctccccgcggtggcggccgaggtaccgcgtccgagctaacgaatgctngactaactagatnccaaagcttgctctgtgaaaattcccgnataaccnntgaagtgggcgacaccntaaccctgcacaccttactcctggtntcagagagcccagtntgaacataaactgngtagaggtgttagactcancctaccctagtaangcccaacctccgagaccaaccttaaacatcagtagactgcgagctgtatgtggataggagcagtttngncaacccctgcnaagtgactctgaaaaagac

SEQ ID NO: 2266 - DNA, 129 bp, Homo sapiens
  misc_feature 69, 70, 77, 99, 109, 119: n = A,T,C or G
ccgggcaggtcttgagtcgacccacgcgtccgcctagcaaagctgtttccactgaatgcatctaagcanngatgganctatgccaaaaccaccacaggngtttcacttnaatgataccncgaaacaagg

SEQ ID NO: 2267 - DNA, 324 bp, Homo sapiens
  misc_feature 180, 221, 234, 242, 245, 258, 263, 283, 287, 302: n = A,T,C or G
tatagggcgaattggagctccccgcggtggcggccgaggtacaatatgctacagggaagaaaacgttccaaaaacaagaaaaagttggaaaaggcaatgaaagtgctcaagaaacagaaaaaaaaaaaaaaaaaaaaaagtgcggccggccgcacttttttttttttttttttttcaatnttatttatcaaaataaatttattaaaagttttcaaagaccnctttaaagtgtanctgccttnaanacagatttttggnactcntaacggacactgcagttttnaacnccatagcactcattntatttcacacatcatttttaac

SEQ ID NO: 2268 - DNA, 116 bp, Homo sapiens
  misc_feature 95: n = A,T,C or G
tatagggcgaattggagctccccgcggtggcggccgaggtacaaaggtatgtaatccaggaagtgaccagcctgatgcgtgttatgactcactgnaagcctcccatgattaaggac

SEQ ID NO: 2269 - DNA, 406 bp, Homo sapiens
  misc_feature 75, 76, 77, 78, 79, 80, 81, 82, 83, 84, 85, 86, 87, 88, 89,90, 91, 92, 93, 94, 95, 96, 97, 98, 188, 210, 212, 277,291, 358, 374, 385: n = A,T,C or G
tagggcgaattggagctccccgcggtggcggccgcccgggcaggtcttgagtcgacccacgcgtccgccggagannnnnnnnnnnnnnnnnnnnnnnntgatctagatcacgagcagccgcactttttttttttttttttttttttttttggacgaattcaggagtcctttattagccggcagccganagacagctagcgctcaaaattntnttggccccgaagaaggagctagattttcttttatactttggtttaaacaggggagagggggagtntagttgaaacaatnttacagaagtaaagtaggcaaaaagttaaaaggataaacggttacaggaaagtaaacagttccaggngcagaggctttaagtntatcctaaggngatggaccccgggctttgggc

SEQ ID NO: 2270 - DNA, 274 bp, Homo sapiens
  misc_feature 25, 103, 171, 271, 274: n = A,T,C or G
aattggagctccccgcggtggcggncgaggtcaagcttcgacccacgcgtccggtttgtttttttcttacggcaactcaaagcaaagagctggaggagccagncattataattgcttactctcatcgcttagcgccccaggtgggatgtgtttccaaaacacatttttgtntttataaggaaatgtagttaggattaattttattgtcctaattagaactcacattttggttaaatcctcaatttcattaaaaaaaaaaaaaaaaaaaaanggn

SEQ ID NO: 2271 - DNA, 530 bp, Homo sapiens
  misc_feature 2: n = A,T,C or G
cnctacttagggcgaattggagctccccgcggtggcggccgcccgggcaggtcttgagtcgacccacgcgtccggtgatatgtcacaatgccgtgtagccagagcctagacaaaagttacagcacctgggagatcagtgcagagatatgtcacaatgtccccagtaggcagagaccaggcaacagttggatcacctcgggatcagtgcagagacatgtctcaatccccctgtgggcacagcctagacaagagttaaatcacctcggttaacagtgcagagatatgtcaatattcccctgtaggccgagcctacacaagtgttacatcactaaggtgatcaacgcatagatatgtcaaaatattgccgtgaaagcagagtctagacaagagttacatcacctgggcgatcagtgcagaggtatgtgacaaggcccctttaagcagagcctagacaatagttacatcacctgagtgatcagtgcagaggtctgtcacaatgcccctttaggcaagagcttaaacacctcggc

SEQ ID NO: 2272 - DNA, 606 bp, Homo sapiens
  misc_feature 71, 76, 77, 93, 103, 146, 213, 264, 297, 303, 311, 331, 333,355, 358, 388, 421, 424, 564, 599: n = A,T,C or G
aggtacttgaccccacagccatctgggatgagccgcttttcagccaccatgtcttcaaattcatcagcatngaacnnggtgaagccccacttntttgagatgntggatcttctggccggccaaggaaacttgaacttggccctgcngcagggcctcaatcacattgctcctttgtttcttgcaagcttttgggttgccgggattggggacatngataaacttgggccaaattgtgaaaccctgggccacaagtgccctgggggngcctttccaaaaagggccaccctccgccatgcnctgttntgggaagnccttgttcaagccccccaancnacaggggaaccaaaccaattcnttngtttggaatggccgggaattgaaccgtggnaaagggggggttggggaagccccgccacccccnggnataatggggaaagccaatcttttgccaacaaactttttttaaccaatgttacccttgcccggggccgggtccgcttctaagaaacctaggtgggggatcccccccgggggcctggcgaggggaaattttcgaattattcnaaagctttaattctgaatacccgtccggaccctangaggggg

SEQ ID NO: 2273 - DNA, 210 bp, Homo sapiens
  misc_feature 144, 168, 172, 174, 176, 184, 188, 207: n = A,T,C or G
atagggcgaattggagctccccgcggtggcggccgaggtctagcttgagtcgacccacgcgtccgaaaaaaaaaaaaaaaaaaaaaaaaaaaaaaaaaaaaaaaaaaaaaaaaaaaaaaaaaaaaaaaaaaaaaaaaaaggggnggccggccgcccgggcgggtcccntcanananaagggggngggngctaatccagtaccaaacnttc

SEQ ID NO: 2274 - DNA, 394 bp, Homo sapiens
ttagggcgaattggagctccccgcggtggcggccgcccgggcaggtaccatttctactgtagaggaaaatatatgacaattatcactgtcactgcctgacatacaaaaatggaacagaacagtggggtaatgaagggaggggagggaaagggaagagcaggagagagaggagttggaggagaggggaaacaaagggaaaagggtctattaaacagaggcctagagaagctaaaatttggaaatggcaaatctgagaagagcctgaataaaaagtggggctgaggccatgcacagtggctcacgcctataatctcagcactttgggaggccgaggcaggtggatcacctgagatcaggagttcgagaccagcctggccaacatggcaaaacacct

SEQ ID NO: 2275 - DNA, 219 bp, Homo sapiens
tacttagggcgaattggagctccccgcggtggcggccgaggtcaagcttcgacccacgcgtccgaaaaatgggagacaatttcacatggactttggaaaatatttttttcctttgcattcatctctcaaacttagtttttatctttgaccaaccgaacatgaccaaaaaccaaaagtgcattcaaccttaccaaaaaaaaaaaaaaaaagacctgcccg

SEQ ID NO: 2276 - DNA, 400 bp, Homo sapiens
ccgcggtggcggccgcccgggcaggtctcctgcctcagcctcctgagtagctgggactagagggatgaaccaccatgcccaggtaattttttaatttttagtaaaggtcgggtctcactatctttccctgctcagctggtctggaactcctgggttcaagtgatcttcccacctcagcctcccaaagtgctgggattaaagaagtaaactaccacactcagccacacataggtaatttaaaatatttccatagtcacaattaaaaacacatataaataggtaaaattaataacattttatttaacccaatatattaaaatatttccactttaaaaagagacctcggccgctctagaactagtgggatcccccgggctgcagggaattcgatatcaaagct

SEQ ID NO: 2277 - DNA, 141 bp, Homo sapiens
  misc_feature 139: n = A,T,C or G
atagggcgaattggagctccccgcggtggcggccgaggtattcgacccacgcgtccgtagtttttatctttgaccaaccgaacatgaccaaaaaccaaaagtgcattcaaccttaccaaaaaaaaaaaaaaaaaaaaangt

SEQ ID NO: 2278 - DNA, 562 bp, Homo sapiens
  misc_feature 2, 24, 36, 82, 96, 168, 216, 237, 240, 269, 304, 331, 334,455, 467, 468, 516, 550: n = A,T,C or G
gnacccagtaatcacataaaggtntgcaggtcatgntgtttatttagcttaactgttttttttttatttgttgaagggggtnggtgttatttcagnctttttcttattgggttgaccagacttggtaaaatctgtaagaaagttccataaattattgggggggaaggnatttcctctgaaattgggctaaaattccttgtagctgaaaaaaaaaanaacaaaaaaacaataaaatanggnggccgggcccgcttctaagaaaactaggngggggatcccccgggggcctgcaggggaattccgnatatcaaagccttatcggattacccgncgnacctcggaagggggggggggggccccggggtacccaagctttttggtttcccttttaagtggaagggggttaaatttgccgccgcttggggccgtaaaatcaatgggtcataaggctggtnttccctggtggnngaaaaatttggttaatcccgcttcaacaaatttcccaccaccaaccantaccgaagcccggggaagccataaaaaggtggtnaaaagccctggg

SEQ ID NO: 2279 - DNA, 425 bp, Homo sapiens
  misc_feature 1, 4, 298: n = A,T,C or G
nggngaattggagctccccgcggtggcggccgcccgggcaggtacaaaaaaaaaaaaaaaacaaaaaaaaaccacttcaactaattcatctgacaatgctgttcatattcatgacgccatttttttgtttgttgttgttgttgttttcctaataataaagaaggagacttagggctgttgggctgatatatgtttgggggtcccacctccccgcctcatccgtacctcggccgaccagtgcaaatatctacccagttagaagagtaaataccatcttagtgttattatcaaaatattntgaactcatgaacctcctcagactgttgctggggactcccagatatcaatactctgagaaccactgatctaatgtttctttagtcagtttctatttgttctctagtataaccaagcataaaagtaat

SEQ ID NO: 2280 - DNA, 503 bp, Homo sapiens
agggcgaattggagctccccgcggtggcggccgaggtcttcgacccacgcgtccgctcagggcacaaagtgatcatttgggatcctaagttaaaaaggaaatgcaagagtaggatactccaattccagagtctttgcaggaggctaatcccacaagaagggtagcatcagagaaagtggcattggtcttagtggtggatcatcaggtagacaagtgatagtgtgtgtaacccatctgaaattcattttaccgtcaccactcttacaaaggacagtttattcccaaggacagtgctgacggggagggggacaggcagggagttaggagggttttcgaggatttcaaacaggtggaacccatccatccctattcccaagggccacttacaactctaaggggtggttacaggattaactaccagttcattttcaaaatgctgctttgaactcagagggttgatacttttaatttgtaattttttgtaaaactttttacaaaatagt

SEQ ID NO: 2281 - DNA, 375 bp, Homo sapiens
ccgggcaggttacaagcttcgacccacgcgtccggtcattattaccctcactgtcaacccaacacaggcatgctcataaggaaaggttaaaaaaaaaaaaaaaaaaaaagtgcggcctcgagcggccgcccgggcaggtacaaaaaaaaccttacataaattaagaatgaatacatttacaggcgtaaatgcaaaccgcttccaactcaaagcaagtaacagcccacggtgttctggccaaagacatcagctaagaaaggaaactgggtcctacggcttggactttccaaccctgacagacccgcaagacaaaacaactggttcttgccagcctctagagaaatcccagaacactcagccctgacacgttaatac

SEQ ID NO: 2282 - DNA, 359 bp, Homo sapiens
  misc_feature 15, 108, 186, 192, 198, 199, 245, 263, 272, 276, 296, 321,329, 337, 338, 339: n = A,T,C or G
gcgaattggagctcnccgcggtggcggccgaggtcaagcttctacccacagcgtccgtttatgttcagcaataaaggttctatccgtaaaaaaaaaaaaaaaaaaagngcggccggccgcccgggcaggtactatgactagacacatgatgcatggctaaaaagctcttctggataactccttagngaaggnctaacnnccccaccaccatcaacctacagccctgccttttttttttttttaanaagtctgtcaccacaatnttgtctggngctngatttcaaataatacatttntagaacctgcccgggcacacgcccnataacgantggttttnnnttatatcaattaacgttaaa

SEQ ID NO: 2283 - DNA, 402 bp, Homo sapiens
ccgcggtggcggccgaggtactccagcctgggcgacagagcaaggctcagtctcaaaaaaaaaaaaaaaaaaaaggagaggaatagtaaatttatagtggagaaatctgcagtcactaacttaaccaaataaccacatggatgtatcccttattaaaggtaatcgaaagggcacagcgttacttctgtggaattcttgcccaaaatgcataatctcaatcaaatcataagaaaacatcaaaattgagaggcattctacaaaaccaataattaaccaatattcatcaaaagtgtcaaggtcataaaagacaagatgtttatagaaatacattaattttggtttctacttaaattttattttttaaaataattgttttagagatgtggccttgttagttggcca

SEQ ID NO: 2284 - DNA, 259 bp, Homo sapiens
  misc_feature 250: n = A,T,C or G
atagggcgaattggagctccccgcggtggcggccgaggtgggatttttttttttgtttttttcttttttttttggtttgttttaaatcagtgcataaatttttcttttctcatttcagcagatggacaaacagatggactctacagctaagtggaatatcaaaggtagaggggtgattctgtgagactgataggcctgactattctcaattctccccactgcagtgttcacgcggacgcgtgggtcgaanacctgcccg

SEQ ID NO: 2285 - DNA, 188 bp, Homo sapiens
  misc_feature 129: n = A,T,C or G
tagggcgaattggagctccccgcggtggcggccgcccgggcaggtcgcgtcgtaacagtgtaacatgtattatggtaacttctaatcttgtggccttagacagtctagtccaaaggcataaagaaagtntgctttaaaaaaaaaaaaaggaatggttatcttcaaaaaaaaaaaaaaaaaaaaaaagt

SEQ ID NO: 2286 - DNA, 200 bp, Homo sapiens
  misc_feature 19, 71: n = A,T,C or G
tagggcgaattggagctcnccgcggtggcggccgaggtacgactcatatagggatctagatcacgagcggncggccgcccgggcaggtctcccatcttgcgcaagttggtcacgtggtcacccaattctttgatggctttcacctgctcattcaggtaatgtgtctcaatgaagtcaccggacgcgtgggtcgaagacct

SEQ ID NO: 2287 - DNA, 200 bp, Homo sapiens
gcgaattggagctccccgcggtggcggccgttaaaggaataatctgcagaacatcttgatttacaagggacaaaatgatgcaaattatatgctgtccaacctactggtgaactggatcagaatggtccaaggactgttaaacagaggaagtatttacattttgaaaacttgcggacgcgtgggtcgaagcttgtacacct

SEQ ID NO: 2288 - DNA, 191 bp, Homo sapiens
  misc_feature 40, 54, 60, 63, 74, 80, 92, 125, 128, 177: n = A,T,C or G
tagggcgaattggagctccccgcggtggcggccgcccggnctggtacataaaanaatttnttngtctttaaatngatacnaatgtctatcanctttaatcaagttgtaacttatattgaagacanttngatacataataaaaaattatgacaatgtcctggaaaaaaaaaaaaaaanagtgcggccgacct

SEQ ID NO: 2289 - DNA, 314 bp, Homo sapiens
  misc_feature 89, 163, 224: n = A,T,C or G
agggcgaattggagctccccgcggtggcggccgcccgggcaggtaccatacttgtcattgcgtagacttcttatcaaaatttcacattnatctgtaggaaaatgtaaagttggtaaaaattgtttacacaaatcacacattttccatccttgacaattgcagngtttttttttaaatattgctgtattaagacaattttaactgaagtaggttgtagaggctanaaacctgattaatagagcagtattagacaattctaactgaagtaggttgcagaggctagaagaaacctgattaatacggacgcgtgacct

SEQ ID NO: 2290 - DNA, 337 bp, Homo sapiens
tagggcgaattggagctccccgcggtggcggccgaggtaaagcttcgacccacgcgtgcgagtcagggaaggtttgtttatgttacatttatttcaccagaactattttaatatatcaaaggggtttactatgccaaacaaaattctagggaaaaatactgctaaaaatggatgcctcatcagaacatgctgttgagtccaatgtgccataagacattttagcatgttaaatagcacttttaatagcaaaaaaaggcacatcaactgcgaagttatccttagtttgcaaatgctttttctagattaatgatttttcaatcattagggtacctgcccg

SEQ ID NO: 2291 - DNA, 122 bp, Homo sapiens
cgctacctgcccgggcggccggccgcacttttttttttttttttttttcaagttttatgatttatttaacttgtggaacaaaaatcggacgcgtgggtcggacgcgtgggtcgaagctacct

SEQ ID NO: 2292 - DNA, 151 bp, Homo sapiens
acttagggcgaattggagctccccgcggtggcggccgctacctccaagcaggatgatgggctagacatggagcatacataaacgggcaagattcagtccctgaccgcaaggcacttacagtctagttgggaagggagacacaaatgtacct

SEQ ID NO: 2293 - DNA, 544 bp, Homo sapiens
ccgcggtggcggccgcccgggcaggtaccagagactccaggaaaaatcaaaaatttgtttttgcaattagccgagcacgtagcccagtctctaaatgtcacttcatattatgtttgtaaaacaactgtaataagagatcaatggccataagaagcctgagaattagtgcctacagacccagttcctgatgaattctcagcccaaaagaatcaccctgatcatttctaggttctaaaagtttcaattattggacaatattgcatagctagaaaaaaaaaaaaaaaaaaagtgcggcctcgagcggccgcccgggcaggtactttgagcaggataataacataaatttcatttaaaaagttgtatttatagccccagtaaccggaaagaattataagtaattatggaagtattatattctgaccataccaagagttaaaaacaaagagttcctactaaagaggaatattttcaagatgatctggtccatcatgtgcatagttaaagaatggttggtttaataaagattcttttgcaaataaagaat

SEQ ID NO: 2294 - DNA, 450 bp, Homo sapiens
aggtacaagcttcgacccacgcgtccgatgaacaactggctgctctgtcccagggtccaatatccaagcccaagaggaaaagagagaaaaaaaaaaaaaaaaaaaaaaaagtgcggccggccgcccgggcaggtacagataaatataggaaactacttcagattattggacaaataagaatttcagtgtgtcactacctataattaagtagcagcacaccacaaccacagcaagtaaacactaatctcctctactgcctttttggggtcttttccagtcacaggagctaatttacagggataccactgggtttcaaccaatctctgaaagttcctttattatgagttttgaaatttaactagtgcatcacctacaattctgttggctagtttttttcttactcttcactaattaagttttaatacaatatgtaatggtttcaaaattttt

SEQ ID NO: 2295 - DNA, 542 bp, Homo sapiens
ttagggcgaattggagctccccgcggtggcggccgaggtcttcgacccacgcgtccgaaactttaatttttaggaataacatattgacttactgaactgaagcattctgagttgaaaggagccccagaggaaaggagttctgtgttgctcacatgttaaaagcttgctcaccttcagagcagagggaatacctatcttcagatatccgcccattttcatctcttcattatagtcaaacagtgtgacttgagagtgttgctctggtgtctgtattctggcttatgaagattatttgaaaaagaactcttactacattgaaatgcagacttttaaaaatttaaatattggattaggcagtcaaaaaaccaaacaagcataaaaggtcagtaagttgtaatcttaaaagtaaaggtggaaaactcattataaatggaagaaaagttttgatttccttttttgtttgatgggcagtatgccatattatatccaaagttggtttaaaaaatacttccatcaactatttttatttaaaataaacattt

SEQ ID NO: 2296 - DNA, 472 bp, Homo sapiens
ccgcggtggcggccgaggtatactttgcaccttgaaaatataaaataaaataaatttaaaaataaaggtaattttgttcttccatgtcagctgaaaataagtgaagactgggtcagtaataacattgctttgctgaattcagagaattctaataaaatatttttagttgggaagctatctgtattaaaaaaaatgatctaaggctggtaacagtggccatacttataatcccagtgctttgggaggccaaggcagaaaaatcacttgaggccaggagtttgagatcagcctgggcaacatagtaagaccttatctctacccggacgcgtgggtcgactcaagacctgcccgggcggccggccgcacttttttttttttttttttttaagctgctccttgaggataagggctaactcacaggcagtgcaccaagagccactataaaaagatccttaatgagcaaaatatatcc

SEQ ID NO: 2297 - DNA, 384 bp, Homo sapiens
ccgcggtggcggccgcccgggcaggtcaagtcgacccacgcgtccgcttgttttgctctatcccataggagttggtatgttgtgtttccaatatcatttactaaaagaaattttcctttttatttcttcattgaccaactggtcatttgcatgttctttaattactatgtgtttgtatagttttcaaaatttctcttattaatttctaggttttcctgtggtcagagaagatgcttgatactactttaattttttgaatgttttaatacttgttttgtgacctaacatatgatctacccttgagaattatctatatgctgaggaaaataatgtgtattacacagccattggatgaaatattctgtaactatctcttaggtacct

SEQ ID NO: 2298 - DNA, 472 bp, Homo sapiens
  misc_feature 379, 450, 456, 461, 462: n = A,T,C or G
gaattggagctccccgcggtggcggccgaggtacacgctttatttatttcttttaggaattgcaggttcctaacaaagtaggggtgaggggggtgttacaaaccagtcactaggcaggaacattagactccaaaagcagagaaatgcttaatttttcttctacctgtttcaccacattcatgtagaactgtagtaaaaaagatggtgaatcaggctgaatcaatctaaataacaacttaaggctcccaaatcacatgaacctaggaccactaaatccaatgtcagacgtgtttaaatggtgcactgctctacatttttctattatgcaaagagctagaaaataatggtagtgtcattatgacattccatgaaaatgaangaaaatctttcaggaaaaattaagaaaataaaaatgtttactaaagaaagaatggtccggctaagtgctanagtttntttcnnttttttttta

SEQ ID NO: 2299 - DNA, 130 bp, Homo sapiens
aggtactatcaagctttattttacctgcaaaaatattttagctacacttggaaaaaaataaacttgagaatataacttcacatttctaaggccagcggacgccgtggtcgaagctcgacctgcccgggcg

SEQ ID NO: 2300 - DNA, 452 bp, Homo sapiens
  misc_feature 242, 426: n = A,T,C or G
aggtacgattttcccttcgcttgaatattatccctgtatattgcatgaatgagagatttcccatatttccatcagagtaataaatatacttgctttaattcttaagcataagtaaacatgatataaaaatatatgctgaattacttgtgaagaatgcatttaaagctattttaaatgtgtttttatttgtaagacattacttattaagaaattggttattatgcttactgttctaatctggnggtaaaggtattcttaagaatttgcaggtactacagattttcaaaactgaatgagagaaaatttgtataacccatcctgctgttccacctgccccgggccggcccgctctagaaactaggtgggatcccccgggcctgcagggaattcgatatcaagcttaatcgatacccgtcgaccctcgangggggggcccgggtacccagcttttt

SEQ ID NO: 2301 - DNA, 324 bp, Homo sapiens
  misc_feature 165, 192, 193: n = A,T,C or G
ggagctccccgcggtggcggccgaggtgtacaaagcttcgacccacgcgtccggtggcgagtgcctgtaatcccagctactgggaggctgcgacagaagaatcacttgaacctgggaggcagaggttgcagttagccaagatcatgccactgcactccagcctangcaacagaatgagactccatctcaaannagaaaaaaaaaaaaaaaaaaaaagtgcggccacctgcccgggcggccggccgcacttttttttttttttttttgccatacaggttcattttattgagtggaaagcttacaaaagggccactggccccttcc

SEQ ID NO: 2302 - DNA, 408 bp, Homo sapiens
  misc_feature 87, 92, 100, 105, 112, 131, 160, 184, 193, 203, 218, 224,253, 258, 288, 297, 300, 306, 328, 337, 343, 345, 356, 362,363, 367, 396, 404: n = A,T,C or G
ccgcggtggcggccgcacttttttttttttttttttttttttttttttttttttttttttttttagggttgagggggaatgctgganattgnaatgggtntgganacatatnatataagtaatgctagggngagtggtaggaagttttttcataggaggngtatgagttggtcgtagcggaatngggggtatnctgttcgaanacctgcccgggcggncggccncactttttttttttttttttactttggcnggggnttttttcttttcttttttttttcagctacnggaatttanccnattcanaggaaatcttccccataattanggaactttnttacanantttaccaagtntgggcnncccnataagaaaaagactgaaataacaacaacnactttaanaaat

SEQ ID NO: 2303 - DNA, 190 bp, Homo sapiens
  misc_feature 37, 38, 40, 42, 52, 55, 61, 64, 70, 104, 111, 112, 117, 123,128, 132, 141, 152, 156, 159, 170, 172, 179, 182: n = A,T,C or G
agggcgaattggagctccccgcggtggcggccgcccnntntntttttttttnttngccagntanaatctnagctttttatttgtaggaaaaaataaacagattnccctccnnaacanggcgtnacaanaaangaggcaatnaagggaaaaangcanatnctaaacggacncntgggttnaancttgacct

SEQ ID NO: 2304 - DNA, 222 bp, Homo sapiens
acttagggcgaattggagctccccgcggtggcggccgaggtcaagcttcgacccacgcgtccgagaagagtttgcaaatgcaacaaaatatttaattaccggttgttaaaactggtttagcacaatttatattttccctctcttgcctttcttatttgcaataaaaggtattgagccattttttaaatgacatttttgataaattatgtttgtacctgcccg

SEQ ID NO: 2305 - DNA, 250 bp, Homo sapiens
  misc_feature 83: n = A,T,C or G
agggcgaattggagctccccgcggtggcggccgaggtcttcgacccacgcgtccgccgcacttttttttttttttttttttgntttctgggtgaagtttattctgttttcacatctaggttgttggggagagtgatagacaaagttctggattctgggcatcgtcggcgcatgcttgtaatcctacttgggaggttgagacaggaggatcacttgaggctaggagttggaggctgcagtgtacctgcccg

SEQ ID NO: 2306 - DNA, 262 bp, Homo sapiens
acttagggcgaattggagctccccgcggtggcggccgaggtcggccgcacttttttttttttttttttttttttcttctttctcttgcctggattcagtcccagaaatgttaggactacctcagttttgctccaaaccaaactcaaacaacagcagccactggaaatcaaggaaacttcactaagaatttaacagatcatcaaaacaccgcctccttcccattttagccggacgcgtgggtcgaagcttgtacacctgcccg

SEQ ID NO: 2307 - DNA, 241 bp, Homo sapiens
  misc_feature 121, 187, 209, 211, 213, 225: n = A,T,C or G
tacttagggcgaattggagctccccgcggtggcggccgcccgggcaggtaccattaaatattctgagaggtgaatgtaaaatataaaaggtataggttttttttttttaaagaaaacaatnaactttcaaagagaaaaccaaaaaaaaaaaaaaaaaaaaaaaaaaaagtgcggccggccgcacttntttttttttttttttttaaaanananatgaggttttgntatgttgcccaggctg

SEQ ID NO: 2308 - DNA, 159 bp, Homo sapiens
acttagggcgaattggagctccccgcggtggcggccgcccgggcaggtcaagcttcgacccacgcgtccgttctaaatgatcgacaactctcaagcaataacttgactgttgaatagaagattaagaaaagttggttaaaaaaaaaaaaaaaaaaaagt

SEQ ID NO: 2309 - DNA, 208 bp, Homo sapiens
  misc_feature 3: n = A,T,C or G
ctnctatagggcgaattggagctccccgcggtggcggccgcccgggcaggtacaagctcgacccacgcgtccgaaataataaagctagaagtaatatttttccttttgtctattttccaaattgactcgatattgatggctacttttgtaagtttttatttaagtttaaagggaatatttattgatcacctctatgtgctcagtacct

SEQ ID NO: 2310 - DNA, 511 bp, Homo sapiens
  misc_feature 327, 328, 330, 331, 332, 333, 334, 335, 336, 344, 346, 348,355, 364, 377, 391, 400, 401, 418, 425, 434, 450, 460, 471,474, 485, 495, 499: n = A,T,C or G
agggcgaattggagctccccgcggtggcggccgaggtaagcttcgacccacgcgtccgcaaagttcaccaaattcgctacagcctaagactagcctcaccagtcctttttcccattaatcaaaactttgcagaagagacaatgatttttaccattcattcaaccagtttgcacagagagaggctgaagcctgacttgtaagaaactcttgtccttttgccagtgtgccaggtttctgggttccccttctctgagtggctttgatgaccctgcttgctgtgccatagctatgggggggccaagccatgttacccaaaaaaaaaaaacnntnnnnnnnggtgcggncngnccctcgngatctaaanccccatagggggngggattaacaattnccattcccnnggggaaattttttggcnccttttnttggggaanaaaattttttttttgnaaattaaaanggtttaaaaanccncccctttttgnaaaaatttantggnttttaacccccc

SEQ ID NO: 2311 - DNA, 191 bp, Homo sapiens
  misc_feature 56, 93, 139: n = A,T,C or G
agggcgaattggagctccccgcggtggcggccgcactttttttttttttttttaangctgctccttgaggataagggctaactcacaggcagngcaccaagagccactatgaaaagatccttaatgagcaaaatatatnccctattattttcctacaagttgctttttacttgagtaggaacccttgattg

SEQ ID NO: 2312 - DNA, 404 bp, Homo sapiens
ctacttagggcgaattggagctccccgcggtggcggccgaggtacacctggtatgccagatgagaatgacaggagccatccgcaagcagttggcggctttcttagaaggcttctatgagatcattccaaagcgcctcatttccatcttcactgagcaggagttagagctgcttatatcaggactgcccaccattgacatcgatgatctgaaatccaacactgaataccacaagtacctgcccgggcggccggccgcacttttttttttttttttacctgaaaatgcttattctagcttcacatttgattgtttggctaagaagaaaattatttattagacttaattttcctcacgagtttaaagattgcttcagatcttaaacttctaatgaggaaagctgaga

SEQ ID NO: 2313 - DNA, 502 bp, Homo sapiens
acttagggcgaattggagctccccgcggtggcggccgaggcaagcttcgacccacgcgtccgcaaagttcaccaaattcgctacagcctaagactagcctcaccagtcctttttcccattaatcaaaactttgcagaagagacaatgatttttaccattcattcaaccagtttgcacagagagaggctgaagcctgacttgtaagaaactcttgtccttttgccagtgtgccaggtttctgggttccccttctctgagtggctttgatgaccctgcttgctgtgccatagctatggggggggccaagccatgttacccaaaaaaaaaaaaaaaaaaaaagtgcggccggccgcccgggcaggtgtcactttcaacttggttatgcctaaaacaaagtctccctcatctccaaacaatttctcccgactttctttcttttttgagatggagtcttgctctgtcgcccacgctggagtgcagtggcatgatcttggctccctgc

SEQ ID NO: 2314 - DNA, 310 bp, Homo sapiens
  misc_feature 46, 174, 233, 258, 260, 262, 289: n = A,T,C or G
ccgcggtggcggccgcactttttttttttttttttttttttttttnaaatgctcaaaagaacaatttttatgtaagtttgtgatagaggcctcaggtaattctacaaaaattaaaacccattttcaatgcaaaattcccgaacataaacaaatgcttttaaaaatatggatggngtggttactcttttagtaatacttggattatcatcaaagatttaactttatttttttgngtgtgtgtgtgttttttttttttgngngngttttttttttttttttttattatacnctaagttttagggtacctgcc

SEQ ID NO: 2315 - DNA, 149 bp, Homo sapiens
cactacttagggcgaattggagctccccgcggtggcggccgaggtgtacaagcttcgacccacgcgtccgactttttgtcttagacccagttagggtcaccttacagtgcaggtggaaagaaagcaggactgctgagaggagctcagga

SEQ ID NO: 2316 - DNA, 149 bp, Homo sapiens
  misc_feature 109, 110: n = A,T,C or G
tagggcgaattggagctccccgcggtggcggccgaggtgtacaagcttcgacccacgcgtccggattaaagtcctacgtgatctgagttcagaccggagtaatccaggnnggtttctatctacttcaaattcctccctgtacctgcccg

SEQ ID NO: 2317 - DNA, 141 bp, Homo sapiens
  misc_feature 32, 45, 108, 111, 129: n = A,T,C or G
tagggcgaattggagctccccgcggtggcggncgaggtgtacaangcttcgacccacgcgtccgccacacgtaactgagatgctcctttaaataaagcgtttgtgttngangttaaaaaaaaaaaaaanaaaaaaaaaagt

SEQ ID NO: 2318 - DNA, 190 bp, Homo sapiens
  misc_feature 45, 46, 75, 97, 106, 137, 144: n = A,T,C or G
ctatagggcgaattggagctccccgcggtggcggccgcacttttnnttttttttttttttattatctaaatcagntttatttaagaatttccaacantgacaactnttataaaggggcatccaagcacaggacacanaactgcnacaaacagcattcttacggacgcgtgggtcgaagacctcggccgct

SEQ ID NO: 2319 - DNA, 375 bp, Homo sapiens
  misc_feature 168, 343: n = A,T,C or G
ccgcggtggcggccgaggtacagaatggtaaaaattccaatcagtcaaaagaggtcaatgaattaaaaggcttgcaactttttcaaaaaaaaaaaaaaaaaaaagtgcggccggccgcccgggcaggtcgagcggcagcacttttttttttttttttttttttatggnttttatttttcaatttttattttggttttcttacaaaggttgacattttccataacaggtgtaagagtgttgaaaaaaaaattcaaatttttgggggagcgggggaaggagttaatgaaactgtattgcacaatgctctgatcaatccttctttttccggacgcgtgggtcgaanacctcggccgctctagaactagtgggatcccc

SEQ ID NO: 2320 - DNA, 208 bp, Homo sapiens
  misc_feature 115, 117, 163: n = A,T,C or G
acttagggcgaattggagctccccgcggtggcggccgcccgggcaggtctcttgtctagtatactcaaggcagcctagtaaattattatttatctatacaatactggaaaaactngnagacaaaaacatgacttgaattgctaaaaaaaaaaaaaaaaaaaangagggagaatgaaaacttccggacgcgtgggtcgaagcttgacct

SEQ ID NO: 2321 - DNA, 264 bp, Homo sapiens
  misc_feature 43, 81, 116, 117, 118, 229: n = A,T,C or G
tacttagggcgaattggagctccccgcggtggcggccgaggtncatttacatacaactgatccaaacaggaagtaaaagcnttatgaaaaaagaacatgatgcaaatcatttcccnnngacaaaaggagggatctgcgtgaattacagcaaatcaaatgatttccacattataaaagcaagccatggcttctacagatattttaattccttgggaggaagtttcacctnatcggacgcgtgggtcgaagacctgcccgggcggc

SEQ ID NO: 2322 - DNA, 495 bp, Homo sapiens
  misc_feature 404, 429, 430, 431, 432, 433, 434, 435, 436, 437, 438, 439,440, 441, 442, 443, 444, 445, 446, 447, 448, 449, 450, 451,452, 453, 454: n = A,T,C or G
ctatagggcgaattggagctccccgcggtggcggccgcccgggcaggtcaagcttcgacccacgcgtccgatttttgtctcctgaggtcaaactgtgcccatctttactgcccctgtgttggtgtcattcctttcagcgcactccatgttctggcaaaacacccacagctcacgttctcgttgtagccacattacgcctttgcattactcttttgccactgacctcactgtcagtcttcttgtcacgctgtttcctccaggtgactctgacatcattagaagcatgccagaacagactggtgaaaagtaaaccttttcacctacaaaatttcacctgcaaaccttaaacctgcaaaattttcctttaataaaatttgcttgttttaaaaaaaaaaaaaaaaaanaaagtgcggccgctctagaactagnnnnnnnnnnnnnnnnnnnnnnnnnncgatatcaagcttatcgatacccgtccgacctcgagggggg

SEQ ID NO: 2323 - DNA, 264 bp, Homo sapiens
  misc_feature 111: n = A,T,C or G
tagggcgaattggagctccccgcggtggcggccgaggtcaagcttcgacccacgcgtccgctgatctgtgattaaagcagtaatattttaagatggactgggaaaaacatnaactcctgaagttagaaataagaatggtttgtaaaatccacagctatatcctgatgctggatggtattaatcttgtgtagtcttcaactggttagtgtgaaatagttctgccacctctgacgcaccactgccaatgctgtacgtacctgcccg

SEQ ID NO: 2324 - DNA, 227 bp, Homo sapiens
cttagggcgaattggagctccccgcggtggcggccgaggtgtcgacccacgcgtccgcattttcaggcttctgcagctgtagattctcactgtgaatcccttgcttgctcatgcataagtgtatttgcaataccaaatatacaggtttagtattttgcctgttagtgattgtttcacatgtgtaacgttttggttgagatgttaaatggtggacgagtacctgcccg

SEQ ID NO: 2325 - DNA, 210 bp, Homo sapiens
  misc_feature 45: n = A,T,C or G
cttagggcgaattggagctccccgcggtggcggccgcccgggcanggtggccgcacttttttttttttttttttttactattcgttaggcttttatttttctctatgttctgcagtaactaaggaaaatcatggtaaatgtcaatcttcacacaacagcagacacaaagggtttcagaaaccggacgcgtgggtcgaagcttgtacacct

SEQ ID NO: 2326 - DNA, 373 bp, Homo sapiens
  misc_feature 107: n = A,T,C or G
ggtgtacaagcttcgacccacgcgtccggtttctgaaaccctttgtgtctgctgttgtgtgaagattgacatttaccatgattttccttagttactgcagaacatanagaaaaataaaagcctaacgaatagtaaaaaaaaaaaaaaaaaaaagtgcggccacctgcccgggcggccggccgcacttttttttttttttttttttcactgtttaaggaatttttattaaagcaagaattttataatccaaattacgtttccttgctcagttatcaattctgttacttaaaacagaactgacattctgagctattccacagtaaagaattacaaaattaaagaaaggaatgctttaaatttttgtacctgcccg

SEQ ID NO: 2327 - DNA, 174 bp, Homo sapiens
ccgcggtggcggccgcactttttttttttttttttttctttctacttttagggtttatttactggtagtttcaggtctggaaatacaaaaaggaacatgacatgggttctgcccttgaggtgctcccagtctggtgagggacacaacacctttcaggggacaaccgtggtacct

SEQ ID NO: 2328 - DNA, 691 bp, Homo sapiens
  misc_feature 84, 98, 108, 113, 114, 224, 285, 299, 308, 313, 317, 328,329, 347, 363, 383, 388, 393, 401, 405, 421, 442, 448, 455,465, 469, 470, 475, 477, 482, 484, 487, 489, 499, 502, 503,504, 514, 524, 528, 531, 532, 536, 573, 582, 593, 594: n = A,T,C or G
  misc_feature 606, 607, 608, 611, 612, 613, 619, 620, 625, 626, 628, 631,639, 642, 651, 652, 668, 669, 679: n = A,T,C or G
tagggcgaattggagctccccgcggtggcggccgcccgggcaggtgccgcacttttttttttttttttttttttttttttttanaatttagccacttntcaggccttnttccnnataatttggaactttcctttggatttgatcaagttggatagagttgatcaaaccctgatcaagttggatagagttgatcaaacccaatgggaaaaagaccaaaacaacantaaaaaacagacaacaacaacaaaaaacagttaggcaaaacaaacaatggcacaatttatntgataactggggtngctttaatnggaangganaaattaaaacnnggttgggcggttattttnactttaaccaaaaaanaaacccccaattttaagttnctttncttanggggcgangttnttggggttttaaaaangggttttttcccttttttagnaagggnggggggnaaaaccccancccnnccctnanaaaancnccncntttttttccnttnnngggagggggnggccaaaacncccnccnntttngaaaaaaaagaaaattttttttttttttttaagcccnttttaaccnccaaaaaaaannaagtgttttccnnncgnnncttttnnaaaanngnggnaccccccnggngggggggannttttttaatttttttnncccccccctnggggggggggcc

SEQ ID NO: 2329 - DNA, 209 bp, Homo sapiens
tagggcgaattggagctccccgcggtggcggccgcccgggcacggtactgaggaaatattttgtaaagtgagctttgggtataacttagccccatcattatttagagaatagaggaggaagaaagaggaaggattttaaaggcagacaatgacagaccattcaggataggtagggttttaaagggagcggacgcgtgggtcgaagacct

SEQ ID NO: 2330 - DNA, 514 bp, Homo sapiens
  misc_feature 478: n = A,T,C or G
ccccgcggtggcggccgaggtaccctaaaatttaaagtataataataataaatttttttttaaaaaaagagtgttgtctttgtcttgtattttctgcagtttgcatgtgatattcttaggtatagattttttttagtatttgtcctgtatattgttattcgagcttctggggatctgtgttttggtgtctatcattaactttggaatattctcagtcattactgcttcaaacattcattctgttgctttttctcttctggtattatcattacacatatatcacaccttttgtaattctcccacagttcatagatattctgttgtatttatttattttttctctttgccttttagttttagagatttctattgacatcacttaaagatgattgatgagttgatgagaattgagagaattgatgagaattgttgatgagaattattcatttgtgttagtgtttttcatttctgccattgncttttgatttttagagcttccatctctctgcttaca

SEQ ID NO: 2331 - DNA, 138 bp, Homo sapiens
agggcgaattggagctccccgcggtggcggccgaggtacaaccttgaccgtgaccgtttgctatattcctttttctatgaaataatgtgaatgataataaaacagctttgacttgaaaaaaaaaaaaaaaaaaaaagt

SEQ ID NO: 2332 - DNA, 267 bp, Homo sapiens
agggcgaattggagctccccgcggtggcggccgcccgggcaggtattttatagaaaagaaaacagaggctcagagaggttaatttttcctggatgtcctagatgttaaatgttacaaccttaattgaccgattccagaatcagagctattaaacacaaaactattttaattctctctaaattcttaaagacccaagaaaaacaaactttattgagataattaggaattttttttaaaatatcggacgcgtgggtcgaagcttgacct

SEQ ID NO: 2333 - DNA, 107 bp, Homo sapiens
aggtcaagcttcgacccacgcgtccgtggtgaacacagagaagacagtcttgtatatattcctctgtattctggggagctttgaccttggagctttgtacctgcccg

SEQ ID NO: 2334 - DNA, 457 bp, Homo sapiens
  misc_feature 113, 429, 434: n = A,T,C or G
gggcgaattggagctccccgcggtggcggccgaggtcttcgacccacgcgtccgcaacacctatgtttataaaaatttgaaaacattacatattgtatttaaaactaattagngaagagtaagaaaaaaactagccaacagaattgtaggtgatgcattagttaaatttcaaaactcataataaaggaactttcagagattggttgaaacccagtggtatccctgtaaattagctcctgtgactggaaaagaccccaaaaaggcagtagaggagattagtgtttacttgctgtggttgtggtgtgctgctacttaattataggtagtgacacactgaaattcttatttgtccaataatctgaagtagtttcctatatttatctgtacctgcccgggcggccggccgcactttttttttttttttttgcnggggnttttttcttttctttttttttca

SEQ ID NO: 2335 - DNA, 173 bp, Homo sapiens
  misc_feature 37, 38, 39, 46, 70, 101, 107, 114, 127, 153: n = A,T,C or G
gggcgaattggagctccccgcggtggcggccgcactnnnttttttntttttttttttctttaaacaccanttagtttatttcaggacaagaatttaccatntaacantcttttnacataaattctgnctccccccacttttttttttttgaanataaccattccttttttttt

SEQ ID NO: 2336 - DNA, 411 bp, Homo sapiens
  misc_feature 2, 5, 6, 47: n = A,T,C or G
cnaannggagctccccgcggtggcggccgcccgggcaggtacatctntatcagagcttttgggtgaccaggcacactgtcaatgagcagtaatacggggaaaggaatctttggggttttttttggtttggtttttgttttgtcgttatttttttgtttgtttgttttttgtttttgtttttttagcagtaggcctcaacagtggacttaaaatactcagtaaaccatgctgttaacagataagctgtcatccagactttgttgttccatttctagagcacagagcagatttagcagaattcttaaggctttaggattttcagaatggtaaatgagcactggcttcaacttagtcaccagctgcattggcccctaacaagacagtcagcctggcctttgaagcgttgcagcc

SEQ ID NO: 2337 - DNA, 291 bp, Homo sapiens
  misc_feature 112, 119, 120: n = A,T,C or G
cttagggcgaattggagctccccgcggtggcggccgaggtactaaactgcacatatttaaaacatataatttgatacattttgactcacaaaacaatcaccacaatcaagangatgagnntatagatcactcccaaaagtttccctgtagtcttttgcagtcctttcttcatggccttcttcatccatccaccccatctcggtaaccaatgatctgctttctgtcaccacaaattagtgagcactgtctagaattttatgtaaactgaataataaagattttactctttcg

SEQ ID NO: 2338 - DNA, 239 bp, Homo sapiens
  misc_feature 100, 124, 129, 163: n = A,T,C or G
actacttagggcgaattggagctccccgcggtggcggccgaggtcttcgacccacgcgtccgcacttttttttttttttttttttttttttttttttttnggaatcatcattaactttatttgncactnttgatagacattggtccactccaacataaaaagnagaattcacccacttccacttaatattctatagaatgaagttgtacctgcccgggcggccggccgcccgggcaggt

SEQ ID NO: 2339 - DNA, 369 bp, Homo sapiens
  misc_feature 265, 270, 295, 303, 324, 341: n = A,T,C or G
cttagggcgaattggagctccccgcggtggcggccgaggtacaaagatttttttacacaaagaaacttaatgctgtattaataaattcagtgtgtagcttcaattgggatagttccaaaagtgaagattttgtgaggaataagtgcaaattttttttttattttaaaaaattctttgaaactcttaagtctttgtgtctgcaataaaattgtacctgcccgggcggccggccgcacttttttttttttttttttttttttttttngaaangtttgaagttaactcattttatttntaggattnggatttcaacattttaatttntttggaatataagtcantttttgcaagctaaaaaatagaatcaaa

SEQ ID NO: 2340 - DNA, 410 bp, Homo sapiens
ttagggcgattggagctccccgcggtggcggccgaggtggacttgattcataaccaaccaacccaggctgtcatgctaaaaaaaagggcagaatctttgctgctgaactactgcatagggtgactaccattgctcctttagtttagtttggctagcagaaggtggtcttgccatgtaaataaagcctctcaggtaatcaaaatgtttctttttttacttttgctggtgtttttttcttttctttttttttcagctacaggaatttagccaattcagaggaaatcttccccataattatggaactttcttacagattttaccaagtctggtcaacccaataagaaaaagactgaaataacaacaacaacttcaacaaataaaaaaaaacagttaagctaaataaacagatg

SEQ ID NO: 2341 - DNA, 455 bp, Homo sapiens
  misc_feature 350: n = A,T,C or G
aggtacttcttacatagtgattgatgtctcatgtctccctaaaatgtataaaaccaagctgtggccggaccaccttgggcacatgtcatcaggacttcttgaggctatgtcactgggcatgtcttcaaccttggcaaaataaactttctaaattaattgagacctgtctcaaattttgggggttcacaggtgagtgggctcaggcatgtgcactagtatgactaaaggtcatagactattagactattagtctatgaccttcctctagaaacactcgactggtaagggaagaatgcctcaactgagcatgtgcacaactcccataaacacacttgtgcttgcggagcctntcaagtgctggcaggccactgctcaggtggattcttccctcctacccggagggaagaatcaggggagaagggacacaagcccctgaatgcatgccaacacgtaaa

SEQ ID NO: 2342 - DNA, 135 bp, Homo sapiens
ccgcggtggcggccgaggtaccttcaggtattgcctatttaatgatcatatatacttgcataatatcatcccttcccttgatttctttcaatctaaaaataaatatgagaaaaacaaaaaaaaaaaaaaaaaagt

SEQ ID NO: 2343 - DNA, 404 bp, Homo sapiens
  misc_feature 299: n = A,T,C or G
actacttagggcgattggagctccccgcggtggcggccgaggtacagaggactcaagaccagatggccaactagaagcagccaggaagaacatctctcatggagagaccaggaatttgggaagactggcacactctgagcagatcttttgaaggaaaacattgagggtggatgaagggaggatgcagagcatgggctgagggggcaggaatctcagaagcctgcacagggcttccaagcactagcattccttactagcccccattaactcctggggaaggggtgagttgaataggtggnggagtggcccgctcttaccatgaaactccagaatcctagcagcaagagaccccatgacccctgtggacacgagctgtccggacgcgtgggtcgaagacctgcccg

SEQ ID NO: 2344 - DNA, 276 bp, Homo sapiens
  misc_feature 18, 19, 67, 69, 70, 71, 88, 90, 92, 101, 102, 105, 107, 109,110, 127, 128, 130, 133, 140, 149, 150, 155, 173, 175, 186,201, 207, 227, 231, 249, 252, 265, 276: n = A,T,C or G
ccgcggtggcggccgctnnctgcccgggcggccggccgcactttttttttttctttttggaaaaatntnnngactctggggataaaantncnaattaaatnnatncnannttttaaaggctattaannanaanaatattngctaaattnnccttntgcataacaaactgtggntntaccatgtaangtttaaaaaaatgtntaaccncaattttacgctcctctgtnacangacaaggactccattcantgncatttaagaactnaatgggttgan

SEQ ID NO: 2345 - DNA, 284 bp, Homo sapiens
aggtcaagcttcgacccacgcgtccgataagccaaaaaatgggagacaatttcacatggactttggaaaatatttttttcctttgcattcatctctcaaacttagtttttatctttgaccaaccgaacatgaccaaaaaccaaaagtgcattcaaccttaccaaaaaaaaaaaaaaagtgcggccggccgcactttgtttctactgggtttagaccgtcgtgagacaggttagttttaccctactgatgatgtgttgttgccatggtaatcctgctcagtacct

SEQ ID NO: 2346 - DNA, 280 bp, Homo sapiens
ccgggcaggtacctgctccatttctcctgcaacatgtggatacagtaatatgatcataccctcccttgttcccctctaggccactttcccctttaaatattaacaccatcataatcatctttggagaaagacacctggatctgtcctgaaccttggcaaaaaataaataaataaataaaaataaaaaactcttctcaattgattaatacctgtcacagatacattttggtttacaaatcaatgaacaatggagggaactctgtccttaatcttggtacct

SEQ ID NO: 2347 - DNA, 461 bp, Homo sapiens
  misc_feature 30, 177, 225, 288, 360, 428: n = A,T,C or G
ccgcggtggcggccgaggtctcttgtttgntattacacttctacgtagattatataatattgcttgtggacataatttgatcaataatatataatgtcagtcactacagtgatccagaatcttattctggctatggaggaagcttaattattaagcaacatcttcctaaaaagcttntgaatttctgattcataagaaaaacaaaacaaatgaaaagagtatctntaactgaaataacactgaagttcgagcttgggccccctcctttgtgttcaacataattaactnttcaagatgaaaccggacgcgtgggtcgaagcttgacctgcccgggcggccggccgcccgggcaggtgtttnttctgggatatctttttcttctgggcaacctcctcttctggtttaggaacaatctgttccttttccgnaaggatcatctcaatgtggcagggagagctcat

SEQ ID NO: 2348 - DNA, 516 bp, Homo sapiens
  misc_feature 264, 364, 401: n = A,T,C or G
acttagggcgattggagctccccgcggtggcggccgcccgggcaggtcttcgacccacgcgtccgggcaattatcaaaaacacttggaaaaagatttttattcctacttttaaacatacatcaaaatctaaaataaaactaggcaccttcagctgggcctggtggctcatgcctgtaatcccagcactttgggaggctgaagtgggcagatcactggatgtcagaagttcgagaccagcctggcctacatggcgaaaccccctntctactaaaaatacaaaaattagccgggcttggtggtggggacctgtaatcccagctactcgggaggctgaggcaggagaatcacttgaacctgggaggnggaggttgcagttagctgagatcacaccactgcactncagcctgggccacagagcaggactccatcttagaacaaaaaacaaacaaacaaacaaacctcatgcaccttcaagaaaatcaaacaagtttttatctaattaaagaaagaatttt

SEQ ID NO: 2349 - DNA, 272 bp, Homo sapiens
  misc_feature 63, 101, 128: n = A,T,C or G
aacactacttagggcgaattggagctccccgcggtggcggccgaggtcttcgacccacgcgtncgctttaacacacactaggctctttgtgtattatgatncagtgctatttgtaactgtgtcccagngaccaaattgcactcgactcgatcagctgttcatccatttcgtgttttttcctgtcaaacattaatccagcaaatatatgaggtatttaccaatttattttcttagtattacaaaataattcattagcataaagtacctgcccg

SEQ ID NO: 2350 - DNA, 350 bp, Homo sapiens
ctacttagggcgattggagctccccgcggtggcggccgccgggcaggtaaatcatagagctgccccaacatctagacagtctctcctactgattataaatgagtgaaaactatcagttagaaaaatctaatttaagttgttaatacatgtttctttggtgagcacctggatatatttatcacaaattcttttatacaaatgtcgaaaatgctttcaacaaacctaagtgtcctaattacatgccacttttaagcatcactttaaggtaaacaaaaatgaaaaccataattttaaattaaaatttgcggacgcggggggtcgactcaagacctcggccgctctagaactag

SEQ ID NO: 2351 - DNA, 233 bp, Homo sapiens
  misc_feature 166, 233: n = A,T,C or G
ccgcggtggcggccgcccgggcaggtgcttcgacccacgcgtccggatggcttgggtcatcaggacgtccattacatccaaaggaagacagcctgtgacgtttcaaaagcaaaagtcccctaccagccagtgaagctacctgatttctcagtatcttacgcccagngacacgatctaccctcaaaacttaaaaaaaaaaaaaagggaaacataaacacataacagcagacctn

SEQ ID NO: 2352 - DNA, 121 bp, Homo sapiens
  misc_feature 7, 10, 59, 80, 94: n = A,T,C or G
gggccgnggncacaacattcccccttccccaaacagtaatatggacactgatttaacangacttataaaaaaataaggcncatttattttgatntggtaattttaaaatagaaaccccttc

SEQ ID NO: 2353 - DNA, 485 bp, Homo sapiens
  misc_feature 4, 59, 411: n = A,T,C or G
gcgnggcgaattggagctccccgcggtggcggccgaggtcaagcttcgacccacgcgtncgagcttgagtcgacccacgcgtccgtgaaaatgttgtctcctttctaaattctctgccgatttgggaaaaagcaaacttgactttaccccgaggaattggtgaaaaattacttttacgccttgcagctgtggaacttggtcttacagcctctgctcttctgcccaaacgggccatgcagtttggatcaagaattgcaaaaatggaaaaaattaatgaaaaggcatctgataaatgtggacggctccaaatcatgtccttagaaaatctttctattgaaaaggagactaaattgtaatgtgattcacaatgtaacaatataaaaataagtttttatataattattaaaaggnagatactctggtgctttactattggataaaataagtaaacctgcccgggcgggccggccgactttttttttttt

SEQ ID NO: 2354 - DNA, 531 bp, Homo sapiens
  misc_feature 33, 269, 274, 312, 315, 378, 381, 406, 432, 459, 464, 471,490, 491, 492, 493, 495, 501: n = A,T,C or G
tccccgcggtggcggccgaggtttcaaagaccngcctggccaacatggtgaaaccccatctctactaaaaatataaaaatcagccgggcatggtggcatgtgcctgtaatcccagctactcaggagtctgaggaggagaatcacttgaacctggaggcagaggttgcagtgagtcgaggttgcgctactgcactccagcctggacaacagagggagactctgtctcaaaaaaaaaaaacctacagctgttcaaggaccagctgcagggncaagngggggccttttttggtctttgaacacatcatagaaagnggncaaatgctgcaaagccatgaagaacatgaacctttaaccgggtagactaactgccccacttanacncttttttttgcccccaaaaacaagnttgattttgccccttttttttttttntccattggggggaagttttggaaaaanaaaanggggccnccccccccttttttttttnnnncnaaaaanccttttttttggtttttttaaaaaaaaaaa

SEQ ID NO: 2355 - DNA, 199 bp, Homo sapiens
ctacttagggcgaattggagctccccgcggtggcggccgccgggcagggccagagacttcaagtctatctgaaaagtctccagaggtctaaccccagataaatagccaacagggtgtagagtacattttacaccccaaagagtgtgccccatggtgatgaaaataaagtgaacatgttgcaaaatgaaaaaaaaaacct

SEQ ID NO: 2356 - DNA, 469 bp, Homo sapiens
  misc_feature 393, 452: n = A,T,C or G
ccgcggtggcggccgcccgggcaggtacccaacacaaactattcaataaagtaatctgctttaaaaataaaacacactgaaaggccgaggcaggtggatcacctgacatcattagttcaagaccagtgtggccaaactggtgaaaattagtctcgactaaaaatacaaacattagctgggcgtggtggcaggcgcctctaattccagctactcaggaggatgaggcaggagaatcacttgaagcaaggaggtggaagttgcagtgagctgagatcgtgccattgcactgcagcctgggcaacagagtgagactccgtctcaaaaacaccaccaccaacaaaataaacacaacagaattattctgcaaatacagatattggagtagctgagttncatctcaaatttgactatgcaggttgcagggtgatcttggccaactacttattcttttntgaagttcaactttttt

SEQ ID NO: 2357 - DNA, 282 bp, Homo sapiens
ccgcggtggcggcccgagcaagtgggcctgtagcccgactcttaatccaggttggtgctattcaaagagatcatctttcacccgagggatttctgggcatctattttgcggatcagaaagtagagaaagaaggtaactttgctgaaagctagtctggggagttagtagctgatacagatcagcatttcctaactatgagatttcataatattctctcttgtctcgattctgagtcactggtgcctgctgtggtggcattgttcatgaacatgtacctgcccg

SEQ ID NO: 2358 - DNA, 491 bp, Homo sapiens
  misc_feature 390: n = A,T,C or G
aggtcatgtgcacattgtgcaggttagttacatatgtatacatgtgccatgctggtgcgctgcacccactaactcgtcatctagcattaggtatatctcccaatgctatccctcccgcctcctcccaccccacaacagtccccagaggtgatattccccttcctgtgtccatgtgttctcattgttcaattcccacctatgagtgagaatatgcagtgtttggttttttgttcttgcgatagtttactgagaatgatgatttccaatttcatccacgtccctacaaaggacatgaacttgagaattcttaatgcagtgctttaatacagtaaaaatttttagtctttgttttctacaaaatgcatttgaaaagtgcactcttgatcttgnattttctttcctttcctttagaatcatattagcagttggacgtatatataaaatattaagtgtacctgcccgggccggccggtctagaactaggtgggatc

SEQ ID NO: 2359 - DNA, 453 bp, Homo sapiens
  misc_feature 438: n = A,T,C or G
aggtgtacaagcttcgacccacgcgtccgagcagaacttggcagcaacagaggaagggcccctggagccggctgtcgtggatgcctttaatcaagcctggcatttggttgctcacgaatgtcccaactcttccgctaggcccatcatgctcaggctgcccaaggcttttctgtcacctcttttgttctctcacactgaccagtcttacctgcccgggcggccggccgcccgggcaggtaccaagtgaatttaaataattggtgtggattggccagtagctaagtgggcttttaaagagtattgaagattgaaagggtttttctttcttttttaaaaaagaaaaacaaactattgattgtagataatgaaaagctagggtttgccctcttcatgtctactctccttccaaatagttatatccaaaactgttttttcctntcccctaccttgtcc

SEQ ID NO: 2360 - DNA, 360 bp, Homo sapiens
  misc_feature 161, 223: n = A,T,C or G
cgaggtacacagctatgcactttccgtttctgacttttgccaccctgtcagccatggggagcccactgtgggactgaaaccctgagctgaatgcggcctcatgtctcagagaaacactggcaagttggtcagagccgcgtctgcatcgaggcgtagctgancggcaggatggggggctgcctgcccagggtctctcaccgtggtgtaagcagagccatggctngcctaggaccctatagataccatcactctttctcagctcgactggagtttgcacctttgcaggggcaaagtaactccctgcaccctgaaccaccccccattcctgttcatttcagcagataatgatggagggggggg

SEQ ID NO: 2361 - DNA, 720 bp, Homo sapiens
  misc_feature 529, 535, 563, 573, 584, 585, 586, 589, 590, 596, 597, 614,633, 638, 646, 647, 649, 654, 657, 662, 663, 668, 672, 676,699, 705: n = A,T,C or G
ctatagggcgaattggagctccccgcggtggcggcccgaggtcaagcttcgacccacgcgtccgctatcatatttcaaatcctaatgggagacaaaacaaaagtgatggtcagtatttctttgaaattctacaaggaacttcaggcacatggtgctgatgagttattaaagagggtgtacgggagtttttgtaaatccagaatcaggatacaatgtctctttgctatatgaccttgaaaatcttccggcatccaaggattccattgtgcatcaagctggcatgttgaagcgaaattgttttgcctctgtctttgaaaaatacttccaattccaagaagagggcaaggaaggagagaacagggcagttatccattatagggatgatgagaccatgtatgttgagtctaaaaaggacagagtcacagtagtcttcagcacagtgtttaaggatgacgacgatgtggtcattggaaaggtgttcatgcaggagttcaaagaaggacgcagagccagccacacagccccacangtcctntttagccacacctgccccggggggccgnttgagggccncccggcagggnnngtnntaacanngtaacatgtattatggnaacctttaatcttgggggncttanacaggctnntnccaanggnttaannaaagnttgntttnaaaaaaaaaaaaagggatgggtntttttnaaaaaaaaaaaaaaa

SEQ ID NO: 2362 - DNA, 636 bp, Homo sapiens
  misc_feature 505, 545, 552, 558, 563, 585, 604, 608, 620, 628: n = A,T,C or G
ccgcggtggcggccgccgggcaggtacagcctcacatacacagatgcaggtgaagtcaccaaagctgatctctcattcgttctggggacagttagcagcgtagtggtcccactgcagcaaaagtttgaaattcattttcttcaggaaaatacccagccagtctctcagtggaaaccctggttatgtcgtggggctcccattagctgctggattccagcctcataagggtggagctctcccgtgtcagctcgtagcacagaaggtgaagagcctgctgtggggccagtgcttccagattacgtggccccttttggaaattcccaggcccaggacatgctggactgggtgcccatccacttcatcacccagtcattcaacaggaaggattcctgccagctcccaggggctttggttatagaagtgaagtggactaaatacggatccctgctgaatccacaggccaaaatagtcaatgtaactgcaaatctaatttcatccttctttnctgaggccaactcaggaaatgaaagggcgattcttatttncactggnggtacntttgnggatgtgtctgcacctgcagangcaggctttaaagcttcancagncattaatggcangctggccnttaacttt

SEQ ID NO: 2363 - DNA, 805 bp, Homo sapiens
  misc_feature 42, 158, 159, 168, 172, 175, 188, 189, 193, 199, 202, 203,208, 209, 213, 216, 229, 234, 235, 236, 237, 239, 240, 250,251, 254, 269, 270, 273, 274, 276, 277, 284, 288, 290, 314,324, 325, 326, 333, 334, 335, 336, 337, 340, 342, 343: n = A,T,C or G
  misc_feature 354, 355, 356, 357, 361, 376, 377, 403, 404, 434, 435, 438,439, 445, 455, 461, 468, 484, 487, 491, 503, 504, 505, 506,507, 523, 524, 525, 527, 534, 536, 537, 543, 574, 586, 630,632, 633, 634, 635, 663, 665, 675, 677, 680, 682, 696: n = A,T,C or G
  misc_feature 707, 722, 723, 734, 737, 745, 748, 759, 765, 776, 782, 794,797: n = A,T,C or G
tagggcgaattggagctccccgcggtggcggcccgcactttntttttttttttttttttttttttttttttttttttttttttttttttttttttttttttttttttttttttttttttttttttttttttttttttttttttttttttttttttttnnaaaaaaaantttnaangggggaaaaaaanngggnaaaaanttnnggggnngggnttnaaaaaaaaaaaanccccnnnncnnaaaaaaaaannggnccccccggggggggnnaanntnnaaaaaantttntnccccccccccccccgggggggggncccccccccnnnttttttnnnnnttnannggggggaaaannnncccngggggaaaaaaaaannaaaaaattttttccgggggaaaaaanntttcccccccaaaaaatccccaaaaaaaannggnngggggnaaaaaaaaanaaaacnggggggncccaaaggggggccanccnaaantttggggggggnnnnnacgcccctttttaaannnanaaaaccntnngccccnttttaaaaaaaaaccccccccccccgggggnggggggtttccnaaagggcccccttcccctttcaaaaaaaaaaaaaaagggggagngnnnnggggggggggggggggtttttttccaananaagggggggntntantnttaccaaaaaaaangggggaacccncaaaaaaaatttttnnaaaaaggcccnaanggcccaanccnaaaaaagggcngggggngggggtttaanaaaagnccccccccccgnganaaaaaaaa

SEQ ID NO: 2364 - DNA, 331 bp, Homo sapiens
ccgcggtggcggcccgaggtcttcgacccacgcgtccgcactgagtgttcaccataatttgagattcttggcatgttaacttttcattatggaatattgaataatttcaatattattcatacatttctttatgttcaaacatacacaaaaatagaataatgaactctacccatcacccagctgcaacaaatatcaatactttaccgttcttaatacatctaaccccttactttttgtttgtttcttttggtgaagtatttaattgtaatttttttttaagagacaggatctcactctgtcacccaggccagagtgcagtggtacctgcccg

SEQ ID NO: 2365 - DNA, 128 bp, Homo sapiens
  misc_feature 106, 112, 113, 119, 122, 127: n = A,T,C or G
cgcactttttttttttttttttttaataacaaacacttatccaacacttagtatgtggcaggcactgtttcaagcactttacacatacaaactcatcccggacgcntgggtnnaagctngtncaccna

SEQ ID NO: 2366 - DNA, 627 bp, Homo sapiens
  misc_feature 607: n = A,T,C or G
ccgcggtggcggcccgaggtcaagcttcgacccacgcgtccggattatttcagctcttgacctgtcccctctggctgcctctgagtctgaatctcccaaagagagaaaccaatttctaagaggactggattgcagaagactcggggacaacatttgtccaagatcttaaatgttatattgataaccatgctcagcaatgagctattagattcattttgggaaatctccataatttcaatttgtaaactttgttaagacctgtctacattgttatatgtgtgtgacttgagtaatgttatcaacgtttttgtaaatatttactatgtttttctattagctaaattccaacaattttgtacctgcccgggcggccggccgcccgggcaggtaccctaataaaggcagcaaaatgcattaatccactatgaatggagttttacattttaatttatgcctaatatttataaaagaatttcattcataggctactcacagttgttatctgacgcttacagaagtggtaaacaaccaattgctagttcaagtagtttcctcatgacatctaatggtaagcaaaaattagtatgcatatttcaacatcccagtnaccaatctttttaaaatgga

SEQ ID NO: 2367 - DNA, 212 bp, Homo sapiens
  misc_feature 188: n = A,T,C or G
cgaggtgtcaagcttcgacccacgcgtcccgactttttgtcttagacccagttagggtcaccttacagtgcaggtggaaagaaagcaggactgctgagaggagctcaggacccattttccaggactattgcttctcaaaactttggagagcaggaaaatagattcccaagtgaaagaggtggcagaantaaaaaaaaaaaaaaaaaaaaagt

SEQ ID NO: 2368 - DNA, 109 bp, Homo sapiens
cgcccggcaggtacacagttctgactgcaatacctttttcagactgcaaagggagctcaggatccagaagtcattaaaagaacggacgcgtgggtcgaagcttgtacct

SEQ ID NO: 2369 - DNA, 191 bp, Homo sapiens
tatagggcgaattggagctccccgcggtggcggcccgaggtcaagcttcgacccacgcgtccgcagaaatactgaaagacttttgcctaaagtggcattattgactgctggtgtgatgctactgtaatgtgataaattattaaattgttgcaaagtgcaaaaaaaaaaaaaaaaaaaagacctgccgcggc

SEQ ID NO: 2370 - DNA, 150 bp, Homo sapiens
cgcacttttttttttttttttttttttttttttttttttaaaaaaagcctcattatcctgtagtccattttggaaagtaaagcccaagaaagcaaaagatgaaggttctaaagctagtttgactgacctcagagtcctcggccgctctag

SEQ ID NO: 2371 - DNA, 109 bp, Homo sapiens
  misc_feature 46, 54, 67, 81: n = A,T,C or G
ttcgtgataacttctcctaagtgccaggcattgtattacatgctgngagcacanagatgaataatancaataggttcacanaaaagatgaattgattgagagaaaaaga

SEQ ID NO: 2372 - DNA, 547 bp, Homo sapiens
cgaggtacccaaaagatatcactgtgaaggtttggatacactgactgaggaaaaaagaaggtcctgaaagcgtctagacaaaaaaagactacttgtaagttgcaagaatcagaatggcattggacttctcagctttcctcattagaagttagatctgaagcaatctttaaactcgtgaggaaaattaagtctaataaataattttcttcttagccaaacaatcaaatgtgaagctagaataagcattttcaggtaaaaaaaaaaaaaaaaaaagtgcggccggccgcccgggcaggtacataatatacagaggtataatctgtaacatcaataatgtaaagtggggaagggcaaggtggaaaaggagtagaatgcttgtatgtgactaaaattatgttggtatcagtttaaaatatattattataactttagaatgctatacccattcccacagtaattcccatagtaaccaaaaagaaaatatctgtaggatcacacaaaagaaaatcagaagtagatgcaaacttgtcactacaggaaaaaaaaa

SEQ ID NO: 2373 - DNA, 304 bp, Homo sapiens
cgaggtgtacaagcttcgacccacgcgtccgaagaaggctctcctctgttccaggagaaggaagggacagatgagaagtcacttcaagttcccagaatactcaggagctgaacttgtcaaggtttagatgtggcaaagcaggccaggcatggtgactcatgcatgtaatcccagcattttgggaggccaaggcaggaggatcacttgagcccaggagtttgaaagcagcccgggcaacatagtgaaacctcatctctagaaaaaatacaaaaaaattagccaggcgtgttggtgtacctgcccg

SEQ ID NO: 2374 - DNA, 752 bp, Homo sapiens
  misc_feature 88, 97, 99, 151, 165, 215, 221, 272, 279, 280, 283, 286,380, 421, 430, 466, 467, 474, 486, 489, 518, 527, 548, 552,556, 563, 570, 581, 637, 672, 673, 674, 704, 710, 716, 731,737, 738, 740: n = A,T,C or G
cgcggtggcggcccgaggtacatctgcaagctttaaagcagtaggttcagacttcctggaagaactgacacttgaagctgactagggnctacttgancncatactcactttggctaagccacagtatgagggaagggtgtcaggaataacncttccatttttatnttgttcattcccgaaaatccaacaggagattcttttcactccctaaaatnaactgntctgtgtataaagcatatctggatatcttgatcttaaatggaaatggtatntgaaaanngcnccnacttttctaaaactttaaaattggcccttttttatttttagccctgggggaggagggagggaatgattcccaaaaaactgactggtttccttgntgcagtgtattaattactggtgattattttttggggggggnaatttagcnggaaaaaatttttttttcagggttaaaacgcgcctnntaaaaanttgggaaatggncgnaaaagggggccctttttttcccccgccgntttgggggnaacccccgcccggtttggaanggtnaacnccctttnaaaaaanaaaaaacttgntttcaaggtttttttttccaaaaccgaaaaatttgggaaggtctttttatataaancttggaaacccgcccccggggtcaaaaccccccgnnnggccgttttaaaaaaatggtacccccgccntccggntttcanaattaaacttttttncccccnncnctggggggggcc

SEQ ID NO: 2375 - DNA, 714 bp, Homo sapiens
  misc_feature 581, 651, 699: n = A,T,C or G
ctactatagggcgaattgggagctccccgcggtgggcggcccgaggtcttcgacccacgcgtcccgagaatagctactgaagtcctaaagagcaagcctaactcaagccattggcacacaggcattagacagaaagctggaagttgaaatggtggagtccaacttgcctggccagcttaatggttctgtctggtaacgtttttatccatggatgacttgcttgggtaaggacatgaagacagttcctgtcataccttttaaaggtatggagagtcggcttgactacactgtgtggagcaagttttaaagaagcaaaggactcagaattcatgattgaagaaatgcaggcagacctgttatcctaaactagggtttttacctgcccgggcggccggccgcccgggcaggtacccaacacaaactattcaataaagtaatctgctttaaaaataaaacacactgaaaggcccaggcaggtggatcacctgacatcattagttcaagaccagtgtggccaaactggtgaaaattagtctcgactaaaaatacaaacattagctgggcgtggtggcaggcgcctntaattcactactcaggaggatgaggcaggagaatcacttgaagccaggaggtggaaattgcagtgagctnaaatcgtccattgcacttgaacctggcaacaaaatggggactccgttnaaaaaccccccccca

SEQ ID NO: 2376 - DNA, 532 bp, Homo sapiens
  misc_feature 259, 260, 295, 307, 311, 324, 330, 331, 335, 341, 347, 352,358, 366, 368, 374, 401, 424, 438, 458, 459, 467, 468, 475,476, 478, 490, 492, 494, 502, 510, 511, 514, 521, 532: n = A,T,C or G
ccgcggtggcggccgaggtatcacgagcggccggccgcccgggcaggtcaatcatagagctgccccaacatctagacagtctctcctactgattataaatgagtgaaaactatcagttagaaaaatctaatttaagttgttaatacatgtttctttggtgagcacctggatatatttatcacaaattcttttatacaaatgtcgaaaatggctttcaacaaacctaagtgtcctaattacatgccacttttaagcatcnntttaagggtaaccaaaaatggaaacccttattttnaattaaaatttngggncccggggttttanttaaannactntggccntttttnaaatntggggnccccccgngngggggnaaatttttttatataaatttttttttnccccccccccccctggggggggngccccccccccccntttttttttttttttttttnnggggggannaaactcnncncgggggataaanananggataatntttttttnnttnggaaatnttttttttttn

SEQ ID NO: 2377 - DNA, 233 bp, Homo sapiens
  misc_feature 15, 205, 210: n = A,T,C or G
gcgaattggagctcnccgcggtggcggccgcactttttttttttttttttttttttaaagcactggtgctcttcttaagtgaaatgttaacacagggctcaatacataaaagagaaagtgaagttgttccatttggggggtcccataaggggcctcatgtttccctaggtgttaccccttcagacacagcacatgcctacaaagnggacncgtggggtcgaagcacctgcccg

SEQ ID NO: 2378 - DNA, 523 bp, Homo sapiens
  misc_feature 77, 86, 167, 201, 208, 219, 230, 247, 333, 364, 374, 378,386, 389, 393, 424, 433, 445, 451: n = A,T,C or G
ctatagggcgaattggagctccccgcggcggcggccgaggtcaagcttcgacccacgcgtccggtctattttgattntggggggtnatcagcattattcttcagaaggggacctgttttcttcaagggaagaaacactcttattcccaaactacagaataatgtgtnaaacatgctaaatagttctatcaggaaaacaaancactgtntttatctccgnaggctatttgntcagagaggccttttgnttaaatataaatgtttaaatataaatgtttgtctggattggctataacatgtctttcagcattaggcttttaagaaacacagggtntttgtattctttactaaagatatcagagctnttaatgttgnttanatgagggngantgtnaagtacctgcccgggcggccggccgcccggncaggtcttngacccacgcgtncgggcnattatcaaaaacacttggaaaaagatttttattcctacttttaaacatacatcaaaatctaaaataaaacta

SEQ ID NO: 2379 - DNA, 321 bp, Homo sapiens
ccgggcaggtcttcgacccacgcgtccgattgaagcctctctgaagttaaacccaactatgtttattaaaatgtgtgaaactgaaagtgggctaggttctaccaaggctgtggaactctcctacgagttctgctgatcaggaaatttaagaatttatcttaaaaatgcaaggaaaaaagactgccttggcaattgtgaatgctgctttcaatctcctagcaccgagcctggcacttaggcagctttcagtaagtgggtgaatgaatgactgaatgaatgaatgaatggctcagctgaggaatgtaactttggtcaagacct

SEQ ID NO: 2380 - DNA, 135 bp, Homo sapiens
  misc_feature 68, 98, 100, 114, 117: n = A,T,C or G
ccccggcgggttgggccgggccccgcccccggggcccgggttaccattaattattaccaggagggttnttaattctggttaaccattcaattaattgntnaaaaggtggggggnaangggccaaagggtggggaa

SEQ ID NO: 2381 - DNA, 315 bp, Homo sapiens
  misc_feature 24, 34, 39, 46, 47, 48, 49, 53, 57, 64, 65, 72, 73, 74, 75,76, 93, 94, 95, 96, 97, 98, 102, 103, 112, 157, 214, 287: n = A,T,C or G
tgggagctccaccgcgggtggggncccggggggnccccncccgggnnnnaaanaaanggggggnnttttttnnnnnaaaaacccccttttttnnnnnncccnnttttttttngggagttggggcccccttggaaaagtttgggaacccccccccaantttttccctttaattgggaaaatttttgggtttttaaaatttttaaaaagggggttngggccccccaaaaaaaaaaaaaaaaaaatttttaaaattttaaaattttaaaaaaaggggcctttttgggggnttttttttttttttttggggaaaaaaaa

SEQ ID NO: 2382 - DNA, 301 bp, Homo sapiens
  misc_feature 23, 26, 73, 256, 279: n = A,T,C or G
aaactttttattaaaatgcttanganacagattgactttctttcgcaaatgactgttttacttttcctgaagnaggacatatatgcactctgataaaactgcattacagcctgcaggacaccttgggccagcttggttttactctagatttcactggcgtcccaccccacttcttccaccccactttttccttcaccaacatgcaagttctttccttccctgccagccagatagatagacacggacgcgtgggtcnaagcttgtacctgcccgggcggncgctctagaactagaggatccc

SEQ ID NO: 2383 - DNA, 355 bp, Homo sapiens
aggtgcggccggccgcccgggcaggtacaagcttcgacccacgcgtccgcacaaacattttttcaatgtagcaaaatcaaacttaaaaaaaaaaaaagaagaaaagaagaagatgccgacagtgcggagtctagccttttgtaaacttcatattgcacactaggactataagccattgctagctcattttgaattttaacgtgtaatttttgttttattttctttctgtggggaaacaatgcttgatccaccaatgctctttttaatgttttataactatgtatgtgtatatatataaatatcaaataatatgtatgcacatatgtgtgtgtatatatctatatgtatatacata

SEQ ID NO: 2384 - DNA, 356 bp, Homo sapiens
tggagctccaccgcggtggccccgggcaggtcgagcgaccgcactttttttttttttttttttacctgaaaatgcttattctagcttcacatttgattgtttggctaagaagaaaattatttattagacttaattttcctcacgagtttaaagattgcttcagatcttaaacttctaatgaggaaagctgagaagtccaatgccattctgattcttgcaacttacaagtagtctttttttgtctagacgctttcaggaccttcttttttcctcagtcagtgtatccaaaccttcacagtgatatcttttgggtacctcggccgctctagaactagtgggatcccccgggctgcagg

SEQ ID NO: 2385 - DNA, 216 bp, Homo sapiens
aggtactcatagcatttttccccacatagtctttcaaaatctgcatttatttcaaaatctgaccttcataactcaactatacatgaattgctggtattgtcttttaacttggccaaagaacagttttctgagttagctattatttccaccataaaattgggggtaagatttggcaaaaaaaaaaaaaaaaaaagtgcggccgctctagaactagtg

SEQ ID NO: 2386 - DNA, 278 bp, Homo sapiens
  misc_feature 228: n = A,T,C or G
aggtactacccattttaattacacagtaaacagaagcacgggtaagtgacatactcatactttaagcaataagaattagaagaaaccatagaagcttggggccttctctctagctctaacccaaagaaaatgaattttattttttttttttaaaagaaaacagcatcaatcacttaagattttcttcctctttttttttttttttttacacttgcttattagtatagnatctcgttccaaagcccggacgcgtgggtcgaagcttgtacacctgcccg

SEQ ID NO: 2387 - DNA, 196 bp, Homo sapiens
aattggagcctccacccgcggtggcggccgcccgggcaggtcaagcttcgacccacgcgtccgtcttattttttactcttaggcaatgcggaatatcaatcccagcacagcaaattctccaaaatgtcaggtaggctcttatctgatgttttagcactggaaaaaaaaaaaaaaaaaaaaaagtgcgggccgacct

SEQ ID NO: 2388 - DNA, 250 bp, Homo sapiens
cggccgaggtcttcgacccacgcgtccgaaatgactggttatttagaaaagaaggatgtttagaataaaacaggaagtccaaacatgtcataagtggtttgtgtatgtcataataagggattataaaaagaggatttatgtgaaaaaaattttatgtgatcaagttgtctacaattacaaggaaattatttataatagacgttctagagatctatattaaaaaaaaaaaaaaaaaaaaaacctgcccggg

SEQ ID NO: 2389 - DNA, 380 bp, Homo sapiens
tatagggcgaattggagctccccgcggtggcggccgcccgggcaggtcaagcttcgacccacgcgtccgtctgaacctacaccccgtctcttcacggtttagacttactaaaataaatacaaggtgattttcatcttcaggtagagtgaagccttttaattaaggcgtcacaggtgcagctattctaccttaatgaaatgggtagtgattttcccaccattatttatttcggtgataatatgctgcatattcaagtctcttgtagttattttcacccaaagtagttgacaatttgatgcttctggtgatgtttatggcttcattttatgtaattttttaagtaagttccactagaaacagttcatcttataccttcaaaa

SEQ ID NO: 2390 - DNA, 323 bp, Homo sapiens
  misc_feature 219, 271: n = A,T,C or G
aggtactataagaacacattaattcaatggaaatacactttgctaatattttaatggtatagatctgctaatgaattctcttaaaaacatactgtattctgttgctgtgtgtttcattttaaattgagcattaagggaatgcagcatttaaatcagaactctgccaatgcttttatctagaggcgtgtttgccatttttgtcttatatgaaatttctgncccaagaaaggcaggattacatctttttttttttttagcagtttgagttggngtaggggtattcttgggttatcagaatactcatatagctttgggatttttga

SEQ ID NO: 2391 - DNA, 351 bp, Homo sapiens
  misc_feature 107, 149, 226, 301: n = A,T,C or G
gttcgtatttcttattctacaacaagggtcagcctacaggcaaaacacatcccattgtcatttttttgtaaataaagttgtattggaacatggccactctcatttgntttctattatttatggctgctttcacttacaacctgagtggntgccacagaaactgtatgggcctgcaaagtctaaaatatttactatgtagctttttcttttctttttggagacagtntgccactctattgcccaggctgggagtgcggtggtgtgatcatgggctcattgcagcctcaaaactcctgggctnaagcaatcctcccgcctcggtctcccaagtagttgggactacaggcatga

SEQ ID NO: 2392 - DNA, 115 bp, Homo sapiens
  misc_feature 75, 81, 100: n = A,T,C or G
ccgggcaggtacccagtaatcacataaattctgcaatcatctgtttatttagcttaactgtttttttttatttgntgaagntgttcgttgttatttcagnctttttcttattggg

SEQ ID NO: 2393 - DNA, 163 bp, Homo sapiens
  misc_feature 14, 22, 70, 71, 74, 141, 145, 150, 151: n = A,T,C or G
accgcggtggcggncgcccggncaggtctagcttagtcgacccacgcgtccgggcttaactaatatttgnntgngtgctactaacaggattataataaatttgtcatcagtgaaaaaaaaaaaaaaaaaaaaaagtgcggnccgntctannaactagtgggat

SEQ ID NO: 2394 - DNA, 149 bp, Homo sapiens
ccgggcaggtcaagcttcgacccacgcgtccgatttcaggttgacttttctcacctttaacctctttatatagcacagtgcaatctggccctactgccacttcatctgggttatctgtagcttgagttgtaaaaaaaaaaaaaaaaagt

SEQ ID NO: 2395 - DNA, 343 bp, Homo sapiens
aggtactgttgtctcatgtaatgctaaaactgaaatggtccgtgtttgcattgttaaaaatgatgtgtgaaatagaatgagtgctatggtgttgaaaactgcagtgtccgttatgagtgccaaaaatctgtcttgaaggcagctacactttgaagtggtctttgaatacttttaataaatttattttgataaataatattgaaaaaaaaaaaaaaaaaagtgcggcctcgagcggccgcccgggcaggtacaggcacctatagaatttaaaggggagatttctttattttgtattcaatgtattaataagatttttaaaacatattttggagaaattgctaat

SEQ ID NO: 2396 - DNA, 150 bp, Homo sapiens
  misc_feature 140, 148: n = A,T,C or G
aggtcctagcttgagtcgacccacgcgtccgatttttgcctccagactacagatcagaaaactgagactcagaatgtttcaattccttgtttaagatcacaaaactagtttgaggtataatggaaactgaaaaaaaaaanaaaaaaangt

SEQ ID NO: 2397 - DNA, 259 bp, Homo sapiens
  misc_feature 24, 32, 74, 85, 128, 176, 182, 186, 193, 210, 221, 225, 232,240: n = A,T,C or G
aggtcaagcttcgacccacgcgtncggaagtnttcattctccctctttttttttttttttttagcaattcaagncatgtttttgnctacaagtttttccagtattgtatagataaataataatttacnaggctgcctttgagtatacttagacaagagacctgcccgggcggccgntctagnactnggtggancccccgggctgccaggnatttcaatatnaagncttattngttaccgngcgacctacgagggggggg

SEQ ID NO: 2398 - DNA, 160 bp, Homo sapiens
  misc_feature 42, 88, 135, 136, 142, 148: n = A,T,C or G
cggccgcccgggcaggtatcaagtgcttggattctgaactgncaaaagaaaactgcacttgccctctgaagtaaaaaccgaaatgagntttcttaggcaaatgtattcatcagcccagataaaaaaaaaaaccanntaatgngagccnttagtcactgct

SEQ ID NO: 2399 - DNA, 259 bp, Homo sapiens
aggtacaagcttcgacccacgcgtccgatacgactcactatagggatctacctgcttgagtcgacccacgcgtccgaacacatacaaaagaattaaacccacaagctgcctctgacagcagcctgtgagggagtgcagaacacctggccgggtcaccctgtgaccctctcactttggttggaactttagggggtgggagggggcgttggatttaaaaatgccaaaacttacctataaattaagaagagtttttattaca

SEQ ID NO: 2400 - DNA, 167 bp, Homo sapiens
aggtggccgcactttttttttttttttttttttaaagtttggggtctgtcaggagacagaggcttttttgaattcactgtgaagagaagaacccgaaccttaagacggcagatccctgagagtctttctggctggtttgagcggacgcgtgggtcgacacctgcccg

SEQ ID NO: 2401 - DNA, 127 bp, Homo sapiens
  misc_feature 42, 103: n = A,T,C or G
aggtacttcaaagttatttgcacatacacttgtttactttgnatgttttgcaggattaaactttgtataatctttttgcaaaatttttttttcagtatgcaangcttgcaagatgaaaattaaaacc

SEQ ID NO: 2402 - DNA, 153 bp, Homo sapiens
  misc_feature 30, 31, 32, 34, 72, 127, 137: n = A,T,C or G
accgcggtggcggccgaggtacaagcttcnnncnactcgtccgagcttgagtcgacccacgcgtccgcgttnatgatttttaaaacacacttgaaataaaaatgattgaactaaattttggtccggngacatcattntgcactgcatagccca

SEQ ID NO: 2403 - DNA, 319 bp, Homo sapiens
  misc_feature 128, 147, 159, 172, 217, 231, 276, 293, 303: n = A,T,C or G
ccgggcaggtacatctctatcagagcttttgggtgaccaggcacactgtcaatgagcagtaatactttgaaaggaatctttggggttttttttggtttggtttttgttttgttgttatttttttgttngtttgatttttgtttttgnttttttagcagnaggcctcaacagnggacttaaaatactcagtaaaccatgctgttaacagataagctgncatccagactttgntgttccatttctagagcacagagcagatttagcacaattcttaangctttatgatttttcanaatggtaaantgagcactggcttcaa

SEQ ID NO: 2404 - DNA, 218 bp, Homo sapiens
  misc_feature 1, 25, 26, 33, 37, 39, 42, 45, 47, 50, 56, 62, 66, 67, 68,69, 81, 96, 97, 98, 100, 102, 106, 111, 113, 115, 116, 117,128, 130, 132, 134, 138, 139, 140, 141, 146, 160, 169, 170,171, 172, 198, 206, 207: n = A,T,C or G
nttttttgggggggggaaaaccccnnacccccnccananagncangnaanaagggntttttnacannnnaggggggggcanccccccaaaaaaacnnncnangcangaagnanannnaaacaaaacangnangnaagnnnncacgngctttttttaaaanatttttttnnnnggggggggggcccccccaaaaaaaangaggacgnnggagccccccc

SEQ ID NO: 2405 - DNA, 379 bp, Homo sapiens
  misc_feature 3, 221, 222, 223, 252, 305, 309, 359, 366: n = A,T,C or G
ctnctatagggccgaattggagctccccgcggtggcggccgcccgggcaggttttttttttttttttttctttctgttccttggactagataatctgaaatcaactgtcttcagttttgcagactcttgtgccagctaaaatgttctgttgagccccagaagctaattttcttttcagttattatgattttcagctttagaatttatttttttaatataannnctacctcttttttatattctccattgggngagacattcacatactttcttccagttttttttagacgtagtttccttgagtncttngagcatatttaaaatagtagatttaaaggatttggctagttactccaccntctgagnttcctcagggaaa

SEQ ID NO: 2406 - DNA, 126 bp, Homo sapiens
  misc_feature 95, 97, 99: n = A,T,C or G
ccgggcaggtcaagtcgacccacgcgtccgcttgttttgctctatcccataggagttggtatagttgtgtttccaatatcatttactaaaagaanantntcctttttatttcttcattgaccaact

SEQ ID NO: 2407 - DNA, 265 bp, Homo sapiens
  misc_feature 37, 48, 69, 94, 99, 106, 113, 119, 128, 143, 168, 176, 187,188, 189, 190, 191, 192, 193, 194, 195, 196, 197, 198, 199,200, 201, 202, 203, 204, 205, 206, 207, 208, 209, 210, 213,244: n = A,T,C or G
acttttttttttttttttttttagtctttctactttnagggtttattnactggcagttttcaggtctgnaaatacaaaaaggaacatagacatngggtntctgccnttgaggngctccnagttttggngagggacacaacacntttcaggggacaaccgtggtacctnggccggtntaaaactagtnnnnnnnnnnnnnnnnnnnnnnnntcnatatcaagcttatccgataccgttctacctntgagggggggcccggcaccca

SEQ ID NO: 2408 - DNA, 316 bp, Homo sapiens
  misc_feature 230, 247, 271: n = A,T,C or G
aggtcaagcttcgacccacgcgtccggcctgggacagatccttagtctttccttgacttttatagacccagaggtgaaaggccaaatgttttgtagaatgtccttaaacttgggtttatctgaggtttccttgtgattgaattcaggttagacatctttgatgggactgtcatagaactgatgctgtgttctaattgcatcttatcaggtgacttatgatttctgtttgncccattattgatgctgntactttagatcacttgattaaggnggtgtctcgcctggcttctccagtgtgaaatttcctttttcttct

SEQ ID NO: 2409 - DNA, 325 bp, Homo sapiens
aggtaatttttctgcttgcccaagaaacaaagcttctgtggaaccatggaagaagatgaaaatgagactggcaaagaacaaatgctgaatctgaagaagatttgggcaaataatctgcatacttttaattgggaataagatggaaaatatgaatgctaaatcaaattttttaaaaaaatacacccggacgcgtgacctgcccgggcggccggccgcacttttttttttttttttttcaatattatttatcaaaataaatttattaaaagtattcaaagaccactttcaaagtgtagcctgccttcaagacagatttttggcactc

SEQ ID NO: 2410 - DNA, 234 bp, Homo sapiens
  misc_feature 33, 36, 67, 74, 122, 144, 191, 200: n = A,T,C or G
acttttttttttttttttttttttttttttttnggnggggaggaaggcaaggcactgggaaagactnacaacanatattgaccctagtcgtaaagaaatccataattgccagtaacacgacntatttaagaacaggaaaagacngacaaggaaaagagggactttttttaaaaaacattactaaagaattnggacataanaagagtgaaattgacaaggaaaggaggaggggga

SEQ ID NO: 2411 - DNA, 328 bp, Homo sapiens
  misc_feature 205, 228, 230, 309, 314: n = A,T,C or G
gagctccaccgcggtggctggccgcccgggcaggtacataatatacagaggtataatctgtaacatcaataatgtaaagtggggaagggcaaggtggaaaaggagtagaatgcttgtatgtgactaaaattatgttggtatcagtttaaaatatattattataactttagaatgctatacccattcccacagtaattcccatagnaaccaaaaagaaaatatcttgtngnatacacacaaaagaaaatcagaagtagatgcaaacttgtcactacaggaaaaaaaaagctatcaaaatagaaaacaatnatggngaaaaataaagaca

SEQ ID NO: 2412 - DNA, 178 bp, Homo sapiens
  misc_feature 109, 146, 172: n = A,T,C or G
ccgggcaggtgccgcactttttttttttttttttttttttttttttatggaaaaaatattgtgattatttttaatagatttacggtataaaagaaaaacttttatgatncaatttcgacagactactttcataaaaaattttactntacatacaatgtattgcaaatttttnggcaac

SEQ ID NO: 2413 - DNA, 369 bp, Homo sapiens
  misc_feature 1, 163, 172, 312: n = A,T,C or G
ngggcgaattggagctccccgcggtggcggccgaggtcttcgacccacgcgtccgattttgtgagaatgattgttctttcacttgggctgtttgagagcataattatggtaatcatgagattaatgtttcatgatttctacctccaaagtgtgaagacaagtnaaacaatgnttctaaattgtcttattttgttggcggagaagattacaatgggctattagtgctacatttggtcaaatgtaatcacttaaatagcttcttgtcaccttaactaaagcagaataaaaaaaccctgccccggggcggccggncccgccccgggcaggtaccattcccgacgtttgcaatggtgggagttggcaggtgtg

SEQ ID NO: 2414 - DNA, 189 bp, Homo sapiens
  misc_feature 175: n = A,T,C or G
ctatagggcgaattggagctccccgcggtggcggccgaggtacaagcttcgacccacgcgtccgcttctcttagaattttggggaaattgatagtccagtgactcctacccacttttgggtgaaggacgatttggaattttgaagtgtggggagacaggcctgtgaagtccgaangactcacttggggt

SEQ ID NO: 2415 - DNA, 122 bp, Homo sapiens
  misc_feature 102, 107: n = A,T,C or G
ccgggcaggtcaagcttcgacccacgcgtccgaaaaaaaaaaaaaaaagtttgttggagaccgactgggggtgaggggctggcagcaggagacagataacangttcnctcagaatgcagagt

SEQ ID NO: 2416 - DNA, 286 bp, Homo sapiens
  misc_feature 2, 22, 57, 68, 110: n = A,T,C or G
angttttttttttttttttcantgcttcccaaagctgcggacataagggtagctganctggactctgnccttgctgaagacttggagatgtctgaagtcataactggggngacctccttggtccaaaatgtgctgccccctatgaattccacatcaggagttgtaggagatgaggttagagggatgcttgggctcatctggcttccttcagcatagcccggacgcgtgggtcgaagcttgacctgcccgggcggccggccgcactttttttttttttttttttttt

SEQ ID NO: 2417 - DNA, 341 bp, Homo sapiens
  misc_feature 223, 339: n = A,T,C or G
ccgggcaggttttcttatgagtgggaggtgactgatcgtggaggtggatttcttatgagtgggaggtgactgatcgtggaggtggatttcttatgagtgggaggtgactgatcgtggaggtggatttcttatgattggcttatcaccatccctccttggtgctgtttttgcaacagtgagtgatttcttgtgagatccggttgtttaaatccagaggcacctncccctaccctctagctcccattcctgccatgtaagacacctgctccccctttttcttaccccatgattggaagctttctgaggcctccccagaagctgatgccagccctatgcttnct

SEQ ID NO: 2418 - DNA, 330 bp, Homo sapiens
  misc_feature 62, 123, 197, 266, 279, 314: n = A,T,C or G
ccgggcaggtcttcgacccacgcgtccgcacattttgatggtcagtcaataacttaagcagntaccaaaatactaggtatccaaggagcgagaggtgggccgagcataagaaacacatttctnatggcacagctctgccaaagccctgcagaatcatttacacataggtctttggttagtagcccctggcacagaantctgatcttaaacaaatattgtctataatcaagtagagcaatgcaattaaaaaaaaaaaaagcacaggnttttggggccatngctgaaatcccagccttgctattttgcttggctgngtgaccggggtttcct

SEQ ID NO: 2419 - DNA, 315 bp, Homo sapiens
  misc_feature 132, 144, 170, 174, 242: n = A,T,C or G
aggtgtacaagcttcgacccacgcgtccgggatgagtttgtatgtgtaaagtgcttgaaacagtgcctgccacatactaagtgttggataagtgtttgttattaaaaaaaaaaaaaaaaaaaagttgcggcncggccgcccggncaggtactggcgtggattctgcatantggngatcacacgttccacctcatcctcagtgagttctcccgccctcttggagaggtcaatgtatgctttcnctcaacaccacatgagcatatcttcggcccacaccctttaatgggcagtgatggcaaaggctattttccgccg

SEQ ID NO: 2420 - DNA, 321 bp, Homo sapiens
  misc_feature 63, 72, 173, 240: n = A,T,C or G
aggtattcaacaagggccctgagagagggacaggcagcccctgtgaatcttgctgttcagcanagacaggantcagcacgtgtgagggcagcagggaagtcttcctggaggagtgagacctggcgatgaggaggcacggcagggaggtggaacaggcaggagagactcttcangaattgaggagatagaatagaggacactaaagccttagagaggccaggggtggtggcttggcaggancatcgcttgaggctaggagtttaaaagcaagcctgggcaacatatccgagacccccatctctaaacacaaaaaataaaaaa

SEQ ID NO: 2421 - DNA, 223 bp, Homo sapiens
  misc_feature 72, 80, 90, 150, 194: n = A,T,C or G
ccgggcaggtacccagtaatcacataaattctgcaatcatctgtttatttagcttaactgttttttttattngttgaagntgttgttgtnatttcagtcttttttcttattggggttgaccagacttgggtaaaatctgtaagaaaagtnccataattatggggggaagatttcctcttgaattggcttaaatncctgttagctgaaaaaaaaaaaaaaaaaa

SEQ ID NO: 2422 - DNA, 281 bp, Homo sapiens
  misc_feature 14, 87, 238: n = A,T,C or G
ccgggcaggtcttngacccacgcgtccgagcaaaattcaactaaaaatacaatctggattccatagccaagggttttatttacaatntcctagtaggaagtctttattttagctttcaatgtgttgaacttataaggaaatttaacgtatacatgagtattatatttatggaatgtgaagatatacagaatggaaatggaaaataatgttaattcgtattgactttgaggaatcttanaatcatgtagccctgttgcaacaagaaatagggaacttctgaa

SEQ ID NO: 2423 - DNA, 267 bp, Homo sapiens
aggtcaagcttcgacccacgcgtccggtttgtttttttcttacggcaactcaaagcaaagagctggaggagccagccattataattgcttactctcatcgcttagcgccccaggtgggatgtgtttccaaaacacatttttgtatttataaggaaatgtagttaggattaattttattgtcctaattagaactcacattttggttaaatcctcaatttcattaaaaaaaaaaaaaaaaaaaagtgcggccggccgctcgacctcggc

SEQ ID NO: 2424 - DNA, 344 bp, Homo sapiens
aggtgcttcgacccacgcgtccgacttaattgagaaggtggaatcctcctatccctgaactcgggggaatggaatctcgctgatcttccaggactagctccctgatcattccagcccctctgaacaacagggcccctggagatagaagtagtcctatttcaccccaactacaacattaatgggaaaaaagaagcaggaattcctgaattttatgactatgacgttgccctgatcaagctcaagaataagctgaaatatggccagactatcaggcccatttgtctcccctgcaccgagggaacaactcgagctttgaggcttcctccaactaccacttgccagca

SEQ ID NO: 2425 - DNA, 309 bp, Homo sapiens
aggtacaacttctcttttttggagttttacttgcttctatcaagaaagacaattttcctgtttccatgacgttggagtttggctcacttccaacagggaaaaggagtgtttttttttgttttgttttgtttttcctgcttcttgaatggtagagagcagtctatagccagagactcgtccctaggtaagtaactgaattggggtttgtcttggttaaagttaagattaacgaccaactggtcttaatttctccttaccattagagcactcagttatcatataaattgcgccattgtttgttttgcctaa

SEQ ID NO: 2426 - DNA, 338 bp, Homo sapiens
  misc_feature 258: n = A,T,C or G
aggtcaaccgccagggtcaaacggaacacaacccactctcaggaagacatccctaacacaaatccagggactttgtttcttaaccttaaaattggaaacacttcttgctaccagggatggggggtggggctcagcagtttggggaaacggagtgggagtcttttgctgaaccggacgcgtgggtcgaagctggacctgcccgggcggccggccgcacttttttttttttttttttttgagagtggctatttcattaanatttaatagttttttttggactaagtagtggaaaaacttttatacttaactgagacattttgtcaaggctaaaaaaaagt

SEQ ID NO: 2427 - DNA, 126 bp, Homo sapiens
aggtacatcccactatttcttttcttttagctagaaaggtataacgttaaaacccttttaccaaataaaatgattttatttagaaaatgccgggcactaaaaaaaaaaaaaaaaaaaaaaaagtac

SEQ ID NO: 2428 - DNA, 137 bp, Homo sapiens
ccgcggtggcggccgaggtacctattttgtatatgtgagatgtttaaataaattgtgaaaaaaatgaaataaagcatgtttggttttccaaaaaaaaaaaaaaaaaaaagtgcggccggccgctacctgcccgggct

SEQ ID NO: 2429 - DNA, 277 bp, Homo sapiens
aggacaatgctgtagataatgcagcccatgcaatacacccaagaacactagagtcctacacccaagtacaatatgataaagcagccctctgcaagtggtgctggataccactaagaagtctactgcagccatgttggttatgattttccatgcagaagggtacagttagttcatatttatgtattgcacataatcatgctattcagcattgatgctatattgtattatgtaaataataaaagccatgtacagagggaaaaaaaaaaaaaaaaaaaaa

SEQ ID NO: 2430 - DNA, 168 bp, Homo sapiens
  misc_feature 131: n = A,T,C or G
ccgcggtggcggccgaggtattcgacccacgcgtccgtagtttttatctttgaccaaccgaacatgaccaaaaaccaaaagtgcattcaaccttaccaaaaaaaaaaaaaaaaaaaaaaaagtgcggccgntctagaactagttggatcccccgggctggaggaattc

SEQ ID NO: 2431 - DNA, 240 bp, Homo sapiens
ctacttagggcgattggagctccccgcggtggcggccgaggtcttgagtcgacccacgcgtccgagtcaagagaacagcacattagttccagaagaaagatggaaattctgaaaactgaatgtcaagaaaaggagtcaagaacaattcacagtatgagaagaaaaatggaaaaaaaaactttatttaaaaaagaaaaaagtccagattgtagttatacttttgcttgtttttcagtttcc

SEQ ID NO: 2432 - DNA, 415 bp, Homo sapiens
  misc_feature 3, 347, 363, 374, 396, 408: n = A,T,C or G
ctnctatagggcgaattggagctccccgcggtggcggccgctgttcgtatttcttattctacaacaagggtcagcctacaggcaaaacacatcccattgtcatttttttgtaaataaagttgtattggaacatggccactctcatttgttttctattatttatggctgctttcacttacaacctgagtggttgccgcagaaactgtatggcctgcaaagtctaaaatatttactatgtagctttttcttttctttttggagacagtgtgccactctattgcccaggctggagtgcggtggtgtgatcatggctcattgcagcctcaaactcctgggctcaagcaatnctcccgccttggtctnccaagtagttngggactacagggcatgagcccnccataccccggntaatttt

SEQ ID NO: 2433 - DNA, 163 bp, Homo sapiens
  misc_feature 119, 121, 124, 129, 143, 144: n = A,T,C or G
ccgcggtggcggccgaggtcaagcttcgacccacgcgtccggaaaatgttttctttttttaatttaaggtttaaaattcctttgccaaatcaaaaaaaaaaaaaaaaaaaaaaaaacgntngcntgccnggccggccggccgnncttactttttttttttttt

SEQ ID NO: 2434 - DNA, 472 bp, Homo sapiens
cttagggcgattggagctccccgcggtggcggccgcccgggcaggtcttgagtcgacccacgcgtccgataaaacaccgccttcagtgtaaaaattttacatggtatctgaacaacatttatccagaggtgtatgtgccagaccttaatcctgttatatctggatacgtgagtattttcctgttccttttttaattaatatactccttgccaccaacctttatgtggttctaagaaaattgctgaaatactttctttattgcttttgagattttacattataatcattaacattactttctaaattattttaaaaatatataaatcacatggattaaaaaacttttcataacttgaaaattttcctttagattaaaagcgttggtcagcctctatgtctgggatgttggagaaaacaatcaaggaggcaaaccattaattatgtatacatgtcatggacttgggggaaacca

SEQ ID NO: 2435 - DNA, 607 bp, Homo sapiens
  misc_feature 200, 216, 224, 247, 256, 268, 293, 294, 296, 301, 304, 310,330, 332, 333, 335, 349, 350, 351, 354, 357, 358, 360, 364,366, 371, 373, 379, 381, 383, 384, 390, 404, 408, 414, 417,419, 420, 422, 459, 461, 463, 464, 501, 502, 504, 509: n = A,T,C or G
  misc_feature 510, 516, 520, 528, 529, 531, 533, 541, 542, 549, 560, 563,564, 576, 578, 579, 588, 590: n = A,T,C or G
ggcgaattggagctccccgcggtggcggccgaggtcttttttttttttttttttttaatggttaagctactcaaattgttttcagagccagagtaaaaaccaaaaaaaatactcatcaatatcaattgccaaattcagtctgaaaacatttcacacacagcttacccaagtataaagctgctggggggacttctgaaaanttggcaacattcattnggggcttngaaatgctttacaaggggaaggnttttttaangcagggcttacntgggttttcccccaaggcccctggnnangtttnccnaaaatnaaaggggggggccccccctngnngngggttttttccccnnnccnccnnancatnanggggngngccccncncnntttttnttttttaaaggggnaaantttttncgngnntntgaaaaaagggtttttttaaaaccccgggggggtttntntnntttttttaaaaaaatatttttaaaaaggggggggggnngntgggnntttttntggngggaaaanntntnacaccccnntaaaaanggggttttttnccnnattttttttttncnnccccaaaananggggggggggggggggg

SEQ ID NO: 2436 - DNA, 136 bp, Homo sapiens
  misc_feature 3: n = A,T,C or G
ctnctatagggcgaattggagctccccgcggtggcggccgaggtgtcattttatttttacgttgttacgatatggggagtagtgtgattgaggtggagtagattaggcgtaggtagaagtagaggttaaggagggt

SEQ ID NO: 2437 - DNA, 419 bp, Homo sapiens
  misc_feature 2: n = A,T,C or G
tnctatagggcgaattggagctccccgcggtggcggccgaggtcaagcttcgacccacgcgtccggcctgggacagatccttagtctttccttgacttttatgacccagaggtgaaaggccaaatgttttgtagaatgtccttaaacttgggtttatctgaggtttccttgtgattgaattcaggttagacatctttgatgggactgtcatagaactgatgctgtgttctaattgcatcttatcaggtgacttatgatttctgtttgtcccattattgatgctgttacttagatcacttgattaaggtggtgtctgcctggcttctccagtgtgaaatttcttttcttctttgtaatattttgtgggggaagtaactttaagactatgtaactgtttcatttcttttcttttcttttga

SEQ ID NO: 2438 - DNA, 320 bp, Homo sapiens
  misc_feature 12, 226, 302, 313: n = A,T,C or G
tactatagggcnattggagctccccgcggtggcggccgaggtgtacaagcttcgacccacgcgtccgaaagattcttggctgagcatggtggctcatgtctgtcatctcagcaatttgggaggcaagggcaggaggatagtttgagcccatgagtttgagaccagcctggacaacatagtgagaccccatctcagcaaaaaaaaaaaaaaaaaaaaaaaaaaaaangtgcggccggccgcccgggcaggtacatgactatatcaggatttcaaattgaggaaaccattgaccgcgagacttntggcaatttanagcaact

SEQ ID NO: 2439 - DNA, 193 bp, Homo sapiens
ccgcggtggcggccgaggtacctattaagctcatgaaccatagaggtatctcggtggcccctcattaccatctgctgttctttcagctgtttagctacatctttggctgaggaaccagacacttcaatccatgtcttagagaagaatgcacatgaccccaacatgaagatgatataaacaacgacatggacag

SEQ ID NO: 2440 - DNA, 177 bp, Homo sapiens
  misc_feature 2: n = A,T,C or G
tnctatagggcgattggagctccccgcggtggcggccgaggtggccgcactttttttttttttttttttgaaaatagtttattattttattgttttttgtttatacatgttaagtttcaactttcaataataaaattcaataaatttgattccttaatcataaaaacttgctttaca

SEQ ID NO: 2441 - DNA, 161 bp, Homo sapiens
  misc_feature 11: n = A,T,C or G
ctatagggcgnttggagctccccgcggtggcggccgcccgggcaggtcaagcttcgacccacgcgtccgataatttatactaaatttagtaaaatggacttcttattcaaagcatcaataattaaaagaattattttaaaaaaaaaaaaaaaaagtgacct

SEQ ID NO: 2442 - DNA, 354 bp, Homo sapiens
  misc_feature 352: n = A,T,C or G
gggcgattggagctccccgcggtggcggccgaggacaagcttcgacccacgcgtccgcttaatagcaaaggataattgaaatcccaaacttacaaggttttcaacaaaagtgaagtttgcttaaagttaacagtgtaacatgtattatggtaacttctaatcttgtggccttagacagtctagtccaaaggcataaagaaagtttgctttaaaaaaaaaaaaaaggaatggttatcttcaaaaaaaaaaaaaagtggggggagacagaatttatgtaaaaagagtgttatatggtaaattcttgtcctgaaataaactaactggtgtttaaagaaaaaaaaaaaaaaaaaangt

SEQ ID NO: 2443 - DNA, 425 bp, Homo sapiens
  misc_feature 3, 245, 246, 247, 294, 306, 314, 316, 323, 327, 328, 329,350, 360, 372, 389, 391, 400, 402, 417: n = A,T,C or G
ctnctatagggcgaattggagctccccgcggtggcggccgcactttttttttttttttttttttttacctgaaaatgcttattctagcttcacatttgattgtttggctaagaagaaaattatttattagacttaattttcctcacgagtttaaagattgcttcagatcttaaacttctaatgagggaaagctgagaagtccaatgccattctgattttggcaacttacaagtagtctttttttnnntagacccttttcaggacctttttttttttcctaagtcagggggtttncaaaacctttcnaaaggggntnttttttngggnnncctgggccggtttttaaaaantaggggggancccccccggggntgggggggaatttgatntnaaagttttntngatccccgccccccntggggggg

SEQ ID NO: 2444 - DNA, 479 bp, Homo sapiens
  misc_feature 245, 263, 265, 272, 283, 288, 323, 337, 344, 356, 357, 358,363, 373, 383, 395, 398, 400, 401, 423, 426, 436, 445, 453,454, 455, 456, 468: n = A,T,C or G
tacttagggcgaattggagctccccgcggtggcggccgcactttttttttttttttttttttttttttgaaatgtttgaagttaactcattttatttctaggatttggatttcaacattttaatttctttggaatataagtcactttttgcaagctaaaaaatagaatcaaactaaggtgatctaagtcctctaggcatccaggctgatccttggaatcatgagcagaatgatgacatactacanggggctagcaataccggntntaaactnttaaataatanccctncatggttttattagggaaccagccaaaagtcccgncccttttaaaactngggggancccccgggcttnnnggganttcgatattnaacttttttngaaacccgcccnccncnnggggggggggccccgggccccnacnttttttgttnctttttaangggggggnnnnaaattcgccccnctgggggggaa

SEQ ID NO: 2445 - DNA, 556 bp, Homo sapiens
  misc_feature 197, 198, 215, 218, 223, 229, 230, 235, 240, 249, 250, 251,273, 274, 279, 280, 282, 288, 293, 294, 295, 300, 302, 309,310, 311, 318, 319, 321, 337, 339, 340, 342, 355, 362, 364,365, 366, 367, 369, 374, 380, 389, 395, 399, 415, 425: n = A,T,C or G
  misc_feature 426, 427, 434, 435, 436, 443, 445, 446, 447, 449, 455, 465,472, 475, 488, 489, 490, 492, 493, 495, 500, 501, 502, 508,509, 510, 522, 525, 531, 534, 535, 537: n = A,T,C or G
acttagggcgaattggagctccccgcggtggcggccgcactttttttttttttttttttttttttttttttattggtatttagtttttatttcataatcataaacttaactctgcaatccagctaggcatgggagggaacaaggaaaacatggaacccaaagggaactgcagcgagagcacaaaagattctaggttnntgcgagcaaatggggtnggnggggngctttnnttggntaaanaagggatgnnnttgggggtttaaaaaaaacccnnggcanncntttttngggtnnnccccnanccccaannnggggggnntnttttgtggggggggtngnntnttttggggggacncaaaaangnnnntnttggncccccnaaaaaaaantttaanggcntttttttttttttttntaaaaaaaannnaaagttnnnttgcccnannncncccctnttttttttgnggggggnggngaaaaaaaaaaannngnngnccccnnntttttnnnggggggggcccnaantttttntcnntnaaaaaaaaaatctcccccc

SEQ ID NO: 2446 - DNA, 456 bp, Homo sapiens
ccgcggtggcggccgcccgggcaggacacaggaggccttattacttttaaattatacaacattttttgcttaaaatttttttaataaaattttttcttttatgacttttgcagacaattttttaaacatgttttaactttttgacttattacaaacattcttttctttaaacaaccagttaatttatttcaggacaagaatttatcatataactctttttatataaattctgcctctcccctttatttttgaagataaccattgtttttttaaagcaaactttctttatgtgttttgactagactgtctaaggccacaagattagaagttaccataatacatgttacactgttaacttttagcaaacttcacttttgttgaaaaccttataaggtttggggatttcaattatcctttgctattaataagaccttgttcagtctaaattaacttaaa

SEQ ID NO: 2447 - DNA, 470 bp, Homo sapiens
  misc_feature 1, 15, 281, 329, 367, 400, 405, 406, 412, 413, 417, 419,421, 422, 430, 435, 443, 445, 447, 448, 449, 455, 459, 469: n = A,T,C or G
ncactacttagggcnattggagctccccgcggtggcggccgaggtcaagcttcgacccacgcgtccgggagaattacccgaaaaacaaccacactgcttcaatcctggacaggatgcaggcagattttaagtgctgtggggctgctaactacacagattgggagaaaatcccttccatgtcgaagaaccgagtccccgactcctgctgcattaatgttactgtgggctgtgggattaatttcaacgagaaggcgatccataaggagggctgtgtggagaanattgggggcttggctgaggaaaaatgtgctggttggtagctgcaacancccttggaattgcttttgtcgaggttttgggaaattgnctttgccctgcttgcctcgtgaagagttttaanaagtnncttccnnaggntnanntaagggtntcttnggtctttntnannnccttcnttantttggggggng

SEQ ID NO: 2448 - DNA, 364 bp, Homo sapiens
  misc_feature 106, 338: n = A,T,C or G
acttagggcgattggagctccccgcggtggcggccgcccgggcaggtgccgcacttttttttttttttttttttttttttagaatttagccacttctcaggccttnttccccataatttggaactttcctttggatttgatcaagttggatagagttgatcaaaccctgatcaagttggatagagttgatcaaacccaatgggaaaaagaccaaaacaacaataaaaaacagacaacaacaacaaaaaacagttaggcaaaacaaacaatggcacaatttatatgataactgagtgctctaatggtaaggagaaattaagaccagttggtcgttaatnttaactttaaccaagacaaaccccaa

SEQ ID NO: 2449 - DNA, 197 bp, Homo sapiens
tacttagggcgattggagctccccgcggtggcggccgaggttacaagcttcgacccacgcgtccgcgaaagcgaagaaggaagctcctgcccctcctaaagctgaagccaaagcgaaggctttaaaggccaagaaggcagtgttgaaaggtgtccacagccacaaaaagaagaagatccgcacgtcacccaccttcc

SEQ ID NO: 2450 - DNA, 340 bp, Homo sapiens
  misc_feature 32, 103, 111, 112, 123, 128, 153, 183, 194, 208, 215, 219,226, 230, 233, 243, 256, 272, 300, 315, 325, 330, 337: n = A,T,C or G
ccgggcaggtactttttctaatatacttttcnattacacatgaaagccatgacaggaactgagataagatttctttgttttttgaaacatcttatctactaanaaaatttnnaaaatcatttnacttnaaagctattagtagttttatactcncttaataagtattaataaatttacatactngacttagtaanctaagcaatttggntaacgtntttntttattngagngantttttgccanttggatatttttnctaccttactattacnttataaatatatttccccaaatatatcnttcctctttaaaaantatgttttgncaacnaaccttnaaa

SEQ ID NO: 2451 - DNA, 206 bp, Homo sapiens
tacttagggcgaattggagctccccgcggtggcggccgaggtacttcaaagttattgcacatacacttgtttactttgtatgttttgcaggattaaactttgtataatctttttacaaaatttttttttcagtatgcaagcttgcaagatgaaaataaaacctgtttgcctgataaaaaaaaaaaaaaaaaaaaaaaaaaaaatgt

SEQ ID NO: 2452 - DNA, 406 bp, Homo sapiens
ctacttagggcgattggagctccccgcggtggcggccgaggtagctgattacaccaacttgaatgaaacgacttctcttgtgaactatcaaggggccgccagaatcacctctgcaagtattggggtcagcatagggactcactcctccagtacaaaggaaccgaggggtgaccacctctgagatgtccttgactttgtcatagcctggggcatattgagcatctctctcacagctgcctttcttatccccattcttgatgtagaccggccgcccgggcaggtgcacatacaccaaatgtctgaacctgcggttcctctcgtactgagcaggattaccatggcaacaacacatcatcagtagggtaaaactaacctgtctcacgacggtctaaacccagctcacgtt

SEQ ID NO: 2453 - DNA, 571 bp, Homo sapiens
  misc_feature 249, 262, 287, 312, 317, 325, 326, 340, 347, 353, 368, 371,383, 384, 388, 389, 392, 393, 398, 405, 410, 418, 419, 422,440, 445, 447, 458, 463, 467, 476, 477, 482, 495, 508, 509,511, 514, 518, 520, 522, 524, 527, 528, 544, 559, 571: n = A,T,C or G
ccgcggtggcggccgcacttttttttttttttttttttaagaaatagggtctcactctgtcccccaggctggagccattatagctcactacagcttctgactcctaggctcaagggatcctgccacctcagcctccctggtagctgggactataggcaggagatcgcttgaaccgggaggcggaggttgctgtaagctgagatcgcgccattgctttccagcctgggtgccagagcaaaactttgtctnaaaaaaaaaattnttttttttaattaaataaaaagggncaggggattttttgggaaaaggtcnaaaanaaaattgnnctttttgaaaaaanccttggnaaaaanccaaaaaaaaaattnggngggaaaaaaatnntttnnttnnggganaaaaaanaaaanaaaaaaanntanggggggggtttttttttnggggngnggggggggggnaaacncaanccccccccnntttanaaaaaaaaagggngcccccccccccnngnggnaaangngntnttnntaattttttttttttnccccccccccccccngggggggggggn

SEQ ID NO: 2454 - DNA, 307 bp, Homo sapiens
gagacacagtctcactcttgcccaggttggtctaaaactcctgggctcaagcaatcctcccgctttcagcctcccaaagtgctggggttacagccgtgtgccactgtgtctggcccttttctttttcataggagaagggttgttgactcccaggaaacgtcacctggaaccaagaatgtgaactcaaggacccccgcctgttggcagctgcatttacttgactcctgttcactgtttcttagccttgtcctttctctcctgccagttctaggggacactgcttctcctggttgacctcatcaatgcc

SEQ ID NO: 2455 - DNA, 428 bp, Homo sapiens
ccgcggtggcggccgaggtttcaaggaccagcctggccaacatggtgaaaccccatctctactaaaaatataaaaatcagccgggcatggtggcatgtgcctgtaatcccagctactcaggagtctgaggaggagaatcacttgaacctggaggcagaggttgcagtgagtcgaggttgcgctactgcactccagcctggacaacagagggagactctgtctcaaaaaaaaaaaaacctacagctgttcaaggaccagctgacaggtcaagtgtggccttttctggtctttgaacacatcatagaaagtgacaaatgctgcaaagccatgaagaacatgaactataaacgggtagactaactgcccagcttagacacttatctatgccacaaaacagctgaatttgtcacatttatatattgcaatat

SEQ ID NO: 2456 - DNA, 442 bp, Homo sapiens
  misc_feature 325, 331, 345, 353, 364, 378, 393, 394, 403, 412: n = A,T,C or G
aggtcttcgacccacgcgtccggtggcttatgcctgtaatcccagcactttgggaggccgaggcaggcggatcacaaggtcaagagatggagaccatcctggccaacgtggtgaaaccccatctctactaaaaatacaaaaagtagctgggcgtggtggcacacgcctgtagtcccggctactcgggaggctaaggcaggagaatcgcttgaacctgggaggcggaggttgcagtgagcggagaccacgtcgctgcactccagcctggttgacagaccgagacttctttttcaaaaaaaaaaaaaaaaaaagtgcgacctgcctnggcggncggtttaaaaaatngtggattnccccgggctgnaggaattttcgatnttcaaagctttattnnattaccgtncgacctttngggggggggccccggtaccccaactttttt

SEQ ID NO: 2457 - DNA, 218 bp, Homo sapiens
ctatacactacttagggcgaattggagctccccgcggtggcggccgaggtcaagcttcgacccacgcgtgcgcaatttttaggcccacaaggagtcaagcacctcaaggagatcttcagtttgaacttggtgtagacacagggatactgatgaatcaatattcaaattagctgttacctacttaagaaagagaggagaccttggggatttcgaggaag

SEQ ID NO: 2458 - DNA, 445 bp, Homo sapiens
  misc_feature 4: n = A,T,C or G
gctnctatagggcgaattggagctccccgcggtggcggccgaggtacttagagtcgggatgcacaacttcaaccaccgacttatcaatgcagccgcctgtgtattgcaattggccgttaccttaagcactgagccacccgggtttagttcagccatttcaagaagtatatttaacgtcggtagttctgctttattaaaatgcagcagaggtacctgcccgggcggccggccgcacttttttttttttttttttttaatgaaattgaggatttaaccaaaatgtgagttctaattaggacaataaaattaatcctaactacatttccttataaatacaaaaatgtgttttggaaacacatcccacctggggcgctaagcgatgagagtaagcaattataatggctgactcctccagctctttgctttgagttgccgtaagaaaaaa

SEQ ID NO: 2459 - DNA, 186 bp, Homo sapiens
ccgcggtggcggccgctacctgcccggcggccggccgcccgggcaggtcttcgacccacgcgtccgaactaattggctttttagaaacaccccacaaaagctcagaaattggctttaaaaaaacaaccaccaaaaaaaatcaattggctaaaaaaaaaaaaaaaaaaaaaagtgggccgctcacct

SEQ ID NO: 2460 - DNA, 412 bp, Homo sapiens
  misc_feature 26, 400: n = A,T,C or G
actactatagggcgaattggagctcnccgcggtggcggccgcccgggcaggtcttcgacccacgcgtccggacagctcgtgtccacaggggtcatggggtctcttgctgctaggattctggagtttcatggtaagagcgggccactccccacctattcaactcaccccttccccaggagttaatgggggctagtaaggaatgctagtgcttggaagccctgtgcaggcttctgagattcctgccccctcagcccatgctctgcatcctcccttcatccaccctcaatgttttccttcaaaagatctgctcagagtgtgccagtcttcccaaattcctggtctctccatgagagatgttcttcctggctgcttctagttggccatctggtcttgagtcctntgtacctcggcc

SEQ ID NO: 2461 - DNA, 167 bp, Homo sapiens
  misc_feature 84, 91, 141, 145, 158: n = A,T,C or G
agggcgaattggagctccccgcggtggcggccgcacttttttttttttttttttttttttttttttgggtttctctttgaaagnttattgntttctttaaaaaaaaaaaaacctataccttttatattttacattcacctntcanaatatttaatggnacctgcccg

SEQ ID NO: 2462 - DNA, 137 bp, Homo sapiens
  misc_feature 7, 115: n = A,T,C or G
acgactnctatagggcgaattggagctccccgcggtggcggccgaggtactgagcaggattaccatggcaacaacacatcatcagtagggtaaaactaacctgtctcacgacggnctaaacccagtagaaacaaagt

SEQ ID NO: 2463 - DNA, 126 bp, Homo sapiens
  misc_feature 7: n = A,T,C or G
acgactnctatagggcgaattggagctccccgcggtggcggccgaggtactttaaagttattttagtcatgaaattttatatgcagagagaaaaagttaccgagacagaaaacaaatctaagtcga

SEQ ID NO: 2464 - DNA, 376 bp, Homo sapiens
  misc_feature 31, 334, 353: n = A,T,C or G
ctacttagggcgaattggagctccccgcggnggcggccgaggtttcaagaccagcctggccaacatggtgaaaccccatctctactaaaaatataaaaatcagccgggcatggtggcatgtgcctgtaatcccagctactcaggagtctgaggaggagaatcacttgaacctggaggcagaggttgcagtgagtcgaggttgcgctactgcactccagcctggacaacagagggagactctgtctcaaaaaaaaaaaaacctacagctgttcaaggaccagctgacaggtcaagtgtggccttttctggtctttgaacacatcatagaaagtgncaaatgctgcaaagccatnaagaacatgaactataaacgggt

SEQ ID NO: 2465 - DNA, 146 bp, Homo sapiens
  misc_feature 42, 55, 78, 81, 86, 93, 145, 146: n = A,T,C or G
ccgcggtggcggccgaggtacaagataggtatggattccagnctggagaaacccntaaaccactacaccctgcctcanagnagggnagaattntcagtatgtatgtggagacaggctcggacgcgtgggtcgaagacctgcccgnn

SEQ ID NO: 2466 - DNA, 120 bp, Homo sapiens
ccgcggtggcggccgaggtctgattacaaaaatttaaaaaatatgcaacttcaggcataaagggttaaggggcagatcttcacaaactccacacaagccagcaagcacagcacctgcccg

SEQ ID NO: 2467 - DNA, 180 bp, Homo sapiens
  misc_feature 103, 149, 162: n = A,T,C or G
tacttagggcgaattggagctccccgcggtggcggccgcactttttttttttttttttttttttaacctttccttatgagcatgcctgtgttgggttgacagngagggtaataatggcttgttggttgattgtagcggacgcgtgggtngaagcttgacctnggccgctctagaactagt

SEQ ID NO: 2468 - DNA, 193 bp, Homo sapiens
  misc_feature 153: n = A,T,C or G
ggcgaattggagctccccgcggtggcggccgagcttgtacagtatgtgaagaagttgcacctcatgagctgatcactgatcaagttaaaaacaccagacatacattatacgtctaataaatttccttcaggtcatgaccagcatgaaaaaatnagacacagacactcagcaaccattctgtaaatgtgtacct

SEQ ID NO: 2469 - DNA, 221 bp, Homo sapiens
  misc_feature 18, 19, 24, 26, 28, 134, 145: n = A,T,C or G
ctacttagggcgattggnncctcncngngggggcggccgagggcctgatctaactgctgccaagacatgccaaggtcaccagcttcccgtcctgaccaacagccacctctcagaaggctggcttaactactcanccccagtcttnttagcagatggcaaggagctctggccaagattttagtctaaacagaaccctaggctgctgatgcaacatcaagcac

SEQ ID NO: 2470 - DNA, 522 bp, Homo sapiens
  misc_feature 30, 57, 58, 59, 60, 61, 62, 63, 64, 65, 66, 67, 68, 69, 70,71, 72, 73, 74, 75, 76, 77, 78, 79, 80, 81, 82, 83, 84,85, 86, 87, 88, 89, 90, 91, 92, 93, 94, 95, 96, 97, 98,99, 100, 101, 102, 103, 104, 105, 106, 107, 108, 109, 110: n = A,T,C or G
  misc_feature 111, 112, 113, 114, 115, 116, 117, 118, 119, 120, 121, 122,123, 124, 125, 126, 127, 128, 129, 130, 131, 132, 133, 134,135, 136, 137, 138, 139, 140, 141, 142, 143, 144, 145, 146,147, 148, 149, 150, 151, 152, 153, 154, 155, 156, 157: n = A,T,C or G
  misc_feature 158, 159, 160, 161, 162, 163, 164, 165, 166, 167, 168, 169,170, 171, 172, 173, 174, 175, 176, 177, 178, 179, 180, 181,182, 183, 184, 185, 186, 187, 188, 189, 190, 191, 192, 193,194, 195, 196, 197, 198, 199, 200, 201, 202, 203, 204: n = A,T,C or G
  misc_feature 209, 218, 240, 253, 254, 263, 264, 274, 277, 285, 287, 292,307, 315, 318, 321, 323, 324, 326, 330, 331, 340, 341, 343,344, 345, 347, 350, 353, 355, 356, 358, 378, 389, 390, 397,400, 403, 405, 411, 412, 414, 420, 426, 447, 456, 463: n = A,T,C or G
  misc_feature 464, 476, 477, 478, 485, 490, 498, 501, 505, 506, 508, 519: n = A,T,C or G
gggatgtggtttaagtggattactgcctanctgagccaaaatgtttgcttgtacctnnnnnnnnnnnnnnnnnnnnnnnnnnnnnnnnnnnnnnnnnnnnnnnnnnnnnnnnnnnnnnnnnnnnnnnnnnnnnnnnnnnnnnnnnnnnnnnnnnnnnnnnnnnnnnnnnnnnnnnnnnnnnnnnnnnnnnnnnnnnnnnnnnnnacttntttcctggnttaaaatgttatttcggtttanaatttttccccanncataccaanncccggggggnttnaaaatttntnaaaanccggggggggccttnatgggggnggngcnanncncccnnattaattanngnnngnggntcncnntngccccttttttttaaaaaangggaaaaaacnnttttccncgnccnantttggnntntatttnaaattnggcccaacccccccggggggnggggggccnttttggnntttttggccccnnnttccccnttttntttttttntanaaannanggggggggggnggg

SEQ ID NO: 2471 - DNA, 374 bp, Homo sapiens
  misc_feature 24, 60, 189, 303, 305, 313, 318, 319, 321, 358, 360: n = A,T,C or G
tactatagggcgaattggagctcnccgcggtggcggccgaggtgcggccggccgcccggncagggtcacgcgtccggcctgctgctttggacatgatgctgactggtagaagcattcgtgcagacagggcaaagaaaatgggactggttgaccaactggtggaacccctgggaccaggactaaaacctncagaggaacggacaatagaatacctagaagaagttgcaattacttttgccaaaggactagctgataagaagatcttttccaaagagaagacaagggtttggtgggaaaaattgnanaggggttnttgcnntnacttttttcaatttgtttagggcaacaaggttttccnanaaaaaaaaaaaaaa

SEQ ID NO: 2472 - DNA, 331 bp, Homo sapiens
  misc_feature 20, 24, 27, 45, 54, 56, 57, 60, 65, 70, 73, 75, 80, 81, 86,95, 105, 114, 116, 119, 120, 122, 123: n = A,T,C or G
ctacttagggcgaattgganctcnccnccgggcgggcggccgagnacttacacncnngcnatcgntttcntgncngcagnnggatncactagttntagcttcggncgccaccgnanccnncnngagcatgcatggaacacatataccaaacatctttctgataacattaaacatttttaaaagatgttaaatgttcttttcattgtggtgcttcagattcctgattctagaacttgtgtgtgtggaacctgtgtgctaactattctgttggaatttaccagcaaagaattatctaagaattttcaaactaaatgatggggggaaggaacta

SEQ ID NO: 2473 - DNA, 150 bp, Homo sapiens
  misc_feature 66, 73, 128: n = A,T,C or G
ccgcggtggcggccgcactttttttttttttttttttttttttttttggggtttctctttgaaagnttattgntttctttaaaaaaaaaaaaaacctataccttttatattttacattcacctctcanaatatttaatggtacctgcccg

SEQ ID NO: 2474 - DNA, 384 bp, Homo sapiens
  misc_feature 355: n = A,T,C or G
ccgcggtggcggccgaggtcaagcttcgacccacgcgtccgatcctcttctgctgttctggaaagaaacagaccagtggtatggagtataagaaaactgatgcacctcaaccggatgtgaaggaagaggaagaagagaaggaagaggaaaaggacaagggagatgaggaggaggaaggagaagagaaacttgaagagaatcatgctgttgcatttagaactttctgctttgcacaggaaagagtcacacaattaatcaacatgtatattttctctatacatagagctctatttctctacggttttataaaagccttgggttccaaccaggcagtagatgtgcttctgaaccgcanggagcaaacactgaaataaaatagtttat

SEQ ID NO: 2475 - DNA, 286 bp, Homo sapiens
  misc_feature 51, 52, 60, 63, 65, 171: n = A,T,C or G
cgaattggagctccccgcggtggcggccgcacttttttttttttttttttnngtattttnagnanagatgaggtttcaccatgttgaccaggctggtctcgaactcctgacctcaggtgatccacccacctcagcctcccaaaatgctgggattacagcgtgagccaccangcccggccaatttttgtaacttttacaaagatatttaatttaaaattgattttaataaaaggtagacatccaaaaacacaggatgatgaatgcacttcaatgttaggggaatatc

SEQ ID NO: 2476 - DNA, 345 bp, Homo sapiens
  misc_feature 70, 260, 271: n = A,T,C or G
tacttagggcgaattggagctccccgcggtggcggccgaggtgttactttaaacaaaaaatgtttacttntaaggatatacgcacaaagggaacataatatacagataaatgagaagtttcgattctgcatcaagcattattcaatcggacgcgtgggtcgaagcttgtaaacctgcccgggcggccgctcgaggccgcactttttttttttttttttttgagacggagtctcgctctgtcacccaggctggagtgcagnggcgcaatctnggctcactgcaacctccacctcccaggttcaagtgattctcctgcctcagcctcctgagtagctgggattacag

SEQ ID NO: 2477 - DNA, 292 bp, Homo sapiens
  misc_feature 16, 21, 25, 32, 35, 44, 47, 71, 80, 157, 251, 255: n = A,T,C or G
ctaactatagggcgantgganctcnaccgcgnggnggcggccgnggncaaggcttcgacccacgcgtccgnaaaaattanccaggtgtggtggcacactcctgtaatcccagctactcaggaggctgaggcaggagaatcgcttgaatccaggaggnggaggttgcagtaagccgagaacctactgcactctggcctgggcgacagagcaagactgtcttgggaaaaaaaaaaaaaaaaaagtgcggccgnccgnccgggcaggtcctagcttgagtcgacccacgcggtcc

SEQ ID NO: 2478 - DNA, 303 bp, Homo sapiens
  misc_feature 62, 66, 67, 98, 114, 125, 154, 164, 173, 212, 244, 286, 289: n = A,T,C or G
gggcgaattggagctccccgcggtggcggccgaggtaccaattgctaaaacagctccagggnaagnnatcttatttagcattagctccctcacaactnttttcattcatacttntattggccagnctcatacctgaagtattttaaatgagttnacaattattncacttaccntcagaaaaaaaaaggagcaaaaactcttaatgactggtnacatgcacatttggtgtaggaaattattatgnggtaaaatttatatatttctatttatttttattaatttattnttnacacattatttcac

SEQ ID NO: 2479 - DNA, 174 bp, Homo sapiens
  misc_feature 15, 148, 150: n = A,T,C or G
actatagggcgaatnggagctccccgcggtggcggccgcacttttttttttttttttttttttttttttttggttttctctttgaaagtttattgttttctttaaaaaaaaaaaaaaacctataccttttatattttacattcacctntnaaaatatttaatggtacctgcccg

SEQ ID NO: 2480 - DNA, 148 bp, Homo sapiens
  misc_feature 25: n = A,T,C or G
actacttagggcgaattggagctcnccgcggtggcggccgaggtcaagcttcgacccacgcgtccgtggtgaacacagagaagacaggtcttgtatatattcctctgtattctggggagctttgaccttggagctttgtacctgcccg

SEQ ID NO: 2481 - DNA, 197 bp, Homo sapiens
  misc_feature 135, 149, 167: n = A,T,C or G
ccgggcaggtctactcaagtagtctttaccccctactcaagtagggggtaaagtgtagaacaaggagtttgatctgtgttcaactgattgtgaaccatcaattgagataactcactaccttcaaggccagccagntacatactttttgnaaaagccaagagtggaancagggttggtttttaatccaatttttgggc

SEQ ID NO: 2482 - DNA, 200 bp, Homo sapiens
  misc_feature 4, 9, 12, 23, 24, 36, 38, 53, 66, 68, 92, 102, 104, 138,145, 159, 165, 166, 167, 181, 185, 197: n = A,T,C or G
aggncgacnttntcacaggcagnnaaaccggccagntnaaaacactatgctanctcgcggggccantnttaggatgggtgaggcagatgaanccattctccnantggccaaggccgagggcatcagcctcaaagaacntttgacnggagagaatcacanacgtgnnntattcgtcataaanaaanaatgaaaaaccnacc

SEQ ID NO: 2483 - DNA, 327 bp, Homo sapiens
aggtattcgacccacgcgtccgtagtttttatctttgaccaaccgaacatgaccaaaaaccaaaagtgcattcaaccttaccaaaaaaaaaaaaaaaaaaaaaaaaaagtgcggccggccgcccgggcaggtaccagtagcaacatatgagtatttctctagataacttttttttgacaaggtctcactctgttgcccaggctggagtgcaatggtgcaatcttggctcactgcagccttgaccttccctagctcagctgaacctcccatctcaggacaccattgcctccactgcccatcctgcatctgcctgcctaccccaaaagt

SEQ ID NO: 2484 - DNA, 346 bp, Homo sapiens
aggtacattttcactcctgctctaaaacttgcctcagtctctcactgtgccttatgcccctcagctgaattctttcttctgagcaggcaggaattgaggttgctgcagacgtgtatgcatttgccaccagtaacatacttggtgccacatgactaggatatgttctctagtgctaacatgttcgtttacagttcttaggactccctgatagaaaaaaacacaaaaaaaaacacaaaaaaacccaaccaaccaaacaaacaaacaaaaaaaaacacaggagtttctcccaaaaagaagtctgcagtgtcttttctgttttctctgaaggtatcccagggtgttagat

SEQ ID NO: 2485 - DNA, 220 bp, Homo sapiens
  misc_feature 73, 75, 76, 77, 78, 79, 80, 82, 84, 89, 102, 131, 136, 139,143, 145, 179, 182, 183, 189: n = A,T,C or G
aatgttgcaggctactctctgccgaccaggccgccgcccgtccctcgtgactacagcaggtacctgcccggangnnnnnnangnaacgnatgtttccacctncttctccaacctctaccccaccattagtngtatnttnactntnaaaacagtggaaccacagccctaaagacctgctnatnnaaagtncttttgtcttaattgtatttaaaaaaaaaaa

SEQ ID NO: 2486 - DNA, 160 bp, Homo sapiens
  misc_feature 25, 50, 57, 92, 99: n = A,T,C or G
ggggaaaacccagctccaccgcggnggcggccgcccgggcttttcaagcntcgaccnacccgtccgataatttatactaaatttagtaaaanggacttnttattcaaagcatcaataattaaaagaattattttaaaaaaaaaaaaaaaaaaagggacct

SEQ ID NO: 2487 - DNA, 228 bp, Homo sapiens
aggtaccctcaccttggtcatctatcctgaaataaggcttagttagtattggcctgaatgttttgtgttttttttttgtttttttttttttttttactgttactttgaaaaatatgtatgtataccttatcatatctgcctatatcacttactttggggagatactcagagctttgtggttatcagtatactaaaaaaaaaaaaaaaaaaagtgcggccacctgcccg

SEQ ID NO: 2488 - DNA, 290 bp, Homo sapiens
  misc_feature 233: n = A,T,C or G
aggtacgcgggggagcctgtccagctggcccgggccctggcctggttctcaagtgtttcctagacagagaggcacctgggtcagtattagtctatttatcagaggtgtaaataatctatgtataagtttttctccttttagattattttgtatttgtttaaaagaagttttgtcaaaatacaaaaatataaagaaatgactgaaagttgttgacagggtttttaagaaataanttattctaattgtttttgtttggtttgtttttgccttgtaaactagcgccaaggaac

SEQ ID NO: 2489 - DNA, 468 bp, Homo sapiens
  misc_feature 45, 51, 85, 106, 110, 120, 127, 131, 153, 168, 197, 201,211, 219, 261, 288, 292, 293, 295, 299, 310, 313, 334, 383,402, 407, 408, 413, 429, 432, 453: n = A,T,C or G
cgggcaggtacgatgggaggacagctttgtagaaaggacattatncagctnatagcaaactttgtggatcccaatccgagatttncctgctgaaagacaagaagtntctnaaataaaagngctgtancagnatttgtatactccagaataagnttctgtgattcttanctgccaatgtgttcaaggcgtgatgactnggtntctgtttctntgaacatnaatactagggtctgtataaatttcaatgcatgccaccagctnatcaacccttttggctttgatttttgnatgnngnattnttattccctanganttccggccaagtacctttggncgccacccgtggtgggagctccaatttcgcccttataagtgaagtccgnaaattacgcgccgcctcanttggnncggtnagtttttacaacgccngangacctggggaaaaacccttgnccgttaccccaactt

SEQ ID NO: 2490 - DNA, 136 bp, Homo sapiens
  misc_feature 2, 80, 134: n = A,T,C or G
gncgggcaggacgcgggaccagaatgcagttccagcttaggaagccacaaacaagccacccaggaggaacaaaacaccgnagcgtggatttttcaaatttcccccgggaaagtaagtctcgcttcctgccaaanaa

SEQ ID NO: 2491 - DNA, 358 bp, Homo sapiens
  misc_feature 10, 41, 96, 133, 152, 155, 169, 174, 176, 230, 278, 283,295, 309, 310, 339, 343, 352: n = A,T,C or G
cgggcaggtnccttgctaagttcagaccttctcttcctttnctttcctttcctctcctgcccattttcctgttcttctgtccttcaatacttctgnagcttcccattcatgttctcttctcccacgcaggccncattgtgtgcaaaaactgnggngggggctgtgctgnactcntncctgcctcctgcctcctgcggctgttggatttgggaatgacctttggtgagagnctcactgctccagggtctattttttggtccaaaggctagaacctatanaagtngggaatcacctnttttttctttttcnngggtgaaaataaaatgggtttttttcaanttcnaacaaaaanaaaaaa

SEQ ID NO: 2492 - DNA, 394 bp, Homo sapiens
aggtacagagaactgaatttacacaataaagtgttaccctataccagtgattctaaaattttggtctggggaacctttcatggggttcatgaggtcaaaactattttcatgataatgttattttgcctgttatattctcattctcgagtatacagtagagttttccagaggccacatgatccatgacatcacaacaaaatgaatagagacagatgaaaatctagctggcttctgctacatgaatcagacattaaggggtccagagaccataaagtgtgacaaccaccactcttcacaacctatatataatatctcaaaataatgttaattctctatcctcaaagtttatttccttatatctacattttctatgatcaacacactcactacaaaa

SEQ ID NO: 2493 - DNA, 393 bp, Homo sapiens
ccgggcaggtaccacaaaaacagttacatggtagagttccaatcacacagaaaggaatccattcagcaaatttccaaagttgcagactgtttgggcccacccagaattccaccaggactggacggcccccaccaggctatactggatatgtggacacagagcttatgctaagctgcctgatcaggacaggtagctgtataattggcaccattaagccatctttcttcttactgcccataaaaacaggtgaacttctaggcttcccagtctatgcttcctgcaaaaaatgaagcatagccataagtgattagaaaaataatgaatggccctctgaaagaatcatacaatactatagacccgccacttaggcacaagaaggctcatgaggatatc

SEQ ID NO: 2494 - DNA, 388 bp, Homo sapiens
  misc_feature 61: n = A,T,C or G
aggtaccttgggattgcaggtgcccacccttgcgcctggctaatttttgtatttttagtanagacggggttttgtcatgttgtccaggctggtctcgaagtcgagctcaggtgatccgcccatctcagccttccaaaatgctgggattacaggtgtgtgccaccatgcccagccaacacacacatttatttaatgcaagttttacctagcacagagaagcagtgagagtcagttacttatatattgaattggaccaagtaacttgtgaagaagctagtaaatatatggaggctaaaaagctgagtggttctgttctaacaaggtctgcacagtaatctcttggcctcgacttctcatccttaaaaataaggagatcgtcctatgtttc

SEQ ID NO: 2495 - DNA, 240 bp, Homo sapiens
  misc_feature 1, 2, 24, 28, 29, 30, 41, 52, 55, 66, 83, 84, 85, 101, 107,120, 154, 155, 156, 172, 174, 178, 183, 184, 194, 195, 196,197, 198, 199, 200, 201, 202, 203, 204, 205, 206, 207, 208,210, 213, 215, 221, 222, 223, 224, 225, 228: n = A,T,C or G
nnggggggggggggcccccccccngggnnnaaaaaaaaaanatttttttttnttnttttttttttnaaaaaaaaaaaaaaaannngggggggggggggggngggggngggtctttttttnaaaaaaaaaaaaaaaaaaaaaacccccccccctnnntttttttttttttttntntatnaaaanngggggggggnnnnnnnnnnnnnnnanatntntttttnnnnnggngggggggggggg

SEQ ID NO: 2496 - DNA, 103 bp, Homo sapiens
  misc_feature 18, 57: n = A,T,C or G
tgggcgaattggagctcnccgcggtggcggccgaggtacagcgggggcggaggtcangggacaagatggtgccaccggtgcaggtctctccgctcatcaagct

SEQ ID NO: 2497 - DNA, 354 bp, Homo sapiens
  misc_feature 17, 55, 340, 342: n = A,T,C or G
gggcgaattggagctcnccgcggtggcggccgaggtacagcgtggaagggtttanggcagcagtgttctgattctttgcgggacggcgagcgcatttgtgctttgcccgccgcggcctaggaggccttttgaggccgcgtagtcggtgtttttgaactgactctacagcttctggcaggccgtgcggcgccctgacccggcctcaccatgttggtgctgtttgaaacgtctgtgggttacgccatctttaaggttctaaatgagaagaaacttcaagaggttgatagtttatggaaagaatttgaaactccagagaaagcaaaaaaaaaaaaaaaaaaananagtacctgcccg

SEQ ID NO: 2498 - DNA, 341 bp, Homo sapiens
  misc_feature 6, 22, 27, 32, 37, 44, 47, 60, 65, 85, 87, 96, 101, 135,148, 156, 159, 174, 186, 196, 217, 219, 229, 246, 250, 256,259, 293, 307, 313, 316, 327: n = A,T,C or G
agctcnccgcggtggcggccgnggacnagggnctgantgtctgngtntcagaatgggatnagtgnccttataaatgagggagctngnttgtccctnccacnacatgaggttacagcaaaaagatggctgtctatnaaccagcaagttngcctttgncanaccccagatctgcanactaccttgatnttggactttncatcctgcacaaatctaagananaaattactgntgtttatcaaccactcngttnatggtnttnttcgttatagcagcctgaactaagacaacaggtngatcttaaggcatngctacnatnaagtctttccntgctcagaatctcc

SEQ ID NO: 2499 - DNA, 267 bp, Homo sapiens
  misc_feature 50, 109, 116, 175, 182, 194, 214, 257: n = A,T,C or G
ctatagggcgaattggagctccccgcggtggcggccgaggtactgggaantggatgacttttcttgtccatatcaccatggaaatctgtgtgctgggcatggagagtgngaagcangcagatgccaatgcttcagtggctgggaaggtgatcgatgccagtgcccttcagcagcngcccagnactgtgtcaatncaaagggccaagtgtgcagnggaagaggcacttgtgtgtgtggaaggtgtgagtgcaccgatnccaggagcat

SEQ ID NO: 2500 - DNA, 524 bp, Homo sapiens
  misc_feature 9, 505: n = A,T,C or G
tggagctcnccgcggtggcggccgaggtactatatgtctgaatgtctgtgtctcagaatgggattagtgaccttataaatgagggagcttgtttgtcccttccactacatgaggttacagcaaaaagatggctgtctatgaaccagcaagtaggcctttgccagaccccaaatctgcagactaccttgatcttggactttccatcctgcacaaatctaagaaataaattactgttgtttatcaaccactcagtttatggtatttttgttatagcagcctgaactaagacaacaggtagatcttaaggcatagctacaattaagtctttccatgctcagaatctccatctgctggccaagcatagtggttcgcacttgtaatcctggcactttgggaggccaagggcgggtgggtcacctgaggtcaggagtttgagaccagcttggctaacatggcaaaactctgtctctactaaaaatacaaaaaattagccgggtgtggcggngggtgcctgtaatcccagc

SEQ ID NO: 2501 - DNA, 118 bp, Homo sapiens
  misc_feature 1, 19, 50, 69, 91: n = A,T,C or G
ntgggcgaattggagctcnccgcggtggcggccgcccggccgggccattnttctttctttttttttttngcggatggggacttgtgaattnttctaaaggcgctatttaacatgggag

SEQ ID NO: 2502 - DNA, 145 bp, Homo sapiens
  misc_feature 66, 83, 110, 125: n = A,T,C or G
aggggcgaaattgggagcctccaccgcggtgggccgggcccgaggtacttttctttttttttttgntggatgggggacttggngaattttttctaaaagggggctatttnaacatggggaagganaagcgttgtgccggtttcca

SEQ ID NO: 2503 - DNA, 387 bp, Homo sapiens
ccgggcaatctaagaagacatgatcactaaatgtgatgtgggatcccagatgggatcctggaccaggtaaaaactaaagtaatgtttcaacttcagtaaataataatgtatcaatattggtccattaattgtggcaaatgtgccacactaatgcaaagcgttagtaacagggaaaactgggagcagggtatatgagaactttttgaactgttttcacaattctcctgtaaatctaaaactcttctgaaaatagagtttattctttaaaagtgtctggaggatgtgcacaagggtgtggcagcagaggggctacaggtaaaaaatcatgacatctggaatatttccttcaatttttgctccacacggtgactatcttaccctgctccc

SEQ ID NO: 2504 - DNA, 464 bp, Homo sapiens
acttagggcgaattggagctccccgcggtggcggcccgagggtacccggggggtctgaggacccgaggtcgtaggtggatctttttcacggagcaaagagcaggaggacaggggattgatctcccaagggaggtccccccgatccgagtcacagcaccaaatttcatgcgcatctgtgtaaagagaccaacaagcaggctttgtgtgagcagcaaggctgtttatttcacctgggtgcaggcgggctgagtctgaaaagagagtcagtgaaggaagatggggtggggccgttttgtaagatttgggtaggtaaaggaaaattacagtcaaaggggggttgttctctggcaggagtgggggtcacaaggtgctcagtaggggagcttttgagccaggatgagccaggagaaggaatttcacaagataatgtcatcagttaaggcaagaacaggccattttcattt

SEQ ID NO: 2505 - DNA, 557 bp, Homo sapiens
  misc_feature 555: n = A,T,C or G
ccgcggtggcggccgcccgggcaggtactaacaaatgcagtagccaacaagattaccatgcaatcattaaggagaaccaaagtaagagagccactcaaaccagattttgaacgctactaaaattaaagtagttctttgatgaatatgaatgagtagggaaaggattctttgtaatagtgatacctctgtggtaagagaagggtggtatgtgagttttagtctacagattatggcaaattcagtgacaacaatcaaatggtctaagattgacagtagcacagttttactctgtgaaggtaatgttcaggacaaatttcaagaaaactagaaaaccattctttacagctgaaatctttccctaaccattgttatttccacttttaagtcctcaagagatgagaaaagggaggtaaggcttccttatacatttcctgcacaatgaaacatttttcctcctccaggcaaaagattcaagcagaactggcaaatatcttatcttgctcttcttaataatataatggtggtaggatataaaggtctatacaattaacctanat

SEQ ID NO: 2506 - DNA, 257 bp, Homo sapiens
  misc_feature 26, 42, 44, 57, 81, 90, 102, 127, 128, 136, 143, 148, 162,171, 174, 206, 235, 238: n = A,T,C or G
actactatagggcgaattggagctcnccgcggtggcggccgncnggccaggtacacnttcttagacctcaacctcgaactntcaaaattnaggatgtctcanccctactgaggccgggagtcacctnnacactganggccctnggtgngaagatgaaccttncaccgtctntantgcattctggagtgcaaaaataaaatccactnaagagtcacaaggcccgctgtgcataatnggnttcacttttaccttttttt

SEQ ID NO: 2507 - DNA, 532 bp, Homo sapiens
  misc_feature 75, 181, 220, 388, 456, 480, 504, 511, 525: n = A,T,C or G
ccgcggtggcggccggccgggcaggtacatgtaatgctcctgaactgtatgcttcgcacggctgacatgctaagntttgttctgtgtattttatgactattttttaaaaagtaaacaaaaaagaattagctggaaataccagcacaggcaaacccctggagacagaaagcaggtgagtggntgctggggcttgagcaggaggaagggcgagggactgcanaatggccatgggctttgccttctagcatgatgagaatgttctggaattagacagtggtaacgcttgttcaacactgccagtgtagttaatgtcactgaattatacactttaaatggctaacatgaccaattttatgttatatatattttactaccacaaaaaaactanctggcacctaaaaacattccattgaacaggccccttcagatctgtgtctttcctgcatgcaaattacnccacagagcaagcacctatggcancgtggatcacaggctctgttttangataganaaaggacacaaggngtccccc

SEQ ID NO: 2508 - DNA, 454 bp, Homo sapiens
  misc_feature 79, 266, 296, 363, 373, 382: n = A,T,C or G
acttagggcgaattggagctccccgcggtggcggccgaggtacttcttttctttactttttttttttttgagacggagnctcactctgtcgccaggctggcgcgatcttggctcactgcaacctctgcctcacgggttcaagcgattttcctgcttcagcctcctgagtagctgggactacaggcacacgccaccatgcccagctcatttttgtatttttagtggagatggggtttcaccatgttggccaggatggcctccatctnttgaccttgtgatccgcccgactcggcctnccaaaatgctgggattacaggcgtgagccatcaagtctggcgagagagattgtttctagatgagggngggggccggntgtccttancccaaagcttgtgccagtctctatcagaaataaatgcccccaaaaccaaaaaaaaaaaaaaataaggtacct

SEQ ID NO: 2509 - DNA, 374 bp, Homo sapiens
  misc_feature 17, 33, 34, 36, 39, 41, 42, 193: n = A,T,C or G
gccgggcaggtactacntcagcaatttctccanngngcngnncgacagcatatggcaccagcccattttcaatttgctgagcatcggccaaagcctgtatgcgaaagccaaggagctggacagagtgaaggaaattcaggagcagctcttccatatcaagaagctgttgaagacctgtaggtttgctaacagngcattaaaggagttcgagcaggtgccgggacacttgactgatgagctccacctgttctcccttgaggacctggtcaggatcaagaaagggctgctggcacccttactcaaggacattctgaaagcttcccttgcacatgtggctggctgtgagctgtgtcaaggaaagggctttatttgtg

SEQ ID NO: 2510 - DNA, 356 bp, Homo sapiens
  misc_feature 18, 30, 54, 88, 232, 285, 292, 328: n = A,T,C or G
ccgggcaggtacaattgntttagaagatantttgtttttctctcttcagtttcncatattactaaagacaaatcatggtaggattggnttgtttattatacttggcctaactatttgtatacaatgcagcaagaatgattattttttacttaggcttttaagtaggctctgatggaactttgttccatagcaggaatctcagataagactttgtaaaacccgtaaaactcanccgagccatggatttatgccattaaatacccatgagttgggtgaaatttcctntcctttngagggcccaagataaacctggggcgtctgcacttgncaaaaagtgatattctttacttacacag

SEQ ID NO: 2511 - DNA, 321 bp, Homo sapiens
  misc_feature 9, 11, 13, 14, 32, 35, 44, 45, 103, 122, 125, 135, 153, 155,156, 191, 195, 214, 228, 233, 238, 244, 248, 253, 261, 263,274, 276, 297, 299: n = A,T,C or G
aggtacacngntnnaatcttacttcaactttnaangggcccacnnaaccctctatatccccttgtaaatttaactgctagtccacaagaggaacagctctttntacactaggaaaaaacctngtngagagagtanaaaatttaacacccatantnngcctaaaagcagccaccaattaagaaagcgttcangctnaacacccactacctaaaanatcccaaaaaaaanaaaanaaagnacgcgnggangtgtnaaattttnanagaagaatttntntttagttctttgcacgaaggnanagataaagacactttttcaaaa

SEQ ID NO: 2512 - DNA, 322 bp, Homo sapiens
  misc_feature 28: n = A,T,C or G
ccgggcaggtacgcggggactgaaaatnggactgttcaactcacctggcagccactcccagagctcctggaactctggcccaaggttctctgactgactccttcttggcttactggctgaagactgacgctgcctgatcgcctcagaagccccgcagaccatcatggacgccgagctttaggtaactcacagtggaggcccgcctgcacccaggtgaaataaacagccttgttgctcacacaaagcctgtttggtggtctcttcacacagacgcgcatgaaagggaagacatacaaaaacaaggcctctgaggtaggtacct

SEQ ID NO: 2513 - DNA, 463 bp, Homo sapiens
  misc_feature 24, 57, 129, 193, 200, 280, 291, 367: n = A,T,C or G
ccgcggtggcggccgaggtacttnttttttttttttttttgggtttccggggtcgtnttgggggtctcaatatttttggctcctctcctttacagacaccttgtattttcaaagtttttcttggagtcnaattcctgatcagaagtttgaatggttgttactgctgtgtttttcatgtcaacaatttcttttntttgttncctgacaaggtgtcctcttgcagctgactgtattattatagcgctttctttccttttctcctgtattttttggtatcttnttgaacacaanaatgctctgacacaagcttgaatcaaaataagcttgtcaatagcttcctttcgcattagatttaactgctccacgngataatacttaaggaacacttttgtttttccaagagcccagttatcgagaccagctttttccaaaatggtggcacaagtgtcagggctcatgcggg

SEQ ID NO: 2514 - DNA, 442 bp, Homo sapiens
  misc_feature 323, 341: n = A,T,C or G
tacttagggcgaattggagctccccgcggtggcggccgaggtactttttttttttttttttttttactttttaaacttcttgttaaaaatgaagacacaaacaaacacattagcctaggcttacacagggtcaggattatcaagatgtcacttaggcgattgaaatttttcagctccattaccatcttatgggaccaccatcctataagcagtctgtcattgacctaaacatcattattcagcacaagcgtatttcaaatttagagttttactttgatgttcttctttttttctttttctttttttgagacggagtctcactntgtcgcccaggctgcagngcagtggtgcaatctcggctcactgcaacctccagtttgggccacagagcgagacagcgagactcggtctcaaaaaaaaaaagaaaagaaaagtacctgcc

SEQ ID NO: 2515 - DNA, 443 bp, Homo sapiens
  misc_feature 396, 405, 406, 409, 420, 422, 424, 430, 431: n = A,T,C or G
actacttagggcgaattggagctccccgcggtggcggccgaggtacgcggggaaataaactcaaaggataggttcaacaccataatagagaggacagacaaaaagaatctgtgaacttgaaaattgaacaataggaatgacccaatttgaataacagagataaatgaacagagcctcagggaattgtgggagtataacaaaagatctaacactgatgtcgtcaaagtcccaaaggagagagaggggatggggctgaaaaagcacctgaagaagtaatggctggaagctccccaaatttggcaaaacacataagcctacagattcaagaagctgggtgaatcccaaatgagagaaatcccttcaaattcacacaaagacacattatagtcaaatttntgaaaactnncanataaaaagaantngncaaatnnggtacctgcccg

SEQ ID NO: 2516 - DNA, 506 bp, Homo sapiens
  misc_feature 224, 265, 276, 295, 350, 498: n = A,T,C or G
ccgcggtggcggccgaggtactttttttctttttttttttttttttttttttgagacggagtctcactcttgtcacccaggctggagtgcagcggtgtgatcttggctcactgcaagctccacctcccaggttcaagccgttctcctgcctcagcctcccaagtagctgggactataggcgcctgccaccacgcacagctaatttttttgtatttttagtaganacaggttttcaccacgttggccagactggtctcaaaacttntaacctcaggngatccacccgcctcaaagngctgggattacaggcgtgagccaccgcacccggcccagactccttaaaatgtganaagtagcactgaggaatgtgatcagattatggccttgattggcacatggggtcgctttccacggttggccttcttgttctccacggcatcttgtgcataagccatttgccatttcaggagctcagcatgcacatcccgggatttctgngcttgggt

SEQ ID NO: 2517 - DNA, 327 bp, Homo sapiens
ccgcggtggcggccgaggtacctgtgacatcataattgcaccctccgacatgatatctcttccaaatgcttgatgaaaaaggtgggaggatcacttgagccagggagttgaaggctgcagtgagccctgtttttgccaccacactccagcttgggattgattcctaaagactcatgttacgtgaggaagcagctcagaagaggaaaggaaaggagccaggcatggctcttcctcagggacgcctgactttccgggatgtggctatagaattctcattggcagagtggaaatgcctgaacccttcacagagggctttgtacctgcccg

SEQ ID NO: 2518 - DNA, 445 bp, Homo sapiens
  misc_feature 93, 150, 194, 227, 246: n = A,T,C or G
ccgcggtggcggccgaggtactttttttttttttttttttttttttggggctggaaggggggcagagtctcactctgttgtctaggctggagngcagtgacagaatcaccgctcactgcaacctctgccttccaggttcaagtgattctngcgccttagcctccggagtagctgggattacaagctaatcccanctaggcgtgcgccaccacactcggctaattttngttatttttattatagtanagacggggtttcaccatgttggccaggcttgtctcaaactccagacctcaagtgatccacccgccttggcctcccaaagtgctgggattacaggtgcgagtatatgcttttaaagggtatccaatcaagctaactatggtgatggaatgtctccagttcctctgtaatacacgtatcgtccagcccgcgtacctgcccg

SEQ ID NO: 2519 - DNA, 585 bp, Homo sapiens
  misc_feature 64, 583: n = A,T,C or G
cactacttagggcgaattggagctccccgcggtggcggccgcccgggcaggtacttgagattangggagtggtgatgactcttaacaagcatgctgccttcaagcatttgtttaacaaagcacaccttgcacagcccttaagccatttaaccctgagttgacacagcacatgtctcagggagcacagggttgggggtagggttacagattaacagcatcttaaggcagaagaatttttcttacagaacaaaatggagtctcctatgtctacttctttctacacagacacagtaacaatctgatctctcttgcttttccccacaacctcagcctctcagagtgctgggattacaggcatgagccaccgcgcccagcctcccttttaaagcactttctgaagtcaagcctgattcaggattgcaagcctgcagagaactatggtggtaaagcctaaaaagatagaatccttcccacacctgagaaggcaggtatttttagaaggaaacaccagaatcacacttaagtcactgcaaaggcattcatgtttatacatttctgaactgtcttacttggaactttatgngg

SEQ ID NO: 2520 - DNA, 489 bp, Homo sapiens
  misc_feature 174, 246, 253, 262, 264, 281, 317, 349, 472: n = A,T,C or G
cttagggcgaattggagctccccgcggtggcggccgggcatggtggctcacgcctgtaatccctccactttgggaggccaaggcaggtggatcacctgaggttgggagttcgagaccagcctgaccaacatggagaaaccccgtctctactaaaaatacaaaattagctaggcntggcggcacatgcccgtaatcccagctactccggaggctgaggcaggagaatcactcgaactcgggaggcanaggttgnggtgagctnanatcacaccattgcactncagcctggccaacaagagtgaaactccatctcaaanaaaaaaaaaaaggaaacatgaagccttccttnaatgatgatagtttctaaagtgaattatttgaatctctttgcatgttttggctctgttaatctaactcttgtctctaaatagatgctgaaagtgtaaatctagatgactataacatacacgtnattgcaagtgtattcaa

SEQ ID NO: 2521 - DNA, 580 bp, Homo sapiens
  misc_feature 407, 564: n = A,T,C or G
tagggcgaattggagctccccgcggtggcggccgggcaggtacttattctttttttttttttttttggttatgaaaacttagggactaaaattaatataaaaattggcataatgttggattgaatctacattttggcagaagttaaacattcccacataatgtcaaaattatacatcatgcagttctgtttttttgtttgttttattttgttttgtttttgagtctggctctgtcacccaggctggagtgcagtggcgtgatctgcaacctctgccccccgggttcaagcgattctcctgcctcagcctcccgagtagctgagattacgggtgcgcgccaccacacttggctaatttttgtattattagtagagacggggtttcagcatgttggctaggccggtctntcctgacctcagggtgatcagcccacctcggcctcacaaagtgctgggattacaggcgtgagccaccttgcccagcccacatcatacagtttgaaatgaaactttgccacaaccagcctttgctgtagcacacacatatatcactgaacctgtttgnaataaaagtttttttt

SEQ ID NO: 2522 - DNA, 566 bp, Homo sapiens
  misc_feature 64, 74, 110, 133, 145, 174, 176, 212, 226, 260, 267, 275,287, 290, 325, 346, 386, 396, 422, 457, 522, 531: n = A,T,C or G
ccgcggtggcggccgcccgggcaggtactttttttttttttttttttttttttttttttttttnggtcatttgnccttagtttttaaaaacaaaagtgttaactagaatntaacaacagatcaaatccaaacncagcagtccagnggagaatcaaaacttttccggctttattntntgggaaaacccctggtctgttttcattcctattggnccaggccaccattntatgatatgaaggcctaaattaggaaagctaggngagctgngcaaattntgggtgtctganccncctgttgtttggcgtgtgatgggggtggaggcccncacaggggtgttctcgctagngttcaaatcacaaaaacagggaccgtaactagggggaggngagcaaagcnctcaccttgggcacaaaatttaaggngtgccaaaaaacccagtaaccaaagataaatactnttttaatgcaacatttttaaaaaatccaattaaatgtaaaaaggtttttgatggacaatgtttcnaaaattttnaataaaagggttccccccgtacttttttttttttt

SEQ ID NO: 2523 - DNA, 443 bp, Homo sapiens
  misc_feature 22: n = A,T,C or G
acttagggcgaattggagctcnccgcggtggcggccgaggtacacacattacactatcccttatcaaatatactgaatgtaagtaggctgggtgcagtggctcatgcctgtaatttcagcaacttgggaggccaaggtgggtggatcacctgaggtggggagttggagaccagcctggccaacatggtgaaaccccatctctactaaaaatacaaaaattagccaggcgtggtggcacacgcctgtaatcccagctactcgggaggctgaggcaggagaactgcttgaactcgggaggtagaggttgcaatgagctgagactgcaccaccgcactccaccctgggtgacagagcaagacgacgtctcaaaaaaaaaaaagtaattaaagcttgtttcgattacttaggctcatcaatagtaagatcaacatggtacctgcccg

SEQ ID NO: 2524 - DNA, 617 bp, Homo sapiens
  misc_feature 35, 53, 198, 268, 440, 581, 588: n = A,T,C or G
acttagggcgaattggagctccccgcggtggcggnccggggtcctttgtcctnaaaacgttagatctgggctctgattcctaactgccactcgtgatcacagaggtgcagagagtcattagccattgttgcacttccattgttgcaagcccctcaccttctggttgaagtgactttcaggagaattaaaagagctggngtttccctccccactcccattcatttttctcattttccccttttgggagccagacataaacacaattgcntatatgagagaaatcagaaagtcatggcacagcctaggggatggtgcaggctcagaaaagacctctgagaagaccttagatttatacttcagactcatcttaggcaaagagggcttacaacaatcaaaaaaacaaaaataataaaaacagtaacaaaaacagcaaaccctgnagaagaggaagaatctgatttccagagttaacacattagtaaattctaatgtctggttttcaacaaaaatatcacaaagggattaccagagaaacagggaaagtgtaaccccattcaaattgaaacctaaagagacttaanaaacaanagggatttaaaggtcaagaaaatttttta

SEQ ID NO: 2525 - DNA, 510 bp, Homo sapiens
  misc_feature 80, 206, 212, 229, 250, 264, 287, 329, 338, 347, 357, 359,366, 368, 372, 375, 376, 378, 380, 384, 385, 399, 403, 405,407, 409, 413, 415, 422, 424, 434, 437, 439, 441, 442, 450,456, 460, 461, 465, 466, 469, 470, 471, 475, 483, 492: n = A,T,C or G
acttagggcgaattggagctccccgcggtggcggccgaggtaccggaaggtcacgggcttgagtcgtagccagggatagnattatgggtgagaatagacaggatggaggacacgaggccacaaagccccacaatcccagggccacagcgccagaggcctagtttgtccagaggaatgaagagatcacaggcatttctgaccacgtntagcanaagtgggggatgacctntaagggctcgagccaggagcntgacttgcagcccnagtttcagagccagttggggcanacctcctcctggagtcctggtcccccaagtcccccagttttnatttcctcntgggactcntcttcaaaancntttaatncnccgnttnnangnaaannattttggttcattnatangncnantttntnaaccttncnggttaaattnatnantnnggaaaacnaattgnaccnncccnngcnnnagcngacccccngcccgtacntttttttttttttttttt

SEQ ID NO: 2526 - DNA, 410 bp, Homo sapiens
ccgggcaggtacgcggggcttctgttgggcgtttctgctgagaggcgggaggcgccgagagtctgtgcgaaggtccgtggacagactgctttgcctgttgttgctcttcggaggcggcgatccccgaaggcgagctgaaatacggctgcaggctacaatttgcagccgaccattatggatgacaaggagccgaagaggtggcccaccctcagggaccgcttgtgctcggatggcttcttatttccccaataccccattaaaccgtatcatctgaaggggatccacagagttgtcttctatcgtgatctggaggaactgaagttcgttctgctcaccgccttatgacatcaataagagagacaggaaggaaaggaccgccctacatttggcctgtgccactggccaaccgg

SEQ ID NO: 2527 - DNA, 252 bp, Homo sapiens
tatagggcgaattggagctccccgcggtggcggccgaggtacctcaagaagtaagtggaacacctttccctgtcatagttattttcatccagacatctggtggaagcatcagattccgacaaacaaggatttatgtcaggatctctcagcctctgtgttaccgagggcattctaacagtcttcttactccggcctccgcttcgccagcacccaggccgtctccagctccaaacacccccgcgtacctgcccg

SEQ ID NO: 2528 - DNA, 601 bp, Homo sapiens
  misc_feature 74, 79, 114, 215, 293, 320, 421, 519, 522, 532, 547, 581,582, 589, 597: n = A,T,C or G
acactacttagggcgaattggagctccccgcggtggcggccgaggtactttttttttttttttttttttttttnggaanggagtctcgctctgtcacccaggctggagtccagnggcacgatctcgactcactgcaacctccacctcccgggttcaagctattctcctgcctcagcctcccgagtagctgggactacaagggatctgccaccacncccggctaatttttgtaattttagtagagacggactttcaccatattggccaggctggtcttgaactcctgaccttgngatccacccaccttggcctcccaaagngttgggattacaggcgtgagccaccgcgcccggcttactacaagtcataagtttcttaaaggcaatgtaaactccgaaaacttaatgcactcttatattgntaatacattaaaatccactggcctggcttacacttttgaatcaatctttgagccatgcatgattttgtaacattcacgtacctgccccggcgggccgnttntaaaactagnggatcccccggctgnaggaattcgaatttaaagctttatcgatcccgcnncctcgangggggggncccg

SEQ ID NO: 2529 - DNA, 517 bp, Homo sapiens
  misc_feature 177, 228, 238, 271, 281, 284, 304, 312, 327, 336, 338, 339,355, 367, 368, 381, 382, 398, 403, 409, 413, 414, 430, 432,435, 437, 453, 462, 466: n = A,T,C or G
ctatagggcgaattggagctccccgcggtggcggccgcccgggcaggtacttttttttttttttttttttgtttttatttttttatttatgttggcagaaaagctgaggcagggcttctgacataaggtaaaagtgtcttggaacatgtcctgggtccagggtctataaccccttgnggcctatggaacaccaagctctgtgccaaagggtggaaggctgccctgccncactacaatntaagcccagagcataaaaccccttgtagcctgnggaatatatncanactcgctggccccttgctcnttgctctnccaagatcacaaatngattgcatntnnaattaaaaaaacctgntctcccttatcnnaaggtagcaaganncatagccaaacccgtncaggntaccgnttgnngcaccaattacctttntntcntnacgtcctaacctggcnacccttacntcanaacatcctaattacctggtttttttttttggattcccaataaaaagggggg

SEQ ID NO: 2530 - DNA, 209 bp, Homo sapiens
ccgcggtggcggccgcccgggcatggtacgcggggtccctacaaatgcaacgtctgcaataaagtcttcacccagcgctgctctctggagtcccacctgaagaaaatccatggggtgtagcagcagtatgcctataagcagcggcgggacaagctctacgtctgcgaggattgcggctacacgggccccacccaggaggacctgtacct

SEQ ID NO: 2531 - DNA, 335 bp, Homo sapiens
ctacttagggcgaattggagctccccgcggtggcggccgaggtaccttggaagaccttattcgatatcttgaaccagagagatggcagttggacttagaagatctatataggccaacttggcaacttcttggcaaggcttttgtttttggaagaaaatccagagtggtggatctgaaccttctaacagaggaggtaagattatacagctgcacacctcgtaacttctcagtgtccataagggaagaactaaagagaaccgataccattttctggccaggttgtctcctggttaaacgctgtggtgggaactgtgcctgttgtctccacaattgca

SEQ ID NO: 2532 - DNA, 294 bp, Homo sapiens
  misc_feature 8, 24, 38, 52, 95, 112, 127, 154, 156, 160, 195, 206, 228,231, 245, 270, 275, 281: n = A,T,C or G
ggagctcnccgcggtggcggccgnccgggcaggtaccncgggggtgccccgnaagcagttgttgttggttgggggcctttgggccggtgacgganactgcccaggtgttggncaccatgttcctctncgcggtcttttttgccaagagcaagtnanatgnaacaaatagtccttttcgtggaaaagaaaaaaatncgctccctttnaacggtggattgaaaatgactntgntttataaagagaanactgagggcggggatactgattcanaaatnctgtancgtgtaataaaag

SEQ ID NO: 2533 - DNA, 277 bp, Homo sapiens
ccgggcaggtacagctgcatcagctgctcgtaggacatgtccagcagctggtcgaggtccacgccgcggtaggtgaacttgcggaaggtccgcttcttcttctgctctacttctgccacccgcgtaccacggctatccttatagctttttaattaaatgaagccaagtgggatttgcataaagtgaatgtttaccatgaagataaactgttcctgactttatactattttgaattcattcatttcattgtgatcagctagcttattcttgtgtacct

SEQ ID NO: 2534 - DNA, 384 bp, Homo sapiens
  misc_feature 158, 170, 174, 176, 179, 180, 184, 208, 216, 218, 223, 244,246, 247, 249, 250, 261, 262, 265, 266, 273, 275, 279, 281,284, 286, 290, 297, 300, 301, 302, 304, 308, 309, 310, 313,316, 326, 327, 329, 330, 332, 333, 334, 346, 347, 351: n = A,T,C or G
  misc_feature 353, 355, 365, 368, 373, 377: n = A,T,C or G
gacatggcgcccgccgccgcttcccccccgcgtacttttttttttttttttttttttttttttctttctttttttttttttttttttttttttttttttttttttttttttttttttttttttttttttttttttttttttttttttttttttttttngggggaaattanaaancnttnnttcnaaaaaaaaaaaaaaaaaaaaaaantaaaaaantntaaanaaaaaaaaaaagggggccccngnncnntaaaaaaaaannggnncccccgngngggngnaananttanaaaaatnttnnnancccnnnganaangggggggggnncnnannnaaaatttttttnntttnangnggggaaaaangcnccctngggnaaaaaaa

SEQ ID NO: 2535 - DNA, 473 bp, Homo sapiens
  misc_feature 298, 304, 329, 336, 339, 343, 358, 369, 387, 389, 390, 392,397, 401, 404, 405, 416, 420, 423, 426, 430, 454: n = A,T,C or G
ccgcggtggcggccgaggtacttctctttttttttttttttttttacatcccatatgacattgactgattaaaaaggcctgatcggttttgttatcttcccacacttcgtttaatttaacttgtgttttgtatctcttataaaccataagataggccaggcgcagtgcctcatgcctgtaattgcagcactttgggaggctgaggcgggtgaatcacccaaggtcaggagttcaagaccagcctgacaacatggtgaaacactgttttactaaaaatacaaaaaattaccccggcggngggggnatgccccctggaaaatcccacttcntcggganggntganacagggaaaaatccntttgaaccctnggaaggcaaaaggtttcnanngncttanaaanccnnccatttgtttncccnagnctngggngaaaaagggcaaaaatttccttcnccaaaaaaaaaaaaaaaaa

SEQ ID NO: 2536 - DNA, 399 bp, Homo sapiens
gactcctatagggcgaattggagctccccgcggtggcccgcccgggcaggacaaaacaaagacttttcatcaactcttttagatatgctagaagagctaaaggaaaccatggacagagaacaaaaaaattaggaaagcaatgcctcatccaatacagaatatcaataaagagattgaaattgtagaaaagaaccaaatagaaattctggagttgaaaagtattataactaaaactgaaaattcactagaggtattcagcagcagactggagaagtcagaagaaagaatcaacaggcttcaagataggtcaattaagattatacagtctgaggagcagaaaggaaaaagaatgaagaaaaatgaacagagcataaaagacctctgggactctatcaagca

SEQ ID NO: 2537 - DNA, 514 bp, Homo sapiens
  misc_feature 226, 235, 238, 241, 242, 243, 244, 250, 251, 252, 257, 265,268, 297, 302, 315, 326, 332, 333, 342, 349, 360, 370, 378,380, 412, 427, 433, 438, 443, 445, 461, 471, 478, 495, 498,501, 506, 511, 512: n = A,T,C or G
ccgcggtggcggccgcccgggcaggtacagagtgtaagcgagctacaccaaagaatggtgattagcgctcccagggtggggaaaaatgaggattgtttatataggcaaaatggaggtgccaaacagaattataacattttcggaactaaggctcatttaaagatacaaatttgattggctactattgattacacttgaaggggatttggtttaactttcttttgtnaaagaaagnacnagnnnntaaggnnntttantttcccanccntttaagtcttaggtttttgaaaaaaaaanaatanggggggcctgggnttaaaattttnaccctnntaaaccccnaaaaggnccagaaaaaanaaataaaaangtttggtngntttttcccaccgaccccaggcttggcaaggcnccctaacttttttcntctttnggccnaaatncnatttggggaagggccnagaaaattgnttttttntttttaccattcccctnttntantgggnaaaanntt

SEQ ID NO: 2538 - DNA, 526 bp, Homo sapiens
  misc_feature 232, 243, 273, 295, 317, 320, 330, 334, 338, 340, 342, 348,355, 357, 364, 375, 377, 380, 389, 399, 400, 410, 414, 418,430, 461, 467, 468, 483, 484, 485, 486, 489, 494, 501, 502,503, 505, 506, 507, 508, 517: n = A,T,C or G
ccgcggtggcggccgcccgggcaggtacatcacaacagtaaaattttgctctttgcttctggaggaacaccctacaacaggtaattaaaaaatttaaaaataatatgaaaggggagctaaatacctgaaaatttaaacaaaatgaagcaaaaaaaagggaaacaaattcattgcaagagatggaaattacattttaaaggctgaaaataataaagaaattcactaaacaacnggccctattgncctggctccttcagaaaagattactggaanggaacctgggaagggggtttgnggaaatacaaaatttttggganttnggggggaaanttancacngngnggaaanccccccngnacccccnttttttttttngnggnccttttttnaaaaaaaaanngggttccccngggncccnaaaaaaaaaaantaaaaaaattttttttccccccccccctttnaaaaanngggggcccccccccnnnnggnggggnatttttnnntnnnnttttttttnccccccccc

SEQ ID NO: 2539 - DNA, 343 bp, Homo sapiens
  misc_feature 272: n = A,T,C or G
agccttggagcaggcaatgatctccaccctcctgggtgcgggtgcagactcaggcatccctgcacttttgggggcctgcttttgcaggctcggaagtgcttgcctctgcagcttggcttctccctgctattggcaccagctctcagatcaaagcaggggggtaagcctggaagccatgaacagggagggcctgaaggctgagggccaggctgccagtcccacctgtaggagtgggaactggtgccttttccaggccagtaagtatgcacttnctcccccgaggcccgtaaaatgccccaggctcagccagaactgagcagagggtgggacgaccagcaacagg

SEQ ID NO: 2540 - DNA, 459 bp, Homo sapiens
ccgcggtggcggccgaggtactagtctcaaaagctggggactctgagccttacctagagtctcagcaggtggaccattaagattaacatttctagtaggtgagttcaatcacaaaaatatttcttgttccatagattttattgtggccatgtcagtgaacacccacaagttttgctcagaatattttaggtgtaagctaaatccctaaattgttcagagttcccacagccctgtagcagcagagcgagaactttaaccagactttttcaatcccaaagctaatctggaggccaacagtgttcaaaaccttggtgactgaggaaccatttagagttttttcaggctcaggaatcacatgggtcgttgttgggcttgggggtaagtttcacaggcgatgaagcttgacgttgagtcacttgacttctggagccataatttattttctcccagcaacctcct

SEQ ID NO: 2541 - DNA, 695 bp, Homo sapiens
  misc_feature 7, 53, 54, 87, 88, 90, 118, 127, 132, 141, 166, 169, 171,180, 185, 192, 193, 198, 217, 231, 236, 242, 244, 245, 247,254, 278, 279, 283, 286, 288, 289, 291, 294, 295, 296, 297,303, 304, 306, 322, 324, 326, 329, 331, 332, 338, 341: n = A,T,C or G
  misc_feature 348, 354, 357, 359, 372, 373, 375, 377, 378, 380, 382, 387,390, 395, 403, 404, 412, 413, 417, 420, 424, 430, 431, 432,433, 436, 440, 448, 449, 450, 451, 452, 455, 465, 466, 475,476, 479, 483, 485, 497, 498, 500, 512, 522, 529, 530: n = A,T,C or G
  misc_feature 531, 534, 541, 544, 545, 552, 558, 559, 569, 580, 581, 582,583, 586, 590, 591, 594, 600, 604, 606, 611, 612, 615, 619,622, 628, 632, 634, 635, 638, 642, 647, 649, 652, 655, 656,658, 661, 662, 663, 664, 665, 667, 673, 674, 676, 688: n = A,T,C or G
ccgcggnggcggccgaggtactcaatggagttccttggggggatccaaaaccnnggagaggaacacaggcgctgagtatggagcagnntngagacccaccccacctgcaggcctgacnagagcgccnggatntctggttcngatgccaatactagacaccccaagnagncngctcacagnaaccnttacctnnttttnaacgcccctgggcctcgcnacgcgcacagaaangggancataancnncngaaaggnacccactgaagcccatttctccgnngagncancnngnaannnncagctnncnccccgctaaggaaganancnagngnngggganccnggccccncaaccnccngnggaacccagcagnncngnnananccccngcnacccnagaagaannaagacggnnaaanacngggnggaacnnnnaanaganaacacacnnnnnaanagaaaacgcnnaaaggaagnnagnaccngnccgggcggccgnncnagaacaagggancccccgggcngaggaannnganacaagcnaanngaaccgncgaccnngagggggggnccggacccagnnnnggncccnnaangagggnaaangngcgcnnggngaancangggcanagcngnnccngggngaaangnaancgnnanaannnnnanaaaaannanccggagcaaaangggaaag

SEQ ID NO: 2542 - DNA, 534 bp, Homo sapiens
  misc_feature 9, 16, 77, 219, 385, 406, 436, 478, 483, 506: n = A,T,C or G
actataggnttttatnggagctccccgcggtggcggccgaggtaccaggacattattttttctattcatctagcacngaagccaaatttgggtctaaaatcttgtgatggcaaccaggagcttttaaacttccttcgtagtgatctcattgaagttgcaacaaggttacaaaaaggaggacttggatatgtggaagaaacatcagaatttgaagcccgnttcatttcattagagaaattgaaggattttggtgagtgtgtgattgcccttcaggccagtgtcataaagaaatttctccaaggcttcatggctcccaaacaaaaaaaaaaaaagaaaaaaaaaaaaaaaagtacaaacttagaagaaaattggaagatagaaacangatagaaaatgaaaatattgncaagagtttcagatagaaaatgaaaaacangctaagacaagtttgggagaagtttagaaagatagaaaaatntaaangcccaaaattgggataaatagcnctgaagaaaaaaaaaaaaaaaaaaaaaa

SEQ ID NO: 2543 - DNA, 642 bp, Homo sapiens
  misc_feature 17, 18, 523, 524, 556, 559, 592, 595, 600, 607, 624, 629: n = A,T,C or G
ccgggcaggtactagannaccttcctcgccactctctccacatgagagagtcagctgccctttctcctgtgcctctgcaggaagaactctcttgcatggcacatctcagctcctcattgagggatagttttctttgataagaaacctggagtccatttactctgacctctctttaaatctatatccagagccactagcccaggaaaaacttgggtgacccgtaatttctcttctcctgctgtccttttgctcttacgccccaccccaactccccttaaattttacaggcttatgacagtttgtatgtgctcagccaatgagcagaaaacctggaaagaatttctggactttagcccaccagtttgtctggttgactaacctgctgagagctaaaaattggcacccattgccccgtgccttcaggcagtctcctggggcagagtatgccaccatccgaatatcaggcactgagtggggatgtgggtgatgctcaacatgactggctagagctttgggggtgggnngggggttaaactactatttttttggccatganctntttccccttccttttttttttaattaaataaanggntcaantaaatanttcaaggcctgcctttnaaaanaaattttttttta

SEQ ID NO: 2544 - DNA, 475 bp, Homo sapiens
  misc_feature 290, 297, 300, 302, 309, 311, 325, 327, 364, 381, 385, 386,391, 392, 395, 404, 412, 417, 420, 466: n = A,T,C or G
actacttagggcgaattggagctccccgcggtggcggccgcccgggcaggtactatttcatatattgtgtgagccccacaaatgtctattttaaaaagagtatagtccctggccaggcgcggtggctcacgcctgtaatcccagcagtttgggaggccgaggtgggcggatcacctgaggtctggagttcgagaccagcctgaccaatatggtgaaaccccgtttctactaaaaatacaaaattagctgggcattgggggagcatgccttgtaatcccagctactcgggngggttgnggngnggaaaananctttgaaccccccnanggccaaaggttttttatttggggcccaaaaaaaaccncccttttgccccttcancccnnggggnnaanaaaaaaggnggaaaccnttccnctncccccaaaaaaaaaaattttttttaaaaaaaattttaaaaatttcnaaatttaaa

SEQ ID NO: 2545 - DNA, 550 bp, Homo sapiens
  misc_feature 134, 200, 220, 252, 264, 266, 293, 308, 335, 337, 362, 374,385, 386, 387, 398, 414, 417, 427, 434, 436, 442, 444, 447,453, 455, 457, 473, 488, 493, 506, 516, 517, 518, 521, 528,532, 546: n = A,T,C or G
acttagggcgaattggagctccccgcggtggcggccgaggtacttttttttcttttttttttttttagtttttgaaatcccgtctctactaaaaatacaaaaaaaaaaaaaaaaaaaaattggccgggcatggnggcgcatgcctgtaatcccagctactcaggaggctgaggcaggataattgcttgaacccgggaggnggaggttgcagtgagccganatcgtgccactgcactccagcctgggcaacanagtgagactttntntcggaaaaaaaaaaaaaaagatctggngggtgaaaataaccngaatgaaaatagcttgaaaactcacangngggaagctcccttttaccctttttnttcccttggccngatggaatccnnncccttttttanaaaaaaaagggaaagnccncttttttttnaaaaaanantggttntnaanattttncncnccccgggggggggggngttattaaaaaaaanggggnccccccccggggnggggaaaatnnnttnaaatttntttncccccccccccccngggg

SEQ ID NO: 2546 - DNA, 451 bp, Homo sapiens
  misc_feature 355, 399, 401, 412, 421, 440: n = A,T,C or G
ccgcggtggcggccgcccgggcaggtacctccattgtttctaggaagtaactaacttgcttttgattttacaggcttgtaggtggaatgggcttgccttgtctcagatgagactttggactgtggacttttgagttaatgctgaaatgagttgagactttgggggactattgggaaggcatgattggttttgaaatgtgaagataggagatttgggagggaccggggtgaaatgatatggtttcgtcctgtgtccctcacccaagtctcatgttgcaagtcccacaattcccacgtattgttagaggtgattgaataatgggggtgggtctttcctgtgctgttcttgggatagngaatgggtctcatgagatctgatggttttaaaaacgggagtttntntgcacaagctntctcttttnctgctgccatccatgtaanatgtgactggc

SEQ ID NO: 2547 - DNA, 464 bp, Homo sapiens
  misc_feature 251, 253, 310, 430: n = A,T,C or G
tacttagggcgaattggagctccccgcggtggcggccgcccgggcaggaccatgacaccaagcattcctgtcccctcccccgcaatggcaatcaagtgtcacagaaaaatagccttttaaaattaccatgagccttttatttttatttatttttacacccaggctggagtgcagtggcgtgatcacggctcactgtagcctcaaactcctgggctcaagcaatcctcctgccttggcctcccaaagttggntnagggttgatgagccactgtgctcagccaaccatgaggtttttagagatgatcttgtntaaacccttctcgcctgttttgcagaaaagaaaattgagatcccagagaaatgaagtaacttgcccaaggtcattcagcaggcaagatagaactagatccccaaattgcaaactagctgnccagagttctttcctcaatgagcaatttaaaagc

SEQ ID NO: 2548 - DNA, 486 bp, Homo sapiens
  misc_feature 265, 291, 310, 326, 390, 416, 473: n = A,T,C or G
ccgcggtggcggccgaggtactaactgtctgggatcgtagtcgattaaacagagccacctttgttcctgaggcaatgcataagtcagcatttttcaatgactgcttctttttggaaggtttggagatgacttttatccgcttgctgaggaacacaccaatgtcatcactgttgccatagaacatctttacagacaacatgaagtgctttcgcttgtctgagtcagatatatacaatggtttggctggtgccataagttcttttcnttccaggttaagctggctgcattttnttggtcactatttcctatnccaataaatgcacacnggtgagactcttgttcaaaaacaaccatcgcggtccatttggtcttttttttttcttccattcnctggccataagatatccaaggggggngggcaaaaaactgggagttattttgtatgccaaaaagacacagccaagaggacttgnggatcatgccccc

SEQ ID NO: 2549 - DNA, 546 bp, Homo sapiens
  misc_feature 182, 184, 186, 189, 199, 203, 204, 205, 206, 210, 211, 214,217, 219, 227, 230, 236, 241, 246, 248, 253, 254, 257, 260,269, 273, 291, 300, 314, 315, 318, 334, 341, 345, 355, 356,358, 372, 373, 387, 389, 393, 397, 405, 406, 413, 418: n = A,T,C or G
  misc_feature 423, 426, 428, 429, 432, 435, 443, 452, 453, 456, 457, 460,461, 466, 482, 488, 495, 510, 511, 512, 513, 523, 525, 537,538: n = A,T,C or G
acttagggcgaattggagctccccgcggtggcggccgcccgggcaggtactttttttttttttttttttttggcataaaaagtgcacaagtttgtcctatgtgttaaaacatcttaatttggatgtatttttatccaaaatgatgcatacttggatgcattaaaagcacaccaacaaaaatncncnctntaacaataangggnnnntttnnaanggngncggggagnggnaacaanatttnggtanangggannttnttntttttttcnaaanaaaagagaatttgctttntaaaacaanaatttttttccccnncanatttaatttgaaaatntgaaagntatnggaaggacanncnccaattggaacacnntgtgcaaaagttcnanaacnaaanaaaagatnnttttctnggttngggcnctnannccntgnaattcaanatttggggnnggnnggnnccccnttttttttgggggggngggggntttcccncccccccccccccannnnggggggaaancntttttttttaannaaaaaaaa

SEQ ID NO: 2550 - DNA, 571 bp, Homo sapiens
  misc_feature 175, 197, 202, 207, 208, 215, 216, 219, 221, 226, 231, 233,238, 243, 256, 262, 273, 280, 283, 289, 295, 298, 304, 308,316, 320, 326, 329, 330, 333, 349, 351, 357, 365, 374, 375,389, 391, 394, 403, 412, 413, 418, 420, 421, 422, 423: n = A,T,C or G
  misc_feature 424, 426, 428, 429, 430, 431, 432, 433, 438, 456, 461, 463,478, 479, 480, 482, 492, 494, 505, 514, 516, 519, 527, 538,552, 556, 557, 558, 560: n = A,T,C or G
cttagggcgaattggagctccccgcggtggcggccgaggtacgcggggggtgctgaaatccggcatgttcttgtcacactgggtgagaagatgacagaggaagaagtagagatgctggtggcagggcatgaggacagcaatggttgtatcaactatgaagcgtttgtgaggcatntcctgtcggggtgacggccccntgggnggacnncccccannggncntaaangggtnanaaccnttccngttttccccaaangcccgnccccttttccnttggganaantttttntttctnccncaaaangttnccctaggntttnttgtcncannaantttcccattttgtttntntgggangatgtttngcccgtcannttccaccaaataananttnctttttggnaaaaaaatnntaaantnnnnncntnnnnnnaaaancccccccccccccctatnaaaantnagggccccccccggnnngnaaaaaataanantaaattttttnccccccccncnccngggggggnggccccccccncttttttttttttntaannnanccccccccccc

SEQ ID NO: 2551 - DNA, 363 bp, Homo sapiens
  misc_feature 215, 231, 240, 250, 265, 286, 294, 295, 298, 302, 305, 317,323, 325, 327, 328, 329, 330, 333, 334, 346, 358: n = A,T,C or G
acttagggcgaattggagctccccgcggtggcggccgtgtctcaccacatcctggctccagtgtggatgcagagagagtgtgacagaggatctgcctgcgaaccacctgggattagtcaagtcccaaggtgcccagagtgggactagttcttcacagtgtggcagctgcactaatctgtttgtgagggaatatccattccctcactctactctcntcattatgggaatttntttttgttncaaaataaancccttttgtataganaaaaaaaaaaaaaaaaaaccncccccccnnttnaaanaangggccccccccngggggngnannnnttnnaatttttttttncccccccccccnggggg

SEQ ID NO: 2552 - DNA, 532 bp, Homo sapiens
  misc_feature 60, 210, 219, 231, 234, 241, 242, 252, 266, 267, 274, 276,277, 278, 282, 288, 304, 312, 313, 317, 328, 330, 346, 349,356, 357, 358, 359, 360, 376, 380, 381, 382, 397, 405, 406,408, 410, 412, 419, 420, 424, 425, 426, 431, 439, 440: n = A,T,C or G
  misc_feature 445, 446, 447, 448, 449, 457, 468, 469, 488, 490, 502, 503,506, 509, 514: n = A,T,C or G
acttagggcgaattggagctccccgcggtggcggccgaggtacagggatctttttggcangagccccaagtaaagctgtcaatcctgatgaggctgtggccattggagctgccattcagggaggtgtgttggccggcgatgtcacggatgtgctgctccttgatgtcactcccctgtctctgggtattgaaactctaggaggtgtttttnccaaccttnttattgggattnttnttttccnncccaaaaagngccgggtttttttnntcccccntnnngggnaacccnggggggaaaaaaaaangtggttcnngggnaaaaaaaaaantnttttaaaaaaaaaaanatnttttggnnnnnattttttttttggganagannnccccccccccccccngggggggnntntntnaaagaanntttnnnttttncatttttnnccccnnnnngataaatnccccccccggnngcctatataaaaaaaaaancnccccccccgggnnaanaanttttnaaatattttttccccccc

SEQ ID NO: 2553 - DNA, 445 bp, Homo sapiens
  misc_feature 294, 387: n = A,T,C or G
cttagggcgaattggagctccccgcggtggcggccgcccgggcaggtactcttttttttttttttttttttttttaagacggagtctcgctctgtcgcccaggctggagtgcagtggcgggatctcggctcacttcaagctccgcctcccaggttcacgccattctcctgcctcagcctcccgagcagctgggactacaggctcccatcaccacgctcggctaagtttttgtaattttagtagagacagggtttcaccatgttagccaggatggtctcgatctcctgacctcgngatctgcccgcctcggcctcccaaagtgctgggattacaggcgtgagccaccgtgccaggccaatatgaaagtttttaacttattggcacaanaagttttcatgaacctaacaatatttaattaacaagtattcttcaataacattccctt

SEQ ID NO: 2554 - DNA, 541 bp, Homo sapiens
  misc_feature 374, 451, 477, 478, 513: n = A,T,C or G
cactacttagggcgaattggagctccccgcggtggcggccgcccgggcaggtactttttttttttttttttgagacggagtttcactcttgtcacccaggctggagtgcaatggcgcaattagggttcactgcaacctctgcctcccgggttcaagcagttctcctgcctcagcctcctgagtagctgggattacaggcatccaccaccgtgcccagctaatttttgtatttttagtagagacggggttttgccatgttggacaggttgatctcaaactcctgacctcaggtgatctaccctcctcggcctcccagagtgttgggattacaggcatgagccaccatgccaggctgctaattctcctttttaggngagttaggggaactgagcctcaaaaaacttaaacgatttctcaaaaaacacctcaagtgataaagtggccacattgnaaagggagtttttatctttttattgnnggcccaggggtcattggacaaaatcatgctacctnttggattttaaaatattcaattggcaaa

SEQ ID NO: 2555 - DNA, 394 bp, Homo sapiens
  misc_feature 236, 237, 240, 273, 281, 325, 326, 333, 344, 350, 357, 372: n = A,T,C or G
tacttagggcgaattggagctccccgcggtggcggccgaggtacgcggggactcagaggccgccatcaacccgccagatcaacctggagctctacgcctcctacgtttacctgtccatgtcttactactttgaccgcgatgatgtggctttgaagaactttgccaaatactttcttcaccaatctcatgaggagagggaacatgctgagaaactgatgaagctgcaaaaccaacgnnggnggccgaatctttcttcaggatatcaagaaaccnaacttgtnattactgggaaaagcgggcttaatcaaggggggtgggcctttannttttggnaaaaaaagggngaattnatttctntttttgggaacaagnaaaaacctgggccaaaaaaaaa

SEQ ID NO: 2556 - DNA, 559 bp, Homo sapiens
  misc_feature 81, 97, 247, 283, 299, 330, 340, 341, 342, 366, 373, 375,383, 388, 392, 398, 402, 407, 442, 444, 449, 456, 459, 460,461, 462, 497, 525, 526, 536: n = A,T,C or G
cactactatagggcgaattggagctcaccgcggtggcggccgcccgggcaggtactttttttttttttttttttttttttnagacagggtctccctntgtcacccaggctggagtgcagtggcacaatcatggctcacggcaacctcgaccccctgggtccaagtgatccttccacctcagcattccacaagatgatggaaccacaggcatgcactactatgcctggctaattcttttattttttgngcagacagaggtctccctatgttgcccaggctggtnttgaacccctgggctnaagctatcctcccgccttggcctcccaaagngttgaattannnggaatgagccactttttgggcctnggcctcnanttaatttnaaaangggngtttgntttnaaccnccgcccctttaaaaaaaaggggcacccccccgggngnggggnaattttnaannnnaattttttcccccccccccccccgggggggggggngccccccccccttttttttttttttaannaaaaaaaaancccccccccccaaaaaaaaaaaa

SEQ ID NO: 2557 - DNA, 203 bp, Homo sapiens
  misc_feature 4, 26: n = A,T,C or G
actnctatagggcgaattggagctcnccgcggtggcggccgaggtacttcttgtcaaattccttcttgatatgagccgcaatgcccctctctatgttgtatttctccagcgcctgagtagcgcactccaccgagtcctgttgcatctcttccgacatgtccgcatttttgatcacggcctttcggtcgccccgcgtacctgcc

SEQ ID NO: 2558 - DNA, 161 bp, Homo sapiens
  misc_feature 21, 57, 69, 78, 90, 100, 105, 110, 137: n = A,T,C or G
cttagggcgaattggagctcnccgcggtggcggccgaggtactactgctgaggtctncaggacagaagncacctcctntggtagaacatncatccctggnccttntcagnccacagttttgccagaaatatccacangaacaatgacaaggctttttgcct

SEQ ID NO: 2559 - DNA, 503 bp, Homo sapiens
  misc_feature 65, 189, 208, 244, 265, 318, 425, 450, 471, 491, 494: n = A,T,C or G
ccgggcaggtacttttttttttttttttttttttttttaggggacacggtctatccgcaagctgnggattctgccattctcatcatagttttgaagccggggttctgaaatctcatgacagatctccagcttgaactcacggaatggtttttctaggccctgctcataatacagctgcaggtaaccagngtctgtcagtttgacgaanatcggtccccagtgcctggaggacatgatgtttttnttctcagggatcctcaacatnattggccacccgtcacgaggctgggaccgtgctgatccaggcgggtgagcatntagttcaatccaggctactgggtcatcatcaggtagagttgcactgccaaagtgatcagggtcattaatttggagttgtttgagtttttcaacagcatcagaagtgngactgggttttgctttgaatcatcnaaactggatggcatccttggnagatgacaatgaagggaatnttntttggcttt

SEQ ID NO: 2560 - DNA, 429 bp, Homo sapiens
  misc_feature 143, 161, 165, 172, 176, 177, 182, 183, 189, 192, 197, 200,215, 223, 227, 237, 239, 250, 265, 268, 272, 278, 296, 298,301, 337, 340, 341, 350, 358, 359, 360, 369, 377, 379, 380,381, 382, 383, 386, 397, 409, 411, 426: n = A,T,C or G
ccgcggtggcggccgcccggcaggtactgggccgggtgcagtggttcacgcctgtaatcccagcactttgggaggccgaggcaggcagatcacgaggtcaggagatcgagaccatcctggctaacacggtgaaaccctgtctntactaaaattacaaaaanttanccgagcntggnnatggnngcttgnatnccaanttnttcggaagcttagcnagaaaatngctnaaccttggangnggagctttgantgagccaaaatcccnccnttgnactcanccttgggggaaaaaaccngnaantccttttttaaaaaaaaaaaaaaaaaaaaaaagggnccnntcggccctnttttaaannnttggggacnccccccgncnnnnnggnaattttttttnaaactttttttntnccccccccccccccnggg

SEQ ID NO: 2561 - DNA, 545 bp, Homo sapiens
  misc_feature 1, 186, 199, 207, 211, 215, 216, 217, 218, 219, 220, 221,225, 236, 237, 240, 248, 256, 261, 263, 264, 277, 281, 288,292, 310, 318, 325, 328, 329, 334, 336, 354, 357, 361, 364,366, 371, 384, 389, 391, 398, 402, 405, 411, 415, 416: n = A,T,C or G
  misc_feature 423, 455, 463, 465, 470, 480, 484, 492, 493, 504, 506, 507,527, 530, 531: n = A,T,C or G
nctacttagggcgaattggagctccccgcggtggcggccgaggtacttttttttttttttttgattgttatttagtttttatttcataatcataaacttaactctgcaatccagctaggcatgggagggaacaaggaaaacatggaacccaaagggaactgcagcgagagcacaaagattctaggntcctgcgaccaangggggggngggngccnnnnnnncccnaaaaaaaaaannttngggggttnaaaaaaanccccntnntttttttttttgncccncccccancccnggggggggttttttttgngggggggntttgccnatnnccggnancccaaagcgctcatgccncanaaanaanantccgngccttttttttcncttgngncaaaccnccantgngctttngacnnccacccncttcatttttgggggggggcaaaaaaaaaaancccgggcncnctttngggggggggncccntttttttnnaaaaaaaaaanannccccccccccctttttttgngannaggatttttttttt

SEQ ID NO: 2562 - DNA, 538 bp, Homo sapiens
  misc_feature 183, 198, 201, 208, 209, 210, 213, 220, 235, 241, 242, 249,252, 253, 259, 261, 272, 273, 274, 276, 277, 282, 287, 294,302, 311, 333, 349, 380, 382, 385, 387, 390, 398, 412, 413,421, 429, 433, 434, 437, 440, 453, 454, 456, 487, 504: n = A,T,C or G
  misc_feature 506, 517, 529, 530: n = A,T,C or G
acttagggcgaattggagctccccgcggtggcggccgcccgggcaggtacttttttttttttttttttttttttttaggggacacggtctatccgcaagctggggattctgccattctcatcatagttttgaagccggggttctgaaatctcatgacagatctccagcttgaactcacggaanggtttttttaggccntgntaataannnagntgcaggnaaccagggttttgcnatttgnncaaaaancgnncccaangnctggaggacannntnnttttnttttnaaggatncttaacantattggccncccgtaacaagggtgggaccgnccttatccaggcgggngggctttttagttcaatcccggctctggggnantantnagnaaaaggtnccttccaaaggaannggggcaanaattgggnggtnnttnggngtttttcaacccnnanaaaagggggccgggggggttttttttaaaanaaaaaaaaatgggggcntnttggaaaaaanaaaaaagggaanntttttttt

SEQ ID NO: 2563 - DNA, 526 bp, Homo sapiens
  misc_feature 193, 208, 217, 219, 221, 226, 230, 233, 235, 238, 242, 244,288, 342: n = A,T,C or G
tacttagggcgaattggagctccccgcggtggcggcaggtggagagagggtggaaagtgagcagcgggctgggctggagccgcacacgctctcctcccatgttaaatagcacctttagaaaaattcacaagtccccatccacaaaaaaaaaaaaaaagaaaaagtactattctagtcttaagaataaagaccntgttcagccaggcgngggggttgncncntgtantccnacncnttngggngnttgggggggcaaaatccgggggtcagggcattcgagaccagcancccggggtcaggctttcgagacccagcctggccaacatggtgaaaccctgtctntactaaaaatacaaaaattagttcggcatgggtggtgcacacctggtaatcctagctactcaggaaggtgaggcaggagaatcacttgacctaggaggcggagactgcagtgagccaagattatgccaatgcactccagtatgagtgacagagcaagacttgtctccaaaaaaaaaaaaaaaaa

SEQ ID NO: 2564 - DNA, 536 bp, Homo sapiens
  misc_feature 240, 260, 283, 289, 291, 292, 294, 300, 308, 320, 321, 322,327, 329, 330, 331, 337, 342, 356, 357, 358, 361, 366, 367,370, 371, 380, 385, 388, 389, 393, 405, 407, 409, 410, 412,413, 442, 443, 449, 460, 464, 465, 477, 478, 480, 490: n = A,T,C or G
  misc_feature 491, 492, 496, 501, 502, 508, 519: n = A,T,C or G
actacttagggcgaattggagctccccgcggtggcggccgaggtacgcgggggggagctcggattttaaggcagtagcctgctgatgctcccagctgaataaagcccttccttctacaatttggtgtctgaggggttttgtctgcggctcgtcctgctacatttcttggttccctgaccaggaaacgaggtaactgatggacagccgaggcagccccttaggcggttaggcctcccttgnggagcatccttgaggcggtntccccccccccggggcccccttnaaaaananncnccccgnaaaaaaanacccccgggggnnnccccnannnaacggnggggncccttttttggggnnnaanaaaannccnncccccaccncaaanaannactnttttttttttcncntnntnnaaaaaaaaaaaaaaaaaaaaaaaaaaaanntttccncgggggggggntttnntaaaaaaaaaanngngcccccccgnnngggngaaanntttttnaaaattttttnccccccccccccccggg

SEQ ID NO: 2565 - DNA, 448 bp, Homo sapiens
  misc_feature 7, 144, 159, 179, 188, 195, 200, 212, 220, 221, 222, 238,239, 255, 256, 260, 266, 269, 281, 287, 302, 308, 318, 322,323, 326, 334, 338, 345, 349, 357, 359, 360, 369, 370, 379,387, 388, 389, 400, 401, 402, 404, 405, 406, 407, 410: n = A,T,C or G
  misc_feature 412, 413, 414, 419, 425, 426, 427, 430, 435: n = A,T,C or G
gcgaatnggagctccccgcggtggcggccgaggtactttgttttttttttttttttttttgctggtaggaaatgctttaataaaaatgcaatctctaaggggccatggcatcattaaaagaaaggatgtcatgcccagatccanaacttgaaggtggcnggcaccagcaagcaccatanttttgaatnggccttnctttncagggtccttantttccacnnntgtttactttttttcnnccttgaaaaaatggannaacntgttcnccncccttgggtttnttagtngggagggaacttttngtccanctaaaaaatnttgnncgngggcccantttngggggcntttngttttttnannttggccccnngggggggcngggggggnnncccctttgttnnncnnnntangnnnaaaantttttnnntcnggggnaaaaaaaaaaaaa

SEQ ID NO: 2566 - DNA, 561 bp, Homo sapiens
  misc_feature 1, 208, 346, 353, 357, 367, 379, 405, 407, 408, 409, 412,417, 422, 429, 431, 449, 463, 472, 484, 505, 506, 519, 522,523, 527, 528, 529, 531, 533, 535, 537, 538, 540, 545, 546,550: n = A,T,C or G
nctatagggcgaattggagctccccgcggtggcggccgaggtacgcgggggaagaagaggaagaagaagaagcagaaggaatggaaagcctggagaaagaggatgaaatgacggatgaagcagttggagactctgctgagaagcctccttctacttttgcctcacctgagactgctccagaagtggagaccagcagaactccaccagnttgtgaacccccaacccttcaatcaagaaaagacctttgatcaggagaagacttctcgtttcattttggggacacattcaggatttcttcaaaagcagtgagtaacattgaacccctcttgcttgctattctggtctntcttctnatanaaattggaanaaaacccccggncccttggagccttttaaatgccaaangnnngcnctttnaaaanttagggnanccccccgggcgggggggnattttttttaaaantttttttcncccccccccccntggggggggggcccccccccnnttttttttttttnttnnaagnnngngnananncnccccnngggnaaaaaaaaaaa

SEQ ID NO: 2567 - DNA, 372 bp, Homo sapiens
  misc_feature 52, 66, 68, 70, 99, 135, 165, 175, 178, 187, 189, 190, 194,205, 207, 220, 242, 259, 263, 273, 278, 288, 297, 300, 302,303, 307, 316, 322, 327, 330, 338, 342, 346, 360, 364: n = A,T,C or G
ctatagggcgaattggagctccccgcggtggcggccgcccgggcaggtactncttttttttttttntngnggacttgggcttctctgcccatattgcantgttgatgttcccagagttctatccttactctaaangatctccatttttgagcttatccacacagnggactgtggnttnctggtcttngnncttntgcctaggacntnctttcctaggtanccacatgcctgctctcattatnttcatgtcttaactcanaggncaactttganttaangctttctatnactacattnaananngtgngacctttcntgtctncccanctngcctgatntttncttntccattgcactttncttntgacttct

SEQ ID NO: 2568 - DNA, 343 bp, Homo sapiens
  misc_feature 65, 118, 147, 158, 187, 204, 210, 251, 265, 274, 284, 295,324: n = A,T,C or G
tatagggcgaattggagctccccgcggtggcggccgcccgggcaggtacgcggggggatttccgntgagtgacccttacaagtccttcttgatcctgaactgggttaggtgccgctgntgctgctcgtgttgaatctagaaccgtanccagacatggnactggaggacgagcaaaagatgcttaccnaatccggagatcctgangaggangaagaggaagaggaggaattagtggatcccctaacaacagngagaaagcaatgcnagcagttgnagaaatgtgnaaaggcccggnagcggttagagctctgtgatgagcgtgtntcctctcgatcacatacag

SEQ ID NO: 2569 - DNA, 343 bp, Homo sapiens
ccgcggtggcggccgaggtacattatgttttcgttttcattcatctcaatagtttcttcttggagatttggggggaaaatgatagacaggaggcaggactagattgcagccctcacccggacagacagcagctcacagggactcgcatcatgaactttggctccagaactactgcaggaatataccaggaaagccaagagaatccacagaccctctgaaggaagcagattgctccttcaggacccaagagacaccctaaatactgtgttggtatcgttggcagagaaacctcaagacggttcacattacaggactctgtgcagacaaccctcggtacctgccc

SEQ ID NO: 2570 - DNA, 377 bp, Homo sapiens
  misc_feature 185, 339: n = A,T,C or G
aggtactacaagaacatcggtctgggcttcaagacacccaaggaggtgcggggaacctcagaagaaagaaggggaacctggcgttcctgcacgtgtgcccacgacgagttgccctgcctgcatctaagtggcttctggggctgctgggaattgtagttgcttccctgaggccacgcccctggctnttttaaggaaccgcccgcccaaggctcactcctttatctttcctatcctttcaggctattgagggcacctacattgacaagaaatgccccttcactggtaatgtgtccattcgagggcggatcctctctggtaagtgcgggagttactggtgtntggggcctgaaatactgaaagaagggtcttggggccca

SEQ ID NO: 2571 - DNA, 416 bp, Homo sapiens
  misc_feature 39, 56, 61, 62, 64, 68, 70, 72, 86, 87, 94, 100, 107, 109,122, 127, 131, 137, 145, 149, 164, 167, 174, 191, 196, 206,210, 213, 216, 226, 232, 236, 237, 254, 256, 257, 259, 261,272, 277, 285, 295, 301, 302, 309, 310, 321, 324, 354: n = A,T,C or G
  misc_feature 371, 373, 376: n = A,T,C or G
tatagggcgaattggagctccccgcggtggcggccgccnggccgggtacccccatnacagnngncaancngnctgaggaagtggcnnctaccangcaggngatcttncnggagcggttggcngcagngccngagttncaccggtnttgngcccctgttcaagtnctnacctgancccatggccctcaccgngtcanagacggagtntgtnatncgnctgcaccaancacacnttcnncaaccacatggtttttnanntngnctgcacaaacncactnaatgaccntaccttgganaatgtnncagtgcnnatggagcccantgnggcctatgaggtgctctgttacgtgcctgnccggagcctgccctacnancancccgggacctgctacacactggtggcactgcccaaagaag

SEQ ID NO: 2572 - DNA, 317 bp, Homo sapiens
  misc_feature 36, 37, 39, 55, 59, 60, 62, 66, 69, 72, 75, 76, 78, 84, 119,127, 140, 142, 198, 206, 230, 261, 291, 304, 305: n = A,T,C or G
ttagggcgaattggagctccccgcggtggcggccgnngngcccgggacgcacagnaaanncntgtnttngtnggnntntctatnaaaaaggcaatcaagaaagataatgtgaaaaaganaggaattnataggtcgggaananatgaatgtcaagacatttgaagaactatagtaaaatgatcaacactaaatatactnagagaaanctttgttaatatgccaatgaggtnggcctgatctttgaaatagtgaataggaatncaatgcatttcctcagtgatcactgattangaatgagttggtnnggatccttggga

SEQ ID NO: 2573 - DNA, 398 bp, Homo sapiens
tagggcgaattggagctccccgcggtggcggccgaggtacaaggaagcctggttgaagtcttttccttgagaggcctggatttgttcacatattcagatttcaactggctttataacaggtttccttatgtgcctcatattggctccaggttcactgggtttaaaaggagccaaagcaccataaggttttggcaaaggaagagtggcatctgcttctgggatgtaggcattcggacgctgctctgcagttgtgtaaacaccattgggcagctggcgattatctgcttccaagaactcctgagacttttcagcgatggccaaggcgtgcatttcttcatctcgaaggactttcaaccattctttctcaatttccttattgagtggcagacctttttcta

SEQ ID NO: 2574 - DNA, 397 bp, Homo sapiens
  misc_feature 37, 49, 55, 56, 81, 89, 110, 122, 179, 211, 220, 246, 247,269, 285, 287, 290, 341, 347, 365, 368, 377, 378: n = A,T,C or G
tgccggtggcgccccgcagtccgcttgtccgtccttnctctctgactgnggtacnncggggcctgtctctgcagaggtcangggaggcnggggccccagcacacgttccncagtggcagcgnggagcggcagcttacgggttcgcgggagcccccgaccccccaagggctagaggagcnctcggcggaccaaagaaagcccgcgaagcggntgcgcgccnaccaataggtgcggggctcggagccnnacaaacttgcgccgtacctccntccgcccccgccccgncnccnccgccgccgccgactccccctactcctgctcctgccttggctcctccgccnaacgtntcgcactccgagagccgnagnggcagcggnnccgtcctgcctgcaaagag

SEQ ID NO: 2575 - DNA, 432 bp, Homo sapiens
  misc_feature 19, 69, 70, 73, 74, 75: n = A,T,C or G
ccacgcgtccgttcccagncagttccatccaagggagaattaagtagagaaatttgtctgcaatctcannggnnngacaaatctacgacaccaggaggaacaggaattaagcctttcctggaacgctttggagagcgttgtcaagaacatagcaaagaaagtccagctcgtagcacaccccacagaacccccattattactccaaatacaaaggccatccaagaaagattattcaagcaagacacatcttcatctactacccatttagcacaacagctcaagcaggaacgtcaaaaagaactagcatgtcttcgtggccgatttgacaagggcaatatatggagtgcagaaaaaggcggaaactcaaaaagcaaacaactagaaaccaaacaggaaactcactgtcagagcactcccctcaaaaaacaccaa

SEQ ID NO: 2576 - DNA, 419 bp, Homo sapiens
agggcgaattggagctccccgcggtggcggccgaggtaccagcctcctctattcctcccaatctcaaggttactcttaaatactagtaaatgcaaaaagaacttgtaaagtggcaaggcatggcctatcaaaagtcagcccaagggcagttttcagccctgcctcacctgggtctagttcagctgacggatgagctgattgatgcgttcaccccgatagccaggtgtgcccatctccttgaggaagcccactctatttttggtagcatgacgggccactgagaggtggaaagggcacaagaaccatgagatctcctggaaatgcttccctgggaaggcaatttcatgaatgaggtcttccaagcaaatgacgccaaacttccccaggtgctcctcaatcactgtacctgcccgggcggc

SEQ ID NO: 2577 - DNA, 421 bp, Homo sapiens
aggtacagagtcttttgcttcctcccacccctagggggaaaaactgctttgtgctttgggaagttgtctctgaaacccggggacagaggacgcaggacagactaggagggagccgggagctgcccggcgggtcatgggaataacgccgccgcatcgcccggtcggcatcgtttatggtcggaactacgacggtatctgatcgtcttcgaacctccgactttcgttcttgattaatgaaaacattcttggcaaatgctttcgctctggtcccgtcttgccgccggtccaaggaatttcaccttctagcgggcgcaatacgaaatgccccccggccgctctagaaactagtgggatcccccggggcctgcagggaaatttcggatattcaaagccttattcgaatacccgtcgacctcgaggg

SEQ ID NO: 2578 - DNA, 349 bp, Homo sapiens
  misc_feature 334: n = A,T,C or G
ccgcggtggcggccgcgcgggcaggtaccccgagtccagcggagacaaaggagttagaaagagacagaataagagtttaaaaggcaggtccaggggaccggagcgttggaggcttgctcatggcccagagctctttggctccgcccaatttattgatttacaagctctttgttcttagggcagatgggaggggtaggaagggatgaggaaaaggattaatcagtgaaggagaactcgtgagtcattcaataatatgtatagtagtggtggtttctgtgaatttccttgagtaaaggcgtgtgtctaaactactcaagatctttaacttatcggnattgaaatggatggg

SEQ ID NO: 2579 - DNA, 347 bp, Homo sapiens
  misc_feature 113, 135, 149, 239, 284: n = A,T,C or G
aggtacgcgggatagtgaaaccccgtctttactaattttttgtatgtttggtagagacagggtttcaccgtgttggccaatatggtctcgatctcctggctcatgcctgtggncccagcactgtgggaggctgangcaggaggatcatnttgaggccaaagagttcgggatcagcctgggcaacatagtgataccctatctcttaaaaaagaagaagtttttaaatttgaaataataanaggtaccttgcccgggccggccgcctctagaaactagtgggatcncccccgggctgcaagggaatttcgatatcaagccttatcggataccgtccgaccttcggaggg

SEQ ID NO: 2580 - DNA, 446 bp, Homo sapiens
  misc_feature 409: n = A,T,C or G
ccgcggtggcggccgggcaggtacgcgggatgattgaattttgtttccgcctaaaatagtaatctataagatataaactcgagttagggtttacattttttacttatgaacacagggcactagggccacttcagtctaatttcctgctttttaattactttaacactccacaggaggaggactggttttcctctgtgacttcctaatgtatggcaagcaggacttcttctaatccactaccctcttcccctagcttaactaaggcttgcagtaaaattataaatttccactttctttcctacattctcaaatgtaggaaatgaggacaaacaacttcctctctccaatttacaacactatcaactatttgtcctttattgtgcatttcagacacaggtgttttaattgntaatcatgtttttacactgcagtggatggcaggtttt

SEQ ID NO: 2581 - DNA, 443 bp, Homo sapiens
  misc_feature 73, 74, 119, 350, 391, 408, 412: n = A,T,C or G
ccgggcaggtacttttttttttttttgagatggaattttgctcttttgcccagtctggagtgcagtggcatgnnctcagctcactgcaacctccacccactgggttcaagcgattcttntgccttagcctcccaaagtgctgggattacaggcgtgagccacccgtgcctggccctgtctctcttaagagtaggttcattgtctgtcttagagtcacttctattgcaactcattttctttttccagggcacagatcgaccaagctgccggttccctattctgcagggacagggactatttctagcatacctgctttcgtccacccaggcaggggtttgggggtgggtctnttctgtgcctgcagtcccccattttgacactttgggttgcncacccattttttggganaatnatttgtttgggaaatgaaggcttccattggg

SEQ ID NO: 2582 - DNA, 570 bp, Homo sapiens
  misc_feature 103, 450, 468, 516, 542, 544, 548, 557, 559: n = A,T,C or G
ggcgaattggagctccccgcggtggcggccgaggtacttctttctttttttttttttttttttgagatggagtctcgctctatcgcccaggctggagtgcagnggcgcgatcttggcgcactgcaagctctacctcctgggttcacaccattctcctgcctcagcctcccaagtagctgggactacaggcgcctgccaccatgcctggctaatttttagtagagacggggtttcgcagtgttagccaggaaggtctcaatctcctgacctcctgatccgcccgcctcggcctcccaaagtgctgggattacaggcgtgagccaccgcgcccagttgtgcatttctggtttctaagaatcaaaccacttgggctgtttttagaagttacttcccatgttataaagctgaggaagcttttttttttttttttttgagacagagtctttgtcncccaagcttggagtgcantggtgcaatcttagctcccggggttcaagcaatttttctgccttaagncttctgagtaagctaaaaatacaggngngccnccaccccgntnggcttattttt

SEQ ID NO: 2583 - DNA, 345 bp, Homo sapiens
  misc_feature 83, 102, 125, 136, 137, 148, 171, 174, 182, 183, 190, 191,203, 210, 212, 228, 240, 258, 261, 270, 287, 306, 314, 318,325: n = A,T,C or G
agggcgaattggagctccccgcggtggcggccgcccggccaggtacgcgggggcactcagggagctcagattttgagacagtngctggccgatgctcccagntgaataaagcccttccttctacnaaaaaagaaanngaaaaaagaanacaggatatctgaaattaagacngcngatggagnngtttctnnaaatgacagggnccaaggngngaccacgggaccaagnggctgaactggnatgaagttaagaagcagnaanaaacatccnataatatggtgatcagntcaacagaatgacatattnaccatgtncccnaggaggngatgactgagatttcaaatt

SEQ ID NO: 2584 - DNA, 160 bp, Homo sapiens
  misc_feature 112: n = A,T,C or G
ttagggcgaattggagctccccgcggtggcggccgaggtacgctggatagcctccaggccagaaagagagagtaagcgcgagcacagctaaggccacggagcgagacatctnggcccgaatgctgtcagcttcaggaatgcccccccgcgtacttttttt

SEQ ID NO: 2585 - DNA, 189 bp, Homo sapiens
  misc_feature 27, 104, 137, 181, 184: n = A,T,C or G
cggctgcggcgagccggtatcagcctnactcaaagggcgggtaataccgggttatccacaagaatcaggggaataaccgcaaggaaaagaaacatgtggagccnaaaaggccagcaaaaggccagggaaacccgttnaaaaaggcccgcggttgcttgggcgttttttccaatagggcttncgnccccc

SEQ ID NO: 2586 - DNA, 287 bp, Homo sapiens
tatagggcgaattggagctccccgcggtggcggccgcccgggcaggtacgcggggggatttccgctgagtgacccttacaagtccttcttgatcctgaactgggttaggtgccgctgttgctgctcgtgttggatctagaaccgtagccagacatgggactggaggacgagcaaaagatgcttaccgaatcccggagatcctgaggaggaggaagaggaagaggaggaattagtggatcccctaacaacagtgagagagcaatgcgagcagttggagaaatgtgtaa

SEQ ID NO: 2587 - DNA, 432 bp, Homo sapiens
  misc_feature 67, 305: n = A,T,C or G
ctatagggcgaattggagctccccgcggtggcggccgaggtactttttttttttttttttttttttngggtatgaaaacttagggactaaaattaatataaaaattggcataatgttggattgaatctacattttggcagaagttaaacattcccacataatgtcaaaattatacatcatgcagttctgtttttttgtttgttttattttgttttgtttttgagtctggctctgtcacccaggctggagtgcagtggcgtgatctgcaacctctgccccccgggttcaagcgattctcctgcctnagcctcccgagtagctgagattacaggtgcgcgccaccacacttggctaatttttgtattattagtagagacggggtttcggcatgttggctaggccggtctctcctgacctcagggggatcagccc

SEQ ID NO: 2588 - DNA, 354 bp, Homo sapiens
  misc_feature 26, 32, 35, 36, 38, 42, 48, 67, 116, 125, 186, 264, 302,308, 310, 317, 327: n = A,T,C or G
tagggcgaattggagctccccgcggnggcggncgnngnacanaataangcctgtcacatattaagtntgtaataacgcatttattattacttatcagggtatgatttatgaattgnggaacctgngattatgggagagtctggcttcaatcaagggctgaaattccatttccactgacatcttttncttccccatcccccgattctgtcctgcaacagggtaacaagaaggggcccttaggccgttgggactttgatacccagnaagaatacagcgagtatatgaacaacaaagaagctttncccaangntgcattncagtatggtntcaaaatgtctgaagggcggaaaacca

SEQ ID NO: 2589 - DNA, 542 bp, Homo sapiens
  misc_feature 504, 510: n = A,T,C or G
ctatagggcgaattggagctccccgcggtggcggccgaggtacatagtgtcgcgaactcaaatcggcatttagatagatccagtggtttaaacggcacgtttttgcctataaaaaaagtgcaaaaaagatgtggtttacaagttaaagctacagaatccctttttgctgtaattgcaccagttttaaagcctctggacagagcagtatttcgtttaaaactttgtttttcttaaaagcttacagtgtttggctaattctcctcccctttttacaagacgggggccggagggtggacactggtggcaggttaagggatactgtcactttaagaagcctgcagattgaagtgtaaacatggagaaattaggggctgattttttaaactgtgtgagatattaaccagccgccctgttataaaatcagggaaatccaaacagcgatttacacccgattaacaccccctttatatattttttacaaaaatacactggggaaaataatcnaaccgntttcatctctcttggcttttttggttttttaa

SEQ ID NO: 2590 - DNA, 516 bp, Homo sapiens
  misc_feature 112, 114: n = A,T,C or G
ttagggcgaattggagctccccgcggtggcggccgaggtacttttctttttctttttctttttttttttaatgtgagacaggatctcattctgttgcctaggctggagtgcngnggcgcaatctcggctcactgcaacctctgcctcctgggctcaagcaattctcccacctcagcctcccaaatagctgggatcactggcacaaaccaccatgcccagctaattttgtattttttgtagagacagggtttcaccatgttgcctaggctggtctcaacctcctgggctcaagcaatcctcctgcctcggcctcccaaagtgctgggattacagatgtgagccaccgcatccagccccacaccctcatttataccaattacctgcccagtaactgtggacttttgcttcctcacccctgctctgatctggaaggagagggattatgttatagcttgtcagcacaagtcccaagttcaatatttctgcggcaaaaacttcttcaaaaaataaatgtac

SEQ ID NO: 2591 - DNA, 493 bp, Homo sapiens
  misc_feature 112: n = A,T,C or G
ttagggcgaattggagctccccgcggtggcggccgaggtacttccctcttcccgctgaagggaaattcacagaagctatagttgatgcagagccgaaatatctgatagttgngcgacctgctccacctccaagtcaaaagaagtcatgttcaggtaaaactcgttctcgcaaacctctgcagctggtggttggcactctgacaccgagctcggtcttcctgtcatggggtttcctcatcaacccacaccatgactggacattgccaagtcactgtcccaatgacagattttatacaattcgctatcgagaaaaggataaagaaaagaagtggatttttcaaatctgtccagccactgaaacaattgtggaaaacctaaagcccaacacagtttatgaatttggagtgaaagacaatgtggaaggtggaatttggagtaagattttcaatcacaagactgttgttggaagtaaaaaagtaaatgggaaaatcca

SEQ ID NO: 2592 - DNA, 417 bp, Homo sapiens
  misc_feature 115, 286, 288: n = A,T,C or G
ctatagggcgaattggagctccccgcggtggcggccgcccgggcaggtacgcgggggctgactcctttttcggactcagtctgcctgcacccatgtgattaaaaagctttattgntcacacaaagcctgtttggttatctcttcacacagacatgcgtgacacttggtgctgaagacccgggatgggggactccttcgggagactggtcccctgtcctcaccctcactccatgaggagatccacctacaacctcgggtcctcagtccaaccagcctaaggaacatntnaccaatttcaaatcagatcttggcttagtggctgaagactgatgctgcccaattacctcggaagcctcctggaccatcacagatactttgagtaatctcttatagtggaaggatgcaaagttggaataa

SEQ ID NO: 2593 - DNA, 266 bp, Homo sapiens
  misc_feature 8, 266: n = A,T,C or G
ccgggcanggtaccatatgtttcaaagtagctgttcatccacagataaagagatcaagaaactctcatatacatacactaggaaatattctccagccatcaaaataatgaagcagtgtcatttagagcaacacagatgaaccgcggagacctgcctcctactccaccatcacatggaacccaccactgcttctccgaagctcgctctgaccacgccgctgctgctgcaggggcctcgcaggaagtgcagtctcccccgcgtacctn

SEQ ID NO: 2594 - DNA, 457 bp, Homo sapiens
tagggcgaattggagctccccgcggtggcggccgaggtactttggtatgtttttgtcttgaaaagaggttttctagctagaaattcggggcccagaaggtcaaggctccagagatccccttctcatcatccttcagttgtctgaggagacagaggatcacatgtgtcacagtgagtgctgattccccagaatctgcagtcttaagctcccctgctgacgcacacagccagttctctgcttcatattcatgtgacccactgtgaagtgacaggcagctgccaattctgtcatataagaagcagctctgcccatgcaactttgaaagttcctgcacttctccatagactgctccttcatggaaataaacacatcatcacactgtgggtgcctaagctaagtttgtttgcagtttgatgatgcccagctccttttcaactcagccttaattggcacttta

SEQ ID NO: 2595 - DNA, 498 bp, Homo sapiens
  misc_feature 97, 222, 301, 472: n = A,T,C or G
cgaattggagctccccgcggtggcggccgccgggcaggtactttttttttttttttttgagacagagtctagctctgcgcccaggctggagtgcagnggcaccatctcggctcactgcaacctccacctcctgggttcaagcaagtctcctgcctcagcctcctgagtatctgggattacaggcacatgccaccacgcccggctaatttttgtatttttagnggagacggggtttcacttgttggtcaggctggtctcaatctcctgacctcgggatccatctgcctggtcctcccaaagngctgggattacaaggcgtgagtcaccgtgcccggcgagaagcaactcttaaaatactttattccttcctctaggaccctttaaatggtgaaaatgggcagatgagtagcaataagtggacctttgttactcttctgagttagaaaaattctaatttaagtacctcggccgntctaaaactaagtggatcccccgggc

SEQ ID NO: 2596 - DNA, 553 bp, Homo sapiens
  misc_feature 10, 32, 34, 35, 49, 54, 62, 261, 311, 393, 402, 422, 461,463, 471, 506, 537: n = A,T,C or G
attggacctncaccgcggtggcccgcccgggnannaaccataaaccgtngcagnctcagcanatattttcccttccttaagtcagtaactttcaccttttcacttacaggaagcactttacggcttctctttagcatatgcaaattgccagcattaccactcttggactttggggccactgttaagtaaagtaagggttacttgaacataagcactgtaggccggggcatggtggctcacgcctgtaatcccagcacttgnggtaggccaaggtgggtagatcacccgagctcagggagttcgaggaccancctgggccaacatggtggaaaaccccacctttactaaaaaatacaaaaattagcccaggttttggtgggctgtatacctggngatgcgcancctattcaaggaagggctanagggcagggagaaatcgcttggaacctggggaggccggnangttgcagntgagcccaagaatccgtggcccactgcactccaancctggggtgacaagaagccgaggactctggnctcaaaaaaaaaaaaa

SEQ ID NO: 2597 - DNA, 518 bp, Homo sapiens
  misc_feature 71, 103, 224, 312, 456, 502: n = A,T,C or G
ccgggcaggtacttcttgatttcatcatacaagacaagcacaaaagcaccacccatgcctctgagaacatnggaccatgcacccttgaaaaaagctttgcctncttcatcacgagcaatcttccgccagcagtcaagccgtgcctgtgtacagatggggttttgccatgtggaccaggctggtctcgaactcctggcctcaagtgatgcacctgcctcggcctnccgaagtgctgggattataggagtgagccaccacgcccggctacagagttgggttttaacagaagaggaccttgaatgctgaagcttnacagggcggccaaactaactcgctgatttttgcaagaccacagtgtaaaggtcggatgtccacctgaagaaggggtgggtgcaactctctgggtgctgcacacaccatgaccaagcctgggcatgcagcaccccagctcccatncattcacactggttgctttgtgaggtcattttgagagggctttcanagccttttaatgagaa

SEQ ID NO: 2598 - DNA, 419 bp, Homo sapiens
  misc_feature 41, 48, 77, 82, 109, 205, 253, 295, 309, 347, 362, 371, 372,376, 403, 411: n = A,T,C or G
aggtacctttgacccatcatcttgggaggtggggaggaccncgagggnccaggcagggtgtaggggaatgtattagnccaangagatttccctcttcatccgcagcagngtatctattctatacctggctatgggagaagaccccttgcatgggagggaccccttgctatggcccctttaagccaggcagtggggatctacctgnggccccggcctccctaaagtcattcacattgaatggggggatgaaggntcgggacagtggctcataagagcccgagtattgagccctaanctgtggggcctaanaaatgttcctttaataaaacaatccttatttttttaanaaaaaaaaaaaaatnaaaaaaaannaaangtaccttgcccgggcgggccgctctanaactaagngggatccc

SEQ ID NO: 2599 - DNA, 561 bp, Homo sapiens
  misc_feature 239, 371, 444, 462, 486, 536, 558: n = A,T,C or G
ggcaggtacgcgggtggacacaatttccacaacctttcagatgctgatgtagagctattgggaaagaacttccaaactcaggaagtttgcagagagcagacagctagagataactcgggacccagagttggtcgacagatgttaggatgtatcctagcttttagctataaaccactcaaagattcagcccccagatcccacagtcagaactgaatctgcgttgttggggaagccagcantgggccttgggggaaggaaagcccatggctgtggttcaagaagaggggtggggcctgggcaagcccacttttcgggggaaaaactccttccgccccagggtttcttcttctcttaagggaggagattatttnttcaccaaaccccgctgcctttcatgcctgcctttcaaaagctaagatccatgttttgcctttgcttaagagnaattacctgcaaaatcangccccaagtggctttgggcgaatnccattttaaaagattttctaggccccttcaagggtttttgtagaagtgtnaagcccttggtggggcaagggnttg

SEQ ID NO: 2600 - DNA, 420 bp, Homo sapiens
  misc_feature 48, 49, 83, 114, 120, 145, 397: n = A,T,C or G
gggcgaattggagctccccgcggtggcggccgcccgggcagggacttnnttttttttttttttttttttttttacggagtgtntgtggacagtgccaactttattgaagacagntccctntgagactacaggcccagccactcanaaggctgaggcaggaggatcgcatgagcccaggagtctgaggccgcagcgagccatggtcacaccaccgcaccccagtctggcaacagagcaagaccctgtctccaaaaaacaaacacaaaaacaaaacaaaacagccaaaagcaggctagaggatgctaaatgagactttcctaaatctccattttggctgggacccaaagctgaggacaaaaattggcaaatatatccatatgttgcagatttgctgccnatccatgaatgatttgttaagga

SEQ ID NO: 2601 - DNA, 495 bp, Homo sapiens
  misc_feature 32, 35, 311, 313, 314, 315, 316, 317, 318, 319, 320, 321,322, 323, 324, 325, 326, 327, 328, 329, 330, 331, 332, 333,334, 335, 336, 337, 338, 339, 340, 341, 342, 343, 344, 345,346, 347, 348, 349, 350, 360, 394, 458: n = A,T,C or G
aggtacatggagttttgatcaacggacttatnccncctctcctaggaactaaaatgccagggccaggctgtgtatttctttcccaggaaattagctttccagcccctttatatatggaaggctgggttaaagttatggttccagaagcttccaaatcctgaaatagatgttttaaagatgcaacctcaaacaccaatgctgttgttaaagagcctatggggaattgctgctgctctagaaactagtggatcccccgggcctgcaagggaattcggatatcaagcttaatcgatacccgtcgacctcgaggngnnnnnnnnnnnnnnnnnnnnnnnnnnnnnnnnnnnnnnaggggtttanatttgccgccgccttgggcggtaattcatgggtncataggctgtttcctggtggtggaaaattggtttatcccgcttcacaaattcccacacaacatnaccgaagcccggggagccataaagtggtaaagcctgg

SEQ ID NO: 2602 - DNA, 444 bp, Homo sapiens
  misc_feature 14, 17, 29, 95, 269, 297: n = A,T,C or G
tggagctccaccgnggnggcggccgaggnaccaaaaagactctcaaaaaccaatactcccccgggcaagggaatagccaagtttgttgcggtttncaatgaatgacatcagccctgtgtaggtctcaatcaaaatgggttcagttaacaccatcagtttctttcctcttccagatccagttgaattcttgtgggcattctggatagctggaacaagcttagacatgaacccagacaacttgcaaatttcaaggaatttctcactggtgnatttcataggatgctcagtgaaagtagnataaggaacttcagtggaccatgggttccagcggggacaagaaagagactgctcctccgggactcccccaagtagaatcttaagggccttctccttggtcttcttgtccaggggacatcccagggaaaggtggaactttgcccaggc

SEQ ID NO: 2603 - DNA, 616 bp, Homo sapiens
  misc_feature 254, 338, 343, 418, 428, 433, 445, 464, 473, 510, 538, 577,596, 609: n = A,T,C or G
ccgggcaggtacgcggggggcatatcagatacgagggcaccatgtagcacagctggaccccctggggattttggatgctgatctggactcctccgtgcccgctgacattatctcatccacagacaaacttgggttctatggcctgggatgagtctgacctcgacaaggtcttccacttgcccaccaccactttcatcgggggacaggaatcagcacttcctctgcgggagatcatccgtcggctggagatggcnctactgccagccatattgggggtgggagttcatgttcatcaatggacctggagcaagtggccaggtgggatcccggcaggaagntttgnagacccctgggatcatggcaggttcacaaatggagggaggaaaccggaccctgcctgggccaggcttgtgccggntccacccaangtttngaaggaagtttnctacagccggaaagtgggnccctctgangaagccgcttttggttctaagaaggctggcggagggnacccttcggcccgcttctaagaactagntgggatcccccccgggctggcagggaaattcggatatcnaagccttatcgatacccgnccgaaccctcganggggggg

SEQ ID NO: 2604 - DNA, 466 bp, Homo sapiens
ctccccgcggtggcggccgcccgggcaggtacagcgtggagggtttaggcagcgtgttctgattctttgcgggacggcgagcgcatttgtgctttgcccgccgcggcctaggaggccttttgaggccgcgtagtcggtgtttttgaacttactctacagcttctggcaggccgtgcggcgccctgacccggcctcaccatgttggtgctgtttgaaacgtctgtgggttacgccatctttaaggttctaaatgagaagaaacttcaagaggttgatagtttatggaaagaatttgaaactccagagaaagcaaacaaaatagtaaagctaaaacattttgagaaatttcaggatacagcagaagcattagcagcattcacagctctgatggagggcaaaatcaataagcagctgaaaaaagttctgaagaaaatagtaaaagaagcccataaaccgctggcagtag

SEQ ID NO: 2605 - DNA, 560 bp, Homo sapiens
  misc_feature 322, 446: n = A,T,C or G
tagggcgaattggagctccccgcggtggcggccgaggtaccttgggtctgaaggggtcactcaagcgctctgctatctctgcagctaaaacgggtgtcaggttttcagctgctactaaagataatgagcataagcgttcaccgaccaagactccagccagaaagcctgcacatgtgaccgtgtctgggggcaccccaaaaggcgaggctgtgcttgggacacacaaattaaagaccatcacggggaattctgctgctgttattaccccattcaagttgacaactgaggcaacgcagactccagtctccaataagaaaccagngtttgatcttaaagcaagtttgtctcgtcccctcaactatgaaccacacaaaggaaagctaaaaccatgggggcaatctaaagaaaataattatctaaatcaacatgtcaacagaattaacttntacaagaaaacttacaaacaaccccatcttcgggacaaaggaagagcaacggaagaaacgcgagcaagaacgaaaggagaaagaaagcaaaggttttgggaatgcgaaggggcc

SEQ ID NO: 2606 - DNA, 440 bp, Homo sapiens
  misc_feature 243, 248, 255, 259, 372, 395, 406: n = A,T,C or G
ccgggcaggtactttttttttttttttaacatctttgtttttaaaatagaatgatagaactttgccagtctttaagatcttggcttaatttaatgtattaatctgtttgtgcaaacataataccaccatttaaaaatgttagggggatgagttgcagtttttataatagatttttttttaaagtttggtattgtaaaacattcacacctctgtccctcaaaattgataattaccgtttaaagngcagncatttgnggtntagaaatcttgttttgttttgcttccattattgagttcctcctaagggaaaattggaggagaaggggactggaatatgaaagccccaaattcatataaaaaagtttgcggttntaaggtttgtattaaaaaatagnatattattaangaaaaaattttttttcacttgatgttttggttag

SEQ ID NO: 2607 - DNA, 674 bp, Homo sapiens
  misc_feature 166, 320, 419, 516, 520, 540, 581, 655: n = A,T,C or G
atatgggcgaatggactccccgcggtggcggccgggcaggactttttttttctttttttttttttttggaaacttccttttcttagttgttgtattcttgaagagcctgggccatgaagagcttgcctaagttttgggcagtgaactccttggatgttctgggcangtaagtgtttatcttgggcctgcaatgaagccagccgaagtccatcccttgggcaagggccgggcttgttggtggggtttttggaaagaagtttgggaccaaggggtcctcctcaagggggaagccggggggggggttcttccctcgggctctngggccgcctgccatatttcttccttgccttgggccgaaccgcctgcttgaataccttggaattgttttcttgccttgcttggttgttttacctaagganatttccctcaatggtaatgtggtttggtaattttaaacctaataatcctttgggctcaattttcaatcccacctcttgtccaatcaagcaaacttgntaangattctttcccccaaaaatngaatttggctggcttgggcaaagggccttgaagcaaattcnattggttttaatcttgcaaacaagcctgaactttcttttttcaagggttccccaccatttaagggaacattttnaatcaaggatgtggaaatt

SEQ ID NO: 2608 - DNA, 586 bp, Homo sapiens
  misc_feature 244, 272, 291, 308, 512, 538, 554, 565: n = A,T,C or G
cgcggtggcggccgccgggcaggtcaaacgatgtgtccgtgatgactggtggggctcatgtaatccccacctaagaaaagtagaaagtgcaactttatcttttaggttaataagtgctgagagatggaggtttttccttctcattttgatggagatgcctagaaaacctcgcctgacactctttgtccaacgcaggatagagaacatagcaacagaaagggtgaggcaaaaggcatggctggtnaaaaggcactgcatgttattaaggatgnggggcctggtcctgttcgnttcacatgtttttcttntttttatacagaaataggaatctaccagacagtaataaatgccacttctcacagaaagtctgacaggcttccactgcctctgagagaacaacaacatgttggctccataacataaagaaaaacaatgctgggtgcggtgcggtggctcgtgcctatgatcccagcactttgggtggctgaggcaggaggactgcttgagcacangagtttgagaccagcctggccaacanggcgaaaccttctctntactaaaaatncaaaaaaaaaaaaattagctg

SEQ ID NO: 2609 - DNA, 782 bp, Homo sapiens
  misc_feature 237, 250, 264, 301, 323, 412, 413, 414, 415, 416, 417, 418,419, 420, 421, 422, 423, 424, 425, 426, 427, 428, 429, 430,431, 432, 433, 434, 435, 436, 437, 438, 439, 440, 441, 442,443, 444, 445, 446, 447, 448, 449, 450, 451, 452, 453: n = A,T,C or G
  misc_feature 454, 455, 456, 457, 458, 459, 460, 461, 462, 463, 464, 465,466, 467, 468, 469, 470, 471, 472, 473, 474, 475, 476, 477,478, 479, 480, 481, 482, 483, 484, 485, 486, 487, 488, 489,490, 491, 492, 493, 494, 495, 496, 497, 498, 499, 500: n = A,T,C or G
  misc_feature 501, 502, 503, 504, 505, 506, 507, 508, 509, 510, 511, 512,513, 514, 515, 516, 517, 518, 519, 520, 521, 522, 536, 538,564, 572, 589, 592, 596, 601, 613, 619, 628, 638, 662, 678,679, 696, 699, 707, 708, 711, 719, 760, 767, 769, 770: n = A,T,C or G
  misc_feature 772, 781: n = A,T,C or G
tcaccgcggtggcgggcggccgcccgggcaggtacttttttttttttttttttttttgtggagacaaggatcttgctctgtcacccagacagatgtgcagtggcataatcatggctcactgcagcctcaacctctggggctcaagcaatcctcctgcctcagcctcccaagtagctgggaccacaggtgtgcacccccactcctggctaatttttttattttttgtaaagatggggncttgctatgtttnccaaggttagtctnaaactcctggggtcaagcgatcctcctgcttaaactnccaaagcacttgcgattcaggngtgagccaccaagcccagccccagcaccacttttaactagctgcataatcttgggtaaactactaacctttccaaagtacctcggccgnnnnnnnnnnnnnnnnnnnnnnnnnnnnnnnnnnnnnnnnnnnnnnnnnnnnnnnnnnnnnnnnnnnnnnnnnnnnnnnnnnnnnnnnnnnnnnnnnnnnnnnnnnnnnnnattgcccgcttggngnaatcatggcaaaagctgtttccgggngaaaatgnttatcccgttacaattnccnaaanatacnaacccgggagcntaaagngtaaagccngggggcccantggggagctaactacaattaatgngttgggctactggccnnttcaatggggaaaaccnggngccacttnntantgaatcgncaccccccgggggagggggtggttttggccttttccttctngtaatantnntngccggggtng

SEQ ID NO: 2610 - DNA, 433 bp, Homo sapiens
  misc_feature 56, 94, 175, 185, 188, 197, 227, 230, 249, 253, 263, 264,266, 311, 343, 380, 388, 390, 391, 397, 408: n = A,T,C or G
gctccccgcggtggcggcccgcccgggcaggtacaatgagatggatacaattagtnaaaccttaaaattaaaaaagctgtagacaacagaaggnaaactggaaatccatttacaattcaaaagaactcactaataacaaaattaatgttcatcaacttcatttataatccatttnggcctacatngcntaactaaantgacacatgtccccgggggctgcaggcgtngcnccaatcttcgctctgaggngctntcttaaccgnnanaccctggaagcgggcaagtctcttgctgtgtcgggaccttgcagnccctggcccttccgccaccatgggaatacctngggccgttctagaactaggtgggatcccccgggctgnagggaatncnntatcangcttatcgatnccgtcgaccttgaggggggggcccg

SEQ ID NO: 2611 - DNA, 320 bp, Homo sapiens
  misc_feature 115, 116, 117, 124, 248, 253, 266, 320: n = A,T,C or G
ccgcggtggcggccgaggtaccaagtgtgggaagatgttgagcaactggaactcatgcgtggcaggtagggatgtaaaatggcacaaagactttgtaaaatactttggcaaattnnnaaaaagnaaacacatagctaccatacaacccagccatcccactccagtatttaacccaggtgaaatgaaaacttatgtccaaacaaagacttgtacttttctatgatgacccgggccggcttctttaacgnttttnggtgcgaaccgcngcccatgttggcgggtccttggtaaaagaccccgcgtcctgcccgggcggccgn

SEQ ID NO: 2612 - DNA, 272 bp, Homo sapiens
  misc_feature 32: n = A,T,C or G
ggagctccccgcggtggcggcccgaggtacangaaagtctagatgatcttgtagtgccagaaagtaagaaagtaataaaaagatgacaggtctgtcacaatgatacagaagccaatgtgacaaagctctcaatagttaaatctcgaatttgagtagtaaaagtgacacagttttagattataacccaaagaactaaataaatatccatgagccctattgatataaatgacaattaagggttttttgttttggtttttttggttgctttggtt

SEQ ID NO: 2613 - DNA, 126 bp, Homo sapiens
  misc_feature 28: n = A,T,C or G
gaaacctgtcgtgcccagctgcatttantgaatcggccaacgcgccggggaagaggcggtttgcgtattggggcgctctttccgctttcctcgctcactgactcgcttgcgctcgggtccgttcgg

SEQ ID NO: 2614 - DNA, 393 bp, Homo sapiens
  misc_feature 118, 250, 252, 385: n = A,T,C or G
ggaggcggccgccgggcaggtactttgtttcttttttttcctttttctttttttaagacatggtcttgctctgttgcccaggctgcaatgcaatggtgccacctcggctcactgcaancctcgacctcctgggttcaagcaattttcctgcctcagcttccaggtagctgggattacaggcgcccgccaccacaccaggccacatctatgtatttagagacagagtcttgctccacctgggagacaaaancngacctccgtttaaaaaaaaaaaaaaaagggaaaggaaaggaggaatttttgaacccagtgcccgttccttgcagatctgcgaacagtgggcaccagcctctagtctcaagtgtgaggtttgactccaggacgntgaattta

SEQ ID NO: 2615 - DNA, 658 bp, Homo sapiens
  misc_feature 173, 175, 179, 195, 197, 240, 243, 251, 266, 274, 284, 293,294, 299, 301, 307, 314, 326, 329, 337, 339, 354, 359, 363,369, 385, 386, 392, 395, 397, 412, 415, 424, 444, 469, 477,494, 504, 511, 522, 530, 531, 532, 538, 543, 546, 564: n = A,T,C or G
  misc_feature 580, 583, 590, 592, 602, 612, 635: n = A,T,C or G
cgcggtggcggccgccgggcaggtacgcgggtgctacacggaggatgaagctaaggagctggctgcggaggtggagggttcaagacggccccaatgaagatggggagatgttcatgcggccagggaacttgtcgactatttcccaaaaccataccccaacagtggagggctgntngagntgccaacaacggagcntngccccctgacctcagctacatcgtgcgagctaggcatggtggngangacttccntttttttccttgttnacgggctntttggaaccnccccccggnnttttntntggggnaagggtntttattaaaaanccntttttttncnggcaagccttttganatggncccncctttnaacaaattttttttanntttttngangngggccccccatcttnctntgttccaanatagccaagggttgtgtgcnccttcctgccgctgggcattttganccagaacnccaccataaaaaacgcntgggctaaanattgttnataatgatggntttggggnnncccctntctanaanataaagggggacatgggnttttttctgaaaaggnggnatttttntnccccccattnaaaaaatgcnccccccgggggaaaaaatttttntttttttttttcccccccccccc

SEQ ID NO: 2616 - DNA, 460 bp, Homo sapiens
  misc_feature 80, 116, 242, 306, 342, 355, 368: n = A,T,C or G
cccgcggtggcggccgggtacattgctatttttccacctatgtccacaccttctcatgaactttcaaagtcagaggcagntaccagtgccattagaaatacagattcaacaacgtnggatcagcacctaggaatcaggagtttgggcagaactggggacttaacaactgttcctatcaccccactgacaaccacgtggaccagtgtgattgaacactcaacacaagcacaggacaccctttntggaaccgatgagtcctactacgtgacacaagtcactcaaagatcaaacatctatccaggcctnagcattccctttccatcttactggaagtctacctgngctcgggacacangggagaagctctnttgaggcaccactttttgggaaaccatctacagacacactgtccagagaggattgagactggcccaacaaacattcaatccactccacccat

SEQ ID NO: 2617 - DNA, 559 bp, Homo sapiens
  misc_feature 5, 54, 55, 210, 211, 212, 213, 214, 215, 216, 217, 218, 219,220, 221, 222, 223, 224, 225, 226, 227, 228, 229, 230, 231,232, 233, 234, 235, 236, 237, 238, 239, 240, 241, 242, 243,244, 245, 246, 247, 248, 249, 250, 251, 252, 253: n = A,T,C or G
  misc_feature 254, 255, 256, 257, 258, 259, 260, 261, 262, 263, 264, 265,266, 267, 268, 269, 270, 271, 272, 273, 274, 275, 276, 277,284, 285, 286, 287, 288, 289, 290, 291, 292, 293, 294, 295,296, 297, 298, 299, 300, 301, 302, 303, 304, 305, 306: n = A,T,C or G
  misc_feature 307, 308, 309, 310, 311, 312, 313, 314, 315, 316, 317, 318,319, 320, 321, 322, 323, 324, 325, 326, 351, 354, 355, 356,357, 358, 359, 360, 361, 362, 363, 364, 365, 366, 367, 368,369, 370, 371, 372, 373, 374, 375, 376, 377, 378, 379: n = A,T,C or G
  misc_feature 380, 381, 382, 383, 384, 385, 390, 399, 412, 413, 457, 459,460, 461, 462, 463, 464, 465, 466, 467, 468, 469, 470, 471,472, 473, 474, 475, 476, 477, 478, 479, 480, 481, 482, 483,484, 485, 486, 487, 488, 489, 490, 491, 492, 493, 494: n = A,T,C or G
  misc_feature 495, 496, 497, 498, 499, 500, 501, 502, 503, 504, 505, 506,507, 508, 509, 521: n = A,T,C or G
tattnagaagtggttccaggtcttagcacaaaacatggatgcactttaggccanncatggtggctcacacctgtaatcccagcactctagggggccaaggtggaaggatcccttcagctcaagagtttgagaccagcctgagcaacatagggagaccctatctctaccaaaaaaaaaaaaaaaaaaaaaaaagtacctgcccgggcggcnnnnnnnnnnnnnnnnnnnnnnnnnnnnnnnnnnnnnnnnnnnnnnnnnnnnnnnnnnnnnnnnnnnnctcgagnnnnnnnnnnnnnnnnnnnnnnnnnnnnnnnnnnnnnnnnnnntaattgcccccttgggcgtaatcantgnnnnnnnnnnnnnnnnnnnnnnnnnnnnnnnntccgntcacaattncacacaacatacnngcccgggagcataaaagtgtaaaagcctggggtgcctaatgagngnnnnnnnnnnnnnnnnnnnnnnnnnnnnnnnnnnnnnnnnnnnnnnnnnnngaaacctgtcgngcccagctgcattaaatgaatcggccaaccccccggga

SEQ ID NO: 2618 - DNA, 525 bp, Homo sapiens
  misc_feature 121, 173, 220, 250, 257, 266, 277, 300, 302, 307, 323, 325,351, 361, 363, 387, 461, 503: n = A,T,C or G
cccgcggtggcggccgggtctttaggatgctggtaaactatggaatttcagacgtggacatctggcagacattttctttaaaatgaataaagtgagcttatcacctcaaggaaaacaactnaagccatctgttgccaatgataaaaatatgagatttaaaaaaatgttgaagnttcaggctaaaattaaaattttgaaaaacttatattggccaccacangtttgacaccttaccaattattaatggganggttttnttaagaggncaacagtgatnttaacaaatgtgggtttttttgntnttggnttattgggaggtttancnattgggaagatctgtaagactcaagngaaccatggntntccaaatgactaagacatgatggntacaaaatcacccctgggtaaaagatccattcaaagtgcaggacagaccaatggaatttagtgtaacagaggtntgaaaggttcatgaaggctgggcatggtggctcacgcctgtnatcctagcacctggagggcccg

SEQ ID NO: 2619 - DNA, 476 bp, Homo sapiens
  misc_feature 243, 251, 252, 260, 277, 315, 345, 346, 350, 358: n = A,T,C or G
ctcccgcggtggcggccgggtactttttttcttttcttttctttttttttttttttgagacggaatcttgctctgtcacccaggctggagtgcagtggcgcaatctcggctcactgtaagctccacctcccgggttcacgccattctcctgcctcagcctcttgagtggctgggactacaggtgcccaccaccacgcctggctacttttttttgtatttttattagagacggggtttcactgngttagccnngaataggntcgatctcctgccttgngatctgccccccttggccttcgagccctttttgacctnaaggaccagcactggaataatgtttggganncccntgcttttnaggcaggcttagggagcaggaaagcatacaggtgtagcagcctttccagctgatccccatgccctgctgcacctggagggctggaacaagctattctcatattggggaaaagggctga

SEQ ID NO: 2620 - DNA, 476 bp, Homo sapiens
  misc_feature 26, 40, 96, 118, 119, 127, 163, 243, 249, 256, 260, 262,267, 279, 325, 341, 347, 348, 358, 361, 394, 404: n = A,T,C or G
ctcccgcggtggcggccgggtacttngttccttttctttnctttttttttttttttgagacggaatcttgctctgtcacccaggctggagtgcagnggcgcaatctcggctcactgtnngctccacntcccgggttcacgccattctcctgcctcagcctctngagtggctgggactacaggtgcccaccaccacgcctggctacttttttttgtatttttattagagacggggtttcactgngttagncccgganagantngatcncctgaccctggnaactggcccccttggccctctaaccctttttgacccctaagggaangtactggaatattgtnttgggnncccatgcttntgnggcaaggcttaagggagcaggaaaagcatacanggtgtagcancctttccagctgatccccatgccctgctgcacctggagggctggaacaagctattctcatattggggaaaag

SEQ ID NO: 2621 - DNA, 591 bp, Homo sapiens
  misc_feature 1, 23, 237, 276, 353, 365, 378, 419, 515, 522, 537, 538,541, 568, 571: n = A,T,C or G
nccgcggtggcggccgccgggcnggacctgttttatcccagctgagaggcaaggagaacctttgtttcttaaaaaataagctggtttcagccaggtgcggtggctcacgcctgtaatcccagctctttgggaggccgaggcgggcggatcacctgaagccaggagttcgagaccagcctggacaacatggtgagaccttgtctttattaaaaatgcaaaaatttggccaggcgccgnggctttacccccttattcccagcactttgggagtcccangcaggtggatcacaaggtcaagaaattgagacccttcttgtttacaccagggaacccccttctttcctaaaaatttntaaaaaccaaanttgctggcatggngggggcacctgtagtcctagctacttgggagcctgaggcangagaatggtgtgaacccgggaggcggagcttgcagtgagcccgagatcgcaccacttgcactgcagcctgggggacaagagtgagactccctctcnaaaacanaacaaaacaaaattnnccnagcgtggtggcaggccccttgaggcangangaatcacttgaaccccgggg

SEQ ID NO: 2622 - DNA, 444 bp, Homo sapiens
  misc_feature 5, 43, 389: n = A,T,C or G
gggcnaattggagctccccgcggtggcggccgaggtacctgangaccttagaaaaaggaggaaaggaggagaggcagataatttggatgaattcctcaaagaatttgaaaatccagaggttcctagagaggaccagcaacagcagcatcagcagcgtgatgttatcgatgagcccattattgaagagccaagccgcctccaggagtcagtgatggaggccagcagaacaaacatagatgagtcaagctttgcctccccccccccttagggagttaagccaaaagctggacaaattgcccagagcctgtgatgccttcttagcagggagagcagatggaaatccaccttgtagaggcttccccagaagaacctccaaattctgtcagctnataccagaagttagaacttctgccagaaaaaaaaaaaaaaaaaagtacctgcccc

SEQ ID NO: 2623 - DNA, 636 bp, Homo sapiens
  misc_feature 9, 34, 113, 117, 119, 140, 152, 256, 262, 267, 281, 305,309, 323, 324, 331, 341, 343, 349, 358, 362, 364, 372, 374,378, 382, 389, 397, 400, 401, 406, 408, 411, 413, 417, 426,427, 433, 436, 437, 439, 441, 443, 445, 456, 457, 458: n = A,T,C or G
  misc_feature 465, 466, 472, 475, 477, 489, 497, 499, 502, 505, 507, 514,515, 519, 522, 523, 524, 527, 545, 549, 550, 551, 556, 569,570, 575, 579, 585, 588, 591, 596, 600, 603, 605, 609, 611,613, 631: n = A,T,C or G
tggagctcnccgcggtggcggccgaggtacttcntttttttttttttttttttcttatttaggggagaacttttaccttttcacttaatgcacttctctttggtgtatctgtnttgngngcaacactactcttgctcttnagggccattaantaaaataagagttactcaggctgggtgcagtggctcatgcctgtaatcccagcactctgggaggccaaggcgggcggatcatgaggtcaggagtcaagggcaanccggcnaaatnggggaaaccccaantttttctaaaaatacaaaaattcntccnggcaatggggggcnnatgcctnaaatcccaananaccctnaaaaggctngggncngggaaaantntttntaanccagaanccccgggnggnnggggngntgnanatangcccaatanncccccnttnncntntncncccgggggaannnttggaanncctttnttntnaaaaaaaaaacnaaaaaggntntcnctntnccccccnngggnaannnganacctcttttttttctccncccnnntttcnctggggggggggnngaatnttantaaaanaanccnccccngggngananaatntnanttttttttcacccccccncgggg

SEQ ID NO: 2624 - DNA, 447 bp, Homo sapiens
  misc_feature 77, 113, 143, 148, 155, 163, 192, 205, 229, 239, 240, 244,245, 251, 254, 255, 259, 270, 297, 309, 311, 314, 315, 324,388: n = A,T,C or G
gggcgaattggagctccccgcggtggcggccgaggtacaacatactgctttgattgatatatacaaaacaccacctncttttgatggaaacggggcccagaagcagatcctgngatgaggattaatgtgcaattcatgtaatntatancacagtnttcaggangtgctcacaggataaaccaatgagggagngggttcaggggcnggacagggaagggaactaaactgngcaagggacnntttnngggcanggnncggncttaagcctantcccgttgggagctctggacatacatnaggcttcaaagntnggnncaactgggngcaaaaaaacctgggctgtttatgcctgcacccctttaggcaccctaagccctactttgaagtntttattttagctctcaatgtgttgaacttataaggaaattaaacgtttcatgagttaag

SEQ ID NO: 2625 - DNA, 534 bp, Homo sapiens
  misc_feature 111, 112, 134, 193, 205, 242, 297, 301, 326, 460, 465, 516,533: n = A,T,C or G
tccccgcggtggcggccgaggtacagataattcaaatctattatctaatgtattaggttaatttctatttgttctatactttttttttttttttgagatggagtcttgctnngtcgcccaggctggagtgcagnggtgcaatcttggctcactgcaagctccgcctcctgggttcatgccattctcctgcctnggccttccaagnagctgggactacaggtgcccgccccgacacctggctnatttttaaaaaaattttttagtagagacagggtttaccgggttaaccaggatggnctcnatctctgacctcgggatcccgcccntttgggcctccaaaagactggggattacagggcggtgagccaccgacccggcctattgacattttttaagggtcaagattttcttttgtgtgtctagtaattcgtcttttattgcaaagataatttgcttattngactnagaaaaatgatttgtgggcatacaatattgtatgtggtacctgcccgggcngccgctctagaactagng

SEQ ID NO: 2626 - DNA, 482 bp, Homo sapiens
  misc_feature 200, 263, 270, 308, 334, 338, 368, 392, 412, 429, 431, 438: n = A,T,C or G
ttggagctccccgcggtggcggccgaggtacagataattcaaatctattatctaatgtattaggttaatttctatttgttctatactttttttttttttttgagatggagtcttgctctgtcgcccaggctggagtgcagtggtgcaatcttggctcactgcaagctccgcctcctgggttcatgccattctcctgcctnggccttccaagtagctgggactacaggtgcccgccccgacacctggctaatttttaaaaaaanttttttnaggagagacagggtttcacccgtgttagccaggatggnctcgatctcctgacctcgggatcccncccntttgggcctcccaaggactggggattacanggcggtgaggccaccgcacccggnctattgacattttttaaggnttcagattttcttttgngngtctagnaattcgtcttttattggcaaagataatttgcttatttgacttaa

SEQ ID NO: 2627 - DNA, 228 bp, Homo sapiens
  misc_feature 21, 67, 184, 199, 216: n = A,T,C or G
gctccccgcggtggcggccgnggtacagataataacatctgatatccacatggggtctggaggtgcnagccaccttcctttcatcccacggtctcacagcagccctggaaagaggctgctctctgttggaggctaagggccagtgttggaaggagctctggtggaaaagtgtggtctgcatgangggctcccatgaatnagaggataggggtggcnggtacctgcccg

SEQ ID NO: 2628 - DNA, 412 bp, Homo sapiens
  misc_feature 93, 399: n = A,T,C or G
cttagggcgaattggagctccccgcggtggcggccgcagaaggtcccggcagcagcaggaagaagacggaccccgcgatgagggcggcggcanggagcaccttcatgttgcgttcggagccccgcgtaccctatggacagttgtgtccccaaggaaggatgagaatagctactgaagtcctaaagagcaagcctaactcaagccattggcacacaggcattagacagaaagctggaagttgaaatggtggagtccaacttgcctggaccagcttaatggttctgctcctggtaacgtttttatccatggatgacttgcttgggtaaggacatgaagacagttcctgtcataccttttaaaggtatggaagagtcggcttgactacactgtgtggagcangttttaaagaagc

SEQ ID NO: 2629 - DNA, 507 bp, Homo sapiens
  misc_feature 77, 198, 273: n = A,T,C or G
actacttagggcgaattggagctccccgcggtggcggcccgaggtacctcatcccctcagtgactaagaattgcagnatttaagaggtagcaggaatgggctgagagtggtgtttgctttctccaccagaagggcacactttcatctaatttggggtatcactgagctgaagacaaagagaagggggagaaaacctancagaccaccatgtgctatgggaagtgtgcacgatgcatcggacattctctggtggggctcgccctcctgtgcatngcggctaatattttgctttactttcccaatggggaaacaaagtatgcctccgaaaaccacctcagccgcttcgtgtggttcttttctggcatcgtaggaggtggcctgctgatgctcctgccagcatttgtcttcattgggctggaacaggatgactgctgtggctgctgtggccatgaaaactgtggcaaacgatgtgcgatgctttcttctgtattggctgctctcattgga

SEQ ID NO: 2630 - DNA, 398 bp, Homo sapiens
  misc_feature 149, 189, 220, 239, 240, 242, 254, 256, 273, 284, 296, 387: n = A,T,C or G
ccgcggtggcggccgccgggcaggtacagatagcaaagactgggaccacagtggagggatgcctaatccagacaagggcaggaataggcagggaaggcttcctagaggaagtgatttccaagctgaaacttgacagatggaacagaagntagccagagatgggaaaactatttttggtcaatggaagancaggtggttgagatagaatctgacacatganagcaaaaaaaaaagtccanngntgggagaatacngngtgagaataagacaatnttaaactggcnatataagtaagngatcatcacaaggctttgtaggacatagtagggagtttaagactttttattctgagggcaatggggaatcacaagagggagttaggcactntacacaacttc

SEQ ID NO: 2631 - DNA, 102 bp, Homo sapiens
  misc_feature 90: n = A,T,C or G
ttagggcgaattggagctccccgcggtggcggccgaggtacctgcaggcctcctacacctacctctctctgggcttttatttcgacccgngatgatgtggct

SEQ ID NO: 2632 - DNA, 356 bp, Homo sapiens
  misc_feature 115: n = A,T,C or G
ggcgaattggagctccccgcggtggcggccgaggtacctgtggatatcatacgaaagtgtagtttcaaaggagatggacaaacgatacctacagtttgatattaaggcctttggngaaaataatcctgccattaaatggtgtcctactccaggctgtgacagagcagtaagactaacgaaacaagggtcaaatacatctggatctgatacactcagcttcccattgctgagagctcctgctgttgattgtggaaaaggacacctcttctgctgggagtgccttggtgaagcacatgagccttgtgactgccaaacatggaagaattggctgcaaaaaataaccgaaatgaaaccag

SEQ ID NO: 2633 - DNA, 437 bp, Homo sapiens
  misc_feature 92, 110, 111, 115, 116, 149, 220, 229, 266, 267, 276, 315,353, 379: n = A,T,C or G
aattggagctccccgcggtggcggccgaggtaccttttttttttttttttttttttgagacggagtctcgcccaggctggagtgcaggggcncaatctggtctcactggnngctnngcctcccgggttcgtgccattctcctgcctcanactgtcgagtagctgggactacaggcacccaccaccaagcccagctacttgggatcgcatgagcctgggantttgaggcngcagtgagccatgatcactccagcctgggcaacaganngagactctntcacaaaaattaactttacttaattacttttattattgncataatcgctccattttattgttgtttgttgttgttgnaaaccaaattgtaaaaccattttatnttttgttgcaaaccaaaaagtttctgagacaggtcttaatttatttagaagtttattt

SEQ ID NO: 2634 - DNA, 372 bp, Homo sapiens
  misc_feature 9: n = A,T,C or G
tggagctcncccgcggtggcggccgaggtactttttttttttttttttttttgtgataaggctaatattttttaaaaggaggcacagtgaatttaagacattgacatttatagccgtagctcgacgcttactcttggaggcccaattatcatccctgtccatcttgtaagtgtcatgtcttcgtcatcttctagaccccagctaactgtgccatctcctactcctttctggccttcttcgagttcttccaacagtcggaaattgcgagggacttttactcccgagcccgtggtggctgccatcttgcgtcgctgttgcttgaaggccggccccttctccccgcgtcctgcccgggcggccgctctagaacta

SEQ ID NO: 2635 - DNA, 367 bp, Homo sapiens
  misc_feature 80, 102, 112, 113, 123, 124, 132, 136, 198, 211, 241, 242,252, 253, 260, 263, 289, 305, 316, 326: n = A,T,C or G
ctcccccgcggtggcggccgaggtactctccgcctaagtccatagagaggctaacacccttctagtttattagtctttgntaaacctatgaaattctgaatntaatggctannttatatgcanngtggaggncacncaaaaatgtttctctcaacagctgtgataagtataggcttattttgatgtctaaagatctgntacctgtatctgntttcatctttcaacacaaattcatgggaannttaactatgnncctgtgntcnggacaagtgtgcatgagaacatcatncactaagtttatcatnaaatgggaaangaagcagacnttttaaaaagcacccaaaccggccgctctagaactagtgga

SEQ ID NO: 2636 - DNA, 487 bp, Homo sapiens
  misc_feature 126, 183, 220, 227, 232, 248, 291, 363, 374, 401, 405, 407,413, 417, 419, 427, 431, 451, 458, 467, 479: n = A,T,C or G
aggtacgcgggggctgactctcttctcagattcagcccagttgcacccaagtaaaataaacagtcttgttgctcacacaaagcctgttggtggactctcttcatatggactcatgtgacatttggngccgaagacctgagacaggaggactcctttgggagaccggcccctgtcctcgccctntttcatgagatccacccatgaccttggggttcctcancccagcncgaangaacttcttcaccaanttttaaatcggggaccgcaaagccaacaagaatgaagaagtgnccaggtatggtggctcatgcctgtaatcccaagcacttagggaggccgaggaggaagaattgcttgaggccnaggaatcccanaccagccttggacaacatggcaaaatnccantnttttcnaatnanattaaagnaaanaaattaaagttacctgcctnggcgggncgttctagnaactagttgganccccccgg

SEQ ID NO: 2637 - DNA, 353 bp, Homo sapiens
  misc_feature 87, 112, 216, 222, 230, 245, 276, 309, 353: n = A,T,C or G
ttagggcgaattggactccaccgcggtggcggccgcccgggcaggtacacggtcagtccgggtcctaagggcgcagggtagggcatnccactgggagttcaaaggggaaacnaagatggttcccactgctgctcagacagtgtcgctaaaattccctcactcattttcaagtcttgttttacataatggcttttaaagcaacttttgttaatgctnctgatnctttaatncaaactattaatgtnccattttggtgacatctgggttttcatacanaaaaaaaaaaagtcaaaaaggggaaacaaaaanatatttacacattttatatataaacttaaaaaccttgtaccttn

SEQ ID NO: 2638 - DNA, 364 bp, Homo sapiens
cgaggtactatggcagttttgcctcaggtgctgaacatttctcagccctggctaaaagggagcagcacagggagagaaacaggataggaaagcagaatggcgagcagcctatggcccagggcctgtaatcccttcccaagactagctgctcagggtggtgcagggacaggaccagaccctgcgcctatttcctgccttctttccctatagggaactctgtaggctgagccactgtcctgctcttatgacattatatcttgtgcctttctcctcagcagtgagcagtgagctactcctggcccaggccctaggggaaatggatcagtctttgaggtttctatttggggaggggagtacctgcccg

SEQ ID NO: 2639 - DNA, 465 bp, Homo sapiens
  misc_feature 5, 425: n = A,T,C or G
ccgcntggcggccgaggtacttgtttttttttttttttgagacaaggtctcgctctgtcacccaggctggactgcagtgacatgatatcggtcactgcaacctctgcctcctgggttcaagggtgattctcgtgcctcagcctctcaggtaactgggattacaggcatgcaccaccatgcctcgtattttttttgcgtgtgtttttagtagagacgtgtttcactatgttgtcccgggctgatctccaactcctgtaagtcaagtgatctgcccgcctcagcctcccaaagtgctgggattatagacatgagccaccacacctgatgtctgatgcttatttattatgtgaccttagcgaagtgtggtagtcattaagtgctggtctatctctataccttccccaggcaaggtaggattgcacttnccgctccacttgtgattaggtggagccatgtgactacttt

SEQ ID NO: 2640 - DNA, 520 bp, Homo sapiens
  misc_feature 241, 250, 292, 294, 376, 404, 482: n = A,T,C or G
tgggctccccgcggtggcggccgaggtactagaaactttccaaggagtcttgggtgtgtagccaagaggagccatgagctatggactcctcaagcacgggaagaggaggtgtgtgctgagaacagagaggccctgccctctgtccactagcgagaatccctagctgccccagcccagtctttctccccggcattcacaaactttgcaagcgttggtccagggcccttctccagatctgttncaactttgnagagtgaagggcttgagcatacgggggaagagagtctgcatnangttagggggaaaacttttaaaagataccctcattgtgtcaaaagaagtgtgccaatctatttttgtatcagcattgggaagngcactttcccctggggccgtgtgggtgngtgaatgtgcaagtgtctgagagatactgcatcaagccctagaccctcaagagccagtcccgcccttttacagagcantcccttatcctggggccatgggtcaggctgaccttcaa

SEQ ID NO: 2641 - DNA, 461 bp, Homo sapiens
  misc_feature 19, 57, 58, 64, 84, 109, 112, 113, 144, 149, 170, 172, 195,226, 247, 252, 256, 264, 266, 344, 371, 373, 380, 403, 407,409, 419, 429, 459: n = A,T,C or G
ccccgcggtggcggccgangtacgcgggggacttcgggcttgttcgctggtggcgtnngagccnagcccggactggtcaggatngatcacggacgtgcaactcgccatntgnngccaacatgctgggcgtgtcgctcttcttgnttgtngatctctatcacttacgtggncngtcaaacaattccaagaatgcangaatgaaagttggcgctttcttccgccccanggtcccaggacattagtctgnggcangatngaggggtntngaaggggcctttcacacttaactttattccttttacccttcacaacatacaaaaggcaacttacacctgggatttttncaaaacaaccttttatttccctcagangnctttccnttaatccctatggaacaaagaangctngnccacttgaantaggggcccnagtatagggggctttgcttttctacttccntc

SEQ ID NO: 2642 - DNA, 541 bp, Homo sapiens
  misc_feature 108, 129, 138, 157, 180, 197, 208, 239, 240, 247, 252, 266,267, 269, 271, 273, 332, 351, 361, 367, 368, 377, 381, 410,413, 427, 463, 479, 494, 496, 539: n = A,T,C or G
ggactccaccgcggtggcggcgaggtacgcgggtatctgtcataagctcaacatctgtagatcagagggctaccagaggaaccagttttagaagatgaacaacacctnttagaaaagaaattgcctgtnacgttttgnaagataaagaagcgggganaacttcgaacgttgcaaacctgnaaactgggagaaacganggcaagctctnttggaacaagcaagctgcaagggagcaaggnncgcctgncccancatggagccggccnngncnanggaaaaggaaggagcgtgagcgccaggagcaagaagcgcaacaagacaacttggaactnggggaagcaactgggaaangcatgctgtnagctannaacctgcantatnagagggaggagagggaggaaaagaaattnganaggcgaagaggctngcaaaactgggaaacttgaaaggcaacgacaacttngagtgggaaccggaantcgaaggcaagaacntncctaaatcaaagaaacataggaacaaggagggacatagtttgnac

SEQ ID NO: 2643 - DNA, 337 bp, Homo sapiens
  misc_feature 187, 201, 258: n = A,T,C or G
caattggactccccgcggtggcggccgaggtaccttatgtagcccaagaaattcaagaggaaattgatggggctccttcaggagcagcgtgcagatatggaccagttcactgcctcaatctcagagacccctgtggacagtccgggtgagctctgaggagagtgaggagatcccaccgttccacccnttccaccccttccnagccctacctgagaacgaagacactcaacccggagtttgtacctgcccgggctggcncgcttctagaaactagttggatcccccgggctgcagggaattcgatatcaaggcttatccgataccgtccgacctcgag

SEQ ID NO: 2644 - DNA, 514 bp, Homo sapiens
  misc_feature 368, 430, 431, 465, 471, 480, 484, 488, 495, 500: n = A,T,C or G
aattggagctccccgcggtggcggccgggcaggtactttttttttttttttttttttggaaacagggtcttgctatgttgcccagactgatctcaaactcctggcctcaagcaatcctcctggcttagcctctcaaagtgctaggattacaggtataagccactgcactaagtccagtgaatcattttccagacaacatttactgaatatccgacactgccttccacagacgggggaggtttcccaaagaggccgtgctttttgagaagctggcaagataaccctggggtggagggaaggtggcccgcagctgagaccaccaccttactgtccccaaatcctcaccagaggttgctgacactttcctnttccccatcctcatctacttttcaaattagaacagtagaaaatgggatgattaggctccttnncatttttaaaaaaccccgttgtttcaaatttttntagacnccaagtctnaaangggngtaatcnccttngtaaaatttaaatt

SEQ ID NO: 2645 - DNA, 486 bp, Homo sapiens
  misc_feature 24, 124, 127, 131, 145, 151, 184, 186, 188, 191, 201, 221,222, 235, 241, 242, 246, 270, 279, 280, 306, 318, 337, 347,388, 391, 394, 395, 436, 484: n = A,T,C or G
ccggcaggtaccaatcatataatntatataacattgctatcagactaaaaacacattcttagctaaagataacttaccatttagaagtcaaaatgcagggaatcttactcctgtttccattttntgncccncttgcttcactcgngtatgncatgctctatctcttctcctatgcagactttangncngtnggccattaantcttgaagaaatttccttcnntcttgctgtcacntaccannttanttggtctgcgtgcaacaagaaggngtattatannaaaaaagttcttgcttaaccattcangattaaataaanaaaaaaattcctttgtttnaacattttgntattttttgcacatacaccaaacttttttaattgccttttncanagnncctttccctccaaaaaataaaaaacaaaaaatcttcaatcnacataaaatcaaacacctgtattgatccatgttcatgctaagctgggnaa

SEQ ID NO: 2646 - DNA, 670 bp, Homo sapiens
  misc_feature 233, 264, 297, 304, 333, 345, 407, 409, 490, 523, 526, 539,546, 557, 563, 590, 592, 596, 607, 614, 615, 621, 624, 639,650, 657, 662: n = A,T,C or G
actccccgcggtggcggcgaggtacaagcgctttgaatatcatgggcaccatgactgtgaccctacaggtaggattggatcactccatgagagtagccggcaggtttctacaatggcctgggaatggactgattatttttatacattttctggcctgagagaaagccaaggtcccctgctgttcacagcaaccctgcctgggagcttggaatcttggtaaatctgccccgttnggatctattggaggtaggctcaccctttttngtcttttgtgggaaaattaaagagaaataattntcagacntatcatcacctccagtggaactacagaanacctggacccanctgcactattttaatgtaaaaataacaatatggccagggtgcagtggctcacgcctgtaatncnatcactttgagcagccaaggcgggcggatcacgaggtcaggagattaagaccatcctggccaatatgggtgaaaccctgtntttactaaaatacaaaaaaattaactgggcatngtnttgcgtgcctgtngtcccanctacttggganggctgngaccaggggaattgctttgaaccccgnanggcntagaattgcantgagccnnaatcangcntctgacttctacctnggcgacaggantgggacnttttnttaaaaaa

SEQ ID NO: 2647 - DNA, 207 bp, Homo sapiens
  misc_feature 78, 99, 103, 115, 119, 132, 141, 167, 185: n = A,T,C or G
aggtaccctatattcttcttgatttctagccttttattggctctcagattgccagagttgggactcaatagtaagcanccattctggtgaggcggaagngatnctaccagggtgngttntcatgacaagcanaatcactgngtttttctctctactctgtggcatangactctatgccatagagngacgtgtgaaaggcttgaggct

SEQ ID NO: 2648 - DNA, 319 bp, Homo sapiens
  misc_feature 62, 69, 71, 76, 78, 94, 95, 100, 103, 105, 120, 125, 132,135, 144, 155, 158, 180, 187, 189, 191, 201, 205, 220, 223,231, 235, 245, 250, 267, 275, 285, 291, 306, 318: n = A,T,C or G
tcaccgcggtggcggccgccgggcaggtacttatttttcttttttttttttgggggtggggncctgggnanttttntnaaggggctttttaacnnggganganancctgtgccggttcancccangccggtngtnaattttcanccttttttcanctngctttgggtttttaaggctttngttttcnancntttttctttnaaanccttcttcacaagtngangccattcntccnggttccttcnaaatntgggcctgggtcccttntccccggntttaaaaaanaacttnccaaaaacaaaacanttttttcccctng

SEQ ID NO: 2649 - DNA, 364 bp, Homo sapiens
ccgcggtggcggccgcccgggcgggtacgcgggggtctccagagtgagtgttccggagagcaccgtgttagggaaggaggaggctgcgggctaacctgccgggagggaggatgctactgcctgtttcctattagtgacaacccacctcctaatcacgtcctgcttcaaacaaggtaacatcacaggacagcctccgaaacaataactgtttgaatatccttaatcttcggcaacttcaataactccccaaaatatatgtaatcagagaattaacttttacaacttttggttattgtttgcttgaaccataaagcagagctctttctgggataaaaaaaaaaaaaaaaaaaaaaaaaaagtacct

SEQ ID NO: 2650 - DNA, 206 bp, Homo sapiens
aggtacttcacaatacaactcttgcagaaagtatgaagacactctgtgatggtggtggcatccacgaagtagccggcgcataggcagcaaacaatgtgttcattcaagtctttgatcttcactcgaacctcctcctgaccctcctttcccaggggagactacacaacgtcggcgacacaacgcgcaggcccccgcgtacctgcccg

SEQ ID NO: 2651 - DNA, 570 bp, Homo sapiens
tatagggcgaattggagctccccgcggtggcggccgaggtacataacaagcaataataaaagtcctctgccgaagacagaatagtgtaaaacctttccttcccctgcccttacagatttctagagaagataatttgggaataaaaggtataaaaggtttttgagaaaagagagatcaaaggacattcagagttcgggaggatatctgggaagcagacttagcttagatcctaaagggtgtagaagatctgcattgctggggaggagtgtgggagtggtaaaccagtcaaagaattcacagatgtgctgggaggaggagaaggggagcagaagcaggaaaacagtctggctgaaacactggttgtatttcaaagagcagtagcaaatcagggtggataaatgtgtgggcctaagcagctggtgagcattaaatgtgtaagaatcaaattgtatccttagcaaacctctgaagatttctgagtaagatttttatgagtgttggtaaatttatataggatgcatatgggtagtacctgcccgggcggcccgctctagatctagtggatccccc

SEQ ID NO: 2652 - DNA, 553 bp, Homo sapiens
  misc_feature 408, 477, 541: n = A,T,C or G
ccgcggtggcggccgaggtacatagtgtcgcgaactcaaatcggcatttagatagatccagtggtttaaacggcacgtttttgcttataaaaaaagtgcaaaaaagatgtggtttacaagttaaagctacagaatccctttttgctgtaattgcaccagttttaaagcctctggacagagcagtatttcgtttaaaactttgtttttcttaaaagcttacagtgtttggctaattctcctcccctttttacaagacgggggccggagggtggacactggtggcaggttaagggatactgtcactttaagaagcctgcagattgaagtgtaaacatggagaaattaggggctgattttttaaactgtgtgagatattaaccagccgccctgttataaaatcaggaaatncaaacagcgatttacaccgattaacaccccctttatatattttttacaaaaatcactgagaaaataatnaacgttttcatctctcttggctttttttggttttaaaaagtgtcaaaaagtctacatttaaatnttaaaaatttaa

SEQ ID NO: 2653 - DNA, 458 bp, Homo sapiens
  misc_feature 5: n = A,T,C or G
cactnctatagggcgaattggagctccccgcggtggcggccgcgcgggcaggtacaccaaatggattacaagcagcatccagcagaagacagaccccccaaccctgcccaccagggctcacactctacaaaaccctgagggcctagaaatctgtaaatgcatcgccaagcactggggctgatttgcagtaattctctaagcaaggcaaacatgatctagctttgaaggcagcatgaaggcagcgggttggtgagaataatctctccttaagagaagaagaaacctggggcggaaggagttttccccgaagtggcttcccgcgtacagaacacagaacttatttctgtcagttatttaatacattgaaaatttagtgaaatgttcaaagagaatagatgtttcccaaaacaacaactttatgttaaaaatagtcattaaaagatctgttgtaattaaaa

SEQ ID NO: 2654 - DNA, 505 bp, Homo sapiens
  misc_feature 105, 468: n = A,T,C or G
tagggcgaattggagctccccgcggtggcggccgaggtacgcggggggtaaaggtatagtagttggcagcagaatggacccattgaggataactataaaattacngaaaatatttaaatgcaacttattgctatagaagcaaagaggactaaagggcaaaattctagagagtggtaaatctcagaaagcacaagcataaaatgcagctctgggggccctttccacttctggctatagggaagaacctgaatactgaacttgattcaggcagaggaccataacctgggggtcaggggaaggcatgggggggaccagaaaccagaagaacgatcaagactgcaatgaaaaaaatggatacattaggagcttcaaacacatataatttctcaagaaatttccagattctcatgctgcatagggcaggagcctgaaaagctaatttgagaagataataagttggatttttgntttgttttgcattttgcaagtacctgcccgtgccggc

SEQ ID NO: 2655 - DNA, 239 bp, Homo sapiens
agggcgaattggagctccccgcggtggcggccgcccggggaggtaccactgaatccaaggctctcttgggtagcctatgtgcctcttggatggtatgtggaagccaaggactgtctgaacgtgctgaacaagagcaacgaggggaaagaattactcgtcccactgacgagttctatgtatgtccctgggaagctgcatgatgtggaacacgtgctcatcgatgtgggaactgggtacct

SEQ ID NO: 2656 - DNA, 462 bp, Homo sapiens
  misc_feature 438: n = A,T,C or G
ctatagggcgaattggagctccccgcggtggccccgggcaggtacttgaacagtaggaggaggtggttcctcattcgtctcccgggagcgtcctcttctcagtcaggctggcaccatgacccaaggaacctcggcgagtgacggataaacaccagtcggcccgcgactaagagctgcgcccccgcgtacgcgggtcaccagggtcagtttctttaatgatggtttccaactggcctaatacattaagtaagactggctgataacatgaccagacagacataaagaccctgttgggaatgacattgaactctcaaagtcaagatttcttacacaaatctatcagctggagaaaatgaaggcagtgtggtatatgtgtgcaaataaggacattatgaagcttaaatatggaatgtctcttggacccccgatgtcatctgnattctctttttcttcttgtaccct

SEQ ID NO: 2657 - DNA, 602 bp, Homo sapiens
  misc_feature 14, 232, 344, 356, 375, 399, 424, 434, 446, 455, 457, 492,497, 505, 547, 549, 580, 591: n = A,T,C or G
cgaattggagctcnccgcggtggcggccgcccgggcaggtaccatcttggctcactgcaacctcaacctcctgggttcaagcgatcctgctgccccagcaccaccccctctccaagtagctgggactacagaagtgcatcaccatgcccagctagctaacttgaatttttagtagagacagggtttcaccaggttgcccaggctggtcttctgagctcaagcaatccacctnccttggccttccaaagtgctgggattacaggcgtgagccaccgcacccggcccattttatatattatttttgcatagccttcattgtcttagcaaagtcagaagaagaccantaacataatgtnatttaattaacaacaacgncaacaacaacaacaaaacaacccnggatgggggcagtggctcaagctantaatggccgnccttatgaaagnccaaggggngnggattggttgattccattttaaaaccaaactgaanccctnttttttanaaaaaataaaccgttaaaaaaatccttggtttttgtttaaangngccggtcccccccccaaggagaaaatttttnggggggggggngttaaaaaaaa

SEQ ID NO: 2658 - DNA, 379 bp, Homo sapiens
  misc_feature 42, 72, 98, 204, 221, 227, 250, 305, 331, 336, 341: n = A,T,C or G
gggcgaatcggagctccccgcggtggcggccgaggtactttnttttttttttttttttttttttttctccanaggctagtttttcttcagtccttaanaactctgctccttatatgggcttcggtggcagtcatggggcagcaccgcaggtctacagtggggtggaggtgttcggtccttgcggggcttcatgaccttgatttntggcggtcggggggcancacccncaggtctacagtggggggaaggngttcgatccttgtgggcttaatgacctttgattcctgactaccgggctgtgaatnggcacaacttcacacaagtattgtgntttcncatcnaccctgggaaagaaccctgccccgggggggcggggttt

SEQ ID NO: 2659 - DNA, 574 bp, Homo sapiens
  misc_feature 53, 141, 160, 171, 174, 177, 184, 187, 188, 189, 195, 199,210, 211, 212, 213, 216, 228, 233, 234, 235, 244, 245, 248,249, 253, 255, 257, 261, 269, 270, 271, 272, 273, 274, 275,284, 292, 293, 296, 308, 329, 332, 336, 338, 349, 351: n = A,T,C or G
  misc_feature 352, 355, 364, 372, 376, 381, 384, 385, 393, 396, 399, 400,401, 402, 407, 409, 410, 413, 415, 422, 424, 428, 429, 430,435, 443, 446, 455, 460, 464, 466, 467, 469, 478, 480, 486,503, 513, 518, 569: n = A,T,C or G
ttagggcgaattggagctccccgcggtggcggcccgcccgggcaggtactttnttttttttttttttttattttttttttttttttttttttttttttttttttttttttttttttttttttttttttttttttttttttnaaaaatttttttttttttnaaaaaaaaaanccnccnccccccnaannncccccnaaanaaaaaaaaaannnnttnaaaaaaatttcncgggnnnttccccccnnaanntttntntnggcnaaaaaaannnnnnnttttttttnggggcccnnccntaaaaaaaaaantttaaaattttttgggggggnccngggnanccccaattttnannttnggggggttnaaaaaaanaaanggggnaannaaaaaaanggnccnnnnaattngnnttntnaaaattncncccnnnaaaantttttctnaanccccaaaangggangggncnntnggttttttnanggtaanggggggccagggggggnttttcccaanttttncccggcccaaaaaaggaaaaattttttttttgttggggggagggagttttnaaaaa

SEQ ID NO: 2660 - DNA, 557 bp, Homo sapiens
  misc_feature 520: n = A,T,C or G
ctacttagggcgaattggagctccccgcggtggcggccgaggtactggaacagggataagttcttggataaggtgccaacatacctataaaagctgatttttgagtaaattattgattctaacatatgtaatggatttggtgtgataattttctgatctttaactataagtgactttttattctccaccagaaaagataaatgactgagaatgtaagtctgcgctctgattaacacaatggagaaacggaaaaactatctctgttaaaaactgattcctgtcattcttctgatatcaaataagaggaaggaaaataaactttttgtgtgtagatagaaaaacatacctgaggccaggtgcagtggatcacgcctgtaatcccagcactttgggaggccaaggcgggcagatcagctgaggtcaggagttcgagaccagcctggccaacatggtgaaatcacgtctctactaaaaatacaaaaattatctgggtgtagtggtgcgtgcctgtaatcccagntactcgggaggctgaggcaggagaatcactttaattc

SEQ ID NO: 2661 - DNA, 369 bp, Homo sapiens
  misc_feature 10, 339: n = A,T,C or G
tcggagctcnccgcggtggcggccgggcaggtactctggctgcagactgaccttgctcaggtccgagaaggatggggcagccactggagtggatgccatctgcacccaccgtcttgaccccaaaagccctggagtggacagggagcagctatactgggagctgagccagctgaccaatggcatcaaagagctgggcccctacaccctggacaggaacagtctctatgtcaatggtttcacccatcagacctctgcgcccaacaccagcactcctgggacctcacagtggaccttgggacctcagggactccatccttccttcccaagccctacatttgnttggcccttttctggtgccatacaccctta

SEQ ID NO: 2662 - DNA, 356 bp, Homo sapiens
ttagggcgaattggagctccccgcggtggcggccgaggtacagagggagggacatacaatatttaataggatatttctacagaacaataacttatattatgtccttgtaaaaatctgtacctctttaaaacatttaactgaaacatccatttttttttagctttgctaatcaaaattgttttaagaattaaaactaggttgtaactaatgtcagtacctgcccgggcggccgcccgggcaggtacataggcatcctattcactgcaccctgtcacacccggcaccccccgccccgcacattatttgaaagactgggaatttaatggttagggacagtaaatctacttctttttcca

SEQ ID NO: 2663 - DNA, 117 bp, Homo sapiens
  misc_feature 46, 74: n = A,T,C or G
agttcggtgtaggtcgtttcgctccaagctgggcttgtggtgcacngaaccccccgttttcagcccgacccggntgcgccttattccggtaactattcgttctttgagtcccaaccc

SEQ ID NO: 2664 - DNA, 339 bp, Homo sapiens
  misc_feature 142, 203, 214, 244, 260, 278, 327, 337: n = A,T,C or G
aggtactgcaactgccagaacttggtattgtagctgctgcccgctgactagcagctggactgattttgaataaaaatgaaagcattaaagggtttccctacaaaacatttttctttaaaatacttttgaaaatggctataancagttgactttcacccttggagagcatcacactgtgtgaggttcagtgattgttgaccctncccagcccctnctgcttctttaagttatctgtgtgcgtgcncttcctctcaatcttnttttgcaccgctcatttntttttctctgacccatgaagaaaaggaaaaactttactgattgataaantttttaaaanaa

SEQ ID NO: 2665 - DNA, 342 bp, Homo sapiens
  misc_feature 308: n = A,T,C or G
gggcgaattggagctccccgcggtggcggccgcccgggcaggtactaattttttttttttttttttggtagaagtggtgtctcactatattgccttggctggtattgaattcttgggctcaagcaatcctcccctcttggcctcccaaagtgctgggattacaggcatgagccacctcacccagcccacttattcatctttttgcctgcaagctacaccaccaaagccccaggtcaaacatctttctccacagactgtgagaaaagagcctttcttcctcctaatttgtaatggctttcagctctatntgtctagcttcaatcctgacatctgcagcttaca

SEQ ID NO: 2666 - DNA, 490 bp, Homo sapiens
  misc_feature 413: n = A,T,C or G
ggcgaattggagctccccgcggtggcggccgaggtacaatgaggcttggctctgtgtgatgcactctaaccagcccacacttcagcagcggcatcatttggattcagggagagtttctgcagcatgaaggagtaggaagaacacagggtgagttcacaggaatccctacttttccatgtgaccttgtttggcctgaagtgattttcttgacctctctgggcctgactttcctcatctgtaaagtggagggtttgaaaatatcacagaaaacaaaataccttaaaggatgctctggcacacagcaggtatttccatataatgatacctcccattcctttttatgtgagctatatcccctgaaacccaggtttgactaaattgagaccaactttcataatatacacaatgactgntagatatgaattttggtgtggtgaagatggggagtgaaaaaagtagaaaaagtcaaatctcattgaataaaaaaggg

SEQ ID NO: 2667 - DNA, 491 bp, Homo sapiens
  misc_feature 1, 2, 31, 40, 61, 147, 265, 294, 300, 303, 315, 334, 338,345, 352, 424, 445, 463, 482: n = A,T,C or G
nnggcggccgcccgggcaggtactttctttnctttttttnttttttttgaggcagagtctngctctgttgcccaggctggagtgcagcggtgcgatcttggctcactgcaagctccgcctcccgggttcacgccattctcctgcctnagcctcccaaggagctgggactacaggctcccgccaccacgcctggctaatttttttgtatttttagtaaagacgggtttcatcgtgttagccaggatggtctcgatctcctgacctnatgatccgcccgctctgtcttcccaaagngctggnatnacagggcctganccattgtgcccagccaaantgtncctttgnaaagttngcgaaatcagattttgtttcccaatagaaccaaaatttttatgagggatgctagcatttttccaaggcatantaattagtttacaacctgaanaaatattatgttttgtantagataaatattaaggtgngcattttaa

SEQ ID NO: 2668 - DNA, 346 bp, Homo sapiens
ctatagggcgaattggagctccccgcggtggcggccgcccgggcaggtaccttattacatatgatttttattagtttctggaggcaaatttaatttttattttaaaatcaaaatctattttaaaagaaatagttctcaaaaagacaacgatgactgggtgtggtggtgtgtgcctgtagttcaaggctgctcgggagacagaggcaggagaaccacttgaggccagttcagtctagcctgggtaacatagcaggaccctgtccctaaaataataaaaaatttaaaaaccacaataatgtgagttacaaaaaagtgtaacttatgaaaagtccgtatttatattgac

SEQ ID NO: 2669 - DNA, 566 bp, Homo sapiens
  misc_feature 321, 422, 463, 501, 515, 523, 556: n = A,T,C or G
agggcgaattggagctccccgcggtggcggccgcccgggcaggtacgcgggggcaggggtgggagcatttatggtgatcagatgtgcctggcaagcccctgttcagacattgctcacattccaaatgttttcgtgtagaatattgcacaggtctggggacgctctacctgtgccctgtgagtgttaataatggtggagaaagagtgtagctgtgcccttgagagagaaggtgagggaaagagtgcaccagtcagctgaccgtcagctggctaggctcttcactgagtcctatgtcgcagtgcacaaatcactgcccatcangcctcagtttcctcatctggtaaatggtgataacatcaatctgcccccccgccagggtgctgttatgagggtcaaaagtggtagtggagggtaatactggntgagtccatttgtgtgtgggaggaagaaaggctttacattnacctggtaccttgggccgctttaagaactaggtggatncccccgggctgcangaaatttnatattaaagcttattcgattcccgtccaccttngagggggggg

SEQ ID NO: 2670 - DNA, 538 bp, Homo sapiens
  misc_feature 369, 496, 536: n = A,T,C or G
atagggcgaattggagctccccgcggtggcggccgcccgggcaggtaccttattacatatgatttttattagtttctggaggcaaatttaatttttattttaaaatcaaaatctattttaaaagaaatagttctcaaaaagacaaccgatgactgggtgtggtggtgtgtgcctgtagttcaggctgctcgggagacagaggcaggagaaccacttgaggccagttcagtctagcctgggtaacatagcaggaccctgtccctaaaataataaaaaatttaaaaaccacaataatgtgagttacaaaaaagtggtaacttatgaaaaaggtcggaatttaatattgacctttggtaagagctcaattantttcagggaaaggcaagggagtatcaccattctgagtaatacaatttcaactaatctttatttcttctacttgaagtcagtgcctatctaccacaaacattcctatatcagtgtgcaaattaatttngagacaataggctttttacgacaatgaattggttactttnaa

SEQ ID NO: 2671 - DNA, 162 bp, Homo sapiens
  misc_feature 42, 43, 103, 136: n = A,T,C or G
acggcgaattggagctccccgcggtggcggccgaggtacttnntttttttttttttttttttttttttcatttttataagaatatataaaaaatgatataaanggacatttacggtagtgggggaaggcatatatntacgttaaaaggcaggacatttttaa

SEQ ID NO: 2672 - DNA, 190 bp, Homo sapiens
  misc_feature 47, 83, 99, 125, 151, 152, 171: n = A,T,C or G
tacgagccatttacaaaaaatcgaccgcttcaagtcagagggtggcngaaaacccgacagggactattaaagaataccaaggncgtttcccccctgggnaagctcccctcgtgccgctctttctngtttcccgaacccctgtccgctttanncgggaataccctggtcccngcctttttcttcccttttc

SEQ ID NO: 2673 - DNA, 423 bp, Homo sapiens
ccgcggtggcggccgaggtacgcgggatgtggtctaatcaaagccatctcaatttgtagatgaagaaggcaaggactaatgacaagaaatgaattgttggccgggcatggtggctcacgcctgtaataccaacactttgggaggccaaggctggtggatcacctgggcttgggagttcgagaccagcctaaccaacatggagaaaccccgcctctacaaaaaaaaaaatacaaaaattagctgggcatgatggcgggcgcgccccctaattccagctactcctgaggctgaggcaggagaattgcttgaacccaggaggcggaggttgcggtgagctaagatcgcaccattgcactccgcactccggcctggacaacaagagcaaaaacttttgtcttaaaaaaaaaaaaaaaaagtacctgc

SEQ ID NO: 2674 - DNA, 179 bp, Homo sapiens
  misc_feature 19, 23, 27, 41, 57, 62, 87, 89, 99, 139, 179: n = A,T,C or G
ccgcggtggcggccgacgnaccnggtnctctgtgggatacncattagagttgctcgntgganatggaatgatggtggggtgcatttnancatggctgantgctttctgcttaaggacctgatgtattaatgctctccangtcattcatatttgggggaaggaacaaagaagggtacctn

SEQ ID NO: 2675 - DNA, 456 bp, Homo sapiens
  misc_feature 108, 419, 442, 443: n = A,T,C or G
tagggcgaattggagctccccgcggtggcggccgaggtacagtagcatgatcttggcttactgcaacctccgcctccctggttcaagcaattctcctgcctcagcctnccgaatagctgggattacaggcatgcaccaccatacccggctaatttttgtatttttaggaagagatggggtttcaccatgttggccaggctggtctcgaactcctgacctcaggtgattcacccgtcttggcctcccaaagtgctgggattacaggtgtgagccactgtgcccggcctccattacacctctttattctagttcaactcagaccgtgaagttagcatacaggtcctcaggagtttgaggccactttccaaggataagggccaccttcaagggcacatcttgcccttaaacaattaaatttntgaaagcttttgggaaaaggggnngaacatgcctttt

SEQ ID NO: 2676 - DNA, 517 bp, Homo sapiens
  misc_feature 164, 235, 248, 273, 275, 417, 458, 460, 467, 485, 487: n = A,T,C or G
acttagggcgaattggagctccccgcggtggccggccgcccgggcaggtacttttttttttttttttttttttgagatataaattggtatgttcacatgttggtaagaaagatctaatagctagaaaaggaactgctgaagttgcaggaaagagaagagaaatntaaggaatgaaacctgaaaaatagagggcagagtcagaggggtggagaaggaaggggccctgacgggaggnggaccactttttncaaggcacatgcaggcaggcacctntntggagggtcccatggctggctatgtgtggcagtgcatgaaatagtcactgaatatgctcccttgctgtcctctgcttgtgctcaccgaggagtgactgtgtctactggaaacaagtttgccttttcactggtctaaataaanggatcaatgacctcaaatctaaagagcattaggaaaccttntnaagccanaactgtacccttggccgntntaaaactaagggggatccccccggctgcag

SEQ ID NO: 2677 - DNA, 472 bp, Homo sapiens
  misc_feature 402, 448: n = A,T,C or G
gggcgaattggagctccccgcggtggcggccgaggtacgcggggggctgcgtgcggcgggaatcatggctgctcgcagagctctgcacttcgtattcaaagtgggaaaccgcttccagacggcgcgtttctatcgggacgtcctggggatgaaggtggagtcttgctctgtcgccaggctggagtgcagtggcgcgatctcggctcactgctctgactacacccggataacagaagacagtttctcaaagccttatgatgggaaatggagtaaaacaatggtgggatttgggcctgaggatgatcattttgtcgcagaactgacttacaattatggcgtcggagactacaagcttggcaatgactttatgggaatcacgctcgcttctagccaggctgtcangcaaacgccaggaagctggaagtggccactgaccggaaagttgcangaaaggtgtttttttaaacccagg

SEQ ID NO: 2678 - DNA, 319 bp, Homo sapiens
  misc_feature 1, 12, 74, 80, 87, 97, 124, 133, 150, 185, 220, 222, 223,224, 225, 226, 227, 228, 229, 230, 231, 232, 233, 234, 235,236, 237, 238, 239, 240, 241, 242, 243, 244, 245, 246, 247,248, 249, 250, 251, 252, 253, 274, 290, 305: n = A,T,C or G
ncccgggcaggnactttttttttttttttttttttttttttttaatggggatttgtctattaaaataggttgtnggaagnaccccanaggacccttnttggatcaggaatcaataatcccaccnagacggggncccagcatttattgggncgcagcataaaacttggccacctccttattggggntgccctgggctgagtcaaaccacatttggatgcancnnnnnnnnnnnnnnnnnnnnnnnnnnnnnnnnctgcaggaatttccattattnaaagccttatcggatncccgttcgaccttcnaggggggggggccc

SEQ ID NO: 2679 - DNA, 325 bp, Homo sapiens
  misc_feature 19, 46, 282: n = A,T,C or G
tagggcgaattggagctcnccgcggtggcggccgaggtactaacangggtgtctggtcttagaagcctcccttcagatcccagctgaccctggtgactgcctggccttgatgttggctgcagccttctgatagaaccacatggattccacccacagctggccaggcttgttacatgggtcaagggaatacaaatggcccccccccagggagcaggtgttggcctcagttttcagggacccttggtgttgctccttacctagagcccattaatctaccccatnaactctcttgccatgaaaagccatcttccaggagccctgtttt

SEQ ID NO: 2680 - DNA, 366 bp, Homo sapiens
  misc_feature 74, 194, 313: n = A,T,C or G
aggtactcaaagacgaatcatgaaaaagaaaaaaactttatttcaaacaggttcagtgatatatgtgggtgctncagcaaaggctggttgtggcaaagtttcatttcaaactgtatgatgtgggctgggcaaggtggcttcacgcctgtaatcccagcactttgtgcccgcgtactcagctgtgttcatgtggnggtctgtggaaagaaaagaagactcgtttggaaatgaagctgtccctttccaagcaagtcttctggtggcttttcttctctcaaaaatgggatcccgataaaatatttgaataggagcngaattggtagaaatgttcgtgcctgtcaccccagaaaagccttgcctggtttt

SEQ ID NO: 2681 - DNA, 427 bp, Homo sapiens
ctatagggcgaattggagctccccgcggtggcggccgcccgggcaggtacttggtttaatttcacagtgagggagtcggttggtgatctctaagaaatccccaagcacctggtgttgggaaagtccctcaaataaagaagtgttcttttctttttttttcctctctctctttctatttatttattttttgagatggagtcttgctctgtcacccagactggagtgcagtggcaggatctcagctcactgcaacctccacctcccgggttcaagcgattctcctgcctcagcctcccgaatagctgggattacagacacccaccaccacgcccagctaatttttgtatttttagtagagacggggtttcactatgttttgtcaggctggtctcgaactcccaacctcaggtgatccaccacttaacct

SEQ ID NO: 2682 - DNA, 167 bp, Homo sapiens
cctcagattttgggcctaggaaggtaggtgatttaaactcactgaaagcatgtacaccttgctgttgctgcttgctgccactgctgctgtttcatctgttcctgctgccgctggaatcgtggaggtaaagacttctgaaactgtttgaaatagccagataatacagc

SEQ ID NO: 2683 - DNA, 512 bp, Homo sapiens
  misc_feature 395, 504: n = A,T,C or G
gcgaattggagctccccgcggtggcggccgaggtactttcttttttttctttttctttttctttttttttaatgtgagacaggatctcattctgttgcctaggctggagtgcagtggcgcaatctcggctcactgcaacctctgcctcctgggctcaagcaattctcccacctcagcctcccaaatagctgggatcactggcacaaaccaccatgcccagctaattttgtattttttgtagagacagggtttcaccatgttgcccaggctggtctcaacctcctgggctcaagcaatcctcctgcctcggcctccaaagtgctgggattacagatgtgagccaccgcattcagccccacacccttatttataccaattacctgcccagtaactgnggacttttgcttcctcaccctgttttgatcgctttaaaactaagtgggatccccccgggctgcaggaatttcgatattcaagcttattcgaatacccgccgccttcgangggggggg

SEQ ID NO: 2684 - DNA, 518 bp, Homo sapiens
  misc_feature 27, 298, 334, 376, 397, 400, 411, 435, 467, 474, 507: n = A,T,C or G
gactactatagggcgaattggagctcnccgcggtggcggccgcccgggcaggtacttttcttttcttttcttttcttttttttcttttttttgagacggagttttgctcttgttgcccaggctggagtgcaatgacatgatctcagctcaccacaacgtccacctcccaggttcaagtgattctcctgcctcagccttcccaagtagctgggattataggcatgtgccaccaagcctggctaattttctatttttaagtagagatggggttttctccatgtgggtcaggctggtcttngaactcctgacctcaggtgatccacccacctcgggnctcccaaaagtgctgggattacaaggccgtggagcccaccgnacccagccaaaggccaaaatnctnaagtcttttgnttttttttttcaaattgaggggtngttatttaacaacaagcttggatcatttgagnccaattnttttggttccccgtttccccacccgccaattcnttttttttttc

SEQ ID NO: 2685 - DNA, 528 bp, Homo sapiens
  misc_feature 146, 149, 164, 185, 193, 200, 206, 212, 220, 222, 227, 228,230, 237, 238, 257, 258, 294, 296, 320, 328, 343, 350, 360,389, 390, 411, 416, 419, 433, 448, 450, 467, 472, 480, 481,501, 516: n = A,T,C or G
aggtacaacatttagagaaccttagctgcccagaaaaactcagattttctgctttacaaaagaataaaaatcatcgaatttattaccctggactttattggaaatcagtgaagaatattcataccaaataccaggtttcacgaacnttncctctctctctttcnttcaaggtaagggggtttggncaaaaggnttgtttntttttngaaaangccgcccngnttggnncnaggtggnncctgtttaagggttgggcnnacggggggtggttaaggaaaaaattcaaatttaaancntttttatattttcccgggggctgngttttaanctttaaaaccccctnggttttnccaaaggggnaattcccaaggttttttaaaaaaaggccnntttttttttttggggaccctngcccnggncggggcccttttanaaaaaaagggggggntncccccggggggtggganggaanttttgganntttaaggcttttttgggtanccggggaaccctttnaggggggggggg

SEQ ID NO: 2686 - DNA, 234 bp, Homo sapiens
  misc_feature 193: n = A,T,C or G
ccgcggtggcggccgaggtactccaacccaagcaacagagcaagaccctgtctcaaaacaaaacaaaacaaaacaaacaaaaaaaatgaggtaggcatgttttattcccatcttacagatgaggagactgaggcaataataattcaatggcttatctaaagtcacaaagctagtaaggagcaaaatccagttntgtctgcttccagcccaccttgtcccacttgcttctttatt

SEQ ID NO: 2687 - DNA, 462 bp, Homo sapiens
  misc_feature 143, 158, 159, 164, 178, 180, 183, 186, 188, 217, 226, 234,246, 249, 253, 263, 271, 317, 322, 329, 349, 368, 371, 377,390, 391, 392, 393, 394, 395, 396, 397, 398, 399, 400, 401,402, 403, 404, 405, 406, 407, 408, 409, 410, 411, 412: n = A,T,C or G
  misc_feature 434, 435, 444, 445, 448, 454: n = A,T,C or G
tactatagggcgaattggagctcaccgcggtggcggccgcccgggcaaggtactttttttttttttttttttttttgggtatataaactatttattaacagacaaggcctacagacttatttcttcttggacacacccacggngcgggcacgggcggnnaagtnggttttggtgtgcntngcnttngnacactaaagggcccaaaaagttgacgcantcccttttntgggcccnaatttttttaantcnttcnaaggtttttnacgggagnttgttgtccagaccattggctaggacctggcttgtattttccatcntttanatccttnttgttctgttcaagaaccantctggggatcttgtacctnggnccgctntagaaactagtgnnnnnnnnnnnnnnnnnnnnnnntggatattaaagcttattcgannacccgtccnnccnttcaangggggggg

SEQ ID NO: 2688 - DNA, 165 bp, Homo sapiens
  misc_feature 28: n = A,T,C or G
aacactacttagggcgaattggagctcnccgcggtggcggccgcccgggcaggtacagtggagaaagaagggggaccccaccagggctatggagagacagtagaggcaggactgaaccgtcagcaaagattaaaaggatgacctgaggctggcaaccacaaaacc

SEQ ID NO: 2689 - DNA, 386 bp, Homo sapiens
  misc_feature 152, 179, 228, 231, 239, 343, 351, 361, 363: n = A,T,C or G
cactacttagggcgattggagctccccgcggtggcggccgcccgggcaggtacagagtcttttgcttcctcccacccctagggggaaaaactgctttgtgctttgggaagttgtctctgaaacccggggacagaggacgcaggacagactangagggagcccgggaggatgggctgcanctgtggaggagggttttaaaggagagagggtcggagagcaaaaggcctnaanaagcccanaagcaagttgagagagggtggaaaagtgaaccaccggcttgggcttgaacccgacacgcttttcttccaatggttaaaatagccaccttttagaaaaaaatttnacaaaggntcccattccncnaaaaaaaaaaaaaaaaggaaaaa

SEQ ID NO: 2690 - DNA, 425 bp, Homo sapiens
  misc_feature 32, 188, 237, 297, 320, 322, 324, 325, 333, 338, 381, 383,392, 409, 413: n = A,T,C or G
tatacgactactatagggcgaattggagctcnccgcggtggcggccgcccgggcaggacgggaaggattcctgccagggtgattctgggggtccgctggtatgtggagaccacctccgaggccttgtgtcatggggtaacatcccctgtggatcaaaggagaaagccaggagtctacaccaacgtctngagatcacgaactgggatccaaaaaaccattcaggccaagtgacccttnacatgtgacattttaccttccgacctaccaccccacttgactggtttcagaacgtttttnacctaaaccttggctttcccttntntnntggccagnttttnaccctgatgcgtaaaaaacgcaaccgacgtgaggggtcctgantntccctgggntttaccccaactccatncttngattaatggggg

SEQ ID NO: 2691 - DNA, 265 bp, Homo sapiens
  misc_feature 220, 225: n = A,T,C or G
cactacttagggcgaattggagctccccgcggtggcggccgggcacggtacttttttttttttttttttttggtaggagatgaggtctcattatattgcccaggctggtctcaaattcctggcctcaagtaatcctctcgcctaggcccatagtattgggattacgggcgtgagccactgcgcccaggctttactagttttccatctatctttaggcctnctcanatttcttgtggggctccacttccaccagtcacacctttaa

SEQ ID NO: 2692 - DNA, 526 bp, Homo sapiens
  misc_feature 224, 255, 283, 287, 292, 295, 300, 307, 316, 323, 337, 344,350, 372, 384, 387, 392, 398, 416, 422, 426, 428, 436, 442,443, 457, 460, 466, 474, 478, 496, 524: n = A,T,C or G
tacttagggcgattggagctccccgcggtggcggccgcccgggcaggtactgcactcaaaaaaattatttctcaatttgtttgctcatactattgattttttttctagaatctaaataattgtgaattaactatgatagcagtatgcacaaacagtaagtgaaatcagacctattaattctgagaggaaggaggtgtcaggattttcacagaagaagagcactnaggccaggcgcagtggcttatgcctgtaatnccagcactttgggaggctgaggcaggcngatnaaggnggncaggngttttanaccagccanccaaacntggggaaaccccgntttttantaaaantccaaaatttccccgcctgtantcccagttactnagnggggnttgggncaaaaaattttttttacncccggngggngngggttttncagagnntataaatcgcgcgnttngctttnaaattttngggnaaaaaagaaacgagttcncttttgaaaaaaaaaaaaaaaaaaaaangg

SEQ ID NO: 2693 - DNA, 330 bp, Homo sapiens
  misc_feature 74: n = A,T,C or G
ctatagggcgaattggagctccccgcggtggcggccgcccgggcaggtacataagcctaaacaatttcacctangtaaaatattgatgtcataaccaaactatatggccccgtttcataaaggttactatattctatagagagtgaagaggtggcctttctatcccagcttaccctattcttgttattgttcaaattctcctgaagcttgcataactagctgccatcaggtaaatgctattggctagcagaagactgcagttctgttaatattagaaccagcagggggaacttgggaacttgacattaaaaatctagaaacggaatttta

SEQ ID NO: 2694 - DNA, 158 bp, Homo sapiens
ccgcggtggcggccgcccggggaggtacttttttttttttttttttttgggcgggggtctttatttgagtttaggcatgattcgaatgaagaggatcatgctaatgaagatgaagcagacgataatgagcgtggcccagagcagccagttgactgact

SEQ ID NO: 2695 - DNA, 281 bp, Homo sapiens
gagctccccgcggtggcggccgaggtacacctgtggtcccagttactccagaggctgaagtgagagagtctcgtgagcccagaaagttgaggctgcagtaagctgagccatgattgcaccactgcactgtagcctgtctacaaacaaataaacgaaaaaacaaaaagacttgtgaaaagtgctgatttttaattaggaaaagattaaacattggatagtcatggaattgtttactgaacattagaaattggttgcaagggtctatgcttctgtaaaataaa

SEQ ID NO: 2696 - DNA, 515 bp, Homo sapiens
  misc_feature 420, 423, 438, 442, 444, 457, 458, 460, 468, 484, 489, 490,491: n = A,T,C or G
actacttagggcgattggagctccccgcggtggcggccgaggtacatatatgaatcactaagagttcagaaattaagctcactttaagaaaactcagccaggcacagtggctcacgcctgtaatcccagcactttgggaggccaaggcgggtggatcacgacgtcaggagtccaagaccagcttgacatggtgaaaccctgtctctactaaaaatacaaaaattagccgagcgtggtgacacacgcctgtaatcccagctactcaggaggcaaggcaggggaattgcttgaaccagggaggcggaggtttgcagtgagcccagatcgcgccattgcactccagcctggacaagagagcgaggactctgacttccaaaaaaaaaaaggaagaaaaaaaaaagttcccttgcccgggccggncgnttctaaaaactaggngggntncccccggggcttnnanggaatttngattatcaaagctttntcgannncccgtcgaccctcgaggggggggc

SEQ ID NO: 2697 - DNA, 364 bp, Homo sapiens
  misc_feature 81, 137, 188, 227, 277, 300, 312, 331: n = A,T,C or G
ctacttagggcgaattggagctccccgcggtggcggccgcccgggcaggtacttttttttttttttttttttttttggtangggaccggggttttaccatgttggccaggatgatctcgatctcctgacctcatganctgcctgcctcggccttccaaagtgctgggattacaggcatgagccactgngccaggccttttgtccattttttattgaactgcctattncttcttactgatttgtagaaagtctttattctagtctggcaggtattttntttcaacacttccaagattattnattggctttggnagctaatgcttcatttganaaaatgctacctgtattattgatgcccatgtga

SEQ ID NO: 2698 - DNA, 527 bp, Homo sapiens
  misc_feature 25, 242, 261, 271, 272, 273, 278, 293, 324, 330, 343, 357,387, 404, 406, 415, 431, 459, 460, 461, 462, 479, 480, 481,483, 484, 489, 495, 506, 508, 515, 516, 519: n = A,T,C or G
cactacttagggcgattggagctcnccgcggtggcggccgcccgggcaggtacaatttcttttttctttttttttttttttttttttctttttctttgagactgggtctcgctttgttgcccaggctggagtggagtggcgtgatcttggcttactgcagcctttgcctccccggctcgagcagtcctgcctcagcctccggagtagctgggaccacaggttcatgccaccatggccagccnacttttgcatgttttgtanagatggggtnnnacagngttgcccaggctggncttaaactcctgggctcaggcgatccacctnttttancctcccaaagtgntgggatacaattgngagccaccacgtccagctggaagggtcaanaattttttacatttttngnagcacaatntggatttttcacccancctttccccttctttttcccttttttannnncccaatttttaaatcgnnncnnttttnttttanaaaaaaaaaancnttttttnnccnaaaaaaaa

SEQ ID NO: 2699 - DNA, 365 bp, Homo sapiens
  misc_feature 25, 118, 135, 206, 211, 225, 237, 249, 265, 298: n = A,T,C or G
ctactatagggcgaattggagctcnccgcggtggccggccgcccgggcaggtacttttttttttttttttttttttgttttttttttttttttttttccgaccaatatggtttatttntgccccagccaagcttntttggaccctggctggggggaaaggcaccccaggcaccggcaagttccagtcattgcagatcctccaggtntaggngtgactggaagtancctgggcactgntgctggaccgtnggattctccttccttnttccgccggcgggtggtcaccaggacaccgcanatcaggcatgtgatgagtcccaggagtcctgccaagccgatgaggatgacagcccaaaagggaaggt

SEQ ID NO: 2700 - DNA, 490 bp, Homo sapiens
  misc_feature 145, 431: n = A,T,C or G
acttagggcgattggagctccccgcggtggcggccgaggtacttcagtggatgcaaatgaaattttatcttttgaaagtaagaggaactatggctgggcggggtggctcacacctgtaatctcagcactttgggaggccaaggtngggcggatcacctgaggtcaggagttcaagaccagcctggccaacacagtgaaaccctgcctctactaaaaatacaaaaattagccaggcgtggtggcacgctcctgtaatcccagctacttgggatgctgaagcaggagaatcttttgaacctgggaggcagaggttgcagggagtttgagattgtcgagtatagtggattgagtgctgtggagccgagattgccaagtgcagtggatcgagtccactgcactccagtctgggcaatagagctaaactcagtctnaaaaaaaaaaaaaaaaaaagtacctgcccgggcggccgctctagaactaggtggatccc

SEQ ID NO: 2701 - DNA, 428 bp, Homo sapiens
cactacttagggcgaattggagctccccgcggtggcggccgaggtacctttgctcaccaagctcttgaggccaagcttgatacggctgttgtttttttctacatcgtagccagcagccgcaagcgctttcttaagcgcggccagagaaaacgccgctgcgctccttagaagctgccactgccttggtgataagctcagatactgggggtccggatgctttgcgtttcccagcagttgcgcctgccttcttcgcctttttcttcacaaggtgttttttctgcgggtgcaggaatggtaggagcaagtggagcagtctccgacatgtttttgtcttcccagaaaagacaataagtaatctcaaactgtcagaacagcatgtcccccgcgtacctgcccgggcggccgctctagaactaggtggatccccc

SEQ ID NO: 2702 - DNA, 415 bp, Homo sapiens
ctatagggcgaattggagctccccgcggtggcggccgaggtacgcgggaggaaggggagggcttggtgttccctacgcgaaggtctgactcaatgcttattccctcttcttcctctctctgcagactgaagaattgaaccgggaggtcgctggccacacggagcagctccagatgagcaggtccgaggttactgacctgcggcgcacccttcagggtcttgagattgagctgcggtcacagctgagcatgaaagctgccttggaagacacactggcagaaacggaggcgcgctttggagcccagctggcgcatatccaggcgctgatcagcggtattgaagcccagctgggccgatgtgcgagctgatagtgagcggcagaatcaggagtacctgcccggccgctctagaactag

SEQ ID NO: 2703 - DNA, 337 bp, Homo sapiens
  misc_feature 106, 110, 123, 125, 128, 154: n = A,T,C or G
ccgcggtggcggccgaggtacgcgggtgtgaggaggtggggagaccaccccacccccatgtccaccatgaccctcttcccacgctgacctgtgctccctccccaancatntttcctgttccananagntggagctgaggtgtctccatctatgnctcaacttcatggtgcactgagctgtaacttcttccttccctattaaaattagaacctgagtataaatttactttctcaaattcttgccatgagaggttgatgagttaattaaaggagaagattcctaaaatttgagagacaaaataaatggaacacatcaaaaaaaaattaaaaaaaaagta

SEQ ID NO: 2704 - DNA, 225 bp, Homo sapiens
  misc_feature 2, 107, 135, 167, 171, 180, 197, 200, 205, 214, 216: n = A,T,C or G
tnagggcgaattggagctccccgcggtggcggccgaggtacttttttttttttttttttttttttttctttcttttttttttttttttttttttttttttttttttngcatcaaaaagctttatttccatttggnccaaggcttgttagggatagttaaaaaagctncctnttggctggngggagaggcttaggcanaanccctnttactttgnanggggccctt

SEQ ID NO: 2705 - DNA, 329 bp, Homo sapiens
  misc_feature 81, 87, 125, 127, 139, 148, 154, 157, 223, 275, 291, 309,321: n = A,T,C or G
ccgcggtggcggccgaggtacttttttttttttttttttttttgtttgagacagagtctcactctgtcactgaggctggantgcagnggcgcgatctgggctcactgcaacttccaccccttcgntntaagtgattctnctgcctcancctccnaantagcttggatcacaggcgcccgccaccacacccggctaatttttgtatttttagtagagacatggnttcaccaaatttttaaagaaaaataaaggtgcatgatcaacaatcaaacttntaggaccgtcccctancaggagagcagcagcagnagcagcacacanacctgccc

SEQ ID NO: 2706 - DNA, 295 bp, Homo sapiens
  misc_feature 14, 53, 75, 83, 91, 94, 111, 157, 160, 161, 172, 183, 196,215, 256, 269, 278, 284: n = A,T,C or G
cactacttagggcnattggagctccccgcggtggcggccgaggtactgagctnaccacttctaagaaactccaanaaaggaancatgtgtnttntattctgacttaacttnatttgtcataaggtttggatattaatttcaaggggagttgaaatantgnnagatggagaanagtgaatgagnttctaccactctntactaatctcactatttgnattgagcccaaaataactatgaaaggagaccgaaaatttgngacaaaggattgngaagagctntccatnttcatgatgtt

SEQ ID NO: 2707 - DNA, 367 bp, Homo sapiens
  misc_feature 1: n = A,T,C or G
ncactacttagggcgaattggagctccccgcggtggcggccgaggtacggggagtgggggtgaagcgtgttctctacataggcaacacagccgcctaagtcacaaagtcagtggtcggccgaggtactttggtaaggagatagggaaggaattaaggctattactctgaagaaagttggggggccagggctcctatttttttgctgaggagatggaagatcagggcttgtattcaataagaatgggaggggccaggggatgcctggcaaaagccttgcactgtgaggtgcaggtagaggcttttattctggtgagaggacatggactctctctctcccctcaggtaactgtgccctgtacctgcccg

SEQ ID NO: 2708 - DNA, 339 bp, Homo sapiens
  misc_feature 35, 40, 45, 51, 52, 53, 54, 73, 129, 155, 172, 189, 193,218, 220, 255, 259, 268, 269, 300, 331: n = A,T,C or G
gaattggagctccccgcggtggcggccgaggtctnaattnttttncccttnnnngagacgaccttttttgganatttttttattttttggcaaatttgatcttaccctttaccagttctataatttggntaaaagctgattatgtcctacaatgncaaagtcagctaactgncgtctacttaagacttntggncatttccaacttatagaggaagggngnctctaaaatctcttcttcagaaggcacctcacttntcanacttaaaannccacatcaagtgttccattaaaagaagatanggcattctgagtgcaaacaaatgggggcttnttaaacta

SEQ ID NO: 2709 - DNA, 433 bp, Homo sapiens
  misc_feature 87, 218, 219, 220, 221, 222, 223, 224, 225, 226, 227, 228,229, 230, 231, 232, 233, 234, 235, 236, 237, 238, 239, 240,241, 242, 243, 244, 245, 261, 262, 263, 264, 265, 266, 267,268, 269, 270, 271, 272, 273, 274, 275, 276, 277, 278: n = A,T,C or G
  misc_feature 279, 280, 281, 282, 283, 284, 285, 286, 287, 288, 289, 290,291, 292, 293, 294: n = A,T,C or G
aggtacatgtctcttctcctctgactctgggaatgaagatttttctactcccacaggcttgaactctccttatagggagtggtcttncacatggcccaaaaatcaagaaggaaggtcaagaataaaaacctcccaaggcttgaaaactaagagctggcacgtaagtacctgcccgggcggcccgcttctagaactagtgggatcccccgggctgcagnnnnnnnnnnnnnnnnnnnnnnnnnnnncgtcgacctcgagggnnnnnnnnnnnnnnnnnnnnnnnnnnnnnnnnnnagtgaggggttaattggcgccgctttggcgtaattcatgggtcattagctgtttttcctgtgtggaaattgttattccgcttcacaattccaccaccaacataccgagcccggggagcattaaagtgtaaaagcctggg

SEQ ID NO: 2710 - DNA, 499 bp, Homo sapiens
  misc_feature 29, 83, 95, 284, 296, 300, 315, 327, 347, 352, 353, 359,372, 374, 380, 386, 396, 400, 411, 424, 434, 435, 436, 437,439, 447, 454, 455, 459, 460, 462, 471, 482: n = A,T,C or G
ccgcggtggcggccgaggtacacgagaanaggagaccccaacacgcttcaagctttgagtggagaggacacagcctctgctgngacagggaacanagggatgcggagaccctgaagatgcttttggacagtggtctgaggttgggacagtggcaggagataccattcacccaggatctccaggacaagagatcagcctggcagttacatgtgttttttttcaaactggttgccaggttggcatgagcgatgacatcaggagattccgaccttttcttattggangggaccggactntgtnggacctggggagttnagttggacaaanaagaaccttttaaaaggggntttcnnttttgntttttcccccccncnaaattntaaaanaccttttttntttnccccaaggggnccaaaaaaacccngccccccccnnnntnttttttgnggggganngggnnantttttgganaaaaatttttntcccccccccccccccc

SEQ ID NO: 2711 - DNA, 416 bp, Homo sapiens
  misc_feature 51, 97, 111, 124, 127, 132, 143, 336, 381: n = A,T,C or G
ccgggcaggtaccttattacatatgatttttattagtttctggaggcaaanggaatttttattttaaaatcaaaatctattttaaaagaaatagttntcaaaaagacaacngatgactgggtgnggnggtgngtgcctgtagntcaggctgctcgggagacagaggcaggagaaccacttgaggccagttcagtctagcctgggtaacatagcaggaccctgtccctaaaataataaaaaaatttaaaaaccacaataaatgtgagttacaaaaaaagtgtaacttatgaaaaggtccgtaattttattattggaccctttgttaaggagctcaantaattttcagggaagcaagggaggtatcacccatttcttgagttnaataccaaattttcaaacctaaatcttttaatttt

SEQ ID NO: 2712 - DNA, 119 bp, Homo sapiens
ccgggcaggtaccccctgacactccagagctactgagaaatactcctttgtctttctgcacttgtagccaggctgagctttgtgaaagaagattgtgtatgtgtgtactttcttttttt

SEQ ID NO: 2713 - DNA, 555 bp, Homo sapiens
  misc_feature 35, 43, 62, 226, 227, 231, 232, 235, 237, 245, 259, 297,303, 333, 334, 335, 340, 344, 383, 386, 398, 399, 407, 414,420, 430, 437, 438, 439, 440, 441, 442, 443, 444, 445, 446,447, 459, 483, 484, 491, 492, 494, 495, 496, 497, 498: n = A,T,C or G
  misc_feature 505, 508, 509, 510, 512, 513, 514, 528, 540, 541, 542, 555: n = A,T,C or G
ccgggcaggtgcgcgggtgggtgacgctggtgaantggcccanggaagtgcacatgtctctncctgctcttccagggtgatttttttgatgtttggctcttggtccttgtttccactggctttccatccccatggggcagaaacagtggctcctgggagcagaaaaggaattgaggtgggcaggcagaagagcctggattgctcactgttttgggaaacttacttnnaganntananaagatccnggaaaacccaaaanccttcttgaccaaaccattttttggggtttttttttgngggccnaaaaattttttttttttaaaaaaaaaaagnnngttgngganaaaaaccccgggggggggggggggtttcttttttttttngtnggggggggcccnnaaaaaaanggggttnaaaacncccttttttnccccccnnnnnnnnnnntttttttttttnaaaaaaaaaaaaaatttttccccnncaaaaannannnnnttttttnttnnncnnntttttttttttttngggggggggggnnnaaaaaaaaaaatn

SEQ ID NO: 2714 - DNA, 519 bp, Homo sapiens
  misc_feature 3, 13, 109, 116, 133, 164, 174, 181, 186, 221, 225, 226,227, 231, 234, 278, 291, 292, 300, 322, 323, 325, 334, 355,387, 388, 393, 396, 397, 418, 420, 422, 423, 457, 472, 473,484, 485, 494, 508, 510, 517: n = A,T,C or G
ccnggcaggtacncgggggcgcgtgagcagctgcagcggcagaggcagcatccagcggcggcgccagcagttccagtccgttgctttacttttttgcttcacccgacanttagtcntttaatgccccgaaagnaggaaaaggtccttcccaggaggaaataacnagtagggggncaaaaangaatngggattccccaaaaaagggtaaaaccttaaaaaancaannngaangcncccaccaaagggaacgggttcttgccccaaggaatttgttcagncgaaaaacccttnncttttccnaccccaaaaaaaaccccttgtnnanccccccaanaaaccccaaaagggaaaaaanaacatttttgcttttaggaaaagggaaccctnntgttnggnnaaccccaaaaattttatttcntngnnggggtttggccctttaaaaaaggggggaaaaagnaaaaaggggaggggnnaaaaaaaaagnnccaaggggnaaaaaggccttttngnaaaaaangg

SEQ ID NO: 2715 - DNA, 610 bp, Homo sapiens
  misc_feature 116, 161, 177, 189, 206, 208, 212, 241, 245, 288, 303, 314,361, 419, 429, 433, 476, 478, 521, 540, 541, 564, 567, 595: n = A,T,C or G
cagtaaatgaactaatctacaagcgtggttatggcaaaatcaataagaagcgaattgctttgacagataacgctttgattgctcgatctcttggtaaaataccggcaatccctccngcattgggagggaattttggattttccaatggaggaattcctaantaacctggttttgggnaaaaaaaaccgncctttttcaaaaaaggnangggnccaaaaaattaaaaccttttttccccttnggtngggggccccccctttttccaaaaaaatttttgggttccttttnctttccccaacccgnaaagggggttngggggaaaaattgggaaaagggaaaaaaaaaaaaagggaacccccanaccccccccaaattttttttttttgggtttaaaaggaaaaaaaggggggtttgggggngaaaggaaanttgncccttggggccaaaccaaggggggggaggggggaacccccaangngaattccaaaaacccaaaggggggccctttttaaatttttaanggaaaaaagggaaaaattnnggaaaaacctttaaaaagggggnggnggttcctttaaccccccattgggaaaanttaaatttttttttt

SEQ ID NO: 2716 - DNA, 616 bp, Homo sapiens
  misc_feature 109, 112, 165, 172, 182, 204, 210, 220, 226, 228, 246, 359,388, 421, 436, 447, 461, 496, 502, 503, 533, 541, 549, 564,572: n = A,T,C or G
actttttttttttttttttttgtcagaaaaactcctttattaccatctccctattacatttctattctagggttagtgttaatctcagggtcttatttctttaagcacngcnaaaaagggcctttggtaggaaagttaggtggtaaaggtttttcaatcctttcnatttttntaatccaaanggggaattggaaaaaattccanaaaggnccataggggnaggccntngttgggaccttaggggancaaattaaccaggtttagggtccttaggggggcaataaaacttttccccaaaacccaaccatttttaagggggggaaaaaaaggccccccaagtttttggggaaaacccaccnaggaggcctaattaggttttggggccttncaaaaccccccttttaattttccaaattggaanccaaatttccgggtnggtttttttcnaaccaaattccaantttttccaaaaaaaaaggttttttttttttgggtngggggnnaaaaaggtttcctttcctttggttaaaggnttgggaancccccaancccccttgggaattnaacccttnggcccccttggggggggggaagggttttttaatttttttttccc

SEQ ID NO: 2717 - DNA, 499 bp, Homo sapiens
  misc_feature 58, 120, 131, 132, 139, 143, 151, 154, 156, 157, 159, 165,177, 178, 185, 188, 219, 221, 270, 279, 291, 302, 319, 322,323, 327, 329, 374, 377, 380, 393, 395, 398, 399, 407, 413,419, 426, 440, 449, 477, 485: n = A,T,C or G
aggtacttttttttttttctttttttttttttggtgggggtgtataggtctggggagngcctttcaggtgctgctccatagacatgtgtgtgccctgtatagaaaccgccccccattgtntagaaaaaacnnccagacncttntcccaaanagncnngnttcttnacccatgtaaannggaaggntgngcgtaattaggaaaaccaagggctcaaccananagggccaaaccaatttaattaaaaattccggttcttgaagaccctttgnccaaaatgnattaccttgtcncccaattttanaggggaaggcccctatntanntttntntctctttgtctggtgggccccccccaactttcaaggtttgccttnggnctncttaccttaaaantnagnnaaaccaanggcggnccaatnaaaaaanggccaaaagggggnctttggttnaaaaaaattaaaaaaaaaaggtttttantttttaanccaattaaaaatta

SEQ ID NO: 2718 - DNA, 642 bp, Homo sapiens
  misc_feature 23, 97, 99, 133, 137, 141, 142, 145, 148, 154, 165, 171,189, 192, 194, 201, 208, 241, 246, 248, 252, 258, 283, 286,311, 344, 350, 352, 356, 363, 366, 370, 373, 377, 392, 393,398, 412, 413, 417, 430, 433, 444, 458, 466, 471, 495: n = A,T,C or G
  misc_feature 499, 502, 503, 525, 527, 530, 550, 554, 575, 582, 587, 608,611: n = A,T,C or G
tcgcggtggcggccgaggtacanagtcttttgcttcctcccacccctagggggaaaaactgctttgtgctttgggaagttgtctctgaaacccggtngnacagattgtaccgtcattgtaccaggaccttacngcancggnnaangcnccgggngcagggcattngggggnccttggccaagtcattgnttngngaaatgnggaaggnggggatcttttaccaaggaaaggggtatggaangttangnaggnttcccnggtgtaaagaaaaggtcccaatgtnatnaggaccccccttgggaagttaaaangtccccccatggtaagcggtcccaagagggttnttgtantntaangggaagnggngatntgngggnaaaaaaagggattgnnaagancccaaatttaccgnngganatccctttggggnggngcccctttggngtggaaagagcccncccgattntaaanccaaacccgtgccttactttcccnttcnccnnaattggtttttaaaaaaattangnacncaaccccccttttttttaangggnaaaaaaaaaaaaaattttttncaaaccnaaaangggttttccccccccccaaanttncccaaaccaaaaaaaaaaaaaaaaaaaaatg

SEQ ID NO: 2719 - DNA, 376 bp, Homo sapiens
gccgaggtacaaacgggtttcccaccttgccagggatcctggggacaacagatgtaaaactcctgagtctctgtgtgtgtgcctgagtggccagtctgccagaactccacacagctctgtgtattgaacccaaggccttggtggcctgggctcatgagcaggtctcctgatccatggattgcagagatccatgggagaagcatgatttcccaggcagggtcgcacattcactcattgcttcccttggctggggattggggttcctttggctctgtgccactcctgggtgggccattgcctcacccttctttcctcagttcttcgtgggttgtttgcctagtcagtcacaatgtgagaacctggcgatttcagttaa

SEQ ID NO: 2720 - DNA, 373 bp, Homo sapiens
  misc_feature 77, 84, 115, 117, 190, 208, 283, 317: n = A,T,C or G
aggtacactcgccagcggttttgccacaggagtgtacgggaacaaaggagacaggctcatttataatctgacgcggncaccctnctgctgcgttcggtttccattggctgggacngnacctcaccttctgtatttgtcccgactggctagcacttagaactttttaaaagaggcaaaggcatacagagancaaaggaaggaggaagtnacttgtggaatattgagaaaggtaaaaacacctttaaataaggaagaggaacaggctatgacctaatgcttgttnggatcagtataagcatgttagggcaaatatttangctaaattgtgggagctaagaacataaagtatattgattttttattatggctagca

SEQ ID NO: 2721 - DNA, 377 bp, Homo sapiens
  misc_feature 29, 188, 189, 190: n = A,T,C or G
aggtacaatttaatttttctgcttgcccnggaaacaaagcttctgtggaaccatggaagaagatgaaaatgagactggcaaagaacaaatgctgaatctgaagaagaggacaactttgggcaaataatctgcatacttttaattgggaataagatggaaaatatgaatgctaaatcaaattttttaannnatacaccacacgatacgactccccgcgtacatctttgctgtggctcacagattgttcctcccattccccttgccgctttttgcctatcgatgggtagcaagagtctttgaaataagcccatttgagccctggataacaagggataaagtggagcggatgcacatcacagacatgaaattgcctcacc

SEQ ID NO: 2722 - DNA, 327 bp, Homo sapiens
  misc_feature 100, 104, 124, 131, 132, 137, 138, 139, 142, 144, 145, 146,149, 156, 157, 167, 168, 169, 170, 176, 177, 179, 181, 187,188, 196, 198, 199, 208, 209, 212, 213, 214, 221, 222, 224,235, 236, 243, 249, 257, 259, 267, 268, 272, 274, 279: n = A,T,C or G
  misc_feature 280, 281, 282, 283, 284, 286, 288, 289, 295, 298, 300, 305: n = A,T,C or G
ccgggcaggtactttttttttttttttttctttttttttttttttttttttttttttttttttttttttttttttttttttttttttttttttttttttntttntttttttttttttggggggnaaaaaannttttnnnaanannnganaaaaaanngggggaaccnnnngggggnncncncccccnnaaaaaaangnnccccccccnnaannnaaaaaannanttttcaaaaannaaaaaangggaanttttttancnaaaaaaanntttntntaaannnnnntntnngggggnggngnttttnaaaaaaaaaaaaaaaaaaaaaa

SEQ ID NO: 2723 - DNA, 315 bp, Homo sapiens
  misc_feature 6: n = A,T,C or G
gagaangacaccatgtgcctcagaaactgctcggtcagacggtgatagcgagccacgcattcacagggccactgctgctcacagaagcagtgaggatgatgccaggatgatgtctgcctcgcgcctggctgggactctgatcccagccatggccttcctctcctgcgtgagaccagaaagctgggagccctgcgtggaggtatgtggctggagtcagctcctctgaactttccctcacttctgcccagaacttctcactgtgtgccctggtttgtttatttttgcaaaaaaaaaaaaaaaaaaagtacctgcccg

SEQ ID NO: 2724 - DNA, 507 bp, Homo sapiens
ctatagggcgaattggagctccccgcggtggcggccgcccgggcaggtactttccaatgaatggtaactgatccaggcacgttatcacacttcctagtcatctccacctttcctgtattgcctgtggcttgttgtttaagattaagaatcaaagagattaagaagtatcacttcaagtcttgctctgctcacttctatgtttgcagtcaaattattccttatgttggtgacctaaagagaattactttcattcatttcatttcccccgtagcagatggaagtgagaaacctctgagaaaatgaaaacatccttaaccactatctttcccttttatttgattattttatgtcagaaatttgcaaaagtttttttctcctccttctcttccttgttgcttaactttttaattcatgccatatgcagatatccaattatgtgcatcctgtgaataaaccacgtcttggtcactgtcatattttgaaccatctcatcagagatgaataata

SEQ ID NO: 2725 - DNA, 477 bp, Homo sapiens
  misc_feature 390, 392, 412, 420, 421, 426, 436, 440, 443, 444, 445: n = A,T,C or G
ccgcggtggcggccgaggtacgtattactgtttcccattatatgttacaaatgaaatgaacacattctcataagttaaaaaaatatagaatatatatttttctttttccttttctttttttttttctgagacagagtctcgttctgtcacccaggctggaggctaaggtgggaggatcacttgaggccaggagtttgagatcagcctgagcaacatagtgagacccccatctctaaaaaaaaaataagaaataaaaatcagcgacgaggcatagcggctcatgcctgtaatcccagcactttgggaggccaaggcaggcaggtcgcttgaggtcaggagtttaagaccagtctggccaaatgggggaaaccccttttttctttaaaaaantnccttttttttcccccccatngggggaannccccntttttccccncccnccnnngggggggggggggggggaaccccccccccccc

SEQ ID NO: 2726 - DNA, 474 bp, Homo sapiens
  misc_feature 100, 352, 472: n = A,T,C or G
ccgcggtggcggccgcccgggcaggtactttttttttttttttttttttttccaaaacaaaacatgcttagcatgcacacttttaccacttttttcgagnggaaagtttattggcaatattaaatttcaccctagataggatatgagaatgttttgataaatcacaatttatagtatattaatgccatgtgagaattttgtttcccaagtaagagctcacatggaacttggtcattaaaccttaaagaaacctttctcacatatctataggcctcaaattgaaataatctataaatgaatttgtagatttctttttagtttaattcctgagtatacagggcaaaagcttatntcctttatataaacttctgctttggtctaaaactgatatatcttcacgttgaggtttcatctgaaatgcaccacgtttgctgacttgcttcaatatgaatttgtatggctataaaattgngc

SEQ ID NO: 2727 - DNA, 353 bp, Homo sapiens
  misc_feature 137, 223, 258, 280, 294, 310, 324: n = A,T,C or G
ccgcggtggcggccgaggtactttttttttttttttttttttttttcgggactttagatagctggattattcttcttttctctttttgtctttcatgtagttattaatgagatggatataaaaccaactactaggtncatatccccaaaaaatgaagtcaatatgttgaagagatatctgaactctcatgattattgcaagactattcacaatagccaagatngggaatcaacctaagtatccatcaacagatgaggngataaagataatgtagcatatntatacaacagaatntattcagccttaacancaacaaaataaatnttgtcatttaagacaacacagataaacct

SEQ ID NO: 2728 - DNA, 351 bp, Homo sapiens
  misc_feature 80, 323: n = A,T,C or G
gcgattggagctccccgcggtggcggccgaggtacacaactccactaacctgggaaccttgcccccatcccccatagcanccacagcgagacctgcccaaggagagtctgagctcagacatgcctagccctgccccaacttgatgggccttcctatctaccctggtagctgaaggcaaaggacatatacccttgggagttctagggccccgcccatcgccagttcctctccatactaccacagctgatgctctctgggaagtgccacctcccagcagcaggccaatcagcacaaaaatagaacattaaaccaccaaagctaanaaccctcagagaatccatttacccccct

SEQ ID NO: 2729 - DNA, 491 bp, Homo sapiens
  misc_feature 381, 457, 468: n = A,T,C or G
ccgcggtggcggccgaggtacttttttttttttttttttccctgtatttttctttttcccgagatgaagtcatgctctgttgctcaggctggagtgcagtagtgtgatctcggctcactgcaacctccgcttcccaggttcaagcgattatcctgcctcagcctcccaagtagctgtgattacaggcatgcatcaccatgtctggctagtttttgtatttttagtagagacagagcttcaccatgtttgccaggctggtctcaaacccctgacttcaggtgatccacctgcctcagcctcctagagtgctgggattacaggaatgagcgaccacacctggtttgtttcttaaaaaacatcttatatttctctgcttaacgngctcaatgttgaacatgtgaaatataataacttttcataatctcttctgattctggctctatatcatctttggggnctggttttaanggaattctaattttcttggcaat

SEQ ID NO: 2730 - DNA, 590 bp, Homo sapiens
  misc_feature 26, 59, 130, 133, 146, 147, 155, 170, 175, 189, 194, 197,202, 240, 254, 259, 273, 282, 285, 290, 293, 302, 311, 312,315, 327, 329, 341, 342, 345, 355, 363, 374, 383, 386, 391,394, 402, 405, 414, 418, 427, 429, 435, 440, 442, 448: n = A,T,C or G
  misc_feature 449, 453, 459, 461, 468, 469, 472, 474, 476, 482, 491, 493,495, 502, 503, 504, 509, 510, 516, 517, 521, 532, 543, 545,548, 549, 552, 554, 555, 556, 573, 575, 577, 578: n = A,T,C or G
ctatagggcgaattggagctccccgnggtggcggccgaggtacacgagtcttttgcttnctcccacccctagggggaaaaactgctttgtgctttgggaagttgtctgtgaaacccggggacagaggacncangacagactaggannggagccgngaggatgggctgcanctgtngaggagggtttcanagganagnggtcngatagcaccaggcctgagaagccatagcctaggtgganagaggtttgaaagngacanagcgggctgattanctgccgtanacnctttnatnccatgttanataaacatnnttnaaaaacccttcntnttgttcccaatnntanaaaaattaancccgggcnatgggggggcntgccccctngtnattcnctnttttaatnaanagaaagggnttgnccccgggtnanttttanttttntnactttnngggnggtttntnttttatnnttntnanaaaaanaattggggngntnttcaaannnatttnnttgttnnaatntttttatattnttttttttttnanctnnccntnnnaacaaaatttttttttntntnncatataaaaaaa

SEQ ID NO: 2731 - DNA, 249 bp, Homo sapiens
  misc_feature 8, 94, 99, 105, 160, 179, 188, 223, 246: n = A,T,C or G
ggagctcnccgcggtggcggccgcccgggcaggtactagttattttaaattccactcataacttatcggccaaaagtagtcacatgggtccacntaatnacaagnggagcgggaagtgcaatcctaccttgcctggggaaggtatagagatagaccagcnctaatgactaccacacttngctaaggtnacataataaataagcatcaggacattatgtgtggnggctcatgtctataatcccagcnctt

SEQ ID NO: 2732 - DNA, 194 bp, Homo sapiens
  misc_feature 11, 16, 40, 43, 49, 96: n = A,T,C or G
ctatagggcgnattgnagctccccgcggtggcggccgtgngcncggagntggtattgacatagcctttgtagaaacagtgcttgagttccgcttcntcttcggaataaaacttggtctgattcaccccgggcgtcccgaggagggtgacagtgaacagtggagcgataaatccggcattggcggtgagattaaa

SEQ ID NO: 2733 - DNA, 614 bp, Homo sapiens
  misc_feature 12, 16, 18, 20, 23, 43, 45, 64, 65, 66, 75, 110, 188, 203,291, 323, 328, 331, 336, 372, 373, 374, 375, 377, 379, 391,392, 397, 404, 409, 412, 426, 430, 431, 440, 442, 448, 459,460, 461, 467, 488, 494, 495, 498, 499, 500, 526, 529: n = A,T,C or G
  misc_feature 538, 548, 551, 555, 560, 564, 566, 567, 568, 572, 575, 576,577, 578, 580, 581, 582, 585, 600: n = A,T,C or G
aggcgggcggcngccncncnccnggtacctgataaaaatttantnctccttggccaggcatggnnnctcacaccngtaatcccagcactttgggaggccaaggccagcangttgcttgagctcaggagtttgagaccagcctgagcaatatggcgaaaccccatctctacaaaatatacaaacattanccaggtgtggtggcnaacgctttcagtccgagctactgatgaggctgaagtgggaggatggcttgagcctgggaagtggaggtttcagttgagcttgagtttnatgccattgaactccagccttgggcgacgggnagacnctnttttnaaagaatttggaaaaaaaaaaagggaaaaaaaaaannnnangncccttgggccgnnatttnaaaaaanatgcnccnccccccccgggggntttnngaaattttnanttttanaagttttttcnnncccccnggggggggggggggggggggngccccnnaannncttttttttttttatttaaggggganggnccccccccnaaaaaaaaanatntttnttttntttntnnncccnttnnnnannntanaaaaaaaaaaaaagngggggggggggggg

SEQ ID NO: 2734 - DNA, 451 bp, Homo sapiens
  misc_feature 80, 268: n = A,T,C or G
ccgcggtggcggccgaggtacttttttttttttttttttttttttatgagatggagtctcgctctgttgcccaggctggngtgcagtggtgtgatctcagctcactgcaagctccacctcctgggttcacgccattctcctgcctcagcttcccaagtagctgggactacaggcacctgccaccacacccggctaattttggttttgtatttttagtagagacagggtttcactgtgttagccaggatggtctcgatctcccgacctngtgatccgcccgcctcagcctcccaaagtgctgggattacaagtatgagccactgagcccggcctctctgtagcttttaagatgttcttaggtgacttatgagaatgaaaaaatggagaattttccgtcttcctgccatgaaatcaattaatggcaattgctactgaaagctgttctgttttt

SEQ ID NO: 2735 - DNA, 400 bp, Homo sapiens
  misc_feature 99: n = A,T,C or G
atagggcgaattggagctccccgcggtggcggccgaggtactttttttttttttttttggggggttgctattattgttattgtttctagatgaatgtgngaagccaaattattcagtgtcttaaagaccatattaaaaactcctgccaggcgcagcagcacgtgcccatgatcccaactacttgggaggctgaggcagaaggatcgcctgagtccagaaatgctgggctatagtgcactaagtcaattgggtatctgcactaagttcggcataaacgtgagggaccacaaggttgcctaaggagaggtgaaccagaccagcctggaaacagagcaagtcaaaactcctgtcctgatgaagtagtgggactgcacctgtgcataaccactgtacctgcccg

SEQ ID NO: 2736 - DNA, 159 bp, Homo sapiens
  misc_feature 137: n = A,T,C or G
ggcgaattggagctccccgcggtggcggccgaggtacgcggggacagacgagatctcgatcgaaggcgagatggcggacgtgctagatcttcacgaggctgggggcgaagatttcgccatggatgaggatggggacnagagcattcacaaactgaaaga

SEQ ID NO: 2737 - DNA, 520 bp, Homo sapiens
  misc_feature 492, 511: n = A,T,C or G
atagggcgaattggagctccccgcggtggcggccgaggtactattaaaaaaacagtttatgtgcaaggtgtataagaaaagtaaaacatacctttggtaaaaagattataaaggggcataagaatgtggatttttacctacattaaagggttaaaaacaattattgttttaaaagtttaagcaagttttaaaacgttaattataaagaaaattctgtgtgtaaacatattagctaaagttaaaaaggtatcatccagtttttctgtgaactggacattaaagtaaaaaatgccacaggtttttcttaaagcatcaacctgctctttaacaaaaattataaaaggttaaaaagagtctataaaatcttaccttatggtcaaacatgaaaaattggataaatatgtctcaagggtttattaaaatttcagtttaaaattaataacacactaatataaaggtaaaatttagcttatctggtataaaaatcatacnagaaacattattaaatatnaaatggggt

SEQ ID NO: 2738 - DNA, 554 bp, Homo sapiens
  misc_feature 77, 102, 110, 247, 315, 342, 352, 363, 376, 391, 421, 435,450, 484, 496, 501, 509, 512, 515, 517, 519, 526, 535: n = A,T,C or G
tctagggcgaattggagctccccgcggtggcggccgaggtactttttttttttttttttttttttttttgagacagnctccctctgtcacctaggctggagngcagtggnacgatcttgggtcactgaaacctccgcctactgggttcaagcaggtctcctgcctcagcctccccagtcgctgggattacaggcacatgccaccacacctggctaatttttgtatttttagtagagacgggggtctnaccatgttggccaggctggtcttgaactcctgaccttagctgatccacctgccctgggctcccaaagngctggaattacaggcgtgaaccactgnacccagcccnttgacctgttntttattattttgnggttaatgccaaatntaaaataatgtttatgtataaagccccatntcacaggggggaantttttttaaaacaanaattcctttttttttaaggaaaaaaaggtttgtntttttgttgcanccttntttattcnaanggntnanctttcanaaaaatgantaataattcctttttttcc

SEQ ID NO: 2739 - DNA, 474 bp, Homo sapiens
  misc_feature 2, 101, 270, 326, 366: n = A,T,C or G
tntagggcgaattggagctccccgcggtggcggccgaggtactacgaagccatcttggctctgtggaaccagctctacatcaacatgaagagcctggtgtnctggcactactgcatgattgacatagagaagatcagggccatgacaatcgccaaggtatgtcctcagggccacttaggctgcctggagggagggcagcgctgccccccgcagtgcctgtgtccaacagttcaaccttcttgctgtgtagcagtgcttttgtgtctcgtnaagcaagtcagctcacccctccttagaggttctggtctgtccaatagagaacgggngggattagcatatggctgattatgagagaaagaagcaatnctaatttagggtggcctgacaagcaagccagaattgcctgtggaaaagttattgcactcctgtaagaattctggaccctattgctcctttgatgtaatggaaagttag

SEQ ID NO: 2740 - DNA, 279 bp, Homo sapiens
  misc_feature 2, 204, 206, 218, 223: n = A,T,C or G
tntagggcgaattggagctccccgcggtggcggccgcccgggcaggtacgcgggaagtgaactgagggccaccctgggaggaagccgactaggcgaattcacttactgaccggcctgggctgctctgagacatggaggaagccagtgaaggtggaggaaatgatcgtgtgcggaacctgcaaagtgggggtggggggagttaanantattatccccanattgnggggcgggatcctgccccggggggaaaactttggaacatctccgcaataagacaga

SEQ ID NO: 2741 - DNA, 345 bp, Homo sapiens
  misc_feature 6: n = A,T,C or G
gggcanggtacccacttggatgactggggagaagggctgggctgctgctggggagtaacacaggccttggggcagggttcaggagttcattagtctggagtccagatcgccacccagggcccagcctgatgtagtgttcgcgttctctcagcgctgcagttttccgataaaggagaggactcctgtgtgccagagctctgaatgggagcctcttctcagtccagccaggcagagggtgaggctgccaccttatggccactgggggaattggctctgggcttggactccaataaggggccgggagctgcagagacctccaaaaggtctcttaactagtcctccaaa

SEQ ID NO: 2742 - DNA, 467 bp, Homo sapiens
  misc_feature 283, 310, 323, 341, 371, 374, 380, 394, 410, 416, 419, 433,436, 444, 445, 452, 453, 456, 457: n = A,T,C or G
ccgcggtggcggccgaggtactgccatacctggctaatttattttttgtggagatgggatctcactttgttgtccaatctgttctcaaactcttggcttcaagtgagcctcctgcctctgcctcccaaaatattggaattattggcatgagtcaccatgccagatcaagaaaatatttatgtataattttatcatacctcattggtcctaatgtttttttgcttgtttaggtcccttctagagataggagaagagagagatccctttctcggggagagaaatncaagccgtcccgatcctcttagggctnggaggtaaaatcntttgataactttgtattnaaaactttgcatccatagtatgctaaggcnttnttttancccaaaaaattttnccttaaaagttttttngaattngcncaaaaagggccccnaanacccaagnnaaagggnnggnncttttttttt

SEQ ID NO: 2743 - DNA, 445 bp, Homo sapiens
  misc_feature 131, 134, 135, 136, 137, 149, 150, 152, 153, 154, 168, 170,179, 181, 182, 185, 188, 189, 191, 192, 193, 196, 199, 201,204, 205, 213, 214, 217, 218, 219, 224, 225, 243, 244, 245,246, 247, 248, 250, 251, 252, 260, 262, 264, 267, 268: n = A,T,C or G
  misc_feature 269, 285, 287, 288, 290, 294, 295, 296, 297, 309, 313, 314,317, 318, 330, 331, 334, 335, 339, 343, 346, 349, 351, 353,360, 363, 365, 366, 372, 375, 378, 380, 381, 389, 393, 400,408, 410, 415, 416, 428: n = A,T,C or G
ccgggcaggtactttttttttttttttttttttcttttttttttttttttttttttttttttttttttttttttttttttttttttttttttttttttttttttttttttttttttttttttttttccccnggnnnnaaaaattttaanngnnnggaaaaaaaaaaancnggggaaaangnnccnttnntnnnaanccntnaannaaaaaaannccnnnaaaannaaaaaaaaaccccaaaannnnnntnnnaaaaaaancntnggnnnaaaaaaaaaggggggngnnantttnnnnccccaaaaaaanggtnnggnngggaaaaaattnnttnncaanccanaanttnantncaaaaanccntnnttcccntgnccntnnaaaaaaangggnacccccnggggggananaatannaaaaaaatttantttaaccccccccccaa

SEQ ID NO: 2744 - DNA, 455 bp, Homo sapiens
  misc_feature 218, 271, 417: n = A,T,C or G
gggcgattggagctccccgcggtggcggccgaggtactttttttttttttttgagacggagtcttgctctgtcgcccaggctggagtgcagtggtgcgatctcggcccactgcaagcttcgcctcctgggttcacaccattctcctgcctcagcctactgagtagctgagactacaggcacccgccaccacgcccggctaattttttgtatttttagnagagagggcgtttcactgtgttagccaggatcgtcttgatctcctgacctcgngatctgctcgcctcggcctcccaaagtgctgggcttacaggcgtgagccaccacacccggcccagtcttgtgtcttaaataccatttccacattgacacctccagaatatttatctctaaacctgacctccagaaggtgcaagcanattgtgtaaaccatgtctccactacacgcctaaaggca

SEQ ID NO: 2745 - DNA, 264 bp, Homo sapiens
  misc_feature 211, 249: n = A,T,C or G
ccgggaggtgtccgaacaggcaggttggtgggttaaaggtcttaatcttgactcgagatctctccccggagttcacagagtaggcgacgaagccgaagcagctggagcgcgacccggaggagtctgacttctcgttgtcttcataattttcattcgttgctttcttcatggacttgcggctgggggaggatccccgctggtcgccgagcangcgggcgggtaaaggtaggccgcgagagccaggttatngagaggagaggaggc

SEQ ID NO: 2746 - DNA, 357 bp, Homo sapiens
  misc_feature 135: n = A,T,C or G
aggtacctgtgactaacaaggggtctgggaggatctgctgctcccatgccctcctttgtgtgttttaaatctgtttgagccttctgggctcctgcgaattagggagtggcagctcctcagtctaactcctattgngaccaggttgcctaattggccctttggtttgggcacccactgtccttctgcgtggttggatagatgctgctcccaatgtccctgatctcttacagacccctctgattcttcactcttggctttgagagcccctgatgccctgcagtcttgactgagcttctaatggttgatcagacccttgaatgttgagctctttccatactagacttgaatattctcctg

SEQ ID NO: 2747 - DNA, 483 bp, Homo sapiens
  misc_feature 17, 24, 181, 234, 270, 274, 283, 285, 286, 292, 296, 308,314, 327, 329, 348, 352, 359, 361, 365, 383, 387, 393, 397,408, 414, 420, 422, 424, 426, 427, 428, 431, 432, 434, 445,446, 451, 458, 476: n = A,T,C or G
ggcggccgcccgggcanggtacangacattttcaaagttgccagtgttactttaattggactgccttcgtaattcattgcctctgcttcaacaatgtgcaactcatcctttgcaccagcccctaaactgaccgttcttaaagatagctggtgctcattttcatcattatccaccttaaagngataatctttgtcggcctttagttcacaaccgaaaagatagttctggggcctnagggggctcatgtccatgtccatcgaatcttccatngggnggcggcacncnntttttntagnaaagaaggcggncggaanataaaaaaaactntnctccaaaaaaacacccggngcanggagggnantcanaccaggggcccccgtttncctnggatcntttnataaaaaaatngggggncccccncngngnnnggnngnaaattctaatnntaaantttttancccccccccccccccctnggggggg

SEQ ID NO: 2748 - DNA, 327 bp, Homo sapiens
  misc_feature 256, 267, 272, 280, 284, 288, 300, 306, 314, 316: n = A,T,C or G
ccgggcaggacttgggaagctgaggcataagaatcacttgaacccgggaggtggaggttgcagagtgagccaagatcgcagcactgcactctagtctgggtgacagagcaagactctgtctcaaaaaaaaaaagactagagaatgtcagggaacacatgtgtatatttaaacaacttcactttgcatttaaaaactcgaaggacagcgaaggtgaaatcaattcacgggccacctaaacttttcagtctaggactnagagcttgtanccatngatctgtngggnttgnacctcgggccgnttctanaactagtngnatcccccggct

SEQ ID NO: 2749 - DNA, 394 bp, Homo sapiens
  misc_feature 245, 252, 267, 273, 281, 283, 291, 294, 315, 335, 347, 361,365, 371: n = A,T,C or G
ccgggcaggtacaacatgagacatgacgcccttcgggacacatgcctgaggtagtgacaatccaactttggaagagtggaagccctagtttcaaattcaagcatgctttgagtataaattaagtttacctctttttgcacagcaacatggccaatctttcctaagctgctcagcttacaagaaaaggaatcatactgctaagaattcaaacttcagcagtcataggtaaagtaagggaagttttntaaaccntatttttagcccccntacccngaaccctngnaaattttngcnagggtttttttcaatttttcnagggacaggttggggtttcnctttaaatccanagggcctttggaanaccntggaanaaaccagacccttttaaaaaagg

SEQ ID NO: 2750 - DNA, 273 bp, Homo sapiens
ccgcggtggcggggtttcgccatgttggccagtctggtcttgaactcctgacctcaagtgatccacccaccttagcctcccacagtgctgggattacaggcatgagtcaccacacccggccagtagaactctttaaacctgaaaaatcagtcaactttgcagactagaggaggatgttgaacacctatgtgtgtattttttttctttaccaactatgcacctatttttcagacacctaaaagtaatgtctgtgaaacagtgggttttcttttt

SEQ ID NO: 2751 - DNA, 159 bp, Homo sapiens
  misc_feature 24, 32, 91: n = A,T,C or G
ccgggcgaattggagctccccccngtggcggncgcccgggcaggtacaatgcttataaaattcaataatttgtattaaaatacaaaatccnataacaaccaggagttcttcggaagaaaaaaaaaatcacaaaacaaccccaacagtggtgaagaacta

SEQ ID NO: 2752 - DNA, 396 bp, Homo sapiens
  misc_feature 98, 305, 328, 390: n = A,T,C or G
tagggcgaattggagctccccgcggtggcggccaaaagctcccagattatttggaaaccatgttttcttcctagtccatggtaacaagaaaaagccantggaagcatcattccaaacaataatctccaaagatggtggcaaccaagtgtcaaatggggactgcaggcacagaagagaccaccccaaaccctgcctgggtggacgaagcaggtatgctagaatagtcctgtcctgcagaatagggaacggcagcttggtcgatctgtgccctggaaaaagaaaatgagttgcaatagaagtgactntaagacagacaatgaacctactnttaagagagacagggccaggcacggtggctcacgcctgtatcccagcactttgggaggcttnaggcgg

SEQ ID NO: 2753 - DNA, 453 bp, Homo sapiens
  misc_feature 439: n = A,T,C or G
ggagctccccgcggtggcggccgaggtacgcgggcagagacaatggaataaacagccaagaatgttaaaatagctattataaatatgatccttatgctcatagagaaaaggaaaaatataagtataatgtgaaaagaaatggaagatataaaaagaaatgcaacttctagaggtgaaaaatatgtctgaaatgaaaacaccatatagatggaattaccaggaaattagacactgcagaagaaaaaaatccatgatgttgaagtatattgcaattaaaactatccaaaatgaaactgagagggggaaaaaagcccctgaaatgtatgaagaaagcctcagtgacctgtgagacaatatcacaatggcctaacataagtgtaatttggaatccccagaaggggtagcaggcccgaaaaaaataattgtttgaataaagggncaaaaggttttccc

SEQ ID NO: 2754 - DNA, 544 bp, Homo sapiens
  misc_feature 72, 77, 84, 87, 104, 105, 107, 110, 115, 121, 138, 140, 148,168, 174, 205, 208, 210, 226, 252, 255, 260, 263, 268, 270,271, 277, 285, 300, 307, 311, 312, 313, 315, 317, 320, 324,330, 332, 347, 350, 375, 381, 383, 385, 387, 395: n = A,T,C or G
  misc_feature 401, 412, 418, 434, 444, 445, 451, 452, 453, 463, 465, 470,471, 473, 474, 480, 490, 493, 502, 505, 507, 509, 510, 511,513, 517, 529, 541: n = A,T,C or G
ctatagggcgaattggagctccccgcggtggcggccgaggtactttattttttttttttttttttttgaganagtgngtgactntgncaccaaggctggagggnngnggnaagancatagntcactgaagcctccatntntggagttnaagggatcctcccgcctcantctccnaagctaaattttttttttttttttttttagnaananacatggtttcactatntttgcccaggccaggtctaaaccttnctnacttnaangcaantnncttctncctttaanccttcccaaaagggnttttggnatannntnanacncagncccttntnccctgggctctttcnttnttaaagaaaggacactttaaatcantttttncncncncagagatnaattgngcaacaaacantattangttggggttttatttnagggttcctnncccggnnnggtccctttnanaaaanntnngggaancccccccggngtntgggggganttntnannntncaantttattttattncccccccccccntcg

SEQ ID NO: 2755 - DNA, 304 bp, Homo sapiens
  misc_feature 19, 22, 25, 30, 33, 39, 135: n = A,T,C or G
cgcgggggcggccgggaanggnccnggaanggnagtcangcagggagcgtctgtccgaacggaggctaggtaagaatatttcaccatgaaaatgttaaaagacataaaggaaggagctaaacaatatggacccanctctccttatatgagaacgttattagattccattgctcgtggaaatagacttattccttatgattgggaaattttacctaaatcttccctttcaccctctcagtatctacagtttaaaacctggtggattgatggagtacctcggccgctctagaactagggggatccc

SEQ ID NO: 2756 - DNA, 162 bp, Homo sapiens
  misc_feature 83, 129, 138: n = A,T,C or G
ctacttagggcgaattggagctccccgcggtggcggccgaggtactttttttttttttttttttttttttttttttttggagngaaacaggagtgctttatggtctgagtggagtgtttgggaggagtncctcccggntcctgccttggggctcacctcccg

SEQ ID NO: 2757 - DNA, 433 bp, Homo sapiens
  misc_feature 417: n = A,T,C or G
ccgcggtggcggccgaggtacatcttctcctaaaaacaagggtagagccaatggaaagtaatggttctgttacatagaatgagttgtcgccttgatcttaaatgatgtattggtagatatacttcccaagtggattaaaaagttaaaacttacagcataacaaagtattagacttactgaggtgacttgaatatctccttttgattttcactctatttttcttttcacccatgggaaaatgataattttttaataaaccaaggctcttaccatagctgaactttaaaacttagactgtcttttctgtaaacgattctgaggcaaagggaaatgactagaagaggatgagtaaacaataacctgaaatgggaaactcgagggaagcacaggcttttttttggtttgttttggttgatncgttttttggtctttg

SEQ ID NO: 2758 - DNA, 460 bp, Homo sapiens
  misc_feature 457: n = A,T,C or G
ctacttagggcgaattggagctccccgcggtggcggccgaggtacagaggccggtgggctccctgacatcccttccaggcaacctgaaagcactgaaatagcttatggccctgtgccagggaccttggcccaagctgctgacctccagggtggggagggagctacccccaggagaagagtcactcagacagcagtatgagcaagccagccagcagctccgtgcctgcacccagctcaggggaatcccagggggttcagatgcccaggaaggaaaaggggacagcgctactgctatggaatgagaccaccacttctcctgttgtccttcccagcttctccccaacctccccttttcctagtttataagacaggagaaaaggggagaaagcaaaaagctggaaagaaacagaagtaagataaatagctagacgaccttggcgccccacctggcctgggnggg

SEQ ID NO: 2759 - DNA, 417 bp, Homo sapiens
ccgcggtggcggccgcccgggcaggtacagaaaattagcaagagacattttctgcattgtgagaaatcaacatagacaccttaaagacccctttgagagtgtggctttttgaacttttcagattttgctcagtgacctgctaacacttacgtgagaggctccaggtgtaaatagaatctaatggcagaatctgtaagtgtaaacaagcatcttaggagtgagagatcaagaccacaaaatgtccagagctatgaccacagctatacctacccataaaatacgatactggagtagggtatttttgtctttttttcttacctaagagctagctaatcaggacaggtgatgcaggttctggagctctaccagggcaagttctattttctttttttgagacagagtctcactgtcgccctg

SEQ ID NO: 2760 - DNA, 210 bp, Homo sapiens
  misc_feature 56, 116, 118, 124, 126, 164, 182, 199: n = A,T,C or G
ccgcggtggcggccgggcaggtactttttttttttttttttttttttcgaatattnctttcagtgttctcagattgacttgaccagcctaagacagatgccagggacatcctcttntntgcctntnaacacttcagtcagatgggaatatggaaggatcatatncaagaggatcatattttntgaagccaatccattanatgtcaggaaa

SEQ ID NO: 2761 - DNA, 361 bp, Homo sapiens
aattggagctccccgcggtggcggccgaggtacttgtagatgttctttggtatctgggcattgaagaattaggtatttattataatcttcacagtctgagcttgttcgtagtggtccttcttggaaaggctttctagatattcagaaggaccgtaggtgttgtgatctaagctgtatctgctttagagggcacccgaagccccgtaatgctctggttcttgcagacttctggagatactgccttgatggtcttggataagatttggaagaatcctctggattatcaggcagagactcttattctctttcctcactttttcccagagtctttctatgctgagctctctggagctgggggagg

SEQ ID NO: 2762 - DNA, 363 bp, Homo sapiens
  misc_feature 2, 3, 46, 48, 339: n = A,T,C or G
tnnccgcggtggcggccgaggtactgtccaaccaaaactttccacngngaaaattttcctgggtgagcctcccagaaaagcccagcttagtgtaagccaaagacctcccaagtctgtcaccaattttttccctattactcacctgatcatgtgggcaatatcccagttggtctctgtagacaatggtccctctatttcaacacctttttcggtgacagtggcgatttgaaactggaagaaagcagagcattcaataatgcccacgccttaagtccttaaatgaaaggtcaggtggaggtcttccccaatgtgaaaataggagtcacacaagtaaggcgnatctgttcttcaaagcataggctc

SEQ ID NO: 2763 - DNA, 210 bp, Homo sapiens
aggtactataatctccttctccactggcaaacagattataccagaaaacagcagttccctatggagaacaatttcacaattatccccaagtatacaatgccaggtaattgctttcggtagttattacttttttttttttgagacagagtctttgctctatcgcccaggcttggagtgcaatggctcgatcttcagctcactgcaacctcc

SEQ ID NO: 2764 - DNA, 203 bp, Homo sapiens
  misc_feature 5, 11, 16, 18, 32, 39, 53, 65, 67, 73, 74, 75, 88, 95, 96,97, 103, 120, 124, 125, 130, 131, 132, 134, 137, 138, 143,146, 147, 148, 149, 164, 168, 178, 179, 183, 203: n = A,T,C or G
gcggncgaggnacaancnacttgggggggcanaaaaccngccccccccacgangagaaggggacnangagaannntttacacacaagngggggannncccccnaaaaaaccgggcgcagnggcnnacacnnngnaannccagnacnnnngggaggccgaggctntttnaaaaaaattnntttngagggggggggggcccccgn

SEQ ID NO: 2765 - DNA, 185 bp, Homo sapiens
  misc_feature 18, 182: n = A,T,C or G
ccgggcaggtacgcgggnttccgcggggcttgctgggaagagaggcgaagccaggtcacctttcaaggacccagaagtagggttttggcctaggtaaccggggcagagatgtggttcgagattctccccggactctccgtcatgggcgtgtgcttgttgattccaggactggctactgtttncct

SEQ ID NO: 2766 - DNA, 392 bp, Homo sapiens
  misc_feature 8, 341, 350, 377, 392: n = A,T,C or G
atagggcnaattggagctccccgcggtggcggccgaggtactaccctctgcttttgcaaggactctactgtgtcatcttaagtgagacaggtgcatatgtatactagtaaaattctctgctttcctagcattggacaaaaacaaaaatcaacaaaagaattgcctcagtgtcttaaactgggatccttactagttgactaggcacttagttactgaaggatatgtgtggaattcaagttcttttcaacctataagaaatatccggccaggtgcagtggctcacgcctgtaatcccagcacttttgggaggccgaggcaggaggatcacaaggtcaggattntcaagaccngcctggccaacatagtgaaattcctgncttctactaaaaatn

SEQ ID NO: 2767 - DNA, 221 bp, Homo sapiens
  misc_feature 161, 175: n = A,T,C or G
cggccgcccgggcaggtactattactaggttcattgtttccagaggggtgaaacggggctttggagaggttaaataacttgcccagggtcacacagctattaagtggtaaagctgggatttacatgagcccagacaaagaacccaagaagctaagctattntcttgtaatacctncaacataggaggcaagaagtgaggtattatacaggttgaggagata

SEQ ID NO: 2768 - DNA, 183 bp, Homo sapiens
  misc_feature 131, 146: n = A,T,C or G
ccgggcaggtacgcgggcatcagctccgtgggaactcacgagcctggggagagttcgtcatccccacatggaacctcagtatggccaacaggcagccctctggtggaaaaatcaacaatcagtccttgcancaacttgatggaacnctagttgaccaccataaagatgtcaagccaggcagca

SEQ ID NO: 2769 - DNA, 347 bp, Homo sapiens
aggtactactgctgaggtctccaggacagaagtcacctcctctggtagaacatccatccctggcccttctcagtccacagttttgccagaaatatccacaagaacaatgacaaggctctttgcctcgcccaccatgacagaatcagcagaaatgaccatccccactcaaacaggtccttctgggtctacctcacaggatacccttaccttggacacacccaccacaaagtcccaggcaaagactcattcaactttggctcagagatttccacactcagagatgaccactctcatgagcagaggtcctggagatatgtcatggcaaagctctccctcttctggaaaat

SEQ ID NO: 2770 - DNA, 119 bp, Homo sapiens
  misc_feature 87, 108: n = A,T,C or G
ccgggcaggtacagttggacctgctggcattcgaggccctcagggttcaccaaggccctgctggcccccctggtccccctggccctnctggatctccaggtgtaagcngtggtggttat

SEQ ID NO: 2771 - DNA, 365 bp, Homo sapiens
ccgggcaggtactgtagattgagatataacaaaaagatgatttctgaaataatattgggaaaagaatttaccggatggtattttgtatctttgcacacctctgttgttatgatgctataaggcaatcttgtccaaccagcagctcacaggccacatgccacccaagatggctttgaatagggccctatacaaattcgtaaactttcttaaaacattatgaaattttttttttttttttttacaataaggctcttgaaaattgtcattacttgtgttttcctatacattcatctgtgtgaaagcctttttcttctttgatttaaaaaaattaactatacagttaatggtttagaacttagaactac

SEQ ID NO: 2772 - DNA, 309 bp, Homo sapiens
  misc_feature 300: n = A,T,C or G
aggtacactcaaaggctatgttctctctcaggactcaagatgaattactggcagaattcctcactacatcctttaatggaaacctctgtcggtcctcatcatcagtgctttcatattctgattcttcactagataattcctcatcctcgtctggcaaaggaggttcctcaggtggctgaggagatgtgggtggaagaggtgcatgcaatggcatatagtcttcatacatgggaggtcgcgcagtaattggtccaaaaggtgtgggcaaattcattttattcataagatgaaggacctgtncctgcccgg

SEQ ID NO: 2773 - DNA, 388 bp, Homo sapiens
  misc_feature 106, 126, 286, 290, 292, 343, 373: n = A,T,C or G
ccgcggtggcggccgaggtactcaatgtttagctcccacttagaagtaagaacatgcccagcactttgggaggccgaggtgggtggatcatgaggtcaagagatcnagaccatcttggctaacaangtgaaaccctgtctctactaaaaacataaaaaattggcccgggtgtggtggtgggcacctgtagtcctagctactcgggaggctgagacaggagaatcgcctgaaccggggaggtggaggttgcagtgagctgagatggtgcccaacaagagggaaactncttntnaaaaaaaaaaaaaaagaaaacacaggtataatttcctaccatgttcttacnggatcataactttaaatggtcacccgcgtnccttgcccggggcgg

SEQ ID NO: 2774 - DNA, 361 bp, Homo sapiens
ccgggcaggtactttttttttttttttttttttttagaataaaagaccatttttattctaattttaactcagaaattattatgcttattcaatttaacactttcgctgaaaggttaaagagataagaaggacagattataattgcttaatattgctatggtaacttccattcaaatacctgtgagtcaccagaagtcaaaaaggtagccagcattgcaacacaggatggatcatgcaacagaaactagcaccaggttaccttatcttataatattatttgctgttaaaatgaaattttaaaacagcaccaaaagttaagttggggctaaaactgttgtgcaggaaagatttcatatagcag

SEQ ID NO: 2775 - DNA, 112 bp, Homo sapiens
  misc_feature 17, 69, 70, 90, 96, 97: n = A,T,C or G
tggcggccgcccgggtnggtaccaaagccagatcctcctgttttgtagcaggaagccctttattagttnntctctatcaatccatctttnataatnnccaaaataggataag

SEQ ID NO: 2776 - DNA, 429 bp, Homo sapiens
  misc_feature 45, 64, 86, 88, 95, 96, 105, 107, 108, 109, 116, 131, 134,140, 161, 183, 186, 189, 200, 201, 203, 206, 207, 208, 216,221, 222, 234, 239, 252, 254, 255, 261, 266, 276, 285, 299,324, 332, 343, 344, 345, 347, 349, 396, 397, 404, 405: n = A,T,C or G
  misc_feature 410, 425: n = A,T,C or G
cccacgcgggcgaaattttggggagggcaaacaccccccgcgggngggccggggcccgcctccnagtaaacctaagagggggaggntnttccaannccccgcagntnnnttaaaanccccatcaaggcccnaancggaanaacccgggggggacccatctnaaggggggggggggccccccgnggnacncccaagccaannanggnnnccccccgnaaagnnggaggggggcgnaaaanaggcagccgcccncnngccggnaaaancaaagggggnccaaaaagncagggggggacccngggcggggggaaaaaaagggaaaanccccggcnccaaccaaaannncnancaaccaaaccaataaccaaaagccccgggggaaggccaaataaaaanngaggggnnaaaangcccccggggggggnggcc

SEQ ID NO: 2777 - DNA, 254 bp, Homo sapiens
  misc_feature 28, 30, 45, 46, 60, 63, 64, 72, 73, 74, 75, 76, 77, 78, 79,80, 81, 82, 83, 84, 85, 86, 87, 88, 89, 90, 91, 92, 93,94, 95, 96, 97, 98, 99, 100, 101, 102, 103, 104, 105, 106,107, 108, 109, 110, 111, 112, 113, 114, 115, 116, 117, 122: n = A,T,C or G
  misc_feature 125, 134, 162, 168, 178, 196, 198: n = A,T,C or G
atgggggaaaaccccgggggcggccgcncnagaactagtggaggnntccagcccgcaggnaannaaaccacnnnnnnnnnnnnnnnnnnnnnnnnnnnnnnnnnnnnnnnnnnnnnncaacnggnccccccagngagggggaaaaagcgcgccgggcggaancaaggncaaagcaggngcccgcgggaaaaaaggnanccgcccacaacaaccacacaacaaacgagccgggagcagaaagaggaaagcccggg

SEQ ID NO: 2778 - DNA, 259 bp, Homo sapiens
  misc_feature 73, 77, 95, 97, 110, 156, 158, 175, 216, 224, 232, 238: n = A,T,C or G
atagggcgaattggagctccccgcggtggcggccgcccgggcaggtacttttttttttttttttttttttccncccnaaccagttctaaccgcangncaattagtttttnaaaagtctctctcttctcatgttttttcctgctttgaaactcaagngntctcttttacttaatanatcaagatccaacactaatttgacattaaatcaagactctntacaagtngactatcnctaacnggctgggggacttctgcggaa

SEQ ID NO: 2779 - DNA, 330 bp, Homo sapiens
  misc_feature 5, 61, 139, 172, 175, 208, 214, 240, 305, 308, 315: n = A,T,C or G
attgnagctccccgcggtggcggccgaggtacattgctggcctttgcccaaattatgcttnccccatttggtatgacctgacaccattgtgatcagtctgatgacctggcagcatcccatctgcctacccagttcactnttgctccatttcagggcctcttacaggcaactnctnacatatatttttgacactgactcatgccttctnaggctnagctaacatcagcccattcattgatncagcaagacaatttgagaaccactatgtgctctgccagagtgaataacaaaaccgcaagtacctnccngggcggncggtctagaactagt

SEQ ID NO: 2780 - DNA, 171 bp, Homo sapiens
  misc_feature 73, 75, 92, 112, 156, 160: n = A,T,C or G
ctatagggcgaattggagctccccgcggtggcggccgcccgggcaggtacttttttttttttttttttttttntncctaaccagttctaacncaagtcaattagtttttcanaagtctctctcttctcatgttttttcctgctttgaaactcaagngttntcttttactta

SEQ ID NO: 2781 - DNA, 819 bp, Homo sapiens
  misc_feature 9, 40, 54, 55, 57, 62, 63, 65, 80, 83, 87, 88, 90, 100, 111,114, 121, 126, 128, 136, 137, 147, 154, 156, 160, 162, 163,167, 170, 180, 184, 185, 191, 197, 198, 207, 210, 212, 218,224, 228, 232, 240, 242, 244, 248, 250, 254, 257: n = A,T,C or G
  misc_feature 258, 301, 303, 319, 331, 337, 340, 342, 344, 346, 352, 355,356, 357, 358, 363, 367, 370, 373, 387, 401, 422, 423, 436,437, 440, 441, 443, 448, 449, 454, 467, 479, 480, 483, 491,494, 501, 517, 518, 519, 520, 529, 534, 536, 542, 552: n = A,T,C or G
  misc_feature 560, 567, 568, 580, 582, 583, 594, 603, 605, 606, 609, 618,627, 633, 644, 645, 647, 655, 662, 664, 670, 682, 685, 688,705, 711, 736, 738, 739, 746, 747, 748, 749, 753, 754, 755,756, 757, 758, 759, 760, 761, 762, 770, 771, 772, 774: n = A,T,C or G
  misc_feature 794, 800, 801, 813: n = A,T,C or G
ggggggggntttggggggggaaaaagccccgggcgggagnggacagaaaaaganntnggggnngngagggggttaggagnaancccnngngggttttccnaaacccccagngangccgggncggcngngcgcgcannggagggcagngctatgnanccgncnngggnacncccaggcccngggnnccacgnggcccnnccggcacgnacngngccgcnaaaccncggnaggncaggcgangnancccncngcanaanngaaggaaaaaaaggggaaaagcgggggcaaagaaccaacaacncngggggaaccacaagcnagggaaccccgngagaanaananancngggganaannnnggggngganagnaanaacaaagggaaaanggcccccgaggcgnggaaaacccaaaaagagaggnnaacggggggcggnnaanngnaccannggcgnaaaaaaaaaaganaaaaagagggcnnggngggggggncgnaaaaaanaacacacgggaccccnnnnaaggggganacccncncggggngccggggggnccccaagnaaaaccnnaaagggaggggnanncccccccccgngggacccgnannaangggaaaaanccccggaangaaagncaaaaggcccnngnaaaccggnaaaaaancncggggncagaaccccccncanaangggggggggggggcccnaggggnaaacccccaaggcccgggggggggngnnccccccnnnncaannnnnnnnnnaaaggggnnncnaaaaaaaagccagccggccngcgggnncgggaaaaaacnaacggg

SEQ ID NO: 2782 - DNA, 452 bp, Homo sapiens
  misc_feature 53: n = A,T,C or G
tccccgcggtggcggccgcccgggcaggtaccatgccgatctctgagaagttntgttgcaccactgtgaaggtctagatgcaagcttggctccctcagaaaggcgcttcccttttgcatggctgaggatccttgaaggaacctggtcagtctccggttcagcttccgacaccagagtggaacccagtaagcaccatcaggaatggatttcactacaagtgtggataactctgattttcaaaggagtagttacttgcaaattacatccttgctgaattcaggaggtatgaaaccctattttaccatgttagaaaacagcccaggattttctcattgctctgccatcatatatgtctatgacttgagcccttatttttccatctgcaaaacaataatgcctatatgtctttgcatatagatttggaaatcttcattcaaggtttagtaggatca

SEQ ID NO: 2783 - DNA, 479 bp, Homo sapiens
ccgcggtggtcgagcggccgcccgggcaggtacttttcttcttgaagtgagtttagatcacgtttcagcaaacgtcctctggagctccttcctctggggaaggagcagcggagggctgtcatcaccactgcactcttccaaccttctcttctgctcattcaccagttccatcctcatctgaccatattactccaggaacttcccttttcccttgtaaattctgttccatttttggccaaaccatggtttgcctctgctgcattagtttgaagtcattttttttccagacattgtggcggtagttcccagatgtccgaaaagatgaagttatcagtgcacgagcagccagggcttttctttatgttgattcaccttaggacacagcccaacaatgcctgcaattgtcattagcccgtgaagaggttcgcttagggctgccacagcacagagtcccagctgcgcccgtttcttcccccccc

SEQ ID NO: 2784 - DNA, 298 bp, Homo sapiens
  misc_feature 284: n = A,T,C or G
ccgcggtggcggccgaggtactaattttttttttttttttttttttgtatttttagtagagacgggtttcaccttgttagccaggatggtctctatctcctgaccttgtcatccgcccacctcagcctcccaaagtgctgggattataggtgtcagccaccgcgcccggcctgaatatcttttttatttttaagctttcaataaatcttactgacatctaattgataaaagttgcacatatttaatgtatacattttgatgaggttggacatatgcatacactngtggtacctgcccg

SEQ ID NO: 2785 - DNA, 516 bp, Homo sapiens
  misc_feature 473: n = A,T,C or G
ttagggcgaattggagctccccgcggtggcggccgaggtactttttttttttttttttttgagacggagtttcactcttgtcacccaggctggagtgcaatggcgcaattagggttcactgcaacctctgcctcccgggttcaagcagttctcctgcctcagcctcctgagtagctgggattacaggcatccaccaccgtgcccagctaatttttgtatttttagtagagacggggttttgccatgttggacaggttgatctcaaactcctgacctcaggtgatctaccctcctcggcctcccagagtgttgggattacaggcatgagccaccatgccaggctgctaattctcctttttagtgagttagggaactgagcctcagaaaacttaaacgatttctcagaaaacactcaagtgataaagtggccccattggaaaggaggtttttatcttctcattggcaggcccagngttcattgcacaatatcatgctacctcttggaatcttttaaaa

SEQ ID NO: 2786 - DNA, 320 bp, Homo sapiens
tcttagggcgaattggagctccccgcggtggcggccgaggtactaattttttttttttttttttttttgtatttttagtagagacgggtttcaccttgttagccaggatggtctctatctcctgaccttgtcatccgcccacctcagcctcccaaagtgctgggattataggtgtcagccaccgcgcccggcctgaatatcttttttatttttaagctttcaataaatcttactgacatctaattgataaaagttgcacatatttaatgtatacattttgatgaggttggacatatgcatacactcgtggtacctgcccg

SEQ ID NO: 2787 - DNA, 464 bp, Homo sapiens
ccgcggtggcggccgaggtacaatacaatctagatgacggtgcagactaagtcaagaactaaagttgtgcagtaacccgagttaaggcatgaatgcggacacacacatgcacacacacagcacccatgctatcaagacacaggattttttcagttgcctcatgagaggcaacctgggcttggcagttaatcagaactgctgagcattccagaaaatgccccccacgactttatgctaacagctgtgtgtatgttttaatcaaaaaattaaagaagaaaaaaaacctaaaaaacaaagaaaaaaacaaacaaaaaatcaccaaaaacctagaaaccccttaatctcttacaatggctcttgagcatggaactcatgtagcagcatcaatggctggctctttaacaatttggaaataaaaggttggtttactatgtatttctttggtagtcatcactaccaaagtt

SEQ ID NO: 2788 - DNA, 440 bp, Homo sapiens
  misc_feature 51, 104, 134, 169, 181, 194, 196, 211, 212, 218, 226, 235,240, 241, 242, 245, 251, 256, 259, 263, 270, 286, 293, 299,302, 310, 319, 333, 334, 335, 343, 348, 360, 366, 374, 379,387, 409, 415, 417, 419, 420, 421, 436, 440: n = A,T,C or G
ccgcggtggcggccgaggtacttttttttttttttttttttttttgctttnatgtctttatgtatttatttttttttgagacagggtcttgctgtgttgcccangctggagtgcagtggcctggtcatggcatnaaggctcactgcagcctggacctcctggttcaagngatcctcttgtntgagtcccctgananaaaaccccacccccnnctacanaaattttntggaaacangggcnnnaanctgttncctangcntgtntggaacncctgggctcaagggancttgtanccttanccncctaaaanagctggganttataaggcatgannnaattgtancctgncccggcgggccnctttanaaaaagtnggaanccccccgnccttgcaggaaatttcattatncaaccntntnnnaatcccccccccccnccan

SEQ ID NO: 2789 - DNA, 417 bp, Homo sapiens
  misc_feature 61, 65, 98, 114, 141, 213, 245, 256, 259, 267, 277, 285,301, 303, 313, 317, 318, 322, 323, 324, 332, 339, 345, 350,352, 353, 360, 365, 366, 368, 369, 370, 380, 382, 383, 385,406, 407: n = A,T,C or G
ccgcggtggcggccgcccgggcaggtacttttttttttttttttttttttttttttttagnaganatggggtttcaccatattggtcaggctggtctngaactcctgaccttgngacccacccgccttggtctcccaaagngctgggattacaggcataagcccccgtgcccggcccacatggtattattttatataaaacgcaagttaagtntttatgtgtgaaaaactttttttgaaactttntcaaaaagaanttnacttattngttaaaaccnttttttgncctaagggccaaatangngaaaaaaaancccnnattnnnctttttanatttttnttggcnaaaantnnaaaaaanatttnncnnntttttttggngnnantaaaaaaaaagggtttttttnnttttttaaaa

SEQ ID NO: 2790 - DNA, 496 bp, Homo sapiens
  misc_feature 24, 162, 272, 308, 326, 332, 336, 343, 357, 375, 376, 384,390, 391, 396, 397, 398, 402, 403, 404, 411, 421, 422, 423,424, 438, 445, 446, 448, 449, 455, 457, 472, 479, 481, 482,484, 485, 489: n = A,T,C or G
tactatagggcgaattggagctcnccgcggtggcggccgcccgggcaggtactttttttttttttttttttgagacggagtttcactcttgtcacccaggctggagtgcaatggcgcaattagggttcactgcaacctctgcctcccgggttcaagcagttntcctgcctcagcctcctgagtagctgggattacaggcatccaccaccgtgcccagctaatttttgtatttttagtagagacggggttttgccatgttggacaggttgatntcaaacttctgacctcagggggaattaaccttcttnggcttccaaaaagggtgngggatnaacngggttgngccccccccccccnggggggggaaaaaattcnntttttttngggggnnggggnnncaannnccccccnaaaaaaaaannnnaaatttttttttanaaaaaannanncctttntnaaaaaatgccccccnccccaangnngnngggnttttttt

SEQ ID NO: 2791 - DNA, 383 bp, Homo sapiens
ggtcttctatgtgggtgtcaaggatatgctccctcacggcttccgaaggcccccagcaaaagatctaacattcttgctcaaagttgcgagagaaagtagcacatggagtagctgggttggggcggcggcctcttctcttcagctcccttagcttggctccgtaagtggatcacttgccaaatgctttagatgattgcctctcaataattgaaaggtggtggtaagttgtattgctgcactgtcggtgttaagagaaattactctcacaagagcagaggcctgaagattctttcttctgaagggatgatgagcctggactctctggactcctagattatgaactcctgcagtggaccatgtcctattttttggagggcgttggg

SEQ ID NO: 2792 - DNA, 468 bp, Homo sapiens
  misc_feature 161, 170, 253, 267, 289, 290, 304, 310, 323, 332, 339, 349,416, 429, 432, 438: n = A,T,C or G
ccgcggtggcggccgaggtaccttcaatacctttagttgtctcccacacacgcgtgtgtgtgtgaaatcttctacaatatcttcccttttttagaccatgttcactgtcaaaaaggtgctttaagagcagtctttggctgggcacggtggctcacacccgnaatcccagnaccctgggaggccgaggcaggcggatcaccgaggtcaggagatcaagaccatcttggctaacaggatggtcttaagggacagngaaaccctgtcttnaacttaaaatacaaaaaattanntgggcgtggtgggnaccgcncctgtaatcccanctactcaangaggctnaaggcaggantaatcactttgaacctgggaggtagaggcttgcagttgagccaagattgcacccactgcactttcantcctgggccgaanaanagccanggactttcatttttaaaaaaaaaaaaaaaa

SEQ ID NO: 2793 - DNA, 147 bp, Homo sapiens
  misc_feature 14, 25, 56, 67, 71, 81, 111, 117, 142: n = A,T,C or G
ccgggcagggaccncgggatggtgncaacttatgacaggacccatgggccctcccnatgcacacagnactnttggaatctnatccttttccatggctctggctcacacttncacagnatttactcctaaatatgccccctgngttca

SEQ ID NO: 2794 - DNA, 228 bp, Homo sapiens
  misc_feature 44, 79, 105, 112, 115, 120, 134, 139, 197, 212, 218: n = A,T,C or G
tatagggcgaattggagctccccgcggtggcggccgaggtacanatttgaatggctttgacttttggcagctgcacagngctaggactggaccatgaaatatctntgggctntgncaatnacatttgggttaanctaancctgatcccatgtgttcctggaagagaagccccatgacattcaaagtccttgacaatntgacaccagcttttntaaccntataaggccc

SEQ ID NO: 2795 - DNA, 440 bp, Homo sapiens
actactatagggcgtcgagcggccgcgcgggcaggtacgcgggcacactgaggaattatgactactatgcaagccgagttccagaatctattaaaaatgcacttgttccttaagggaaagtttcatttggccgggcgcggtggctcatgcctgtggtcccagcactttgggaggccgaggcaggtggatcacttgagctcaggagtttgagaccagcctgggcaatatcgtgagaccccatctctacaaaaatacaaattaactgggcatcctgtcatgcgcctgtcgtcccagctacttgagaggctgaggcagaggaatctcttgggcccggaaggcggaggttgcagtgggctgggatcgtgccactgcactccagcctgagtgacaggagttaagccctgtctcagaaaaaaaagacaaaaacccaaaaagtacct

SEQ ID NO: 2796 - DNA, 217 bp, Homo sapiens
  misc_feature 35, 61, 68, 75, 78, 81, 87, 93, 118, 132, 142, 161, 170,179, 184, 209: n = A,T,C or G
tacagaagccgggagcataaagacgtataagcctngggggttgctctaatgtaggtgaggntaacatnacattanatntgnagttgncgcctnacttgccccgctttttccagttcgnggtaaaccttgtcnttgctcagcntgcattttaattgtaattnggtccaacngcgctgganggagnaggctggtttttgccgttatttggngccgcttc

SEQ ID NO: 2797 - DNA, 366 bp, Homo sapiens
  misc_feature 4, 355: n = A,T,C or G
actnctatagggcgaattggagctccccgcggtggcggccgaggtacgcgggatgataataagatgcaatttgaatcttcatcatacgaaggatactttctagcttgtgaaaaagagagagacctttttaaactcattttgaaaaaagaggatgaattgggggatagatctataatgttcactgttcaaaacgaagactagctattaaaatttcatgccgggcgcagtggctcacgcctgtaatcccagccctttgggaggctgaggcgggcagatcaccagaggtcaggtgttcaagaccagcctgaccaacatggtgaaacctcatctctaccaaaaaaaaaaaaaaaaaaangtacctgcccc

SEQ ID NO: 2798 - DNA, 489 bp, Homo sapiens
  misc_feature 427, 469: n = A,T,C or G
ccgcggtggcggccgaggtactgagcccttcattccccaaactcagactcttagctcttttgtcaactctgggcaaaggtcagcattggaatcgagcggccgccgggcaggtacattttctctcatccacttccgattctcttcattggctgcaatatctttttcttcaaatcctattttgttggcttctaggaaaccaagcacatcttgttgtttcttcttaatcgctgtagagccagaggaagatgcaatatatacaccggatcaccatcctgggaacagcggctgcggttgtttgggtcctgaaaagggctgtggagcagctgcagcaatggctggaatccagctaggggctgaaacaacggttggcagagaagggtgggggaagtgggaaaaaggaagaactcgccagaagccccgccttcgnctttagcaagcttccaccgagctcttctaagcgcttgagttncagccaaaaacccccccccg

SEQ ID NO: 2799 - DNA, 332 bp, Homo sapiens
aggtactaacctcttaccttccaaggtggtagaacatgcttgaaaagatagtaagtgaaaaggggtagccagtgctttactcacaagactgcttgaacatgagactcaaggagggacctcagcaggcctggggtgttcagcaactattcctggccggggcatcttgcaaaggagttgctgtgacagtaagctcttccactttgagaccgtcacctcagccacggctcccacctgggctcaggaatggtcaggcaacacgtggggcccaggatggcggtggatgactaaactgccgaagaccgcgccgctgcgactaccgaagtacctgcccg

SEQ ID NO: 2800 - DNA, 426 bp, Homo sapiens
  misc_feature 383: n = A,T,C or G
ccgcggtggcggccgcccgggcaggtacaagtatgcaagttttctgtaaacagattactttcaaacagttgggagccccagggagataatagaaggtatcctactcaacagcagtatatagaatgctgtagaagaggaatattgtaagaacaagaactatctcttgaaaactaaaaatatgataactgaaatataaatttaaataggattggaagctaaagctaggaaattaccctagaatgttttttgagaaatggaaaataccgaagaccaaaaaaataaaataaaactatgctgtgaaagagaaagattagcatttgagaaggcgggaagttggtcctgctcagatgccggttttcagatgccttattctaaaaaatagngatagaaaacaaatttctacaaagcaaaattacaataaattta

SEQ ID NO: 2801 - DNA, 488 bp, Homo sapiens
  misc_feature 12, 420, 422, 423, 436, 472: n = A,T,C or G
ctacttagggcnattggagctccccgcggtggcggccgaggtacagacgggtgcctgtagtcccagctacttgggaggctgaggcaggagaacttgtttgaacccggaggtgaaagttgcagggagccgaggttgtgccactgcactccagcctgggagacagagcaagactctgtctccaaaacaaacaaacaaacaaaaaaaccctgtagcttgggatcagccttctcttctgttgtttttctttaaaaaataaaaattaaaaataggcttcaagtgatcctcccgccatgacctccaaaactgctgggattgtaggtgtgagcactgcacccagccgtatgtttttttctacataaaaaacagcacaggattatcttccaaagctaacaaatatgttcaaataaccacaaccccaantnnaaaaaaaaaaatnaagtacctgcccggggcggcccctctaaaaactaantgggatcccccggggc

SEQ ID NO: 2802 - DNA, 353 bp, Homo sapiens
  misc_feature 1, 2, 4, 6, 10, 11, 12, 15, 26, 39, 42, 55, 57, 58, 59, 75,77, 78, 82, 88, 100, 115, 120, 129, 138, 141, 166, 176,180, 187, 189, 216, 221, 230, 231, 232, 233, 234, 235, 236,237, 238, 239, 240, 241, 242, 243, 244, 245, 246, 247: n = A,T,C or G
  misc_feature 248, 249, 250, 251, 252, 253, 255, 256, 257, 271, 273, 274,280, 292, 299, 301, 304, 308, 312, 316, 317, 319, 322, 332,336, 342: n = A,T,C or G
nnangncccnnnagngaggggaaaangcgcgccgggcgnaancaaggacagagcngnnncccgggggaaaaggananncgcncacaanaccacacaacanacgagccgggagcanaaagnggaaagccnggggggccnaangagggaagccaaccccacaaaaaangcggggcgcncacngcccgcngnccaggcgggaaacccggcgggccagcngcaanaaagaaaannnnnnnnnnnnnnnnnnnnnnnngnnngcgaaaagggcgcncnnccgcanccccggacaccnaaacgcngngcncggncggncggnngnggngagcgggaanagcncacccnaaggcggggaa

SEQ ID NO: 2803 - DNA, 280 bp, Homo sapiens
  misc_feature 1, 21: n = A,T,C or G
nccaccgcggtggcggccgtncgggcaggtactcctttcagagggtcatctcctccacaagtattttttgtttctttggctggtctgggtccaatgctgttgccatccccagcttcagactgttctccttgttttggagaactttctttggactgtatcttcagagacactcctggtcaaggggcctcagaggacccaaacgctctgaaacagcgtcttagctcatcgccgagtgtcagctctagctcttcggagcgctttcttctccccccgcgtacct

SEQ ID NO: 2804 - DNA, 508 bp, Homo sapiens
  misc_feature 336, 349, 392, 395, 407, 408, 439, 447, 455, 461, 476, 495: n = A,T,C or G
ccgcggtggcggccgaggtacagagaaaatattttttaaaaatctcatcaggctaggtgaggtggctcgtgtctgtaatcccagcactttgggaggccacgctgggtaggttgcttgagtccaggagttcaagaccagcctggccaacatggcaaaacaccgtctctacaaaaataatacaaaaattagtgaggcatggtggcacacacttgtagtctcagctatattacttgagaggctgaggtgagaggatcaccgtaagcatgggaggcagaagttgcagtgagcctagaatgcgccactgcactccagcctgggcgatagagcaagactgtntcaaaaaaaaaanatttggggaataaaggaaagttcctgccccggggcgggcccgnttntagaaacttagnnggatcccccccggggccttgcaaggaatttncgatatcnaagcttanttcgantccccgtccaccctngaagggggggggccccggntaccccaaatttt

SEQ ID NO: 2805 - DNA, 380 bp, Homo sapiens
  misc_feature 18, 178, 203, 244, 362: n = A,T,C or G
tagggcgatttggagctncccccggtggcggccgcccgggcatggtacttttttttttttttttttttttgccagcttttctaagcaaatagattgtctgaattagtcacagaataattttgtgaaaattcatgtttaagtagcaactaccctttctttttttatatatttttaaggnattagtttatcttcttctaactggngcagtcacttaatgttttcattaatcttcgacctggagagngaaatactgatatttctagaaaaaaattctactcctctgattatttgaaatgctgaggaaaatgtccctcccatagtaaaacttgtaaataaggaactatatcatattcagtagctgngttctgttccatcttttt

SEQ ID NO: 2806 - DNA, 367 bp, Homo sapiens
ccgggcaggtacattctctgttcattacttagttcttaaggatatgtgttcatccattctgtcgctggctcagagtttgcttcactctctagaccagagtataatttcatttggcagtctcctatacaaatatgcatttaagttttttgacacgtacgcgggggactcaacagaaatgggtttccagaagaataatgaaaagttgtgggtaggaaaatgaatcatttggactcttcaatgaaatggagtgagcccaggagagctcagccaacagaggcactctgggaacctgttagtaaagccaggctggccaaatgccatttgattttgaacctcgtaggtccccactcaccctctgccaggagct

SEQ ID NO: 2807 - DNA, 412 bp, Homo sapiens
  misc_feature 199, 227, 234, 274, 311, 338, 349, 354, 367: n = A,T,C or G
agcctcacccgcggtggcggccgaggtaccccgggtgttcctttttgttcaaagtctatttttattccttgatatttttctttttttttttttgtggatggggacttgtgaatttttctaaggtgctatttaaacatgggagggagagcgtgtgcgggctccagccccagccccgctgctcacttttcccacccctctnctcccacctgcctcttggcttctcaggncctctgnctcttcccgaccttctcttcttcttgaaaaccccttcctnccacagcttgcagccccatcctccccgggcttccctncctaagtctggtcctggcggtcctctngtcccccgggntttcnagaggacaacttnccccaaaggcccaaagcagttttttccccccctagggggggggga

SEQ ID NO: 2808 - DNA, 446 bp, Homo sapiens
ccgcggtggcggccgctcgggcagggtacatgccaccacgcctggcttattattattgttttgttttggagacaagagtctcgttctgtcgcccaggctggagtgcagtggcacaatctcagctcactgcagcctccgcctcctggattcaagcaattctcctgccagagcagctgggattacgggcacgtgccaccatgcccggctaatttttgtatttttagtagagatagggtttcaccatgttggccagcctggtctcgaactcctgacctcaagtgatctgccacctcggcctcccaaagtgcccgaggttacaggcatgagccactgcacccggcctattattattaacttagtgtttgctaagtgctttatagatacggacttgcttaaatcttataataagtcctgaaagatggggtgataacctcatttaagaaatt

SEQ ID NO: 2809 - DNA, 361 bp, Homo sapiens
aggtactgtaaatattaccattatttaaaatgttgacatttctgcattaagtagaaactttctaaatgcctaaataccactcaaacatgacttaaaagaaattgaatgactcaccactatgaccttcaagagtctgattcatagaaaggttactgggggctgcaaggcccctcaattttgcatcatctgtctgcgtctctaatttcaaaactttcagtaatccatcttcaccaccgcatgctatgaacccttgttccttgttccaggatacacactgcagcttcacgttattgggaatggaaattttcttgctcaggtagaagaacatcgtgggatccccgagagggtcacggcggccgct

SEQ ID NO: 2810 - DNA, 366 bp, Homo sapiens
aggtacgcggggggctctgagaggagtctaccttgccttcttatgggaagggagaccctaaaaaactttctcctctttgtcctcctttttctcccccactctgaggtttccccaagagaaccagattggcagggagaagcattgcggggcaattgttcctccttgacaatgtagcaataaatagatgctgccaagggcagaaaatggggaggttagctcagagcagagtagtctctagagaaaggaagaatcctcaacggcaccctggggtgctagctcctttttagaatgtcagcagagctgagattaatatctgggcttttcctgaactattctggttattgagcccttcctgttagacctacc

SEQ ID NO: 2811 - DNA, 376 bp, Homo sapiens
  misc_feature 104, 188: n = A,T,C or G
ggcaggtactttttttttttttttttttttgcaacattgccctttgatgtccccatgagggccaggcccaggcagaacccatcccattttatccttaaactcanaaggaaatttgtctaaatattaaaggattaatatgggaataaaaaatgaaccttaaaccctgccactgatacacaagctgtctntcttagagttcaatgaacacttcaggagagtatttccaacaatatttagatattggaatatctaaatattgttgatttagataaccaccctagatttctcaccaccctagaacatttagtggggagacattcttttctcctttttctgataacttggtcagaagtgattgactgtgcaaatggtattt

SEQ ID NO: 2812 - DNA, 349 bp, Homo sapiens
  misc_feature 1, 2, 18, 26, 31, 32, 41, 48, 55, 61, 72, 86, 104, 128, 129,146, 148, 156, 160, 163, 166, 171, 173, 194, 197, 207, 226,232, 237, 239, 256, 257, 272, 281, 287, 290, 292, 319, 323,331, 333, 339, 346: n = A,T,C or G
nncggcggccgggcgggnacgcgggngagcnntacgagggncaggaancccagangccgcncgacctggagncagcctacaacgcnttcaaccgctgccggcangcccgagcccggggcactagcccnngcacagaagggcagagncngaggcganggcnccnggnccccngnccgccacacaggcctttggtnttntcacacaacncacggggcggcagccgccngaaagnagacngnccccgggggcagaacanngggggccgggccccnccccacaanaaagangcncnccgacaaaaaaaaaaaaaaaaaaaagnaccncggccgcncnagaacnagggganccc

SEQ ID NO: 2813 - DNA, 144 bp, Homo sapiens
  misc_feature 35, 37, 43, 46, 49, 95, 128, 138: n = A,T,C or G
cggtacccaagcttttggttcctttaagtgagggntnaattgncgncgnctttggccgtaattcaatgggtcaatagcttggtttcctgtggtgnaaattggtaatcccgcttcaacaaattcccacncaacatacgnagcccg

SEQ ID NO: 2814 - DNA, 185 bp, Homo sapiens
  misc_feature 21, 34, 55, 92, 118, 134, 147, 159, 163, 166: n = A,T,C or G
ccgggcaggtacgttcttttngcttttcctttcngtaagatggtcttcagagctncttaaacacatttagaaaaaagttaaaccccaagacnctttggggataggttaattttaagangcccaactttggactnggattaaaggaantaccttaaaaancccnggnaaaacaattattttttggg

SEQ ID NO: 2815 - DNA, 157 bp, Homo sapiens
  misc_feature 31, 46, 60, 62, 73, 84, 89, 98, 100, 149, 150: n = A,T,C or G
ggcggcggccgaggtacagagaagccatcantttagagggcagcanaaaaccagaagccngntttgatccctnaacaccaagangcctntaacaacangncaccagcacccccaggaaggccaaggagtcccacagaaaaacctagggnnagaccaa

SEQ ID NO: 2816 - DNA, 257 bp, Homo sapiens
  misc_feature 14, 20, 23, 25, 55, 60, 61, 62, 63, 64, 66, 74, 87, 103,105, 108, 113, 118, 124, 125, 126, 128, 138, 145, 156, 158,161, 169, 177, 191, 194, 202, 203, 229, 244, 249: n = A,T,C or G
gcggcggccgaggnacaagnaancnccttttttgggggggggaaaaacccccccnccccnnnnncnacccagangaggagggtttcngcccccaggggaacancnccnaaaancagcncggccnnngncgggaccagngccaggnggacagccagngnccnggccagangaaaggcngccgtttttttttnttngggggggnncgggggggggcccccccaaaaaaaancagccaccaccaggnggggnggggagga

SEQ ID NO: 2817 - DNA, 367 bp, Homo sapiens
  misc_feature 150, 201, 228, 241, 254, 262, 266, 269, 278, 301, 310, 325,334: n = A,T,C or G
aggtaccctgaggtgctccgctggggactctgctcattctgggggtgcagttgacggctggtcgtgatctttccccgtaatctgtcccctcttacggaacctagtctcccgttctggccatggcctttcttcttggacactgcttaggancccagaaagaagtattgttatcaaattcttaaagccttaggaagaaagtcnagggagtgggaaaaccaggcttctganaaagaatacctgnttggcccacctgnatcttccnaggncanccacggaantcccgggccccttccaatcaggnaaggtcggnaatctctgatggtcnatcggttcnatggccaacctggccaaccagtttgaaaaaaaa

SEQ ID NO: 2818 - DNA, 171 bp, Homo sapiens
ccgggcaggtactgttcctgttggccgagtggagactggtgttctcaaacccggtatggtggtcacctttgctccaagtcaacgttacaacggaagtaaaatctgtcgaaatgccacccattgaaagcttttgaagtgaaagcttctttccttggggaccaatggtgggct

SEQ ID NO: 2819 - DNA, 347 bp, Homo sapiens
aggtactttttttttttttttttttttgggttaggatggttctaacctgatgggttgtgtttacagtggggtttcccccaaaggttatcttcctgctttcctctgtaaatagggcagttgctgcaacagattaaatacactcgggccacctgtgggttagtgggtcaagaatttttgacagaaaggctataggctgccggtggcccccgtgtgtttgggtgagcacccctagagctatccctttattcacattgacgaagaggtggaatggctgttctagggaaggtagaactaaggcagttatgagcaggtgttttaattcctctacttgttggacctcccgtggt

SEQ ID NO: 2820 - DNA, 205 bp, Homo sapiens
  misc_feature 65, 68, 72, 95, 98, 102, 106, 109, 120, 122, 131, 134, 147,152, 156, 166, 168, 169, 176, 185, 187, 196, 200: n = A,T,C or G
agcttatcgatacccgtcgaccttcgagggggggccccggtacccagctttttggtccctttaantgngggntaaattggcgccgctttgggcgnaantcantggncantagcttggttncntggtggtgnaanttggtaatcccgncttcnacanttccacacanannacgaagnccggggaancntaaagtggnaaancctgg

SEQ ID NO: 2821 - DNA, 230 bp, Homo sapiens
  misc_feature 171, 192, 197, 206, 210, 217: n = A,T,C or G
cggccgcccgggcaggtaccatctcttgggaaaaccatgctacctcttctctctgttctctattttgccactagagaaatagaaaataaggctgggagcagtggcttatacctgtaatcccagcactttgggaggctgaggcgggaagaatcacctgaggtcaagagtttnaagaccagccttgactaacantggtngaaaacccncgtnttttttntttaaaaaatacc

SEQ ID NO: 2822 - DNA, 489 bp, Homo sapiens
  misc_feature 430: n = A,T,C or G
ccgcggtggcggccgaggtactccaatccgggtgacagagggaagactctgtcttaaaaagaaaaaaaaatcaatagaaatcggtttttatttatttatagtatgtgctttgagtggttctcaatcaaattgatttttcccccttccaggggatatttgaaatatctggaggcatttttgtttgccccatctttgggtatcatattggcatctagtaggtagaggccagggttgttgctaagcaccctataatccacaggacagcacccaaaaacagttacccagcccaaaatgtcagtattgtcaaggttgagaagccttaatttagatgtaatgttaagagttcagtaaattggccaggcacggtggctcacgcctgtaatctcctagcactttgggaggcaaaggcaggcagattgcctgagctcangagttcgagatcaccccgggcaacaaggtgaaacgctctgtctactaaaatacaaatcc

SEQ ID NO: 2823 - DNA, 490 bp, Homo sapiens
  misc_feature 23, 24, 399, 449, 470: n = A,T,C or G
ccgcggtggcggccgcccgggcnngtactcctcttgctaccacctttgttgcagaagatgaaggggagagggagcttctccctatggcctcatggcttcttgtgagacagatcagtccagccagatacagagcaaagcagctttgcatcaccgcgggccagttgctgatgcccagctttatgtctaaaaaaaaaaagtggaagcctcaagggggatggaggatagcaagaagaatgggtgccttggccccagaggcattgtagggagaggaagacaatgtatctcatcagggttctcaacattatgagattatcacacatcaactatctttggaggggctgagtgattgagttatggctctgactcctctctgggggtggagagtgaaagatgacaaanaaggccatctgtcccctaggagacacagtttgcagtataagacaggacanaagagaacagaaaaacaaatncaactggaaaaaaggggtgg

SEQ ID NO: 2824 - DNA, 333 bp, Homo sapiens
  misc_feature 33, 287, 305: n = A,T,C or G
aggtaccttagagcaacatgcaaagcttccctnctcagcaatcccaggttggggccccctgtcttcctatcgtcctacccgtcacaaccaccactgcaggcttctgatgctctgttttcctcctctgtctcagttcagttgctctgagttagagaggagctctctgggactggagcaaatgactgcaccggccctcatgggacttccatttcagtggattcaggggaaagcagcacgtgtttttgagagaccttggcaacgcaggcgaccttgacgtcgaccaaaanaagagagatttggaatgnttgtttacagcctccggtcaaaaaaaaa

SEQ ID NO: 2825 - DNA, 431 bp, Homo sapiens
  misc_feature 38, 50, 51, 52, 60, 65, 66, 76, 82, 100, 105, 107, 180, 187,210, 256, 261, 273, 287, 288, 291, 299, 300, 302, 324, 370,371, 379, 390, 400: n = A,T,C or G
ttagggcgtttggagctccccgcggtggcggccgcccngtcaggtaccannncttagcanggaanntggacaacanaagctntaaatcctcttgcatcgncacgntnaatttgcactgaccaatctgttggcacagtaactggttataagctaaatttctacattttggctacaagtatnccaaatncaccttttaaaaaatcctatgtnagatgccatctggtgttaatgatttgcacaccccttaaattgaaantattncaaataaatctnacggatttatatannatnattaatgnntntattttaaaaagacaatctganaataacacttcccctaattgttgtcttaataatgaccaagagctgnngaaaaatnattcacactgntacgtcgttntgttggtttgctcacgggggaaggggggttg

SEQ ID NO: 2826 - DNA, 313 bp, Homo sapiens
  misc_feature 14, 20, 24, 50, 51, 53, 58, 61, 73, 95, 117, 134, 202, 222,265, 267, 270, 272, 287, 292, 301, 308: n = A,T,C or G
gcgaatttggagcnaaaccncggnggcggccgaggtacttcggggagagnntntcctnccntcattttgaacnccagcggcctcttccccttccnggggctgcttgccctgggaacnctggcaccttgggctgnggaaggctctggaaagtccttcaaagctggagtctgtcctcctaagaaatctgcccagtgccttaganacaagaaacctgagtgccanagtgactggcaggggccaagggaaaaaaaaaaaagttgccctnanccntngggggaaaaaaaagngcccnggaaacccnggggggnccccc

SEQ ID NO: 2827 - DNA, 429 bp, Homo sapiens
acttagggcgaattggagctccccgcggtggcggcggaacacttgaggtcatgagtctgagaccagcctggccaatacggaaaagccccgtctctaacaaaaatacaaaaatacaaaaattgggtgtggtggtgtgcacctgtagtcccagctactcagaaggctgaagtaggagaatcgcttgaacctgggaggcagagattgcaccactgcactccagcctgggtgacagagagacactccatctcaaaaaaagaaaagaaaggaaaaaaagaaaagaaaagaaatgttgaggcaaatgaatatacaaacacattttagattagcatttgaattagtaaactgcataaaaaagatccaacatgagctgacatcatccaatccattgagggcccaaatagagcaaaaaggcagaggaagagcaaattc

SEQ ID NO: 2828 - DNA, 376 bp, Homo sapiens
  misc_feature 340: n = A,T,C or G
ccgcggtggcggccgaggtacagaaagaagagtatccatttcaactactaggttaactgcctttgatgagcttgattttacctgggtcactaattccacagaaccaatgtaggtgtctgggcggagcaaaatatgctccaattgtgttttcttttgatagattctttcaacagacagtcttttcttagcatcttcatttttctttattttgttgacttgcatattttcatttacaggctgcaatggtgacacttccatggtgacggtcgtgaaggggctcaagaaccctgaaagcgactaaacaggcaggaccccacgagaccacccccgaccaagccgnttctccacagacgcgcgtcccccgcgtacccgcccg

SEQ ID NO: 2829 - DNA, 392 bp, Homo sapiens
  misc_feature 27, 142, 146, 147, 149, 150, 151, 153, 154, 155, 158, 168,171, 182, 183, 190, 193, 194, 195, 196, 197, 199, 200, 201,206, 207, 209, 210, 211, 213, 214, 215, 216, 221, 222, 225,231, 232, 235, 236, 237, 238, 239, 243, 246, 251, 252: n = A,T,C or G
  misc_feature 253, 254, 255, 258, 259, 260, 261, 262, 263, 264, 269, 270,272, 275, 276, 277, 278, 279, 283, 286, 288, 292, 295, 302,322, 327, 328, 336, 337, 338, 340, 341, 342, 349, 351, 353,354, 362, 363, 365, 369, 372, 377, 379: n = A,T,C or G
ccgcggtggcggccgaggtactttaanttttttttttttttttttttatttttttttttttttttttttttttttttttttttttttttttttttttttttttttttttttttttttttttttttttttttttttttttttngggnngnnnannnttnttttaaaaanggnaaaaaaaaaannggggggnggnnnnngnnnaaaannannngnnnnggggnnaancccccnnccnnnnngggnaanccccnnnnnaannnnnnnttttnngnggnnnnncccnttntnaaanaancggggtnaaaaaaaaaaaaaaattttnggggnnattttttnnngnnnccccctnancnngggggggnntntttnctnttttnanacccccggggggg

SEQ ID NO: 2830 - DNA, 460 bp, Homo sapiens
  misc_feature 264, 266, 268, 288, 299, 302, 303, 305, 311, 316, 318, 320,321, 324, 330, 333, 346, 360, 382, 383, 387, 389, 390, 393,400, 423, 445: n = A,T,C or G
ctacttagggcgaattggagctccccgcggtggcggccgaggtacttttttttgttttgttttggttttttttttttggcttgactcaggatttaaaaactggaacggtgaaggtgacagcagtcggttggagcgagcatcccccaaagttcacaatgtggccgaggactttgattgcacattgttgtttttttaatagtcattccaaatatgagatgcattgttacaggaagtcccttgccatcctaaaagccaccccacttntntntaaggagaatggcccattcntttccaagttnccnnangggganaaaanancnnttnttttcnggnaaattttttaaancaaaattttttaancccccccccaaaaacctttttnntttngnnaanaaaaaanaaaaaaaaattttcccccccccnctttttttttttttttttcacnccaaaaaaaaaaaaa

SEQ ID NO: 2831 - DNA, 453 bp, Homo sapiens
  misc_feature 95, 104, 108, 113, 118, 121, 129, 136, 137, 151, 155, 173,176, 192, 208, 222, 223, 229, 240, 242, 243, 245, 252, 253,257, 259, 267, 268, 269, 270, 277, 278, 282, 284, 285, 287,289, 306, 307, 308, 318, 322, 323, 326, 330, 332, 336: n = A,T,C or G
  misc_feature 343, 346, 358, 359, 368, 370, 377, 387, 389, 392, 411, 412,421, 422, 436, 440, 444: n = A,T,C or G
ccgcggtggcggccgatgtactttttttttttttttttttttttttttttttttttttttttttttttttttttttttttttaaccctttgactnttttttaangccncgggnggatntcnttgcccanctcccannaatgtttgcccttntaantctgttccacttttaggnggnagccaccaggccttanccatcccgggtacctnggccgttttaaaannaggggnatcccccgggntnnangaatttnnaaantnaaagcttnnnngaaaccnncccncnntngnggggggggccccgggcnnnaaattttttntttnnttnaaanangggnaaaaaanggncccccttggggnnaaaaaaaangnaaaaaantttttttttntnggnaaaaaaatttttttttccnnaaaaaaatnncaaaaaaaaaaaanaaangggngggaaaaaa

SEQ ID NO: 2832 - DNA, 523 bp, Homo sapiens
  misc_feature 75, 77, 246, 273, 275, 282, 304, 321, 322, 325, 327, 331,336, 341, 356, 361, 384, 401, 410, 425, 449, 452, 458, 460,471, 472, 474, 476, 477, 478, 506, 509, 511, 512, 514: n = A,T,C or G
ccgggcaggtacaaagattcctcactgcgtgctaagaaaacagatccaggccgggcacgggggctcacacctatnancccagcactttggaaggctgaggcgggtgaatcacctgagatcaggagtgcgagaccagcctggccaacatggcaaaaccctgtctctactaaaaacacaaaaatttgccgggcatggtggcagatgcctgtaatcccagctacttgagaggccaaggcaaggagaaanttgctttgaacctggggaaggccgaangnttgcaantgagcttgaagattcggcaacnaacttgcactttccaannccntngggntgacnaggangataaggaccttccnttctncaaaaaaaaaaaaaaaaaggganaaaaaaaaaaaaagggntcccttttnggcccggttttttanaaacttaagtgggaattccccccnggnccttgngngggaatttcgnntntnnnaaagcttttttcgaattccccgccccanccntnngnggggggggg

SEQ ID NO: 2833 - DNA, 567 bp, Homo sapiens
  misc_feature 249, 264, 283, 287, 301, 306, 317, 319, 322, 326, 328, 329,337, 338, 341, 343, 351, 352, 353, 355, 356, 358, 369, 378,380, 395, 401, 402, 412, 421, 422, 428, 430, 440, 444, 456,462, 463, 468, 469, 470, 474, 482, 484, 503, 525, 540: n = A,T,C or G
  misc_feature 544, 548, 550, 551, 552, 556, 563: n = A,T,C or G
ctaattggagctccccgcggtggcggccgggcaaggtactttcttttttttttttttttgagatgaagttttgctcttgttgcccaggatggagtgcaatggtgcaatctcagctcactgcaacctccgcctcctgggttcaagtgattctcctgcctcatccttcctagtagctgggattacaggtgcccaccaccacacccagctaatttttgtatttttaagtagagaatggggttcaccatgttnggccaggctggtttnaaactcctgaccttaaggngaanccccctttgccttnggccnccaaaaagggntnggnaatnannaggggggnnacncncccccttnnncnnanaaaaagggggnttttttttntntggggggggggaaanattttnnaagggggggngcccccccnncccctnanaaaaaaaaanaaanccccccccccgnggggannaaaannntttntataaaanantttttcccccccccccccngggggggggggcccccccccanctttttttttttttntagnaagngnnncaanccccccnaaaa

SEQ ID NO: 2834 - DNA, 139 bp, Homo sapiens
  misc_feature 5, 15, 38, 44, 55, 59, 64, 67, 78, 85, 87, 103, 105, 110,128, 130: n = A,T,C or G
ggggnaaaccccggnggcggccgcccggtttggaaccngggttnaaacccccggntttnaaccncanaaccgcaaganaacgggngnaaaaaaagggaaacanancagcngtccaaagaaaacaaaangngggcaaacc

SEQ ID NO: 2835 - DNA, 294 bp, Homo sapiens
  misc_feature 212: n = A,T,C or G
ggtggcggccgaggtactgatcatggaactctcggggaggaaatgatgttttccttctacccatcttatgttcattggctggggctcctggaacagaagacagatttacaaaagagaaaggcacacaaatttatgtaatataagttttacatgacatgggagcctttataaggaaatgacccaaggaaatggttaaacctgagtggttttgngttaggtttgatgagcaatgaaaagctatggagaactatgataggaggagtgtgagctaaacgcaatgaactgggggaaact

SEQ ID NO: 2836 - DNA, 525 bp, Homo sapiens
  misc_feature 173, 194, 222, 266, 294, 321, 342, 352, 355, 369, 372, 381,382, 396, 397, 409, 417, 423, 429, 432, 443, 446, 453, 454,462, 463, 466, 479, 481, 482, 499, 505, 509, 519: n = A,T,C or G
tacttagggcgattggagctccccgcggtggcggccgaggtactttttttttttttttttttttttttctcaaaacggccttccttagtcctgtaaaacctggaatgcacatagtcctgtaatggccatcccagaagtgaatctacatgattattcaaattcaaatacctaanaaaaaaaatcacttgaagttntgcaacttcccaaatgcaaattcctganaaagaaacttgactgagccagttcaactttctgtattggattanaaatcctatcttgctggctggtctgtanattgggttgctcttgagtcaaaatgancctttttttaaagttaagccncttttgcccnttngggggggggccccnctnggggggggnnaaaaaaataatttnncccggggttttntttttttncccccnaaaaanctntttttttttcnaanccccccnnaaaaaaannggnccccccccccctngnngggggggggggggggtntttttntccncccccccccncaaaaa

SEQ ID NO: 2837 - DNA, 457 bp, Homo sapiens
  misc_feature 266, 442: n = A,T,C or G
ccgggcaggtactttttttttttttttttttttttgggtttttagtagagacagggtttcaccatgttggtcaggctggtcttgacctcctgacctcatgatccaccggcttcggcctcctgaagtgctaggattacaggtgtgagccactgcgcccagccctgagaaatagttcttctaattgtcatccagttttcatctgagtcctgttgttctttggatatgtgcccttccagagcacagcaggggttgttcaagtcttccanaaaagcagctcttgtttctcctcatgtggtgggagtggagtcagagcgtggctcaggccccacattctcagctgtttggatctggggactcgaagtttctggtggttacttctgaaagtcttttccaggataattattcttgctcggtttctctgcatctctgacaggctggtttncctgcttccccgctt

SEQ ID NO: 2838 - DNA, 404 bp, Homo sapiens
tacttagggcgaattggagctccccgcggtggcggccgaggtacttttttttttttttttttctttttttctctgtggaaaaagaaagaatttgactttatttagaaagtctacaaaatacagaagacgataactcgcttgctgtaagtcaggaaataaataaattctaggagccgggcaatattttttaacttttttttgagacaggagtttgctatgttgcccaggctggagtgcagtggtgcgatctcagctcactacaacctctgccttctgggcttaagtgatcctcctgcctcagcctcccaagtagctgggactacaggcatgagccaccatgcatggctaatttttgtattttttgtagagacggggtttcaccatgttgtccaggctggtctcaa

SEQ ID NO: 2839 - DNA, 466 bp, Homo sapiens
  misc_feature 376: n = A,T,C or G
aggtactttttttctttttttttttttttttggagacagggtgtttatctgtcacccaggctagagtgcagtggcgggattactgctcactgcaacctcgacctcctgggctcaagtgatcctcccagctcagccttcaagagtagctgggactgcagacctgcaccaccacgtccagctgcccggttaatttttttctgtcggtttgaagaggggagaaggtctcactatgttgcccaggcttgtctcaaactcccgggctcaagcaatcctcccactgttggcgtcccaaagtgcttggggttacaaggtgtgagccaccaccacactggggctctgctctgcctttctgagttttgggttttctgcttatggngggggagctttgttcccgttcttccccacaaagaacccagggatgtggcacaagcttccctgcccgtttttcctttaacttcaagttggg

SEQ ID NO: 2840 - DNA, 527 bp, Homo sapiens
  misc_feature 274, 303, 446, 459, 476, 479, 512: n = A,T,C or G
ccgggcaggtacaactggaaacagccaccggagagagaactgtctcgccttcgccggctttaccagggtcatctccaagaagagagtggccccccacctgagtcaatgcccaagatgccccctagaacaccagcggaagcctcctccactgggcagacaggccctcagagtgctctgtaggagctgtagactgggaagagaggccaggcgtggtggctcactcctgtaatcccagcactttgggaaagccaaggtgggccttgatcactttgantcccaaggaagtttttgagaccagccttnggcaccatggtgaaaacctttgtctttaccaaaaaatacaaaaatttagctgggtgtggtggtgcacacctgtagtcttaactattgggggaggctaaggtagggattcactttgattcccaaggaggcggagggttttgcanttgagtttggcanttcaacaccccttgcanttncagccttggggtggacaagcttaaaaccctttnttttcaaaaaaaaaa

SEQ ID NO: 2841 - DNA, 422 bp, Homo sapiens
cttagggcgaattggagctccccgcggtggcggccgaggtacccatgtcaatggagtaatgctcccaggagagttatggctgctctgctatgtcatgcaggttgttagggaagtaggggaaagctagaagttacaggccttacccagctcccatgcaacccaaaaggccagtctcactcccaccgtgccccaccctgacagcaccaagtttgtttccaggcagtgagtgagcagggctgagaacttgtcccaggctaccagcctgccagctgagaaagaaagcatggcttttgcatctttttgcctgttgagtctgcgcactggatttatgccctccctcgagttttggccgggagattcacgttttggttcaagtggttaccaaagtttacttggggaggtttccttttcctttgggtctt

SEQ ID NO: 2842 - DNA, 419 bp, Homo sapiens
  misc_feature 2, 268, 273, 291, 293, 296, 302, 318, 319, 322, 334, 336,340, 341, 352, 354, 364, 366, 368, 372, 373, 377, 381, 385,391, 392, 393, 395, 403, 405, 406, 407, 415: n = A,T,C or G
cnaattggagctccccgcggtggcggccgcccgggcagggtactttttttttttttttttttttgtatttttagtagagacagggtttcatcatgttggccaggctggtctcgaattcctgacctcaggtgatccgcctgccttgaccttccaaagtgctgaaattacaggcatgagccacgatgcccagcctgaggaacagatttctatatggcaaataataaaggcaaataaaaattaatgctaaaatagaatgaggaaagtattnttttnttcaccagaatggttgtnancanaaatgntttgcaccagggtggnnttnaaaaaaaccccncncttnnattttgggttntncctggggggntntngggnncatnaaanaccnttttannntntttttttnannnaaaaaaantttt

SEQ ID NO: 2843 - DNA, 496 bp, Homo sapiens
  misc_feature 229, 276, 396, 403, 416, 421, 423, 426, 434, 458, 469, 477,482: n = A,T,C or G
aggtactttaacttctttttttttttttttgagatgagttttgctcttgttgcccagactggagtgcaatggcgcaatctcggctcacaacaacctctgccacccgggttcaagcgattctcctgcctcggcctcctgagtagctgggattacaggcatgcatcactatgcccagctaagtttgtatttttagtagagacggggtttctccatgttggtcaggttggtntcgaactcccgacctcaggcgatctgcccgcctcggcctcccaaagngctgggattacaagtatgagccaccgcacccagcctaagatccaagattcttatgttttctctccttgccttttggaacctgcccggggcgtgagcggcccgccgggccaggtaccaacnagaaacncaaacaccttgcncagtntntcnaggcaccntttccaaaaaccaaaattttgganaaggtgaaacnttaacttnatatnggcttaaattttaa

SEQ ID NO: 2844 - DNA, 467 bp, Homo sapiens
  misc_feature 30, 33, 56, 68, 70, 79, 97, 129, 132, 168, 192, 194, 195,228, 317, 319, 349, 353, 362, 369, 375, 385, 420, 428, 438,447, 460: n = A,T,C or G
accgcggtggcggccgaggtactttttttnttntttattttttttattattttttntggggacggagngnccctcttgntgcccaggctggagcgcnatggcgtgatcttggctcactgcagccttcgnctnccgggtatcaagtgattctcctgcctcagcctcccnagtagctgggattacaggcatgcntnnaccatgcccagctaattttgtattttttagtancaaaaccgggggtttcacccatattgggtcaggcctggtctcgaactcccagacctcaagggtggatcccgcccaccctcggcctttcncnaaacctgctggggaattaccaaggccgttnaagnccaacccgncgccctnggccangggggacctnatacttctttttttaaaaaaaaagacatttttgtnggggggcntcaccacccnttatatttnaaaaattaggttnccttgcc

SEQ ID NO: 2845 - DNA, 381 bp, Homo sapiens
  misc_feature 60, 62, 95, 97, 99, 127, 158, 163, 196, 215, 250, 318, 336,360, 366: n = A,T,C or G
ccgggcaggtacttttttttttttttttttttttttttcctcatctttctttgataatgngngaagccaaggataggcaggaaccccaagttccntntntcctgggattgtcacaaaattccccctntccccatcgcatctattttttgtttgttttnttttnttcccaaagagggaaaaataccatgggctttanaggaatcatcgctcactgngggaaccttgccccctccccaagccaccccactgngcccataaacgtgctgcctgtaaccaattgttcctgttgaataacaatgcgagctgaggggctttttntgcctgagctgcaaatanattaggctgctcccttttatgtgngcaaanacattacccaaaagc

SEQ ID NO: 2846 - DNA, 354 bp, Homo sapiens
ccgcggtggcggccgcccgagcaggtacctcagaatgtaactgtatgtggaggtctttaaagcaatgattaagttaaaataaggctattagagtggggccctaactctaaatgactggatttatatgaaggagctagaagaaggacagacacaccagggtcctgtgtgcacagagggacaaccatgtgaagaggcagcaagaggccaactgcaagccgaagagagaggtctcaggggagaccaaccctgccagcactttgatctcaggcttccagcccccagaccagtgataaaataaatttctgctgtttaagccaccctgtctgtggcattttgttctagtggccctagcaa

SEQ ID NO: 2847 - DNA, 283 bp, Homo sapiens
  misc_feature 3, 23, 25, 56, 80, 81, 91, 101, 117, 133, 253, 257, 259, 265: n = A,T,C or G
ccnggggcggccgaggtaccatnangcttgcaggggctgaagcatggtttgtccanaaccccaaccaccaggtctatcgnnctctttctgncacctttttnctcttttttccttctncccttgcacctgaggncctggaaggccttgatgaggcccagcaaacaggcattctcacagctgggtttatagtctttgggccccttactcagtatcctgggaaccctgggccaggaagttaacagtggtcaatcanaaantnctgaanaaaatccccctccccctg

SEQ ID NO: 2848 - DNA, 569 bp, Homo sapiens
  misc_feature 8, 11, 14, 15, 18, 19, 28, 29, 45, 47, 52, 59, 66, 68, 76,77, 78, 89, 91, 92, 97, 106, 113, 114, 116, 118, 126, 131,133, 134, 136, 144, 166, 170, 171, 174, 175, 177, 178, 179,186, 197, 198, 199, 206, 209, 210, 216, 235, 241, 260: n = A,T,C or G
  misc_feature 264, 266, 272, 273, 275, 278, 281, 312, 313, 325, 328, 333,348, 349, 351, 355, 361, 371, 374, 384, 388, 406, 407, 419,425, 432, 442, 443, 444, 459, 465, 468, 474, 475, 490, 496,497, 502, 510, 512, 513, 517, 519, 521, 522, 523, 524: n = A,T,C or G
  misc_feature 533, 538, 544, 551, 552, 553, 555, 565: n = A,T,C or G
ccccccgngcnggnncannttttgggcnntttttgggttttcagnanggttngtggagnatccccngnggtttttnnnaaacccccccncnnaacanagaccaaanggggggnngngnaggggggnggggncnntnagagaggnggggcgggggcagcgggggggnaagnnggnngnnnagggganggggaggggcnnncccccanacnnggaggnggaaggggaaagaacggcnaggggnaaaggccggggggccaccnagcncngggggnncnacngangggggaaggaacgggggaaaccaaaggcccnncccccacccaanaanggccngggaaaaacccacanncngggnaagganaaaggggccnganggcgaagganggcncccaagcaggaggcgggnnggggccgcaacngccccnaaaaaangcccccgggnnnaccccaaggggggangggggncanaaaagnngggggggaaggaacngggccnnagggnggcccccngnnagangngnnnnggcggaaancccangcgccnggggggnnnanccaagggggnggga

SEQ ID NO: 2849 - DNA, 157 bp, Homo sapiens
  misc_feature 16, 25, 35, 40, 41, 42, 44, 45, 48, 50, 55: n = A,T,C or G
gagatgcagtcgattncatacctantgggtcccantcctnnntnnggncngttgngaagccggatagtgactgagatcactgggtagaccttgtccaccttggcattcttgtctgccaaggtccatggcccatggggatggggacaatttgagtggg

SEQ ID NO: 2850 - DNA, 490 bp, Homo sapiens
  misc_feature 11, 18, 19, 29, 31, 36, 39, 76, 89, 124, 182, 210, 220, 260,262, 267, 270, 279, 304, 332, 341, 342, 343, 345, 348, 349,362, 378, 384, 402, 412, 419, 423, 425, 457, 465, 473, 474: n = A,T,C or G
ggcaggaactnttctttnntctttttttntnaagtnagnggtaatttaaaaatctgaaatataggctgggcgtggnggcttacgcctgnaatcccagcactttgggaggctgaaagttggggcnggattcatctgagctcgggagttcagggaccagcctgaccaacatagagaaaccccgnctctactaaaaatacaaaaattagccanggcgtggtgngcaccatgcctgtaatcccagctgtttcagggaaggcccnangccanganaaatttgcntggaaccccggggagggccgggaangtttgttggatggagccccgaagatcanccaatttgnnnanctnncaaacttttgggnttgaacaaagaagccnaaaaanttccccaattctttcatnaaaatacaangaaaacnttananaaaaattttttgaaaaattaatggggaccccntgggaaangaggcccnntaaaaaaaaaaaaaaa

SEQ ID NO: 2851 - DNA, 320 bp, Homo sapiens
  misc_feature 2, 4, 18, 31, 45, 48, 51, 62, 78, 79, 117, 124, 125, 134,136, 137, 154, 157, 182, 189, 190, 191, 216, 224, 248, 275,281, 282, 298, 309: n = A,T,C or G
cnancggaaggggccccnggggggggggganaagggcaaaacccnggnctnagcaaccacangggggggccggagccnnggggggccaggaccaggggagagggaagccccagcccngaggcgnncgcaccacncnnagcaccagcgcaccaanacngcagacgaggaaggaagcacaagcnccccacnnnacaaaggggaaaccgaggcgcgggnagcgcggncccggggacggccgcacaagaacnagggggacccccccgggcggcaggagngccggnnagaagccaaaacgaanccggcgaaccngggaggggggg

SEQ ID NO: 2852 - DNA, 320 bp, Homo sapiens
aggtacgcggggatgcgcagtcgtgagtcctcttgtccttgagcgtcaaccttctttccctgaagtggctggggttcctgtttccttctttgattgacaacttgtgttaaccctcgcacatctctgggccaatttttgcttgaaaatggcagctcccgagcagccgcttgcgatatcaaggggatgcacgagctcctcctcgctttccccgcctcggggcgaccgaacccttctggtcaggcacctgccggctgagcttactgctgaggagaaagaggacttgcccgaagtacctgcccgggcggccgctctagaactag

SEQ ID NO: 2853 - DNA, 377 bp, Homo sapiens
  misc_feature 4, 19, 48, 197, 206, 207, 218, 278, 282, 301, 302: n = A,T,C or G
cggnggcggccgcccgggnatggtaccctctgtcacggcttccttttnctggaaaagggaatttcccaaccccgggtgaggcaatgccccgccctgctccgtgggctgcacctgctgtctgtcaagccccaatgagatgaaccctgtacgcgggggcctgggatctcaaaatggcggccccgtgcggaaacagcgtntgggagcanncatgttgcctnctgaacaaagccgttgaagatgaagaatgggcaaaatcgccccatacggaacaagcgcancctngggagcccgatacctggcnngcgaacaccaaacgggagaatttcgccaatatggatgtgacagcggttcccattaaagcggtgatagggattttt

SEQ ID NO: 2854 - DNA, 419 bp, Homo sapiens
  misc_feature 140, 195, 216, 239, 257, 262, 305, 326, 333, 341, 350, 358,375, 378, 389, 391, 392, 393, 396, 403: n = A,T,C or G
ccgggcaggtacgcggggtgggcattctgggtaacagagctatttacttcctgcgggtgcacaggctgtggtcgtctatctccctgttgttcttcccatcggacgaagatggccctggagacggtgccgaaggacctgcnggcatctgcgggcctgtttgcttgtgttcgcgtggtcaagactagtaccaccagntttagaatatgatggcttgtngacaacatgttgatgtcatatgntatcaaaatcgaaacggngtcanctccgaagaaggatgggttattattgacttgcaccttagcctnttcgcttttgcatggggatanccatttngctcattnatgaagttnccatgtantgtacaggccttggggntcntttcaaaggtntnnnaanctgcagntccagttaaaaccttt

SEQ ID NO: 2855 - DNA, 351 bp, Homo sapiens
  misc_feature 185, 246, 280: n = A,T,C or G
ctttcatgtgatctttgtggcagtgggacaggaagtaggcgcgggccctcaggttctccctatcgaagcggtctatggagatagttggatactcggccatctgcccctcgaaagaactcatagcgccgtcgatcccagagtccgggaccccaaaaccgcagctgaagccaaggccagccctgacncgcccccgcgtacctcggccgctctagaactagtgggattcccccgggctgcagggaattngatatcaagcttatctgataccgaccgaccttcnaggggggggcccggttacccaagcttttttgttcccttatagtggagggtttaaatttgcgccgcttgggc

SEQ ID NO: 2856 - DNA, 444 bp, Homo sapiens
  misc_feature 38, 51, 53, 59, 64, 68, 72, 79, 80, 85, 86, 87, 92, 95, 116,124, 129, 133, 154, 269, 275, 277, 318, 326, 386, 392, 419,433: n = A,T,C or G
gggcgatttggagcaaaccccgggggcggccgcccggnttggtaccaaaantncaaacnaccantttngaanccggcgnngacgnnngcggnccnagctactctggaggctgaggngggaggancgctngagnctgggaggcagaagttgcagnaagccgagatcatgccactgcacaagctaggtgacagaatgagactctgtctcaaaaataattaaaaagcctctgccccaaactcgttaaaagattttataaccacaactgctgnttctgngnagatgcatctgcatgcccaggagcagtaaatgcaataaaancatttggntatactttgaacacaaaataaacgggtgaggcttttactttcgaaaaaaaaaaaaaaaanaagggncctcggccgctctaaaactagggggancccccgggccgcanggaaatcgata

SEQ ID NO: 2857 - DNA, 167 bp, Homo sapiens
  misc_feature 56, 79, 86, 100, 103, 117, 142, 149: n = A,T,C or G
acattaatttgcgtttgcgctcacctgcccgcttttccagtccggggaaaccttgncgtgccagcttgcatttaattgnaattcgngcccaaccgctgcngtnggagaggccggctnttgccgtatttggggcgcctcttcncgctttnctcggcttcacttgactc

SEQ ID NO: 2858 - DNA, 474 bp, Homo sapiens
  misc_feature 73, 385, 445: n = A,T,C or G
tacttagggcgaattggagctccccgcggtggcggccgaggtacttgtcctcagcttgggcttcttcctcctncatcacctgaaacactggacctgggggtagccccgccccagccctcagtcacccccacttcccacttgcagtcttgtagctagaacttctctaagcctatacgtttctgtggagtaaatattgggattggggggaaagagggagcaacggcccatagccttggggttggacatctctagtgtagctgccacattgatttttctataatcacttggggtttgtacctgcccggacacatccagtaggctaaggggatgctttccttttctggggtttttcggggggttttttggagcggggagagggatgaangaggtgctccccttaatttctttattgagaatgatgccgtggatacttgaatttaagcanttgtcacatgggcagtgtcctacctgggg

SEQ ID NO: 2859 - DNA, 307 bp, Homo sapiens
  misc_feature 38, 39, 68, 115: n = A,T,C or G
agggcgatttggagctccccgcggtggcggccgggcanntactttgcggtttttgggacttgattttngcagagggatcgggcactgaaggtgcagttctcaaaatcacacctgnaggctggctcctcgctgtgggtatccaggtgcttctggaggtcaataagattcttgcagctgtagtcacaacagtcacatttaaagggccggtcctcactgtgacgaaagcgcatgtggttgcggagggaggaaggcagcgggcaggtcatgtcacacagagggcacttatagtgattcacatggttgcgca

SEQ ID NO: 2860 - DNA, 232 bp, Homo sapiens
  misc_feature 10, 43, 89, 125, 171, 181, 216: n = A,T,C or G
atgcgttgcngctcactgccccgctttccagtcgtggaaaacnctgttcgtgcccagcctgcatttaatggaaatcggccaaaccgccnccgggggaggagggccggttttgccgtatttggggncgcttcttcccgcttccttcgctcaactggacttcgcttgcggctncggggttcgnttccgggcttgctgggccgaggccgggtatttcanccttcaacttcaaaag

SEQ ID NO: 2861 - DNA, 412 bp, Homo sapiens
  misc_feature 21, 60, 68, 72, 76, 132: n = A,T,C or G
ccctagggcgttttggagctncccccggtggcggccgaggtacttttttttttttttttncccggagntttntaanaagatttatttagcaaaaatacatatagccattattgcaagacttaaatgagatgntaaatgttcaacccaattttctttcctggataagtttttctttcatatccctgtcagttttgaaaacataataccagaagaaggggggcccaattccacagagagctcccaagaatgagtttctgggagtgagtctgaagttgagataaacctttgctgatcttgcttacgttcaatgcatctgggcagcgtctttgatgagccctggcggttaggctggtggcactgaagcaggcctccagggtctcctgtttaagcaggattttaaggccaaccctgc

SEQ ID NO: 2862 - DNA, 462 bp, Homo sapiens
  misc_feature 382, 462: n = A,T,C or G
catctatagggcgaattggagctccccgcggtggcggccgcccgggcaggtactttgggaggctgacgcaggaggaccgcttgagctcaggagttcaagaccagcctgagcaccatagtgagacctcatctctactaaaaaaaaaaataaaataccaggcatggtagcatgtgcctgtagtcccagctactctagtcccagctacttgggaggctgaggtgagaggatcacttgagcccaggagatcgaggctgcagtgagccattatcacgccactgcactccagcctgggcaactaagcaagaccctgtctcaaaaaaattttaaaaaatttaaaaaataagaaaatccaagctaggttgaaatctgaatgttgagcagntcagtgaggcacaaacttagcttaagaaagtcaaccctgcccacttgccattttgaaggttattactagccaaaattacn

SEQ ID NO: 2863 - DNA, 405 bp, Homo sapiens
tatagggcgaattggagctccccgcggtggcggccgaggtacagaaaattagcaaggagacattttctgcattgtgagaaatcaacatagacaccttaaagacccctttgagagtgtggctttttgaacttttcagattttgctcagtgacctgctaacacttacgtgagaggctccaggtgtaaatagaatctaatggcagaatctgtaagtgtaaacaagcatcttaggagtgagagatcaagaccacaaaatgtccagagctatgaccacagctatacctacccataaaatacgatactggagtagggtatttttgtcttttttcttacctaagagctagctaatcaggacaggtgatggcaggttctggagctctaccagggcaggtctattttctttttt

SEQ ID NO: 2864 - DNA, 450 bp, Homo sapiens
  misc_feature 132, 299, 425, 436, 438: n = A,T,C or G
aggtacagctcttctcttgtctttctgagctcttaccagaattgccttccgtgtctttttttttggagatggagtctcactctgtcacccaggctggagtgcagtggcgcaatctcagctcactgcaacctntgcctccctggttcaagcgattctcctgcctcagcctcccgaggggctgggactacgggtgcacgccaccatgcctggctaattttttgtattttagtagcgacagggtttcactgtgttgcccaggctggccttgaactcctgagctcgggcaatctgcccgcctnattctcccaacatgctaggattataggcatgagccaccacgccctgcggtgtccatatttctaacagcagtcacttcagagccatctaggtttcttctaacatgcacctaaaaactctttggcctntactacctagntntgaaaccatttt

SEQ ID NO: 2865 - DNA, 159 bp, Homo sapiens
  misc_feature 21, 29: n = A,T,C or G
cggccgccgggcaggtacagntgcatcanctgctcgtaggacatgtccagcagctggtcgaggtccacgccgcggtaggtgaacttgcggaaggtccgcttcttcttctgctctacttctgccacccgcgtaccacggctatccttatagctttttaat

SEQ ID NO: 2866 - DNA, 298 bp, Homo sapiens
cgcccgggcaggtactttcccctcccccagaaaagcaggacttgcccgctaagggtgaaggaccaaggcaggcgtccctgagtggtctgacacctttgaaacgtgagtgaataatcagagaggtgtccctgcaatgattaaacaccaaggaaaggctgccttcccagtctgtgaccagcgccagagttttgggtccacggataaaacgtgtctcgtttgtctctaccagaaaatgaaaggaattgaaattaagagaagggagagattaaaaaaaaaaaaagaaaaaaaaaaagtacct

SEQ ID NO: 2867 - DNA, 553 bp, Homo sapiens
  misc_feature 14, 266, 329, 330, 331, 332, 333, 334, 335, 336, 337, 338,339, 340, 341, 342, 343, 344, 345, 346, 347, 348, 349, 350,351, 352, 353, 354, 355, 356, 357, 358, 359, 360, 361, 362,363, 364, 365, 366, 367, 368, 369, 370, 371, 372, 373: n = A,T,C or G
  misc_feature 374, 375, 376, 377, 378, 379, 380, 381, 382, 383, 384, 385,386, 387, 388, 389, 390, 391, 392, 393, 394, 395, 396, 397,398, 399, 400, 401, 402, 403, 404, 405, 406, 407, 408, 409,410, 411, 434, 435, 436, 437, 438, 439, 440, 441, 442: n = A,T,C or G
  misc_feature 443, 444, 445, 446, 447, 448, 449, 450, 451, 452, 453, 454,455, 456, 457, 458, 459, 460, 461, 462, 463: n = A,T,C or G
ccgcggtggcggcncgcccgggcaggtactttccccttccccagaaaagcgggacttgccgctaagggtgaaggaccaaggcgggcatccctgcatggtctgacacccttgaaacgtgggtgaataatcagagaggtgtccctgcaatgattaaacagcaagggaaggctgccttcccagtccgtgaccagcgctggagttttgggtccacagataaaacgtgtctcctttgtctctaccagaaaatgaaaggaattgaaactaanagaagggagagattaaaaaaaaaaaagaaaaaaaaaaagtacctcggcccgctctagaactannnnnnnnnnnnnnnnnnnnnnnnnnnnnnnnnnnnnnnnnnnnnnnnnnnnnnnnnnnnnnnnnnnnnnnnnnnnnnnnnnntgttccctttaagtgagggttannnnnnnnnnnnnnnnnnnnnnnnnnnnnnagctgtttcctgtgtgaaaattgttatcccgctcacaattccacacaaacatacgaacccgggagcataaagtgtaaaagcctgggggtg

SEQ ID NO: 2868 - DNA, 611 bp, Homo sapiens
ccgcggtggcggccgaggtacaaattgtcgtttttattcctcttattgggatatcattttaaaaactttattgggtttttattgttgttgtttgatccctaaccctacaaagagccttcctattcccctcgctgttggagcaaaccattataccttacttccagcaagcaaagtgctttgacttcttgcttcagtcatcagccagcaagagggaacaaaactgttcttttgcattttgccgctgagatatggcattgcactgcttatatgccaagctaatttatagcaagatattgatcaaatatagaaagttgatattcaacctcacaagggctctcaaagtataatctttctatagccaactgctaatgcaaattaaaacatatttcattttaacatgatttcaaaatcagtttttcatactaccctttgctggaagaaactaaaaatatagcaaatgcagaaccacaaacaattcgaatggggtagaaacattgtaaatatttactctttgcaaaccctggtggtattttattttggcttcatttcaatcattgaagtatattcttattggaaatgtacctgcccgggcgggcgctctagaactagtg

SEQ ID NO: 2869 - DNA, 524 bp, Homo sapiens
  misc_feature 9: n = A,T,C or G
gcgaattgnagctccccgcggtggcggccgaggtctaatttgaatttgtaatgagtctgatggtatatttcaattttttgctttgagggactggctgctacattgcagaatatcttatatccctgactgctttccactaaatgtcagtggtgaccccaatccaatattatgacaactgaacatgcttatgcatccctcatgcctttattttttattttgggaaatctttcagcttcagtttttgctgatatttatgtgattctttgttctgcaattcaaatttctgggagccaaacagtctccttggttcagattactgttttttgactagagcttctcgcttcagattctgtcataagattatggcttaacctatggttgtcctttgatttggtgccatatgaaataaaacattattttctatggctatgtattaagaattttgtgcaattctgtttttcttagaaggctgagggtgtgttgtcagacaccatgactgatgtgacaggtgtattttattatgc

SEQ ID NO: 2870 - DNA, 481 bp, Homo sapiens
  misc_feature 444, 457: n = A,T,C or G
atagggcgaattggactccccgcggtggcggccgagtcctaccctttactttttccccaagaccatctcagggtggagcattctgtctaagagaagaaagataaggaggctcccacccacctctcccaagagcagacattaaacatctttgtgctttgaagagagtgaatttggatagtcttgtgattctcaagactaacttccagaattatactttaaccccttccagatatggtccgcctttggcattgtgtgtacctgtgatggggcgtgtggtttccggttgtctcacctttaattgtcaacctccagtgtatgactctagaaatatgaggaaaagcttttcagtttttaaaattgccatttaaatttagtctattaaaaacaaacctagaggtcttgggttgcagttgatttcagagtatattaatttagtgggtcccnaaagtattacatntatttatattctggaatgaaaagg

SEQ ID NO: 2871 - DNA, 396 bp, Homo sapiens
ccgcggtggcggccgaggtactccttcgtaaaccatggagagccagcccaatgcacagcagtggatatcatctttctcagagtccagtatcacagaatcacgactttgtccagctgcaggtgcctgcaggtcacactggctaactacttctgtgatgggctcttctttctgaggttctgccaacttgtctactacatagggttgatcatcctgttcaggaaatatttctttcatttgctctgagcttaatattgtaatttgtatttgatctgctgggtctttggagtcaggactggttttatcagcagtttgatcttctgaggtctggtatgtagtttgctggcccacagaaccttcacgtgtattcacagcctcaatgccataaggaaactcttt

SEQ ID NO: 2872 - DNA, 236 bp, Homo sapiens
  misc_feature 23, 64: n = A,T,C or G
cccttagcgtggtcgcggccgangtacaaggtgaaccctgaacattctgtgtcagaaagctaangaagtgcccagagaatgataaatcaatcaaaagaacaaagcgacaagcatgaaaggccaaatatgagataatttgggaatttaaaaaatgaacataatggatccgtaacacattgaattttttaaaattcttgagcctgtaatgatactggaggaaggagtcttttgtttac

SEQ ID NO: 2873 - DNA, 419 bp, Homo sapiens
  misc_feature 324, 384, 411: n = A,T,C or G
ccctttcgagcggccgcccgggcaggtacgcggggtggggatattttgtctcacagattgtaagaaaggggtatggaaatccccaggcaacagtgtgctcctcagcttgctgaaacagaccaaagactatgttctaatcaaaccttccaggaatctcatggaaatttcatttaatgcctctccaggcacttttctgaaagcccccacgttagggatgtcttggctaagacatctctcatggtatccacagcaaccctgatgaagctcatttctggagaagaagaaagtctctcaacacctctgctaagtcatcattctcccatnctcactgcagcagttcctggaatctcatgaagggaagcttgggacccaccgcacaccctntgcaaatacctcacaagtaaacttggnaaatgccg

SEQ ID NO: 2874 - DNA, 324 bp, Homo sapiens
cccttagcgtggtcgcggccgaggtacagtcctagccacagtagtaatcaccactggcctgactgagccctcaccctttatacagtgtctcctgccaccctcctgggagaggctgttctcggcacagctggcctggggtcacacagctggtaggtgtaaagcaggcattggagtccaggtagtctcactccgtagcctgtctctttagccactggaaatgtagagcaaagcgagaattgtccaaagagataagctaataaagaggaaaacaggctgggtgcaatggctcatgcctgtaatcccagcactttgggaggccaagga

SEQ ID NO: 2875 - DNA, 385 bp, Homo sapiens
  misc_feature 83, 86, 88, 288: n = A,T,C or G
cccttagcggccgcccgggcaggtacatcaccctgctgagggacatccaggacaaggtcaccacactctacaaaggcagtcanctncntgacacattccgcttctgcctggtcaccaacttgacgatggactccgtgttggtcactgtcaaggcattgttctcctccaatttggaccccagcctggtggagcaagtctttctagataagaccctgaatgcctcattccattggctgggctccacctaccagttggtggacatccatgtgacaagaaatgggagtcatnagtttatcaaccaacaagcagctccagcacccaagcacttctaccttgaatttcaccatcaccaacctaccatattcccaggacaaaaagcccagcc

SEQ ID NO: 2876 - DNA, 625 bp, Homo sapiens
  misc_feature 463, 610: n = A,T,C or G
cccttagcgtggtcgcggcccgaggtacaaatagagctggaatgatgatgatcacaatgaagatgacaacagtggtggcaatgacacggctgccactacttggagtggcctcggagtttaatatcaaaggctggcctgggtttgagctggttgagggagaagtgagtgtattgcatacatgagaaaacctgagcaaaggaaagatgagactcaaatggcagcactaagaccattttgcactggagtatcagatatattttgaaaagaagactgtagagtgactttttgaaagacatgggggattaagcaggtaaagagaagcttgaagtggtatttagagatgctacatttagtgacttcagaaggtataaactgaagcagcaatgtagattaatattcaagatatggggataaaagggtgactaaagtgggatccaaagcaaatgggtgcccgaaaaaccantgaaagaagaacttgatggaggctatgatctaatttacatttaaggggaatgaggaaaaccagtgggaagaatttgccacccttgaaaaattaaatactggaagttctgacccaaagaaattagggttaaaaaaaagaaattaaaangcctttctttttgga

SEQ ID NO: 2877 - DNA, 357 bp, Homo sapiens
  misc_feature 349: n = A,T,C or G
cccttagcgtggtcgcggccgaggtacctccttcagtgagttgttggcaactaggcagtgaaatgagggagtgaccgctcatggctcatgaactttgcaagttgtgcaactcaactgtcccaccttgaaagggctcaggaaggtaaagagtgttgttttgggacacagggattgttgcatttaaatctttgtgactgtggtttggtctcagactggtttttcatgcataagttcttcttaccctcaggcatctgggattttacctgtttttcttccagtggtgtgccctctccgccacattgtggaagcgtgctttctcaatccttcaggaagaaattcaaagactttnttttttaa

SEQ ID NO: 2878 - DNA, 308 bp, Homo sapiens
cccttagcgtggtcgcggccgaggtacattatttagtgtaatgcctaatgttagtcctctttatagcatattttatacaatttctattatttaacaggccttgggaattcaaagatgaaatgtgtgtccctcaagtaactcactaatctattgttataagtagattgtaattcatgagtgctgtaacagctatcctatgacagcactgaagaggatgtggacttcctagatgaatatgtattgagttgtaggggagtaagaattcacctaccagtgaactagtggacctgaagtggtattccagattg

SEQ ID NO: 2879 - DNA, 528 bp, Homo sapiens
cccttagcgtggtcgcggccgaggtacagttctcagtttttcttataggagaaatatggtatatgtttataagaatcttttatgagattatagatttcaatgctgtggatagtgtcttgcacccaaacaagaaagtccataatggaatgatcttccctcagcttcctatcgatttagttacctcttgaaagcacaaaaattaaaacattgccatatgttgaatttttaaaaagcacttggagtgagcgaacatttcctgataaatgccttttagagataggttcttgatattcagacatctgcagaaatgttctggttcccaaagtcatttcacttcgaaataaaacacagctccttcaaacagcactttttccacataaatctaagttgcctctccctgtggacattcagaactgatagaacaaacactactcttttgaatttgatggttcgtgtcctttaaagtgtttgaggacctatgcagagcctgtacacttggggtagtacctgcccgggcggccgctcgaa

SEQ ID NO: 2880 - DNA, 328 bp, Homo sapiens
cccttagcgtggtcgcggccgaggtacaaatttattaagctctaggttcatcagatgaccaggaaaacatagactatcaggacacagacaaagcagaactgcagaattatagaaaattcaaggtctcatggaggaaaagcagtatctacaataagaaagagaccccaaacagcactctagatttctttaagagggattatatttcctccttcctcccattctcccttcatttcttcctacctccctcttttcatcctcttctccttttatcttttcatcattcctttcttaagcattttacttagttactactatgttctaagcactg

SEQ ID NO: 2881 - DNA, 567 bp, Homo sapiens
ccctttgagcggccgcccgggcaggtacaaaattgctaattttattccagtgatgattatttttaactttggtgattacgtatcaaattaaggtaattctataaaaatctacagccagtaaactgaaactatagctaaaactgtagctactgtttttatattttcttagatgcatgttgttttattataatagtttaatgtagtggttgaatggaatatgtggttttcttctagaataccttatgtgatttattctatgacttttttcctttgaacccttatgactcttagtatgtaaattttcttaaattatactcttttgttgtttattctaaactacttgaggcagatctcaaaagttgaataattactgtgcatctcagagaattgtcttgtgtctttcaaatatatttagttgtctttagcagtaactcttacatggttatttgcatgacttaataaacatttcaatgcccccaagttacctagcagaaaaagtccacttttaaagacatctgtaagagagaactttatttttcttaaattggaagcacatcatttagtcct

SEQ ID NO: 2882 - DNA, 462 bp, Homo sapiens
  misc_feature 200: n = A,T,C or G
gtacacagcaaatacaatcttatgtcagttataaagaataataaataattttttgaaaagcaaagtgacttgtccataaccacaatatttttcattttcaaatctcatttttatttcttatgccacattgcctataattatacagctaacaattatcccatgctcagaagaaataaaactgacgtagttagtaatcagtnatatatcattcccttaaaacaagtattgctgacttaatatgcataaaactgctgtcacataccaaatatgaccaacaggtaaagggtgagaacaatttcactgactacaatatttatagcaaaataaagtgtctatatagtgggaaagaaatatgcttaaaaagaaaatagggaaaatgcccagtagaagaaataaactaaattatgcaacctgcccttaaaaaaaaaggccttttattggtatttcaacctacccagaatt

SEQ ID NO: 2883 - DNA, 526 bp, Homo sapiens
  misc_feature 63, 73, 74, 75, 77, 121, 168, 173, 190, 200, 229, 235, 243,249, 280, 326, 333, 351, 354, 356, 358, 379, 411, 414, 426,432, 434, 440, 461, 490, 495, 500, 501: n = A,T,C or G
cccttagcggccgcccgggcaggtacttttttttttttttttttttttttttttgcgtgtganacgaagtttnnntnttgttgcccaggctggagtttgacccacaaaataaggttcccanatcaccatcaactaaagttcaaaatagacaaaccctatccatcctanccagngattatttagtatttgnggaaagcctntaaatttaaagggtccacgaacaaagacngagacnaaagaatnagagcnacatgtaggaaaaagagatttacacagactntaaaacattaacaaaaccaagatttgtattaccagaaaaagagttnttttgtntaagaaacaaaaataagntgntntngggaaaaaaaaaaaaaacagntggaagcttaaaaggaaacttaaggaaacctnccngaaagaagaatnaaatgngngaaatngaaatagggagagaaaacttnaaagcccaaaaataaaaattgaaatgacncatcnttttnnggaacccaaaaaaaaaagaaaaaaa

SEQ ID NO: 2884 - DNA, 378 bp, Homo sapiens
cccttagcgtggtcgcgaccgaggtacagcaggcctaatgataagacagcctacctgggctccagcctgcctgtaactgtgtgaacttagcaagtccttcactcagtcagactttgctttctacatctgaaaaagtcaaaagaaagaaaataaaaacctcagcctacctccctctcagggttgttacaagggggaaaagagcataaaacagatgcaagaagtgcttccttaaagagttcaatatgaattgtttttctgtttaggttatgttaaatctatttcatattattaatcccttccagatgacacccatcaaacaaacacccaaatggtccatgtctgaaagaccacagacttttcttttgggaaaaaaaaaaa

SEQ ID NO: 2885 - DNA, 456 bp, Homo sapiens
  misc_feature 33: n = A,T,C or G
ccctttcgagcggccgcccgggcaggtactttnttttttttttttttttcttttttgagacagtgtctcgcactgtcacccaggctggagtgcagcggtgtgacaggcacatgccaccatgcctgactaattttatcgttttcttttttttttcaggtagagatggggtttcaccttgttgtccaggctggtctcgaactcctgacctcaggtgatccacctgccttggcctccttacgtgctgggattacaggtgtgagtcaccacgcccagccattgatctgttgcctcttactagagcttcttgttggattccagttttttcccactctattttattcatttgtggcctttggaaaatagatctgttcatttcatttacccaccaaaaaaggataagttcttactctttgaaataaaaatcaaactccttagtctgcctctgaaataaaaatc

SEQ ID NO: 2886 - DNA, 324 bp, Homo sapiens
cccttagcgtggtcgcggccgaggtacctattgtatcagaaaaatgctaattaattttttgcacataaagggcattttaaacttggttttattctttgtgataaatatggatgatgaatggtaatgttaaacagaattcaaaagttatcagtttggctagccagacacagtagtatatgcctatagtcctagctacccaggaggctgaggccagaggagcccggaagttcacgtttagcctgggcagcatagtgagacacttgtcttttataaaaacaacagcaaaaaatgatcagttttggggataagtaaagacaaaatggc

SEQ ID NO: 2887 - DNA, 488 bp, Homo sapiens
  misc_feature 118, 348, 382, 398, 415, 431, 449, 453, 466: n = A,T,C or G
cccttggccgcccgggcaggtacgcggggaaaaaaatatttttatcttttagaatatcagtttgtcccttacagtaatgtaaaattacatttattttatctttaggatataacatctnaaacagaggctattaacttttacactatgtgtaaagaaacaacttgagaggcaactttattatgcaaccacgatcatgaaggggatgaataaaccaactacttagaaaaaaaagtgctctattatcatggaatggttttcattgatcctttcttgtatttctggaatcactagaactaatctccaatctatgcactgaatttttgacatacgataaaatgccatgatttnattaatggattaaaatacttgtctggaagtatancttttttaaataattncagtggatgataatttnattgacaaggtgacanacctaaattctgttttcntccntgccttgcaaaangaaacttttagggggattaaaa

SEQ ID NO: 2888 - DNA, 379 bp, Homo sapiens
  misc_feature 126, 218, 244: n = A,T,C or G
cccttagcgtggtcgcggcccgaggtacaaataaagtattccaagggttcagaatagaaaatgatttcttccagcttggggacatttgggaaattgggatatcctttggggaaatgtagtaatcantatattctgggaaaacatagtagaagaatgaataaataaattccattgaatttggaatatgttgccattctccctgtaactaatgctatcangataaagtagaaataccacatttcanaaacagctggagtagacaggtcttcataggctagcttgggaaacctaataactattaataatgaaattttaattatactcttggattctaaacaaatgaacacacagtgatctttttgacttgctgcttggttat

SEQ ID NO: 2889 - DNA, 321 bp, Homo sapiens
cccttagcgtggtcgcggccgaggtactgattgttgaactccgagtcacactcattatgacctgggaggcagatgtctagccttcagctaattatgatgggcagtatggaggagagtgtgagtcaaaccttccatggaggaaaaggagtgaacactcagggagactggagccgtttaaaaggacatggggaggatctaatcaggatcttgaaaatttaatgttctcaaaagttatttctatcagtcttaagtaatagatgaatttctttttgccactgcaaagatgatactgtcttgataaccattctctatcatcatgcc

SEQ ID NO: 2890 - DNA, 425 bp, Homo sapiens
  misc_feature 15: n = A,T,C or G
ccctttcgagcggcncgcccgggcaggtaccacctgactcagctgggtgcatttgaccagttttgcccccatctgtaaatatccctcagtccccatggagctgtagaggtgagtgatgaagcagtgacagctctgggtaggaactcagcttaatttcaagttccagaccctctccatcctcaggttcttcttctgtaaaatgaagatccctttgcggtgaaacgttttgcagctctggaatctgagggtgtaggaggagctacagaagaggggtataggactcacctgaataaaggtggcatctgtgattactgtgggcgagggtgagagggaagaggatactgaccgctaagccttgccttcttagtccaaattttggttgtgcattaaatatgtcttaattttttttataacttaacctcacc

SEQ ID NO: 2891 - DNA, 524 bp, Homo sapiens
cccttagcgtggtcgcggccgaggtacagaaggctaagtatcgctaatttctattcagagacacagggactctacccttgttcctggctttataaagctgctcagttctaatgtgcactgcacacaacagctgccagggccacaaacacccccaagcagacgttaggctctcaacccctaagatacagttttcctctcaatagctcataagactctgccctctgacgtgagaaaatagaattctgttgtgctttttaagtatgcctatggcatcttttaaaatataccatatatgatccagtatttctttgtgtttggagtgtgaatctgcaggtgaaagagtgtgttctacacgtgcccgatccatcctcattacacaaattcaccctctactttaaaacagggaatttgggcctttgacaggaaacaagccggacagtcatggggccaagctggaatcaaatgtaaatatttaatttcctcctgttaaaagcagagtggacccacagtcccttccaaagtaa

SEQ ID NO: 2892 - DNA, 571 bp, Homo sapiens
  misc_feature 261, 376: n = A,T,C or G
ccctttcgagcggcccgcccgggcaggtacccaactaggaattggggctcagcaaagtgccctggaggaagtgatacccaagctgagagatgaagaataatgagtggggtagccagggataggtgagagggaacatcctccaggcagaaggagaagcagacacaagggagggtgtggcaagagatgaacctgaaaggcagtcttggaccatatcagagaggaccttataagctcatcatgaagcttaaaatgaatccttangtcattggacagctgtggagaaagagtttgtaaggggagggaagttatatgaatcacaggaattttttaaaggtggctatggtagtagtgtgaaaagagaaatgattaacagtangcaagctcagagaaagaagcccgccaaggaggctgtcaccataatccagcagaaagaagatggtggcctggactggggaaagtgactgtaggggatggagagaaatggatgggcttgggaaatgagaaagggataggatccacagggcttaggatttgagtgaatagaaaagagagagaaaagttaaaccagacc

SEQ ID NO: 2893 - DNA, 417 bp, Homo sapiens
cccttagcgtggtcgcggccgaggtaccactgcactccagcctgggcgacaaaatgagaccctgtctcaaaagaaagccctctccttagctgagcagaggaagggaaggagtgtggctatgagaatatgatttatgccattttctgtttttaaatctagaagatcttctaagcacaaatacagctacaatgaaatattttacagacaaaatgttaatagaccatattctttgaattaaatttgtttttaattttctctacacattttttttttcctggagtctcttagctctaaatatatcaatcagatttataattttttttacctgattcagatgtcttacatttttatattaaatgaaccttaagcatgattcttttggtaagccagtatgaatgccagtggttggggggcggg

SEQ ID NO: 2894 - DNA, 235 bp, Homo sapiens
  misc_feature 79: n = A,T,C or G
cccttagtgtggtcgcggccgaggtacagtccacaaaatggtttgcttctgaaaaagcagtagtagtcttacatccaanattattcctaaaataaagtttcgacccacatatataatgaaattgaaactgcctacattggcaaagccagaaagagagtaaaaaagatggggtaggccagttgcggtggctcatgcctgtaatcccagtacctgcccgggcggccgctcgaaaggg

SEQ ID NO: 2895 - DNA, 558 bp, Homo sapiens
  misc_feature 471: n = A,T,C or G
cccttagcgtggtcgcggcccgaggtactgtctgtgacaagagcaagaaatacattttgaagtggtttgttttagtagctaaagttatcctgactgatcatttgataaaggatatttaccagcagttcacaatgaacatactactacatgtatatattaaagatcatagcctgcacaataaaaagaagaaaataaataaattagaaaataaatagtttagaaacaaagacacagtattagttctagttacagaatatgattctccaaatagtatatgctatcagcttcatcaacaagtaaccagaataccaaagaagacatagaaatggctaacaagtatataaaaacatgctcaacatcactaattatcagagaaatgcaaatcaaagccacaatgagatattaagtcacacctgacaggatcactattatcaaaactacaaaagtcaatacttattggcaaggatgtanagaaattgaaacagcatggagggtttctcaaaatattaaaaatagaactaccatatgatctgcaaccacttctgggtatttatccaa

SEQ ID NO: 2896 - DNA, 455 bp, Homo sapiens
  misc_feature 69, 71, 143, 157, 159, 163, 168, 262, 281, 299, 315, 316,351, 354, 367, 397, 404, 425, 427, 440: n = A,T,C or G
cccttagcgtggtcgcggccgaggtacttttttttttttttttttttttttttttttggagacggggtntnacactgttgcccaggctggagtgcagtggtgcaaacatggctcactgcagcctcgacttcctgggtccaatnaatcctcctgcctnancctncagantagctgggactacaggcatgtgtcaccactctagactaattaaaaacaaaaaattgtagagacagtgtctcgccatgttgtccaggctggtctnaaactcctggcaatccttntgccttgacctcccaatntgctgggttacaggtnntgaggaacctgcctggcacccagtttttttaaatnaanttttcctactgtncccaaccaaaatgacttcttatgaagcttntcatcanttaatgagctttattaatganancttcaacactggncaaggggggaaaaat

SEQ ID NO: 2897 - DNA, 345 bp, Homo sapiens
cccttagcgtggtcgcggccgaggtacaggcgtgagccaccatgcccagcctgaatcccccttctcaaaagtaacttccattcactttgtccctggcagtctgctggtgaccatgatttctaaggctcactcatgggaccaaaggcaagaagaaagggaggagggtggtaaccagataaactttgcaacccctttgataggactttttgggtgagaatttttatgaaaaataatatatacttctactatagatctgcctctagtttcaacctctagttttagcactgattttttccccttaatttccagaagcatgatataataatctttttcaaagaaagtggg

SEQ ID NO: 2898 - DNA, 700 bp, Homo sapiens
  misc_feature 553, 578, 623, 625, 626, 630, 637, 649, 653, 666, 670, 671,678, 689: n = A,T,C or G
cccttagcgtggtcgcggccgaggtaccctgggggtgtcatcaaccaagattagaaatatgggaagatgaaatggtttttaggaaagataatgattttaattttagaactgtcaaatctgaggtgaatccttcaaaaaagtcaaatgatagttccaaagagtgaccatgaaatctgacaaataagagttatcttagcaaggagcagtctcatggaaataataaaagctgaaacaaatagtagtgattgaggagtaaatgagaggtgaagcagtggagataatacaggttctgtttggaggagacttggcaataaaggtgaaaaaataggatggatgagatagcactcagcaatgaaatgtaacagaattgatgcaacacgggtgaatctcaaaatcatgccaagtgaaagaagtatagtccctataatcacctatagtcccaattactcaggaggctgaggcaggagaactgcctgaggccaggagtttaagaccagtctgggccaacacaagcaagacccccattcttttaaaaaaaattaaaaaacattanccaggcattggtgtggtgccccccntagttccccagctactcaagaggcttgggttgggaggactacttngnnctcntgagttnaagaccagtctngggnaatcaagccagancctnntttcttnaaaaaaacaanccataaacctt

SEQ ID NO: 2899 - DNA, 498 bp, Homo sapiens
  misc_feature 57, 341, 416, 424, 432, 461, 468, 477: n = A,T,C or G
cccttcgagcggccgcccgggcaggtactcctatcagtgatgtatgagagttacagntgcttcacatgtctgtcaacatttacactgtcactgttttttatattagccattttagcatatatgaaataactgattttaatttacattacatttccctgattaatgagttgagcactttttcatatgcttatttttcatttgtatatctttcaagaagtgtctttcatgtcttttctcattttaaagttgggtgtctttttattgtaggtggttattctttgtattttgaatataaatccttttgatagattatgcctatgattttttaaagactctatgtnttcacttattggggatctttcgaaggaacaaaattttttttataaaaatccaacttttatcaggtttttttaatnttaatggntttttatngaccctcaaaagtcaccaataggaacatnatttttntttccttanaaagtttttatgggttttggg

SEQ ID NO: 2900 - DNA, 365 bp, Homo sapiens
  misc_feature 158, 188, 191, 213: n = A,T,C or G
ccctttcgagcggccgcccgggcaggtacatctctccatatgcagcaggaatgtcttttttatttaagggcacatttacacaaagagcaaatggtccagactcagtcttccataacctagagtctgaattgatcactctataaaatggaaaaatgttncttttctttttttttttttttttttttttnggnttttaactttttttgagacagngtctcactttgtcagctaggctagagtgcagtgacacgatcacagatcactgcagccttgacctcctgggctcaggtgatcttcccatttcagcctgctgagtagctgggaccacagggcgcgtgccatcacacctgcctaatttttgtatt

SEQ ID NO: 2901 - DNA, 375 bp, Homo sapiens
  misc_feature 80: n = A,T,C or G
ccctttcgagcggccgcccgggcaggtactgtagttataaaactgacactgtttacaattaacagtgttctagaatccanttgtttggagggtattttacattatgaaatattgacttcagatggtcactgctattttcgagatctatgactatgtttcaaggagatccattggtctgacaaaataagagatgtatattcctgaaaattgcatgtcctctggagtctgttgtctggatggtatcagagaggtattagaactgtcctcagaggtcattacaattttctcatagtgtttgtcaaggaaagagttggggtgtgaaaggtcttctatagtattgggtcctaaccaagtcagggaagagaagcaaatgcc

SEQ ID NO: 2902 - DNA, 391 bp, Homo sapiens
cccttagcgtggtcgcggccgaggtacttaagtaaagaaattaacctctaataatacaatatttttattagttaaaaataaaggacatatgtatctacacacacatatatgctatacataaatacatatgagaaagacaaaaattgagagattaagagacagagagagtttgagatagagagttcaaaaaaaaagcaaatgatataaatttacaagagtaaatagaataatcatgtgaaggggtattaggagttctttgttttatcttttaacatttctgtaagtttaaaattattttcaaaataaaagatctaaatatttttcaaaaaataaaaccaaatttttgaaaatctaaaaaattttcaaaaaataaaaacataaacataaaaac

SEQ ID NO: 2903 - DNA, 320 bp, Homo sapiens
cccttagcgtggtcgcggccgaggtactaacaaggccagaagccttctaccttcagtcttgctctggcaaccccacctcttctttcatcttctcccatctagggagatgtctaatgggcatgatagttagaggtggtgagaggatagggacaggaaagtcctgcctgtgggacaacagggatcagggactcaacaagtcttaggcctctcaccaggaccagcatgttgggaagctgcctctccatccatattcagtctcagaatgggcagctgcttcccctgcaccctcatcttggtctggtcttggtgatagggtgggg

SEQ ID NO: 2904 - DNA, 552 bp, Homo sapiens
  misc_feature 536, 545: n = A,T,C or G
ccctttcgagcggccgcccgggcaggtacagtggtgacaagatctcagctcactgcaacctctgcctcccaggttcaagtgattctcctgcctgagcctctgaatagctaggattacaggcacgtgccaccatgcctggctaatttttgtatttttagtagagacaatgtttcaccatgttgcccaggctagtctcaaactcctgacctcaaatgatccacctgcctcagcctcccaaagtgctggattacaggcgtgagccactgtgcctgccctaagcctgtgtgttttattcttctgacttgcaggctaaagcggcagctcttccatatctcattgctatctcctagggcttccgctaggagactgatctggggctagaggcctccctctgtgtacacgagaatgctggaaatgtcacctctcagggctctgcctgcctctcagccctgaaagccatggtggaaaggggtggcgcttgacatagacatctgaggaaaagaagtgagggagggtaaagggtggtgcagtaagangaaggggtngggaagg

SEQ ID NO: 2905 - DNA, 355 bp, Homo sapiens
cccttggcccgcccgggcaggtacattatcattattttatatcttgctcaatcttttaggcgtcaatctcacatcaaaaagtttattggcctataacggcacgagccaacttcaaattattttttaaaagttttgtgtatttgtagattatgaatctctggtaactacttgtaacatttggctctgttttctgtgaatatttatccctagctaaaaaaaattcttacatcttcagaagagctataatgttgacacctaactacactgtaatactacacagtaataggacactaagcagatagataggtttttaaaaaatatttgtattttcagcacctggtaatacagtggtcta

SEQ ID NO: 2906 - DNA, 410 bp, Homo sapiens
  misc_feature 229, 262, 274, 322, 326, 356, 363, 386, 397: n = A,T,C or G
cccttagcgtggtcgcggccgaggtacttcgttggtgcctcagtctttaaggattaactaggaagaattttctttctgcatagaaactttataaaataacgacattgttaataattcaggcataatattacattatacctttcttgaatgctgacgttgcatacaagggtgatctgtaaacctccatcatttccttgctctcacttttagacctatttcctgacataanaaccttggtgggtagttctggattttttttttncttcttcttttnttatttttgagacaggggtctcactgtgtcgcccaggctggcatgcantggntgctcaagtgatcctccagcctgtgccttnctgagtnagcttgggacaacaaagcacaangccaccaggtnctggctaattttt

SEQ ID NO: 2907 - DNA, 415 bp, Homo sapiens
ccctttcgagcggccgcccgggcaggtacatcaccctgctgagggacatccaggacaaggtcaccacactctacaaaggcagtcaactacatgacacattccgcttctgcctggtcaccaacttgacgatggactccgtgttggtcactgtcaaggcattgttctcctccaatttggaccccagcctggtggagcaagtctttctagataagaccctgaatgcctcattccattggctgggctccacctaccagttggtggacatccatgtgacagaaatggagtcatcaagtttatcaaccaacaagcagctccagcacccagcacttctacctgaatttcaccatcaccaacctaccatattcccaggacaaagcccagccaggcaccaccaattaccagaggaacaaaagga

SEQ ID NO: 2908 - DNA, 339 bp, Homo sapiens
cccttagcgtggtcgcggccgaggtactttgctagtatttgtgggttttgtattttacatttaaatcttaatgtaagatttaaatgtaaatcttaaacatcttaaacacatatagtttaaggtgtgaggggagatttaactaatctgttttttccttttattccacttattaaacccaaatgtttaatcagttgtccctaatattgtttagtgaataataattgcaaataatatggtttttatattttgcaaggcaattttccttcatcctttattcttcttttaaaaaaaatttctggactatttctacattatcatcatccatcatccattattatt

SEQ ID NO: 2909 - DNA, 476 bp, Homo sapiens
cccttagcgtggtcgcggccgaggtacatatggatttgatacgtagatatagatttaagactagaaatacttatagatatattggtatataaatggtattccagtgcccttttataggataaaattcattcttatattagaaaaatccattcatacataatttttgattattcaagacataaatgttgaacaactaagtgctagacaatatggtaggtgcaaaattaacactagaaaattcttccccagagcactgatttatcattacacaagcacaaatctttaattctctaatcacataaaattattttcttctaataacttcatctcaaattccctttggtttctgtgaaaagaatcttataatatgtcactatacatacaaattatgaaaaatttatgcaaacatacatccttttcaggaagaaccacaaatcttcctgcttgaggatcattagaaggcaaattatttaatc

SEQ ID NO: 2910 - DNA, 537 bp, Homo sapiens
  misc_feature 476, 501, 507, 527: n = A,T,C or G
ggtcgcggccgaggtacttagaacactgttgatggagtatatctgttgtgagcctggtttctgtgtatgtgtccaattcagtgataggagaagaaagcctgtaattacatttgcataaagtggttggctgctaaagagatgtaattccattattccaaacttttaattcatattttaaaatataaaaactagtatatatatcaaggaatattttaggaaatcttgtagttacctgtaagtgtctaactgtgtattcaatcagtaaccaatatggaaattgcagagtttcttcatcagaagatatgagtttaaattttatatttggcatgcacagcaatatattaaatgctgtgcttaactagaaagtattgtgcagtgtgatggccttttaacctcacaatatacattttatttttattccctagacttgcacatgaagtgcatatgttcatatttacccgtttggagatgggtangatacaaccagcatagctccatctncatggnccatctttgatttcatgccncctttccttt

SEQ ID NO: 2911 - DNA, 199 bp, Homo sapiens
  misc_feature 5, 8, 18, 47, 50, 53, 122, 144, 146: n = A,T,C or G
acccntancgcggtcgcngccgaggtactatttgggggatcaagatntgnaanatttaaactgtttttggtaaaaactagcactgttgggaagaatgctgtggaataccacaaactagtttngcaaaggggaaaagaatgtttnanaagtgctgattgtattttaaacatcagtagtgataatacaaggaaagctttta

SEQ ID NO: 2912 - DNA, 534 bp, Homo sapiens
cccttagcgtggtcgcggccgaggtacagttctcagtttttcttataggagaaatatggtatatgtttataagaatcttttatgagattatagatttcaatgctgtggatagtgtcttgcacccaaacaagaaagtccataatggaatgatcttccctcagcttcctatcgatttagttacctcttgaaagcacaaaaattaaaacattgccatatgttgaatttttaaaaagcacttggagtgagcgaacatttcctgataaatgccttttagagataggttcttgatattcagacatctgcagaaatgttctggttcccaaagtcatttcacttcgaaataaaacacagctccttcaaacagcactttttccacataaatctagttgcctctccctgtggacattcagaactgatagaacaaacactactcttttgaatttgatggttcgtgtcctttaaagtgtttgaggacctatgcagagcctgtaacacttgggtagtacctgcccgggccggccgctcgaaaggggc

SEQ ID NO: 2913 - DNA, 313 bp, Homo sapiens
cccttcgagcggccgcccgggcaggtacaattgggtaggcccagaagaggaaagagagcaaaatagagtagtcaggaaaagagggcccagtttgggcgcctgttagctcctgtgtggtgtgaaaggcactcagatgttcctgcatctctgatggaaaacacagaacctggctcagctgagagacaacagctctgtcatggggaggttgaagtgaccccacagcaaagtggagaggaagttgttgaacagaagctgtggcagagactcaaagaggcctataatgctggtgagaactatggtggcctgagtcatc

SEQ ID NO: 2914 - DNA, 305 bp, Homo sapiens
  misc_feature 206, 259: n = A,T,C or G
cccttagcgtggtcgcggccgaggtactcacctgccacatcctaatctcagctcctctctctcccaccctcatccaccttccataacatgctttagtcccaccctactgtcagttattcctgcaaagaatacaacttacagccgggcgcggtggctcacacctgcaatcccagcactttgggaggccgaggtgggtggatcacgangtcaggagattgaagaccatcctggctaacacggtgaaaccccatctctactnaaaatacaaaaaaaaaaaaattagctgggcatggtggcgggttgcc

SEQ ID NO: 2915 - DNA, 317 bp, Homo sapiens
ccctttgagcggccgcccgggcaggtactttgtttatggatctgttgaatctgaggagaagtgattgctttgagttagctagttttaaattcatgacactttcccaacataattaggtatttgaacctaagtgtgtgctagtgtattgtatatttttcattaattactttattgaaagttgctttgggaatcaattcacttcaatatattttactgttctcagtgaagaatgtgactaataagtatttggactttcaaaaagtgatacagtctttgtgatagttttttacctttacattaatgagttggaaaataac

SEQ ID NO: 2916 - DNA, 565 bp, Homo sapiens
  misc_feature 356, 435, 522, 528: n = A,T,C or G
ccctttcgagcggccgcccgggcaggtaccacttcacaccagcctgggtgacagagtgagactctgtctcggaaaaaaaaaaaaaaaaacgaaaacaaacaaaaaaataaaatgttcacttttgggctctatgcccaacaagtgaggttgctggactgtgactacaaggacacctgagctgtaactgtgtccatgcatctcattttctcttgagaagactaaagaactgacctttaaaataaacacagctccatggtggcccctttcaaagtcatcacctcaggaggccacacacgtgcctgaaggatgctgccttggcttgcaaacctctcaagctcccccagagtagccttcanggtcccctccccgctacacaacagcagccagctttgctagcagtcacttctatgcttctctcccactgacagttactgngagtgagcctctgcaagtattaacagcgcctaattaatgcagtgacccaagatacaagcggtgacaaactccttacccttcaagtanggcctntgtggctgaaaattttacaatgggcttgtgaagggga

SEQ ID NO: 2917 - DNA, 442 bp, Homo sapiens
  misc_feature 401: n = A,T,C or G
cccttagcgtggtcgcggccgaggtacatttacagaaaggccactgcagctgcatcatagttctataactcttcaaagtccccaggcaccctaagtagatagcttgaagcttcacctttacaaagtccaatccattgcatcaaaagcctacattatcccatttcctgtggcctagagattacaaatcacctgaagtaataccaaaacccagtgagtaaagacggaagtaaatctagtgagtttccaaccacccaccgcccccgagatcttaaaggaagcagtaacaagcaactagaactcacatgagaatttataggccaagagattttaatgtaagcattcttataattaaatacctcttacaaaaaatgccatttaatcagacaaggggaaaaaagtancatcaaaagagatgctgacaagggagacaatgaaatcaaat

SEQ ID NO: 2918 - DNA, 606 bp, Homo sapiens
  misc_feature 474, 554, 582: n = A,T,C or G
ccctttcgagcggccgcccgggcaggtacttttagtagagacggggtttcaccgtgttagccaggatggtctcagtcccctgaccttgtgatccacccacctaggcctcccaaagtgctgggattacagacgtgagtcaccgcgcgcagcccgcttttgtggtttcaaaagttctcacttgctaatgtcatgttagagatacaaatttaaagtatgctaaatcagtggagagaacagatgtttaatctatagacacttatacatgcactaagaaagttgactactatactgaagtcccttataagaagggagttgttaaggataaggaatgtggattgggctctttcagagactccatacaggtatatttaattagcaaaggagtcaaaaaaacaccagttgttatcaacagcactttgcacatgttgggatatgatttgccaactggtgagactatttcaggtattaacatanaatatatgtcagcttttggggagaaaaaagtagtctaggacagtaaaatagtcttatttgcttaaatgaacccataaacntaggcagcatttcttcaaagtggtattncatggatcaccaatccttataaaa

SEQ ID NO: 2919 - DNA, 340 bp, Homo sapiens
  misc_feature 189, 303, 310: n = A,T,C or G
cccttagcgtggtcgcggccgaggtacagagtattttaatctttaggggatcaagatgtcagatgcaaacaaagctgccattgcagcagaaaaggaagctctgaacttgaagttaccccccattgtccatctcccagaaaacataggcgttgatacaccaacacaaagtaagctgctaaaatacagaanatccaaggagcagcagcagaaaattaatcaggttagtaattgatggagcccaaaagaaatttagacagaacactgggtaaaaagaacacctctattaccaccaccctgattatncctcaanactatgaccagtgaaaatgaaaaaaaaaag

SEQ ID NO: 2920 - DNA, 406 bp, Homo sapiens
  misc_feature 358: n = A,T,C or G
cccttagcgtggtcgcggccgaggtactgagtttgtgttgttaagagttaaggccttaaacttggctcaaaataaatttaactgtgatttctctaatttttagtgcctactgtttcaccagacacctagagtcaatagtgtcctagaatctacggtgtccagggcttgagcaagatactttagtgaatataaacactaacgagaccttgccttttctcaagcctacaggatatcagcctatttgaaaagtgacactggctttacacccagaagcccacaaaatagaatgatgtaactgaattttttggtagctctctgggtaatttatgtggtgttaggactctttgggtttgaaagnaaagagactcgtgatcccattctggcattgacagtaaacttcattgga

SEQ ID NO: 2921 - DNA, 388 bp, Homo sapiens
  misc_feature 324, 339: n = A,T,C or G
cccttagcgtggtcgcggccgaggtacaaattataatacacataccagacaaattttattaaataataaagaagggagagagaaagagcaagacactttttaagcaccatgtgccaggccagtgcttgaatctcttcctacgttacttctccttattatttaaccgttatttaaatgttactactcccattttacagatggagaaatttagcttaaggtaatgacaagattgaacttcaagttttctgactccaaaatatgccctctttcgaccacaccgtattatctctaaatatggaaaacatttcaaaagtagcaagcgtnttcagaacaaaaacnaaaacaatctaagggggcttacacattataaacatggtttcggggtcat

SEQ ID NO: 2922 - DNA, 646 bp, Homo sapiens
  misc_feature 626: n = A,T,C or G
cccttagcgtggtcgcggccgaggtacttggagaaaatgcacaaaatctgactaaggagccataagactctgggtgcaaataattgaaaaaaatattttagaagcataatatcaattcatctagttttaaagttttcacaaattataatagggaattctgcttatttcacaaaataattatctgaccttaagaggatttttcctaacatcacataaacctgatggctttacacagtgatgatgagctattatttcattttcatcctgataaactacataagaattgcaatttttatatgcaattattcataatgtatgtttggatttccctgtttaaattctattagagtcctactttatgaaaaatctatcatttaatattctatttaatactgagatgaacatacataaaagcaaacagatgaagaagatgagtaatatctcaggatctgtagccatcagactatgagcaaatcataatatattattataagtcccttctgttacagtcagatatttcagaaaaataacaataatgtattaaaaacggaacttctctggtctttaaatagcacaagtaattcaactgataaatctagataatcttatagctctctatacctatnggttgggtttgccttttcta

SEQ ID NO: 2923 - DNA, 407 bp, Homo sapiens
  misc_feature 143, 176, 226, 362, 363, 364, 365, 366, 370, 372, 381, 382,386, 388: n = A,T,C or G
cccttagcgtggtcgcggccgaggtactgcaaaattgcaagggcaaactttgtgtcttaccactatgatgggagaagagttaaataaacaacataacaacaaactaacttatatactctggtgaacacctcgatttcatgatnaaagggaatatacatttattttcaagaactganttacacttttacaaagttgaccatatattagttaataaagcaaatctganaacatattaaaacaattatcatataaactacattctttgatcagaatgaaattaaattagaactcagtataaataaagaacaccaaataatgtgcaagtctggaaacatccttcaaagtaacctataggtccaccnnnnnggananaaaccaaanncaantnatgttcctgcccgggcggc

SEQ ID NO: 2924 - DNA, 318 bp, Homo sapiens
cccttagcgtggtcgcggccgaggtacgcataggaaggaagctgtccaagccctccattgctctttgagctcatcatgtgattatagggaaggggaaagggaatgatttcctcagaaaaatatactgatcaccatatattctttcgggatgctaaacaagtatccagaaaaacatttacatgtaatacatctacaaatcctcttttccagtaatgcttatgtcctgtcatctgagatataaaattctttctgggttactaatttcttaatttggccaatttatttaagatgctcttcaaagttttaaattaattgact

SEQ ID NO: 2925 - DNA, 276 bp, Homo sapiens
cccttagcgtggtcgcggccgaggtacaatttccactcttaaaaatttactaaggtttgctttgtggcttaagatatggttaatttttatgaatgttctctctgtcacactattatttagcattgttaaatatctaatgtcaattagctgagaaagagaaatgaggcaaacaaattagaaaggagaaggtaacattattactatcagatgttataaaagaaccaacaggacaatctatataaacatccccgcgtacctgcccgggcggccgaaggg

SEQ ID NO: 2926 - DNA, 235 bp, Homo sapiens
  misc_feature 6, 59: n = A,T,C or G
cccttnttgtggtcgcggccgaggtacagtccacaaaatggtttgcttctgaaaaagcngtagtagtcttacatccaagattattcctaaaataaagtttcgacccacatatataatgaaattgaaactgcctacattggcaaagccagaaagagagtaaaaaagatggggtaggccagttgcggtggctcatgcctgtaatcccagtacctgcccgggcggccgctcgaaaggg

SEQ ID NO: 2927 - DNA, 218 bp, Homo sapiens
cccttagcgtggtcgcggcccgaggtacttttaatgtttcttatacttgtttcttcagaatttaattagttttaaaggaatttttctcattataaaatacataaactctcaaattctttttgttttgttttgtttttttgatgtaagttctcgctctgtcacccagcctggaggttgcagtgagccgagatcacactactgcactccagcctggtgac

SEQ ID NO: 2928 - DNA, 377 bp, Homo sapiens
  misc_feature 28, 264, 307, 314, 322, 329, 353: n = A,T,C or G
cccttagcttagcgtgggccggggccgnagtacatttacagaaaggccactgcagctgcatcatagttctataactcttcaaagtccccaggcaccctaagtagatagcttgaagcttcacctttacaaagtccaatccattgcatcaaaagcctacattatcccatttcctgtggcctagagattacaaatcacctgaagtaataccaaaacccagtgagtaaagacggaagtaaatctagtgagttttcaaccacccaccgnccccgagatcttaaaggaagcagtaacaagccacctagaactnccatgangaattttntaggccnagagatttttaatggtaagcattnttataattaaataccttttacaaa

SEQ ID NO: 2929 - DNA, 423 bp, Homo sapiens
cccttagcgtggtcgcggcccgaggtaccagccagttttgagatatacctggtttgctttaatgttattaaattgctttggtgagttttgcaaatggacaattgaactttgttctgccaaattcttttttattgcatttaaacttcagggttttttatttccggcttattatgaatggattagtcattttgtgaataactcttcattgagtttagggagaaataggacgttagatccgaagatgctatttgtttaatcaccagaatggacaaaattatacttcatttactatcagggaggcatggggagaatagaggcctaggggtgccgtcttgtggctcttactgtttttgtgtatctggtttttttttttttttttgagagggcttccattatgttgcccgtgctggaccccaactcctg

SEQ ID NO: 2930 - DNA, 530 bp, Homo sapiens
  misc_feature 155, 235, 254, 330, 366, 409, 424, 435, 439, 513, 518, 527: n = A,T,C or G
cccttcgagcggccgcccgggcaggtacgcgggcaagtctgcatggcaaaaaaggtgtccacaagtgtgaatggctcatttttaatgactagccaacagccacttgtaaaagatgtaattgaaattgttcagagattaggttccgtctgctttgncctccttctcaaaagttttcatggatccaagctattcttaagcattgtttaatctaggaaatagcctttatggactaatnataagaaagaaaaaggcanatttttaaaagatattccaaattcaaaagaaaataagtttgggcagcctgacttttgattatctgtaaaaaatcanggccaatagttttgaacgggaagagtaaatatgaanggttttctaaaccagttttttcttggaagaagaaggggttggnaggttaagaaagttnttctttttttnatcnagccatgtgccctaccaaaaaacataaaatggtggtttcctgtgaaccctcaaaaaagtaaaatcagtgagtgngatgnagggaattnggg

SEQ ID NO: 2931 - DNA, 427 bp, Homo sapiens
  misc_feature 143: n = A,T,C or G
cccttagcgtggtcgcggccgaggtacttgaaaactctgattcccagagggagggtaacatagagcaaagccccctacttacccacaaagaatattcggtgtgtggcaaaaaggggaaacttgttattttaagtcactaattnaaaaacctagctcaatctaatatactagctcaatctaatacactaattttgtttttaaattagtgtaaactaatttaaacctagctcagtctaatacactaattttgtttttaaatgataatacagtaatgaatacctagaagacaaaggttaagggaaaggaaaagagaaagaggtgctgagaaaaaaaacaaggggagtttgaactgaaagttaaagagctcattaaaattttgacagatcatccatcttttcatctgaactccgtatctataaatcctgat

SEQ ID NO: 2932 - DNA, 251 bp, Homo sapiens
  misc_feature 196, 215, 239: n = A,T,C or G
cccttagcgtggtcgcggccgaggtacctccccatcagtgacattaacattacatattaattcaacaggacatctcctatatgccaggtagtgttctaagtgctgagtgagttataactgtaacaaaacatgcctgccacttaagaaacttacagggtaatgagttaaaaatgaacacataaataaggtaacctgntgataatggggaaatgctnggaggaaaataaattggggaggcngggcgggggggt

SEQ ID NO: 2933 - DNA, 327 bp, Homo sapiens
ccctttggccgcccgggcaggtactgaaacatcaaaacaccagaatgaacatcaggagggaaacatgaaagtagccactccaagtaaggctccagaacatactcaaatgaaggaaccagggctttactgcgtgacctagatcaacaacagagctgttctccttctttcagctaatcaggagcatttagttgggattgggaaagaggcaaaatatacatagaggtagaaaatgaagatttatatggataacttcacagctgttttcctgtgaaccacatttctagcaataaactaatccaattgggagggaaaacaatatgtgaagaa

SEQ ID NO: 2934 - DNA, 659 bp, Homo sapiens
  misc_feature 460, 488, 519, 525, 529, 538, 542, 546, 557, 561, 627, 632,640, 644, 646: n = A,T,C or G
ccctttcgagcggccgcccgggcaggtacttgtgttgtttgaatggtattttgaaagcaattgcatagttactattgattcctcaaaatgcataatggggatgcttctgacccgacttgccttttagcaagttgaaggtaggtatgcaccgacagggctctgacttcaccagaactaataagttagattgcaatagtaggagacagatataaataatgaaggaagctagagttatgacggctttctggaaaaatgttgggaattggaaagaaaatgtggaaagagagttgagtggaagaaagactaatagagtaggagtattagttttatgagaatgtgagtaaatctaatattggataaatgaatctaaggctactaatactacatttttgcaacttacatttttgagtatttgggtagtaaaatcactccgataaaaacttttagagtggttcacctntcaagtcacataattttgtgttttatcnacatatacttggtttttttagtccaaaatantggttnggantttcttggntacncctnactttggaaanacantaaaactagccatttaaaaattaattccaattaatttgcatgttattttttttttttaaagcattntcctngggggatntatngnctttgcaaaattt

SEQ ID NO: 2935 - DNA, 351 bp, Homo sapiens
cccttagcgtggtcgcggccgaggtacgcggggcaagcaggtgttccatgagctgagccagcagacccatggcatcacccggctgggcccctactctctggacaaagacagcctctaccttaacggatggactccgtgttggtcactgtcaaggcattgttctcctccaatttggaccccagtctggtggagcaagtctttctagataagaccctgaatgcctcattccattggctgggctccacctaccagttggtggacatccatgtgacagaaatggagtcatcagtttatcaaccaacaagcagctccagcacccagcacttctacctgaatttcaccatcaccaac

SEQ ID NO: 2936 - DNA, 344 bp, Homo sapiens
  misc_feature 206, 223, 333: n = A,T,C or G
ccctttcgagcggccgcccgggcaggtactttcccaggctattagtattatctaatgagtggcttaaagataccagaaacactgactgaggtctccacctgcttctggctgaatgaatgggagcttctagccattgaataagaggcagtagccaatgtttcttattctgaatggtccaggttgacttttataagagaaacactcanccttttaattgctgaangtctggcccatagactaagattgcacattcttagtctaggttcacttgaactagactgcacccactgacgatatattcagttcaggtgttaactcacttggataagcatntggcctgtcct

SEQ ID NO: 2937 - DNA, 247 bp, Homo sapiens
  misc_feature 17, 32, 53, 61, 73, 78, 80, 88, 128, 130, 182, 185, 198: n = A,T,C or G
cccttagcgtggtcgcngccgaggtactaaanactaacatttattgagcactnactagatnccataaactganattgncnttgatctntgattaattaatctcacaatccttgcttttctgaagtatntnattcaatcctttgaatgtccctaatgcacagataaggaaataggctgctctncanataaggaatacanatccttgtggattcaacccagatctgacttgaggctaaactcctaacca

SEQ ID NO: 2938 - DNA, 529 bp, Homo sapiens
  misc_feature 460: n = A,T,C or G
ccctttgccgcccgggcaggtacgtttgtttatcaagctagaaaattcagataataaagtcagcatctggatgaggtaacacattttttctgccattcctaacttcctctcctggtattcaagtcatagataccggcctttatccccaaagagtcaattctattgttctttctttcatatagatgagagtcagagaaacaaagtaaggtttgggagaaatggacatggtatagttttagctaaacattctaatatacaaaaaaaaatttaagttgttttgaaacaaataacacccaaagtctacacatttatagtaataaataattatccagctaattcagataaaaatttgtttctaactgggaaggccagaagtctgtatttctacagacaatttaaaatcgagcctggaagcaaatatccagataatttggatccccttcctccagtttacccaaangaacaagttgtttcaaggtagggcacagttataccatgtttggatccacatggatgaaaatttactact

SEQ ID NO: 2939 - DNA, 328 bp, Homo sapiens
ccctttcgagcggccgcccgggcaggtacccagaggaccagatgattgatgggttctaccacgagcatctaatagcgactgctgcagaactggtgtggaaaaggtttctattttataaaagaaagtatccagaaggctaaaggcagttgtggaatttatttcttcccagtgctctgattgtcaaaatttgaataaagctcagtgaaaggaggacagtaattaatgacttgatagccaaacatcgtaatgatgatttagtgatatactagactggatgaaagagaggtcactgtcttttcactatggattcatcataaacagtatcatt

SEQ ID NO: 2940 - DNA, 356 bp, Homo sapiens
  misc_feature 277: n = A,T,C or G
cccttagcgtggtcgcggccgaggtaccaactcattataagcagatcacagtcatatagtgagagagaaggaaaagaaaaacctatgtagatctagaggaattacctaagaattcctaattacataggattaagctctgggctaacatcaaattttaagtaattactaaaataatttcttttctttcttttttttttgagacagagtctcattttgtcaccaaggctagagtgtagtggcttgatctcagctcactgcaacctccacctcccgggtncaggtgattctcctgtctccaagtagctgggattacaggcatgcaccaccacctccagctcctttttttatttttaggt

SEQ ID NO: 2941 - DNA, 358 bp, Homo sapiens
  misc_feature 55, 57, 62, 63, 64, 65, 68, 70, 71, 77, 79, 81: n = A,T,C or G
ccctttagcggccgcccgggcaggtacagttctgctcagaatgccctatctcctnantaaannnnaangnnggaganangncctattttgggagaactaattttgcaattcctgccaatttttatgcattttgcccttgtttccataattcagcacctccatcatctcttcatcacctccatcaagatactttcacttccttttaaaagcaaagatctctatttaatgtaatgcttctcagtttattatttacatttttattttttcaccatgctatcatttttactgggattgtcactgctttggttaatgctctggttacaaagtggcattgctgtggggcagtcagctgtaaccc

SEQ ID NO: 2942 - DNA, 602 bp, Homo sapiens
  misc_feature 70, 466, 470, 514, 574: n = A,T,C or G
cccttagcgtggtcgcggccgaggtacaaggtgatacattctagccttctacaaagtgcacttagaccangatattctttcatgatggcagacaaatgaggagtttcttttcattatctaatgaaaaaagagttggtctatattttctcagtgtattcctatagggaagagagtcttattgttgataacctttcagacaagtaagatgcttctgcatcctatgaggtattcccaaagcccctctttaatctccaccattgtgcataattttgtgataatgaagcagttattttcttctcttgatagacattttatgaaggcagagactatgccactcttgcttacagttgtagctccagcatctaacatggtggcttaacacatagaagatgctcagtaattacttgttaaatgaatgggatgggtgggtggatatgccctaatatgatgcagcttgattatgctngaantctggctggattaagacatcattccaagaagtaaataccagtantctttaaactgttgccctgtatcttacacacctgaaagagacatctttccaagggtgatnaaaaaaaaaggtcataccctttgaaaaa

SEQ ID NO: 2943 - DNA, 324 bp, Homo sapiens
cccttagcggccgcccgggcaggtacttagatttgcttagatacctgtaaaagtgggattggtatgggataaaacgttcttgtgctgcttgcaaaagtctttggaatattctttgggatattttggtgcttaggaagtgcttttcaggttatattaatatatgcttagtcttcatgctttcaagtcctgtgggacgttaatgttagtcttttaagttgagtcctttttggttatattaagaggtagttcttgatgtttcaaaggccatccagaaataggaatgcctgaacaggaatttccaattaagtcggtcagaatcctgaa

SEQ ID NO: 2944 - DNA, 300 bp, Homo sapiens
cccttgagcggccgcccgggcaggtacgcgggacacaaactaacctctaatgtcaatatactgtgaaaaacactgtgatacagatatgtggagggtagtatgaggacacaaaaaagagtgacagctaacccaaccaaggtggtctggagaggcttcctgggagactgatttagacttaagtgttatggactaagtaagagctacctgagtgaagaaggagggaaaggagactccatacagaagagctgaggaatgaggagtgtcctagggtagtcatggtttccttttttttttttatga

SEQ ID NO: 2945 - DNA, 573 bp, Homo sapiens
  misc_feature 6, 134, 162, 169, 190, 199, 217, 218, 240, 243, 247, 257,267, 288, 299, 301, 316, 331, 351, 378, 384, 392, 394, 402,404, 410, 416, 417, 421, 427, 429, 435, 445, 448, 450, 488,489, 513, 518, 533, 548, 561: n = A,T,C or G
cccttncgagcggccgcccgggcaggtaccagtgattacctgcccctcctaccctgggcctgccccatcccccacttaagaactacaaactaaactactgatgaaaacatttatatatgttgatactgaaagantccctgtagaggaatagcaactggatangtaagcnactgcagaaaaaaaggtgggnaaaatttgnttagggcatatcctttanntttaaacttgaactttcttccnacnaccnaaattatagnaccccaaggnacctttggcttaacctgcacncttaatggttntncaaaattaaaaaagnggaaaaccaaggttnggcattaattggtttttacnaaaaaatttttaaaaaaatttgggggnatatgnaaccaacnanaattggtnancttaanataacnnaccnaaattngnttgggnggaaaattcnccntngaaaattttggggtaatacccctttgggggaaacccanngaaaaaaaaaagggggaaccaacntttcnaaccaaaaaaaaagntttgggggaaaaaanaaccttttggggnttaaaaaaaatt

SEQ ID NO: 2946 - DNA, 366 bp, Homo sapiens
ccctttgagcggccgcccgggcaggtactatcttttatttagatatgctgagataattacagatgaaatgtttttggggttttttttctacataatctgttgtaataactggtgggagaaagtgggtgtataaacacattgctgcaattaagtgatggagacatgagtgttcattgcactacaattacattttattgaaaatttcctcactcaaatttatggaataggtatctgttagaaactattgatcattctctctaaatttgaaaaaagaagctgtatttgactcttatgtcccaataaaacttaaaaaatgctgcccgagaattgtttggtgtgaaaaaaaaggaaactacaaagtctttt

SEQ ID NO: 2947 - DNA, 595 bp, Homo sapiens
  misc_feature 486, 498, 529, 562: n = A,T,C or G
ccctttcgagcggcccgcccgggcaggtactacccaaacctaaatttagaaacaggattagaaaaatatcattcctattcttcttggctataaatttacccatcaaagttaaatttaattatacattcttaatagtcttggatagacagggcttcacagataaattgtaatttaagcaagaattattttttcctgtttaaccctaaacacaataatgtggtctttactagctcatctcaattgaatatcatgccttagtatttgggctttatataatttagtgtgtatattaatttctgctcctgagctcttataaatgaaactgctgggagctgtgcacaaggcttaaactaaagaaacctcttaaagacagtgtggatatcactgaaagtattttgggggaaaactaaattttaatgtaaaagagaacaacttttagaaagaagagaaccataaaaataaaatgcagcactcctttgactttgnctaattccttgngtctttctgggtggaattctgtagtcaatgnggtttaaaaatacatcagcaccctttgcttctncctataatggaaaaatttaaatttaaaacaaaa

SEQ ID NO: 2948 - DNA, 382 bp, Homo sapiens
cccttagcgtggtcgcggcccgaggtacttgtttttggccacaggaatcttaagtgacttaattaacaggtgagtggcattgctcctgaacagagctacctagttataatctgtgttacctttgctttaaaatgttctctttactccatttccttagttgatatgcttgaggcatcttgttgaatccatcatttattcacccactcattcatttcacatgtatttgcagttgcaaagcaggcagtaggaataaaattaggatcaaaataaggtagtaagtaacgaaatttgctgagtatgttctgagagaatagctgaatatacatttctaaatggacgacaaatccatttggaagtctttctcctcctgttattttggtaa

SEQ ID NO: 2949 - DNA, 386 bp, Homo sapiens
  misc_feature 305, 310, 364: n = A,T,C or G
cccttagcgtggtcgcggccgaggtaccgtaaatggaaattatcccgcaaattacggcatctccaaatgtagcgtggaaactaatattgacatgtcaacacaggattaatacatagtaatcaaagagtgcttaaaaattcattaaaaatgaagtcccacctctaaaagtgaaatgtgcaaattaaagtagcagttagataatgttttgtcatttaggtaaaaattacaaaagaatcggccgggcgcggtggctcacgcctgtaatcccagcactctgggaggccgaggccggcagatcacctgangtcangagttcaagaccagcctggccatggtgaaaccccgtctctactaaatataccangaaattagttggggccgtggtg

SEQ ID NO: 2950 - DNA, 630 bp, Homo sapiens
  misc_feature 23, 29, 415: n = A,T,C or G
cccttagcgtggtcgcggccgangtacancaagataagtgacctactgagggacagagttcaaaataaaataggtttcagtcactcaatgaagtgctttgctgggagatctcgcctggtcctgtggtcctttagtgaaatatggggaaaccagcaggggacgtaggtcagatagtttataatggtgagttataggttgtatattataaggagcatttctcagcactgaagaaatttcactagattccagctcacctttccaaactattaaaagcaaaacgggactgtttttcaaaaattggaaagtaaacctggcttcttgttagaaatttggaaaatattgagaagttttagacccagtccctttaaccttaaggagctcacatgcaataagatggaagggcaggggagatcangacagaaaactaccgatatggccgtgagaacatggaagcttatatcaagtgaattcttctttgaatttacctttttataaatcttttaaaaacaaatttgactttaaaaaagccccaattttaaatcggaaatgctaattagcacctttaaagttagatgaaacatatcagtggaatcaaagcctacgcctcaaatggatgtattttaatggttt

SEQ ID NO: 2951 - DNA, 418 bp, Homo sapiens
  misc_feature 26, 398: n = A,T,C or G
cccttagcgtggtcgcggccgaggtncaaacattaagtgtgtaattcaatgagttttgacaaataatgcagttttgtaaaaactttggtgaaattggaaaataaccgcaccccagtcaccttgtttttttggctactactaaattgactctgatcacatggaagtgtaataattttctttagtgtgaatgccctgagccatgaggtaaccctgttctgaagtggtttccttgcttgtaaataaataatgttgacatgtaaagcaggaccaccaaactgtaagtcttgtagtaattttaatgtattttccactctggacaaaaagatgtgtctttattcctgataaatattaatagttctagaagaggacattttccaaattaaagaattaggtatttnttcataattcccgggtagta

SEQ ID NO: 2952 - DNA, 316 bp, Homo sapiens
  misc_feature 80, 87: n = A,T,C or G
cccttagcgtggtcgcggccgaggtacaaatttattaagctctaggttcatcagatgaccaggaaaacatagactatcangacacanacaaagcagaactgcagaattatagaaaattcaaggtctcatggaggaaaagcagtatctacaataagaaagagaccccaaacagcactctagatttctttaagagggattatatttcctccttcctcccattctcccttcatttcttcctacctccctcttttcatcctcttctccttttatcttttcatcattcctttcttaagcattttacttagttactactatg

SEQ ID NO: 2953 - DNA, 398 bp, Homo sapiens
cccttagcgtggtcgcggccgaggtacaagccgtgtctaaggagctggttggagagtttttgcaatttgttcaacttgataaagaggcctctgatcctttcagcctaaatgaattacgagatgaattatcaaggaaacagaaagaagaattatggcaaaggctgaagaatttattgacagatgtgttgttagaaagcccagtggatgggtggcaggtagtggaagcccagggtgaagacaatatggaaaccgaacatggctcaaaaatgagaaaaagcatagaaataatttatgcaattacatctgtgattcttgcttctgtgtctgtaataaatgaaagtgagaactacgaagccctactggaatgtgttattatattaaatggtattttatatgca

SEQ ID NO: 2954 - DNA, 240 bp, Homo sapiens
  misc_feature 137, 178: n = A,T,C or G
cccttagcgtggtcgcggccgaggtacaacgtgggcaagcatctgtgcatatgaaatgctgtttttctaaaagatttctcacattggcaaactgagagattttcttctggaacacaggaaagattatattaatgctnatagccataccatgtctgaatatgggaggatgacagacacngaacgagaccagatagaccaggatgcccagatattcatgaggacctgttcagaagcaaaggg

SEQ ID NO: 2955 - DNA, 664 bp, Homo sapiens
  misc_feature 487, 498, 555, 569, 584, 607, 651: n = A,T,C or G
cccttgagcggccgcccgggcaggtccgggcaggtacactgcataaagccagagttaaaacttcactgccagcctctgaacagaaggctgttctatccacactatcacaagacctggtggagttgaggcaactgctgaattaccatacagggaagaatgaattcaagaaaattcccatgcaagataggctcttaaaaaataaatttacacaagaaaatcagcactgtaaaggtaattgataagcccaatagaagggaaacctatacaaagaaatagaaataactaagcaatctgaaatggactttaaataatgatgtttacaattctctaagaggaaaaggagcattagcatcagtgaaacaaaagtagggctatagaaaaaacaatacttatgaaaaaaaccaattggaaatttttagatggaaaagcgcgaagtaaaaaattcaaccccatggtctaaaagaataaaactgcacccagctggaangggaaaattanttaatttttacgaagaaaccaattaaatcttaccagaatgtaaaggagataaagatnttttaaataaatcnggagtttaggagatntaaacttttttccatatggagtnttttaaatatccatatggttattatgtattccatatatatcccnaaaggggaaaggg

SEQ ID NO: 2956 - DNA, 449 bp, Homo sapiens
cccttagcgtggtcgcggccgaggtacaaactattctctttcctattgcattttcccttgagaacatgaactgacaaggaacaaggtgaaggagtttgactggactttagggataatataactcccttaaaagaagtgttaaaatgaaggagagattttacaaatggcaagtagcataaaaaatgggaattgtaaagaattagtatagatgatttttgactggggaaacttaaacactaattactttcagaaagaatttgagatgattttctttagtaggggtgatagtggtaaggcccttctatgaagtatgtgatggattggactacttctgagagccctttcttctcttaaaatcttacggtaaaagtttttgaagaatcatatttcaagaacttttttcttcttccacattagccatcttcagataataagaaaccagataccta

SEQ ID NO: 2957 - DNA, 323 bp, Homo sapiens
ccctttcgagcggccgcccgggcaggtacgcggggatggctggatttttttcttttactttaagaagtctgtcttttaactgactacattatttatatgaaatagaattctagtatattttgactcagttttcccaacttatttcgtattttctttttactgcatccactttttaactggcatcaacccccttcttttgggttggttgtgttttacgcacctcctcctcttttcctcactccactggtttgcaagttatacatttgatttcttttctttcagtgccatgctctgataaaataaaggacatttattacagaaaa

SEQ ID NO: 2958 - DNA, 536 bp, Homo sapiens
  misc_feature 325, 445, 473, 474, 496, 500, 533: n = A,T,C or G
cccttagcgtggtcgcggccgaggtacacaagtcacgattatacagtttaatgagtaaacactgatcacacccatataaaccactgccaggccaataagtaaaatcttacaagcaaccccaaaaaaactctaggcctctacctttagaatgcgtttgcagtatttaggactattgtagttccaaaattactaaaagtaatgaatcattaatgtatgtgtattacatgttagaaattttatttattttttgaaagcatgcatgtttatcattcttaatatactttctcctgtttaatctcttataaaccttaaactgtagtgactnttaggagagtgaaattcatgaatataaaggtagtccataaaaccgtgatttgtagattttaaatctgaaaaacattctcatatgcaccataaattttgtcactgttctatttgatttgcntatctctacaggtgaatgaatttgtttnntttgaagaggatgggggaagcntttnccattttaaacagggataaaaactgagggaaantga

SEQ ID NO: 2959 - DNA, 318 bp, Homo sapiens
cccttagcgtggtcgcggccgaggtacaaatttattaagctctaggttcatcagatgaccaggaaaacatagactatcaggacacagacaaagcagaactgcagaattatagaaaattcaaggtctcatggaggaaaagcagtatctacaataagaaagagaccccaaacagcactctagatttctttaagagggattatatttcctccttcctcccattctcccttcatttcttcctacctccctcttttcatcctcttctccttttatcttttcatcattcctttcttaagcattttacttagttactactatgtt

SEQ ID NO: 2960 - DNA, 277 bp, Homo sapiens
  misc_feature 57, 116, 127, 192: n = A,T,C or G
cccttagcgtggtcgcggccgaggtacaaaattgcttgagtctgaagaacctgctanggagcatatacatcttcaattaacctacaactggtcttcagtaaaacctctgtccctgncacactgaatntggtgtaagtcatttttaaaacttctggccaaaacccaaccataatatgctttcttgtaagccancttcatatacctaaagaaaacatgtgaaaggccgggcaccgatggctcactcctgtaatcccagcactttgggaagacgaggggg

SEQ ID NO: 2961 - DNA, 405 bp, Homo sapiens
cccttagcgtggtcgcggccgaggtacccactgatgtcgtcatggtggcaagtcagtgttggccctgtcctaaccacagggaaggggttctctacagaaaagtagagtttagatctgagaaggtagttgagaatgagtgccgtatagtgaataatagtagatttttaccccattttacccctttgtctttggttgtatatatattcacataccattctaattatacatatagtttcaaaaatgcctctgcttctccaaacacaactatactttatatatattttcaaaaacagttctacctccttcttccaaagataaatatctgtgttttgtgtcctccatggccacccctaagagaggtgcaaggaggatttcattcctgggaattacctactttaatagcct

SEQ ID NO: 2962 - DNA, 457 bp, Homo sapiens
  misc_feature 182, 229, 244, 256, 307: n = A,T,C or G
cccttagcgtggtcgcggccgaggtacttttttttttttttttttttttttggagatggagtctccctctatcgcccaggctggagtgcagtagcacagtctcggctgccaggcctccccaatctcttcttctcacagggcagggctgaacagtatctcctcctggctgcatccgagcccanaagtcaaaacctaaggggtccctgcttggctgggacagaggccgcanacctaggtccagctntgactcgacagnggcacatccctgtgaagtagggcttgggggcttcccatgaacagctttcanagtgagtgcagtagagtggggctggaggacagttttgacagatcttgagcaggtgcttgaattttaacccaacatccacccttacccatgacccaggtgacatttcagaggagggttcacctgccctgcaaagtaagagctgcaaaatca

SEQ ID NO: 2963 - DNA, 616 bp, Homo sapiens
  misc_feature 265, 395, 443, 446, 448, 453, 474, 493, 496, 503, 513, 541,544, 549, 552, 555, 561, 566, 567, 569, 582: n = A,T,C or G
cccttagcgtggtcgcggccgaggtaccaatgaggaagagagttttgtaaaagcaagcaggctggctgtcattaaaagttatcttaaataacttgtcgcagcccactcccaccagtcctgaaaatagttcattcaagtggtaaaacaagacaaggcagaggacgatgtctctaacttccctgatgtgagatctaaagccccattcctaactcttggttttagaattgaggaaagtggaataaatgcatttggaaaggatctgttntcttcccaggtttcctgcctgggttgaaaataaagggttcaggggatggaaacaactttgaggaacataaagaggtattgggggttcatcaattcatctttgtttcaagatgggtcccccccaccctccncaatgcaagttaattagggagataattttagcctacctttgggaattnatntntaaanataaagttatctttttttaangctttgtcactttaattgnccncccctgnatttgataangaaaagtagtttttttcttatttgaccnctnttttngantgnctattnggaanncnttttattttgggnacttttttggggggtgggaaaggaaagttaaatt

SEQ ID NO: 2964 - DNA, 290 bp, Homo sapiens
  misc_feature 278: n = A,T,C or G
cccttagcgtggtcgcggccgaggtacaaagaagctgagtgatttgttgaggtcccagtggagtgtcagacctaaacttccagtttcccaattacttaaataaggttcttctcatcagaccctctttcctcatctctctactaaaaaactacagtgaataacttccactgtcatcaaatagaaactttctgtgctggtttcccctaccccacctttctgtgcttgataacagaagctgttgggagccccaccttcagtcttatttgtccttccttgcnggtttttctttg

SEQ ID NO: 2965 - DNA, 324 bp, Homo sapiens
cccttggccgcccgggcaggtacaataatgggattgtggttataagggagaatgcctctattcttcagagaggcacacagatttacttgcttttaaatggtctagcaaaaataaaaacaaatccactcataaaactaatatgacaaagtagatggttctataggtgttcaatgcatcatcctttcaattttctaaatatttgaaattttcttaataaaaagatagggaaacaaaggtggcttggaggaaacaaaaacaaaaacaaaacaagaagatccagtctaatggaaagatgcaatggactcagggatcctgcagccaaag

SEQ ID NO: 2966 - DNA, 313 bp, Homo sapiens
cccttagcgtggtcgcggccgaggtactgttgttccagactgtatgattgaaatagctgttattttcccagtttctgtagatcacatataggaagttctgcataatcatagtgatgaaaactcatgtttaaaaaatccatatataattagcgtgatacaacacagcatcttaacactgaggctttaagttttaataattctgttattctcagtaacactgaaagttgcctgtgctctttctgtcacacaattgattccaatgtattttaaaatgtgtttttctgagtcatttgttgccttgttactttttaaa

SEQ ID NO: 2967 - DNA, 274 bp, Homo sapiens
  misc_feature 3, 32, 70, 135, 154, 192, 243: n = A,T,C or G
ggnacttagctgggaatctgcatctttagagntcaaaactgtgcagtttttcctctgattaggtattatnatgttgaactccaaagggtcatttacattcctttataacactggagctctggtgtatcgaattgngttatgagataagccactngcagggacttgaacattccattttctttagattttgtngtatcagcatgtgaatatgctgaatacaacttgtatcctaaagcatacaanctataacattttcacgttggactcaaatttc

SEQ ID NO: 2968 - DNA, 581 bp, Homo sapiens
cccttagcgtggtcgcggccgaggtacctggaaggccccactgttacttcttcatacaggcaaaagctaatcaactatttcaccttgcagctaagtcaggacagagtgacttggagaagtgcagatgaactcccgtggctttttcagcagcagggaagtaaacagaagctgcatgattgccttcttaatctctttgtgtctcaaaacctttataaaaggggacactttgctgagttgctgagttattggcagtttgttggcaaagacaaaagtgcaatggcaacagaatacttcgattcattgaagcagtatgagaaaaactgcgaaggcgaggacaacatgagttgcttagctgatctttatgaaaccttggggcgatttctcaaggatctaggccttctcagtcaggtaagctcagcagatcaatggcaagccagagacaggtgggatttttgtgttcactcttctctttttccaagatgttaatgtggttttcatttgttgtgctataatccttaatatttaatcagatgacagatcttgcagcatttcactcactttaactggcctttcaccccttt

SEQ ID NO: 2969 - DNA, 425 bp, Homo sapiens
cccttcgacggccgccgggcaggtacttgagtctcttaactctgtaaaatcaaaacctaaagaaaacaaaaagattatcccttgcattcgaatactgtttagtcagtgtatatcaatttttttttactgtatcactgcattcagaggtatcaaattttgcttgcagcgctgtaaaagtttaccagtcagatttgtcggcccggcatggtggctcacacctgtaatcccagcactttgagaggccaaggcgggaggattgcttgaggctgaaagtttgagaccagcctgggcgacatgatgaaactccatctctactaaaaacacaaaaattggccaggcttggtgccatgcacccgtggtctcagctacttgggaggttgagtggggaggatcgtttgagcccaggagattgaggcttcagtgag

SEQ ID NO: 2970 - DNA, 644 bp, Homo sapiens
  misc_feature 539, 576, 621, 637: n = A,T,C or G
ccctttcgagcggccgcccgggcaggtacttgtgttgtttgaatggtattttgaaagcaattgcatagttactattgattcctcaaaatgcataatggggatgcttctgaccgacttgccttttagcaagttgaaggtaggtatgcacgacagggctctgacttcaccagaactaataagttagattgcaatagtaggagacagatataaataatgaaggaagctagagttatgacggctttctggaaaaatgttggaattgaaagaaaatgtggaaagagagttgagtggaagaaagactaatagagtaggagtattagttttatgagaatgtgagtaaatctaatattggataaatgaatctaaggctactaatactacatttttgcaacttacatttttgagtatttgggtagtaaatcactccgataaaaacttttagagtggttcacctctcagtcacatattttgtggttttatctacatatacttggtttttaagtccaaaaatattggttggatttctggtataccctacntttgtaaaaagcataaactagcatttaaaattaatcnaattaattgcatgttattttttttttttaaagccattttcctggngatatatggcttttgnaatttta

SEQ ID NO: 2971 - DNA, 397 bp, Homo sapiens
cccttagcggccgcccgggcaggtacgtgtctgtggtcccgactactggggaggccaaggtgggagaattgcttacgaccaggagtttgagtccagcctgggcaacatagcaacaccccatatcttatttaaaaaaaagcactctatgtttgttttgggcctctttgagaacatttactatgaaattttatttatctttgtttcctttcagttcttcttttgtttattgtgattatctttcatataacaatgtgcttaaatagctggtggttcttgataggtcactcaacaagtgagcaaactgatggatcctgtgttttgtgagcagtgtttattggctgtgatagagggtggggacctagatgcttttaggggatcctcctgttatccatttctg

SEQ ID NO: 2972 - DNA, 738 bp, Homo sapiens
  misc_feature 577, 629, 683, 705, 712, 738: n = A,T,C or G
ccctttcgagcggccgcccgggcaggtactggaagaatgagataatttatttggcaaaattcatatgtatatgttatgccaaacacttggctaatatctggatgagatgggcaatttacagactatgtaatcaactagggttctatctgtagttgtgttatgagaaacaatggttcattaattcacggaaatgtgaattaaaaatgtcattaagcgaaagactctgttagcttgaattcctattgggatatgcaagacacataacatttatgcatatttgtgatgttctaatccatttttagggaataggatattatataaagcaccctagtttaaacaaatacatgattacggttgtcaatagagatagatataaatagtgacctgtgtaattattttgctaatgctgaaattttttttcagacaagtggatccaaaatctaccaatgatcttgcattacattaaggggaaaagtatctccttaatggggaatctttacttttttttttccaaattgtgcctatcacatgatcttatggatagataatggttggtattcctggtggattcttatgngcaaaaaaaagagaacttgatacattggttagttacattgctctctttctgngcatcaagcttcaactatcaagatttctaagtggcaaaaaagtttgggggctgngttatagaagtggaataaaatnttactgnacatcattcttttaattaaaatcccn

SEQ ID NO: 2973 - DNA, 393 bp, Homo sapiens
  misc_feature 62, 67: n = A,T,C or G
ccctttcgagcggccgcccgggcaggtacaacagcttcctaactggtgtctcccttcctctnagccntgctgtgcatcattctcgcaccctgcagagagttatgtcttcacaatgcaattttggtgttaccccttaacttaaaaacttccagtgcacttaggacaaaatccaatattcttaagcccccaaagactcttcatgatctgaccctatcttgctttcaacattcatcccctccaatgttctctctcaggttctaagctttccacaaattgctacatctgcaaagattactgcccccagccttactccatcttctttacctaaatcaatctactcagttttcaattcattcttggattaaacttcaagttctttaggggaagcccttt

SEQ ID NO: 2974 - DNA, 315 bp, Homo sapiens
ccctttcgagcggccgcccgggcaggtactgatcattcaatgagagaatatgtcaaaaaatagttggtgcatagtagatgctcaagaaatgtcaaattctcctgccttttcacttagattcttaaaagtatgaatggtttcatatcctcattgacaaagtatttctctgaaaaattctaagaataaaaaatcctacatctctgaataattacattcatgactcagggtgaattaaagcttcactttgcctggaaagacgcaaaagaaacttgaagacaaaacaagaagcagatcacaaagacataaagtatagtg

SEQ ID NO: 2975 - DNA, 392 bp, Homo sapiens
cccttagcgtggtcgcggccgaggtacacacttctgtaacttaatatgtcatttggataccttttctcaagaagactcaaataaataattttattatgccttaaatattaccaagtcagaatactcacagatggatactctgtccaaatgagtatttgtgattgcgcatttacacacacatataatttgtcattggtaattttgttgcagaaattattgtgagaaaataaattttaaaagaaaatacgattctatgaatacattttatattttacctttttctggcacatactgttgcatcaaactgattaattaatgtaattatgttaaacttctccagttaaaaaagagaatatacactgcaaagctgaatgtgtatactacttgttgaa

SEQ ID NO: 2976 - DNA, 319 bp, Homo sapiens
  misc_feature 181, 183, 191, 314: n = A,T,C or G
cccttagcgtggtcgcggccgaggtacttaaagagctcgtggtgtgtgccaggagtgtgttttccatgcattcttcctgagaagtaggtttgattatacagtatctattttacagataaaggttgaggtcttttctttctaaggtgttattagacagctatagacatggacaccaaaactngncgagcctncggcattgtaaaggcttggcttaccttccatcaccctcagcagttctgctggaagggaaaaatggaaacagggcccttaattttttctcattattggattaattggaagcactaggcatggtntgctt

SEQ ID NO: 2977 - DNA, 472 bp, Homo sapiens
  misc_feature 455: n = A,T,C or G
ccctttcgagcggccgcccgggcaggtacatttaaaaggtgatgctaatactttaaaatgtttaagatatagatttaaaaagcattgtaaattgtatactgcagtgtcgtctacatggcattggacaggacataatgtaaaacataaaagtgcaattgttacacttacatatgatagtgaatggcaacgtgaccaatttttgtctcaagttaaaataccaaaaactattacagtgtctactggatttatgtctatatgacaaatcttgatactgcatccacaacattactggcgtgctttttgctttgcttttgtgtgcttttgtgtgtctgcctattaatacgtccgctacttttgtctgtgtctacatacacatcattaatactattggtattactattgtggataacagcagcctctgcgtttaggtgttttattggatatattggatttgnttatataccattatttt

SEQ ID NO: 2978 - DNA, 578 bp, Homo sapiens
  misc_feature 441, 444, 473, 544, 559, 565, 568: n = A,T,C or G
cccttagcgtggtcgcggccgaggtacataacacatttatgtgtctatgtgtatatactatttatgtaaacatataatatatgcaaaacatatatgcatatacacataccgatatatgcaaatctgtatatagaaaaacttagtttactcaagattattaaaattgatcctgggaacaaaacaatacaccttttctaggcatttatccctactatagagacagagaaagaaagattgtgagagggagacacacacattcagatgagccttcagggaattgtatgaacttttgaaccagagatggagaagccagagcccagcctgttcccactttaataaacatttttttcttcaattaattaaggtttgggaaagaaaaaaaaacccccagaagagaaagtaatttaacatgccatgcatactttacagatggatcctccntcngatgcctattaaatctatgcatgattgcnctggaaaaaattaattgcatttggttctcactattgggaaaatagggtgccaacagctcaaaaataaaaanggaaaatgaaaccanggtggntgntggtggttta

SEQ ID NO: 2979 - DNA, 331 bp, Homo sapiens
acgcgggctccaatttaattcttttagttgaatgagcttctttctcgcttgttacagactcacttagggctcattcctccctgccttagtcccagtatggtctcagtaatgacatgcagtatggggactttggactcctgtttgaacaaaccagctttgagatgataaaaatttgaatatgaattgagttcttgaagataagaaattgttaattttgtcaggtttgttaatggcatggtagttactctaaaaacaaatttctgggcgagtgtagtggctcatgcctgcaatcctagtacctcggccgcgaccaccgctaagggcgaattcc

SEQ ID NO: 2980 - DNA, 839 bp, Homo sapiens
  misc_feature 482, 510, 594, 601, 634, 657, 728, 735, 758, 764, 783, 790,804, 805, 807, 809, 810, 811, 819: n = A,T,C or G
cccgcgtccgctttcttatttggaaagaaaacaacactcaccacggcattcacaatgctggggaccttatgaatgggaatggagaggctgcactaatgtaagtggggtcaacatccctgctggagggcagatgcaagtggggtcaacatccctgctggagggcagatgcaattttggcaaactaatgacttttggaagccattttctagactgcatttttctcttctttcttagaatgcttttctcaaggggaaaaagaaagcagaggtgtaaatggtatctggccgttcgaagagcccgtctgggagactctctgctgaccacagcactgtctctccccagggcccagtcccacagtgtcactgagtccagagtcgggactccaacaagccctccgcattccagcatgactgtggtaaaaacaaaaaaaatctattttattctagtccatcacattttctatatttgctaaagaaatctcnatcactccataaatgatcggttaaaatnaaaaatataggctgggtacagcagcttatgccctgtaatcccatgctttgggacactgaggctggaagatcactttgaggccangagttcnagaccagcctgggcaacataaaaaagacccatnttttccaaaattaaaaataattngctggggggagcctaattccactacttgggaagctgaaggctggaggattgcttgaccctgggagtgagangctacantgagcttttattgccccactgcncttcanctttggccaacaaaatganaaccctntccgtaaaaaatcnncncnnntcaaaaanttttaaaaaaaaaaaaaaaa

SEQ ID NO: 2981 - DNA, 403 bp, Homo sapiens
cccttagcgtggtcgcggccgaggtacaataatcgtttttggaatgatggagtaaatggtggatttcatgcctcaacttgaatacactctctggtggctgaaaccgaggaagaatgttgctccaaaatattaacgggtgataacttgcttttctattttaaaatagaaaaattaattctcccattctcttgcatggaaagaaccactcaaacggaaattattttgtatttagtcactatttagttattattttttccaaaattaaggctcatgctcagaagctatttttcttaatatgtttgagtttttaaaaattggaaaaaatatctcttccaccaagaatttggcaaaagaaagctagaattaaacaccgcaataataaatttcacaacactatgaaaag

SEQ ID NO: 2982 - DNA, 417 bp, Homo sapiens
  misc_feature 31, 215, 294, 296, 364: n = A,T,C or G
cccttagcgtggtcgcggccgaggtacactnacagccctgtcctgagcctgtgttaaagccggcactctatttttctggtgtcatgtcagctgctcacatgtctgtccctcactccatgccccacatccccttgttccagggtccggctcgcagtcagcacttttaccatgggaatgcatgccttagtttagcccaccttccctgggaaaaaganctggatatacacacaacatacccatgtctcaattgtctggtatgcaagtgatatgacatatttgtgttaataaatttgngncttatatgcatttgtgtgcaggcagtcactcaaactgggacacttttgatctaaataaatactaaggnggatccttggacaattggcaaagccaggactgtcagataaatggtccccttgg

SEQ ID NO: 2983 - DNA, 322 bp, Homo sapiens
cccttagcgtggtcgcggccgaggtactaaaaactagtaatgcaaaggcagcaatgttagcaaaatttaaagagttataccggggtgagttttacagaattagtaagaccatttaaaagtaataaatcaacgtgttgcgattggtgtattgctgcatttggacttacacccagtatagctgacagtataaaaacactattacaacaatattgtttatatttacacattcaaagtttagcatgttcatggggaatggttgtgttactattagtaagatataaatgtggaaaaaatagagaaacaattgaaaaattgctgtcta

SEQ ID NO: 2984 - DNA, 515 bp, Homo sapiens
  misc_feature 452: n = A,T,C or G
ccctttcgagcggccgcccgggcaggtacgcggggagcgcgccggaagaaaaaccagcaagaaggcggcgggggaagatggcggtcctggggtagagtttgcaagctttctgactaggctagtcgagcaactattcgggtcatggcgtcaaactcaactaagtctttcctggcagatgccggctatggcgaacaggaactggatgccaactctgcccttatggaattggacaaaggcctaagatctggcaaacttggtgaacagtgtgaagcagttgttcgctttcccagactttttcagaagtatccattccctattcttatcaattctgcattcctaaagttagctgatattttcagagttggaaataatttcctgaggctatgtgttcttaaagttacccaacaaagtgagaaacatttggagaagattctaaatgtggatgaatttgngaagagaattttttctgggattcatagtaatgatcctgtggcaagagccatcaccctccggat

SEQ ID NO: 2985 - DNA, 527 bp, Homo sapiens
  misc_feature 200, 249, 263, 399, 510: n = A,T,C or G
ccctttcgagcggccgcccgggcaggtactttttttttttttttttttttttggtggactcagggtcttactctgtcacccaggctggagtgcagtggtgcaatctcagtttaaacccccaagtctgtggtattttgttatagtccccctggaaattaatacaggattcatggtctgccaaagtctcattccctgctcanaccgacaatggatagtgggatcctttgtgatatgtgctctgtgagttanaagtagtaacttanagctgttgaggacaatacctttgcaccccatccactgaattttgttttcaaagatacagtctgaaactcccagagggtgagtgcctttccagtgtgtcagagccattagcggctgagcagaccgctgagcatgtanatttctaggtcagggccctctccccaaagaatcatactccctggttgaactgaacctaaatcaggtttaaaactagacagatgccaaccaacttaaaattccaaagatatncaagacctgcccatggc

SEQ ID NO: 2986 - DNA, 432 bp, Homo sapiens
  misc_feature 51, 66, 71, 82, 88, 149, 194, 310, 312: n = A,T,C or G
cccttagcgtggtcgcggccgaggtaccaacagcagtgaaccagggcctanttgtcagcaaccaanacctntgctgacccanaagcanacaggtgaccctttcaccaaaacttcaatcatcagtcttctcttttctttttttgaaacanagtcttgctctgtcgcccatgctggagtgcagtggcgcgatctcnactcactgcaagctctgccttccaagttcacgccattctcctgcctcagcctcccgagtaactgggactacaggcgcccgccaccatgcccggctaattttttgtatttttcatananacatggtttcaccatgttagccatgatggtctcgatctcctgacctcgtgatccacatgccttggcctcccaaagtgctgggattacaggtgtgagccactgcgcccggctagttttctc

SEQ ID NO: 2987 - DNA, 496 bp, Homo sapiens
  misc_feature 440, 455: n = A,T,C or G
ccctttcgagcggccgcccgggcaggtacatttaaaaggtgatgctaatactttaaaacgtttaagatatagatttaaaaagcattgtaaattgtatactgcagtgtcgtctacatggcattggacaggacataatgtaaaacataaaagtgcaattgttacacttacatatgatagtgaatggcaacgtgaccaatttttgtctcaagttaaaataccaaaaactattacagtgtctactggatttatgtctatatgacaaatcttgatactgcatccacaacattattggcgtgctttttgctttgcttttgtgtgcttttgtgtgtctgcctattaatacgtccgctgcttttgtctgtgtctacatacacatcattaatactattggtattactattgtggataacagcagcctctgcgtttaggtgttttattgnatatattggatttgnttatataccattatttttaatacatacacatgcacgctttt

SEQ ID NO: 2988 - DNA, 512 bp, Homo sapiens
  misc_feature 188, 212, 219, 360, 379, 380, 383, 424, 426, 463: n = A,T,C or G
ggtacaagagttggaaaaacagagttgaaaggaaaaatgaggataatcttatttaaaagattattgaatgcctaagtgcctttaataactccacaaggaccctcatgtaaacaaaattcagcaatagcaacaaaacaaagcctctgaaatgctcattgttccccagtgagataagctttaaagagcanaaatacgaaaaacaaaaccaaatntcaagtnaaacttaaaaatgttactttatgggagaggacaggcaaggcggcaagaacatagaagcagtgccacctgaagctggcatgataaggttgatttaactgcactggaagtgacagaatctgaaagaacgacttttcaaatgtnagataaatccatttcaaannatngttaaacttgtgaattcaacagaaaaactgtaaaactttcngnggaggctgttaagagcaaaattgttccctcagagcanaggactcattgatgccgaagatagaggaacatggccaacccaattaaaa

SEQ ID NO: 2989 - DNA, 477 bp, Homo sapiens
  misc_feature 430: n = A,T,C or G
cccttagcgtggtcgcggccgaggtacaaagagaagaactcatgtcaatggaaagtctgtttatccttaaagccacatttgtagactagacagttccaaaatatcccttggcaatcccttttgcaaagtaattggaaaatgctgtgccaagtgataaaaagcatttcaagtttctgcctaatgtctgttatagttttcaaagccctgaattgcaaaacaagattaaaactagttctgaaataaacaacaagtatttactgaagaacaactatgaggcactctgctggaactttggggatttgaagatgtgtaagactgagcttacaatttagttggggagatcagacgtgtgcacagccaaggttaagctctaatacagcatgaaaatatctgaaatgtcaaaaaacaccagcaactgtttccatctcanggagtgaggctactatcctccaaaggcaagtcctagccccatcaaaa

SEQ ID NO: 2990 - DNA, 508 bp, Homo sapiens
ccctttcgagcggccgcccgggcaggtacatatacattatgtaattaaaaagcgtgcatgtgtatgtattaaaaataatggtatataaacaaatacaatatatacaataaaacacctaaacgcagaggctgctgttatccacaatagtaatactaatagtattaatgatgtgtatgtagacacagacaaaagcagcggacgtattaataggcagacacacaaaagcacacaaaagcaaagcaaaaagcacgccagtaatgttgtggatgcagtatcaagatttgtcatatagacataaatccagtagacactgtaatagtttttggtattttaacttgagacaaaaattggtcacgttgccattcactatcatatgtaagtgtaacaattgcacttttatgttttacattatgtcctgtccaatgccatgtagacgacactgcagtatacaatttacaatgctttttaaatctatatcttaaacattttaaaggattagtatcacctt

SEQ ID NO: 2991 - DNA, 353 bp, Homo sapiens
  misc_feature 267: n = A,T,C or G
ccctttcgagcggccgcccgggcaggtaccaggactgtcctagtgcggggaataaaagtgaaattatagtcctttctcctgaagaaatcagggtctagtggaaaggaaggtgggaccggaaggaagctggccggtggagcttggccctgtgctaagcattcctatccacttaactgtgggtaatcgtctgaaactccctacagacctgggagtaagctattgtattgaaggggctgtatggagtcagggagagaagccaggctttanagtcagatggctctaatcgtgcatctcaccctctctgtgtccccaagctctccctctgtaagatggggacaatgacagcacccacc

SEQ ID NO: 2992 - DNA, 316 bp, Homo sapiens
cccttagcgtggtcgcggccgaggtacattgtatactgcagtgtcgtctacatggcattggacaggacataatgtaaaacataaaagtgcaattgttacacttacatatgatagtgaatggcaacgtgaccaatttttgtctcaagttaaaataccaaaaactattacagtgtctactggatttatgtctatatgacaaatcttgatactgcatccacaacattattggcgtgctttttgctttgcttttgtgtgcttttgtgtgtctgcctattaatacgtccgctgcttttgtctgtgtctacatacacatcat

SEQ ID NO: 2993 - DNA, 485 bp, Homo sapiens
ccctttcgagcggccgcccgggcaggtacttttctccaagtcaatgaatccaatctttaatggatctgggatgctctctgaccaggtcctgttatgagtttcctgtgttataattaaaaaccccaaactgattaagcatgagaggatacttcctgctctcagataaattatttattatattctgtattatccttgtaatttttctggatatgaataaataacaatgtatctcagaaaaacacattttgaaaagccttataaagttaaaactttaaatgcttttcatcaaaatgttatgaccaataaaaatgccattcatgtatctcatcacactttctatacattttgtagtgatatgtatttatacatactgcagttggaaatagggaatgcttttttggtttcccacggtaggctgcaggttttaaaagcagaagtcctgaacctctgaaggcaacataagaaaagtattcatttgaaacctg

SEQ ID NO: 2994 - DNA, 594 bp, Homo sapiens
  misc_feature 174, 358, 474, 531, 571, 575: n = A,T,C or G
cccttagcgtggtcgcggccgaggtacttgtgtgggtgtcttaccttgcattagaatatcctaggcctttctaattcttcctcttgaattccctgtgtcactcatctgaggtcatctcttggatttaaatacatttggtctgaaattctcaaactgctgaataaaatgccatantaagtccaactatatggtttcatgtagggtaaagtaaccattgtggaaggattacgataaaactgtgtgacaataaatagaataaaagatggcaaaacaatctgtaaattacaaagtgttataaaaatgcattgaatttctagtgttcttacactttcatatttctcattggcacatcaatcanaccttgccttcctaaagtgggaggaagaaaaaggctgcacctgtctggggctgaaggtctgggcagaaacactagccaaaacttttactaaatcttcatgtcacccccccaaactnattaggggcccaaacttatttcattatcttcactatcccccagggtttccctctccntattttttcatgccccacctttcagcacttttcatggttncttngtctttaaaaaacccccaa

SEQ ID NO: 2995 - DNA, 320 bp, Homo sapiens
cccttcggccgcccgggcaggtacatttaaaaggtgatgctaatactttaaaatgtttaagatatagatttaaaaagcattgtaaattgtatactgcagtgtcgtctgcatggcattggacaggacataatgtaaaacataaaagtgcaattgttacacttacatatgatagtgaatggcaacgtgaccaatttttgtctcaagttaaaataccaaaaactattacagtgtctactggatttatgtctatatgacaaatcttgatactgcatccacaacattactggcgtgctttttgctttgcttttgtgtgcttttgt

SEQ ID NO: 2996 - DNA, 682 bp, Homo sapiens
  misc_feature 128, 588, 590, 613, 623, 640, 650, 652, 660, 676: n = A,T,C or G
cccttagcgtggtcgcggccgaggtaccatttgggattatggtttttaaaagcttgagaatattacttatttacttttgcagctttccatgcagctgtttttttttctctctgtttttgactttgganataaagttactgatttttatctttacttttctctttattttgtgccttggtcttgaaaaagtaataaatatttcttactgaggccccctcctgctttgttctgccatctaaggtgattacaatgctcaagtctctttgttggttgcccttgactaatgcttttcagcagccccgggctcagctcctggttcccagtatggcacaatgaccaggcagatatctcgacacaactctactacttcttcgacatcttctggtggatacagacaaactccctctgtgactgctcaattttctgctcagcctcatgttaatgggaggtccactttattctcaaaattcaagtaagcttgtgctttgcaggcatacagcaacagggggagctccttttggaaggaaattatttgaaactggtttttcttgccaggggatagacaaccaattgaaaaaccatgaaggntncaagggttatttttgggttttangaaattaagncccttgaaatcataccnatttttaaanangtaattgntttaccaccttttttnttccca

SEQ ID NO: 2997 - DNA, 443 bp, Homo sapiens
ccctttcgagcggccgcccgggcaggtacatgttccttcccttactttggggagtctaggttgtgaatttgaaacaaaatcagattcttttcatcttccctttcccctcaaattcctgagaaaacctccaaccttctaaatttatagcaaatcaactataattatgtgtttccatttgaaattcaagctaaaataacatactttaaaaagtgtatcttaaaaatcatatttcgcttcaaaaaaacttgttaaaagtaatttgcatcagatcctggagtcgacttgaagaattctcctacatctgacacccagttaggccctttgagaaagagagaaaagagaattttttaatgcatgtttgattatggccatctcttttcttagaaggtagaagatagcaccatgccgattcgtcgaactgtgaattctacccgggaaactcc

SEQ ID NO: 2998 - DNA, 324 bp, Homo sapiens
cccttagcgtggtcgcggccgaggtacatttaaaaggtgatgctaatactttaaaatgtttaagatatagatttaaaaagcattgtaaattgtatactgcagtgtcgtctacatggcattggacaggacataatgtaaaacataaaagtgcaattgttacacttacatatgatagtgaatggcaacgtgaccaatttttgtctcaagttaaaataccaaaaactattacagtgtctactggatttatgtctatatgacaaatcttgatactgcatccacaacattattggcgtgctttttgctttgcttttgtgtgcttttgtg

SEQ ID NO: 2999 - DNA, 485 bp, Homo sapiens
  misc_feature 423, 455, 470: n = A,T,C or G
acatctgcacattgtgcaggttagttacatatgtatacatgtgccatgctggtgcactgcacccactaaatcgtcatctagaagtgttttctaattttatttgtaatttcttctttgttccattggctgttgaagaatgtgttgtttggccgagcacagtggcccacgcctgtgatcccagcactttgggaggccgaggcaggtggatcacgaggtcaggagatccccgcgtacatctatttaaaagtcaatacacaggaaaaaggtctggaagaatatatactagaaaagaatggttacctctaggggatggagtgtcaaggtgaattttggtttattcatactgtctaaatgattgcttaataactcaggtattgctttcaaaaagtaagaggaagggtgggaaataccctgttctctcanaattttaagtccagagtgctggggagaaaaanatggcagcacttgancgggactgaaaaagt

SEQ ID NO: 3000 - DNA, 384 bp, Homo sapiens
  misc_feature 333: n = A,T,C or G
cccttagcgtggtcgcggccgaggtacgcgggtaggagcaggaggagcagtgggggaagctggtattatttataccactctttgtattttatcactttttataagtctgaaattatttcaaaatgaaaatgtaaaaagaacaaggagtttctcactattctttgtccccctaaaaagaccatctttttaaaaagattaaggaattcatacaaaataagtaagaattaacaattataggaagtttgggccaagcacagtggctcatgcctgtaatcccagcgctttgggaagctgaggtgggtggattgcttgggcctaagagttcaagactanccctggtaacagcgaggacccttgtctctacaaaaaataaaaaatactaac

SEQ ID NO: 3001 - DNA, 301 bp, Homo sapiens
cccttagcgtggtcgcggccgaggtacagatggggtttcactgtgttagccaggatggtcttgatctcctgacctcgtgatctgcccgcctcggtctcccaaagtgctgcgattacaggcgtgagccactgtgcccaggcctattgggggttatgcaggttcctttgcttggccatggtagatggctaagtctttgcttccaagttcttttgaccatgagacatgtagagccagggaggaaagagaaaacccaaaccaggtcactgttacctgtgaataacatcttgatcgagttctgaga

SEQ ID NO: 3002 - DNA, 322 bp, Homo sapiens
ccctttcgagcggccgcccgggcaggtacattttcatattctccacctttgttccttgccctttgccttcaaagatatgtagatgttccttaactccaaaaattataaaaacaaacaaaaaaactttaccactgttcattatcaaagttactattcatttatccattcaatatttagagtagctaacaagacaaaacaaaataattgctgctttcgtggcttatagtggggaagggtgataaacaccatgatgaaggagagaagagtgctattgtgggggcacaaattatggggatctgatccttttttttaagggaggcat

SEQ ID NO: 3003 - DNA, 319 bp, Homo sapiens
ccctttcgagcggccgcccgggcaggtacatttaaaaggtgatgctaatactttaaaatgtttaagatatagatttaaaaagcattgtaaattgtatactgcagtgtcgtctacatggcattggacaggacataatgtaaaacataaaagtgcaattgttacacttacatatgatagtgaatggcaacgtgaccaatttttgtctcaagttaaaataccaaaaactattacagtgtctactggatttatgtctatatgacaaatcttgatactgcatccacaacattactggcgtgctttttgctttgcttttgtgtgc

SEQ ID NO: 3004 - DNA, 546 bp, Homo sapiens
  misc_feature 399, 523: n = A,T,C or G
cccttagcgtggtcgcggccgaggtaccatgttctaaaggcaatcgagtcataatacactgaaagcagtccaagagcagcaagagactttgctgcagctgtagatcactggatcggtaactcgtagttaaaggaaatccctacccactcccatccagcccctaccccctaattatgggacaaaatagccaattcaatgagatttaaacaggaagttcacaagaggaactcttatacctatgaggacccattaaccagggattccacaaccagtagaatattatctactggtagctatttaagccttacctgacaggtctccaagccagccgcagcagccacatccctctctgcgccataaacgtctcgcctcagtttcctgaaattcccaactgagaanggaatatagccagcaggcactcccaaccctgttatgattctacagttctactgttagtaaatttcccaggggcatcacaatctgtgtccttacacatgcatacacagaggagcttcctttttanggatgagctcctcattacagggc

SEQ ID NO: 3005 - DNA, 318 bp, Homo sapiens
cccttagcgtggtcgcggccgaggtactaagtctatcgccatgctgtgtcacgtgggcaggtcttcttggcattcatcttgaacatgacccaaatcctggctccatcttccctcttacttttcctttgccccatttttcttccttattttttatgtatgtttaccttgccctgtaggcgcatttgtaagctggctcaaatccttttgggaacaaggtgggttataaatgcacacgttcctacacaggatgttgttagtcatttcataaggtctcttgtggaggagattagccaatagcttcttttgtaaccttaggca

SEQ ID NO: 3006 - DNA, 688 bp, Homo sapiens
  misc_feature 355, 468, 483, 491, 497, 501, 513, 543, 556, 570, 581, 615,620, 640, 651, 652, 681: n = A,T,C or G
cccttagcgtggtcgtggccgaggtacaaaacacatttggtcctgagatttttcagaagcaattttaagtgtaataggaatcctcagaaggaagaaagtaaacatgttctgagcaactcctcctccaggcactacaataaaagagaagggaactggacctggaaagacagacagtccatagagaagtggagagggaagaggaagagagcatgctgcttaatgcaggttgacatttctgtttgtgaagctaattaaattccagaaggattaaatacttaatactttaccgtctgtatgtatgtatgtatttatttatttatatttttttgagatggagtctcactctgtcacccangctggagtgcaaaggcccaatcttggctcactgcaacctccaccttccaggttcaagcgattcttctgactcacctccaagtagctgggattacaggcacacaccaccatgcngagctaattttttgnatttttantaaaanacangggttccccggntacccggatgggctcaatctcctgacctcnggatctggctgtntcgggcctcccaantgcttggatanaggcgtgagcccctgggccccacttatacccttnataantaaatatttaatccccaagntttaaattttnnttatcccttgtcggggtaaacctttcccnaaaaagg

SEQ ID NO: 3007 - DNA, 320 bp, Homo sapiens
cccttagcgtggtcgcggccgaggtacatgattctacactgaatctgcatttcactcccatatctataccagaaggttatcagtggaagagaaattcagttatcttgaatggacatgatcttctcaggagcagtcagtggttaattgggacaagaaaacacaagtcattatcattgagaaatctgaagcaaattgaggcaggttgtcacctttcaccaggaaacaaattagccctgtctttaaaaagacttctttctctctctgctgactggggattcctgtcaactgccaatgaaatagggagagtgtagattaatggc

SEQ ID NO: 3008 - DNA, 315 bp, Homo sapiens
cccttagcgtggtcgcggccgaggtactaaccatatgaaaatagttgctaccttgttggacaggacagatatacaaagcatttccatttttacagaaaatgtgtatggataccatggaggtttgaaataaatgctgagttcattcaaactatagtgaaatacagcatgtgaaaaagtaattacttattgactataataaatgcttcataaaatataatagatgctgattctggccaagattgacaaaatctaatgcagcctacatgtctcagtggttaatactaagactctgaataaaatacaagcaaataaaca

SEQ ID NO: 3009 - DNA, 362 bp, Homo sapiens
cccttagcgtggtcgcggccgaggtacctttgccagtttctggcatattaacagctgagatcagataagtgaacagcgatagaggtagtgaggtttaggattcaggtctgccaccgggagcgcacctctgggctcaggtctctcatttgtaaaatgggacatttaggtcagatcagcattttcaaaagtgtgacatgttagtaaataagatgattttatgtggttgacagatgaatgtattacctttagtggttatatgtttattttcatggttacttttatttataataaattttgtgactagctaagaatcaattatctctttaaaatatatttaaagtttaaaatgtgggccaacttag

SEQ ID NO: 3010 - DNA, 322 bp, Homo sapiens
ccctttcgagcggccgcccgggcaggtacatttaaaaggtgatgctaatactttaaaatgtttaagatatagatttaaaaagcattgtaaattgtatactgcagtgtcgtctacatggcattggacaggacataatgtaaaacataaaagtgcaattgttacacttacatatgatagtgaatggcaacgtggccaatttttgtctcaagttaaaataccaaaaactattacagtgtctactggatttatgtctatatgacaaatcttgatactgcatccacaacattacctggcgtgctttttgctttgcttttgtgtgctt

SEQ ID NO: 3011 - DNA, 349 bp, Homo sapiens
  misc_feature 332, 347: n = A,T,C or G
cccttcgagcggccgcccgggcaggtactgaatggaagagagagttggaacagtgaacatattctactttttcaagaatttctcttttaaaggtatgggaaaaagatggcacaaaattcatttgaggatagcatagatctaaaggcatttaaaaccttgagtcttgaacatatttataggcacggaaaaaattctacagaaaggaaagattgtaattataggagagagaaaaacagtgatatttctgaggatattgtggggagtgggtgctaaaggaccattggatatatcattcttaaaccagaaaggggaaaggattgggtaccttcggncgcgaccacgctaangg

SEQ ID NO: 3012 - DNA, 497 bp, Homo sapiens
  misc_feature 440, 449: n = A,T,C or G
ccctttgagcggccgcccgggcaggtacatttaaaaggtgatgctaatactttaaaatgtttaagatatagatttaaaaagcattgtaaattgtatactgagtgtccgtctacatggcattggacaggacataatgtaaaacataaaagtgcaattgttacacttacatatgatagtgaatggcaacgtgaccaattttcgtctcaagttaaaataccaaaaactattacagtgtctactggatttatgtctatatgacaaatcttgatactgcatccacaacattactggcgtgctttttgctttgcttttgtgtgcttttgtgtgtctgcctattaataccgtccgctgcttttgtctgtgtctacatacacatcattaatactattggtattactattgtggataacagcagcctctgcgtttaggtgttttattgnatatattgnatttggttatataccattatttttaatacatacacatgcacgcttttt

SEQ ID NO: 3013 - DNA, 314 bp, Homo sapiens
cccttagcgtggtcgcggccgaggtacaaatagggtcacctactctcaaattctgcggttcaaattgtggttggagatgagatgttctatttctgcatctctcctggaccatcttagagcagtgcaaagtttactggatcttccagtgcattattggcccttggtgtgatgacgagagagcaggaaggaggtctccagctccttttctgagttcagatgttccctagcccaagaagactaatcatgcacctggtttcctgctctgaaaaataagaagtgattttggcagcctttgaatctggatggaaggtggt

SEQ ID NO: 3014 - DNA, 316 bp, Homo sapiens
ccctttcgagcggccgcccgggcaggtacatttaaaaggtgatgctaatactttaaaatgtttaagatatagatttaaaaagcattgtaaattgtatactagcagtgtcgtctacatggcattggacaggacataatgtaaaacataaaagtgcaattgttacacttacatatgatagtgaatggcaacgtgaccaatttttgtctcaagttaaaataccaaaaactattacagtgtctactggatttatgtctatatgacaaatcttgatactgcatccacaacattactggcgtgctttttgctttgcttttgt

SEQ ID NO: 3015 - DNA, 320 bp, Homo sapiens
cccttagcgtggtcgcggccgaggtacatttaaaaggtgatgctaatactttaaaatgtttaagatatagatttaaaaagcattgtaaattgtatactgcagtgtcgtctacatggcattggacaggacataatgtaaaacataaaagtgcaattgttacacttacatatgatagtgaatggcaacgtgaccaatttttgtctcaagttaaaataccaaaaactattacagcgtctactggatttatgtctatatgacaaatcttgatacttgcatccacaacattactggcgtgctttttgctttgcttttgtgtgctt

SEQ ID NO: 3016 - DNA, 512 bp, Homo sapiens
ccctttcgagcggccgcccgggcaggtacatatacattatgtaattaaaaagcgtgcatgtgtatgtattaaaaataatggtatataaacaaatacaatatatacaataaaacacctaaacgcagaggctgctgttatccacaatagtaataccaatagtattaatgatgtgtatgtagacacagacaaaagcagcggacgtattaataggcagacacacaaaagcacacaaaagcaaagcaaaaagcacgccagtaatgttgtggatgcagtatcaagatttgtcatatagacataaatccagtagacactgtaatagtttttggtattttaacttgagacaaaaattggtcacgttgtcattcactatcatatgtaagtgtaacaattgcacttttatgttttacattatgtcctgtccaatgccatgtagacgacactgcagtatacaatttacaatgctttttaaatctatatcttaaacattttaaagtattagcatcaccttttaa

SEQ ID NO: 3017 - DNA, 298 bp, Homo sapiens
cccttagcgtggtcgcggccgaggtactttataaatttaatctataatgatgtattagcaatcatagggaacaccatgatggtcagtgttcagacttgatgaagactgaagcatgagagagggccagacagatattgtggagtccgtgcagctttctactaatttctatttaccaataaatatgcctgggataatataggagaattatagaaaggaacaaggaaactaatcaaggagaaagtagagggcggtttccaatgagagaatttcatctgcttctaatctaaaaaaaaaagac

SEQ ID NO: 3018 - DNA, 336 bp, Homo sapiens
  misc_feature 304: n = A,T,C or G
cccttcggccgcccgggcaggtactatagttagagacttgtagttgattttttccaaattgatctgctatttcttggagctctttaatttaaaaacatttaataacttttttattaggcagctaatcagtttcactgaggtagaagagttggaaggcatggaaaagtataaaactttattttgaattagttggatttccatggttatttaaaaactaggcccacctattttctaaggcacttttcatttgtaatatcactgaaattgaaattccttctggtttgttagaactctgataggaaanggcagccagaagaataggaaaatttaccttca

SEQ ID NO: 3019 - DNA, 451 bp, Homo sapiens
ccctttcgagcggccgcccgggcaggtacatatgggtttatagacatatatatattcacacatatatgaatatgtatacatatatattttttaagctcttatctaaagtggtttttaagtgatgtgaagtttaacctcagcatcaaagtatattctaaaatataaaacaactattttttatcattctacattttttatttacatcaactgtatcacccattacatatttgataaagaggttatgcctcagtaattctgaagctgaaggcttaaaatctcagcccagtgactctggagaatcacgtgttagttaaagggaaagcggcggcctcacatgctgcgtaagtttcattctcaggcatcctttctgagggacctacttttactggagatcattctgctaaataaggtaacatctagcctcaatggcagtcatgttagttaaccccct

SEQ ID NO: 3020 - DNA, 376 bp, Homo sapiens
  misc_feature 320, 326, 328, 354, 355, 358, 363, 374: n = A,T,C or G
ccctttcgagcggccgcccgggcaggtacaggaagacacgcttgaaagagtccctaatgacactgagcaacaattccccatgtttgttacactggaagttgttctatctaccttatgcgcctgtctttaattcctggcatctcacaagtctgaaagacagttattatcatttatacaggaagaaactagggctcctataggggaaatgacttgttaatatcataagactagcaaagcttacttactcaattcctaatgctcttcagagcatattatatctgaactctatattaaatttgtggttggtgtttctaaattantcctgnanttaaactgatttttatattgggggcnnacnaagtngggtcatttgnaa

SEQ ID NO: 3021 - DNA, 468 bp, Homo sapiens
ccctttcgagcggccgcccgggcaggtacatggattaggttatgcctggtcaccaccagtcctaaatgtgtctgtgggggacacagtggcatggcattggcaaacacatccgtttcttagagggataggatataggattttttctgtctccagtcctggaagtgtaatttatgatggcaaaggattcacaagtggaagacaaaaatctacatcaggtatgtttctgcttattgggttttgcatcatgtcactttttcctaaatgtaataaaatgacattttgtgtagatttaatacagtatttttacataaataatatacacaaatgcgtaaggtatttggcattttattgctgcagtaaaaatgttactaatgagtgtaagcaagttattttatacatattcaagtgtgttctgatattagaaatatcttatattgattctggtgataatcaaccaattgaaaaaca

SEQ ID NO: 3022 - DNA, 230 bp, Homo sapiens
  misc_feature 8: n = A,T,C or G
ccctttcnagcggccgcccgggcaggtacgcgggcagtcaatcggaaactattgttgactctcctttaaaaatatatccaaaatattaaaagactgacagcctctaagactaccacttcagtccaagccaccgtaattgctggctattgtaacagctgacatcttgggctggaggtgtggtgagggtggttaacagaatcccaatacaaacttcagatcaattaaatgag

SEQ ID NO: 3023 - DNA, 442 bp, Homo sapiens
  misc_feature 180, 181, 341: n = A,T,C or G
ccctttcgagcggccgcccgggcaggtactggcatgaagcacttcacctcaaggagggttctccttgtgggctagggcttcccagaaccctgaggtggaggtggactggagctggaccttgggaggaaactctaggtgtaacagcacaggaggagaccaagctggagttttggagagagnnatggttcaggagagcagggcaagataggtaatatagaaagtcaatggctggaaacaaaggggcaaaagaggagctaaccttcctgaattctcaactatatattagcttttttaatggccacaattaactccataatggaggccatgtgtgttaacaaganaatgcatggctggaaaaacagaatccagtctgggttgcttaagccaaagaaggatatctggctcggtgttgtggctcatgcctctaatcccagcactttgg

SEQ ID NO: 3024 - DNA, 303 bp, Homo sapiens
cccttagcgtggtcgcggccgaggtacatgtgcacaacgtgcaggtttgttacatatgtatacatgtgccaccatgttggcgatagcacagtattatttagtgttcaattacattcttcaaattcccctctttcttgtctctccaaatattttcaagtctcttacagaaaaaaatgtgccttgtttttctcccagatgcctgtctttagcacttagcatggtgctgagggtatgtgaagttgattggtttgtgagtggggaaaaaggagatttctaaagcactagaaaagatccgcctctcca

SEQ ID NO: 3025 - DNA, 184 bp, Homo sapiens
gtcagcccgcgggaacgaccgaaccccctcagagcgggaagaggggcgcgggacggacgggcgggggacggcgggggcagaaccgggaaggccacccgtcggaacccggcgacacacccgtaccgagacgccgcgaggacgacacgctcccaacacgaggcccacgccgcggaccataccgggc

SEQ ID NO: 3026 - DNA, 522 bp, Homo sapiens
cccttagcgtggtcgcggccgaggtactttttttttttttttttttttttttgaggctgagtctctctctgtcatccaggctggagtgcagttgtatgatcttggttcactgcaatctcctcctcctgggttcaagtgattcttctgcctcagcctcccaagtagctgggatcacaggcggccgctaccacatgcggctaatttttgtatttttaggagagacagggttttactatattggccaggctggtctcaaactcctcaaaccccaagtgatcctcctgcctcagcctcccaaagtgccaaggattaaggcgtgcgtgagccactgtgcctggcctaggataaatttattagtatcaggaatccttatgcttcttttgaatgattattttctcttaatgttaaagtataacttttgggtatacatttcatatgttagctccattccaggcttcattttgtgtctcaattcccaatccttaattttcgttttactgaggtcttttttttttttaagtt

SEQ ID NO: 3027 - DNA, 267 bp, Homo sapiens
caggtgtacaagctagcttgagtcgacccacgcgtccgggtgcacctgtggcatgcctgagaggattaccttgatcacattatttaaggtaggaagcctgcccactatgagtagcatcattccctaagatgaagatgagatcttgtataaaaaggaaaaaggtgagacataagagagagtgggagtgagatcagatgaattagaaaaataaggagaaactggactgagcaaccagtattcgttgctgtgaaaattctttatgtacct

SEQ ID NO: 3028 - DNA, 635 bp, Homo sapiens
  misc_feature 9, 617: n = A,T,C or G
cgtccggtnaaaagtcagatatattatcaaggagatctggatattgtaaaacccgattagaaattgggtttccccctgttttggagcgatacacgtcaatagtgaccttggtaaaaccacatttggtaaaggcctcttgtactgatgggaaacttttcaatcatctggagactgtttggcgattcagcccaggtcttcctggctatccaagaacatgtaccttggatttttcaatttcttttgaattccgctcccttctgcactctcagctcgctacactgttctttgatgaagttgtgaaacaaatggtagcggcctttgaaagaagagcttgtaaactgtatggtccagagacaaacattcctcgggaattaatgcttcatgaaattcaccacacctgagaggaaaacgagagctgcctccatccatcttgactagtttgttcacttttaagaagccatttcaccagctattgagaagtcagacagcatttgttaaacctgccttgactccaagcctgctccattgaaaatttatacattgaatatggactcacttgtacatagaatcatttcttcaatcaaagtgtaactctaagtaaccgtgtacatttgcangctctgcctgcctttgta

SEQ ID NO: 3029 - DNA, 520 bp, Homo sapiens
  misc_feature 458, 471: n = A,T,C or G
cccttagcgtggtcgcggccgaggtacagtcttttgttcaatcacagtatctgggtgtaatagacagtagctatttatttaattagtctatatttttatcttcagtgggctttaaatgacttgtttattaaataaattataaattaataagtgaatgagttataaaatcccaaaagtaatcttattttatggggtcagactttggaaaggagagcctcttccctgaaatcttgaatacatggcatttttaatgccaggacacaatacacaaatctgtatatttttgtataatatctgatttcatttactgtataagaaagacttggataatatttttcaatttttaatttatttgttatttttttgggaacagggtctcactctgctgcccaggctgaagtgcagtggtgtgatcttggctcactgcagccttgatctcgtagactcaagcaatcctnctacctcagcctnccaagtaactgggaccacaggtgcacaccaccatccccagctgattttt

SEQ ID NO: 3030 - DNA, 281 bp, Homo sapiens
aggtacaagctagcttgagtcgacccacgcgtccgatttaatgtctacactgtagctgtcacagacacaccagaagagggcatcagatcccattacagatggttgtgagccaccatatggttgctgggaatagaacttacgtcctctggaagagcaagaagccagtgctcttaaccattgagccatctctccagccccagcctggggttggttggcatttctatgggacatctttggccaacaactcagctgaatgcactacagtctctgtacctgcccgg

SEQ ID NO: 3031 - DNA, 385 bp, Homo sapiens
ccctttgagcggccgcccgggcaggtaccagtaaatgctgcctcatcacctacacccttggtttacttctcagataaactcaggaagtttaaatggattctgagaatctgtagctgcaacatagtgagcccaggagtcccggtccagcagctagtattaaattctctgttgctagcttggacctctctcgatatctaggaattgtctgcagtgtgcggtggcacagtaacaaccatttgtttctcaacaagaatctgataatgttgcttgaacctcctgaaccagtgctgcatgctctgcttcttcatatgtttgtccttagatttgaccaaaaacaataactgataatgtaatacagattccccagctccctgtgagctgggtt

SEQ ID NO: 3032 - DNA, 468 bp, Homo sapiens
  misc_feature 391, 430, 432, 454, 455: n = A,T,C or G
ccctttgagcggccgcccgggcaggtacatttaaaaggtgatgctaatactttaaaatgtttaagatatagatttaaaaagcattgtaaattgtatactgcagtgtcgtctacatggcattggacaggacataatgtaaaacataaaagtgtaattgttacacttacatatgatagtgaatggcaacgtgaccaatttttgtctcaagttaaaataccaaaaactattacagtgtctactggatttatgtctatatgacaaatcttgatactgcatccacaacattactggcgtgctttttgctttgcttttgtgtgcttttgtgtgtctgcctattaatacgtccgctgcttttgtctgtgtctacatacacatcattaatactattggnattactattggggataacagcacctctgcgtttaggggntntattggatatattggatttggnnatataccattatt

SEQ ID NO: 3033 - DNA, 323 bp, Homo sapiens
cccttagcgtggtcgcggccgaggcacccccaaataagcctcagttcccatatttaaacttttttctcataggaaagctacaggaattttaagatatcacatggttacatttgcttttcttccagatggagctaaattgctatatgatacagggtttattttatatttctcatattaaagatgaaaaagtgaaaattgagtagttgactcaaaattatatgtatatatatatatatatgttaacagttgaatacaaacaagattacaagcagtgaaacattcaaataggtttttggcaactccaaatattttgtgtttcacaa

SEQ ID NO: 3034 - DNA, 325 bp, Homo sapiens
ccctttcgagcggccgcccgggcaggtacatatcttttatatgctcatatgctcctgtagtcgttagttttaattcttaaaaatgtgataattagtaataaacttttattatatcttatgtaaaataattgtgtgtctgagagagactaaaactcatgccctacttctcatgatttctctttctcttttgtttccctttcacagacagaagaattatagcctcagtatttatgtatatttttgaaagagtgaagtggggactgagaaggtatatctacatgctatgcctttagatagcattctgtttcaaatctccttttctcat

SEQ ID NO: 3035 - DNA, 359 bp, Homo sapiens
cccttgagcggcccgcccgggcaggtacatctaaaaacctttttacttccaaaaacctttttggctctctcaagaatttgctctcaatataggagtggtaaatctgttggtgatataaacacagggaaaaaacagggagaatcaaagacagattaatcattcaacaaagacttactatctaccaggagcctgacagtgtatcaggtagtgcctcatgcactggaccaacagtgggaaataagatgagggtaatccttgtcctcacagaacctccattcttagaggaaagaaggaaattaaacatgaaattccactgagatgaattatgaaaggggaagcagatggtcctgtcatagggc

SEQ ID NO: 3036 - DNA, 400 bp, Homo sapiens
ccctttcgagcggccgcccgggcaggtacatcaccctgctgagggacatccaggacaaggtcaccacactctacaaaggcagtcaactacatgacacattccgcttctgcctagtcaccaacttgacgatggactccgtgttggtcactgtcaaggcattgttctcctccaatttggaccccagcctggtggagcaagtctttctagataagaccctgaatgcctcattccattggctgggctccacctaccagttggtggacatccatgtgacagaaatggagtcatcagtttatcaaccaacaagcagctccagcacccagcacttctacctgaatttcaccatcaccaacctaccatattcccaggacaaaagcccagccaggcaccaccaattacc

SEQ ID NO: 3037 - DNA, 316 bp, Homo sapiens
cccttagcgtggtcgcggccgaggtactgcagtgtcgtctacatggcattggacaggacataatgtaaaacataaaagtgcaattgttacacttacatatgatagtgaatggcaacgtgaccaatttttgtctcaagttaaaataccaaaaactattacagtgtctactggatttatgtctatatgacaaatcttgatactgcatccacaacattactggcgtgctttttgctttgcttttgtgtgcctttgtgtgtctgcctattaatacgtccgctgcttttgtctgtgtctacatacacatcattaatactat

SEQ ID NO: 3038 - DNA, 319 bp, Homo sapiens
cccttagcgtggtcgcggccgaggtactcaataaatactttcctaaatacttacattaaagctatttctgtaataaaaaagttcttcaagtcaacacaatccacaagtatttgttttgttcttagtgtaagcttagcacaagtctaggaaagggtttagcattgaagtctatttagggagacaaagtcacaggcaacatatttaaataatgttaccaaacccaatcctatctgccaaaatgctgggaggagatggtgagtgccacaaaggttcagaaaggaaactgacttcagaaagtggtatgaggtgttacattttg

SEQ ID NO: 3039 - DNA, 555 bp, Homo sapiens
ccctttcgagcggccgcccgggcaggtacttaattacctcaaaagaaaactgtcaacccaggaactaaagtttatccatttggacttacaagataacctttaataccccattgccactgtatccgatgctgtcagaggcccacctacatctccccctacactcagcatttcagtgcatactgatagaattgtgctatcacctgcaaatacctctttagggcacgccagaagtgtgcaggagataacatatctggctgaaactttcaatccctgacagaggggatttgggatacaaatacttcgactttctcacccactggtggggataaccctgaggaatgttcttcagggttccacaggactcctctgagggacttgtaacagttccccccaagagtaacctgttcagtgctgtgcctctcttggctttctttcatgcctctattctcaattccagctctactcctgagtttccttgctcactttccaggaacagtttgaattcaaattcttctctcaggctctgcttttgagggaaatcagtctaagacaatc

SEQ ID NO: 3040 - DNA, 400 bp, Homo sapiens
ccctttgagcggccgcccgggcaggtacatatacattatgtaattaaaaagcgtgcatgtgtatgtattaaaaataatggtatataaacaaatacaatatatacaataaaacacctaaacgcagaggctgctgttatccacaatagtaataccaatagtattaatgatgtgtatgtagacacagacaaaagcagcggacgtattaataggcagacacacaaaagcacacaaaagcaaagcaaaaagcacgccaataatgttgtggatgcagtatcaagatttgtcatatagacataaatccagtagacactgtaatagtttttggtattttaacttgagacaaaaattggtcacgttgccattcactatcatatgtaagtgtaacaattgcacttttatg

SEQ ID NO: 3041 - DNA, 397 bp, Homo sapiens
cccttagcgtggtcgcggccgaggtacaccaatgccaaaaattttgttagggaaacatttttctcctttctccctctcagggagagatgattaagaaaaatcaagttctagtggcagctgggtcttagagagaaggtttttcctacctgattatccagttgttttggggatggcagttcacactgcttggagcagagtctaatttcccgaagattaataatattaaagaaagttaaatgaagcaaacagcatgccacactgtgcagagccccagtcagaaccacactgcccaattcccttctgctattgggaagataattactgaatctttgttcctgtgaagtaaatgaattttgaatcctctgtatgtttaattatccaaaattgaacctttgtt

SEQ ID NO: 3042 - DNA, 472 bp, Homo sapiens
cccttcgagcggccgcccgggcaggacatttaaaaggtgatgctaatactttaaaatgtttaagatatagatttaaaaagcattgtaaattgtatactgcagtgtcgtctacatggcattggacaggacataatgtaaaacataaaagtgcaattgttacacttacatatgatagtgaatggcaacgtgaccaatttttgtctcaagttaaaataccaaaaactattacagtgtctactggatttatgtctatatgacaaatcttgatactgcatccacaacattactggcgtgctttttgctttgcttttgtgtgcttttgtgtgtctgcctattaatacgtccgctgcttttgtctgtgtctacatacacatcattaatactattggtattactattgtggataacagcagcctctgcgtttaggtgttttattgtatatattggatttgtttatataccattattttta

SEQ ID NO: 3043 - DNA, 369 bp, Homo sapiens
  misc_feature 155, 156, 221: n = A,T,C or G
acctgaaacctgtaactttacatgagtagaaatccgaaatgttataaggcaattgttacagcaagaaaggaaaagactagttatgtgatgtgctcacatccagaaatctaatagcagatgactcaccaatcataatagagcatgtcagttaaagnnctccgtgacttcagtccagacaggatcaagtccccactctactcctgtccagtgtctgaatttanacaaatgacttatcctctcgatgtttaagttctcatcctgataatggcagcacctacctcacagatttgtgaagaatagaaagttactacatggctgctcatcacaacagtgatgaatacattgcagggacactttaactggtgtacc

SEQ ID NO: 3044 - DNA, 323 bp, Homo sapiens
ccctttcgagcggccgcccgggcaggtacatttaaaaggtgatgctaatactttaaaatgtttaagatatagatttaaaaagcattgtaaattgtatactgcagtgtcgtctacatggcattggacaggacataatgtaaaacataaaagtgcaattgttacacttacatatgatagtgaatggcaacgtgaccaattttttgtctcaagttaaaataccaaaaactattacagtgtctactggatttatgtctatatgacaaatcttgatactgcatccacaacattactggcgtgctttttgctttgcttttgtgtgcttt

SEQ ID NO: 3045 - DNA, 317 bp, Homo sapiens
ccctttcgagcggccgcccgggcaggtacaatgggcctacgataatgacatagtagacgatagtgaaattgcatataaatatgcacaattggcagacactaatagtaatgcaagtgcctttctaaaaagtaattcacaggcaaaaattgtaaaggattgtgcaacaatgtgtagacattataaacgagcagaaaaaaaacaaatgagtatgagtcaatggataaaatatagatgtgatagggtagatgatggaggtgattggaagcaaattgttatgtttttaaggtatcaaggtgtagagtttatgtcatttttaa

SEQ ID NO: 3046 - DNA, 483 bp, Homo sapiens
cccttgagcggccgcccgggcaggtaccctctacagaaaagccagctgaatgtaaaactcccctagtgcccttttctccttataatggtatagttattcttgtccctgactactctgattgtatgccagggccttcaaattatttgcattttatatcttgttcatctttaataattataacagcaggaaacttagcctaataaagtcattccattcataactggaactctaattctaaaaaagaaattaattaaagaaaattattgatgtgaccaaggtttagctacatgtataatccacaacagaaatttttctatcagtaaaaaattggaagcaacctataggtctgacaatatggaattatttaaataaatgatgattgatccactgtaagtcaggaattgctgccaacattaagggcttaactgaggtcatgaattcaaaatgtgaccaagcactatgtgtgtctgtgtgttttcttcc

SEQ ID NO: 3047 - DNA, 312 bp, Homo sapiens
cccttagcgtggtcgcggccgaggtacgcgggtgtaattatatgttttcattttctcttagctgtatagctagcagtggaattgtgggatcatatgtaactgtattatcttttgaggaactgccaaattgttttccaaagcagctataccattttatgttcctgctagcagtgaatgcagacatgatcgctacacgcaatttctgccttttctttgcatcataggataaaggatgtttttatgttgcctaatttgacttgaagactggtggctttgatgacttttaaaaatattaaataaaactttatttac

SEQ ID NO: 3048 - DNA, 324 bp, Homo sapiens
  misc_feature 261: n = A,T,C or G
cccttagcgtggtcgcggccgaggtactgcaagcaacagttactgcgacgtgagcagcaacgaagtatcctctcctgaaactattaggcagcacttggccaaccacaccgccgcgacccataccaaagccgtcgccttgggcaccgaagaaacacagacgactatccagcgaccaagatcagagccagacaccggaaacccctgccacaccactaagttgttgcacagagactcagtggacagtgctccaatcctcactgnatttaacagctcacacaaaggacggattaactgtaatagtaacactacacccatagtacctgc

SEQ ID NO: 3049 - DNA, 321 bp, Homo sapiens
cccttcgagcggccgcccgggcaggtacgcgggcatagttagctgtttattgctttcctgctcttattctcagtccccaggaccaaatgttgaccactaccttcccccacatataattaggttatttaccgaacgccatgcaggtggctgttaaaaggaagatatatacttaccttataaactcaacttttccctgttgtctttctgtctcacccctacctccatgctttaaattaacttttcaggcttaggccttatctctcagtagagccatataaggtatgtgtaaaagcaggaaaatgtttcctggggatgaagctt

SEQ ID NO: 3050 - DNA, 502 bp, Homo sapiens
  misc_feature 177, 178: n = A,T,C or G
ccctttcgagcggccgcccgggcaggtacatgactgtcctaacaaaaaacaaaatgaaggcagaagtagatttttaattggctgtttcatctttcataaaagctaagaacatagtagcagaatgtagctttctggaggtgacgtgtagaggggcctgagctgaggtccaagtatttnncttgctcaaagagtagattcagaattcccagtgagaggggaggagggagaatgttccttaaactgttttcctaaacatctttaaaaacaaacaaacaaacatggtttttaataggagctcaactgcaaatgctaacaggtagtattttctgttaaggtcctgatgcatgcaaatgtattgagaaagattatactaaatatttttctcttattcaaccacaggttttcagaatattggattttatagaacaaaatttccaaaaagaattttgagggctccatggatttgtccactttttattgtcaagtgaaaacaatttttttt

SEQ ID NO: 3051 - DNA, 462 bp, Homo sapiens
  misc_feature 7, 329: n = A,T,C or G
ccctttngagcggccgcccgggcaggtaccctagaacttaaagtatgataataaaaaataaataaataattttaaaaaatagatttaaagaaatctctacaattctttaaagaatacatttaattttgacatgttagaattatatttgattgaatttagttactgtaaatattagattaaaatatttttgttttattcttgttttctttttcctagtcctcctggtagaaacaaagtttgagtatgatacacaatctggttaggtctcagaacaaccattatgatgtcggatgagccattcattaataataattgaaacaataatacanataaagctatcctttataggagcacttatttatatgcaaagtgctgttataaagatggatatatatttatttctcattaaatcattaagaaaaaggttactattattatttcccttttaaagatgaaaaaagt

SEQ ID NO: 3052 - DNA, 320 bp, Homo sapiens
ccctttcgagcggccgcccgggcaggtacattgtatactgcagtgtcgtctacatggcattggacaggacataatgtaaaacataaaagtgcaattgttacacttacatatgatagtgaatggcaacgtgaccaatttttgtctcaagttaaaataccaaaaactattacagtgtctactggatttatgtctatatgacaaatcttgatactgcatccacaacattattggcgtgctttttgctttgcttttgtgtgcctttgtgtgtctgcctattaatacgtccgctgcttttgtctgtgtctacatacacatcatta

SEQ ID NO: 3053 - DNA, 422 bp, Homo sapiens
  misc_feature 390: n = A,T,C or G
ccctttcgagcggccgcccgggcaggtacgcgggttgctctcctttttaactttgggttttctaagactagaaacatgaaagtgctgaagatgggcatgaaaaataatggagaggaaaaccatggggatagtgaagataatgaaataagtttgggccctaatgagtttggggtggtgacatgaagatttagtaaaagttttgctagtgttctgcccagaccctcagcccagacaggtgcagcctttttcttcctcccactttaggaaggcaaggtctgattgatgtgccaatgagaaatatgaaagtgtaagaacactagaaattcaatgcatttttataacactttgtaatttacagattgttttgccatcttttattctatttattgncacacagttttatcgtaatccttcccaatggt

SEQ ID NO: 3054 - DNA, 466 bp, Homo sapiens
  misc_feature 177, 178: n = A,T,C or G
cccttagcgtggtcgcggccgaggtacatgctagtttatgttttaggagtttagtttctatttctctgtttagctaattctctatcttttggccactccttttttattcccctcaaacagtcgctttctcttcccatctctatagcaacttgtaatatactataggaataattatgnncatgcaacaatgcaacaatttaatatataagtgcattacatttcttatttttatttttcttaaaaaaaattagccgggtatggtggtctgtgtagagatggggtttctccatgttgcccaggccagttttgaactcctggactctagcaatccacccactttagcctctcaaagtgctgggattacaggcatgagcagccacatagctttcttagcatgccctttgtatgatcccagacctaagtccaagggatttatcaatgatacgcatccatcttcctaagggga

SEQ ID NO: 3055 - DNA, 296 bp, Homo sapiens
  misc_feature 2: n = A,T,C or G
tngagcggcccgcccgggcaggtacttaaagttggttgttttttaatggggatgtggaatggaggggtaaatattttgtgttttttaatgaggaatcccaaacactagagttttttctttatattgcaaaggcactgatgccccttctcacaaaatatttcatgcttcagtattggcctaaagttgactatctttatataaattaaaatcttctcatgttttagtggtgttttagaagatcttgacatgttactttttgaattaaagtgaaacgcatagcatatggactcaacaaa

SEQ ID NO: 3056 - DNA, 118 bp, Homo sapiens
  misc_feature 75, 83: n = A,T,C or G
cccttagcgtggtcgcggccgaggtacgcgggggccaggcggaagcccggctccgggccagcatccgagagcccngactggangagttgagaagaggaggaagaataatgggaggaga

SEQ ID NO: 3057 - DNA, 334 bp, Homo sapiens
cccttggccgcccgggcaggtacgcgggggagtatcttgcagccagcgtggactcgaggatctcttcaaggtttttgcttttggatgcccgctccttagttaagggcctgaaagtgaggtcatgggctctgatttaatgaaggactggcctcaccaggcagcaattgctgggttctgcctgagttcgtgaatgctgaagatggcggcccaattgatcgcagcttccagaaagaagggatcctttctgaatgggatgggcagtgaacttcacacctacccttggcaggctggagaaactgaccaagagtctagaaggaagctaatgtgcctcaat

SEQ ID NO: 3058 - DNA, 466 bp, Homo sapiens
  misc_feature 401, 430, 454, 455: n = A,T,C or G
cccttagcgtggtcgcggccgaggtacatttaaaaggtgatgctaatactttaaaatgtttaagatatagatttaaaaagcattgtaaattgtatactgcagtgtcgtctacatggcactggacaggacataatgtaaaacataaaagtgcaattgttacacttacatatgatagtgaatggcaacgtgaccaatttttgtctcaagttaaaataccaaaaactattacagtgtctactggatttatgtctatatgacaaatcttgatactgcatccacaacattactggcgtgctttttgctttgcttttgtgtgcttttgtgtgtctgcctattaatacgtccgctgcttttgtctgtgtctacatacacatcattaatactattggtattactattgnggataacagcagcctctgcgtttaggggntttattggatatattggatttggnnatataccatta

SEQ ID NO: 3059 - DNA, 349 bp, Homo sapiens
  misc_feature 334: n = A,T,C or G
cccttcgagcggccgcccgggcaggtacttcaaatacaactcaggcacttcagatggctttgtaaactgggtcaatgctattccatctgaaaggaaattacagaattattttcaattcaattatacatccctgcaaaataatttgagggcagctttgaatgctgtaagtgagttgtgatgccatctatattaatcctaaaacttatcttcaaattgattcccaaagtccaacacactttttatttaataaatatttacaggccaggcacggtggctcaagcctgcaatcccagcactttgggaggccaaggcaggcggatcacaagatcagganatttgagaacatcct

SEQ ID NO: 3060 - DNA, 317 bp, Homo sapiens
  misc_feature 136: n = A,T,C or G
cccttagcgtggtcgcggccgaggtactttattaaggaactcttaatggaataggcttttgggtttttctagtttgcaggatagatgaaaaacatggctgctgtatttgttggctttcctgagtttattcatatantaacaggtaactccaaaccttcagtggtttacagccacagaagtttatttctcactcacgtgatctgtgggctgggagatggctgtggctctgagctccatgtattttcttcattctaggatccaggctttcgtgagtaaatacagaaagatttttgtaatatatcaactgtttaaagttt

SEQ ID NO: 3061 - DNA, 420 bp, Homo sapiens
cccttagcgtggtcgcggccgaggtacatttgctgacgtttttcttcagaaaaaaactaattttatggtaaaattctttccaaatttatttttctgttttattccttcttttccaaaattaacaagtcaattcagctatctatgtagaaaactgatttattccttgtgtgtatgttagcaacgtttataatctcttaatattattaattccatagactattagccataaaaattaaatgttgacattctaccctattcataaagtaaacagcaaaagaaatttaaattattagtttgttgttgttagagaactatctttgttttaatgcctctcatttttaggagaataaaacctgaccttaaaatcacctttgtagaaatggtggctaatagcttattctgttagccatgaggaaatct

SEQ ID NO: 3062 - DNA, 419 bp, Homo sapiens
ccctttcgagcggccgcccgggcaggtactcacagccaggcagaggagtctgacagacccaaggattagaagccgtgtggttgccccttcccaagaataacccttgcttgggtgtctgagactgcaagtataatcctgcatcagaggagagagagcagggagctggggccagggcttgtggctgtagacacaagtggaagaaaccccagatctcttttcttttctagggcacttcttgctattgtaatttgaaaatgtattatttgaataatgagggatgtctttctcctgcaggactggtagctccttggaggaagggcctactggtcttgcatctgtctccctaccccaaggccaggcacatatgggaactatttgttgggtgtgtgtagtttcaagttctgcctctacccctgcct

SEQ ID NO: 3063 - DNA, 312 bp, Homo sapiens
cccttagcgtggtcgcggccgaggtacaaacctggccgtctaatgctgttaatagtgcagcattttaggtcctctttacccaggactgcctgttcaacaattagggattaattgcttcccggattatccaaatccaaagtgtctttaacccagctacctatgggtcactggctcattaacatgcacttcctcagacttctcacttgaacagctaaagtcaagctggaactcattttctttttactgatcagagaaaaataaatctacagtttggaatttttcttaaattagagttattctaatcaacagaat

SEQ ID NO: 3064 - DNA, 415 bp, Homo sapiens
  misc_feature 399, 401: n = A,T,C or G
cccttagcgtggtcgcggccgaggtacagattgaggtttgtttatcctttttaattccagtttgttcttggctttcttagttctgaaaattgaaatctgccttcattttcactgatgcctgtgttgtaatgtgtcagtaaactgggtattcttccaagcagttggttgattccaggcttctgcatatctttgtgctgttctggaatttgttttctgtccatcaccgcatttacctgcccatactctgaggctaacatatccagaaacttttaaacttaacttccatttttcagaacagccatctgctttagaataaatgatttccgtttatccagaaaaaagtaactaggtcttaaagacttcgtgtattcgccgttctcacatgtggcaaaatatggntnggtttttctttttt

SEQ ID NO: 3065 - DNA, 560 bp, Homo sapiens
  misc_feature 505, 519, 530, 535, 551: n = A,T,C or G
cccttcgagcggccgcccgggcaggtacttagcactggttttcaagctgaaaagtaagtataagtcagcaataaatagttgccatttatgaatacacaggacaaagaaaattgagcacctagtggctgatgtttgcaaaatattaaataacttaagttcattgaatacaattagagtcaaattaatgaagcttagagatctagtgttatttaaactactagtagtgggccaagtgttgccattaacatttttttaatgatgaaatagaatagtaaaaatatgtttattttacctaataggttcattctagctttaaaaaaagtgttgtttcatgaagcttttgtgtattttgcatatatagatccccagtgtaaactgtatttgttactttggctcatagccaaaaactcttgaaagccactaatctagcccagtgccttcatttcatagggtggcaaaattaaacctatgggtcatctgatttgccaaaatttcctcagggagnttagtgataaaatnccttgggggcnttcanaactccaaggccagangatttttta

SEQ ID NO: 3066 - DNA, 418 bp, Homo sapiens
cccttagcgtggtcgcggccgaggtacagtgaggttacttcaagcaaacagttctgagctgtcagggtatttcagccacctcctgacaggcagaaggccctcagaggtctgccatcttgcctcgcctagccgctcgcaggaagaaatctcccttcttttgccttgcagctggtgttcacctctctgccttaagtattcatgcaagccttcaaagtctccttccattctctatttagccaagcactttggggttgaaagttgaaaatagccaaaaacccagctcaaactagattaaggatgctcacggggaatgcaacagaatggacaaggttagaatggaggcttccccgaaaattaagctccagaagtttagtgctttcttggggctactctctattaaaaatatatatattttaaa

SEQ ID NO: 3067 - DNA, 391 bp, Homo sapiens
  misc_feature 152, 155, 159, 164, 167, 169, 172, 173, 180, 187, 191, 197,202, 207, 209, 219, 238, 241, 246, 259, 263, 277, 283, 285,294, 304, 308, 310, 315, 316, 318, 322, 326, 332, 338, 343,347, 350, 359, 366, 373: n = A,T,C or G
ccctttcgagcggccgcccgggcaggtactgaggtgcctcatgaaaattagattattttggatgtattttcaggtagacacaagcccattctttaaatcagtttttgttcttaaagtagaactattttttcagttaatataaaaaaaaaaanaancccnttttngtngngtnnaaatctngggtttncctnaatgtnttttnggctntnaaggaaggtngaattcccgaccttttttnagnccccngaaatccatcatntttngcctgcccctgtancaaatnancggctgatnctggggcttntaanancccannangctntcancctgantttttntttcncagncanaaaaagtcntgagggnggatganattaaaaaaaaaaaaaaa

SEQ ID NO: 3068 - DNA, 293 bp, Homo sapiens
ccctttcgagcggccgcccgggcaggtacgcgggcttatctgtgttttcggctaacaagcggtggacgcctcctcgaagcatccgcttcactgcagaagaaggggacttggggttcaccttgagagggaacgcccccgttcaggttcacttcctggatccttactgctctgcctcggtggcaggagcccgggaaggagattatattgtctccattcagcttgtggattgtaagtggctgaccgctgagtgaggttatgaagctgctgaagagctttggcgaggaccaagatcg

SEQ ID NO: 3069 - DNA, 312 bp, Homo sapiens
  misc_feature 96, 105, 111, 155, 161, 173, 187, 208, 224, 234, 254, 258,296: n = A,T,C or G
ccctttcgagcggccgcccgggcaggtacatttaaaaggtgatgctaatactttaaaatgtttaagatatagatttaaaaagcattgtaaattgtntactgcagngtcgtntacatggcattggacaggacataatgtaaaacataaaagtgcanttgttncacttacatatnatagtgaatggcancgtgaccaatttttgtctcangttaaaataccaaaanctattacagngtctactggatttatgtctntatnacaaatcttgatactgcatccacaacattactggcgtnctttttgctttgcttt

SEQ ID NO: 3070 - DNA, 686 bp, Homo sapiens
  misc_feature 493, 507, 525, 533, 535, 551, 559, 577, 578, 597, 599, 630,634, 637, 644, 657, 675, 676: n = A,T,C or G
cccttagcgtggtcgcggccgaggtactgggaagacaaagatggataaaacagagtccttgatccagagagcagagtctagagttaggcaggcacacaaagaaatgataatgagataatgtgatatgtgctataatagaggtatgttccaagggcaacgggataaagcaaatgattctgtctggtataaaaggagaggatctcaaagacagcatcatgttaaccagctcttaagggataggctcacctacagagatatgaaggaagggaactctaaacagagggaatggtatcaataaagagatgaaggcatcaagtgtagtgagcagaaagaaatctgggtatcaggaataaagatatctaagctgagctggcatatgtagacaagagtaggaacgttcatgtggtgtaatgctagccccatgggctaatcagtgtttggggtcacaaggatgaagattaagagtgtttcatgtcaaccaaaattttttggnatcattggtaaganaaagaagcattatttttntaccaagnanaaccttgaaggtgctnttcacccntttaggtaaggggagtanntttttaaattttaaaccangnctttaaatctttccttttggggaaattttcncccnttngtttttnccttttaccattntgccaacattgaggtgcnngggacttttt

SEQ ID NO: 3071 - DNA, 363 bp, Homo sapiens
  misc_feature 13, 15, 23, 26, 54, 72, 74, 79, 166, 177, 189, 231, 234: n = A,T,C or G
cccttagcgtggncncggccgangtncatgagcaccctggagatactaaaactnttattctgactaaatgtntntcaanagcagcctccagatttttctgcattcttgctaccttgttaacttgcagtgccttacagtttaccattggctgtcctgaaataccctnttagaactaanataatacaattngaaatcatgggtagaaatcatgaaatcatgggtagaaataanganggtggaagaagcagctaggtttccaaagcagcaaaatgtcagatacattctgaagcagccagtttccccagtgtccccaccccaccccgtatggggctcacattctatttttctctttgtccttttttt

SEQ ID NO: 3072 - DNA, 241 bp, Homo sapiens
  misc_feature 137: n = A,T,C or G
cgggcaggtgctagcttgagtcgacccacgcgtccgctctgattttattctgcctctaagaggatattcagcacccagagcaccctattccactctgttttacttttccatgaagaagagagggagggtcataaaangataactaaaagtagacagtaaatgaaaatgttgaggggcattcttgtgtgtctacatcccatgggtcctagctctactgtctacaaaggacagcaaacgaagg

SEQ ID NO: 3073 - DNA, 466 bp, Homo sapiens
  misc_feature 236, 412, 449: n = A,T,C or G
ccctttcgagcggccgcccgggcaggtacatttaaaaggtgatgctaatactttaaaatgtttaagatatagatttaaaaagcattgtaaattgtatactgcagtgtcgtctacatggcattggacaggacataatgtaaaacataaaagtgcaattgttacacttacatatgatagtgaatggcaacgtgaccaatttttgtctcaagttaaaataccaaaaactattacagtgnctactggatttatgtctatatgacaaatcttgatactgcatccacaacattactggcgtgctttttgctttgcttttgtgtgcttttgtgtgtctgcctattaatacgtccgctgcttttgtctgtgtctacatacacatcattaatactattggtattactattggggataacancagcctctgcgttaggtggtttattggatatattggnatttgccatatccatat

SEQ ID NO: 3074 - DNA, 314 bp, Homo sapiens
cccttagcgtggtcgcggccgaggtactaaaaactagtaatgcaaaggcagcaatgttagcaaaatttaaagagttataccggggtgagttttacagaattagtaagaccatttaaaagtaataaatcaacgtgttgcgattggtgtattgctgcatttggacttacacccagtatagctgacagtatgaaaacactattacaacaatattgtttatatttacacattcaaagtttagcatgttcatggggaatggttgtgttactattagtaagatataaatgtggaaaaaatagagaaacaattgaaaaatt

SEQ ID NO: 3075 - DNA, 374 bp, Homo sapiens
ggtacgcgggctcctaatattggaaaggagaatggagactattttgtgttccaacattaactaaaaatactaccaattgcagaagaaaaaaaagatggtatataaaataaatcataatgaaaaaagtaacaaaatagcatcctttttgttttccaaatgaaacaaaaacttttcacctagaggtgcttatagaatgtgacctgatactaagtaaatacaaaattgtcactgctaaataattttccaagcaaagataatgacactaaaatatgtttattcgttctcaacggtagcctgcttctcttggaattccagtcagctttggcaagaatgtctttatccaagtgtctccagagtattctgggcagctcaaa

SEQ ID NO: 3076 - DNA, 314 bp, Homo sapiens
  misc_feature 284: n = A,T,C or G
cccttagcgtggtcgcggccgaggtactatgggtgtagtgttactattacagttaatccgtcctttgtgtgagctgttaaatgcagtgaggattggagcactgtccactgagtctctgtgcaacaacttagtggtgtggcaggggtttccggtgtctggctctgatcttggtcgctggatagtcgtctgtgtttcttcggtgcccaaggcgacggctttggtatgggtcgcggcggtgtggttggccaagtgctgcctaatagtttcaggagaggatacttcgntgctgctgcaggatcagccatggtagatta

SEQ ID NO: 3077 - DNA, 467 bp, Homo sapiens
  misc_feature 438, 442, 449: n = A,T,C or G
cccttagcgtggtcgcggccgaggtacaagcatttggattcatagcccttagaatctactgtttccaaagctagtcgaatatcagaaaagcagcttggtaaagtgcaaataactttgttcagggaatcaggaagcacagcttagaatcccagactccctctaactgtctgtaatgtaaactcaggtaattcccttcactaggtatcaaatgtctcatctataaaatgaagggtatatatgtgaccagtgatgctactttgacgtattttgagttaatcagagatttttctgctcaaaatctttggaagaaaagctactaatgggtggcagagagtggcaaacgttctatctaaactatagacctcctcctcttcagaaacctctgatgaattgtgctacatagaataaaatataaaatcttttgtatcctttactggngcanaaagtanatgcttgattttttttct

SEQ ID NO: 3078 - DNA, 541 bp, Homo sapiens
  misc_feature 521, 527: n = A,T,C or G
ccctttcgagcggccgcccgggcaggtacatttaaaaggtgatgctaatactttaaaatgtttaagatatagatttaaaaagcattgtaaattgtatactgcagtgtcgtctacatggcattggacaggacataatgtaaaacataaaagtgcaattgttacacttacatatgatagtgaatggcaacgtgaccaatttttgtctcaagttaaaataccaaaaactattacagtgtctactggatttatgtctatatgacaaatcttgatactgcatccacaacattactggcgtgctttttgctttgcttttgtgtgcttttgtgtgtctgcctattaatacgtccgctgcttttgtctgtgtctacatacacatcattaatactattggtattactattgtggataacagcagcctctgcgtttaggtgttttattggatatattggatttggttatataccattatttttaatacatacacatgcacgctttttaattacataatgtatatgtacctnggccgngaccacgctaaggg

SEQ ID NO: 3079 - DNA, 488 bp, Homo sapiens
  misc_feature 471: n = A,T,C or G
cccttagcgtggtcgcggccgaggtacattgtatactgcagtgtcgtctacatggcattggacaggacataatgtaaaacataaaagtgcaattgttacacttacatatgatagtgaatggcaacgtgaccaatttttgtctcaagttaaaataccaaaaactattacagtgtctactggatttatgtctatatgacaaatcttgatactgcatccacaacattattggcgtgctttttgctttgcttttgtgtgcttttgtgtgtctgcctattaatacgtccgctgcttttgtctgtgtctacatacacatcattaatactattggtattactattgtggataacagcagcctctgcgtttaggtgttttattgtatatattgtatttgtttatataccattatttttaatacatacacatgcacgctttttaattacataatgtatatgtacctgcccgggcggccgntcgaagggcgaattcca

SEQ ID NO: 3080 - DNA, 441 bp, Homo sapiens
  misc_feature 419: n = A,T,C or G
ccctttcgagcggccgcccgggcaggtacgcgggtttgtctcccaaaatgtgagaacctccattaagtccagaaacagttttttaaaaaggacactttttaaattttatttaatcactattcactcattgtctgttatgtgtcaggtcttgtgccaatattagaagcatagtgatatatatgacctggttccagctttggggagctcaaaatttagttgatgagacacacaatttcatcatcagaatgcaatattataggtgttaaaatcgaggtggataaagtggttgtttttctgtctttcagtttgcctgggagtcatacttcagaataagggctaaaattggggtctaagaaaggtgtgaataaggaaaacattaaatacttttacctaaaagaaaattgggagagacagtttangggacaagttactgaataagaa

SEQ ID NO: 3081 - DNA, 367 bp, Homo sapiens
  misc_feature 310: n = A,T,C or G
cccttagcgtggtcgcggccgaggtacatgagcaccctggagatactaaaactcttattctgactaaatgtctttcaagagcagcctccagatttttctgcattcttgctaccttgttaacttgcagtgccttacagtttaccattggctgtcctgaaataccctcttagaactaagataatacaatttgaaatcatgggtagaaatcatgaaatcatgggtagaaataaagaaggtggaagaagcagctaggtttccaaagcagcaaaatgtcaagatacattctgaagcagccagtttccccagtgtncccaccccaccccgtatggggctcacattctatttttctctttgcctttttttaaat

SEQ ID NO: 3082 - DNA, 324 bp, Homo sapiens
cccttagcgtggtcgcggccgaggtacaatgggcagtgtttggatccttccctggaatcagtgacgaatgcatggtgttctgcccaatgagaatgaaccatttgaacaaatcaagtaacctcaaaggtgtaattctcttggcatcgttaatgattattggtaggagtaaataagtgcaattcttttgttgttcttttttggagatgaggtgtctctgtgttgcccaggctggcctcaaatccctgggcttaagcaatcctcctgcctcagccttgagtagctgggatcacagacatgtacgcggggagctcaaagcccgcaaga

SEQ ID NO: 3083 - DNA, 500 bp, Homo sapiens
ccctttcgagcggccgcccgggcaggtacatttaaaaggtgatgctaatactttaaaatgtttaagatatagatttaaaaagcattgtaaattgtatactgcagtgtcgcctacatggcattggacaggacataatgtaaaacataaaagtgcaattgctacacttacatatgatagtgaatggcaacgtgaccaatttttgtctcaagttaaaataccaaaaactattacagtgtctactggatttatgtctatatgacaaatcttgatactgcatccacaacattactggcgtgctttttgctttgcttttgtgtgcttttgtgtgtctgcctattaatacgtccgctgcttttgtctgtgtctacatacacatcattaatactattggtattactattgtggataacagcagcctctgcgtttaggtgttttattggatatattggatttggttatataccattatttttaatacatacacatgcacgctttttaat

SEQ ID NO: 3084 - DNA, 474 bp, Homo sapiens
ccctttcgagcggccgcccgggcaggtacatttaaaaggtgatgctaatactttaaaatgtttaagatatagatttaaaaagcattgtaaattgtatactgcagtgtcgtctacatggcattggacaggacataatgtaaaacataaaagtgcaattgttacacttacatatgatagtgaatggcaacgtgaccaatttttgtctcaagttaaaataccaaaaactattacagtgtctactggatttatgtctatatgacaaatcttgatactgcatccacaacattactggcgtgctttttgctttgcttttgtgtgcttttgtgtgtctgcctattaatacgtccgctgcttttgtctgtgtctacatacacatcattaatactattggtattactattgtggataacagcagcctctgcgtttaggtgttttattggatatattggatttgcttatataccattattttta

SEQ ID NO: 3085 - DNA, 405 bp, Homo sapiens
cccttacgtggtccggccgaggtctaattagaaaatatagcttgagccccgtgccaggcctgttttgtttgtttttgtagagacatggcttcaccatgtctcccaggctgcctgccttggcctcccaaagcactgggattataggcatgagctaccacacctggccttacggttttcattaatataaatataactacgtattcccaatgccacattcataaatgagaaattttaattattgatatctttaagtttttaacagaaacagtgatacaaagctgacctgttaaaattacttagtttttaaaacaatctgcaagtcagtctgtgaatggtatttacatatttaaccatttgtttataagaaatatttaccactgcccggtccctgcccgggcggccgaa

SEQ ID NO: 3086 - DNA, 482 bp, Homo sapiens
  misc_feature 377, 386, 447, 468, 474: n = A,T,C or G
cccttagcgtggtcgcggccgaggtacattgtatactgcagtgtcgtctacatggcattggactggacataatgtaaaacataaaagtgcaattgttacacttacatatgatagtgaatggcaacgtgaccaatttttgtctcaagttaaaataccaaaaactattacagtgtctactggatttatgtctatatgacaaatcttgatactgcatccacaacattattggcgtgctttttgctttgcttttgtgtgcttttgtgtgtctgcctattaatacgtccgctgcttttgtctgtgtctacatacacatcattaatactattggtattactattgtggataacaacagcctctgcgtttaggcgttttattgnatatattgnatttgtttatataccattatttttaatacatacacatgcacgctttttaattacataatgnatatgtacctgcccgggcggncgctcnaaagggcc

SEQ ID NO: 3087 - DNA, 324 bp, Homo sapiens
cccttagcgtggtcgcggccgaggtacatttaaaaggtgatgctaatactttaaaatgtttaagatatagatttaaaaagcattgtaaattgtatactgcagtgtcgtctacatggcattggacaggacataatgtaaaacataaaagtgcaattgttacacttacatatgatagtgaatggcaacgtgaccaatttttgtctcaagttaaaataccaaaaactattacagtgtctactggatttatgtctatatgacaaatcttgatactgcatccacaacattactggcgtgctttttgctttgcttttgtgtgcttttgtg

SEQ ID NO: 3088 - DNA, 546 bp, Homo sapiens
cccttagcgtggtcgcggccgaggtacattcattaacatgggaaaaaatgaaatgctgattctgaattcccagtatgaaatcccttattgaaacagttccatctcagcatgagctttatgggggatttcataagaggccgtcctctccaaagtccccaaataaagcatctggggatgattctcctcaaattctcctcaaatgcaatgttaacctttaagaaaaaccagaagaaacaaatttaaaataccaacaaatgatgcctgttttgcatcattaaccgtaagtgttcacattgagaaatccatacaattgaaacataaaatctagtatctatctaaaaataaaaacaaaaatagaatggaatgaaaaacacatgcaactggagttattaagctagtattgctcttttgtattttatctttctgtttacttataatttctccctattgcacaataagcaatttatagtaaattgtagatcttatatatcactgcattccagccacctggcatttttccctaacatattagcccgataaatattt

SEQ ID NO: 3089 - DNA, 313 bp, Homo sapiens
ccctttcgagcggccgcccgggcaggtacgcgggggtttgtttaaacttaagtaagccttagtagtttatggcaattttaaataacctttgaaaatatacaagcagatacatacattagctctaaatgtatatataattattttattgaaactcacattttcggcgaggcgcggtggctcacatctgtattcccagcactttcggagtccgaggcaggcagatcacaaggttaagagatcgagactctcctggctaacatggtgaaaccctgtctctactaaaaatacaaaaaaattagcctggtgtggtggt

SEQ ID NO: 3090 - DNA, 318 bp, Homo sapiens
cccttagcgtggtcgcggccgaggtacatttaaaaggtgatgctaatactttaaaatgtttaagatatagatttaaaaagcattgtaaattgtatactgcagtgtcgcctacatggcattggacaggacataatgtaaaacataaaagtgcaattgttacacttacatatgatagtgaatggcaacgtgaccaatttttgtctcaagttaaaataccaaaaactattacagtgtctactggatttatgtctatatgacaaatcttgatactgcatccacaacattactggcgtgctttttgctttgcttttgtgtgct

SEQ ID NO: 3091 - DNA, 487 bp, Homo sapiens
acagtagtagagtgagcggaagcacttttggctgaagtgcaacattagtgattgaggaagtgcaggtccgtaatatcttaccccaaaccctggggctcactgagcttccgagttcagagtttttcagaattgatgaacacatccagaaggcccatggggcagatacaccttagacatattgatgaaagtggagttggaattgggttgtggaagtcgtaggacgtgaattctaggtttcttggagtgtggagtatggtgtctaccgtttggaaacagagaagaatgacattatgagttttatttataaaataagaatttcttctttgtattaaaatagatttttatataggaaattttcattaccttcagtatcagaaaggcccccaaatctatttcaccgtttccataataaattgtgaaagaaagatttgattgggatattgtctttaaaaatgaaaccaaaaagtatgggaaaatctttaatttt

SEQ ID NO: 3092 - DNA, 704 bp, Homo sapiens
  misc_feature 328, 338, 401, 421, 424, 436, 473, 483, 518, 524, 543, 556,579, 591, 598, 615, 627, 628, 672, 681, 683: n = A,T,C or G
cccttagcgtggtcgcggccgaggtacttcccacgtcctcccagaccttgaatgcaccgctgcctgggcccgtgtttcagccacacctgccccctataacctagctccaaccttcatcccttggtgagcctcccctggcaagtcatagaaacccagagggagttccttatttcctggtcacccggcacagctgtttgcaatcttcactgtccattaggcacctcaaggggcttttaaaaatattcattcctgggccccaccccgagaggtttattaaagtgtgtgaactactgggatgggtgttggggagaaagactaagacatcatncaaaccacanatgtttcaatctgagggggaaaataacatatgcatgccactacccctttcatgaaatgggaanctgtggggtgttgccaaganaanaaggttatgttnccaaaaaaagttcgaaaaaaaagatttcttaagggtnggggaatcanaaagcttttgggagacacaaaggccttttaaaccngccttntttccttgaggagccttanaaaatgggtgggntatttacatactgggcccttccnaaaaattttggnaactttnggggggcttgggccccncaaaaatctaannggttttttaaattttttgacccttttgagtttggaaaaaggccnaaaaaaagntngggtttggttttttggttttt

SEQ ID NO: 3093 - DNA, 297 bp, Homo sapiens
ggtacgcggggatcgtatccatttaataataaccagctgatgggatgctgtgaggttaaatgggatgcgtagggaacgtgggtttgtaggttctccatagagggtagctgctgctcttattattgagactcttgttgtaggacagtctctctctcgctctcgctcgcgctctcgctcttttagacagggtctcgctcggttgcccaggctggagtgcagtggcacgatcatagcttattgcacccttgaactcctgggctcaagagatcctctgcctcaacttcttgagtagctggg

SEQ ID NO: 3094 - DNA, 473 bp, Homo sapiens
  misc_feature 199: n = A,T,C or G
cccttagcgtggtcgcggccgaggtacttcctctttcttttcacttcatctttacgggcatattaatgagtggagtaaagcactcagaagaacagcaggaaaagaggattcatgtatgtcagaggagctgaaggctctcaataggttcagagaatgcaggtcttccagctgctgagggtgtatgcttccactatgcctnatagcaacccctgaacaaagtggggtctctaaagttctattaacaggctcaattactaaacacctttaaccagaaaatattccctctgggtccttttcctttacattccatgagttggagaagggaaggaattagtgtagtagttgaatgaatggctgaatgaaatgatacagttgatagtgtaagactctacaagcagcaaaagtcttgactataaaagatacttccttaaaactgagaagaagatattcatttttgtcccccactccccgga

SEQ ID NO: 3095 - DNA, 320 bp, Homo sapiens
acttagcactggttttcaagctgaaaagtaagtataagtcagcaataaatagttgccatttatgaatacacaggacaaagaaaattgagcacctagtggctgatgtttgcaaaatattaaataacttaagttcattgaatacaattagagtcaaattaatgaagcttagagatctagtgttatttaaactactagtagtgggccaagtgttgccattaacatttttttaatgatgaaatagaatagtaaaaatatgtttattttacctaataggttcattccagctttaaaaaaagtgttgtttcatgaagcttttgtgt

SEQ ID NO: 3096 - DNA, 466 bp, Homo sapiens
  misc_feature 454: n = A,T,C or G
ccctttcgagcggccgcccgggcaggtaccatcatgaagagactgaacgtgcaagatgctgtctcctcccaaatagactcactactgagcatgtctctgaatttctcaagtgtgtctgacagtctgagggactgctgctgttccctgattggcaggtgagggcaggttgggaggtctgaggaagacccatgccagatacctgagaaccacctttgtgtccagtgaacagataggctagacccaagaagaaatgccatcccagagagctggcttatctgaaagttgtagttgtttttcctttaataaagaagtgggtggcccaaatatctttgatctgcttgccttctcttccccacctgccagtgtgaaaggttcttaacttggtggccccgtgtaaaatgggtttttacagcttgtgttccgtaactgaagggcttttgatgaaactgttttnggtgaaaaggct

SEQ ID NO: 3097 - DNA, 348 bp, Homo sapiens
ccctttcgagcggccgcccgggcaggtacgcgggctccaatttaattcttttagttgaatgagcttctttctcgcttgttacagactcacttagggtcattcctccctgccttagtcccagtatggtctcagtaatgacatgcagtatggggactttggactcctgtttgaacaaaccagctttgagatgataaaaatttgaatatgaattgagttcttgaagataagaaattgttaattttgtcaggtttgttaatggcatggtagttactctaaaaacaaatttctgggcgagtgtagtggctcatgcctgcaatcctagtacctcggccgcgaccacgctaaggg

SEQ ID NO: 3098 - DNA, 365 bp, Homo sapiens
  misc_feature 259, 323: n = A,T,C or G
cccttagcgtggtcgcggcccgaggtactaataaggctaggctactttaaggaatttctattttgaaccagataactagtattaaacagccataggccgtcttctaaccccagctagatattttgcaaaatgtttttgttataataaaggtaacagaggccaggcatggtggctcacgcctataatctcaacactttgggaggcttaggcgggtggattacctgagatggtttcaagaccagcctggttaacatggccnaaaccacgtctgctaaaaatacaaaaattagctgggcgtggtggcaggtgcctgtaagtcccanctacttggaaggctgaggcaggagaattgcttggacctggga

SEQ ID NO: 3099 - DNA, 485 bp, Homo sapiens
  misc_feature 202, 289, 314, 317, 320, 324, 342, 362, 416, 429, 433, 455: n = A,T,C or G
cccttcgagcggccgcccgggcaggtacaggtggctgtgagtaaatactgtttctttggctaaatcttagtgagcaaaatgacacatatatgtattttataagtcccctgatagcctctgtgcctcccgtcttttgtttcaagtaatcccttgagtagagctgcatgtaagtttcaagaacatgcctttccttggtgggganggaatcctgtattcaacaatattccagagtattaactaagtgggatcacattcatgaagtgggtctaccttcgtttgctccttctgnggtaatttatcctcaacacaatctnctntangctnaaaggggtaaaagtgtgnccaagaaaccccttcaccanaccacacatacagtgatgctggtcccactgaaaaccttttttggttccgttccnaccttacccaatnttgnctaccaattggctaatttgaancaatcggattttccttgggaaactgggatt

SEQ ID NO: 3100 - DNA, 437 bp, Homo sapiens
  misc_feature 182, 223, 225, 281, 285, 392: n = A,T,C or G
cccttagcgtggtcgcggccgaggtacttaattttttttttttttttttttttcggagacaggatcttgttctgtcgcccagcgtggagtagcataatcatagctcactgcagccttgaactcctatgctcaagtgatcctcctgcctcagcatcccaaaatgctgggattacaagcgtgcnccactatgcctggctaatttattttatttcattttttgtananattgagtctcgttttgttgccccggctgatcacagttacttttgagtatatataancagnggctatcaggaacacaagaggcccagttacttccatttcttgagattttctgtatattaaaaaatttaaaaggggatattctgggggatttattatcaaaactgtgntgatatgttaaatgtgtacctgcccgggcggcccgtttaaaaagg

SEQ ID NO: 3101 - DNA, 334 bp, Homo sapiens
  misc_feature 145: n = A,T,C or G
cccttagcgtggtcgcggccgaggtacattcaaagccctgctccacaccttgccctggccaggtccacctttgaggtgatgacgacagttgctgagaaaagagaaaagaccactggctcactacttgtttctgctgctataatanagaggagaaaatgatgaaatgctctttttaccttcctgtttgaagattgcctggtcataaaagggagtcagaggtctgacttctctatttccatcccttaggggactctttaacaacaaaaagaatgtattacaagtatgtcaagctgataacgcaaggcttttcctcctggaagattggtgtaggtga

SEQ ID NO: 3102 - DNA, 472 bp, Homo sapiens
  misc_feature 403, 440: n = A,T,C or G
ccctttcgagcggccgcccgggcaggtacatttaaaaggtgatgctaatactttaaaatgtttaagatatagatttaaaaagcattgtaaattgtatactgcagtgtcgtctacatggcattggacaggacataatgtaaaacataaaagtgcaattgttgcacttacatatgatagtgaatggcaacgtgaccaatttttgtctcaagttaaaataccaaaaactattacagtgtctactggatttatgtctatatgacaaatcttgatactgcatccacaacattactggcgtgctttttgctttgcttttgtgtgcttttgtgtgtctgcctattaatacgtccgctgcttttgtctgtgtctacatacacatcattaatactattggtattactattgnggataacagcagcctctgcgtttaggggttttattgnatatattggatttggttatataccattatttt

SEQ ID NO: 3103 - DNA, 533 bp, Homo sapiens
  misc_feature 469, 478, 484: n = A,T,C or G
cgccagtgtgatgggatatctgcagaattcgccctttagcggccgcccgggcaggtacgtttaaaaggtgatgctaatactttaaaatgtttaagataccgatttaaaaagcattgtaaattgtatactgcagtgtcgtctacatggcattggacaggacataatgtaaaacataaaagtgcaattgttacacttacatatgatagtgaatggcaacgtgaccaatttttgtctcaagttaaaataccaaaaactattacagtgtctactggatttatgtctatatgacaaatcttgatactgcatccacaacattactggcgtgctttttgctttgcttttgtgtgcttttgtgtgtctgcctattaatacgtccgctgcttttgtctgtgtctacatacacatcattaatactattggtattactattgtggataacagcagcctctgcgtttaggtgttttattgnatatattgnatttgnttatataccattatttttaatacatacacatgcacgctttttaattaca

SEQ ID NO: 3104 - DNA, 310 bp, Homo sapiens
cccttggccgcccgggcaggtacccaaagatgtttacttgagagtagtttattcctttcagctcctcagctctatacattcttccagggaaccgtagatcttggtgcctatttgagccccaaaggatcagttagttttacaaaggacaatcgtattctctgtcacatcctttttggccatgcctcaaaagcagtcccacaatgtaagctactgctcataggctcaatgcagtccaccttcaaagcaagagaaataatttcatgagtaactccaactgccgccttgttatagggaaggcatcatgttggag

SEQ ID NO: 3105 - DNA, 201 bp, Homo sapiens
  misc_feature 109, 152, 159, 170, 189: n = A,T,C or G
ccctttcgagcggccgcccgggcaggtactaaagtcaagtttcagttgtttggaagtttgtgggggttttaatttttttcctttaaaaagttctgcctgtcccatcttnaaagcttgcgatccttgctcttgttttttcttcccctgtgctnggcctgntagcggactcntctgataaaatgcctaacnatcaaggtaaat

SEQ ID NO: 3106 - DNA, 386 bp, Homo sapiens
ccctttcgagcggccgcccgggcaggtacatttaaaaggtgatgctaatactttaaaatgtttaagatatagatttaaaaagcattgtaaattgtatactgcagcgtcgtctacatggcattggacaggacataatgtaaaacataaaagtgcaattgttacacttacatatgatagtgaatggcaacgtgaccaatttttgtctcaagttaaaataccaaaaactattacagtgtctactggatttatgtctatatgacaaatcttgatactgcatccacaacattactggcgtgctttttgccttgcttttgtgtgcttttgtgtgtctgcctattaatacgtccgctgcttttgtctgtgtctacatacacatcattaatact

SEQ ID NO: 3107 - DNA, 520 bp, Homo sapiens
  misc_feature 441, 450: n = A,T,C or G
ccctttcgagcggccgcccgggcaggtacatttaaaaggtgatgctaatactttaaaatgtttaagatatagatttaaaaagcattgtaaattgtatactgcagcgtcgtctacatggcattggacaggacataatgtaaaacataaaagtgcaattgttacacttacatatgatagtgaatggcaacgtgaccaatttttgtctcaagttaaaataccaaaaactattacagtgtctactggatttatgtctatatgacaaatcttgatactgcatccacaacattactggcgtgctttttgccttgcttttgtgtgcttttgtgtgtctgcctattaatacgtccgctgcttttgtctgtgtctacatacacatcattaatactattggtattactattgtgggataacagcagcctctgcgtttaggtgttttattgnatatattgnatttggttatataccattatttttaatacatacacatgcacgctttttaattacataatgtatatgtacc

SEQ ID NO: 3108 - DNA, 323 bp, Homo sapiens
cccttagcgtggtcgcggccgaggacaatgctctataaaacatacagatatccctgttttagtgtccagttctcatttaatatcagatcagatagatattatattctagttctatttagtggttcatagaacctaattatgttgtccagcatcatctttcccacttggaaattctaggaagatgaccacatccactgcaaacaagaacattttttttttctatcagtgtagtttgcctcttttattttacagttttgtatcttatcttaatgaactggccatactttagaacaaagttgaatattaggttcttcatttcaaat

SEQ ID NO: 3109 - DNA, 400 bp, Homo sapiens
  misc_feature 222, 357: n = A,T,C or G
cccttagcgtggtcgcggccgaggtacccaggagccaggaagagcagaggggagcatcagtgtccacatgttgggggatacctctgtgatctgtccacccctagtggacaagccacatattcaggccaatgcccagtaaggactggtaacaaatttctgtaagtcctccagctgccccagggagtcagctgtgccatcaggtcccatggccttgctcagganaccagagtgaacatgacaaaaggagagccacttctccttcaacctctgttcactgctaagttaccttgcttctggagggaaaaacaaaatccttcctcaagcttgtcagccacctcccctgaggccttccgtgcntcttttagattctcgtaccgccggggatgaacaagcaaaggaa

SEQ ID NO: 3110 - DNA, 434 bp, Homo sapiens
  misc_feature 125, 357, 398, 409, 417: n = A,T,C or G
cccttagcgtggtcgcggccgaggtactgggattgcagtcaggagccactgtgcctggcctctgggcaaaccatttctctccttggctactaggatgtggtaattttcttgcccttcatgattgntccttctctctaccctttaacacatcctttcccatttccacctcttaatactccattaccagtattttctaaggttccacatttaaactccattctctgtctctgtatttctctctgcctctggctctgtctcttatcttcatactttgcaccccaccctgctggcaatctcattctaccccaggaatttaactctatcctgtctttgttatgtctaaaagaagagccacangggagaggggccagaatattttcttcatttctttacaaagngatttttcctnaagggganaatctggcctttttttt

SEQ ID NO: 3111 - DNA, 486 bp, Homo sapiens
cccttagcggcccgcccgggcaggtactcacttcctcttggtgccttaagagctttcctcaaattgtatttctgagcagggacatttacaagcctgcatggaactgaaggatctcctgtctgaagattctcacaagtaattgatagaatgagatttatttgacaaataacaaaaccatctgccaaatccatgattaaatggcagggactctgggtctcttgtgcttagtgagggaaggaaggaggtggtatgttttcagtgaaacactcactgaatggaactccaggctggagggagagtgaagagggaagagaatacagtccttgctattttcctcagctgattcataatacattaacaccctcatttacatggcctattagaagttatttatatttccaattacaggctatttgaatattgcatttgtagtcgaattacagggtttagggaaagctcgtttgttttcaagaaaggattctggtt

SEQ ID NO: 3112 - DNA, 374 bp, Homo sapiens
  misc_feature 156, 320, 353: n = A,T,C or G
cccttcgagcggccgcccgggcaggtcctggcacaaggtaagtgctcagtcaatgtttgtgttatcattttattgcttgagctatggtcttttcctgattctttcttgcgaccacagcaccccacaggtttttgagttatcttggaactaagtggncccaccagggaatctattatcatggataaatgaaaaactgaatgaataaaatttactggtttccaaaggaaagcagagaatagattcaaattccaattatttaataaacaccaaacacaacaatatatactgaactgaagaagttggatgggatagggggaggngtcttttaagaagcagaagacccgccagatgcngtggctcatgcctgtaatccc

SEQ ID NO: 3113 - DNA, 474 bp, Homo sapiens
ccctttcgagcggccgcccgggcaggtacatttaaaaggtgatgctaatactttaaaatgtttaagatatagatttaaaaagcattgtaaattgtatactgcagtgtcgtctacatggcattggacaggacataacgtaaaacataaaagtgcaattgttacacttacatatgatagtgaatggcaacgtgaccaatttttgtctcaagttaaaataccaaaaactattacagtgtctactggatttatgtctatatgacaaatcttgatactgcatccacaacattactggcgtgctttttgctttgcttttgtgtgcttttgtgtgtccgcctattaataccgtccgctgcttttgtctgtgtctacatacacatcattaatactattggtattactattgtggataacagcagcctctgcgtttaggtgttttattgtatatattggatttgtttatataccattattttt

SEQ ID NO: 3114 - DNA, 618 bp, Homo sapiens
  misc_feature 520: n = A,T,C or G
cccttagcgtggtcgcggccgaggtactgttttccacagagtgggaagataagaacacatgtagagatgataaaatgtcattggctccaagagacaagcttcgaaatccatggtggttgaagaacatcaaagaggagcaattatttcagtcattagggcagttccacctgttctaattgaacatttttaggatgtagaagatgcatcatacattggtatctattcagaaggtggggacatctgctgtctgtcatgtatctgggagatgtttatctcaacaggaggcaataataatatggtaaaccaaacctaatattatcatgatgcattaaaactgggttaattgaagcaataaaatcaaagtaacagtaaatgcttatacaacatgttaagtaatatttacttcaatcttagaaatgaaatgataattttacattctagcagatgtatttcttgatacctgttctgagaggacagaaacaaggctcaaaattcatgcaagaggctaataacaacttanttgatagtaaaatatggagcattggatgtagaagtgcattaaccttcttggttaatctgagttggacctataagtgggcatattggttttttggggaa

SEQ ID NO: 3115 - DNA, 221 bp, Homo sapiens
  misc_feature 208: n = A,T,C or G
ccctttcgagcggccgcccgggcaggtactccagcctgggtgacagagcaagactccgtctcaaaaaacaaagttaaggttggggagttaaggttgggtagaatgcattaaccaggcattagaattgcaatgttgggttcaagattaccacttgggcactgaagtgaagattaagggttagaagttaggatttagtacctcggccgcnaccacgctaaggg

SEQ ID NO: 3116 - DNA, 447 bp, Homo sapiens
  misc_feature 351, 378, 387, 396, 405, 409, 414, 415, 425, 432, 433: n = A,T,C or G
acatatcaaatttccaatttatatggaaccatttaatagagatttttttctataattataaacgataatttctaaagctgtagattaacccaataacatagacacttcttaataacagcttttggaaattggaacaagaagtctgcaaaggcggccgggcacagtggctcacgcctgcaatcttaacactttgcgaggtcgagatgggcatatcacctcaagtcagcagttccagaccagcctgaccaacatgctgaaaccccatctctactaaaaatacaaaaaattagccagatgtggtggcacgtgcctgtaatcccaactacccaggaggctgaggcaggaaaatcnctggaagccgggaagcaaaccctgcantgagccaanatcgcccantgaactccngccnggggnnacacattganacctccnncccaaaaaaaaaaa

SEQ ID NO: 3117 - DNA, 512 bp, Homo sapiens
  misc_feature 448: n = A,T,C or G
cccttcgagcggcccgcccgggcaggtacatttaaaaggtgatgctaatactttaaaatgtttaagatatagatttaaaaagcattgtaaattgtatactgagtgtcgtctacatggcattggacaggacataatgtaaaacataaaagtgcaattgttacacttacatatgatagtgaatggcaacgtgaccaatttttgtctcaagttaaaataccaaaaactattacagtgtctactggatttatgtctatatgacaaatcttgatactgcatccacaacattactggcgtgctttttgctttgcttttgtgtgcttttgtgtgtctgcctattaatacgtccgctgcttttgtctgtgtctacatacacatcattaatactattggtattactattgtggataacagcagcctctgcgtttaggtgttttattgtatatattgnatttgtttatataccattatttttaatacatacacatgcacgctttttaattacataatgtata

SEQ ID NO: 3118 - DNA, 437 bp, Homo sapiens
cccttcgagcggccgcccgggcaggtacagacctacgtgaccatatagactattggaaacacatgcgcctagaatgtgctatttattacaaggccagagaaatgggatttaaacatattaaccaccaggtggtgccaacgctggctgtaccaaagaataaagcattacaagcaattgaactgcaactaacgttagaaacaatatataactcacaatatagtaatgaaaagtggacattacaagacgttagccttgaagtgtatttaactgcaccaacaggatgtataaaaaaacatggatatacagtggaagtgcagtttgatggagacatatgcaatacaatgcattatacaaactggacacatatatatatttgtgaagaagcatcagtaactgtggtagagggtcaagttgactattatgggttatattatgtt

SEQ ID NO: 3119 - DNA, 317 bp, Homo sapiens
ccctttcgagcggccgcccgggcaggtacatttaaaaggtgatgctaataccttaaaatgtttaagatatagatttaaaaagcattgtaaattgtatactgcagtgtcgtctacatggcattggacaggacataatgtaaaacataaaagtgcaattgttacacttacatatgatagtgaatggcaacgtgaccaatttttgtctcaagttaaaataccaaaaactattacagtgtctactggatttatgtctatatgacaaatcttgatactgcatccacaacattactggcgtgctttttgctttgcttttgtgt

SEQ ID NO: 3120 - DNA, 361 bp, Homo sapiens
  misc_feature 65: n = A,T,C or G
cccttagcgtggtcgcggccgaggtacctattctatgccattacacttctaggtgtatacttaanagaaatgagatatatatcctcaaaaggtcctatataataatgacccaggcagctttatcaataataaacaaaaactggaaacaatcaatcaacaataaaatgacgtggttacttgttcataaagatgactgcccaacaaaccacgccttctgttatccctgtccttatgtgttccccttccttgaatttgtgctggtcttgcgatttgattttgactgatataatacaccaattgtgaagctttatgatttctaatctgaattcaaaagaatccttgcagctttctttttggtccc

SEQ ID NO: 3121 - DNA, 515 bp, Homo sapiens
  misc_feature 448: n = A,T,C or G
cccttcgagcggcccgcccgggcaggtacatttaaaaggtgatgctaatactttaaaatgtttaagatatagatttaaaaagcattgtaaattgtatactgagtgtcgtctacatggcattggacaggacataatgtaaaacataaaagtgcaattgttacacttacatatgatagtgaatggcaacgtgaccaatttttgtctcaagttaaaataccaaaaactattacagtgtctactggatttatgtctatatgacaaatcttgatactgcatccacaacattactggcgtgctttttgctttgcttttgtgtgcttttgtgtgtctgcctattaatacgtccgctgcttttgtctgtgtctacatacacatcattaatactattggtattactattgtggataacagcagcctctgcgtttaggtgttttattgtatatattgnatttgtttatataccattatttttaatacatacacatgcacgctttttaattacataatgtatatgt

SEQ ID NO: 3122 - DNA, 319 bp, Homo sapiens
cccttgagcggccgcccgggcaggtactcgtggcccatgttggttcaatttttatagcttcagttatccaaaggtgacacagaatacccataatgatgactgggcatgcgttttacctttgggcagacaccccatctttttattctgaaatttaaaataattcagattcttttggggaggggattagtttaaacattaataaacagaatataaacaggcagatggatgggtagataagcggtattcgggaatttgagggcttgggacagaaatagattccttttcctttttaggttttctttcctaacttgctgcttcc

SEQ ID NO: 3123 - DNA, 390 bp, Homo sapiens
cccttcgagcggccgcccgggcaggtacatatacattatgtaattaaaaagcgtgcatgtgtatgtattaaaaataatggtatataaacaaatacaatatatacaataaaacacctaaacgcagaggctgctgttatccacaatagtaataccaatagtattaatgatgtgtatgtagacacagacaaaagcagcggacgtattaataggcagacacacaaaagcacacaaaagcaaagcaaaaagcacgccagtaatgttgtggatgcagtaccaagatttgtcatatagacataaatccagtagacactgtaatagtttttggtattttaacttgagacaaaaattggtcacgttacgcatatgtaagtgtaacaattgcacttttat

SEQ ID NO: 3124 - DNA, 406 bp, Homo sapiens
cccttagcgtggtcgcggccgaggtacgcggggtgtattgactaattgccctccagtaaagttgctgcaaattattcttctaccagcagtgtcttagagttactgtttccttagagacatgcaatgttctttattgtctttgtcagtaagtcaagctaaacaaatatttaagctttattgtttatttctttgataactgcttcatgtgctcttgtcatttgtgcatcttctgtgaattgcctgtttttgtcttttgcccattttatttattgaattgcctttttaaaaactgatttgttcatgcctgtaatcccaacactttgggactccaaggcagatggatcacgaggtcaagagatcgagaccatcctggtcagtgtggtgaaatcccgtctctactaaaaat

SEQ ID NO: 3125 - DNA, 323 bp, Homo sapiens
cccttagcgtggtcgcggccgaggtacatcaagtgctttttaaaaagttgatattgttggttatttttcttttattaaaatccacagccctgtgggctgctgtcccatccttatcgggctcattcaagaccagcattgacatttctaatttgcaaatttaaagattgtcaggaaatggtttaaacacccagtatgattggggagctttttgactgtgggtgacaagagtgggctcacctctgggaagacagtaggggcaggggaggagagcttgggctagatttagggagagttaggaatagctaacatttattaagcactta

SEQ ID NO: 3126 - DNA, 218 bp, Homo sapiens
cccttagcgtggtcgcggcccgaggtactgtgtttagaagggattaccaaaggctggagcgatttaagctatgcactagccttgccctcttaggttgcattctctttaggccactggttctcaaacattagggtgcactgtaaccattacagagcttgtgaaaagtgcagaaacctgagcctcaccttatgagattcttgattcatccagggggagga

SEQ ID NO: 3127 - DNA, 447 bp, Homo sapiens
  misc_feature 344, 395, 417: n = A,T,C or G
cccttagcgtggtcgcggccgaggtacacatttatgtgtgggtgtacaacatttttctgtgattatatgggtagttttgaaagaatatacttatgagccagagcaagaaattggaaccaatatgtgtagaggttattgcttttctctgcttagtgtgtcttggaaaaaagttctttacaggtaaataattttaaataccaatacccttagtatggatcagcaaattaggggctctgagaagtcctttcattacaagagttgtttaagctttgatttattgttttctaaacttatttgagctgggatgctttttcagagcagacacattctagtatattcttgtnttatctgcactatagatatgtattgttacataccttcagcttggcaaggcngactaataaaggaggttccaanacttcccttggtttaatgaagaacattcaa

SEQ ID NO: 3128 - DNA, 315 bp, Homo sapiens
ccctttcgagcggccgcccgggcaggtacaatgaaaggccaactccctctttggacacagggggcttggttgtattctaccaaactcccactagggggagtgttttagcagtgtgggctgtgcccttcacattctaaacaactgattttcattagtgattctcatgaacaaaaaacttcacctcttcacctatcatgaatactcaacttataaggccaggtgctgtataaatccccgccctcaacacccagactcccaaatgcaggtagctgagctgatgactttttataagcaatgctaccttaaaaatatgca

SEQ ID NO: 3129 - DNA, 351 bp, Homo sapiens
ccctttgagcggccgcccgggcaggtacgcgggggcaacagagccagactccatctcaaaaaaaaaaagaaagaaagaaagaaatgaaagtggtcttgtgtggagtctctgccctctaaccttgtagttggcccaacttagcacaatttcttatgtgatatttcaagttaatagtgcctcttaggcactattatcatcaatcccattttggagattgggaaaatgagataaggaacctgactgaggtcacacagttatcaaatgacaaaagcgaaatttaaaagcagataccagcagggcttgatggctcacgcctgtaatccagcactttgggaggccaaggcgggagga

SEQ ID NO: 3130 - DNA, 574 bp, Homo sapiens
  misc_feature 561, 562, 563, 564: n = A,T,C or G
cccttagcgtggtcgcggccgaggtacagtgagttcgtcatacatctagatgaggatgtaaaagaacaaaaacttggaatttccctccctctccatgcagctttgaagagtctttaatccaagggaaacctacagttctttctctgccgtaggttctcttctcctctcttccacttcctccagctcctgtttgtctcttcctccctgtgtgtcttactaccttgttttgggggtttgttttctctcctgatttttacctctttcagtcctcaaaatggtctgaataaactggagattaatttatttttgaaagaagtgtttgtatctactaagtgaggttatggaagagatccaaaaatgttctgggtggcaggagaagacatttaaaatacacagttaataagccacatttagataatctataattgactgtagtttattcagaaatgtcttttgttaaataaagcttctaagtgaagtctcaaagccacagaattaagaaaggctgtttgtttaatcaatgtgattactgctcatatttttaaaaggaaaaaaaagccnnnnaaaaggaaaa

SEQ ID NO: 3131 - DNA, 402 bp, Homo sapiens
  misc_feature 9: n = A,T,C or G
ccctttcgnggccgcccgggcaggtccttaggcatggtcagtaagatctggccaatgacatgtaagcagaaatgatacatactaatgatatcctgaataagaatggggtgtgacccactactattgtttttcctgttcctgctggctggaatatagtaaagtaggaagctgaaccagtaatattaaaccatgaaatagaaaatacatgttaaatatggcagagcactaagatggaagaaatttgggtcacttgcatgatgatgtgtgtgcctattactaaatctgctttgttatctgagagaaatccagtctcctcattaaactaaataacattcactatgacagcattgttaatctatgaggtgccccagaatcccttatagattacctgctaaacctgtc

SEQ ID NO: 3132 - DNA, 123 bp, Homo sapiens
ggacacatgaaactattactagtttcgtatcaaaataaaactagttaatattccgtcaggccaatcgctaacataatatactccaataaaaatttattgacatatatccactaccaaaaaaaa

SEQ ID NO: 3133 - DNA, 315 bp, Homo sapiens
ccctttcgagcggccgcccgggcaggtacagtaaatcacaagagaaggtggtggcgaatccctgctcacactggaagttgctctgtggaccattcgaagaagctctggactgatcacaagggaaaccgagcagaactgtgaagcagacggacaggaacaaaaggctattctggtgtgaggagaaatcagtcacttcagctccacaggcagatgttgctactggactgacaagtggaacctactcctgctggagaaaggtaaagtttgccattggggcagacgcagagttcatacactgtctgtcgagaacttgag

SEQ ID NO: 3134 - DNA, 501 bp, Homo sapiens
cccttagcgtggtcgcggccgaggtactttcaagtttttactcaaactcaatataatttcctttagaaaaatgtttttgagaaacacagtattaaatcaagaaagcccttgctgcttttattgtcactaaaatcatatattgttttccaaagaatactgccatttgtttatatttccctacagtttttgtttttgggagttttgttttgttatagtggcagctgaagtgattttgagtgtttgcagcatgatgttaattaaccaaatgtttcaacctggaactttgaacacctgggcttacataaattgctcagaatcagtgtggaaatcttcggaacagtggatgtagaagatttggggtaaaacaggcactagatggtgaggggttttatgctctactcattctttacgcaaaataaaaacagacgagtaagtgttggcctctttggaacagatgattcccagcagcagttggcatgctttatgtacctgcccgggcgg

SEQ ID NO: 3135 - DNA, 413 bp, Homo sapiens
ccctttcgagcggccgcccgggcaggtacaagttgagagaaaattgttgagaagcttcaaaacctgctttgcatttttattttatgggcttccctaaacccagtagatcgagtgccaattaggaatgcctcgaacatctataagccttgtaggcttatacttgccttatataggctttgtagactatcacagtagtagatcatctattgttcattaaatctgctgcttttagaattcccagcatcagaattctgtgctttaaaagctgataccacatttttggaacattctaagactgtgggtcagtgacctcctatttgttttgatccccgccccgccttttatggaatctgatttggatttcataattcctatactcccatataacatctatgtcgtgaaagatttataag

SEQ ID NO: 3136 - DNA, 425 bp, Homo sapiens
  misc_feature 45, 332, 378, 411: n = A,T,C or G
cccttacgtggtcgcggccgaggtcttaacattttggggctaganctaatatatttactagtggacacaggaagaagcagacgccaaggcatatggtcaggaagggagttaacaggccaccaccaaagaggaagaatgcggcagctgaatcacctgagggtagatgaaaagaggataaaatggcaccgacagatccaaaggccttaagaacctcaaaaaacctcagtaataaggaaatgtgtttggaaatactgatattgttaccttcatttgggaagtgttcacgtgtgaatagggaagaaaataagggaaccacctgtgaattaccttangctttcaccagatgagtatgagtaaaatgtgtgaagtgaaattcangttaacccttcaagtcacataggcaggaaaccnaaaaaaaaaaaaaa

SEQ ID NO: 3137 - DNA, 433 bp, Homo sapiens
  misc_feature 262, 263, 264, 265, 266, 267, 268, 269, 270, 271, 272, 273,274, 275, 276, 277, 278, 279, 280, 281, 282, 283, 284, 285,286, 287, 288, 289, 290, 291, 292, 293, 294, 295, 296, 297,298, 299, 300, 301, 302, 303, 304, 305, 306, 307, 308: n = A,T,C or G
  misc_feature 309, 310, 311, 312, 313, 314, 315, 316, 317, 318, 319, 320,321, 322, 323, 324, 325, 326, 327, 328, 329, 330, 331, 332,333, 334, 335, 336, 337, 338, 339, 340, 341, 342, 343, 344,345, 346, 347, 348, 349, 350, 351, 352, 353, 354, 355: n = A,T,C or G
  misc_feature 356, 357, 358, 359, 360, 361, 362, 363, 364, 380, 383, 384,390, 395, 397, 398, 405, 412, 413, 431: n = A,T,C or G
ggccgcccgggcaggtacagatgtctttgagggcagctctcaggtagaattgcttctttttgtaaaactgttaacagttttagattaaaaatttaaggggagtagattctgtctgcactcagaaaggcaaagtcacatgcctcaacttttgactaaagcacagcaactcactgtaaagcaaccacagaacaaaaacttacaaacatgacactggcaaataaaaagctgtcatgattttgatgaatgttaatcccgcgtaccnnnnnnnnnnnnnnnnnnnnnnnnnnnnnnnnnnnnnnnnnnnnnnnnnnnnnnnnnnnnnnnnnnnnnnnnnnnnnnnnnnnnnnnnnnnnnnnnnnnnnnnctggaatttaaatatnttnnattttnaactnannaaaggcntttggcnnaaaccatgtttggaaaanaa

SEQ ID NO: 3138 - DNA, 402 bp, Homo sapiens
  misc_feature 382: n = A,T,C or G
ccctttcgagcggccgcccgggcaggtacttcaaatacaactcaggcacttcagatggctttgtaaactgggtcaatgctattccatctgaaaggaaattacagaattattttcaattcaattatacatccctgcaaaataatttgagggcagctttgaatgctgtaagtgagttgtgatgccatctatattaatcctaaaacttatcttcaaattgattcccaaagtccaacacactttttatttaataaatatttacaggccaggcacggtggctcaagcctgcaatcccagcactttgggaggccaaggcaggccggattacaagatcaggagattgagaacatcctgaccaacatggtgaaaccccgcctctacttanaatacaaaaattagccaggc

SEQ ID NO: 3139 - DNA, 442 bp, Homo sapiens
  misc_feature 266, 357, 374, 405, 406, 426, 434: n = A,T,C or G
cccttagcgtggtcgcggccgaggtacagtctctatttctaagtcttgatttcctcatttataaaacaaagcatctaaatgatatcaaatacccttgttttgaaaatcaaagaataagcacggcacccaagacaactttttgtatcacaggcacacatgaatgcttttttccttttccttttcttatcataaaaacctatattttatgacttttacatttattcctagatgctctcatatgcattatctcatttttacaataacantataaatataaacactgtgtatgctattgtacagatgagagacttgaagcacagaaggctaaaactacctttaacttctaaagaaattttntgagaagccatctgagnactcttgacagggtaaaatccctatcatttnngaaaagtgcaactgggggancacatgtnttttaaat

SEQ ID NO: 3140 - DNA, 320 bp, Homo sapiens
cccttagcggccgcccgggcaggtacgcgggtcgctaccgtcggcttgatttatttcaagagcatatgtttgaagtattggaacgagcaagaaggatgaatcggacagattcagaaatatatgaagatgcagtagaacttcagcagttttttattaaaattcgtgatgaactctgcaaaaatggagagattcttctttcaccggcactcagctataccacaaaacatttgcataatgatgtggagaaagagagaaaggaaaaattgccaaaagaaatagaggaagataaactaaaacgagaagaagaaaaaaaaaaaaaa

SEQ ID NO: 3141 - DNA, 687 bp, Homo sapiens
  misc_feature 387, 388, 389, 390, 391, 392, 393, 394, 395, 396, 397, 398,399, 400, 401, 402, 403, 404, 405, 406, 407, 408, 409, 410,411, 412, 413, 414, 415, 416, 417, 418, 419, 420, 421, 422,423, 424, 425, 426, 427, 428, 429, 430, 431, 432, 433: n = A,T,C or G
  misc_feature 434, 435, 436, 437, 438, 439, 440, 441, 442, 443, 444, 445,446, 447, 448, 449, 450, 451, 452, 453, 454, 455, 456, 457,458, 459, 460, 461, 462, 463, 464, 465, 466, 467, 468, 469,470, 471, 472, 473, 474, 475, 476, 477, 478, 479, 480: n = A,T,C or G
  misc_feature 481, 482, 483, 484, 485, 486, 487, 488, 489, 490, 496, 497,498, 499, 500, 501, 502, 503, 504, 505, 510, 515, 525, 532,544, 556, 564, 565, 566, 573, 578, 581, 585, 586, 592, 599,610, 613, 623, 627, 629, 649, 651, 664, 671, 675: n = A,T,C or G
acctgcaatatatttggagtattatgtctttattgttgttaaaaagtttttattgaatgtatgaaaattatcaaattgtattcatcattattaacatgtcctggggaaggaagggaaactttctaggacagaagtcactttcagatgtcatgtatgtattgggtgttcaatcatatctaacactgttttgatttttgtgggaaaatattccaggaaacgctaattctctttagactccttgttcttttatgactacaatgaacatatgtctatgtgatagctaaagatatttttgaattgtatgtgtgcttaattatcggtaagtataaatatttgagaaaacacatggtctggatatttaaaaccctcataaacatgttggtaccnnnnnnnnnnnnnnnnnnnnnnnnnnnnnnnnnnnnnnnnnnnnnnnnnnnnnnnnnnnnnnnnnnnnnnnnnnnnnnnnnnnnnnnnnnnnnnnnnnnnnnnncggggnnnnnnnnnnaaatnttttnccccaaaaancaaaaancagggttagatntgaattggaacnccccatannntaccatnacatntgnaaanngacttntgtcctnaaaaaggtttnccnttccttcccnaggncnttgttaataatgatgaaatncnatttggtaatttncataccnttcnaataaaaaaact

SEQ ID NO: 3142 - DNA, 369 bp, Homo sapiens
ggtacttaaaaaatttttaatgtaaaatacccctttaaggatagaatttagggccttgaaattctactcagttgctctgaactgtggggaatttgagacaaatagcttttgtaattggaatgcacactgtgttgtaataatgtggaaagagaaacaaaaactttccttaatgtaatgagtttccattatctgcctaatctaaggtttgtaagtctacattgtcaggatttatattgaggagatagggggtgtcattttctgtacaagataagttttaagtatgttctaaatatttgtctgctgtagtctatttgctgtatatgctggaaatttttgtatgccatttagtatttttatagtttaaggaaa

SEQ ID NO: 3143 - DNA, 346 bp, Homo sapiens
cccttagcgtggtcgcggccgaggtacagaacacctcctgcaagccagactccacttaccactcatgttgagatttgttcccaacctcagagaagttcgtggttgggcacatatacctaaacatgtggcttaagtgatttaaaatagtgaaatgcttgttgattacaaaaatacatgtaacacatgtaagctgtaagaaataaaatatatatctctcacttcaccgctcaatttaaaaaactagaactgtagtagtattattgaagctacctgaatttcctaattccatctccactgccctggctctccaactgagagatcttgatttttttcatttattgttccc

SEQ ID NO: 3144 - DNA, 403 bp, Homo sapiens
  misc_feature 104, 293: n = A,T,C or G
gactccatctcaaaaaataaataaatgaataagattcatatggcacctagttaatttcatttactcaatacttttcagaaattgaagaagctctttttcaccanctactaaacaaaagcaatttattcaactaggttttctttgcatgagttgttctgtatgtaacaagaaagcaagaaaataaatatttttaaatgtcacacttccctgcaaaaataatcacaataataataataataataatgaataagagtttataggctaggtatagtggctcacacctgtaatcctancattttgagaggctaaggcgggtggatcacttgaggtcaggagctcaagaccagcctggccaacatggtgaaaccccatctgtacaaatacaaaatattactctaaaaaa

SEQ ID NO: 3145 - DNA, 446 bp, Homo sapiens
  misc_feature 14, 130, 132, 204, 241, 387, 419: n = A,T,C or G
ccgcccgggcaggnaccctacagagctttgtaagttccttccttatatagtatataaaaggtcatatagctatatctgcagaggacaataatgaaatatctggtattagtgagctcttattatatgccangncctttgctaactgctttccagtgatatcttataccaaccctatggaataagcactattatcctgctttgcanagtaggaattgaggcttagagcagttgagtaactttnctgagggcacacagctctacatatagtggaataagtcacattccagaatgttccttttacctgcacagggtaactctgtcagaatttataaaaccaataaataacagcagtaacaaaaacctaatagcttcccatgtacttgaggntaagggagcatattttatttttccttatatgngggtttctctgactcaatttggctgtt

SEQ ID NO: 3146 - DNA, 443 bp, Homo sapiens
  misc_feature 414: n = A,T,C or G
cccttagcgtggtcgcggccgaggtacactggcagcctctactggccattgcaaagagcagcattgtcctctgttctttccattccaggttgcatatgcttttacttgggtttagctctttcttctttggtcctcaccctctttgttgtcctcttttgaagactagttattctgttggatgtcttgatttataattaataaagagctactagtccagtattttcattaataaattaatatcataagtgaatggaattcttcaggaccttagaagaagttatgaatataacctttccttgagaagtaattttcatgtaagagggaagatagatttatctttatgtaggttttaaaatactttctcagttgcaagccttaatgtatgatatagaagattagtcttttacttatganctggacaaaaaaccctgatgcctttggaa

SEQ ID NO: 3147 - DNA, 457 bp, Homo sapiens
  misc_feature 8, 25, 28, 38, 115, 117, 138, 144, 145, 155, 269, 270, 273,324, 431: n = A,T,C or G
ccctttcnagcggccgcccgggcangtnctacttatanatctccagcttacataactcaaatttagtttgctttctgcggcattaacatttgactcattgaatggcttatagtananatgaaggttattataatgtanaaagcnnattaaactgnattttaatttataaaatcaaggtgttagaagaggtgattatggaggtcttttctggcctaattttgtgactgctgttgaattccatgttacttgaaaagagtatttcaatagcnnatnaacaataggcatcatacttttcattctgaagccattgaaggtttactgcanaaaaattattctctaagcacatgactgttatccaatatcttaacaaaaaaggaggagatcattttctgggttattttttcctcagacttactatgccactgaggtancatactaaattgtcaatgacactttt

SEQ ID NO: 3148 - DNA, 345 bp, Homo sapiens
  misc_feature 300: n = A,T,C or G
cccttagcgtggtcgcggccgaggtacagatggggtttcactgtgttagccaggatggtcttgatctcctgacctcgtgatctgcccgcctcggtctcccaaagtgctgcgattacaggcgtgagccactgtgcccaggcctattgggggttatgcaggttcctttgcttggccatggtagatggctaagtctttgcttccaagttcttttgaccatgagacatgtagagccagggaggaaagagaaaacccaaaccaggtcactgttacctgtgaataacatcttgatcgagttctganaagaagagtgcccgcgtacctgcccgggcggcccgctcgaaaggg

SEQ ID NO: 3149 - DNA, 368 bp, Homo sapiens
ccctttcgagcggccgcccgggcaggtaccctagtaattggtggccctgatatttgaaacctttgtgtattttttggttaacgttcctgttcttcttggctgctgctagccacagaatatttatttttagagaaatttttcattggaacagaaaatggtggttgtgatgcagtcatggctctgtgacttagcaaactgataaaaagataaaagtatgaagcaaagacaaacagggtggaggtcggtgttctcccgcctaccctttctatgtggtgctcatcatcagtccccctgtgttgattctgatagagaactataaaatgaaacctatggggaatttgtcattctgaaatgaaagctaatgtaat

SEQ ID NO: 3150 - DNA, 321 bp, Homo sapiens
ccctttcgagcggccgcccgggcaggtactttttttttttttttttttttttgtttgactcagggtcttactctgtcacccaggctggagtgcagtggtgcaatctcagtttaaacccccaagtctgtggtattttgttatagtccccctggaaattaatacaggattcatggtctgccaaagtctcattccctgctcagaccgacaatggatagtgggatcctttgtgatatgtgctctgtgagttagaagtagtaacttagagctgttgaggacaatacctttgcaccccatccactgaattttgttttcaaagataca

SEQ ID NO: 3151 - DNA, 552 bp, Homo sapiens
  misc_feature 383, 419, 516, 519, 523, 532, 534, 535: n = A,T,C or G
cccttagcgtggtcgcggccgaggtacgcgggtaggagcaggaggagcagtgggggaagctggtattatttataccactctttgtattttatcactttttataagtctgaaattatttcaaaatgaaaatgtaaaaagaacaaggagtttctcactattctttgtccccctaaaaagaccatctttttaaaaagattaaggaattcatacaaaataagtaagaattaacaattataggaagtttgggccaagcacagtggctcatgcctgtaatcccagcgctttgggaagctgaggtgggtggattgcttgggcctaagagttcaaagactaaccctggtaacagcgagaccctgtcttctacaaaaaataaaaaatactanctgggcatggtggtgcacacctatagtcccagatantcaaaaaggctgaggtgggagggattgcttgaacctgggaggcccaaggcttcagtgaaccatggtcatgccactgcacttcagcctgtgtgaaganaancaanaaccttgtntnnaaaaaaaaaaaaaaaaa

SEQ ID NO: 3152 - DNA, 309 bp, Homo sapiens
cccttagcgtggtcgcggccgaggtacttcggtattacagcgccacccactggctagaagtcctcatagcacatatgagatgtagccataaaatagatgaattcttgaaataaggaatataacactgactattctgattcagtagaacataaaaaatgtctaacaaaacagaaccagacacattatattatttctacaagtaaacagaatatctattagatatgttcacaagggttttatcaattttgaaatccaagtgtataatccccaaatgctgtaaggacttaaattttatagccaaaacaatta

SEQ ID NO: 3153 - DNA, 211 bp, Homo sapiens
cccttagcgtggtcgcggccgaggtacaaaaggatatattaagaaaagtgtttcccttccactccagacaccctccccaaagcaacctattaacaatgactatttgtccagtttctttgcataagtacttttttttttttttttttttttttttttctttttttttttttttttttttttttttttttttttttttttttttttttttttt

SEQ ID NO: 3154 - DNA, 321 bp, Homo sapiens
cccttagcgtggtcgcggccgaggtacattgtatactgcagtgtcgtctacatggcattggacaggacataatgtaaaacataaaagtgcaattgttacacttacatatgatagtgaatggcaacgtgaccaatttttgtctcaagttaaaataccaaaaactattacagtgtctactggatttatgtctatatgacaaatcttgatactgcatccacaacattattggcgtgctttttgctttgcttttgtgtgcttttgtgtgtctgcctattaatacgtccgctgcttttgtctgtgtctacatacacatcattaata

SEQ ID NO: 3155 - DNA, 391 bp, Homo sapiens
  misc_feature 28, 32, 38, 39, 42, 44, 46, 59, 60, 103, 146, 299, 377: n = A,T,C or G
cccttagcgtggtcgcggccgaggtacntggnactacnngcntntnccaccatgcccanntaattttttgtattattagtagagatggggttttaccatgttncccagtctcaaactcctgagctcaagtgatctgcctgcctcancctcctaaagtgctgggattgcaggtatgagccgccgcctctactttatactttcttgttgaagtggactgtattgctgattcccacccacactctctttttggatatccggcccctcctcgagtctctgggaagggcaagcactataaaatngagggacaactagggaactcccacccccactgctaggcaagatcagattctctatcctgctaactggaaatgatacanagtgttcgatagat

SEQ ID NO: 3156 - DNA, 324 bp, Homo sapiens
cccttagcgtggtcgtggccgaggtactacgcaattttggaggctctatcatcgtacacattggagacacacataatagtttagacagcaatttttcaattgtttctctattttttccacatttatatcttactaatagtaacacaaccattccccatgaacatgctaaactttgaatgtgtaaatataaacaatattgttgtaatagtgtttttatactgtcagctatactgggtgtaagtccaaatgcagcaatacaccaatcgcaacacgttgatttattacttttaaatggtcttactaattctgtaaaactcaccccgt

SEQ ID NO: 3157 - DNA, 416 bp, Homo sapiens
  misc_feature 372: n = A,T,C or G
ccctttcgagcggccgcccgggcaggtacttgctgattggagcaataggaagagaccatttggcagtgatcgtgtgcagtgtgactgtgtgatagaaactgtgcacttgtgatgcatcccaactgcatagtgggcggcaccctgcaatcctcggaccccgtcctactgcccttggtagggtgtgggaagttacccagacagaaacaggaaaagtataggaagttccttcccaggaacataggcattggaggacataatttccctcttagatccctggattgtggttcagaaatgtccacaagcaaaggcttagaaataatttgtggaaagtgtgtttcagagctgacccagaaataatctggtttgacagangcatgaggggcacacctttgagagtatacttcttaccttatttc

SEQ ID NO: 3158 - DNA, 279 bp, Homo sapiens
  misc_feature 5, 32, 68, 70, 72, 73, 77, 264, 266, 267, 269, 270, 276, 277: n = A,T,C or G
tccgnttaactggacggtcctggggccatcanagtaagagtgaagggaagagcttttttttttttttntntnncggntgccactctgactgaagaagctgacagcaggggcagaggggctctgggacactgctgtgtggactctgggttaagggcgtgaagaggctggtgctgtgggattcggctcgatgaatgaagcactttatggactgcgggaatcagttactgccacacccaataaactggaagtgtttacaaaaaaaananncnnaaaaannaa

SEQ ID NO: 3159 - DNA, 401 bp, Homo sapiens
  misc_feature 66, 392: n = A,T,C or G
ccctttcgagcggccgcccgggcaggtacatttaaaaggtgatgctaatactttaaaatgtttaanatatagatttaaaaagcattgtaaattgtatactgcagtgtcgtctacatggcattggacaggacataatgtaaaacataaaagtgcaattgttacacttacatatgatagtgaatggcaacgtgaccaatttttgtctcaggttaaaataccaaaaactattacagggtctactggatttatgtctatatgacaaatcttgatactgcatccacaacattactggcgtgctttttgctttgcttttgtgtgcttttgtgtgtctgcctattaatacgtccgctgcttttgtctgtgtctacatacacatcattaatactattggnattactatt

SEQ ID NO: 3160 - DNA, 614 bp, Homo sapiens
  misc_feature 530, 543, 580, 591, 592: n = A,T,C or G
cccttagcgtggtcgcggccgaggtacatttaaaaggtggtgctaatactttaaaatgtttaagatatagatttaaaaagcattgtaaattgtatactgcagtgtccgtctacatggcattggacaggacataatgtaaaacataaaagtgcaattgttacacttacatatgatagtgaatggcaacgtgaccaatttttgtctcaagttaaaataccaaaaactattacagtgtctactggatttatgtctatatgacaaatcttgatactgcatccacaacattactggcgtgctttttgctttgcttttgtgtgcttttgtgtgtctgcctattaatacgtccgctgcttttgtctgtgtctacatacacatcattaatactattggtattactattgtggataacagtagcctctgcgtttaggtgttttattgtatatattgtatttgtttatataccattatttttaatacatacacatgcacgctttttaattacataatgtatatgtacataatgtaattgntacatataattgncgtataccataacttactattttttcttttttatttntatatataatnntttttgggttgggttggttgtt

SEQ ID NO: 3161 - DNA, 339 bp, Homo sapiens
  misc_feature 327, 331, 332: n = A,T,C or G
ccctttcgagcggccgcccgggcaggtacaattccctctctctcccaccagttgctagtttgttgatatgagaggagccttttgtgagaagggaaggttgataaactaaatgaagagtttactcacactagaaattgttatttggaggagtttttgtaatcatatttaaataccattcaaaacctaacagtttggttgagtagttataaaatgtatactgtgggagtatctgaaagggatatctaacacacagttgtttatctttcttcatttctgagaggtgtaagggtgtgataaaaggaagatcactgtaggtatgaataaatnccannaaaaaaa

SEQ ID NO: 3162 - DNA, 473 bp, Homo sapiens
ccctttcgagcggccgcccgggcaggtacatttaaaaggtgatgctaatactttaaaatgtttaagatatagatttaaaaagcattgtaaattgtatactgcagtgtcgtctacatggcattggacaggacataatgtaaaacgtaaaagtgcaattgttacacttacatatgatagtgaatggcaacgtgaccaatttttgtctcaagttaaaataccaaaaactattacagtgtctactggatttatgtctatatgacaaatcttgatgctgcatccacaacattattggccgtgctttttgctttgcttttgtgtgcttttgtgtgtctgcctattaatacgtccgctgcttttgtctgtgtctacatacacatcattaatactattggtattactattgtggataacagcagcctctgcgtttaggtgttttattgtatatattgtatttgtttatataccattatttt

SEQ ID NO: 3163 - DNA, 170 bp, Homo sapiens
  misc_feature 16, 144, 145: n = A,T,C or G
cccttagcgtggtcgnggccgaggtactatgggtgtagtgttactattacagttaatccgtcctttgtgtgagctgttaaatgcagtgaggattggagcactgtccactgagtctctgtgcaacaacttagtggtgtggcaggnntttccggtgtctggctctgaacttg

SEQ ID NO: 3164 - DNA, 521 bp, Homo sapiens
  misc_feature 438: n = A,T,C or G
cccttagcgtggtcgcggccgaggtacatttaaaaggtgatgctaatactttaaaatgtttaagatatagatttaaaaagcattgtaaattgtatactgcagtgtcgtctacatggcattggacaggacataatgtaaaacataaaagtgcaattgttacacttacatatgatagtgaatggcaacgtggccaatttttgtctcaagttaaaataccaaaaactattacagtgtctactggatttatgtctatatgacaaatcttgatactgcatccacaacattactggcgtgctttttgctttgcttttgtgtgcttttgtgtgtctgcctattaatacgtccgctgcttttgtctgtgtctacatacacatcattaatactattggtattactattgtggataacagcagcctctgcgtttaggtgttttattgnatatattggatttggttatataccattatttttaatacatacacatgcacgctttttaattacataatgtatatgtacctgcc

SEQ ID NO: 3165 - DNA, 312 bp, Homo sapiens
  misc_feature 1: n = A,T,C or G
ngtaccttcatggttaagaacatgcattttttgtcattgcaattttattcccaaatctattcatgtattcagcagtgaaccgaatacccgttatatgccagataccttgctaggctgggctgtgggtgatacctgttccacaagacaaatgtgggctcaaagagacatgctctctgcccttgtaaagcttgcagggaagataggcaattgagtatttggtagataggaagtgttctgggaggcctctcatataagtatgtgagagctctcatataggggataaaggaagtcacacctcacaccaagacctga

SEQ ID NO: 3166 - DNA, 323 bp, Homo sapiens
ccctatgagcggccgcccgggcaggtactagcagtagttaaaattactgagatattttcaatgaaccttcaaaaaagaccaacaaatctatttttctgtccaatgtaattttgatacttaagtttataactgtgttaagattaagtcaaactccttagaaatgttcagagaaatattagtctatatttcttatattgctcaagttctatttctataagtgataaattatacaaaatcagatatatggctcagcctgcagaagtttaagaaaaatgtttaaactaattttcatctttattaagctttcccttaagcaaagatga

SEQ ID NO: 3167 - DNA, 330 bp, Homo sapiens
cccttagcgtggtcgcggccgaggtaccgtgctattaaattatcagtcctgttgaatgatagagattaaagatttatttttccaagtgtcatattataaatgttgcttaaaactaagcataattcttgggaaaaaagtgagcaaatgtgtctgtgtaatcacatttaacaattaagttatgtaaaatctcattactaaagccattagctaaataagcaaatttgattaggaaatttggattaatgcaaagttcaaatatgactgcaaccaatgttggttcattacagtttgcaaatttcaaatgcataaataaacccttaggaaaaaatg

SEQ ID NO: 3168 - DNA, 317 bp, Homo sapiens
cccttagcgtggtcgcggccgaggtactatgggtgtagtgttactattacagttaatccgtcctttgtgtgagctgttaaatgcagtgaggattggagcactgtccactgagtctctgtgcaacaacttagtggtgtggcaggggtttccggtgtctggctctgatcttggtcgctggatagtcgtctgtgtttcttcggtgcccaaggcgacgactttggtatgggtcgcggcggtgtggttggccaagtgctgcctaatagtttcaggagaggatacttcgttgctgctgcaggatcagccatggtagattatgg

SEQ ID NO: 3169 - DNA, 348 bp, Homo sapiens
  misc_feature 54, 261, 263, 264, 288, 297, 301: n = A,T,C or G
cccttagcgtggtcgcggcccgaggtacaaatatttggcaaaggaatgaaaaangttagaaagttgtctgtctgtgggctaggctctgcctgcatgatacttacaatctaggtcagaggttcctaaatccttctcaatgcccgtttgcactggccctgaggaaagtgtgaaaatgaagactattgtaagaggtcttacatgaagctaaatttgttcatttatatcacttctcttttattatgacattatgtcctctgcagntnnttggtattaaaatgtcttttatgnaaaggatantaanaagtagatagtactcttttttgtggaaaaaaaaaaaaaaaaagtcct

SEQ ID NO: 3170 - DNA, 502 bp, Homo sapiens
  misc_feature 433: n = A,T,C or G
acgcgggcatttgccagtccctgtggacttaggccagatagtataaataatagtcacaaaaggagtatgaatgggataagaagccacttctagtctgagacaattaagagtagtagtgccttctctgcactctcacccctcattctgacagctgaagtgaaggactcccaacttctggaactgcccaatgaaagtagccttgtgtgagtgttagctggcctgctttggtctgggatgcaagtagaaataaactcctgtcatattaagccactaagactttagggatatgttgctgtagcatagcctaatgtagcctgattactgaacgagccaccccatcaactgaatctatgtgtatactaaaaacattttaagatacacaaggtctcaaagagttcactcgatgcacactttttctcaagaagctctagangatgtgctccacaaaaaataaaggtataaattgtgaaagaagaaaacataggatttaggaatcaagggg

SEQ ID NO: 3171 - DNA, 297 bp, Homo sapiens
cccttagcgtggtcgcggccgaggtaccatatgcgtggaacagagaaacaaagcaagccacatctttctatcggcaaggcattgggtggatgcaaagttaaagagctaaacatgaaggccgggcgcagtggctcatgtcacgtctgtaatcccaccactttgggaggctgaggcgggtggatcacttgaggtcaggagttcaagaccagcctggccaacatgatgaaaccccatctctacttaaaatacaaaaattagctgggcatggcgttgagcatctgtagtgacagctactcg

SEQ ID NO: 3172 - DNA, 353 bp, Homo sapiens
cccttagcgtggtcgcggccgaggtacttcagcctgggcggcagaacaagaccctgtctcagaaataataataataataaattttgttataacaagaaagagcaatcaatacagaaaaagcaggacaatttaaatgtggaaaaaaccagaaagatgaaaatattaatgggccaaacttgccagttagaggagtgtgagatttgagtttaaaaggaaaacaacttctaggccaggcacagtggttcatgcctataatcccagtgctttgggaggtcaaagcaggaggaccagttgaggctgggaattcaagagctacacaggcaacatagcaagaccttgtcccaaaaaaaaaa

SEQ ID NO: 3173 - DNA, 323 bp, Homo sapiens
ccctttcgagcggccgcccgggcaggtacatttaaaaggtgatgctaatactttaaaatgtttaagatatagatttaaaaagcattgtaaattgtatactgcagcgtcgtctacatggcattggacaggacataatgtaaaacataaaagtgcaattgttacacttacatatgatagtgaatggcaacgtgaccaatttttgtctcaagttaaaataccaaaaactattacagtgtctactggatttatgtctatatgacaaatcttgatactgcatccacaacattactggcgtgctttttgccttgcttttgtgtgctttt

SEQ ID NO: 3174 - DNA, 562 bp, Homo sapiens
  misc_feature 537, 546: n = A,T,C or G
cccttagcgtggtcgcggccgaggtacatgattctacactgaatctgcatttcactcccatatctataccagaaggttatcagtggaagagaaattcagttatctgaatggacatgatcttctcaggagcagtcagtggttaattgggacaagaaaacacaagtcattatcattgagaaatctgaagcaaattgaggcaggttgtcacctttcaccaggaaacaaattagccctgtctttaaaaagacttctttctctctctgctgactggggattcctgtcaactgccaatgaaatagggagagtgtagattaatggcactgtaacagtggccatgaaacaaccataaagccgttttctaatttttatgaatatttttaattgattcgaccagtgtgtttgaatgacaaaatttgtgctaagcttcagctccggaaaatcagggtgccatcttccagctgaaatcagtaggtgcaccagtctgtttggggaaagttctgtgtataaagaaaaagccataaaataccgacaaagtanctcttcctnttggctaatttacctt

SEQ ID NO: 3175 - DNA, 315 bp, Homo sapiens
ccctttcgagcggccgcccgggcaggtacatttaaaaggtgatgctaatactttaaaatgtttaagatatagatttaaaaagcattgtaaattgtatactgcagtgtcgtctacatggcattggacaggacataatgtaaaacataaaagtgcaattgttacacttacatatgatagtgaatggcaacgtgaccaatttttgtctcaagttaaaataccaaaaactattacagtgtctactggatttatgtctatatgacaaatcttgatactgcatccacaacattactggcgtgctttttgctttgcttttgt

SEQ ID NO: 3176 - DNA, 444 bp, Homo sapiens
  misc_feature 97: n = A,T,C or G
cccttagcgtggtcgcggccgaggtacattcttacaacttggaggataaggactacacacattcatctacccatacacacagtgaaacacatgtgtngcttaaataaaacagacattctccaaggatttctccaattataataattgattgggcttcaaaaactcaaggttgaatttcagcttctaacttgatgagaatggctgtcttaattctgtcattttttgttaattttacttccaggaagtcagggctgtgatttgaggcttttttctctaagcttctgtgatggagatgaatttattaaagtggggccataatgtctttttgagcaacattaaaactgagtcatcagaattaggaagtatcaagaagtcaagatcaattttcaagaacaggagcataaaattcgaactcaatctgtgttaacattaagagatttagaa

SEQ ID NO: 3177 - DNA, 396 bp, Homo sapiens
ccctttcgagcggccgcccgggcaggtacgagggcaagagaggaggtgtctccttaaaaaggaagacagtaaggtaacacaatttatctaaagtcaaaaaacttaaaacggacccggatgtcaaacccaggactgcccgagcacaggacctgtatttttactgctctgcctgcctgctaggcagcaccgacccaccaaaacaaaggatagcaagcaccaaatggacagtattttaaacagaaaaaaaattgaaaacagctcacaagtgtgtataataggtattcatagccataatgttttaatcaaacaaaaataagtttattttctttgactcaaattataattatgtattatgcgattaagtatgtcaatattttacagagttgtagaaagaat

SEQ ID NO: 3178 - DNA, 336 bp, Homo sapiens
  misc_feature 1, 70, 161, 180, 264: n = A,T,C or G
ncccttaccgtggtcgcggccgaggtacgcgggggtggctacaagtaactgtggtgtggaagcagagtanagagaaaacttgttcctcattagagagagagccacacttctcactgcacacaatgagaggccaaagattacccttggacatccagattttntattgtgccaggcctgacnaagagccttttgtgaagatcatcactgttgaagaggcaaagcgcaggaagagcacatgcagctactatgaagacgaggacgaanaggtgctgcctgtcctacggccccacagcgcgctcctggagaatatgcacatcgagcagctggcccgacgcc

SEQ ID NO: 3179 - DNA, 552 bp, Homo sapiens
cccttagcgtggtcgcggccgaggtaccacaaaagcaagtatcaatcagtctgctatcacaagataagttctgtccttgattagtcaagatgaactctttattttcaaatcctattattaacgtatataaggatggaagcctcaaatttaaagccaaaggatgctggcaaactgacaccctgagagagtaaaaaacaaactagaaatagataaaagattctttcacacacagactgggaacagaatagggaacccagaaataagaccgcacacctacaatcatcatctttgacaaacctgacaaaaaaacaagcaatggggaatagattccctgtttaacaatggtgctgggagaactggctagccatatgtagaaaactgaaactagaccccttccttacatcttatacaaaaattaactcaagatggattaaagacttaaatgtaaaaccccaaactacgaaaaacttagaagaaaacctagacaataccattcaggacagaggcatgggcaaagatttcatgactaaaaacaccaaagcaatggcacaa

SEQ ID NO: 3180 - DNA, 502 bp, Homo sapiens
  misc_feature 490: n = A,T,C or G
ccctttcgagcggccgcccgggcaggtacatttaaaaggtgatgctaatactttaaaatgtttaagatatagatttaaaaagcattgtaaattgtatactagcagtgtcgtctacatggcattggacaggacataatgtaaaacataaaagtgcaattgttacacttacatatgatagtgaatggcaacgtgaccaatttttgtctcaagttaaaataccaaaaactattacagtgtctactggatttatgtctatatgacaaatcttgatactgcatccacaacattactggcgtgctttttgctttgcttttgtgtgcttttgtgtgtctgcctattaatacgtccgctgcttttgtctgtgtctacatacacatcattaatactattggtattactattgtggataacagcagcctctgcgtttaggtgttttattggatatattggatttggttatataccattatttttaatacatacacatgcncgctttttaatt

SEQ ID NO: 3181 - DNA, 317 bp, Homo sapiens
ccctttcgagcggccgcccgggcaggtacgcggggagcgcgcggaagaaaaaccagcaagaaggcggcgggggaagatggcggtcctggggtagagtttgcaagctttctgactaggctagtcgagcaactattcgggtcatggcgtcaaactcaactaagtctttcctggcagatgccggctatggcgaacaggaactggatgccaactctgcccttatggaattggacaaaggcctaagatctggcaaacttggtgaacagtgtgaagcagttgttcgctttcccagactttttcagaagtatccattccctatt

SEQ ID NO: 3182 - DNA, 347 bp, Homo sapiens
  misc_feature 323, 347: n = A,T,C or G
cccttagcgtggtcgcggccgaggtacacctataggtaaccagtgtaggtcattagaacacaggcttcacactgcatgctgatctgcaaagtgaggacataccagtgacaactttggaatctgcatccagccacaggtaacagatgtattgcaccagactcagatctagattttgtgatgactatataatgaactagaagttcaaattagagaaagaaacaattcaaaatcagaagaaaggtaaaagcaagtggccacatgatcgcattaaaaaagaaaaaggcaaatatctcaataagtacctgcccgggccggcccgctcnaaagggcgaattccagcacactgn

SEQ ID NO: 3183 - DNA, 306 bp, Homo sapiens
cccttagcgtggtcgcggccgaggtactgttaaggtcatgcacccgtgtgaggtctgttcacaacatcacacggcaggacgatcacctctcttgttctggacaatctgctcctttggctataaccttaaatttcacttggcttacacgaatacagtggaaagattaagaactctggagtgcaatgaaagtggattcaggccgggcgcggtggttcttgcctgtaatcccagtgctttgggaggccgaggagggagatcacttgaggacaggaatttcagaccagtctgggcaacgtagtgagaccc

SEQ ID NO: 3184 - DNA, 343 bp, Homo sapiens
  misc_feature 7: n = A,T,C or G
cccttancgtggtcgcggccgaggtacgcggggagtcatattggggagatagtgttaattctatcgatgtcagaactttaggcaagcaaatctcaacttacctatacataatgtgctgatataatggctgttgaagtaaataaatataaagaaaagttctgcacttcttttgtcctgatcagtgcttctctggtaaatgtgctaaccgcaatgatagttgagattttaagggctgggtaaaatagcaaaaaacaatgaaaaggaaacttgtttaacaagtgtgatgacagctatggatctgtgatttaaaggaagaaatgtaaatcccctttgagttggatat

SEQ ID NO: 3185 - DNA, 173 bp, Homo sapiens
ccctttcgagcggccgcccgggcaggtacagtaattagtgtcttatgatcctgcctataatatttttgaccgtcataagttacttttaaaaattttcaagatcttcataataatgcagtgtgttctactgattgcattgtcgaatgtcagcatatatttggtttttttgttgt

SEQ ID NO: 3186 - DNA, 315 bp, Homo sapiens
ccctttcgagcggccgcccgggcaggtacatttaaaaggtgatgctaatactttaaaacgtttaagatatagatttaaaaagcattgtaaattgtatactgcagtgtcgtctacatggcattggacaggacataatgtaaaacataaaagtgcaattgttacacttacatatgatagtgaatggcaacgtgaccaatttttgtctcaagttaaaataccaaaaactattacagtgtctactggatttatgtctatatgacaaatcttgatactgcatccacaacattattggcgtgctttttgctttgcttttgt

SEQ ID NO: 3187 - DNA, 345 bp, Homo sapiens
ccctttcgagcggccgcccgggcaggtacgcgggtgaaggagtgtgtgaagaaaacattgataagccatgcctatgtgaaaggaaaactatattatatttcaagtcattccatccctagtcactttttgattagcagccttggtcttcttcaggactaaccattataggcagagtgtgcacaggttccagataaaactgctcaaagcaaatggattaaaaaaactgtccaagagagtctaagaacttgttttatgaagagtcttggctctccaatggtgagtcccagtctgaatttattcaagactgaaagaagttggagcatgtctgtgcaagggtatttttca

SEQ ID NO: 3188 - DNA, 460 bp, Homo sapiens
ccctttcgagcggccgcccgggcaggtactacttatagatctccagcttacataactcaaatttagtttgctttctgcggcattaacatttgactcattgaatggcttatagtaaagatgaaggttattataatgtagaaagcaaattaaactggattttaatttataaaatcaaggtgttagaagaggtgattatggaggtcttttctggcctaattttgtgactgctgttgaattccatgttacttgaaaagagtatttcaatagcagataaacaataggcatcatacttttcattctgaagccattgaaggtttactgcagaaaaattattctctaagcacatgactgttatccaatatcttaacaaaaaaggaggagatcattttctgggttattttttcctcagacttagtatgccagtgaggtatcatactaaattgtcaatgacacttttaaa

SEQ ID NO: 3189 - DNA, 431 bp, Homo sapiens
cccttagcgtggtcgcggccgaggtatgcgggcccttaaagacctagagaaaaatatagtaaacacattagatctcgcaggggaaatggtagaaagtaaatatctaggagaacaataaaatgaaatgtaaataattacagtgccaaattatactttctacaaaataattatatttcaaaaatatttcctacattatttggccattgtctctgcacttacagtttgattggtttcttttgcttatgtgcagtattgagataaagtcaaagaaaagttggaggccggtcatggtggttcgcatctgtggtcccagctactgtggaggctgaggcaggaggattgctcaagcataggagtttgaggctgcagtgagccatgattgtgccaatgcactccagcctgggcaacagagcaagacccagtctcaaaaa

SEQ ID NO: 3190 - DNA, 321 bp, Homo sapiens
cccttagcgtggtcgcggccgaggtacattgtatactgcagtgtcgtctacatggcattggacaggacataatgtaaaacataaaagtgcaattgttgcacttacatatgatagtgaatggcaacgtgaccaatttttgtctcaagttaaaataccaaaaactattacagtgtctactggatttatgtctatattgacaaatcttgatactgcatccacaacatttattggccgtgctttttgctttgcttttgtgtgcttttgtgtgtctgcctattaatacgtccgctgcttttgtctgtgtctacatacacatcatta

SEQ ID NO: 3191 - DNA, 543 bp, Homo sapiens
  misc_feature 251, 254, 265, 275, 313, 330, 363, 374, 398, 405, 424, 427,466, 514: n = A,T,C or G
actcccattcatacctacccatccactcccaatttcaatacaaatttatatctctataaatgactaaaatactattgtgttggtttttctttctttttttttcttgctgccacaacaaattaccacttacttaaagaacataagattaaagtgatagattttaaagcataaaataaaaaaaaaaattattatcttaccattctgggggtcaaacattcacatgactttggccaaaatttaaatgggggtanacngtgttcttttntggaggatcnggggatttatttccttgcctttacagcctccaaaattntggacttgaatgggagngacagggtttttcttctggtaatgagcataggngtaggctggtncaattaatagtcactacatgcaanaaagcanaatcaagggaaatgaaaanaanctagtcctgttaacttcaattgacactgaaatatcaagncatctctgaagttgaatatccatgaacttgtcaggtatatgtcaggtntattgttgacatttgtaaaaaaaaaaatt

SEQ ID NO: 3192 - DNA, 453 bp, Homo sapiens
  misc_feature 358: n = A,T,C or G
cccttagcggccgcccgggcaggtacacacgtgcacgcatctcccactcctgcctgtcatcctcgtgtctgtcattttcctgtctgagaaccaatggcagggtagagtcagcagaggttcctacaggatttcaatcctgaccctgctttttaccaaccgcgtgaccctgggaggtgtgttcagctttgagcttcagttccctcccctgtgaaacaggagtaataatttctacctcatggtgttgacatagggatttaaaaaaatgagatatgcaaggtgcttgcgcataggggggtgtggagggaagggctcactaaatgttacttcttccccagaggccactccagtctcacactanaattggggccaggaggtagggaaaccaggagcagagcttgtggtttgtccccagagtttcagagggtccttgggtaagggaggaatctcctccct

SEQ ID NO: 3193 - DNA, 514 bp, Homo sapiens
cccttcgagcggccgcccgggcaggtacatatacattatgtaattaaaaagccgtgcatgtgtatgtattaaaaataatggtatataaacaaatacaatatatacaataaaacacctaaacgcagaggctgctgttatccacaatagtaataccaatagtattaatgatgtgtatgtagacacagacaaaagcagcggacgtattaataggcagacacacaaaagcacacaaaagcaaagcaaaaagcacgccagtaatgttgtggatgcagtatcaagatttgtcatatagacataaatccagtagacactgtaatagtttttggtattttaacttgagacaaaaattggtcacgttgccattcactatcatatgtaagtgtaacaattgcacttttatgttttacattatgtcctgtccaatgccatgtagacgacactgcagtatacaatttacaatgctttttaaatctatatcttaaacattttaaagtattagcatcaccttttaaat

SEQ ID NO: 3194 - DNA, 590 bp, Homo sapiens
  misc_feature 16, 229, 387, 458, 520, 551: n = A,T,C or G
cccttaccgtggtcgnggccgaggtaccttacataaagtatgcactaaataaactgaataaaattgacaatatgcaatgtcaaagacaaaacataatggcagtattatactatatagaaatctacttagagagttaaataatgtagtattgtaaatatgtatcttttaatacacaatgtcataaaatgcacgaatacccatatattaaccagactttttcttaaatggnctcactctgttgcgtaagctggagtgcagcagtgtcatcatagctcactgcagccttgaccttgcacctccccaaccccaagttcaaaagatcctcttgactcaaacctcccaagcagctgcccagcaagaccagctaatttttaactttttgtaganacgggcccttacaccgctgtccaggctagtcttgaactcctgggctcaagagatcctcctgccttggcctnctgaagtgctgggatttccgggatgagccaccacacccagccaatatatgtatttcaaaaanatttgtgttgcacatgacaaaaacctaatgntggatggtcacttttttaaaattaaaaagaaaaaaaaaa

SEQ ID NO: 3195 - DNA, 313 bp, Homo sapiens
cccttagcgtggtcgcggccgaggtactatgggtgtagtgttactattacagttaatccgtcctttgtgtgagctgttaaatgcagtgaggattggagcactgtccactgagtctctgtgcaacaatttagtggtgtggcaggggtttccggtgtctggctctgatcttggtcgctggatagtcgtctgtgtttcttcggtgcccaaggcgacggctttggtatgggtcgcggcggtgtggttggccaagtgctgcctaatagtttcaggagaggatacttcgttgctgctgcaggatcagccatggtagatt

SEQ ID NO: 3196 - DNA, 478 bp, Homo sapiens
  misc_feature 451: n = A,T,C or G
cccttagcgtggtcgcggccgaggtactgaaatggagttaatgagcctgaaacagggccagctgagctcaagttttggagtgcgccgaggcaacatgcctaagcagaggccagaatccaaaccaatcactgatacaagtttctagcaggagtctgctcaccagttagactcaaagcaagactagagttttctgagcaattaggctaaggaggaggcaggccagggtgctggggtgagggtggagagtaaggagagtgcagggcatgttctgagtctcaattattgattgcaaatcacttagagatcttgtaatcaaagattgttttctatatcatcaatacaggcacatatctaacagtctggtattattgctgatggtttgtctggattattataagactagtcaaaatctaactccaaacccttaagatatacaatctatttcagttangactgctggttaatgttgtctggcatt

SEQ ID NO: 3197 - DNA, 268 bp, Homo sapiens
  misc_feature 243: n = A,T,C or G
atctgcagaattcgcccttagccgtggtcgcggccgaggtacattcattaacatgggaaaaaatgaaatgctgattctgaattcccagtatgaaatcccttattgaaacagttccatctcagcatgagctttatgggggatttcataagaggccgtcctctccaaagtccccaaataaagcatctggggatgattctcctcaaattctcctcaaatgcaatgttaacctttaagaaaaaccanaagaaacaaatttaaaataccaaca

SEQ ID NO: 3198 - DNA, 492 bp, Homo sapiens
  misc_feature 398: n = A,T,C or G
cccttcggccgcccgggcaggtacatttaaaaggtgatgctaatactttaaaatgtttaagatatagatttaaaaagcattgtaaattgtatactgcagtgtcgtctgcatggcattggacaggacataatgtaaaacataaaagtgcaattgttacacttacatatgatagtgaatggcaacgtgaccaatttttgtctcaagttaaaataccaaaaactattacagtgtctactggatttatgtctatatgacaaatcttgatactgcatccacaacattactggcgtgctttttgctttgcttttgtgtgcttttgtgtgtctgcctattaatacgtccgctgcttttgtctgtgtctacatacacatcattaatactattggtattactattgnggataacagcagcctctgcgtttaggtgttttattggatatattggatttggttatataccattatttttaatacatacacatgcacgcttttt

SEQ ID NO: 3199 - DNA, 547 bp, Homo sapiens
  misc_feature 6: n = A,T,C or G
catggncggagcaaaacatcgtccagccgctaaaaacactgatggccgatgatccggattacagtttcgatattctggaagcccgctacgccattgaagccagcaccgcatggcatgcggcaatgcgcgccacacctggcgacaaagaaaagattcagctttgctttgaagcaacgctaagtgaagacccggatatcgcctcacaagcggacgttcgttttcatctggcgattgccgaagcctcacataacatcgtgctgctgcaaaccatgcgcggtttcttcgatgtcctgcaatcctcagtgaagcatagccgtcagcggatgtatctggtgccaccggttttttcacaactgaccgaacaacatcaggctgtcattgacgccatttttgccggtgatgctgacggggcgcgtaaagcaatgatggcgcaccttagttttgttcacaccaccatgaaacgattcgatgaagatcaggctcgccacgcacggattacccgcctgcccggtgagcataatgagcattcgagggagaaaaaacgcat

SEQ ID NO: 3200 - DNA, 491 bp, Homo sapiens
  misc_feature 480: n = A,T,C or G
ggtacaaccttgagattacagatggttagcatagttatgtgcttttttgtctttgttttttaatcttaatcaaaataaaagcaactaaggaatcagattactgactctaagcttttaaaaaggagtgatttttttaatcagtgtccctcagtcagctagtgctatgccagcctgacttctcagctgcacctgttacattctccaaccctatgtgacttgcttttcaaattgttgagttgctaatgggaattttggattgtttgggggcatgcagatccataggaaatggtaatgaagaataagcagctcatgagagtgatggctcaagctgccatcatttaacttgaacttcttactgtcttgactttatgtttccgaaatgatgagccagatacattttaaataaaatttttagaattagagttaattccaaaaggataaagacacagttttctgttaaaacttgaagttacagagaanggaaagtacct

SEQ ID NO: 3201 - DNA, 560 bp, Homo sapiens
  misc_feature 453, 508, 532, 543: n = A,T,C or G
cccttagcgtggtcgcggccgaggtacatttaaaaggtgatgctaatactttaaaatgtttaagatatagatttaaaaagcattgtaaattgtatactgcagtgtcgtctacatggcattggacaggacataatgtaaaacataaaagtgcaattgttacacttacatatgatagtgaatggcaacgtgaccaatttttgtctcaagttaaaataccaaaaactattacagtgtctactggatttatgtctatatgacaaatcttgatactgcatccacaacattattggcgtgctttttgctttgcttttgtgtgcttttgtgtgtctgcctattaatacgtccgctgcttttgtctgtgtctacatacacaccattaatactattggtattactattgtggataacagcagcctctgcgtttaggtgttttattggatatattggatttgnttatataccattatttttaatacatacacatgcacgctttttaattacataatgnatatgtacctgcccgggcggccgntcgaaagggcnaattccagcacactggc

SEQ ID NO: 3202 - DNA, 512 bp, Homo sapiens
  misc_feature 417, 426, 469, 473, 484, 505: n = A,T,C or G
ggtacaagagtatgaaggaggcttagtgtctgcggatatgatacaaatcacaccttcattaagactagagaatggaagtcatactgggtgatagtgtatgagggtggagaagacatagaaatgagaagaggaagtaaagaacttcaacaatttcctgggaaaaccaaagatctcagttggtcaagagcatgctctacaatcagcaacattttagtatctagtatcatgttatctttaagccataatttgtccttggtctttctaggttttgtttttattattttcttgaaggagaagggtgggaatgggtaaaacattctggtcttccttttgcaaatctagaaccacaaaaccaattacaaatttgcgactcttgctataaacaaaaaatactccaatttatcagtgacctaattngaagagctnaaacccaaaaactcttagaagaaaatatagggggggaaagccnatgnatttctttggntttttttggggtggggggaanccggggg

SEQ ID NO: 3203 - DNA, 502 bp, Homo sapiens
ccctttcgagcggccgcccgggcaggtacatttaaaaggtgatgctaatactttaaaatgtttaagatatagatttaaaaagcattgtaaattgtatactgcagtgtcgtctacatggcattggacaggacataatgtaaaacataaaagtgcaattgttacacttacatatgatagtgaatggcaacgtgaccaatttttgtctcaagttaaaataccaaaaactattacagtgtctactggatttatgtctatatgacaaatcttgatactgcatccacaacattactggcgtgctttttgctttgcttttgtgtgcttttgtgtgtctgcctattaatacgtccgctgcttttgtctgtgtctacatacacatcattaatactattggtattactattgtggataacagcagcctctgcgtttaggtgttttattggatatattggatttggttatataccattatttttaatacatacacatgcacgctttttaatta

SEQ ID NO: 3204 - DNA, 437 bp, Homo sapiens
ccctttcgagcggccgcccgggcaggtactgtgcaatggttaatgcattatttgaggttcaatttaatgatgtttagtgtatatgattacagactgatacatgcatgccatgctgggtttctgaaaacaagtgctttagtggcagtagaaagaaattttaacaagtaacagattaaatgtataaggcttacagcacaatgattaaaaacaaaggaatacaaactaaatagtcgtgaacacaattagtttctcttcctgcagccacagtgtgtgtgctgaagatatacataaactgttggatttttcagtgtagtcataaaacaaagctaagatacaaaaatagttgaaagtctttgcaacaaaatctcaattacagtataaccaaatattaagcagaaattcttgtacaatatttctgaaacacttatgtctgaaat

SEQ ID NO: 3205 - DNA, 566 bp, Homo sapiens
  misc_feature 487, 508, 549, 556: n = A,T,C or G
ccctttcgagcggccgcccgggcaggtacattttcatattctccacctttgttccttgccctttgccttcaaagatatgtagatgttccttaactccaaaaattataaaaacaaacaaaaaaactttaccactgttcattatcaaagttactattcatttatccattcaatatttagagtagctaacaagacaaaacaaaataattgctgctttcgtggcttatagtggggaagggtgataaacaccatgatgaaggagagaagagtgctattgtgggggcacaaattatggggatctgatccttttttttaagggaggcatcagggaaagtctctctgaggaagtaaggttgattctcaaaggacagatggcagagacccgggttaaggggtggattggcaccaggctgaagtctggtgctcacaagaaactaagtgacagcataggttggtatagtgtgtaagatcaccttattttcttcttcanggaattttttgagaacctggnttatatttgcatcttactctcattttttcttgggtcccagnaacatanttattttccc

SEQ ID NO: 3206 - DNA, 515 bp, Homo sapiens
  misc_feature 483: n = A,T,C or G
cgcccgggcaggtacataagtgatttggattacctatattatctctctcttttttttttttaaccatgtgcatgtttttctttaaaatagaaatagtgaagttctgcttcagtcagaacctgcataggttaattaaatgcacgctttactccaactctacaacactaaaggacatgaaggctgcaaaacgactgggaagggctgcccccatacactcaactcctccagtttctcatgcatccgtccaccaagttttaccagacatttactatgtgccaggttctgcactgggcacaggagcagagggccggtggagacacagtccctgcccccacagagctcacagatggggcaggcagaagccacagaggccgtggtggtcacgcttcgggagaaaagaaccacaagtcaaaggggcacaaaagggggcaaccaactctatctgggatgctggaaaggattcctgggggatggagatgactnagtgggaatagccctgattggaaagaagaaag

SEQ ID NO: 3207 - DNA, 324 bp, Homo sapiens
cccttcgagcggccgcccgggcaggtacaaaatggaacctacattaatcatctaaaacggcattatcataacagacttgcctgagccattacttaccacaatgaattggtatgacacttctaacaaggtcagaaaaatcagattctgttttcttaatattgaggatctttcccactttccctgagctaatgagacacaggtctgtggcaaatacatttagtattttcctacacatgaattcctaacaaaaccaagcaagagcatacaaagggaaacatactttagctaatttaaaggtgtcttatgttattttgcttattgaaa

SEQ ID NO: 3208 - DNA, 617 bp, Homo sapiens
  misc_feature 531, 566: n = A,T,C or G
cccttagcgtggtcgcggccgaggtactattattttcatcctctccatttttcagataagagaactgagttgcagaagcattaatagcttcaccaaggacacacagtaataagcggcccaacaaagattctaacccaggccgactggatccagagcttggactcctaacaactagagattattgttcctttcgcaatccagccacatgaacctcctttatatttaatgcaaaatatgcattgtttttcacctccagccttctcaaatgacaatgtctcttcctatgcattcgcctactccacctaacctcactttcccttgggctccctcctatccatcctccaggattcttggtcagggtcagctgccccttctgtgtgtgctaccccatcaccctgtgcttccccttccagcactcagcacataaactgggtatttcaactacaggttctctgtcacctcccacccttgacttgaaagctgcacaaggacaggggccaagctacccaagcatttctatatctacaatgnctggcaggcttggcggggggctctatcattactgngaaaagaccaggatacctttattaaataagtggaataaaatttgaatagtt

SEQ ID NO: 3209 - DNA, 318 bp, Homo sapiens
ccctttgagcggccgcccgggcaggtacatttaaaaggtgatgctaatactttaaaatgtttaagatatagatttaaaaagcattgtaaattgtatactgcagtgtcgtctacatggcattggacaggacataatgtaaaacataaaagtgcaattgttacacttacatatgatagtgaatggcaacgtgaccaattttcgtctcaagttaaaataccaaaaactattacagtgtctactggatttatgtctatatgacaaatcttgatactgcatccacaacattactggcgtgctttttgctttgcttttgtgtgc

SEQ ID NO: 3210 - DNA, 571 bp, Homo sapiens
  misc_feature 137, 138, 431, 453: n = A,T,C or G
cccttagcgtggtcgcggccgaggtactaaccatatgaaaatagttgctaccttgttggacaggacagatatacaaagcatttccatttttacagaaaatgtgtatggataccatggaggtttgaaataaatgctgnnttcattcaaactatagtgaaatacagcatgtgaaaaagtaattacttattgactataataaatgcttcataaaatataatagatgctgattctggccaagattgacaaaatctaatgcagcctacatgtctcagtggttaatactaagactctgaataaaatacaagcaaataaacacctttgaggactttgaacagtaaataacagagggcgggtttaagggtaatcaaaacttgaagaaacatctatatggtagtggtgaatttattatatttttcttgcttatctcctangctgtgacctaaagactatctnaatgggaaaatgtgtaacaggcaaatttagcaaaacctatggggaaccacatatttcttggctatagggcaaagagaaaggccctatactagcaggagaaaataggaagaaacctttt

SEQ ID NO: 3211 - DNA, 500 bp, Homo sapiens
  misc_feature 440: n = A,T,C or G
ccctttcgagcggccgcccgggcaggtacatttaaaaggtgatgctaatactttaaaatgtttaagatatagatttaaaaagcattgtaaattgtatactgcagtgtcgtctacatggcattggacaggacataatgtaaaacataaaagtgcaattgttacacttacatatgatagtgaatggcaacgtggccaatttttgtctcaagttaaaataccaaaaactattacagtgtctactggatttatgtctatatgacaaatcttgatactgcatccacaacattactggcgtgctttttgctttgcttttgtgtgcttttgtgtgtctgcctattaatacgtccgctgcttttgtctgtgtctacatacacatcattaatactattggtattactattgtggataacagcagcctctgcgtttaggtgttttattgnatatattggatttggttatataccattatttttaatacatacacatgcacgctttttaat

SEQ ID NO: 3212 - DNA, 553 bp, Homo sapiens
  misc_feature 436: n = A,T,C or G
cccttagcgtggtcgcggcccgaggtacgcgggtaattgattgggcttcaaaaactcaaggttgaatttcagcttctaacttgatgagaatggctgtcttaattctgcttttttgttaattttacttccaggaagtcagggctgtgatttgaggtttttttctctaagcttctgtgatggagatgaatttattaaagtggggccataatgtctttttgagcaacattaaaactgagtcatcagaattaggaagtatcagaagtcaagatcaattttcaagaacaggagcataaaattcgaactcaatctggtggttaccattaagaagatttagaagctcattcagactgataactaacgaataaatatagctttcatttgttggagactttatgtgagccagccagttatacatgttatttataatccccacagnaacactgcaaggtaggttatcaactctatttttgcagttgaggaaattgaggctaagaaaatatgccatttaacttttgctgcataacaaaactaccccaaaaagctaatgggttta

SEQ ID NO: 3213 - DNA, 436 bp, Homo sapiens
  misc_feature 13, 15, 33, 40, 42, 52, 69, 147, 220, 255, 289, 292, 401: n = A,T,C or G
taaaatgtttaananatagatttaaaaagcatngtacatngntactgaatgncgtctacatggcattgnacaggacataatgtaaaacataaaagtgcaattgttacacttacatatgatagtgaatggcaacgtgaccaattttcntctcaagttaaaataccaaaaactattacagtgtctactggatttatgtctatatgacaaatcttgatactgnatccacaacattactggcgtgcttattgctttgcntttgtgtgcttgtgtgtgtctgcctattaatacnttncgctgcttttgtctgtgttctacatacacatcattaatactattggtattactattgtggataacagcagcctctgcgtttaggtgttttattgtatatattggatttntttatataccattatttttaatacatacacatgca

SEQ ID NO: 3214 - DNA, 299 bp, Homo sapiens
  misc_feature 10, 19, 22, 24, 27, 28, 89, 95, 98, 104, 105, 117, 121, 124,133, 166, 169, 172, 184, 186, 279, 282, 285: n = A,T,C or G
cccttagcgngcgcccggncangnacnnattctaggtggccttatttacataatagattggtggtgtttacatttaactaatgagtttncatttnacnaaaacnnaaatccagtgtntganctnaatgataanaactggaaatgctttttctcaaggacgtggtcnatnatntaagtttgcacnangacgaggacaaggaaaacgatggagactctttgccaacgtttaaatgtgtgtcaggacaaaatactaacacattatgaaaatgatagtacctnggncgngaccacgctaaggg

SEQ ID NO: 3215 - DNA, 468 bp, Homo sapiens
  misc_feature 403: n = A,T,C or G
ccctttcgagcggccgcccgggcaggtacatttaaaaggtgatgctaatactttaaaatgtttaagatatagatttaaaaagcattgtaaattgtatactgcagtgtcgtctacatggcattggacaggacataatgtaaaacataaaagtgcaattgttacacttacatatgatagtgaatggcaacgtgaccaatttttgtctcaagttaaaataccaaaaactattacagtgtctactggatttatgtctatatgacaaatcttgatactgcatccacaacattactggcgtgctttttgctttgcttttgtgtgcttttgtgtgtctgcctattaatacgtccgctgcttttgtctgtgtctacatacacatcattaatactattggtattactattgnggataacagcagcctctgcgtttaggtgttttattggatatattggattttggttatataccatt

SEQ ID NO: 3216 - DNA, 311 bp, Homo sapiens
ccctttcgagcggccgcccgggcaggtacaaatatttggcaaaggaatgaaaaaagttagcaagttgtctgtctgtgggctaggctctgcctgcaagatacttacaatctaggtcagaggttcctaaatccttctcaatgccgtttgcactggccctgaggaaagtgtgaaaatgaagactattgtagagtcttacatgaagctaaatttgttcatttatatcacttctcttttattatgagattatgtcctctgcagttttttggtattaaaatgtcttttatgaaaggatagtaagagtttagataagt

SEQ ID NO: 3217 - DNA, 234 bp, Homo sapiens
  misc_feature 218, 227: n = A,T,C or G
ccctttcgagcggccgcccgggcaggtacttacatattgcaaaagctatcttccttctatacatgaggctgtcagctgaatagtcttggaagagtgaggagtgaatttttctgctggcaactcggttagttttagcagttggtgctaaaacttggcaaagttttcaccaaatacatggaagatatacaaaaatagagggggcatgtaaaagaaaaacnttgacatantctgagc

SEQ ID NO: 3218 - DNA, 602 bp, Homo sapiens
  misc_feature 561, 590: n = A,T,C or G
ccctttcgagcggccgcccgggcaggtacctaaacaggccaaatgttgcctttggggttcctgtttcaacagcatggtgtgaagcgctgcatcaaccttctctgcctcatcctgcaaggtggcaaattcctcaagaatatgaccaagcttatctctctgtcgagccctgttatgtccatggatctgaataagactacagaatggccgaacacagtgagtaacaaaggagtcgatacagtccttagcctggtgattattatataggtagcacttgggggaaagcaccggaggactgacaaaagaccgaagtgcatctttcaccatgtcttgtatgagatgagttccaaagacctttttgttatccaccaggaaagtggtttgtaacagagatcttgaaagaacacgtggtgactgttcactaaattcacagaaaaaaatccaggatacaatgtaaatttgttaaattcacaacctcacagacaggttttattctatctattaatcttgcaaaatagttcaccatttcttcccttttaattattttttgcatatcgagggaangtaggtggaagtagcctctggttcacaangggttcaaaacc

SEQ ID NO: 3219 - DNA, 389 bp, Homo sapiens
cccttagcgtggtcgcggccgaggtactactactactattgctactattacttataatagaacacttgatactgaacagtatctttggatactgacatagggtgatcattattgaattatttaaacattcatctgcttaaagattagatgctttcttacgcaatttttcaacataccttccagttcattttatcactctgttactttagaggaagcactgtggtcattagttcttactctatcaaaatgatatttaactctcagatacctcagtcagagcctgatccttactataattgaaataaaaattattgagcctcttctgtattttatactagagaccttgccctgcattgccagggaaaatcattaaccactgcaaaatttaa

SEQ ID NO: 3220 - DNA, 583 bp, Homo sapiens
  misc_feature 433, 516, 543: n = A,T,C or G
cccttagcgtggtcgcggcccgaggtaccatatttcagatattggcacattcggcttgtataaggggagacgcttttttgcagttggacggccattgaagacaagttggtcaccccaagttttctttccagttcttctgaaaaactcactaaagaaaaagaaagcaagaaatacagaaaagtatagaaaaataatccatattcccaccacctaggattaagttgttaacaagatgaaaacttcatactgaaaaaccaccctttctagaggcgatttaccacttattccttgcctttcaaaatatttacttttcaaggtaatctctccttattaatttgaaaaaaaaatgtttcttttaaatagagattgttaacttggggtctggctaggctgtgaatcctctgatattaaacaaaagattttggttgaaggngcttataaggctttatttttcttcctttctgctctagccccatatgtgcagggattttcattagatcctcaaagagttctgtnacccccaccctctcccttctaccttgntacttttgaaacattctcctacagatttagtgggggaaat

SEQ ID NO: 3221 - DNA, 387 bp, Homo sapiens
  misc_feature 193, 325, 358: n = A,T,C or G
agaattcgcccttagcgtggtcgcggccgaggtacctaacggaaattttatcattgctttaaaatgtattttaatgaagatattaaaaaatacctttgatggattcttcaatattgtcgaactgctcaaaatgattatactgttatatgaagtctaaaatctttcatgcaacttacaagaatatttttgttgnatgcaccacagttggaaaattctagtgggaccatgtccatgcaattactgattatgtaatgctgtaaatttttgataagcatgttccaagttttcctgttctaaaaacaaaaacattaaaatcacccactgntgaagacaaaagatcattactttattaggaganattattagatatgttttagaaactagttt

SEQ ID NO: 3222 - DNA, 506 bp, Homo sapiens
  misc_feature 37, 93, 106, 111, 113, 119, 125, 140, 146, 156, 168, 249,268, 277, 280, 281, 284, 286, 293, 303, 308, 316, 321, 334,344, 352, 399, 408, 441, 444, 460: n = A,T,C or G
gaggtaccaataaatgagtattacatgttaatataanatgatgtagctcttcagccacaggggtataaacctggctagcatgacacaccaganctctgctcattgntgttngntcattngtttgnttttttgaaatagtntcgctntgtcacccangttgaagtgcantggcacaatcttggctcactacaacacctgcctccccagttccagcaattctcatgcctcagcctcccgagtagctatgantacgggcacatgccaccanccctggctnatnnttntntttttantagggacgantttcntcatgttncccangctggtcttgaantcctggcctnaagtgatncacccaccttggcctcccaaaatgctgggattgcaagtgtgagtcantggcccccngtaacattgttaatgttcatttttcaggctccnttnaaatgattcattagantgctaaaatagaactcagggcatttgatttccatagtttaaaataa

SEQ ID NO: 3223 - DNA, 404 bp, Homo sapiens
  misc_feature 33, 356, 380: n = A,T,C or G
ccctttcgagcggccgcccgggcaggtactcanaaggagaaatagaaaatttaaggacaggcaaagatactggatctggataaaatatttaagtttgaactttatatattgaattcttcgttctatagagactatgcttttctatgcaacaagccaaggaacattaaaaaaattggtcatgtaatttacattgcacaatatggagattgtgcgttgctttaaaactattgttagcgtctgggaacagataacctgaggtcaggagttcgagagcagcctggacaaaatagcgaaaccatgtctctactagaaatacaaaatcagctgggtgtggtggcatggacctgtagtcccanatactcaggaggctgaggcagganaagcacttgaacctgggaggcgga

SEQ ID NO: 3224 - DNA, 660 bp, Homo sapiens
  misc_feature 584, 637: n = A,T,C or G
actcctatagggagtcgaccccgcgtccgctgtgccctctgttgttggatcccaggcatgaaaactttgtgctttttagccccaagttaagtctgaatggtcatcttattctgtgataggtaagtatgactgagtcggggtgatttggcgtgggccttgggtggtagaagaaacatctttagggcttataaaatgttctacaatatttgtcagcacccatgaatttgagtactgcatcgaatagagtagagctctcaacagtatgtttgaaatgatccagaaggatattataaactattcagatattcacaatggcaatctatctcagagaggcgatcatttgcatatgttgatcaaattagcatctgatgctcataaataatggaatgacattaggtttaataagtaatttttaaagagaagtgctgacaggtcattggggttataaagaaaaccaaaataggtaccaggccctgtgcagtttatcagacattcgacctcgttcatcaagtttttcagaagacagtaccaccattgtgagttttcttaccaatttgcttagcttccacaatttcctcgtttgnattcctccataatacaattatcagcttggggaggaggatgtacattaagatcntcttagatccatggagaattaaa

SEQ ID NO: 3225 - DNA, 298 bp, Homo sapiens
cccttagcggccgcccgggcaggtacagattctaggtggccttatttacataatagattggtggtgtttacatttcctaatgagtttccatttgacgaaaacggaaatccagtgtatgagcttaatgataagaactggaaatcctttttctcaaggacgtggtccagattaagtttgcaccgaggacgaggacaaggaaaacgatggagactctttgccaacgtttaaatgtgtgtcaggacaaaatactaacacattatgaaaatgatagtacctcggccgcgaccaccgctaaggg

SEQ ID NO: 3226 - DNA, 199 bp, Homo sapiens
aggtgtcgacccacgcgtccgcacagttggaagggaaaaactgacatcattgctctgatggtaaaaagtatcctgtggctctcaaggcctgcagcatcaggggcaagcgaggagggcgggcctcgcatttctcaagcttttcactgcaggctaacactgggaaatcgcccttgatcggtttgctttgttacctgcccgg

SEQ ID NO: 3227 - DNA, 440 bp, Homo sapiens
  misc_feature 240, 243, 246, 249, 250, 252, 254, 258, 263, 264, 268, 280,283, 299, 303, 326, 331, 335, 337, 338, 345, 348, 350, 353,356, 367, 381, 390, 393, 396, 400, 401, 404, 405, 406, 407,415, 417, 422, 425, 427, 428: n = A,T,C or G
ccctttgagcggccgcccgggcaggtcctgagccacgatttgttctctcaacactctccaggctgtcagaaaagagatagaaactcaccaaggccaagaaatgcttgtgcgtggcacagaaggaatcaaagagtactttttttttttttttttttttttttatttttttttttttttttttttttttttttttttttttttttttttttttttttttttaaaaaaaaaaaattttttttnttnaanccnnancntttntttanntttngtttaaaaaaanttnaaccaaaaaaaaattnaaancaaaaccggggaacccaaaaccnttttncaangnnggggccnttncnccnttnaaaaaaaaaanggttttaaaagttntttttcccnttnggnaaannaannnnaaattttnancgggnccntnntttttttttaaa

SEQ ID NO: 3228 - DNA, 697 bp, Homo sapiens
  misc_feature 567, 650: n = A,T,C or G
cccttagcgtggtcgcggccgaggtactagaattgcatccttccatagtgtaaataataatcaaacataaacatgttcaattactgatattttagtccaatgttttttgtttcaattacatatctttttgcatcctacctattatacataaactaacatcaaaatgaaaactccatttaagaaagagcataaggaaatgacccccaaattgtactttttttttttttttttttttggtttttttaaatgagaactcaattttatttacatctatttatttccattcagtgtatcacatcttcaggataggtaataacagtgtgaagggtgtgctcattttcttcagctgtgagtagaggagtcttcccgagagtagcagttgttgatccaaatgattgaagccttcaggtaagggaataactgctgcaggaattctttcttgaagaatttaagctgtttggtaggaattctgtaactacatacctttgaaacactattcacattcaaataaaacgcttgttttctagccaggcacaggctcaattagtttttcaaactctagccaangcagtatttcatttgggaaatcatgcaacagaactgctcaattcttaacttcttctgctgttaacatttacacttagactggncagcaaccagttaacttaaaattttggcctcaaggggacaaaaaaaa

SEQ ID NO: 3229 - DNA, 337 bp, Homo sapiens
  misc_feature 57, 171, 222, 262, 312, 319: n = A,T,C or G
ccctttcgagcggccgcccgggcaggtactttttttttttttttttttttttctganacagggtctcactctgtgtccaggctggagtgcaactgcacgatcatagcccactgcggccccaacctcccaggctcaagccatcatcccacctcagcctcccaagtcactganactacaggtatgtgccaccacacctggctactttttaaattttttgtaaanaacccgcgtacttttacctacaaagaggctttttacccanaatgctcctgcacacactttgctgcttcttaaggtgcattttacctgaanactccanagtggagtggattaatat

SEQ ID NO: 3230 - DNA, 201 bp, Homo sapiens
  misc_feature 53, 80, 82, 83, 97: n = A,T,C or G
cccttcgagcggccgcccgggcaggtacgcgggcactcctcttctcagaactngatcaagatgttattcacaggtaacantnncctgttttgggttnctctttcctccctggctctacatgtctcatggtcaaaagaacttggaagcaaagacttagccatctaccatggccaagcaaaggaacctgcataacccccaata

SEQ ID NO: 3231 - DNA, 509 bp, Homo sapiens
  misc_feature 442, 451: n = A,T,C or G
ccctttcgagcggcccgcccgggcaggtacatttaaaaggtgatgctaatactttaaaatgtttaagatatagatttaaaaagcattgtaaattgtatactgcagtgtcgtctacatggcattggacaggacataatgtaaaacataaaagtgcaattgttacacttacatatgatagtgaatggcaacgtgaccaattttttgtctcaagttaaaataccaaaaactattacagtgtctactggatttatgtctatatgacaaatcttgatactgcatccacaacattactggcgtgctttttgctttgcttttgtgtgcttttgtgtgtctgcctattaatacgtccgctgcttttgtctgtgtctacatacacatcattaatactattggtattactattgtggataacagcagcctctgcgtttaggtgttttattgnatatattgnatttgtttatataccattatttttaatacatacacatgcacgctttttaattacataa

SEQ ID NO: 3232 - DNA, 498 bp, Homo sapiens
  misc_feature 457: n = A,T,C or G
ccctttcgagcggccgcccgggcaggtacatttaaaaggtgatgctaatactttaaaatgtttaagatatagatttaaaaagcattgtaaattgtatactagcagtgtcgtctacatggcattggacaggacataatgtaaaacataaaagtgcaattgttacacttacatatgatagtgaatggcaacgtgaccaatttttgtctcaagttaaaataccaaaaactattacagtgtctactggatttatgtctatatgacaaatcttgatactgcatccacaacattactggcgtgctttttgctttgcttttgtgtgcttttgtgtgtctgcctattaatacgtccgctgcttttgtctgtgtctacatacacatcattaatactattggtattactattgtggataacagcagcctctgcgtttaggtgttttattggatatattggatttggntatataccattatttttaatacatacacatgcacgcttttt

SEQ ID NO: 3233 - DNA, 392 bp, Homo sapiens
ccctttcgagcggcccgcccgggcaggtactaacttacataaaaaaggccctgttataaatcaaagaacttaatttcagtattgcattcaatggctccacacacagaaagctcttttggtttgtaaaagggataaagtagacttctaagattattttaagtaatatattctatgtgcttttatggcacggcccaaacaaaagaactcctagatggtttctgggaactgtttgttaatttaccattccaggatgaaacaatcagattgctccacctcaataaaatggcctttcacacacatcatccttgcaggacactctgcccaaattatttaacctttgaacacaagaacctaccctgaggttgcttgagattaaatggaataaatatgga

SEQ ID NO: 3234 - DNA, 549 bp, Homo sapiens
cccttagcgtggtcgcggccgaggtacagtcatacatagctcactgaagccttgaactcctgaggtcaagttatcttcctgcctcagcaattcttgttatacgtaatatagactaaagcgcctgccctagaaatttatcttcaaaaatgaaacaaaatagaacaaaggttgtgattttagtttatctaaaatgtggagtttccttcctcttgccaccagatcagagaaaaaattttgtaatgatataagttgattgagattttttatggcattttgcgtaggaatatatattgcacaactaggcaagttatccacatttattatccctgaactttgaattataattttacatatgatgaggctggctaaactttaatgggtattttttattttagaaacctagtaaatacatatttacatttgtaattacttgctgtaatcttacattgaatcaagttgtattctgtttcgtgtattgtgtcccccccccccctttttttaataaaggaagcactgtgactgtttttattttaaaagactttttttttt

SEQ ID NO: 3235 - DNA, 463 bp, Homo sapiens
ccctttcgagcggccgcccgggcaggtacatatcttttatatgctcatatgctcctgtagtcgttagttttaattcttaaaaatgtgataattgtaataaacttttattatatcttatgtaaaataattgtgtgtctgagagagactaaaactcatgccctacttctcatgatttctctttctcttttgtttccctttcacagacagaagaattatagcctcagtatttatgtatatttttgaaagagtgaagtggggactgagaaggtatatctacatgctatgccttttgatagcattctgtttcaaatctccttttctcatcattgactggaacacagttgaaaaaatattaaactgattttgtgacgatgaatttaggaattccagttagctaaggattagaaaaactgattttcggaggcatactctgatccagaatggggctttaatattggattat

SEQ ID NO: 3236 - DNA, 443 bp, Homo sapiens
  misc_feature 27, 170, 366, 403, 418: n = A,T,C or G
ccctttcgagcggccgcccgggcaggnacagccagctgggtactaaaccagaatttcccaccagcagctcaaatctatcgttatgtctttttccttctctgttaccatatcgcacatttcacttaaagctcaattggtttggccaagctagaaacctgaagtcctcttanactcactcttccctttaatgttgaacagagttagacctcaaggcttgttggttctactttttaaagatttctgaaatcaagtatcacttatcctcacagtcagccttcgtttggaaacttaatagctcttacctggattacaacagctttgtaacttatttttgtcccaaggttctcacctgttgattctgatttncattgttataggagggccataggtggcagagatgttnttttccacaaagtcnttaaatttataagtgattctcccct

SEQ ID NO: 3237 - DNA, 546 bp, Homo sapiens
  misc_feature 484, 546: n = A,T,C or G
cccttagcgtggtcgcggccgaggcacccccaaataagcctcagttcccatatttaaacttttttctcataggaaagctacaggaattttaagatatcacatggttacatttgcttttcttccagatggagctaaattgctatatgatacagggtttattttatatttctcatattaaagatgaaaaagtgaaaattgagtagttgactcaaaattatatgtatatatatatatatatgttaacagttgaatacaaacaagattacaagcagtgaaacattcaaatagttttggcaactccaaatattttgtgtttcacaaaaggagttaggttaacttttctaaatataactcattttatactattttaataaggagaaacttaaggatgagaaggcatgaggaaaagttacattagtgaaagctatatactaaagcagaccttcaacaacagctcataactaataaatgctttgtattttgntttcaagcagttatgtaaatcaatttggtgatttcttacactgtacctgcccgggcggccgn

SEQ ID NO: 3238 - DNA, 416 bp, Homo sapiens
actgctgatctattcccttagtcaacaagtaaattatttttattgtcagtttggcttggttgatctgtccttgcagcctaagtgatgcatgagcgaatggagaaatgaactagttgctacatagaagcttgaggtcaggttgaaattaggggctcaaactagatatgaaacccagggcatggaaatggtcacagtgcctcttgaataagaagcgctacttcaaattggaatgttgatgtaacagaatcaagagatagtattctcagggcttggtcagcaaggtctgaaggttcaaaatgtggctgtgttgtaaactactgagaaagccagtggggagaagagatttccctaagacagtctgacaactatgttccgtctcatgctagagatacctggctgctagtcaaaggccttcc

SEQ ID NO: 3239 - DNA, 418 bp, Homo sapiens
  misc_feature 214: n = A,T,C or G
cccttcggccgcccgggcaggtacgcggggtggtaaaactcattgcagcgttgaagaacttaactgacgtttcaccagatttggacatcaggctgaagatggaagaatcccagaaggaacttgaatcatatatgatgagggctcagcagttactggggcaaagagagagccccggtgaactcatttcaaaacacaaggaagcactaataatttntaatacaaaaagtctggccaagtatttgaaagctgttgaagaactaaaaaataatgtaactgaggacataaagatgtctttagaagaaaagagtagagatgtctgtgccaaatgggagtctcttcatcatgaactgtctttatatgttcaacaactaaaaatagatattgaaaaaggaaagcttagtgacaatattttaaaact

SEQ ID NO: 3240 - DNA, 474 bp, Homo sapiens
  misc_feature 383, 462: n = A,T,C or G
cccttagcgtggtcgcggccgaggtactgcagtgtcgtctacatggcattggacaggacataatgtaaaacataaaagtgcaattgttacacttacatatgatagtgaatggcaacgtgaccaatttttgtctcaagttaaaataccaaaaactattacagtgtctactggatttatgtctatatgacaaatcttgatactgcatccacaacattactggcgtgctttttgctttgcttttgtgtgcctttgtgtgtctgcctattaatacgtccgctgcttttgtctgtgtctacatacacatcattaatactattggtattactattgtggataacagcagcctctgcgtttaggtgttttattgtatatattggatttgnttatataccattatttttaatacatacacatacacgctttttaattacataatgtatatgtacctgcccgggcggccgntcgaagggcgaa

SEQ ID NO: 3241 - DNA, 321 bp, Homo sapiens
cccttagcgtggtcgcggccgaggtacatttaaaaggtgatgctaatactttaaaatgtttaagatatagatttaaaaagcattgtaaattgtatactgcagtgtcgtctacatggcattggacaggacataatgtaaaacataaaagtgcaattgttacacttacatatgatagtgaatggcaacgtggccaatttttgtctcaagttaaaataccaaaaactattacagtgtctactggatttatgtctatatgacaaatcttgatactgcatccacaacattactggcgtgctttttgctttgcttttgtgtgctttt

SEQ ID NO: 3242 - DNA, 476 bp, Homo sapiens
  misc_feature 294, 347, 357, 457: n = A,T,C or G
ccctttcgagcggccgcccgggcaggtacatttaaaaggtgatgctaatactttaaaatgtttaagatatagatttaaaaagcattgtaaattgtatactgcagtgtcgtctacatggcattggacaggacataatgtaaaacataaaagtgcaattgttacacttacatatgatagtgaatggcaacgtgaccaatttttgtctcaagttaaaataccaaaaactattacagtgtctactggatttatgtctatatgacaaatcttgatactgcatccacaacattactggcngtgctttttgctttgcttttgtgtgcttttgtgtgtctgcctattaatacgtnccgctgcttntgtctgtgtctacatacacatcattaatactattggtattactattggggataacagcagcctctgcgtttaggtgttttattgaatatattgaatttgnttatataccattattttta

SEQ ID NO: 3243 - DNA, 240 bp, Homo sapiens
  misc_feature 15, 52, 131, 148, 150, 177, 178: n = A,T,C or G
cccttagcgtggtcncggccgaggaccccatggctgttgtggcttctgacanaggaggcaggaatgtggtggctggcttgggagttgtaggaggctcatctggaccaggttcattgtaaccgttaaggtanaggctgtctttgtccananagtaggggcccacccgggtgatgcctnnctctgctggctcagctcatggaacacctgcttgataggcagacctgggccgctgaggggctg

SEQ ID NO: 3244 - DNA, 328 bp, Homo sapiens
ccctttcgagcggccgcccgggcaggtacccattaatcctctagaacatgcatttactctatattacagctttgcatgcaataactagttgtgtttcctcaatgatgtcaccttgaagtggcttttatttttcttatttcactgatgagagatgtgagggttacctgagggacatatcaagtggtcaaaccactattcagtagctatccttcttactttaaaactccgtggtctgctcaaaaccgtcttgctaagtaaatatgctaaaaatgagttctctttctgttactggacctcttatcttggtccttggttaattttccctcat

SEQ ID NO: 3245 - DNA, 235 bp, Homo sapiens
ccctttcgagcggccgcccgggcaggtacacagttcagtccataccagggctgaatggggaatgatctgcatgtataacagggaaattttgaggtatttaagtgacatacactttgtgaatgtgctttgaaatatccaaagtgtcacataattataatataagctgctatcatgagctaatttcttgttttttcttttcttttcttttcttttttctttttcttttttttttttt

SEQ ID NO: 3246 - DNA, 366 bp, Homo sapiens
  misc_feature 21, 151, 331: n = A,T,C or G
cgtggtcgcggccgaggtacncggggtaggttaagaatgtggatgggtttccattgcatagattcaaggtttgctatcacagaaaaaagaagctagtgcttctatcttactaaattggaaaattatttttctcattgttcattctatcagngccccctttcccctctgtatttatatagcacgggaatgtatagtttctatcaaataaatcattagaaaggcaatgttcaggccggacatggtggctcacgcctgtaatcccacacttggggaggccgaggcgggcagatcgtgaggtcaggagatcaccgaccatcctggctaacacggngaaaccccgtctctactaaaaatacaaaaaattag

SEQ ID NO: 3247 - DNA, 329 bp, Homo sapiens
  misc_feature 136, 141, 213, 238, 256, 304: n = A,T,C or G
cccttagcgtggtcgcggccgaggtactgtggaaatcaatggtaagaaaaaaaatggacaggtcatctaatatgtaaacaatttaactttgatgtaatctcttgtttgctggatttggtcctggggaaagtcaaangactntcttatttacttagttgaatctctcaccttttctctgtcttctcatttaacttctcttctcttaccttgcanagcattttgatgatgagtccagctnaaaatagtgttgtgtcangaattcagacttacggcctaaccctttttcttgtggggaaatctttangtgtataggactgtgctaatggtga

SEQ ID NO: 3248 - DNA, 510 bp, Homo sapiens
  misc_feature 494: n = A,T,C or G
ccctttcgagcggccgcccgggcaggtacatatacattatgtaattaaaaagcgtgcatgtgtatgtattaaaaataatggtatataaacaaatacaatatatacaataaaacacctaaacgcagaggctgctgttatccacaatagtaataccaatagtattaatgatgtgtatgtagacacagacaaaagcagcggacgtattaataggcagacacacaaaagcacacaaaagcaaagcaaaaagcacgccagtaatgttgtggatgcagtatcaagatttgtcatatagacataaatccagtagacactgtaatagtttttggtattttaacttgagacaaaaattggtcacgttgccattcactatcatatgtaagtgtaacaattgcacttttatgttttacattatgtcctgtccaatgccatgtagacgacactgcagtatacaatttacaatgctttttaaatctatatcttaaacattttaaagnattagcatcacctttt

SEQ ID NO: 3249 - DNA, 470 bp, Homo sapiens
ccctttcgagcggccgcccgggcaggtacatttaaaaggtgatgctaatactttaaaatgtttaagatatagatttaaaaagcattgtaaattgtatactgcagtgtcgtctacatggcattggacaggacataatgtaaaacataaaagtgcaattgttacacttacatatgatagtgaatggcaacgtgaccaatttttgtctcaagttaaaataccaaaaactattacagtgtctactggatttatgtctatatgacaaatcttgatactgcatccacaacattactggcgtgctttttgctttgcttttgtgtgcttttgtgtgtctgcctattaatacgtccgctgcttttgtctgtgtctacatacacatcattaatactattggtattactattgtggataacagcagcctctgcgtttaggtgttttattgtatatattggatttggttatataccattatt

SEQ ID NO: 3250 - DNA, 604 bp, Homo sapiens
  misc_feature 580: n = A,T,C or G
cccttagcgtggtcgcggccgaggtaccttctgataggtttacgtttcagtgaaaccagtgccactaagtatggacatggatgaagcattcaaaatcagccaatctgaatgatgggggaaaagggctagaaatacaactgacttaagagaaaacatcacagtcaaaacaattgagtttttcctccccacaatatgaaattctattttgtcttctctgaaataaaacataattgtttcagtgttaaaaaaaaaaaaaaaagctaaaatgcttaagataatttcatctgtggcttcatccttactccttcaacaaaattcctgaagatacagtgggaagatgttgatagaaaagtaacggttaagggaactgcagctaggaaaagatccctgcacagactgcagaggcccaggtgtcctgaagttggacatcgaaggtcattatcatgtcctatcaggagaggagttcttttcaatgtttcactaatatcaatgtctacttgctttcctcatgggccagattcccccaaaaaccacacatccttaaggatgtcatttggtttatgttgacaaaccaaattgntttaacatttcaaaggatgcttta

SEQ ID NO: 3251 - DNA, 464 bp, Homo sapiens
  misc_feature 186, 262: n = A,T,C or G
cccttagcgtggtcgcggccgaggtactactagttgtttcaagatataccaagaaacctcaggttctacatagctaaaaaagtttcttatattttgttaatgtcaatcaaacccatttttcacaggcaaaaatgtgtattttcatgccttatttgataattccatgaaaaaattaaaatattttantcagcatattagaaatttattcttggagatgcaaatacgtattttcaaattgtaagtgttaaattgtggatataanaatcttcccacctattttttattttaacttaatattttcaaactttataaatatagataggataatttgcttatctttttttgacaaagccatcaaataatcagtgttgtgaataagggtatttctttggaaaacataaaaggggcacaattaatcagctgtcaacaaggaaaggaaacaaaattgggtatttaaataattg

SEQ ID NO: 3252 - DNA, 683 bp, Homo sapiens
  misc_feature 299, 305, 307, 308, 309, 310, 311, 312, 313, 321, 325, 328,330, 331, 344, 347, 357, 358, 366, 373, 382, 384, 391, 393,397, 398, 399, 400, 410, 411, 416, 417, 418, 420, 421, 425,430, 434, 435, 436, 437, 438, 439, 440, 441, 442, 443: n = A,T,C or G
  misc_feature 444, 445, 446, 447, 448, 449, 450, 451, 452, 453, 454, 455,456, 457, 458, 459, 460, 461, 462, 463, 464, 465, 466, 467,468, 469, 470, 471, 472, 473, 481, 484, 488, 491, 498, 499,500, 501, 509, 513, 516, 521, 522, 526, 528, 529, 530: n = A,T,C or G
  misc_feature 531, 539, 540, 541, 542, 544, 546, 547, 548, 550, 551, 552,554, 555, 556, 561, 562, 568, 571, 578, 579, 580, 581, 585,586, 587, 588, 589, 590, 594, 595, 596, 597, 598, 599, 600,602, 603, 604, 606, 607, 608, 610, 611, 612, 614, 616: n = A,T,C or G
  misc_feature 618, 619, 620, 621, 623, 624, 625, 626, 627, 628, 629, 630,633, 634, 635, 641, 642, 648, 655, 662, 668, 680: n = A,T,C or G
aaatatttggcaaaggaatgaaaaaagttagaaagttgtctgtctgtgggctaggctctgcctgcaagatacttacaatctaggtcagaggttcctaaatccttctcaatgccgtttgcactggccctgaggaaagtgtgaaaatgaagactattgtagagtcttacatgaagctaaatttgttcatttatatcacttctcttttattatgagattatgtcctctgcagttttttggtattaaaatgtcttttatgaaaggatagtaagagttagatagtagtcttttttgtgcaaaanaaaaanannnnnnnaatttttngggncgnanncccctttgggggnaanttcccccccnngggggggnttttttnggggacccnanccgggancnaaannnngggggaaaannggggnnnanntggntcccngggnnnnnnnnnnnnnnnnnnnnnnnnnnnnnnnnnnnnnnnnaaaggganagngaanaanaaatttnnnnactccccnttgnaangaaannaatncnnnnggcttttnnnngnannnannncnnnccccnnaagganccnttttttnnnnaatnnnnnnggcnnnnnnnannnannncnnnangngnnnntnnnnnnnnggnnnaaaaanntggggncccaaancaacttnaaaatncctacttttttnaaa

SEQ ID NO: 3253 - DNA, 561 bp, Homo sapiens
  misc_feature 528, 560: n = A,T,C or G
ccctttcgagcggccgcccgggcaggtacaatgggcctacgataatgacatagtagacgatagtgaaattgcatataaatatgcacaattggcagacactaatagtaatgcaagtgcctttctaaaaagtaattcacaggcaaaaattgtaaaggattgtgcaacaatgtgtagacattataaacgagcagaaaaaaaacaaatgagtatgagtcaatggataaaatatagatgtgatagggtagatgatggaggtgattggaagcaaattgttatgtttttaaggtatcaaggtgtagagtttatgtcatttttaactgcattaaaaagatttttgcaaggcatacctaaaaaaattgcatattactatatggtgcagctaacacaggtaaatcattatttggtatgagtttaatgaaatttctgcaagggtctgtaatatgttttgtaaattctaaaagccatttttggttacaaccatcagcagatgccaaaataggtatgttagatgatgctccagtgccctgntggaactttttgatgacaatttaagaaatgcnt

SEQ ID NO: 3254 - DNA, 344 bp, Homo sapiens
  misc_feature 62, 98, 134, 234, 334: n = A,T,C or G
cccttagcgtggtcgcggccgaggtactgcaagcaacagttactgcgacgtgagcagcaacnaagtatcctctcctgaaactattaggcagcacttgnccaaccacaccgccgcgacccataccaaagccgtcnccttgggcaccgaagaaacacagacgactatccagcgaccaagatcagagccagacaccggaaacccctgccacaccactaagttgttgcacagagactnagtgggacagtgctccaatcctcactgcatttaacagctcacacaaaggacggattaactgtaatagtaacactacacccatagtacctgcccgggcggncgttctaaag

SEQ ID NO: 3255 - DNA, 327 bp, Homo sapiens
  misc_feature 276: n = A,T,C or G
ccctttcgagcggccgcccgggcaggtacattatttaaaaaaccagagagttatttggtattaagaagaaagatgattagattgaaagattgaaagtggacactatggataggaagtaaatgaaaccacttctttaactggagtagtttttaatttttgagtttttttctataggtaacataaaatagggatgggttttgtagttggcttttcattcttggcactaatgccactgttgggaccttgagacagcaaattgaactttctgatagttgncctaatagctctttcaggctgtatttggtgtccttagtgaattaaagtttg

SEQ ID NO: 3256 - DNA, 414 bp, Homo sapiens
  misc_feature 369: n = A,T,C or G
ccctttcgagcggccgcccgggcaggtacattgtatactgcagtgtcgtctacatggcattggacaggacataatgtaaaacataaaagtgcaattgttacacttacatatgatagtgaatggcaacgtgaccaatttttgtctcaagttaaaataccaaaaactattacagtgtctactggatttatgtctatatgacaaatcttgatactgcatccacaacattattggcgtgctttttgctttgcttttgtgtgcttttgtgtgtctgcctattaatacgtccgctgcttttgtctgtgtctacatacacatcattaatactattggtattactattgtggataacagcagcctctgcgtttaggngttttattggatatattggatttggttatataccattatttttaa

SEQ ID NO: 3257 - DNA, 528 bp, Homo sapiens
  misc_feature 191, 238, 324: n = A,T,C or G
cccttagcgtggtcgcggccgaggtacagtgggaaaggctttctccagctgatggatggctgttctctttatttggagtatcttactggttatgtaagcgacctcgagagaaattatcctgacccagatcggaggatgcagtagtgcttcagctgcaggatttcttagtcgttaacaccacagtgctgatnacaaagagcgagttgtaatcctcatcactgccagggctgagccagancagacagaaaatcgtcatttgctcgttggagacttgttaggttatagctcctgcttcgttctgtggtcttggcttttcttcctatncaatgacgccgctgcaagtgagctcacaaatgcttggtttgagagccatttgcctgtgatttttgaagactaaagaagtatttacactagatactcttccagaacaaaatagaaatttcagcaaatacttactgacctttaaagccttgttgtggatttcttgagatttaaagatactttaaaattctcaaagaacaaaacttt

SEQ ID NO: 3258 - DNA, 410 bp, Homo sapiens
cccttagcggccgcccgggcaggtacgcgggcctgacctcaggctgcagatattgagctgaggggagaacaatagggtctcaaaagatctttttggagaccagaaaaacacaacatataccattggaacattgaagcttttgggcatggggcagaaattaatcacatttaaatttgaattaatttaatcaggttattttcctaataattaacacaactcgagaatggaaatttttggccaggtgtggtggctcatgactgtaatctcggcactttgggaggctgaggcaggtggataacctgaggtcaggagttcaagaccagcctggccaacatggtaaaaccctgtctctacaaaaatacaaaattagctgggcgtggtggcacatgtctgtaatcttagctacttgg

SEQ ID NO: 3259 - DNA, 306 bp, Homo sapiens
  misc_feature 8, 9: n = A,T,C or G
gcgtggcnnggccgaggtcatttaaaaggtgatgctaatacttaaaatgtttaagatatagatttaaaaagcattgtaaattgtatactgcagtgtcgtctacatggcactggacaggacataatgtaaaacataaaagtgcaattgttacacttacatatgatagtgaatggcaacgtgaccaatttttgtctcaagttaaaataccaaaaactattacagtgtctactggatttatgtctatatgacaaatcttgatactgcatccacaacattactggcgtgctttttgctttgcttttgtgt

SEQ ID NO: 3260 - DNA, 559 bp, Homo sapiens
  misc_feature 459, 557: n = A,T,C or G
cccttgagcggccgcccgggcaggtacgcgggtgcccctacctaactttgttgatagggccctacctaaccagtaaagtaattggtgtgcatcccccatttgccctgaatctcccagggaaagggctaataaacagtgactttataagcaagcaagagaagaggggccaaaggctgaacagcttttcacccggatacctactttggaaagaaacccgagtttgccatgaagaatgataatagatagtagggaagcctcccaggcttgtatgctgctggtagcaggcagtgtattaacaaccaagccagaaaattttcacagagatatctcctaaggcactgaaaataaactgctgtttattttttcagggacagtcaaagcagtcaaatactttttacaaacattttcttggactctttgcttcccctctcttacattcttttctataaaaatatttgnatttctctgttgatgagttttaagaggatatgttaatatactagcaattttatttttctatttagaatatcctccattttttatttttattttttaangg

SEQ ID NO: 3261 - DNA, 311 bp, Homo sapiens
  misc_feature 21: n = A,T,C or G
gagcggccgcccgggcaggtncacagatattagcaaactgcctagccaaaagaattcatataaaagaaaattagcattacagcccataggacttttggagacaaagacacacagcccgttttgtaaccagtgttaactgaaagtccgattgtgctggactgaagagaacactcaccaagcatgatgtcggtgctaactggaatttcttttataatttggacaattttaccacaaactctctaaacttcagttttctgatctgaaaaacgggcccaagaacagtaagtatcttcctgacaaggttgctatga

SEQ ID NO: 3262 - DNA, 327 bp, Homo sapiens
  misc_feature 10, 203: n = A,T,C or G
ccctttcgancggccgcccgggcaggtacttttcttcttttttttttttttcttttttgagacgggctttcactccagcctgggtggcagagtgagaccctgtctctaaacaaaaacgaagcatgtctatagaaagaaactgaaaaatgttagcattaagaacccagatggagacctttcttttggtcaagattataatttanaaattttgagatggggtgtggtgaggaaagtgaggaagcttaactgcttggttctttcatctctgaaatttaggcagtgacattatttatttagagtgagataaattgtgatggctcaaagaga

SEQ ID NO: 3263 - DNA, 477 bp, Homo sapiens
  misc_feature 17, 212, 318, 475: n = A,T,C or G
ccctttcgagcggccgnccgggcaggtacgagggcaagagaggaggtgtctccttaaaaaggaagacagtaaggtaacacaatttatctaaagtcaaaaaacttaaaacggacccggatgtcaaacccaggactgcccgagcacaggacctgtatttttactgctctgcctgcctgctaggcagcaccgacccaccaaaacaaaggatatgnaagcaccaaatgaacaagtattttaaacatgaaaaaaaattgaaaacagctcacaagtgtgtataataggtattcatagccataatgttttaatcaaacaaaaatnagtttattttctttgactcaaattataattatgtattatgcgattaagtatgtcaaatattttacaggagttgtagaaagaatgttttattcaaaaagctagcaccaagacttaagtagaaaagcttttgcaactcactggtgtagggacagtgaanaa

SEQ ID NO: 3264 - DNA, 308 bp, Homo sapiens
ccctttcgagcggccgcccgggcaggtacttttttttttttttttttttgagacagggtctcactctgccacccaggttggagtgcaatggagcaatcatagctcactgtaacctcgaactcctgggctcaagtgatccttccacctcagcctcccaagatgcaacacgggttttttccacgtttttttcttactcagaaaatgaggaaacagaaagtagagcaaatacaatatctgaagagattattgttgagaatttccaagaaacaatagtaacagacagtaatttacagattgaagaagctatt

SEQ ID NO: 3265 - DNA, 384 bp, Homo sapiens
  misc_feature 377: n = A,T,C or G
ccctttcgagcggccgcccgggcaggtacgcgggctttactaatagttcagccacactcgaagacctgaatatagtagaaacttgaataatttggacctgctaaaggagaggtcacatagcttggaagcggtcagaatcagcagacatttggcctggcgcagaggctcacaccagtctggccaatatggtgaaaccccatctctactaaaaatacaaaaaatatttagccgggcatggtagtgcatgcctgtagtcccagatactcaggaggctgaggctggagaatcacttgagcccaggaagcggaggttgcagtaagccaagatcgtgccactgcactccagcctgggtgacagagcaagactctgtcccaaanaaaaaaa

SEQ ID NO: 3266 - DNA, 364 bp, Homo sapiens
  misc_feature 24, 26, 44, 131, 202, 230, 232, 248, 256, 263, 290: n = A,T,C or G
actttttttttttttttttttttntnatgagacagggtcttgcnatgttgcctaggctggtctcgaactcctggagtcaagtgaatatctgacctaggacttttttgttgctacaccatgggggtcccagnaaaaacccatttaccactcatgcttgcacaacccaaaaatgccagggagttcttgctgatggggccaactnttgaccaataggaaactggagcctatananaaattccacccccttngaaataanacactgnaaaaattttgcaagggaagatcctganaaaaagaagtttcccccacttcccttttagggatgatttattttcttaaaataactttttattttcttaaaagt

SEQ ID NO: 3267 - DNA, 392 bp, Homo sapiens
  misc_feature 327, 378, 384: n = A,T,C or G
cccttagcgtggtcgcggccgaggtacttaaaaaatttttaatgtaaaatacccctttaaggatagaatttagggccttgaaattctactcagttgctatgaactgtggggaatttgagacaaatagcttttgtaattggaatgcacactgtgttgtaataatgtggaaagagaaacaaaaactttccttaatgtaatgagtttccattatctgcctaatctaaggtttgtaagtctacattgtcaggatttatattgaggagatagggggtgtcattttctgtacaagatagttttaagtatgttctaaatatttgtctgctgtantctatttgctgtatatgctgaaatttttgtatgccatttactatttttatngtttangaaaatat

SEQ ID NO: 3268 - DNA, 243 bp, Homo sapiens
  misc_feature 128, 199, 232, 234: n = A,T,C or G
ccctttcgagcggccgcccgggcaggtacatcaccctgctgagggacatccaggacaaggtcaccacactctacaaaggcagtcaactacatgacacattccgcttctgcctggtcaccaacttgacnatggactccgttgttggtcactgtcaaggcattgttctcctccaatttgggaccccagcctggtggagcangtctttctagataagaccctgaatgcctcattncnttggctggg

SEQ ID NO: 3269 - DNA, 630 bp, Homo sapiens
  misc_feature 122, 273, 355, 365, 367, 382, 386, 398, 407, 411, 432, 479,507, 534, 540, 571, 606: n = A,T,C or G
cccttagcgtggtcgcggccgaggtacacttacttttaaaaaaataataaaaaaaataataaaaatccttttcccaagcacccccgtctaaagttacagctgtatttggttactcgttgganaggaaggccggttgcctttcttcttggcttccaagccttgtttctgaatcctttccacacacacaactcttatttcaaagagaaaccccactgggagactggaagacaggactgtgagagaaggaagttatgttaattccccaaccccaangacaccagtgggcacttcaaatacttagggagaaaaaaaaaagcttccttctaaattgattaaaagtttggtgatcacattngcaagttttnanagctccaccattacntccntcctcccccatngcaccagtnactngcttaatcacaaatagtgtcnctgcttaaggaccaagtaaggctgaatgtgacccctgtttcccccgnggcagcctgggctccaaggtaattgaanacatgacggctgttgattttggctgangctcancaggacttaatgtttggggaaatcaatggcnccacagtaggccacaaccccaccaaagtgcttttncaccttgagggaatacctgcccgg

SEQ ID NO: 3270 - DNA, 411 bp, Homo sapiens
  misc_feature 378: n = A,T,C or G
cccttagcgtggtcgcggccgaggtacaaataaagtattccaagggttcagaatagaaaatgatttcttccagcttggggacatttgggaaattgggatatcctttggggaaatgtagtaatcagtatattctgggaaaacatagtagagaatgaataaataaattccattgaatttggaatatgttgtccattctccctgtaactaatgctatcaagataaagtagaaataccacatttcagaaacagctggagtagacaggtcttcataggctagcttggaaacctaatagctattaataatgaaattttaattatactctggattctaaacaatgaacacacagtgatctttttgacttgctgcttgtttataanttggggatggtctgaattcattgttgattcaaa

SEQ ID NO: 3271 - DNA, 388 bp, Homo sapiens
ccctttcgagcggccgcccgggcaggtactaacttacataaaaaaggccctgttataaatcaaagaacttaatttcagtattgcattcaatggctccacacacagaaagctcttttggtttgtaaaagggataaagtagacttctaagattattttaagtaatatattctatgtgcttttatggcacggcccaaacaaaagaactcctagatggtttctgggaactgtttgttaatttaccattccaggatgaaacaatcaggttgctccacctcaataaaatggcctttcacacacatcatccttgcaggacactctgcccaaattatttaaccttgaacacaaagaacctaccctgaggttgctgagattaaatggaataatatgg

SEQ ID NO: 3272 - DNA, 522 bp, Homo sapiens
  misc_feature 1, 11, 19, 24, 52, 68, 79, 82, 90, 95, 108, 221, 233, 280,319, 341, 350, 422, 426, 431, 432, 436, 443, 448, 466, 476,479, 504, 509: n = A,T,C or G
ngcttgcaccnttccgaanaaaancgctgtactaaagccgcgagtctggtgnaccttggcaccccacncgttgcaagcntgnattggtancccanagacgcccaaccntacctgggaaatgaatgttctttgggaaaaaaaaatggacccggtgggaagcccttggggcttgggaagcccccgaagggttcccgccgttggcgggcccaaattccaagccngggttgggcaancccggggaccttggggccgttgccaataacccgttggggacggtttncaagaattacccccaccccaccccaggttagccaccttnagttattttggccccaccttgncccaccaanaagagggccaattgggaaggaacaccaaaaaccgtttccccccgggtttggcccttcctggccgggttgggncaanaattnncccnccgggtngccanggccgggccccgcctttnggaactttanttncttagaaagaaaaaaaaaacccttncccancaccctttccccc

SEQ ID NO: 3273 - DNA, 398 bp, Homo sapiens
ccctttcgagcggccgcccgggcaggtacgcgggtctcctaaaatctgaaaaattgatgctttgccctaaaaaacaatctctcaaatgattgaggaaacaatggaataattgaataccctcaacttaattctaaattaagggagaatttgttggtcaagtgaagactgtgtatagctagaactgtaactgagaatttaggcagcagatttttaaacaatccaaataaaaaaaatttttgccccgcttaatacagagccagtgtctctgtagcacttggcccatggtagataatctaaaaatgtgatatgtgaaattccatgacttaagactgtaaaagactgcgtggtatttagtggacatagcaatattcatggaatgaatgaatgaatgaatgaaa

SEQ ID NO: 3274 - DNA, 301 bp, Homo sapiens
  misc_feature 280, 284: n = A,T,C or G
cccttagcgtggtcgcggccgaggtacattctactcccaaaaaccttgaaatccaaacaactaacaaagtgaaacatgtttgtcctctctctccccctctatctctcgctttccctccctctctctttctcttcctgtagaactgcccatcacattccaaatccccacttaaatgcttggattagtgcatgccaacccaaactcctatatttactacttctaaaaaagcacaaactaaggattaatgttcataatcatgacttgataataagttgaagantggnaattttttgtttggttg

SEQ ID NO: 3275 - DNA, 331 bp, Homo sapiens
  misc_feature 239, 257, 258: n = A,T,C or G
aggtactgtatttaaatatgacttataacttgtctgttttttttttctttgtctatttatatatctgggttctttgttaagtcatgaagaccaagcttagaaacacagcatttaactttcaaatgaaagcaatggaggttttatgcccctatatacatttgaggccactggtattttaaattggtttttctttattctgcttttagggttactttgtgttcacaagacatgccactgtnaccattatacattattgnnaattaaacccaaaacttattttttaattttctcagcaagcacattctcaaagagttttaatcctttccaaaac

SEQ ID NO: 3276 - DNA, 316 bp, Homo sapiens
ccctttcgagcggccgcccgggcaggtacatttaaaaggtgatgctaatactttaaaatgtttaagatatagatttaaaaagcattgtaaattgtatactgcagtgtcgtctacatggcattggacaggacataatgtaaaacataaaagtgcaattgttacacttacatatgatagtgaatggcaacgtgaccaatttttgtctcaagttaaaataccaaaaactattacagtgtctactggatttatgtctatatgacaaatcttgatactgcatccacaacattactggcgtgctttttgctttgcttttgtg

SEQ ID NO: 3277 - DNA, 322 bp, Homo sapiens
ccctttcgagcggccgcccgggcaggtaccagcacagcaattgctgtatgtttgtttttaattatcggttttcacttggaggggccagttctctatattccaatctattttctatatcagaaatgagcaggcattttaaaaaatggttttcattgatggagaggtaaaagtgaaatggctttgttgtatttatattataaaaggccatttcccaaatctagaatttattactaaaaatcaagtttgcattgaggggaggagtatgatttgctcaagcttactttttttataggtggggtttttatattttcaatgtgattac

SEQ ID NO: 3278 - DNA, 923 bp, Homo sapiens
  misc_feature 20, 24, 38, 52, 63, 76, 94, 179, 180, 190, 213, 220, 308,327, 339, 349, 428, 463, 464, 496, 548, 551, 567, 576, 577,581, 593, 596, 617, 645, 651, 675, 683, 684, 685, 689, 692,693, 695, 696, 697, 698, 699, 701, 707, 709, 714, 736: n = A,T,C or G
  misc_feature 742, 760, 761, 776, 786, 788, 790, 795, 800, 827, 839, 840,842, 844, 849, 850, 851, 862, 864, 865, 866, 873, 874, 877,879, 883, 888, 889, 903: n = A,T,C or G
ccctttccagcggccgcccnggcnggtactcattgctnttgaatgttgctgnttctactattncttggagacaganctagggcatatcattgtntaaatacctacacataggtgataatatggacaaatctacagatagcttctgattatcaattcagaaccatagatttagtttggtnntttatatttntaacatccttctccaacaataanaaactanctctcattattcttaatatttatttgattaatctccttggccataaccaatctccctctcctgcactgatgcctctttaatcccagtnggcccagacacctcacatnaggctgcatggnacacatccangtcttgttgcaagctaaaatcctaccaagaaaaaggacaacacttaccctatattgagtcttcttccgagtatcaactncactgtggcatctgcctatgttcattcaccccggnnccttcagggttatatttttgtgttttgtccanggtttttagctggtctctggggagggttggtccaacaggagctaacgctccntancgggaagctgccatangattttggnnattntgttttccctcnggngggatttgggaaggttctttntaagatcaaggaaggatttctggcgggncccggngcttacccctgtatccacactttngaggcccnnnagcnatnncnnnnngngaattnanaccgnctggttaacacggggaaacccntttttntaaaaatacaaaaaattnnccccggcgtgggggnggggcccctntntnccctnttctngggaggctgaggcaaaaaaatggcccnaaccctggaggnngnanttgcnnnggaccccaaanannncctttgnnctncngccngggcnnaaaacgaaaattcntttttaaaaaaaaaaaaaaa

SEQ ID NO: 3279 - DNA, 234 bp, Homo sapiens
ggtacttctctttctatgcaggatctgaatgtgaccatatgagtaaaacagccatgatcatcttcccagtggaaaggccaccagtagttaacagttttgaatcaacaatacacctgcaaatgaggactgagctttgcatgcttcctatttcaggagattttccatccttttaaaaattccacacacaaatcaccagggctcctcaggaaaggttgctgagaacttgaaatttca

SEQ ID NO: 3280 - DNA, 337 bp, Homo sapiens
  misc_feature 95, 192, 194, 202, 205, 213, 216: n = A,T,C or G
accaacactcttctgttttcctttctccttgcttccggatctgaggatgagcaagaatatcaacaccaattgttgacttaacctctctaactgtnataataagttccttgaatttcccactgtttctttctttttttctatgtaggcttatatgaattatggcatacttgatttatataactgatatgttgntnaaaagttncangaatatanttnctttgataaattaatatcagtgccatttattggaattctgtggtgaaacattctttaaaaacaggcaatattagggaaaaaagctctaactttttttgggggggataaatctgaattttca

SEQ ID NO: 3281 - DNA, 459 bp, Homo sapiens
  misc_feature 253: n = A,T,C or G
ccctttcgagcggcccgcccgggcaggtacataaagcatgccaactgctgctgggaatcatctgttccaaagaggccaacacttactcgtctgtttttattttgcgtaaagaatgagtagaagcataaaacccctcaccatctagtgcctgttttaccccaaatcttctacatccactgttccgaagatttccacactgattctgagcaatttatgtaagcccaggtgttcaaagttccaggttgaaacattnggttaattaacatcatgctgcaaacactcaaaatcacttcaagctgccactataacaaaacaaaactcccaaaaacaaaaactgtagggaaatataaacaaatggcagtattctttggaaaacagtatatgattttaagtgacaataaaagcagcaagggctttcttgatttaatactgtgtttctcaaaaacatttttctaaagg

SEQ ID NO: 3282 - DNA, 313 bp, Homo sapiens
ccctttcgagcggccgcccgggcaggtacatttaaaaggtgatgctaatactttaaaatgtttaagatatagatttaaaaagcattgtaaattgtatactgcagtgtcgtctacatggcattggacaggacataatgtaaaacataaaagtgcaattgttacacttacatatgatagtgaatggcaacgtgaccaatttttgtctcaagttaaaataccaaaaactattacagtgtctactggatttatgtctatatgacaaatcttgatactgcatccacaacattactggcgtgctttttgctttgctttt

SEQ ID NO: 3283 - DNA, 320 bp, Homo sapiens
cccttagcgtggtcgcggccgaggtacattgtatactgcagtgtcgtctacatggcattggacaggacataatgtaaaacataaaagtgcaattgttacacttacatatgatagtgaatggcaacgtgaccaatttttgtctcaagttaaaataccaaaaactattacagtgtctactggatttatgtctatatgacaaatcttgatactgcatccacaacattattggcgtgctttttgctttgcttttgtgtgcttttgtgtgtctgcctattaatacgtccgctgcttttgtctgtgtctacatacacatcattaat

SEQ ID NO: 3284 - DNA, 357 bp, Homo sapiens
  misc_feature 1, 33, 99, 104, 108, 198, 245, 266, 308: n = A,T,C or G
ncccttagcgtggtcgcggccgaggtacctganatcacaaacaacttttgtgaaaaacaaacagcattcctgtcatgggcccttatttaacccactctncaaanaaangagagcaaaaaagtttactccagatcaaatatgccattttaattttatttcctaagcttggaataaaatactgtaattaaatacaattgnattatatttcacaattttgaatttaagggatctgttctaaatatcantagctcaaaaatccagagttngttctgtttttggctaagatgtttataggtaaatttcatggnaaaatgtttctatttcatgcacaatttcctagagtttcaaaaaaaaata

SEQ ID NO: 3285 - DNA, 386 bp, Homo sapiens
  misc_feature 17, 18, 19, 199: n = A,T,C or G
cccttagcgtggtcgcnnncgaggtactatgggtgtagtgttactattacagttaatccgtcctttgtgtgagctgttaaatgcagtgaggattggagcactgtccactgagtctctgtgcaacaacttagtggtgtggcaggggtttccggtgtctggctctgatcttggtcgctggatagtcgtctgtgtttcttcngtgcccaaggcgacggctttggtatgggtcgcggcggtgtggttggccaagtgctgcctaatagtttcaggagaggaatacttcgttgcttgctgcaaggatcagccatggtagattatggttttttgagaacagatggggcaccacaattcctagtgtgcccattaacaaagtcttttcaaaatac

SEQ ID NO: 3286 - DNA, 362 bp, Homo sapiens
  misc_feature 13, 83: n = A,T,C or G
cttagcgtggtcncggccgaggtcagcagaatgcgtctccgagagctcccttggtccaaagacaaagcgttcctgcccagagnccacagagaggtgtctaacatgccttctatactcacaaattggttctgatccagtggagtcccatcagtaggctcatgcacttccccaagaactccacaaaatgattaagaactaatcagcttttgggctgggcgcggtggctcatgcctgtaatcccagcattctgggaggccgaggtgggtggatcacctgaggtcaggagttcaagaccagcctggccaacatagtgaaaccccatctctactaaaaaacaaaaaataagctgggcgtggtggcgg

SEQ ID NO: 3287 - DNA, 312 bp, Homo sapiens
ccctttcgagcggccgcccgggcaggtacatttaaaaggtgatgctaatactttaaaatgtttaagatatagatttaaaaagcattgtaaattgtatactgcagtgtcgtctacatggcattggacaggacataatgtaaaacataaaagtgcaattgttacacttacatatgatagtgaatggcaacgtgaccaatttttgtctcaagttaaaataccaaaaactattacagtgtctactggatttatgtctatatgacaaatcttgatactgcatccacaacattactggcgtgctttttgctttgcttt

SEQ ID NO: 3288 - DNA, 319 bp, Homo sapiens
ccctttcgagcggccgcccgggcaggtacatttaaaaggtgatgctaatactttaaaatgtttaagatatagatttaaaaagcattgtaaattgtatactgcagtgtcgcctacatggcattggacaggacataatgtaaaacataaaagtgcaattgctacacttacatatgatagtgaatggcaacgtgaccaatttttgtctcaagttaaaataccaaaaactattacagtgtctactggatttatgtctatatgacaaatcttgatactgcatccacaacattactggcgtgctttttgctttgcttttgtgtgc

SEQ ID NO: 3289 - DNA, 657 bp, Homo sapiens
  misc_feature 129, 222, 268, 308, 414, 469, 470, 520, 531, 532, 579, 593,604, 613: n = A,T,C or G
ttccccctttttccgaagcccggcccgccccggggccaggggtaccaccagggccccaaagaaaaaaaaaaaccccgtattcaaaaaatggtaaaattattcaaatttcccccattttaccaagcccangtttaaaaagaaaccaattggggggaaaagacccaaagaaagggaagaatgggccaggttggacccaggaaaaggaaaggggggaaggaaaangggggggaaaaataaatttggggccaccttaaagaaaaaaaggccnggaaaaggaagaaccattattttttggggaagggggaagnaattggggccttaccccccgcccgttacccatttttctttaaaagttcaaaaacccacctttggttggaacctttttttggccttttttaaaattttcccatttgnaaaattggttttccccttgggcccctttccccttttgggaattaattttttgggnnaatttttttaaatttttcctttttttttttttttttcctttcctttaaanaaaagtttaannaaaaggggttaaatttaaaaatttttgggtggggttgggaaattaanttttttttcccaanggaaaaaaaantttaccccncggggaattttaaaaaaatttgggaaatttttccccaaaaaaaa

SEQ ID NO: 3290 - DNA, 361 bp, Homo sapiens
  misc_feature 352: n = A,T,C or G
cccttagcgtggtcgcggccgaggtactttccttcccatcaaccagtaatgagcctcctgctgcccccaccacatccccacttgtgatgtcagcggggatcttggacttgtggcctaattgacaataatgcacctctcccttgccctgctggcatgatgtcagaggagatctagtggacttttaccgtttcccagaagtattgaggccatcttaccacagtgtcagtggataccacatggaggatctacaactctcactttcactcagaatgtatgaggagaccctgcccctccttgagtgtcaatggaacctggacttgtacctgcccgggcggcccgctccgaaagggcnaattccaag

SEQ ID NO: 3291 - DNA, 232 bp, Homo sapiens
  misc_feature 125: n = A,T,C or G
cccttcgagcggccgcccgggcaggtactggtatctgattgttcttacagaaactcaggatgaaaaccgaagaagaggcccggactcatacagagattgaaatgttccttagaaaggagcagcanaaacttgaggagaggctggagttctggatggagaaatacgataaggacacagaaatgaaacagaatgaactaaatgctctcaaagccacaaaggccagtgacttagc

SEQ ID NO: 3292 - DNA, 321 bp, Homo sapiens
cccttagcgtggtcgcggccgaggtacattgtatactgcagtgtcgtctacatggcattggactggacataatgtaaaacataaaagtgcaattgttacacttacatatgatagtgaatggcaaccgtgaccaatttttgtctcaagttaaaataccaaaaactattacagtgtctactggatttatgtctatatgacaaatcttgatactgcatccacaacattattggcgtgctttttgctttgcttttgtgtgcttttgtgtgtctgcctattaatacgtccgctgcttttgtctgtgtctacatacacatcattaat

SEQ ID NO: 3293 - DNA, 322 bp, Homo sapiens
cccttcgagcggccgcccgggcaggtactatgggtgtagtgttactattacagttaatccgtcctttgtgtgagctgttaaatgcagtgaggattggagcactgtccactgagtctctgtgcaacaacttagtggtgtggcaggggtttccggtgtctggctctgatcttggtcgctggatagtcgtctgtgtttcttcggtgcccaaggcgacggctttggtatgggtcgcggcggtgtggttggccaagtgctgcctaatagtttcaggagaggatacttcgttgctgctgcaggatcagtcatggtagattatggtttc

SEQ ID NO: 3294 - DNA, 315 bp, Homo sapiens; identical to SEQ ID NO: 3175

SEQ ID NO: 3295 - DNA, 523 bp, Homo sapiens
  misc_feature 454, 523: n = A,T,C or G
cccttagcgtggtcgcggccgaggtacatttaaaaggtgatgctaatactttaaaatgtttaagatatagatttaaaaagcattgtaaattgtatactgcagtgtcgtctacatggcattggacaggacataatgtaaaacataaaagtgcaattgttacacttacatatgatagtgaatggcaacgtgaccaatttttgtctcaagttaaaataccaaaaactattacagtgtctactggatttatgtctatatgacaaatcttgatactgcatccacaacattactggcgtgctttttgctttgcttttgtgtgcttttgtgtgtctgcctattaatacgtccgctgcttttgtctgtgtctacatacacatcattaatactattggtattactattgtggataacagcagcctctgcgtttaggtgttttattggatatattggatttggntatataccattatttttaatacatacacatgcacgctttttaattacataatgtatatgtacctgcccn

SEQ ID NO: 3296 - DNA, 378 bp, Homo sapiens
  misc_feature 153, 167: n = A,T,C or G
ccctttcgagcggccgcccgggcaggtaccaccagccttgacacagagcccaggggcaacttgtgcttcagtcaacctgtgaattcttgatatttatttctacttgggagcataaaaaacccaaaggtaagtggagaaaacgctctttacctncccacttctttctntggggattctcctttctcttgcattaggccaagagcagaaaatcctggagtccccagaaggtaaggtttagagctgactggaagccagaacaactgccttagaacgccaacgaggactgctacttctggcccccttaagacctcggaggacgggctttggccaaaacacatgggaccaggtgcttcgcccattttattttttaattttttt

SEQ ID NO: 3297 - DNA, 556 bp, Homo sapiens
  misc_feature 134, 249, 284, 442, 464, 499, 503, 514: n = A,T,C or G
cccttagcggccgcccgggcaggtacatctgtattaaggaataaaatgcaactacggaaaatgataaactagatggaggggtgcctatgacactgtaaagtttaacaaggatgttgtagaataatgtgtattgnatgatgctatttctatgtctttgcattaatctggaaagaatgttcctttttttttttggagacagagtttcactctgtcacccgggctggaatgcagtggtgcagtctcaagctnacccgcaacctccgcctcccgggtttgagcgattnttcttgcctcagccgtccgagtagttgggactacaggcatgagccaccacgccctgctaatttttgtatttttagtagagacagtttcaccatgttggccaaggctggtctcgaactcctgacctcaagtgatccatccgttttacctccaaatgcangattaagcatgagccactgctnccacttgagaatgtttttttgaataacctgctttntcanttttaaggganaatgggggttgggaataaaaggcagatcatttttttttaaga

SEQ ID NO: 3298 - DNA, 536 bp, Homo sapiens
cccttagcgtggtcgcggccgaggtaccatttattaacagctttccttggaaactctgatatagagatacctttatatttgtcttctagggagtatattaagtaaaccaaaacatttacttttttggatgcaagatagaaaatgttaacgtttctttgctaatgacattcttttccataaaagtagcttgggtaggtagaggactaatatcacacttaatagtattgctttctggtttctaggaagattgctacatgtgtatatgaagtcctgtagttctccttttaaactgactagttcctactctgcttatgaaatttatagaacatattttagatttatggcaattaaagcaatctaagagcacctaaattttaaactattttaactactcaattcagggagaaatataataagaaaattccccccatattatttggtatatagtctatttaaaatagcatagcaacttatattttatagtaagaattttggctggatgaaaattaatttaaatactagaaacattcatgtag

SEQ ID NO: 3299 - DNA, 522 bp, Homo sapiens
  misc_feature 476: n = A,T,C or G
cccttagcgtggtcgcggccgaggtacttgtgtgggtgtcttaccttacattagaatatcctaggcctttctaattcttcctcttgaattccctgtgtcactcatctgaggtcatctcttggatttaaatacatttggtctgaaattctcaaactgctgaataaaatgccatagtaagtccaactatatggtttcatgtagggtaaagtaaccattgtggaaggattacgataaaactgtgtgacaataaatagaataaaagatggcaaaacaatctgtaaattacaaagtgttataaaaatgcattgaatttctagtgttcttacactttcatatttctcattggcacatcaatcagaccttgccttcctaaagtgggaggaagaaaaaggctgcacctgtctgggctgagggtctgggcagaacactagcaaaacttttaataaatcttcatgtcaccaccccaaactcattanggcccaaacttatttcattatcttcactatccccatggttttcctc

SEQ ID NO: 3300 - DNA, 601 bp, Homo sapiens
  misc_feature 3, 6, 34, 515, 546, 554, 560, 568, 577, 598: n = A,T,C or G
ttnatncgcccttagcgtggtcgcgggcgaggancaagagcaagtctagtgtgagaagcacttttcaggcatcatgtttgctgaccaccctttggcccaaacactcacctcactaagcctagactcaaaatatgagggcactgcaaagattcacagcaaagattcatggcacagggcctagacacagggaggagtctctgtatttgttttttctttgtatttgttttatcaagtgaaaaacaaataaggatctctgcttccatcaacattattcatctttgtttcaggggtccctgtgattttaagttggccaagatgtaactggcataatgaatacaaccaaatgagaaatattacctttttttgttgatgatgtgattgtatacctgtaagagtggaagggactccagtaaaaaactggagtgcaacaatcagtaagaatatttgacaaggctgttggactaaaaaaataaatgttagaaaaaatcagtaagttcttcttttattagccattngttcaaacaaatattttatttaaaacacctnacttgggnttaatnaagcattnaatctgggncccctaagtaccctggccccnggg

SEQ ID NO: 3301 - DNA, 299 bp, Homo sapiens
cccttagcgtggtcgcggccgaggtactttcaagtttttactcaaactcaatataatttcctttagaaaaatgtttttgagaaacacagtattaaatcaagaaagcccttgctgcttttattgtcactaaaatcatatattgttttccaaagaatactgccatttgtttatatttccctacagtttttgtttttgggagttttgttttgttatagtggcagctgaagtgattttgagtgtttgcagcatgatgttaattaaccaaatgtttcaacctggaactttgaacacctgggctt

SEQ ID NO: 3302 - DNA, 344 bp, Homo sapiens
  misc_feature 243, 304: n = A,T,C or G
cccttagcgtggtcgcggccgaggtacactcacacaggtggagagagcagaacaatgaattcttcctgagaattgtagggatttgcagagtggaggtgacatttgagtaggcctttatgagaaggattagaaagagtttgctagtagaaaaccggagtggacgtcctagggactagcttgagcagaggcctggaagcatgacaggttacacagactgctaagtctaataaaccaatccagctntacagcataatgagttttgagaattacagtcaagtatgattaactcatacttcaccacttncaaatgtgttgattatcatcctcttatgctaagctgaatt

SEQ ID NO: 3303 - DNA, 436 bp, Homo sapiens
cccttagcgtggtcgcggccgaggtacagacctacgtgaccatatagactattggaaacacatgcgcctagaatgtgctatttattacaaggccagagaaatgggatttaaacatattaaccaccaggtggtgccaacgctggctgtatcaaagaataaagcattacaagcaattgaactgcaactaacgttagaaacaatatataactcacaatatagtaatgaaaagtggacattacaagacgttagccttgaagtgtatttaactgcaccaacaggatgtataaaaaaacatggatatacagtggaagtgcagtttgatggagacatatgcaatacaatgcattatacaaactggacacatatatatatttgtgaagaagcatcagtaactgtggtagagggtcaagttgactattatgggttatattatgtt

SEQ ID NO: 3304 - DNA, 326 bp, Homo sapiens
ccctttagcggccgcccgggcaggtacgtttaaaaggtgatgctaatacctttaaaatgtttaagataccgatttaaaaagcattgtaaattgtatactgcagtgtcgtctacatggcattggacaggacataatgtaaaacataaaagtgcaattgttacacttacatatgatagtgaatggcaacgtgaccaatttttgtctcaagttaaaataccaaaaactattacagtgtctactggatttatgtctatatgacaaatcttgatactgcatccacaacattactggcgtgctttttgctttgcttttgtgtgcttttgtgt

SEQ ID NO: 3305 - DNA, 431 bp, Homo sapiens
ccctttcgagcggccgcccgggcaggtacattgagtgaaattttgatgtataagtgctggcagccgaaattgccctgagcacaaaatgagctttcctgtttgataatttgcttgattcactatgttgctacatgcagggcactttatgcctgacttatattaaatccagtcacctgcttaatgttagaagggtcataattatatacaagggttttgaacatacagcatgtcaatatttcagatctggcatataaaatatgtatacccattttcaatttaacaattttaaaatatgtttggtaataactttagggttataatacaacacaaaatcattctattttcaccaagaataaagtaagcaaatgtattggggttatgagacaaccatagccccatatattgggacgagcagaggcatggagttatga

SEQ ID NO: 3306 - DNA, 320 bp, Homo sapiens
cccttagcgtggtcgcggccgaggtacattcaaagccctgctccacaccttgccctggccaggtccacctttgaggtgatgacgacagttgctgagaaaagagaaaagaccactggctcactacttgtttctgctgctataatagagaggagaaaatgatgaaatgctctttttaccttcctgtttgaagattgcctggtcataaaagggagtcagaggtctgacttctctatttccatcccttaggggactctttaacaacaaaaagaatgtattacaagtatgtcaagctgataacgcaaggcttttcctcctggaag

SEQ ID NO: 3307 - DNA, 471 bp, Homo sapiens
  misc_feature 315, 347, 404, 429, 441: n = A,T,C or G
ccctttcgagcggccgcccgggcaggtacatttaaaaggtgatgctaatactttaaaatgtttaagatatagatttaaaaagcattgtaaattgtatactgcagtgtcgtctacatggcattggacaggacataatgtaaaacataaaagtgcaattgttacacttacatatgatagtgaatggcaacgtgaccaatttttgtctcaagttaaaataccaaaaactattacagtgtctactggatttatgtctatatgacaaatcttgatactgcatccacaacattactggcgtgctttttgctttgcttttgngtgcttttgtgtgtctgcctattaataccgtncgctgcttttgtctgtgtctacatacacatcattaatactattggtattactattgnggataacagcagcctctgcgtttangtgttttattgnatatattggatttggttatataccattatt

SEQ ID NO: 3308 - DNA, 461 bp, Homo sapiens
  misc_feature 432, 435: n = A,T,C or G
cccttagcggcccgcccgggcaggtactcacttcctcttggtgccttaagagctttcctcaaattgtatttctgagcagggacatttacaagcctgcatggaactgaaggatctcctgtctgaagattctcacaagtaattgatagaatgagatttatttgacaaataacaaaaccatctgccaaatccatgattaaatggcagggactctgggtctcttgtgcttagtgagggaaggaaggaggtggtatgttttcagtgaaacactcactgaatggaactccaggctggagggagagtgaagagggaagagaatacagtccttgctattttcctcagctgattcataatacattaacaccctcatttacatggcctattagaagttatttatattccaattacaggctatttgaatatttgcatttgtantcnaattacagggtttagggaaagctcgt

SEQ ID NO: 3309 - DNA, 256 bp, Homo sapiens
  misc_feature 189: n = A,T,C or G
cccttcgagcggccgcccgggcaggtcatgaactgctgggctcaagctatcctcccacctctgcctcctgaagtgctgggattacaggtgtgagccactgcaccctgtcctgacagtcattttctaagataagcttcacaaagatgaaaataacattctaagatccattatgtatatatcatttcactnggaaggtgaattcctccagtaatcatctattcacctttactttggatcctgatttcatacattgggg

SEQ ID NO: 3310 - DNA, 455 bp, Homo sapiens
  misc_feature 344, 362, 365: n = A,T,C or G
ccctttcgagcggccgcccgggcaggtacatttaaaaggtgatgctaatactttaaaatgtttaagatatagatttaaaaagcattgtaaattgtatactgcagtgtcgtctacatggcattggacaggacataatgtaaaacataaaagtgcaattgttacacttacatatgatagtgaatggcaacgtgaccaatttttgtctcaagttaaaataccaaaaactattacagtgtctactggatttatgtctatatgacaaatcttgatctgcatccacaacattactggcgtgctttttgccttgcttttgtgtgcttttggggggtctgcctattaaaacntccgctgcttttgtctgnggnctacatacacatcattaatactattgggattactattgggggataacagcagcctctgcgtttaaggggtttaatggatatattggattt

SEQ ID NO: 3311 - DNA, 319 bp, Homo sapiens
cccttagcgtggtcgcggccgaggtactgttttccacagagtgggaagataagaacacatgtagagatgataaaatgtcattggctccaagagacaagcttccgaaatccatggtggttgaagaacatcaaagaggagcaattatttcagtcattagggcagttccacctgttctaattgaacatttttaggatgtagaagatgcatcatacattggtatctattcagaaggtggggacatctgctgtctgtcatgtatctgggagatgtttatctcaacaggaggcaataataatatggtaaaccaaacctaatatta

SEQ ID NO: 3312 - DNA, 429 bp, Homo sapiens
  misc_feature 343: n = A,T,C or G
ccctttcgagcggccgcccgggcaggtaccttccccaaggacaagcagtgatggagaactagtctaagaagatgccagtcaggctctgaatggcctaggtaatagtggagaaccagcctggactgggggatatccaagacatagcatgaatggggctagcagagtcctgactcatattttgaccattaaaaaaaaaaaaaatcctggctgagtgtagcggctcatgcctgtaatcttagcactttgggaggctgaggcaggtggatcacctgaggtcaggagttcaagacctgcctgactaacatggtgaaaccctgtctctactaaaaatacaaaaaattanccgggcgtggtggtgggtgcctgtaatcccagcaactcaggaggctgaggcacgagaatggcttgaacctgggatgcggaggttac

SEQ ID NO: 3313 - DNA, 670 bp, Homo sapiens
  misc_feature 330, 344, 378, 380, 404, 414, 421, 426, 442, 446, 451, 454,458, 461, 467, 468, 469, 470, 478, 479, 483, 486, 487, 490,495, 498, 500, 501, 503, 504, 505, 506, 507, 511, 512, 513,514, 516, 519, 520, 524, 525, 528, 529, 530, 531, 541: n = A,T,C or G
  misc_feature 549, 553, 554, 555, 556, 560, 561, 563, 564, 565, 566, 567,568, 569, 574, 575, 576, 581, 582, 584, 585, 586, 587, 588,589, 590, 591, 592, 593, 594, 595, 609, 618, 625, 628, 646,654, 655, 656, 657, 662, 663: n = A,T,C or G
ggtactcttcttagaatatataatatcaattaaatatagtaattctgtatagttgtaaatgcttaacattattaatctgttgattctttggagacttaaaataattctgcaaggtatgttacgcagacattgatccttatttttagaatgaagaaactgaactgacattcacagcagttaaaagcttgccagatggccaggcacggtggctcatgcctgtaatcacagcactttgggaggcccaggtgagtgggtcacctgaggtcgggagttcgagaccagcctgaccaacatggagaaaccccgtctttactaaaaatacaaaattancctggagtagcggngcatgcctgtaatcccacttcttgggaagctaananaaaattgctggaacctgggggggnaaaaaattgnaaggganccaantccccccattcacttngggnggggnaanaaanccncccccnnnnaaaaaaanngggnttnnganccccnacngnnannnnnaaannnntnttnncccnnggnnnnttttttgggnaaaaaaanttannnncccnngnnnnnnnccccnnnggggnnannnnnnnnnnnngggggggggggggnaaaaaaaanttttttnaanaaaaaaaaaaaaaaaaancccccccnnnnttttnnaaaaaaa

SEQ ID NO: 3314 - DNA, 297 bp, Homo sapiens
cccttagcgtggtcgcggccgaggtaccacttctatcttcagttgggcttggctgaaggagtcataacttctttgcctattgtcattgggcatttgcttccatttttcttttcttagcctttaatagttggggtccatatatgcactttactcatcccttctccaataatgggtccggttttcaagggcatggtcttaaattgtaaaatggagttacagcatatccaagcgaataggaaaatgaagaaaatctcaccctacaatttgttatttatctagttctttctctttctccca

SEQ ID NO: 3315 - DNA, 470 bp, Homo sapiens
  misc_feature 404, 450, 456: n = A,T,C or G
ccctttcgagcggccgcccgggcaggtacatttaaaaggtgatgctaatactttaaaatgtttaagatatagatttaaaaagcattgtaaattgtatactgcagtgtcgtctacatggcattggacaggacataatgtaaaacataaaagtgcaattgttacacttacatatgatagtgaatggcaacgcgaccaatttttgtctcaagttaaaataccaaaaactattacagtgtctactggatttatgtctatatgacaaatcttgatactgcatccacaacattactggcgtgctctttgctttgcttttgtgtgcttttgtgtgtctgcctattaataccgtccgctgcttttgtctgtgtctacatacacatcattaatactattggtattactattgnggataacagcagcctctgcgtttaggtgttttattggatatattgnatttgnttatataccattat

SEQ ID NO: 3316 - DNA, 323 bp, Homo sapiens
cccttcgagcggccgcccgggcaggtacatttaaaaggtgatgctaatactttaaaatgtttaagatatagatttaaaaagcattgtaaattgtatactgcagtgtcgtctacatggcattggacaggacataatgtaaaacataaaagtgcaattgttacacttacatatgatagtgaatggcaacgtgaccaatttttgtctcaagttaaaataccaaaaactattacagtgtctactggatttatgtctatatgacaaatcttgatactgcatccacaacattactggcgtgctttttgctttgcttttgtgtgcttttg

SEQ ID NO: 3317 - DNA, 386 bp, Homo sapiens
cccttagcgtggtcgcggcccgaggtactaaaaactagtaatgcaaaggcagcaatgttagcaaaatttaaagagttatacggggtgagttttacagaattagtaagaccatttaaaagtaataaatcaacgtgttgcgattggtgtattgctgcatttggacttacacccagtatagctgacagtataaaaacactattacaacaatattgtttatatttacacattcaaagtttagcatgttcatggggaatggttgtgttactattagtaagatataaatgtggaaaaaatagagaaacaattgaaaaattgctgtctaaactattatgtgtgtctccaatgtgtatgatgatagagcctccaaaattgcgtagtacctgccc

SEQ ID NO: 3318 - DNA, 316 bp, Homo sapiens
cccttcgagcggccgcccgggcaggtacatttaaaaggtgatgctaatactttaaaatgtttaagatatagatttaaaaagcattgtaaattgtatactgcagtgtcgtctacatggcattggacaggacataatgtaaaacataaaagtgcaattgttacacttacatatgatagtgaatggcaacgtgaccaatttttgtctcaagttaaaataccaaaaactattacagtgtctactggatttatgtctatatgacaaatcttgatactgcatccacaacattactggcgtgctttttgctttgcttttgtgt

SEQ ID NO: 3319 - DNA, 469 bp, Homo sapiens
  misc_feature 230: n = A,T,C or G
cccttagcgtggtcgcggccgaggtcatgctattttgtcttatgaaaagagataaattaggtaggaaaggtaagcatcaccatcttatagaagaagaaacctagacaaagtgaattttccaattgcccaagattgtgtctcttatttttggagttggaaatagaacccaagtctcctaatgctcagtccggaaagcattattactgtattgtttttaattctcccatatntcaatcacttatgataaatgaaagttataaggagaaacactttaaaatatttaaatgcttcagatgtttaaaaatattttttaaggtagtgatgagttttcaacaatatctgataaattgaaagccttaagagccagattctattttccacagaaagaaaaaaacctacatagccccagaccgttatcttcatgtcagtttagatgatctcttaaatgtaacataaacccttaaaatct

SEQ ID NO: 3320 - DNA, 315 bp, Homo sapiens
cccttagcgtggtcgcggccgaggtactatgggtgtagtgttactattacagttaatccgtcctttgtgtgagttgttaaatgcagtgaggattggagcactgtccactgagtctctgtgcaacaacttagtggtgtggcaggggtttccggtgtctggctctgatcttggtcgctggatagtcgtctgtgtttcttcggtgcccaaggcgacggctttggtatgggtcgcggcggagtggttggccaagtgctgcctaataatttcaggagaggatacttcgttgctgctgcaggatcagccatggtagattat

SEQ ID NO: 3321 - DNA, 588 bp, Homo sapiens
  misc_feature 537, 565: n = A,T,C or G
cccttgagcggccgcccgggcaggtactcgtggcccatgttggttcaatttttatagcttcagttatccaaaggtgacacagaatacccataatgatgactgggcatgcgttttacctttgggcagacaccccatctttttattctgaaatttaaaataattcagattcttttggggaggggattagtttaaacattaataaacagaatataaacaggcagatggatgggtagataagcggtattcgggaatttgagggcttgggacagaaatagattccttttcctttttaggttttctttcctaacttgctgcttccttctatcaaccttatctggtctgtaagaacctgggaaaatataagaaactgatggttgtggggagggaatagaagaagactgttctaggtcttagaagatgcattaattaaaagttgctaaggcttgtaattaagaatcaagacccttgtaggtgtaggtgatagacctttgtgtgattttctcagttgccccaaattataccaaatttcaacctcantaaagaattctgaagttttacaaagttngaagaagagagaaaagggaaaag

SEQ ID NO: 3322 - DNA, 414 bp, Homo sapiens
acgcggggagaggacacaactcaaggagagaaaaggacagtttgggacaacaggtgggtgggcagtcttgaaaattggtagccacagacgcccagcgagagtgaagaaggacaggtggcttcattctgtggttgatgattccctcatggaagttcttgttcagggaagaagaaaaaaggacatctcattaaagtgccaagatacaatgccggctcctacgtgcaccttgttttggaccctgaatgtaaatgatcactttcagcgtgttttaaaaagcattcgtgatttcagcgatcctttctgaaatgtgtaaaaataccatcgtctccaacgataaaaacaacaacaacatctgccgatggcaaaatatagtcaactttcagggccaagtttttggaagcagccaatgcgttt

SEQ ID NO: 3323 - DNA, 555 bp, Homo sapiens
  misc_feature 487: n = A,T,C or G
agtcgtcgacccacgcgtccgcatttattcatttaaaatacatttctagaacacctgtaaggtgtcagtcagcctctctgctggaggcacgtggtctggcagggagaaatatgaaggtgcacagaagtacctgacggatacagccctgctagagtgtgggcaacagacagatcagggtggattgccttctacacgactgcgtctgacccagcttcacacagctctgggggcttggggaatattccagagagaaagggtgcaggaactataaagacaggaaggtataagagacaaggtatgggatgaaaactgcacatgcttcagttttgtgacctgaaattttaaataggaagaggatggcagtaaaacaagacgatcaacctactggctaaaattctggctgggtgtcgcatcctaacacttgtaaggcaggggcaggtggatctctgtgagttcaaggccagcctggtctacaaagtgagttcanaacagctagggcttttacacagagaaaccctgtctgaaaaaaaaagcctaatataaattgcaattctt

SEQ ID NO: 3324 - DNA, 488 bp, Homo sapiens
ccctttcgagcggccgcccgggcaggtacatatacattatgtaattaaaaagcgtgcatgtgtatgtattaaaaataatggtatataaacaaatacaatatatacaataaaacacctaaacgcagaggctgctgttatccacaatagtaataccaatagtattaatgatgtgtatgtagacacagacaaaagcagcggacgtattaataggcagacacacaaaagcacacaaaagcaaagcaaaaagcacgccagtaatgttgtggatgcagtatcaagatttgtcatatagacataaatccagtagacactgtaatagtttttggtattttaacttgagacaaaaattggtcacgttgccattcactatcatatgtaagtgtaacaattgcacttttatgttttacattatgtcctgtccaatgccatgtagacgacactgcagtatacaatttacaatgctttttaaatctatatcttaaacattt

SEQ ID NO: 3325 - DNA, 286 bp, Homo sapiens
  misc_feature 76, 105, 168, 171, 183: n = A,T,C or G
cccttagcgtggtcgcggccgaggtacctttgccagtttctggcatattaacagctgagatcagataagtgaacancgatagaggtagtgaggtttaggattcangtctgccaccgggagcgcacctctgggctcaggtctctcatttgtaaaatgggacatttaggncanatcagcattttnaaaagtgtgacatgttaagtaaataagatgattttatgtggttgacagatgaatgtattacctttagtggttatatgtttattttcatggttctttttattta

SEQ ID NO: 3326 - DNA, 479 bp, Homo sapiens
actgaattaatacttacttacaaaattggtgtttgtatttttaacaagaagatacatttttttgagttttaatttttatctccttagaaggcagtccaaaaacatattagaattatgatgcataaggaatttaattacagtttctaagtcttacaaagtaaaaagtattaattggtgttatttgttgaaatatgtcataaagaacaatatcctaactgggggtatggcttaagagcaatccgatttaagaaaaagacgaaaagcaggatcttagggtatcgtaattttgtaaatttttgtttcttggaatatttagaaaaattgattttaaaatgtctcttggaatagctgggctagaaatggtggttcaagggtgcaaggagattgtagaatcctctaaagggagccgttttttactacaatggcagggaatagatgccttattagatgggagctattgactccgtgttaaaaacctt

SEQ ID NO: 3327 - DNA, 318 bp, Homo sapiens
ccctttcgagcggccgcccgggcaggtacattgtatactgcagtgtcgtctacatggcattggacaggacataatgtaaaacataaaagtgcaattgttacacttacatatgatagtgaatggcaacgtgaccaatttttgtctcaagttaaaataccaaaaactattacagtgtctactggatttatgtctatatgacaaatcttgatactgcatccacaacattattggcgtgctttttgctttgcttttgtgtgcttttgtgtgtctgcctattaatacgtccgctgcttttgtctgtgtctacatacacatcat

SEQ ID NO: 3328 - DNA, 733 bp, Homo sapiens
  misc_feature 543, 545, 554, 596, 624, 660, 670, 703: n = A,T,C or G
cccttagcgtggtcgcggccgaggtactgtctgtcaggtatcccactaaaatcccaaatgtttctcaaaagtcacatctaagtgcaatataaatcaaaacgaaaggtttgtctcaattatttccacatttatttatcttacaaacctcagttattaacagaagttaacagaaatcttaacagaaatattatttgctatgatttatattagattgagattcagaaaattttaattctggcattgttttccaaataagcagctgtatttttctatatgaacactaaccgtctcagttttctcaccggtaaataataaaattggactcaatgtaatcccttaagttattcttagttttagatagtgctcagtattccattttcagctcagtcatgtagaaaggtgaaaagaggttaactcctgcaaccacaacaagaaattggagaccaggcatggtggctcacgcctgtaatcccagcactttgggaggccgaggcgggcagatcacgaggtcaagcaagatccgagaccatcctggctaacacngngaaatcccngctctacccaaaaatacaaaaaattagcccgacctggtggcnggcccctgtggtcccagctactcgggangctgagacaggagaatggcatgaaccccaggaggcngagcttgcantgagcccaaaatcgccccctggacttcagcctnggcaacaaaaccagacttgtctcaaaaaaa

SEQ ID NO: 3329 - DNA, 410 bp, Homo sapiens
ccctttcgagcggccgcccgggcaggtacattgtatactgcagtgtcgtctacatggcattggacaggacataatgtaaaacataaaagtgcaattgttacacttacatatgatagtgaatggcaacgtgaccaatttttgtctcaagttaaaataccaaaaactattacagtgtctactggatttatgtctatatgacaaatcttgatactgcatccacaacattattggcgtgctttttgctttgcttttgtgtgcttttgtgtgtctgcctattaatacgtccgctgcttttgtctgtgtctacatacacatcattaatactattggtattactattgtggataacagcagcctctgcgtttaggtgttttattggatatattggatttggttatataccattattt

SEQ ID NO: 3330 - DNA, 399 bp, Homo sapiens
cccttagcgtggtcgcggccgaggtactcttcagtaatactccacttgcatgcagcagcttacgtggagagaatggctgatgtattgggcattgtgagaaaaaaaaaactgacgtttatactttcctcaaattttggcagatttccccaaatataaacaatggagacaatttattcacacaatcatttcctagaacttcataaaataatgaagtaacaccgtaatggtgaaggttgtggtgaggaaaagaaggttggggaagaaaggaatgcttctttttattttctacccactcgacctcaccaaattactagggctcaattgagcccttagcaaacaaaacaatcaaaaatgtattttatgcaaatgaagctctttttagaccaaagtacctgcccg

SEQ ID NO: 3331 - DNA, 250 bp, Homo sapiens
  misc_feature 100, 102, 103, 104, 105, 106, 107, 108, 109, 113, 115, 118,119, 120, 123, 124, 126, 127, 128, 129, 130, 131, 132, 133,134, 135, 138, 139, 141, 142, 143, 150, 152, 153, 154, 157,159, 160, 162, 166, 168, 173, 189, 194, 198, 210, 215: n = A,T,C or G
  misc_feature 217, 222, 223: n = A,T,C or G
cccttagcgtggtcgcggccgaggtactttttttttttttttttttttttttcttttttttttttttttttttttttttttttttttttttttttttttntnnnnnnnntttntnttnnnttnntnnnnnnnnnnaannannnaaaaaantnnnttntnntnctgngntttgnaaaaaaaaaaaaattncaccntttnagggggggattngacangngccannggcaatgatgaaatgagaatctacccc

SEQ ID NO: 3332 - DNA, 446 bp, Homo sapiens
  misc_feature 1, 26, 28, 46, 55, 220, 383: n = A,T,C or G
ncctttcgagcggccgccgggcaggncnctggggataccaagaaanagtgctggnaaagtcctttatcaggccagccggcaattttggttagttcttactccttttatggcttgagctatctccataaatgccatccttcctggtaaccataggaacagtgccactgtgatttcttgaagtggaagacagcctagtgctaaagacatctaccaaggaaantatgaacataattcaccctaattattatatatgatatctcacattgtgtattagctgttaatgcctctgtgcctgaatgaagaattagatctgtgacctttcctcccagatgattctgatggatgatattgaaagatattcttgagatttgggggaaagaaantaatgaaggcaataaagtattttaattttattcatgatggaccttatgagtgaaagcttttta

SEQ ID NO: 3333 - DNA, 316 bp, Homo sapiens
  misc_feature 158: n = A,T,C or G
cccttgagcggccgcccgggcaggtacaaaacagggctagattaaaaaaaaaaacaaaactattagggtctcatcaaaatgacaagatgacagggctccaaccagctcaagtcttcactccccattgggaggaagactttccatcacaagcctaaatnacccagcaggaaaccagcccagccctgtcttctcagtgaggccttttctaacacgggtgcttatctccatctcaggatcaaaggatctattgcttctggcaaaagggcaaaagcaccgcttttactgggaggtacctcggccgcgaccacgcttaagg

SEQ ID NO: 3334 - DNA, 320 bp, Homo sapiens
ccctttcgagcggccgcccgggcaggtacatatcttttatatgctcatatgctcctgtagtcgttagttttaattcttaaaaatgtgataattgtaataaacttttattatatcttatgtaaaataattgtgtgtctgagagagactaaaactcatgccctacttctcatgatttctctttctcttttgtttccctttcacagacagaagaattatagcctcagtatttatgtatatttttgaaagagtgaagtggggactgagaaggtatatctacatgctatgccttttgatagcattctgtttcaaatctccttttc

SEQ ID NO: 3335 - DNA, 480 bp, Homo sapiens
cccttgagcggccgcccgggcaggtacatttgttacgtggtaggccttggaggttaatatatttaacattacagtgaatatcatcagtgatccatggagaatccattgttcaacagtttgtgattttggggaagcatacatgtgaatagaatatgctgtaggatggagcagggagcaagtcacttaggtggcaagtgtcttccatcactttttggaataacttagctacttgcccactatcaatgaatatcagatgaattacagagctacactgctagattttataaccttatagaaattataacaggaaggcttgcatgaatatggggtttgtaaagctcttcagatgtatctttcatacatgtcaaatatgaacagttatgggaactgttatatttaagagacatgcaagagaaataaagtagaaaataaaaataaaaattgtgccttcagaaggaaagtaacaatatgataactgga

SEQ ID NO: 3336 - DNA, 271 bp, Homo sapiens
  misc_feature 6, 20, 24, 28, 227: n = A,T,C or G
cccttnccagcggccgcccnggcnggcncgcggggacagtccttcattctcagtaaacactgtgtgatacaatcagcctgccgcagatgctccttattctattactgcggcataatcatttgggtaaatctgtgaaactaatgcaaaatctcacaaggctattcagaaatatggattgaaaatggaagactggaaaaatagcttgtcatagcccattagcgactacncgctgcgatttaagaaactatttttcaaacgtttccattttgca

SEQ ID NO: 3337 - DNA, 440 bp, Homo sapiens
  misc_feature 300, 347, 354, 390, 395, 416, 419, 430, 433: n = A,T,C or G
ggtacaataggggatgacatttttgatgggatgccaaatgtttagcttctctgagaggcaacatttaagcaggaacctcaatgaagtgatggagcaagtgatacagatccctgagaagaggccactgagggggcaacatgcagagccctcatgggagtaggcttgatggaatctgggaaaggcaaggaggttggaattgctggagcagaatgagaaaggggtgagtttggagtagtagccaggaccagacagaggctttggattttctaagagggaagggaggatgttgggagggttcangatgggtatagacctgatctgagtgataaaaagattacactagttgntgtgtanacagtatactaggaaaggttaaagtggaagcaaaanactanttcaaagaccgttgcaaaggntcnggttgcaaagntcnggtgaaa

SEQ ID NO: 3338 - DNA, 401 bp, Homo sapiens
  misc_feature 181, 282, 287, 293, 296, 309, 314: n = A,T,C or G
cccttagcgtggtcgcggccgaggtaccactcagtttcttagctaatgtgttgtaacactattcttatcccttacaactgtctaaaaggattctttttttagactttctctgctagttaccccaaaatattctgtggtagtgagttccaaaaactaattacatgtcacataaaaacaccgnccttgtatctatttcaagttggccatacctcactctttcttctagcatagatagtttacggatgttcctaggatttccgattcactagttcctgctattgngggtngctaanttntattttgattttngtttncttttctaaacatggctgctactgctgttcatatttgcattttgtttaccagactatcgatatcagaattgtgctctgggggcggct

SEQ ID NO: 3339 - DNA, 207 bp, Homo sapiens
ccctttcgagcggccgcccgggcaggtacgcgggggttcaaattaaagggctaaaatactatacatgccacctttgcattcctttgagttttgtttgttttgttctgtttgtgtcactacaaaacttatgttgcccttatatagcacatttttccttattgtgtccttttgattaattttaatgaccatttgttctcttttaaatca

SEQ ID NO: 3340 - DNA, 552 bp, Homo sapiens
ccctttcgagcggccgcccgggcaggtacaatgggcaaggctataagagccagcaacaggtcatgtggcctcaaggggctcgtggccctacgaggccacagaagccagtgaacagagacaaagattgcttcatggacacctgtaaacatccacagggaagcttggaaccacctggggaaatgaaccctgagcaccacaaagtggaggtgacacctgtggaaaatgagtatataaatttaaagatctctaagctgtgctcgcaaatcaaggcagaactcagcacacagtaacacggacaacactagcgttcaatgacaggtatttttgagaggattggtgctggatatgtatctctaacactttgaggatgttcttttgtgggtaacatgatccttctgtctgcctatggaggctgtgtcagaggtggacattttccaagatttgggcttattttacctagaatttctttaagcatcttaatttcgtttgtaaaatgggaactatactccataactcacagggctgtcatgtgatcaaagtgaaatcatggat

SEQ ID NO: 3341 - DNA, 297 bp, Homo sapiens
acgcgggatgatacattattagcaaaggtctgaatataatgctttaatgattattacctttatacttttgcctttagaacattcagttgaatgttctgcatatttctaagtatgtagaaaatattttacaaattaaagatttcatagcaagacaactttcaacaaaaaagaaaggtttatttttttcctttctttattaatttttggaataatgaattggtattactgtttttcagccaaatccacatttcaaaagtagaagttaaatatcactttaatcccaatagaattttgggg

SEQ ID NO: 3342 - DNA, 369 bp, Homo sapiens
acccaaagatgtttacttgagagtagtttattcctttcagctcctcagctctatacattcttccagggaaccgtagatcttggtgcctatttgagccccaaaggatcagttagttttacaaaggacaatcgtattctctgtcacatcctttttggccatgcctcaaaagcagtcccacaatgtaagctactgctcataggctcaatgcagtccaccttcaaagcaagagaaataatttcatgagtaactccaactgccgccttgttatagggaaggcatcatgttggagcctcccagctcaaattctcacagtgaacaatttaagtctaaagttcaaaagtttcaatggcatttggtggaaaaaatatc

SEQ ID NO: 3343 - DNA, 529 bp, Homo sapiens
  misc_feature 175, 183, 226, 314, 393, 405, 517: n = A,T,C or G
cccttagcgtggtcgcggccgaggtacagttaattttttaaagttttaccattactatattccaaagaaaattctaacgtagaaataagggtctgaatatgaggacatgttcttcacgttggcctcatcataattttcctctaggtaggcaggaatgttgatggcctctactaantctcctancttccaggagggtgagttttaaaacatggttttgtaagagganaactgaacaaatgaccaagtcatgagtttcttctgcagagattctccatcccactcagaaatgacactgaaaatacttcttggggcangaggagagaagaaagctatctaagaaagaggaagatttacatttagatattggcagagacaggccgaaacagtttcttnccatttttgggnttgccctatgtgtagaatagaatctacccaactatgttttacctttcagatacacatacaacgggggccccattcttgtcattgtcttcttcgggacaaaagtatcaatggntgggagaaagaa

SEQ ID NO: 3344 - DNA, 464 bp, Homo sapiens
  misc_feature 99, 279, 300, 303, 315, 331, 344, 352, 356, 371, 377, 380,383, 393, 403, 417, 422, 428, 431: n = A,T,C or G
cccttagcgtggtcgcggccgaggtacttatcaaaaatgcttcaaaaatatttactgagtgagtcaggtaacaaaacgattaaaatgcttagccatcancgtatgcctctattttttaagggctttttataagcaaatacgggtagaaaaacattggcagtttgagagtaaaataaacatatataactcaccaactgactgatcaggataattatctgggagtctctgggggtaaaaagcccccagtttgttccattttacaactcccaccatggcctnagtcaggccaccaacatgatncanctaaatgtggantttgaaagggtgtccnctggaacccatcntatagtantccngccaacgggatccantagtgnaancanccccaaaacncagatattgntaaaaggtccaacnttttnaacaanggnggggttggggatttaaaaaccttgggttaaaaa

SEQ ID NO: 3345 - DNA, 464 bp, Homo sapiens
  misc_feature 282, 319, 327, 333, 348, 360, 362, 411, 419, 423, 437, 444,447: n = A,T,C or G
ttaatgttactaacaacagatcagcgacaacaaaaacctcccaacattccaatatttaggtatttattggtgtccgagtttcctggcagtgtatgaatacatgggtcgaaatgaactggcctcatattatttcagggtagcatggctatgattattaaacaccacagacacccatttgcttatttttgatttttgacattctaagacatagactttttaaaaaatcttcttaaggggacaaatctcctaatttaagacctagataaacccaagatttaccanttttttgaaaacagtgatgttacttaaattcacaagnaaacaccnattctntttcagatataattncttcaatgggantncgaggagggggtttaaagttttacaaaaattggaaaaaaataacctggncaattaanatanctgggcttaccttntttcaanaanaaaccaatttttttttt

SEQ ID NO: 3346 - DNA, 465 bp, Homo sapiens
ccctttcgagcggccgcccgggcaggtaccaaattatgaagaggtggcgttccacactgtgaaatctgagggcttttaaattagtatttttacttatgcaactcctttttccccacgcttaacagtgaacacaggaaatatattttcactcgttcagtcccttaatactgagcatctcttctgtgccaagcattgtcaacatctagagacacaatgccaaattcgaacatggtccttgcccttaaggaacttggtctaggccaggcgcggtgcttcatgcctgtaatcccagcactttgggaggccaaggcgggcggatcatgagttcaagagattgagaccatcctggccaacacggtgaaacaccatctccactgaaaatacaaaaattagatgggtggtggcacatgcctataatcccagctacttgggtggctgaggcatgagaattgcttgaacctggga

SEQ ID NO: 3347 - DNA, 447 bp, Homo sapiens
  misc_feature 287, 296: n = A,T,C or G
cccttagcgtggtcgcggccgaggtactgttccaggtgttttacctgtatttacatatgtgcctatgtttgctaatttaatgtttagataaacctataaggcaaatattattctttctcttttacaggtgaacatgctgaagctctaggagctaaagtaatttattgaaggttggaaagttagaatggaccagagtccattttgttttaattacaccaggggttctctctgaggcatcaaaatcttgatggatatagggcatgggggaagtgatattaaaacagcancagtagtangcaacaacaacaacaacagcatacattgtatgatcctgcctaatttcttccaacaacaacaacaacaacatacattgtgtgatcctggctaatttcttccaacaacaacaacaacaacatacagtgtatgatcctgcctaatttattcccc

SEQ ID NO: 3348 - DNA, 499 bp, Homo sapiens
  misc_feature 397, 420, 427, 449: n = A,T,C or G
ggtacttctgtagaaagaccaggtttctggagtggtggagtggtggagggcaagttactgtgaattgaaagggaagtgagaaagtgtagatagttggctagactggcttctttcaaggaaggggaggaagaagaaaccacactgaggtaataggagttttcacggagtcagatttcttaagcaatgagcactttggagaggtagcagacttgtgctgtaggatgtagaaaatgggaaaagaaagagaaatgcagaggtcaaagaaaaacatcaccagtttaaaaatgttggtctctgtggtggtttaaaaatattttaaaattatttaacatatgaagaattatttaacatttctctcttcaagaaatatggccaggcctggtggctcacacctgtnatcccacactttgggaggctgangcaggangatcacttgagttcaggagttncagaccacctggccaacatggtgaaacccctcttttcttaaaataaaaaa

SEQ ID NO: 3349 - DNA, 506 bp, Homo sapiens
  misc_feature 450: n = A,T,C or G
ccctttcgagcggccgcccgggcaggtactggcattgatatgttaatgaaaaaacttttggagctcctttacttcatagaaacagctaaacaaagaatatttttaaaatatataactctgaaagctgtatttttgcttctcttttgtcctacaaattgttattgccatttgcatttaggttgagttttaattttaagtcttgtcattactcttaaaaaatgtaaatggtatattccagcatttagaacatctctcaaagttctattttctgtttaaagactatttctccagttgctttataattccgtcatacaggctcaatcttctatgacatttaacacgtcacttgcaacagactttcacacttattaatagaatcttcccagacaaaccaatgtgtagtccatattctagttatccacgtgtccaatactgttaaaggtgacatanggagtcagctgttttctttgaggaaaataaaaaacttccccaaaactaaacttaat

SEQ ID NO: 3350 - DNA, 124 bp, Homo sapiens
cccttagcgtggtcgcggccgaggtacaaaaggatatattaagaaaagtgtttcccttccactccagacaccctccccaaagcaacctattaacaatgactatttgtccagtttctttgcataa

SEQ ID NO: 3351 - DNA, 469 bp, Homo sapiens
cccttagcgtggtcgcggccgaggtacatttaaaaggtgatgctaatactttaaaatgtttaagatatagatttaaaaagcattgtaaattgtatactgcagtgtcgtctacatggcattggacaggacataatgtaaaacataaaagtgcaattgttacacttacatatgatagtgaatggcaacgtgaccaatttttgtctcaagttaaaataccaaaaactattacagcgtctactggatttatgtctatatgacaaatcttgatactgcatccacaacattactggcgtgctttttgctttgcttttgtgtgcttttgtgtgtctgcctattaatacgtccgctgcttttgtctgtgtctacatacacatcattaatactattggtattactattgtggataacagcagcctctgcgtttaggtgttttattggatatattggatttggttatataccattattt

SEQ ID NO: 3352 - DNA, 667 bp, Homo sapiens
  misc_feature 386, 397, 413, 421, 425, 429, 434, 437, 443, 459, 488, 489,502, 526, 527, 528, 538, 541, 542, 546, 562, 566, 576, 581,582, 583, 587, 591, 601, 608, 618, 621, 633, 637, 642, 646,647, 657, 658: n = A,T,C or G
cccttagcgtggtcgcggccgaggtacagttccatctttggccataaggagacaatgatgtcaagaggctaaggccatatgatctgtaggtgaaaaacctgggatgagaatcaaggcctcaaactttttccactacatcacagatttaggagcagttagagggaaggcttcaatctggagaacactaacaggctctagagattattgggtcatggtggctgggacagaaataaggattcacagaaagatgtttgttgtcaatgttcttttacagtaaatgttcttttgagattttgcttgataaaaaggttgagcagaagtgaaaaaaatttttttctttttttctttctttttcttttctttttgcttttttttttttaaaacantttcctttttnttccccaggctggagngcaagggngcantttnggttnacnaaaacnttcccccccagggttnaagcaattttgcctaacctccccaagtannttggattacaggnggcccccccccccccccgggaaannntttttttttnggnntttnaaaaaaaaaggggggncccncttttggggnagggnnntttnaaanccccaccccngggggancccccccaanggngggggaaaaaangggntaaancccnnaaaccggggnnaaaaaaaaa

SEQ ID NO: 3353 - DNA, 510 bp, Homo sapiens
  misc_feature 463: n = A,T,C or G
ccctttcgagcggccgcccgggcaggtacatatacattatgtaattaaaaagcgtgcatgtgtatgtattaaaaataatggtatataaacaaatacaatattacaataaaacacctaaacgcagaggctgctgttatccacaatagtaataccaatagtattaatgatgtgtatgtagacacagacaaaagcagcggacgtattaataggcagacacacaaaagcacacaaaagcaaagcaaaaagcacgccagtaatgttgtggatgcagtatcaagatttgtcatatagacataaatccagtagacactgtaatagtttttggtattttaacttgagacaaaaattggtcacgttgccattcactatcatatgtaagtgtaacaattgcacttttatgttttacattatgtcctgtccaatgccatgtagacgacactgcagtatacaatttacaatgctntttaaatctatatcttaaacattttaaagtattagcatcacctttta

SEQ ID NO: 3354 - DNA, 386 bp, Homo sapiens
cccttagcgtggtcgcggccgaggtacttgacgttaatgccgatgataattcatctgatctacagaatattcactttaatagagagatgagagtctgaaatgaccagaggaaaatagatactgaagccaatatagtcttgataccaaaataaaattaaaatgagaaactaacatgataggttcaaggccttttgggagcctgttttctttgccagatttcacattcttacagcttcatggtctttttcttctaacaaattaatcagctgagagaagctgtctttcagtgcatccatgtcatccagtgagcagggctgtagaatccagcgttttccacgtgcaagtggttcaagttcaaaatattttttgatctctttgacctgccc

SEQ ID NO: 3355 - DNA, 318 bp, Homo sapiens
cccttagcgtggtcgcggccgaggtacatttaaaaggtggtgctaatactttaaaatgtttaagatatagatttaaaaagcattgtaaattgtatactgcagtgtcgtctacatggcattggacaggacataatgtaaaacataaaagtgcaattgttacacttacatatgatagtgaatggcaacgtgaccaatttttgtctcaagttaaaataccaaaaactattacagtgtctactggatttatgtctatatgacaaatcttgatactgcatccacaacattactggcgtgctttttgctttgcttttgtgtgct

SEQ ID NO: 3356 - DNA, 321 bp, Homo sapiens
cccttagcgtggtcgcggccgaggtactccagcctgggtgacagagtgagaatatgtctcaaaaaaaattatcagcagaagataatatagaccccaaggctaaagggaaccattatcatctctaggcctgaaagcctaggagagggtgctgtatggagaggactgcttctgacagagggatatagccaaccttggtggcctaatagagaggaaagtagggaatagcttcaccttccttctctaatcttctgctagtatccctattaatttagcctaattagaagctggaaggtaggagagcctccatgggcaaaaagctgt

SEQ ID NO: 3357 - DNA, 475 bp, Homo sapiens
  misc_feature 234, 440, 449, 455: n = A,T,C or G
ccctttcgagcggccgcccgggcaggtacatttaaaaggtgatactaatactttaaaatgtttaagatatagatttaaaaagcattgtaaattgtatactgcagtgtcgtctacatggcattggacaggacataatgtaaaacataaaagtgcaattgttacacttacatatgatagtgaatggcaacgtgaccaatttttgtctcaagttaaaataccaaaaactattacagngtctactggatttatgtctatatgacaaatcttgatactgcatccacaacattactggcgtgctttttgctttgcttttgtgtgcttttgtgtgtctgcctattaatacgtccgctgcttttgtctgtgtctacatacacatcattaatactattggtattactattgtggataacagcagcctctgcgtttaggtgttttattgnatatattgnatttgnttatataccattatttttaa

SEQ ID NO: 3358 - DNA, 516 bp, Homo sapiens
ccctttcgagcggccgcccgggcaggtacatatacattatgtaattaaaaagcgtgcgtgtgtatgtattaaaaataatggtatataaacaaatacaatatatacaataaaacacctaaacgcagaggctgctgttatccacaatagtaataccaatagtattaatgatgtgtatgtagacacagacaaaagcagcggacgtattaataggcagacacacaaaagcacacaaaagcaaagcaaaaagcacgccagtaatgttgtggatgcagtatcaagatttgtcatatagacataaatccagtagacactgtaatagtttttggtattttaacttgagacaaaaattggtcacgttgccattcactatcatatgtaagtgtaacaattgcacttttatgttttacattatgtcctgtccaatgccatgtagacgacactgcagtatacaatttacaatgctttttaaatctatatcttaaacattttaaagtattagcatcaccttttaaatgt

SEQ ID NO: 3359 - DNA, 309 bp, Homo sapiens
ccctttcgagcggccgcccgggcaggtaccatgtccagccaaggaagtcctagtgttgcgctttctacgacgacagtcagttcagttgctgtgcaggctggggactccaaaatcgttatagctgtcataaaggtaagctaacaacttccttttttctgtgcggctgtgggcttctagctgtgtgttgaaaaccctaaagaacattccatgcaatcggcaggacacagcatagagaagacaacgcagcaagcactcttactgctttctaaaatgggctactaagagaaacctctacaagtttcagcagtt

SEQ ID NO: 3360 - DNA, 415 bp, Homo sapiens
  misc_feature 335, 370: n = A,T,C or G
ccctttcgagcggccgcccgggcaggtacgcggggattcagataaggaggagttggctggagtgctgccctgccttggtatttggtgcacagtcctgggaggatcctggtgctgggacagtcctggttttgtagattcctagtgcctagaggacacaactcaaggagagaaaaggacagtttgggacaacaggtgggtgggcagtcttgaaaattggtagccacagacgcccagcaagagtgaagaaggacaggtggcttcattctgtggttgatgattccctcatggaagttcttgttcaagtttgtctgttgctactttgaaatttattgatnatttgtattcttgttcttttgacattattcttttnaatttcaatgccactgcttttgtatgtaaattaattcatttttta

SEQ ID NO: 3361 - DNA, 310 bp, Homo sapiens
ccctttcgagcggccgcccgggcaggtacatttaaaaggtgatgctaatactttaaaatgtttaagatatagatttaaaaagcattgtaaattgtatactgcagtgtcgtctacatggcattggacaggacataatgtaaaacataaaagtgcaattgttacacttacatatgatagtgaatggcaacgtgaccaatttttgtctcaagttaaaataccaaaaactattacagtgtctactggatttatgtctatatgacaaatcttgatactgcatccacaacattactggcgtgctttttgctttgct

SEQ ID NO: 3362 - DNA, 324 bp, Homo sapiens
cccttagcgtggtcgcggccgaggtacctaactcatgggattgaataagttaatgtatgtgaagcacttaggacacagtgtttaccatcatcactattattcctattgtaatcttgttcagaggtgagggtgcctgaattaaggcagtagcagtgaggatgatagaaagaagtggccagatggaggctctacacaggtgatagaattgacaggaatttatgattaattggatgtcagaagggtagataaaagagaataaaaagttgagggtgattgcaggttttggatttcatcagcttgagtgaatggtggtttcagtccctg

SEQ ID NO: 3363 - DNA, 286 bp, Homo sapiens
  misc_feature 258: n = A,T,C or G
cccttagcgtggtcgcggccgaggtacaaatatttggcaaaggaatgaaaaaagttagaaagttgtctgtctgtgggctaggctctgcctgcaagatacttacaatctaggtcagaggttcctaaatccttctcaatgccgtttgcactggccctgaggaaagtgtgaaaatgaagactattgtagagtcttacatgaagctaaatttgttcatttatatcacttctcttttattatgagatcatgtcctctgcaggntttttggtattaaaatgtcttttatgaa

SEQ ID NO: 3364 - DNA, 296 bp, Homo sapiens
cccttagcgtggcgcggccgaggtaccctaaaacttaaagtataataataataataatttcctcattcatacatcctgtatattaagttgccatattaatttattgaaagattttttagtatactttcccacagtttagcattcttctaaggctccttacttctaacacaaagtccaagctctttaatctgacatttaagtttttccaccaacaggacccaattgatctcgtaatcttgtcttttttaattcttgataatcagctttttccactaaaaagctgaaatgattaagga

SEQ ID NO: 3365 - DNA, 450 bp, Homo sapiens
  misc_feature 10, 13, 29, 181, 193, 201, 222, 246, 248, 279, 303, 304,317, 324, 352, 367, 393, 401, 411: n = A,T,C or G
cccttagcgnggncgcggccgaggtactntttaggttttctttagaagaaggagatatgaagaagcaaaagaagaataaagaacaacccattttcatttgcttttaggaaactctggtaagctcatggctcacataggatttaagtgtttgatccacatgttcaagcttctcacttttctnacctcacttggnataggaangtatagcctgccgtctccttnagacctgcacatagactaacccangnccactagatactagcctttgtggaaagaccncctggaaagtgattctatgcttgnntgactgttcatgngtttaancaaggacttcacattgccacattacttncctatttcattggcncaaaagccctaattccctttttttcntgtccacncaggggcaantgccagaaataagcttgatgaatttatggccttttgggg

SEQ ID NO: 3366 - DNA, 310 bp, Homo sapiens
ccctttcgagcggccgcccgggcaggtactaaaacccctaactcaggaataaggaccatcctcctcatggtttccactgtgctctggcagcagagaaatggcctgaccctgtttgcccccactcatgtgatgccacctgagatctaccccatttctatgaatgtctggcagattcccacttaaaacagctgctggaataaagatcacattgatccattctgatggcaggtggggaagcagagacccataacaagcaccactccagcagaccagtcagggggatgaagatttctgcttacctccttagtgt

SEQ ID NO: 3367 - DNA, 474 bp, Homo sapiens
ccctatgagcggccgcccgggcaggtactagcagtagttaaaattactgagatattttcaatgaaccttcaaaaaagaccaacaaatctatttttctgtccaatgtaattttgatacttaagtttataactgtgttaagattaagtcaaactccttagaaatgttcagagaaatattagtctatatttcttatattgctcaagttctatttctataagtgataaattatacaaaatcagatatatggctcagcctgcagaagtttaagaaaaatgtttaaactaattttcatctttattaagctttcccttaagcaaagatgagcaatcatcttaactgtatcaccaaggggctataagatatttctcagatttaataaaatttcaatacctgatttaaccaattaatgccaaaatcccattcctttcctgttttcattacacttatatctactttatcaggactggcaaaaac

SEQ ID NO: 3368 - DNA, 331 bp, Homo sapiens
tctgcagaattcgcccttcgagcggccgcccgggcaggtacgcgggcactgcactccagcctgggtgacggagcaagaccctgtctcaaaaaaaaaaaaaagaatgaatgaaataatgcaaacaaaactaaaagcatttgtgcttcaaggacactcaaaaaagttaagagaatcaactgaatggaaggaaatatttccacatcatatatttgaccttatatctagaatacataaagaatacttaacatctcaataataaaaacacaacccaacttaaaaatgggcaaagagggctgggcgcagtggctcacgcctctaattccaggacttt

SEQ ID NO: 3369 - DNA, 316 bp, Homo sapiens; identical to SEQ ID NO: 3318

SEQ ID NO: 3370 - DNA, 656 bp, Homo sapiens
  misc_feature 514, 590, 609: n = A,T,C or G
cccttagcgtggtcgcggccgaggtacattcttacaacttggaggataaggactacacacattcatctacccatacacacagtgaaacacatgtgtagcttaaataaaacagacattctccaaggatttctccaattataataattgattgggcttcaaaaactcaaggttgaatttcagcttctaacttgatgagaatggctgtcttaattctgtcattttttgttaattttacttccaggaagtcagggctgtgatttgaggcttttttctctaagcttctgtgatggagatgaatttattaaagtggggccataatgtctttttgagcaacattaaaactgagtcatcagaattaggaagtatcagaagtcaagatcaattttcaagaacaggagcataaaattcgaactcaatctgtgttaacattaagagatttagaagctcattcagactgataactaatgaataatatagctttcatttgttggagactttatgtgagccagccagntatacatgttattttataatccccacagtaacccctggcaagggtagttatcaacctctatttttgcaggtttganggaaaattggaggcttaanaaaatatgcccatttaaactttttggcttgcattaaccaaaactacc

SEQ ID NO: 3371 - DNA, 431 bp, Homo sapiens
  misc_feature 392: n = A,T,C or G
ccctttcgagcggccgcccgggcaggtacgcgggaatggtgtgaacccgggaggcagagcttgcagtgagtctagatcgcgccactgcactccagcctaggcgatggagcgggactccatctcaaaaaaaataaataaataaaaataacaaaaataaagaaaagtatttgatacatcaaaagacatgacatcttggaagtggattccagatgattcagcgaagcttctctaggtgctgtaaaaaataatgaccttactccttaattaaataagcactcaaaattttattccagtagagagaaagcaggggctggaacttgtttgcttggtccctttctggccgtgtaaaaatgggcaaaacttggcatgaccacatctgttttttaatttcnaaatctcttaattttacagttcatttcaaacaaattttt

SEQ ID NO: 3372 - DNA, 513 bp, Homo sapiens
cccttagcgtggtcgcggcccgaggtactgaaaatacagatggaattttaagcaaattcattatttacaaagcaaataagtgagtcctggtatctgacaatgggattcaccataaaattaattttaaaattactaggttttaaatttttacccgaaaatgatttgatgcatttttgcattaaaaactgtatttattacatgaagtataaataccccaggagattaaatccatcctgccatattcatgggagcctgatctagcccgaggtatgatgcccagcaggacacagtggccataggagaaaggttagcagccattcagagcagtcggtgttgtgctggaggcgttataggtattgtgagtatctctcttcatggtaagtagccataatataatgactcataggattcttctctccaaagaacactgtgctgagagtcaagttatcggctctggttttaagtcatctaatttactctataaatttcctacaaaattagaatgtacctgcc

SEQ ID NO: 3373 - DNA, 422 bp, Homo sapiens
  misc_feature 383: n = A,T,C or G
ccctttcgagcggccgcccgggcaggtactgggcagatctggcttcacgtaaaaataagagaaattaagaccaataggtaggccacaggatctagtttttagcccagagaagaaagctttagttaatttcaaagtcacatagacagaacagacttcagagctccaatttttaggaaacaagtaggcaaaaaaaagaggttctgggactcaggtatataagaagggtgagtcaagtcacagctttgaaattcttccattgtctctagctttctcttgactctcacccactaatgaagatctctaacctccctaatttctagcccaaaatatagatacacattttcagactccatgtgctctcttgttctcttcaaccacacctntaaatgagaaccagggcagatataatcacttctattcat

SEQ ID NO: 3374 - DNA, 246 bp, Homo sapiens
cccttagcgtggtcgcggccgaggtacatgctagtttatgttttaggagtttagtttctatttctctgtttagctaattctctatcttttggccactccttttttattcccctcaaacagtcgctttctcttcccatctctatagcaacttgtaatatactataggaataattatggcacatgcaacaatgcaacaatttaatatataagtgcattacatttcttatttttatttttcttaaaaaa

SEQ ID NO: 3375 - DNA, 567 bp, Homo sapiens
  misc_feature 4, 13, 14, 17, 21, 29, 35, 40, 50, 58, 174, 185, 223, 274,304, 537, 552: n = A,T,C or G
cggnctcatgttnnatnattntaatgatncatttnataanaaagtggctnatctgganagattcacttgtgaaccttgatgatgttttatttatctttgagcgtgctttacttccccttgccagtgctgttgttttgatagacaggggagtattgttgtcaggttgtgtagcantcatagaccanaagtcagcaaaccggcttgcaggccacattcagtgganaccatttgtggtctggagaacctgaaatttttattattttgcccttttcanaaaacttgccaaaccttgtcattatactgnaaacatggtctgagactcagttttgcgcacaaattttgttaagctttaaaatggttttaacctcttgttgtcagttggcacccttcttttaagataccagtataggaatttatttaaatataaacagattatgaaaaaagtgtatactcatttcaaaacacccaggatgcccaacacttgattttaaaacctgagtctccctccatttgagtctgctcctatagggtaactgntaacattttaagtgngtaaactcttgaaac

SEQ ID NO: 3376 - DNA, 313 bp, Homo sapiens; identical to SEQ ID NO: 3282

SEQ ID NO: 3377 - DNA, 503 bp, Homo sapiens
  misc_feature 206, 441: n = A,T,C or G
cccttagcgtggtcgcggccgaggtaccataaaaatataagggaaaataagctttcctagaatttttcagtgttctagtttttaaacagtgatgttttttattaacctatttcatccattcaaagacaggcctttctccacaccacattttcctctaaaatcatgataacacttttaaattgatggtgtcttccagtgtgtatcanccagatggcagtgtgttacagttccaggaaaactcgttcacatcttccgtaagatcaagaaggctctggcatcagataagatcaaatgttgtctttctgttttaaatatgtgccgcaaagagatttgcttacaatctattgagaaagctaaaacagagcagacattgtcctgttgcggggtagatgaatagcctaagaatagtttagacaaattctgaaaacgaatttaccttanaagatgttcatgttagatctggtaaaagtaacatgttatttttctgtcaagccctttttgta

SEQ ID NO: 3378 - DNA, 625 bp, Homo sapiens
  misc_feature 321, 328, 356, 357, 507, 525, 538, 590, 602: n = A,T,C or G
cccttagcgtggtcgcggccgaggtacccaaattccgaaggccaaatatgtcaaaatgaacacaggaaaatcaaacagacttctatgacaactcacagcagcccaacattcctgttagtagcaaggagctgaccaacaagcaatgcaggtaagtaaatcatacagattgcaagagatgaacaccttttggcatagctctctctgctgcctcctaaggttagtcctaaagactgaagaagacagtgctgggaaaagcactgaaggtcccatcccaaacactaggaataagggaaacaaaaagaggagcatcattatcgtggntaaggtnaaaggaaacaagcagtaacgagccatanntcaccagcaataaaacagaaacgcattgataagaaatcttcggaataagattgcccagtggagagctccaacaacttcaaagggcctgtgagatgcacagctgactggaagtcagctcttcgtctctacttgcccgccagctaagcccanagctccagcctccctgangctcttcccttcnttgtaaaaagcaggaatgagtatgtttttcttcaaaacctcttctactttangattctggcttncagtgagatcaatcctattccta

SEQ ID NO: 3379 - DNA, 495 bp, Homo sapiens
  misc_feature 368, 444: n = A,T,C or G
cccttagcgtggtcgcggccgaggtacagtcagactgtgacccaccatcagacagggacagctatgttcgcgagctgatgacttacatcgaggtcgattcctatggtgaatgtttacgaaacaaagacctccctcagcagctgaagaatccagcctctatggatgccgatggcttttataggatcattgcacagtataagtttatcctagcttttgagaatgcagtttgtgatgactacatcactgagaagttctggaggccactgaaactgggggtaagtccctgtatattacggatcccccagcatcacagactggcttccaagtaacaaaagtgctattcttgtatcagaattttctcaccccanggaactggcaagttacatcagacgactggattctgatgacagattgtatgaagcctatgtacaatggaagctgaanggtgagatctctaaccagcgacttctgacagctctcaaggaaccgaaatgg

SEQ ID NO: 3380 - DNA, 413 bp, Homo sapiens
  misc_feature 316, 351, 370: n = A,T,C or G
cccttcgagcggccgcccgggcaggtactatcactgaattgaatgagattttagtccaaaccaaaaagtaaatattttttaaagtaaaatatattaatggaaggagagtttgctataaatgattgaattaatgtgacagtttaatttatgaatttttatagacatagtaaatgccttctcaaattatataaatgatttcataagtggtccttatgtgcaaggtaaaatgactgctttatctctctgatataaataaatgtgaaaaataactttgatacactttttatttgtttggatgattatttctaatcctggngagtgaaaatgccatctggtgtgtccttttaactnttctattatctcttaaatntaaaaactttttcatttaaatgactatttccaggcaatctgag

SEQ ID NO: 3381 - DNA, 399 bp, Homo sapiens
cccttagcgtggtccggccgaggtacaaggcatttttgctaactgtaacttcccacttaatcaacaaaaacaaaaacactcatttctgaacattcagtgcattcatgattaatcttaattacaccacaaaggtatttttcaatggtgattttgcgggagtggggtaacagtttcgaaagcaacattgtcagaaacatagttgattttaaaggttctttctggtgaccttgacttctgctttttagaagaccttacacagagttgtatttatttctcctggaatatttcaagcaattcagagtgaaagggtatacattccaatttgcgtatgagataaaaatttaggttacattgagaagctattttctttagttacagggaaaaaaattgtagggcttt

SEQ ID NO: 3382 - DNA, 301 bp, Homo sapiens
  misc_feature 231, 269: n = A,T,C or G
cccttagcgtggtcgcggccgaggtactgggttttgcccttgtgtgctcaaacatttctaaggtgtcccaagccctggaaatagggaagggaagggtggaggcttggatctgaggtcttgctgtccactccctgcctgcctgcccgcatctcaggcatggccaacagcagcccgttgaggggggcttgtctggacagttgcgtgtgatggtgttgagccatcacagggcanaggtcacttgtgtcacccccatagtcattgggttgcangccatggaggagggacctccactccatggggc

SEQ ID NO: 3383 - DNA, 319 bp, Homo sapiens
cccttagcgtggtcgcggccgaggtaccagaagggttacatgataagtagtaacaaaagcaatctaagaaaaggggataggaagtatatataatgtggggatggtttgtgcttttagataggataatgaacgatggtctcattgaggttacatttgcacaaagattggaaagggatgaagaagccacctaagagaaggaattccaagcacagtgaacagaaacctcaaagatactgagggttggagcatatctggtatagcggagaaatagtaatataaagtctagtgtggcaggagaaatgtgaacaaagagaaaagt

SEQ ID NO: 3384 - DNA, 564 bp, Homo sapiens
cccttagcgtggtcgcggccgaggtacaatggtgtgatttcggcttactgcaacctctgcctcccaggatcaagcgattatcctgcctcagcctcctgagtagctgggactacaggcatgtgccaccatgcctggctaatttttgtatttttagtagagatggggttttgccgcgttggccaggctggtcttgaactcctgacctcaggtgattcacctgctttggcctcccaaagtgctgggattacaggtgtgagccaacgcgcctgacctacaatatgtatttctgagaggacatagcaagtcaattgtatgatctctaatataatttctaatcagagacagaaaacttatttaacaattttcctttaagtgtggttaaaaaactgagtggtttttgggaaagatattatacttgagaaaggacttgaattagttgggttgcctttgttgtcttcatgtctgataagttatcttactgtgcctacctaatgaagattaacattacttatgaaatgtttgattttaacagaaacatttgaccatttactggttattttattt

SEQ ID NO: 3385 - DNA, 599 bp, Homo sapiens
  misc_feature 549: n = A,T,C or G
ggtacgcgggttaacccagacatctccatgcctcctctgtattggaggtggaattaggccagatccaacatggcatgtgagattgaagcttggaggacatgtcgctttgcaggaaacaatctggttaagcagaggacccggccatttattggtgggttctggcgctttcaagaatgtgaagaatgagtggccaaagttaacaaaggagcatgcacagggatgggggtcacacccactttgtagagtttaagaatagtaagggacctacgggaacttctcaaggtaataggtggcatgtcttctttccttggcatgacacagaatgtaaagataatgggaggatgaacctccaagcctggaactttgggagaagcttctcctcttggaagtgccagtacagaaaagttcccaaatagaacagattccttcattccacctgaattcagagagagatcctgtggacacatgtgcctctccatcagagactgctatccagacattcatcttcccctaaaaatgcacttctgctgtgactgcgggccaatgttnccaggataaaacagggtgacatccaactgtacttgcctcaacttgccttt

SEQ ID NO: 3386 - DNA, 488 bp, Homo sapiens
  misc_feature 433, 441: n = A,T,C or G
cccttagcgtggtcgcggcccgaggtactgaatacattacagtttcctttggttgttcctgctttagtaggaagttatgaagatatttaatattcaaaatcatttatccacagtcctggccttggggaaatattgcattttatcaaatcagctagctgccctgctcagaatcagacatcagatgggagcaagtagaagcttatttttatatttgaaatatttcttaagtaaagctaaaaaaataaaggcttcactgctacataaagtgatataggttttatcattcaaaagcacagaagtaagaagatattggaaagcaggcttaatacttgcttcctgagttctttctatatatttctaaattatgtaatggatggtttatcctaaactatttttctaaatcataatggccggcatatttttatttatattntatttaancgaatagagtcataacaaatgaacacattaataaaaatattcaatga

SEQ ID NO: 3387 - DNA, 314 bp, Homo sapiens
ccctttcgagcggccgcccgggcaggtacaacgtgggcaagcatctgtgcatatgaaatgctgtttttctaaaagatttctcacattggcaaactgagagattttcttctggaacacaggaaagattatattaatgcttatagccataccatgtctgaatatgggaggatgacagacacagaacgagaccagatagaccaggatgcccagatattcatgaggacctgttcagaagcaattcagcaactacgaacagaagctcacaaggagatacattcccagcaagtgaaggagcacaggaccgctgttttgga

SEQ ID NO: 3388 - DNA, 402 bp, Homo sapiens
ccctttcgagcggccgcccgggcaggtactctctatttcccagtcacgagagtgtaaaggcagggtcctaggaggttttttgtcaggctggtctcctcctctgcccctgcagtgagagcctacattggtctgagaagccagggatggtctgttatggatcatattgctgactgtctctttaaaatctctcagcctgttggtgctgctggatggtttggaggcatttctaggagcctgcttctctttcagtgtttctccttcactgtggtatcccgaggcctggggctcatcgcctttcctcctaacccgaccagagctcctcttgcgctctatcagtgaccctttcttggatgtgtgtttctgattacattcactatcagtcaggtgtcctgaatcttcact

SEQ ID NO: 3389 - DNA, 629 bp, Homo sapiens
  misc_feature 342, 408, 481, 488, 519, 578, 593: n = A,T,C or G
cgccagtgtgatgggatatctgcagaattcgcccttagcgtggtcgcggccgaggtacaatggtgtgatttcggcttactgcaacctctgcctcccaggatcaagcgattatcctgcctcagcctcctgagtagctgggactacaggcatgtgccaccatgcctggctaatttttgtatttttagtagagatggggttttgccgcgttggccaggctggtcttgaactcctgacctcaggtgattcacctgctttggcctcccaaagtgctgggattacaggtgtgagccaacgcgcctgacctacaatatgtatttctgagaggacatagcagtcaattgnatgatctctaatataattttctaatcagagacagaaaacttatttaacaattttcctttaagtggnggttaaaaaactgaagtgggtttttgggaaagatattatacttggagaaaggacttgaattaagttgggttgncctttgntgtcttcatgtctgataagttatcttactgngcctacctaatgaagatttacattacttatgaaatgtttgatttaacagaaaacatttnaccatttactggttntttttattttaatatttcaagctttggggtattttt

SEQ ID NO: 3390 - DNA, 401 bp, Homo sapiens
  misc_feature 142, 284, 368, 369, 390: n = A,T,C or G
cccttagcgtggtcgcggccgaggtactcctcaaggctggagaagctacttggttgggttgtggcctactgtggtgccattgatttccccaaacattaagtccttgctgagcctcagccaaaatcaacagccgtcatgtctncaattaccttggagcccaagctgccacgggggaaacaggggggtcacattcagccttacttggctccttaagcagcgacactatctgtgactaagcaagtgactggtgcgatgggggaggagggatgtaatggtggagctgngaaaacttgcaaattgtggatcaccaaactttttaatcaatcttagaaggaagccttttttttttttctccctaagttattttnnaaagtgcccactgggttgtcntttgggggttt

SEQ ID NO: 3391 - DNA, 316 bp, Homo sapiens
cccttagcgtggtcgcggccgaggtactccaaccaacaaatgtagacagaccataatcagtcacatacataattgtgggttctaaaatatcattttgtctaaaaaaaactccaacgaaacatgtaaaaataagattttggataaattaactttgacgacatttgactaacattatctcaaaaataattctacaggaatcattttatgaaaaaaatatacaatccatattggtttaattatgaaattttgactcaacgaaacttaagaaacgagccaacattttactcatggtctctagaggcatctccttattact

SEQ ID NO: 3392 - DNA, 322 bp, Homo sapiens
cccttagcgtggtcgcggccgaggtacagcaattaaaggttattttatttctccaaacttaagagaaatagtatattctataggttaaaaatgtaaggtctgccgtcttatgatagtctcaaattaaaaaaaaaacaggccaaaactatcacatatttaatatatttcactcctagttgtgcaaatctgaggcttatccaggtccactaccctttgctcattgtctctcaaaaagcatttaggtcagacagagaatatgaacctttttactctgccttctaataaaaagttacacagggaaagaaaacgttatgtacctgcc

SEQ ID NO: 3393 - DNA, 397 bp, Homo sapiens
  misc_feature 193: n = A,T,C or G
cccttagcgtggtcgcggccgaggtacaacgtgggcaagcatctgtgcatatgaaatgctgtttttctaaaagatttctcacattggcaaactgagagattttcttctggaacacaggaaagattatattaatgcttatagccataccatgtctgaatatgggaggatgacagacacagaacgagaccagatngaccaggatgcccagatattcatgaggacctgttcagaagcaattcagcaactaccgaacagaagctcacaaggagatacattcccagcaagtgaaggagcacaggaccgctgttttggatttcattgaagattacttgaaaagagtatgtaaactttactcagaacagaaaagccatcccagttaaaagaatggtggataaga

SEQ ID NO: 3394 - DNA, 332 bp, Homo sapiens
cccttagcgtggtcgcggccgaggtacgcgggatagatttatatttaatatgttatattgggaaaaattaatatatttttcaatgctctttgagccacacatactcaaaattgggttttatcagccgtttattacactgtgcctaagtccatagtaatctgcagtgaatcatttagactggaaaaaatagcttaagaaacatgactaaatcttttgaagaaatacatgaaagcaaaaagtattctaataggatttcttatagagtcaacataaaagatgcattaaaaatcgaatagtcttggtttcaaatactgtgtgatggcagaaaactc

SEQ ID NO: 3395 - DNA, 278 bp, Homo sapiens
cccttagcgtggtcgcggccgaggtaccagattgctgccacattgctagatgtgatcaggtcaggggaggaagagaggtgtccttccttgtatgtctatgtctccctgtgaagaaagttttctgagaagcctgcagagagttactcctcatattcccgcagccagaatcttgtcaaatgtccctgcctaacccaatctttggcaaggagaaatgcaacaccatgatcagcttagatgaaccaggatgaactcacagaaatgtggaccagatttgcttt

SEQ ID NO: 3396 - DNA, 371 bp, Homo sapiens
cccttcgagcggccgcccgggcaggtacgcgggggggtgagaagtgtgtgcttcccttcctgggaggtgggcacctggggcacttggagtatctgaggagctctccaaacatgagatttttgagctccaattgcagcagatgaatgtttcatttcattcaacacattctaaaacatcaggagatctcaaatgtgcgtagaagagacacttacctaccgggcttgcacagccctgcccttcacccgttctcacacatggctccttcctacccgtccctccatttttcccaccccaagtgattttgaagcaagtcccagatatgataaaagataaaattaggctgggcacagtggctcacagcactttgggag

SEQ ID NO: 3397 - DNA, 531 bp, Homo sapiens
  misc_feature 355, 362, 385, 421, 431, 457, 465, 477, 497, 503, 507: n = A,T,C or G
cccttagcggccgcccgggcaggtacaacgtgggcaagcatctgtgcatatgaaatgctgtttttctaaaagatttctcacattggcaaactgagagattttcttctggaacacaggaaagattatattaatgcttatagccataccatgtctgaatatgggaggatgacagacacagaacgagaccagatagaccaggatgcccagatattcatgaggacctgttcagaagcaattcagcaactacgaacagaagctcacaaggagatacattcccagcaagtgaaggagcacaggaccgctgttttggatttcattgaagattacttgaaaagagtatgtaaactttactcanaacaganagccatcccgagttaaaagagtngtgggataaggaaaaagattatctaagctggaaccngaaccaaatnccaagaccaggagaattcacatcttntgggaaangtttcacagatnctttcaaaagacttctgaanaaaacnttcncctgaaaaacgttcagaaaaaaat

SEQ ID NO: 3398 - DNA, 438 bp, Homo sapiens
  misc_feature 132, 144: n = A,T,C or G
gatatctgcagaattcgccctttcgagcggcccgcccgggcaggtaccattttttctgcttattgcaccctcatttctaatttgtttataatttcatgagatgttatcttcttcacattatacattttattngtttttactttnacctttactcaggatgtataatcatgataattcagtttttatagttccaataatgtcaattactcagcttaatgcttgtccatgctggactacccatggctaaagcaatattttcgatgtctcttcctaaatgtgaatgggagctcatgccaggatgtcttaaattggttcttaatggtttaaatgggaagctcatttaagatgctaagaaagtatcttgccctaggacaagactgagtccataacagtaaaacaaatctgctatagaagttgttgtatttccccaatggatgg

SEQ ID NO: 3399 - DNA, 646 bp, Homo sapiens
  misc_feature 473, 537, 548, 614: n = A,T,C or G
cccttagcgtggtcgcggccgaggtacgagaaaagtgacttaacatccaaataaagaaaaatagttagccaatccattcattatgttgatatgatcaggtctccaagatgcatttaatcaatatattctgccttgattagccatattgaaatacttgaaaacataacctacaatatgaaaatcagacatacttataaatgccaatagcttttatttagagtcaacaagtgatgaaaaagctcttacttaaataaattgactttgagaacaagaatgcgaacagaaacataattcgttcattgtataattgtttttccctgctgtggacattagcctttggcatatggtctttgaccataatctatgggtagatatagccagggcactggaggaacacgaaggtgaattccagttgggtaacactggagaattccagttaaaacaagggtgactaaaatctaaaatacactgtnacatagaccaaaagaattcttattgtagattaaatgtatgtagaagatatagaaggattattgngtctggttcanaatgtaatttcatgccctgagaatttcctttgaaggaaaaaatgggtctgggatccccattagccnaaagcccctggttttgctggccagtttaatta

SEQ ID NO: 3400 - DNA, 631 bp, Homo sapiens
  misc_feature 335, 413, 488, 539, 545, 565, 566, 587, 590, 605: n = A,T,C or G
cccttgagcggccgcccgggcaggtacacctctgattctcactagttgaatgcaagaacttgaaaggttcaggtaagtgttttgaaaaattttgactttccaaacttttgccacttgctatctgaaactcaggaatcaaaaaataccgacaggcactgttactttcaaaattctttctataagttgagaatgggacagatttgcagagcaagggaaacttgaacagttacttctagtggtaggaaatgaggtggctaggatattacccagctggtgggtgacttgggcagtgtgttcctgctttcagtggttagcctttagcaaatctgctttanagtgagagtagagggcaggctgttgtattacagtgctcttgtttttgtaaaatttaattcactctactggtattttgnctccttgggtaaaggggtatttaatttttcttcattttttaataatatataacaagtcagtgaaaagaatttggntttcaaaaatgtcatccaaagcaaattttacaggttggttccctgggtatnaaatgnctcaacaaattctcttttanncatttaaaatgggttaaaatnggnaaaaccggggtgtanaacatggtggaaaaataaaatttatt

SEQ ID NO: 3401 - DNA, 525 bp, Homo sapiens
  misc_feature 366, 478, 490: n = A,T,C or G
ccctttcgagcggccgcccgggcaggtaccagggaccactatttaagagacatgaaaagaaatccagaatccccaagtgtctgtattgctgggggtgatcatggactgttattgacctcttggtgtttggaaggctgcttttagatactcctgaatctgtttaccacataactacatgtattacatatttcatttgattactttcttagttatggttttcttttcttctttttggagatggagttttgctcttgttgcccaggctggagttgcaattgcgcgatcactgcaaccttcacctcccaggttcaaacaattgtcctgcctcagcctcccgagtagctgggattacaagatgcctgccgncacgcccagctaatttttgtatttttagaagaagacggggttttcaccatgttgaccaggctggtctcgaactcctgacctcatgatctgctcaccttggcctcccaaagtnctgggattacangcatgaagccactgcaccttggccatatttttttt

SEQ ID NO: 3402 - DNA, 316 bp, Homo sapiens
  misc_feature 145: n = A,T,C or G
ccctttcgagcggccgcccgggcaggtacttcctccattcagcaccaaagtctcaggggcctacctgtcactcctacgggcactcgacaatggcatgggtgacctcaacaatccgggggggctacgggcatttcagaataccacncgtggagggaggtatacctcaatatttcttttttttcttcaagctgatataacttgctgttccctttgaagaaatatgtgccatttttctaaaaaaatttttaaaatagttcacaaaattagaaaagcttaacattttttcagcactattcttatgtaagactgagaataa

SEQ ID NO: 3403 - DNA, 569 bp, Homo sapiens
cccttagcgtggtcgcggcccgaggtactcaagtcagtttgcctctcgcagacattcaagtttatttaggtcacagccttatatgtagtgaaaagcccttatatctgttttttcatgcaaaaacctctctcaaaggccttgttttccagctaatcactctcactgtcatcttctgaccattagaactcttgcctctcctggggccagtagccatcttatatcctaacccccgacttctccatcttcctactttccagtggattctgtttaagatttcatcctttttaggtcagcagcccgctctctgggtctgtcatgatctttgctctctgcacaattttcaggtagaaaactctagggcagagtttctctgcaatttggtgtattagatctcagaaggctttaggggtaacacaggaaatgttggtgaccagatttgcgcataagcattatttgcacataagcattatttggtttgggccagatttgcacataagcattattttgtttggcccacaattgtattttcaaaaatctagaaatttttcataatacagattcttgggctt

SEQ ID NO: 3404 - DNA, 539 bp, Homo sapiens
cccttagcgtggtcgcggccgaggtccaagtgggagctgaaatagagccagtgttctattctctaagccttagcccctgggtctggggctgcatcacccagaggaagaagttctctttctctgattagaccatccagaggaagttgccttaattaaggtattacaaatgtgccagaccgcgctactagtggccatcccgtgagatttattgaatgaccatactgtcttctacattaagggttactttcaggtattggaacagccattgccaacatcaagatatggactgttttataaggtaatatggcatcactatggtaggaaggctgaaaaaaaggaggatgggctctttcaacacactcctggtggcctcctggtttccgtcagcagggtatatttggccacaaggattctttcatttcagtaagaatggattttttttccctgcatttttccttaatacccttggaaccaccagaagagaaaatcttccaaaatttttgaaaactaatttatttcctgaccaaaaaattaattct

SEQ ID NO: 3405 - DNA, 364 bp, Homo sapiens
  misc_feature 284, 332, 347: n = A,T,C or G
ccctttcgagcggccgcccgggcaggtacgcgggtttccactttgtgagaaggacaatctgcctttgcatgtttatttcttcctcgttttagggtcagagtaggcagatattggtatcatgtatcaattattgttaactggtcttctgcagctagaacagaaagaaatacattgacttatctctatttgctaggtcttgtgctgagtcatgttgcattataccatttagttcttttgttgagctcctttatttccattttgtagatgaggagactgaggcttanaggtagtatggtgcacctaaggtcaagcagcatcaggatttgtacctngggcccgcgaccacnctaagggcgaaattcca

SEQ ID NO: 3406 - DNA, 410 bp, Homo sapiens
  misc_feature 379: n = A,T,C or G
cccttagcgtggtcgcggccgaggtacatcaccctgctgagggacatccaggacaaggtcaccacactctacaaaggcagtcaactacatgacacattccgcttctgcctggtcaccaacttgacgatggactccgtgttggtcactgtcaaggcattgttctcctccaatttggaccccagcctggtggagcaagtctttctagataagaccctgaatgcctcattccattggctgggctccacctaccagttggtggacatccatgtgacagaaatggagtcatcagtttatcaaccaacaagcagctccagcacccagcacttctacctgaatttcaccatcaccaacctaccatattcccaggacaaaagcccanccaggcaccaccaatttaccagaggaacaaa

SEQ ID NO: 3407 - DNA, 312 bp, Homo sapiens
ccctttcgagcggccgcccgggcaggtacttcttattagtgaataatgattctctagtcataataacttagacattacatataaattttaagttaaaactactataacaatattgggaaaaatgaaaaaagggagtagatagtgtaaaagggccatatccttctctaccacagcaggaagtgaacagataacgtctcaaatcaaaaaactgtagtataggctttccaccccagctctgccccgcccatatagatacctattacagaaggagggaaatagcttttaaaaaaggagagttaaatgaaattgcct

SEQ ID NO: 3408 - DNA, 295 bp, Homo sapiens
ccctttcgagcggccgcccgggcaggtacattccaactgccctgcgtgcagaaacatcctgattgtcttcaaactgcagatctgcaatgctgtcgaaaagtttggcaaggtgacatgttacctgtttaggctgagctccttttgagagaatgtcaagtaaatcagcagaagagacgaaatagaagcgaggaaaggctatgcgcttggtttccaggtattcagcgagagctttttcacaaagagaaagcctggactgtaaatctttaagcttttcatagagattaggtcttgcacg

SEQ ID NO: 3409 - DNA, 390 bp, Homo sapiens
  misc_feature 215, 327: n = A,T,C or G
ccctttcgagcggccgcccgggcaggtaccaagcgaaactgaaccagggatacaccaagaggtaaagtcggaaacatccagagagatgggagagtttttcaaagatttggaggcccctatggatgaaacgcataaagagtcagacctagagccaccagaggaggctaaaccaaatgttacagaggatgtgttcctagagtcagctatggaaacangatccagatccagtgccaccaacggaaaccatgtctgaggtttcgggggccacagtcagagagagaaatttagaattactagaggaggagactgaaccgggggttccagagngaatcacttatagtgcaacatgaatgagacagggtctagagcctccagagcagaccaaaccaa

SEQ ID NO: 3410 - DNA, 516 bp, Homo sapiens
  misc_feature 408, 468: n = A,T,C or G
cccttagcgtggtcgcggccgaggtacgcgggggagtgtggctgagattcgacgcccactctgccatcctctgctctcctctagaggaagttgctcttggggagctgagttcctgaaactaagcaaatgacaagtgctcctccagccgtgagatgagccagaggatggaatgccacaggccccacttcgtctcccagcccttcatctttcttccatgtccaaaggcggctccccagaggccaagggctcagctcttgtgttctctgagactgtggcacagctcaccctggcttccttagtaggaagcttttaagaactgctcttgtagaaagaacaaaccctaatctagcctccagcaaagagccaggatcatgctgaacttcctgtgaagccttcgtggggggatcnaggctggagaaagtgctgcttcattctgaggtctgaatttcctgctgcttgttcacaaanaatgcttttttaatcttttaaactttttggttttcccccactttccga

SEQ ID NO: 3411 - DNA, 416 bp, Homo sapiens
  misc_feature 256, 410: n = A,T,C or G
ccctttcgagcggccgcccgggcaggtacatgtgcacattgtgcaggttagttacatatgtatacatgtgccatgctggtgcgctgcactttaatctgccaccaggcagatgtctggttctgaaacaggtgtgcccacaagttccctcggtggcctcctgacccataaaacatcctatacttctactgcccattacattcccctgttgagaaaaagcacagaaggggagccatcattttctgtttgcacatttcantgactttgcggacacatatgggaaaagggcatgaaactgtaagtgatagaacttacactcatgggtcttgaaaatactgcactgcatgaagcctcactttgagagagagttctttaactctgaggttgttttcaagtaaccaaactttaattanaaagtt

SEQ ID NO: 3412 - DNA, 556 bp, Homo sapiens
  misc_feature 493: n = A,T,C or G
cccttagcgtggtcgcggccgaggtacccagggatgttgcccctgtaaggggatgttcaggagaatattggagaagtcctgtctgcttctttgaagctcctttttccatattttaattcttgttactgctggaagttgcactaataccgatgtgatgagagtttcagtccttggagccttttatgaggactgtctttttattgctggttttagaagctgctagaataccataggatattacttcaactaggattatctaaaccaaagccacctgattaaatttgctccaagaagcactcttgttatatatccccatctcagaccgtgttctactagtctagcaggacttactagaaaagattagacagtgtattatgttgggtaaataatgacattattccaatgtccaaatatagttcagtgtccaatataagtttaaatgtagttcagtgctgacagtagaaaaatcccccttttcaaattttttactctnctcaatggtccctccctatggtttcctctcctattttaaagaaaaacattttattccctcaaa

SEQ ID NO: 3413 - DNA, 409 bp, Homo sapiens
cccttagcgtggtcgcggccgaggtacgcggggaagcaagcctgggcaatggcgggcgccctctgctaaccttgctgccgccttgcagtttgatctcagactgctgtgctagcaatcagcgagattccgtgggcgtaggacccttccgagccaggtgtgggatatagtctcgtggtgcaccgttttttaagctggtctgaaaagcgcaatattcgggtgggagtgacccgattttccaggaaggcactggaggagtttgcagaaatgaaagaaagagaagagaagaaggctaacctcgaaagggaagagaagaaaagagattaccaagcccgaaagatgcattacctcctcagcacaaagcagattccaggaatatacaattcacccttcagaaaagagcctgatccat

SEQ ID NO: 3414 - DNA, 460 bp, Homo sapiens
  misc_feature 76: n = A,T,C or G
ggccgcccgggcaggtacataggttgtgtatccccagcatatattcctatattgataggaaaaaactgaggctcanagtctatatattacttacctatggtcacacatttcaatttattatcagtagtgcctattctttggaccccattatatttgtaatatggaaatataacaaattattcaataattaaaataattatgaggtttcttagttgtcaaggtgaagttaagttacaattctgtttttatttcaaaagagaaaggcttagtatgttttacaacaattttccattcagtgtggtatatattacactgctaagaatactttggggccaggcactgtggctcctgcccataatcccagcactttgggaggccaaggcaggcggatcacttgaggtcaggagttcgagaccagcctggccaacatgtcgaaaccccgtctctacttaaaaataca

SEQ ID NO: 3415 - DNA, 400 bp, Homo sapiens
ggtacgcgggcatcaacctatattttttgacaaaccctcttaataagttacatttcttttttaaaagagcatgataaagatattttcagtcagtaaaaacaaatttttctaactgcagacccaatttagagatataattcaggcagaaacagttatcagatgaaagaattgagctgtaaaaagaaaataattgaaaaaaaacccagaaaatatgtcagtaaaaccaaataattattgaatatacaaagcaataataaaaatttacgaggcttaaaattgagaaaaatctaaaatataaaaataatgtataagtcagaaataggttgatcagggttaacgtgttacaaaattcttgtattgttcaagaggagggtaaagataagaattgctttaaactttg

SEQ ID NO: 3416 - DNA, 403 bp, Homo sapiens
  misc_feature 200, 284, 331, 337, 351: n = A,T,C or G
cccttagcggccgcccgggcaggtacattgctgaaggagatctataaatttttgtgggaaagctaagaagtctaccagaagaccttgctggaattttaaactttgaaaatcttcctcagatataacaaggttatataaaaaaaatggatccgtgtcatcagtcagacgaataactaagtcctttctgtgaactggattanaaactgattgtagttcaatgctcattcttatacttactctcctgtagtcccagctatttgggaggctgaggttggagaaatgcngaacctggtaagcagaggctgcagtgagccaatactgcaccactgcncaccancctgggcaacaganaccctctcctcacagtctttgcatttcacctgcaacgggactagttggtgga

SEQ ID NO: 3417 - DNA, 370 bp, Homo sapiens
  misc_feature 344, 357: n = A,T,C or G
cccttagcgtggtcgcggccgaggtacagagtctatacagtctctatgaaaaacaaaagcaaaactcaatctattattaaatgttaccaagtattaggaaaactgaggacactcatcctcctggttcctggacagagactacgttacatagtggaatacaccaaattcttctttaaaaagcgctagagtcctgctgaagccctttttaattcaagttgtgactcaagagaaaaaaggaaaagccacttctacattagaatagaaaaggacacaaaagtaattttatccattatggagaaaaactgggatgcaacaattccaaatgaagagatacagttacttancatctataagatnaaaatcatgtttt

SEQ ID NO: 3418 - DNA, 354 bp, Homo sapiens
  misc_feature 80, 199, 349: n = A,T,C or G
cccttagcgtggtcgcggccgaggtacgcgggtcataaggttaacccaggttcaagggagtggagaagaggatgtcttangatgagaagagcagtgataacccgttgcagagaatatggcatgattctttggggagtcattatctgccacaatcaaaataactttaggataaaaatgtttcctaaaaagtctgaattanaagcatcattgggtgggaagatagccgagaacactctgggcaacatagtgagacccctgtctctacaaaaagtaaaataaaaattagcctgtagccaggcctggtggcacatgcctgtagtcccagctactcgggaggctgaggctgcantgagc

SEQ ID NO: 3419 - DNA, 304 bp, Homo sapiens
  misc_feature 217, 221, 223, 228, 230, 234, 257, 266, 271, 277, 281, 283,288, 293: n = A,T,C or G
cccttagcgtggtcgcggccgaggtacagtcagaaggctacgtgatgccacctagagataaatgtgtagagaaggatgagttctgggaaaggatctctagacctgccaatatttatagatcagaaaatgatgaggactttgggaagatccagccaatgacttgataggacaataggaagatttcagagtcctagaagccaagtaaaaaaaaaaaaantttntnaaaancnatanggggaaaaaaaaaaattgttttnaaaaatccnccaantttttnaaantnttttnggggntttaaaacccc

SEQ ID NO: 3420 - DNA, 325 bp, Homo sapiens
ccctttagcggccgcccgggcaggtacgctgggggagccggatatatagagtgtcacgtttgggagccgaaagactggagccgtttccttgtggctggagcgcttcccgtagcctcggggaaggagcaggatttagaggaccactagttggaccccatcctcgtgctggaggaacaggaacctctttcaggagctataaaagaaagggaggaatcatgtccacaattgcagctttctatggcggcaagtccattctcatcacgggggccacaggctttctgggcaaagtgctaatggaggagctgtttcgcaccagcccagacct

SEQ ID NO: 3421 - DNA, 706 bp, Homo sapiens
  misc_feature 301, 434, 482, 508, 523, 526, 541, 543, 562, 596, 602, 620,631, 639, 662, 663, 691: n = A,T,C or G
cccttagcgtggtcgcggccgaggtacctcccggggttctacagttcctcctgcccactggccagggggaatctggcgggagcctctcggtggatgctgtcacatgactgtgccttctgaaagaacatctgtgaagagcagtttctggtgtccctgagtaacccttttctaacaattcagccagtgtatttcctccaagagtagaaaacactggcttggaaaatctagtgaattttcagcttcttgtgaatgtgtatgaacaaaccaacctactcggtctgtgaaattctcgctaattcanatgggacatgggcaaggcttctaatactttcatcccatgaacataaattttgatatttcagctgcagattttttcaaatatacaatgacctgaggccaggaaagttaccttgtcaatttattttcttataatntgcatgtcttataaaagtagactacagcaggcgtgggaccaaaaaccngaacaaaagtctaactggattgaaancttattccttaaaanaanacattgggttcttananaccttacagctttgcttgnagttctcatattaccttccttttgtgggaaaatntaccanaaaaaaaaaatggagganggtgaaaaggngaaggttntttgtggggaaaaatggttaggnncaatttggtttacctcttcccaatcccnaccctgcccgggggg

SEQ ID NO: 3422 - DNA, 564 bp, Homo sapiens
  misc_feature 60, 152, 159, 217, 246, 247, 264, 315, 317, 331, 340, 372,374, 385, 391, 427, 470, 519, 520, 534, 546: n = A,T,C or G
cccttagcgtggtcgcggccgaggtactttttttttttttttttttttttggagacggantctcgctctgtcgcccaggctggagtgcagtggcgccatctcggctcactgcaagctccacctcccaggttcacgccattctcctgcctcancctcccnagtagctgggactacacgcacccgccaccacacccggttaatttttttgtatttttantaaaaaccgggtttcaccgtgttaaccannatggtctctatatcctnaccccataatctgcccccttaacctcccaaaatggtgggattacaagcctnanccacttgctcccanccaacactntttttattattaacaaatatactttctacctnanccacattcttncaaatnctcaacaattccaactttttaaaaaattcatttttnccaaaaaactccttctttattttattccaaaaacctattattncttaaatcccaattttatttttaccattttaaaataaaaaacccaattnnaaacccaacaaacntttcccaacttncaaaatttccctttaaaa

SEQ ID NO: 3423 - DNA, 191 bp, Homo sapiens
  misc_feature 130: n = A,T,C or G
cccttagcgtggtcgcggccgaggtagtagaaaggaaaaaggaggcgggcccccttcattcagtaaccagtgctagggggtagtccccaagaggtgggatagcctgcgctggattgtaactaatgatcgnttcaggcctagagtattttctctagtttctggaaagtacctgcccgggcggccgctaaggg

SEQ ID NO: 3424 - DNA, 420 bp, Homo sapiens
  misc_feature 391, 420: n = A,T,C or G
cccttagcgtggtcgcggcccgaggtacgcgggggtgcaggttcagacaggccctgagcacagcctgtcaccatcctccatcttccctgctgtcttctgtgtcccctgagcttccgtgagggtttgtctttcctctgtggctctttaaaccacttcctgtccctaggagaatctcccccgtgggtggggaagccctaaatcagggcaggactttgggctctgatcagcagactacacttcttagcaccacccagcctccagcaagaacctgaggcaggagaatcgcttgaacctgggaggcggaggttgcaagtgagctgagatcgtgccactgcactctagcctgggcaacagagcaacacttcatcttaaaaaaatgaaaataaatttnaaaaattttgcttgattttatttttttan

SEQ ID NO: 3425 - DNA, 286 bp, Homo sapiens
  misc_feature 93, 100, 101, 104, 174, 205, 240, 254, 279: n = A,T,C or G
ccttatcgtggtcgcggcccgaggtactactcttttccactgatccatatggaatctgtcacattgagacttctggtcttgatggatagagcnttttaanncanaggcaggtggttcggggatatgcagaacaggactctgaagttgatcctgagaagtattccagtaggatanaatgtgaaagcccaaacaatgacctcagcanattcctaaggcttcctagaacattccaacaaagancgcgtgggtctcantaaagaaaatttgttgcttataggntgcacca

SEQ ID NO: 3426 - DNA, 166 bp, Homo sapiens
cccttagcgtggtcgcggccgaggtaccatctactacagtctttgtttctgttgtagggttccttctcaaggacttatcctagtttaaaaatacgactttttgcccaaatttcatttgggtcctactgcccggttggagaaccctttggctttcttcgatccttca

SEQ ID NO: 3427 - DNA, 558 bp, Homo sapiens
  misc_feature 111, 134, 166, 190, 206, 208, 214, 223, 229, 231, 238, 240,242, 247, 270, 285, 294, 303, 305, 316, 328, 341, 354, 381,383, 387, 415, 439, 457, 458, 468, 475, 478, 490, 492, 496,498, 508, 509, 558: n = A,T,C or G
cccttagcgtggtcgcggccgaggtacgcggggtattataataagatcgtagagctatttcttgagtcaattttgctatggaatattttttaccatctttaaacatttganaaaattcagctatcagcccatantaaatacatatgcctggttaatatttttaaanctttataagggtttttacacatanatggaaatcaacaagntntttacntccttttcncagggncnaaattanananataanatcttattgctcacatggattgnagggctttcttaaanaaacaaatnttagcctgngngttgggaccantcctcttttagngggattgttaaantcttttccccttncaaggaatttttaaaaaattccaattnangttngctggaaccttttggatttgccaattgnaaaaaccaaattaaaagggtcaanggtttattccttaaatgnnaaaaaaactntttaaanaanaagggaattgtnantgtntntttcaatttnngaaattttttccccttggccaaaattttttttaattttaaaattttttn

SEQ ID NO: 3428 - DNA, 403 bp, Homo sapiens
ccctttcgagcggccgcccgggcaggaagtgtgatgatagcagcacctggaagcggctttggatgccatgctgagttcttcagacggcaggcgaaaggtagaggggagccagagaagatttttaacaaaaaagtgacatgctcatttatgttttatttctaaagacgagaagacctggtccctcttgttaggtttgcagagtataaatgacaagctacaggcttttagaaggatgctagggcagtggtgcagagatcagagtggaattcgagggactacaacaaggaggtaagttaggaggctgccagccatgaagccttaaactaggagggtgtggatggaaacagaacatggttaggtgggagatactgagttagctgaatcaatgcaactcagtgaccca

SEQ ID NO: 3429 - DNA, 310 bp, Homo sapiens
ccctttcgagcggccgcccgggcaggtacgctgggtgtgtatatatccaaatataaacagttaagaagaagtggaagagggattttactcccaagtattccgacttcagggcttgggctcttctatactaaactttctgaaagaaatgctaagtaaaattacaaacttcgagaacataatttagagaatattaatgatatatataattgagtaataatggtaatataactaataagaatcaggaagtaaagaaagaagtggcggaagaattggaagaggatcacttccctaaccttcataacagtgatca

SEQ ID NO: 3430 - DNA, 281 bp, Homo sapiens
cccttagcgtggtcgcggccgaggtactcattttatacaggcaaaaatatttttgcaaaaatgaaaaaatattttgaggattgttatattccagatatatttttatatttttagctaccattttgatactgaaatctggataaaaaattaggcttcatgttttccatttaagtctccatacctgtcctcaaaaatcacattaatccaggtgtaattgaatatgaatttatagaagcacatgggaaatgaaattttatgtctaattagatatttttcacagt

SEQ ID NO: 3431 - DNA, 397 bp, Homo sapiens
  misc_feature 63, 139, 158, 192, 245, 297, 329, 336, 340, 371, 372, 385: n = A,T,C or G
ccctttcgagcggccgcccgggcaggtactgaaatgtaagcaaggtgggaaatttagatgtangatttatttttttaagtgttcttgcaacttttcctttagtttttaacttttgctgggaaaaatacatctgagaaantactgagagaattcctgtnatgagttttccttatgttttattcctctatctgnggataactgagaattaaaacttggagtaaatatgaaatagctggatatacaangacttatcttttttcaccaaatatgtaattagaaattttggttgttatgccnaattagaaattcttttacttaaaatttccggnttaagtnaaanccttgtcaatttttttctgccttaaaaaatnntacttagattaangtatactttcct

SEQ ID NO: 3432 - DNA, 313 bp, Homo sapiens
  misc_feature 281, 297: n = A,T,C or G
cccttagcgtggtcgcggccgaggtacacattaaagaaaaatagtgagaacactaaagaaaattcaagtgtagcacaactaaaacttctggaactggggaaacagctataaaaataatagcaagcaagatttgggaaccaaaacaaaaaagaaaccaatagttgaaggaaaggctagtcacctttattagtggcttggaataacaagtagaagaaataactcaaaacagaccacactataaggaaattgacattgagattaaaaaaaaaaagacttaaaangattagagatgcgtanctcccaaaaaaaaaaa

SEQ ID NO: 3433 - DNA, 314 bp, Homo sapiens
cccttagcgtggtcgcggccgaggtactcatactcacttttgagatgaagggaacaatacaatccttgctggcaaaccctcccctcactgggacagagcaccctgtcattcctgacctggctccttcatgcgcccctattcccatgtgtcaccataactgcagttctcttgttactctattacaagtagatatgctgccaacataaatgggattttgagtctggtgggagaatgcaggagtcattttgaaagacacacaaaatagaacagaaatgctcacttggaaggctgatcttctgggatagttacctttc

SEQ ID NO: 3434 - DNA, 490 bp, Homo sapiens
  misc_feature 7, 251, 365, 429, 452, 464: n = A,T,C or G
cccttancgtggtcgcggccgaggtactgtttcatgttatgctgacagacctatccttcattattctagtcactaatatagtccttttgttgtaatctagtcatacattctaagcttgatttagacacttgccaaaagaagttccaatccagtggtttcgagattccaaaggcacctttctctcatgacccaaaggagtaattttggcatcttaaatggattaatttgtcttcctgatgggagcacatcanaagaatggtgatgtggatgttagatagagctgagggggccatactcgaactcccagaggtatctgcaggggctggggcagggaaagtcttaacccagctctaaacactttccanaggtattttgttggggggtagggggaagatactgctctaattaggaaataagattttgtcttanatgactttttttttattcctctnggaccaattttnaaacatagctggaactccaactgggc

SEQ ID NO: 3435 - DNA, 309 bp, Homo sapiens
cccttagcgtggtcgcggccgaggtacgccggggggactgggggttcgtctgctgggtttgtggagcagctagctactcggcgggatctcccggcaggatgggtaaaaagataaagaaggaagtagagcctcctcctaaggatgtgtttgacccattaatgattgaaagcaaaaaagcagcaactgtggtgttaatgcttaattctccagaagaggaaattttggctaaagcatgtgaagccatttataaatttgctttaaaaggtgaggaaaataaaacaaccctccttgaacttggagctgtggaac

SEQ ID NO: 3436 - DNA, 384 bp, Homo sapiens
  misc_feature 341: n = A,T,C or G
cccttcgagcggcccgcccgggcaggtacgcgggtaacactaaaggcatcataggtttaactgaaatacgttatatgaagttttacaaaaaggtcaacagaaagctcatttgtgaaaacatactctcatgggagcttctttaacattagttcagaggttaatatatttcctggaggtgttttcctggaattgattgcactattgcatggtaataacatttaattgttaaggaaacattatatataggttcaaattatcccttaatgttgatttctccccttttccatggattttgatactaagaaacaaaatgctttgagattttggtaactattttgatnttgataaaacatggttaaaaatagaaggacatgatatttttct

SEQ ID NO: 3437 - DNA, 434 bp, Homo sapiens
cccttcgagcggccgcccgggcaggtacactatcctgtggtttctaaattctgcttctttattaagaaacgattaactgtaaggtagaggaactaccatgttatacttctctgcaaatctcagaaacaagcacccaaatgtagatcaccctgctgaagctcaaatcacaggactccttgggtatagatgccttagaatgctacagggccgctaccgtcttcttcgactacgtaattcaaaagacagctgtggcttggtctcattcctacagaggggctgaagcatgaaactcaaaccctagtgctgcttctggagatactgcaggatgtgatgaaggaggtcacttaaacatcaatgtcactcaaatattttagaaatattgcccagaagacaggcctatcactaatcaggatttctgtgtctcaatcaataaa

SEQ ID NO: 3438 - DNA, 319 bp, Homo sapiens
  misc_feature 233, 239, 259, 261, 263, 265, 268, 274: n = A,T,C or G
cccttagcgtggtcgcggccgaggtacaggaaaacaccagcgagatgcacaggagagaaatgacttcattacatacatacagtggatgtcacatgaggctatgggttacagacaaggcacaacaatgcattacatacagtggatgcctacagcatcagggctaattctctcctcaagagttcttaggaattccagaggaaaggcaggaaaatacacagaggattaaagagtancatacngagattctctaataaccatncngntnagntattanagacacaggggcaacatggcaagaccctgtcttttacaaaaaaaa

SEQ ID NO: 3439 - DNA, 514 bp, Homo sapiens
  misc_feature 381, 398, 407, 416, 420, 462, 465, 479, 503: n = A,T,C or G
ccctttgagcggccgcccgggcaggtactggatagcatagacatagaggaccactcaagagttatcaggaagtcagagtccctacgctttgaagactccaggtataacatacatgtgttacctagaagccttctctcctcccacaggagtccattatcaaggtcaccttcacggatgaggcccttaatgctaggcagtaacaggcttggggtaggaaaatgggacagaaaaacacagaagtagtgaggtgtggctaggcaggaagagtgctagcggatggggcccctgacactaaggaagcggtgggaaaggcgtgaggctttgaagaccctctccaaggggcccaaggcttcagaaaaaaaaaaaaaaaaaggcagggangggaggtaaggaggcanagaagtaanaaagattantatntttcaggtttttctagccattttagtcttcaaggggatggtnttnggaaatgaaaaccnggaattctgattagattgggggtngaattccttta

SEQ ID NO: 3440 - DNA, 296 bp, Homo sapiens
cccttagcgtgtcgcggccgaggtactccaaggcctaatgtagtaaaagcctgtggacttggtctaagagagacaggggacccctgagaagaaaacttctgttcctgttcctgggcacagaagcaagctagggccaatgctgaaaaaggtagctgctgagtagcgcagggagacaactgaacacactagatacctgggaatgtgcgaaacttgggaggggcacatggtcaggccagaagaggattagtaagaaaactcaaagggccgacaaataaattaatgttctgcttgtttag

SEQ ID NO: 3441 - DNA, 301 bp, Homo sapiens
cccttagcgtggtcgcggccgaggtacaacgtgggcaagcatctgtgcatatgaaatgctgtttttctaaaagatttctcacattggcaaactgagagattttcttctggaacacaggaaagattatattaatgcttatagccataccatgtctgaatatgggaggatgacagacacagaacgagaccagatagaccaggatgcccagatattcatgaggacctgttcagaagcaattcagcaactacgaacagaagctcacaaggagatacattcccagcaagtgaaggagcacaggacc

SEQ ID NO: 3442 - DNA, 801 bp, Homo sapiens
  misc_feature 192, 207, 216, 224, 227, 409, 467, 587, 588, 592, 606, 665,684, 694, 753: n = A,T,C or G
cgcccagtggtggatgggatatcttgcagaaattcgccctttcgagcgggccgcccgggcaggtacctgtggtttggggaaagattttaaaatgagtggacagttatttgggaacaaaagaagctaataaatcaatccccctggcaaaatttaaaagaaacatgcagaatgaaaaagttttggacacattanaaaatacttctacangtggaccanaaaggaanaanatccaaggaaacaaaagcctttttggatatgtgccaaccaaaaattttagtaagggaaaggtaaaaaaaaggaattaaaaattggtggaatggaattgggttcaaaggaaaaatttatcgcaggtttatttttaccaaaggggcccacttggagttattttttaaaaccgtcccaaaaaagntttttgtttttaaaaattgggggccttggtttaccccgcttggaagaaaatggaatgnaaggggattgaagaaaattggatggggtttggaaaaggggtttaccattttttaaggggaaaaaattggaaaaggaaaaacctttaggaaaaaattttaattattaaaaagggacaaggnnggantggaaattaccaancggaaagaatttttttattaaaccaaattgttggttaaaaaaattttttttgggcccanggggaaaaaggggaaatantttgaaaagntttaaggaataccaatttacctttaccccttttggaggggggaaaataaaatttggttnggttaatggaagaatggtggaatggttttctccctgcccccctgggga

SEQ ID NO: 3443 - DNA, 479 bp, Homo sapiens
cccttagcgtggtcgcggccgaggtactctagaaatgtgaagacattctatcaaccatgcttgagagtgttcgatgctccacactttggccaatctgaagcattttctgtattcttcacaattcccctgggtaaccaataagatgattttaaactaaaagatagcttgttgttaggtcatcacaaccatcccacaagtgtttgccttggtgttttcaaaggatctctgaagatgctttatgaatcatttcttgttgttagatgcctaagtgcagttgtcaaggctgtagaactgccaaggaggaagggaaggcagtgccagctgaaacagcagagagattcaggagagtgatgcagaaatactcgtggagactctcatttctgacctggatctcaaataataaatgatgatttattcctttatcattcagacagtcttgtgtacctactgcaaccagacccctgctggatcctgaagct

SEQ ID NO: 3444 - DNA, 104 bp, Homo sapiens
  misc_feature 47, 54, 82: n = A,T,C or G
caattcgcccttagcgtggtcgcggccgaggtacccatgagaaaccntcacagnaattcccacggttatgaggaaggatgtnaggacagaatagggattttcct

SEQ ID NO: 3445 - DNA, 478 bp, Homo sapiens
  misc_feature 436: n = A,T,C or G
cccttagcgtggtcgcggccgaggtacctgaggagaatttcttcaatgttcctgctttcttaactgtctcaggacaacttcatctagaagtgatgtcaggagcttttactcaagtgtttacctttggtccgaccttccgagctgaaaattctcagagccggaggcacctggcagagttttatatgatagaagcagagatttcttttgttgacagccttcaagatcttatgcaggttatagaggaactgttcaaggctacaacaatgatggttctctcaaaatgtcctgaagatgttgaactctgtcacaaattcatagcacctggccaaaaggacagattagaacatatgctaaaaaacaactttttaatcatttcttatacttgaagcagtggagatcttaaagcaagcatcccagaacttcacctttaccccanagtggggtgctgacctacggactgaacatgaaaagtacctgc

SEQ ID NO: 3446 - DNA, 257 bp, Homo sapiens
ccctttagcggccgcccgggcaggtactctgttgccagttattaaaaataattttggtgatgtcagttccttttacaacaaaccatacaaattctgcattgcctgtaggataaggttcaaacttcttggaaagccatacaaatctcaacaatataattttggcacatatatctcctacaatgtgtgtgtatatacgagttatgaagagttatgggccaggcacggtggctcatacctgtaatcccagaactttggga

SEQ ID NO: 3447 - DNA, 337 bp, Homo sapiens
  misc_feature 117, 122, 133, 287: n = A,T,C or G
ccctttcgagcggccgcccgggtaggtacgcggggtctcctttgtaggtaacctgtcattggtctttggatttttttatagtctccctttgtatctggtgtaatttagtttcaatcntggtngtggcctacgntgtagacttcttgcttgaaaagttgttggatttcttgagtttgaattttggagtgtttaatcagttctgaaaaattttcagtgttagatctttggatattgtttctccattacttgattttctccttcttcttgagaaataatcaaactcaagngaggtcataggaaccctcaggtttataattagtccctcaggaaaaaatta

SEQ ID NO: 3448 - DNA, 427 bp, Homo sapiens
  misc_feature 142, 212: n = A,T,C or G
cccttagcgtggtcgcggccgaggtacgtagctttgtgctttgcccatagtagttattcaataaatatattgatggactattaaaggtgaattttcaaatgtatcagagaaagagcagagagaacaagggaagaatttaacnaatcagagactgtcaggtatttgacttaaactgggtattagtcaatctccagattatactgatctactgncttaaaattaataaaatctttattctattgtgaaattactgctcacagcacatagctaagagtttgatgggaccttagtaagtgcttcctccaaatattttacctatagccacaatcacccagcaaagctctccaaaactttgaagagagtagttgctttaatagtaattaaactactcaacaaaggtagcacagagctgcaattctgtgcatga

SEQ ID NO: 3449 - DNA, 484 bp, Homo sapiens
  misc_feature 235, 461, 463: n = A,T,C or G
acttttccagtggacatttttcactggtttaaaggaaatgtgacattctctgctcagatactcacatgcatatataaaaagaagttgtgtaacttacattattttatgacttcaacaaccttgagcaagtgtgaaaagagattctgtgggtagccccaaaatggctctgtccaccttcccaatttctggttaagtaatccctaccacgaacttctaacatgtaactgttgctcantaagatctggaggagctggggcattgaatggaagcagtaagttctctgtgagtaaattcttttttaggcatcacatgtgattttcaagtgggatgaacatgcaaaatacacatgtcttccccatgcatcctgagaagccatcctactatggttcttccaaacacagtcaaatttctcatgcttactcaatgatgtatttgcacattcagcccttaccattttggangncatttctcatctatttaaacc

SEQ ID NO: 3450 - DNA, 465 bp, Homo sapiens
ccctttcgagcggccgcccgggcaggtacatccatgttgtcagcgaggagaatctgaaattgtctgaggataggagaacacaaagaaaatctttaaaagaacatgaggtcaaaaatcagagctcgaaaatctactgcttcatagctgtgtgaccacaggcaaattcttttgcctcagttttttcatcctaataatgaagaatatcttatttgctttggagggctataagacatgatgagatataataaacataaggcactgagatacatcatagacacttaattgttgttagctattatattacttatcttagggttttccttcatggtattttgttggaaatgataaaaaaataaaacaaatatgtaagggcttgtaaaacccaagattcagtatacctactgcttctagctttaattctaggctctgccatagttaggatgtttactcatctgtagttcaaaa

SEQ ID NO: 3451 - DNA, 398 bp, Homo sapiens
ccctttcgagcggccgcccgggcaggtgtcacactgatttacgatcactctcctaacccgacattagatatattcaatagatctggcagtaagtgtagtgcatactaacgggtcttgattttcaataattttatgcataagaaagatttttattgtgttttattgcgttggctgaatatatcaggataccaactgaaagcagatcttaaagttaataactccagctttttttggtttagtattcgataaacttctcttaggccactagggcttaatgaacaaaatacctctttggcaaagaattttgcaggcacaaaatgttactataaaattaatttttgttgaagaaactaaaaatggaaaggacttaatttggatattgcagttattttaaaaaa

SEQ ID NO: 3452 - DNA, 323 bp, Homo sapiens
  misc_feature 15, 237: n = A,T,C or G
cccttagcgtggtcncggccgaggtcaggagggtggggttgggaggaggataagcatccatcccactcaaacagaaaactgctacttaatagaggaatggtggaatggtttctggggaggcaagaacaaagtctgttttagtagcaccatcataccaaccactttcttgcatctgcaggctctttgcaagagaagatagcaagcacatggtgcagatagtgggactgcaagagcttnaggtggacagtgtggagctcctcttagaggtaattaattcttccttctttattaccccaccacaacagtgtaagtactaaagtgaa

SEQ ID NO: 3453 - DNA, 418 bp, Homo sapiens
  misc_feature 395: n = A,T,C or G
ccctttcgagcggcccgcccgggcaggtacacaattgatagtcacatcatctacttcttaagatagatttcatgaaaatcaacttagcactggatctcattcacatttgaaagctaaagaaacatgtttatacacatgctaaatttctgaggaggaccaatccatatgaaaataagttcagttctaggtggagcagactatatttaccacggcagtcttggacaataactcaatgtgagatgaacttgctgtaacagaaacacaaacttattttcaagtaaaaatgctttttctgaagataatacatttaaaaaagtgtgaggcaaagaaaacaaaagtctgatgaatctaagtaggactcacacacaggtaatgcttgttcttttccatagacngcttttttctccaaccataactt

SEQ ID NO: 3454 - DNA, 301 bp, Homo sapiens
cccttagcgtggtcgcggccgaggtacttgggagactgaggcaggagaatggcgtgaacccaggaggcggagcttgcagtgagccaagatcgcgccactgcactcccgcctgggtgacagagcaagactctgtcttaaaaaaagaaaaaaaataaagtgaatatcagtattgctgaaaattcctagaatattggataaaactttaaatgaaaacatgaataactgactttgggaactgtaattgtagaaattttgtttttccaaaaacaagaaagtaaccttggttcccaatacaaccaga

SEQ ID NO: 3455 - DNA, 434 bp, Homo sapiens
actcgaagtcgacaaggagaagaaagagatccagaagttgaactagaacaccaacaatgtttagcagtattcagcagagtgaaatttactcgtgtgttactgacagtgcttatagcctttactaagaaagagaccagtgctgttgcagaagctcaaaaattgatggttcaagcagcagatcttctttctgccattcataattcattgcatcatggcatccaggcccagaatgatactacaaaaggagatcatccaattatgatgggttttgaaccccttgtgaaccagaggctacttccacctaccttccctcgatatgcaaaaataattaaaagggaagaaatggtgaactattttgcaagattaatagatagaataaaaactgtctgtgaggttgtgaatttaacaaatttacattgtatcctggatttttt

SEQ ID NO: 3456 - DNA, 271 bp, Homo sapiens
  misc_feature 2, 22, 122, 140, 256: n = A,T,C or G
ancggccgcccgggcaggtacncgggggagccggatatatagagtgtcacgtttgggagccgaaagactggagccgtttccttgtggctggagcgcttcccgtagcctcggggaaggagcangatttagaggaccactanttggaccccatcctcgtgctggaggaacaggaacctctttcaggagctataaaagaaagggaggaatcatgtccacaattgcagctttctatggcggcaagtccattctcatcacnggggccacaggcttt

SEQ ID NO: 3457 - DNA, 326 bp, Homo sapiens
  misc_feature 19, 77, 78, 122, 137, 138, 177, 185, 190, 201, 215, 216,248, 250, 302, 314: n = A,T,C or G
gtgtgatggatatctgcanaattcgcccttagcgtggtcgcggccgaggtaccttttttttttttttattttttttnngagacggagtcttgctctgtcacccaggctggagtgcagatggngcgatcttggctcanntggaaacttccggctctcgggttttacgccatttctttntgcttcanacttncccgagtggcntgggactacaggcnncccgcctggctaattttttgtatttttagtananacagggttttgccatgttagccaggatggtctcgatttattgacctcgtganctgctttgcctnggcctcccaaag

SEQ ID NO: 3458 - DNA, 471 bp, Homo sapiens
  misc_feature 262, 435: n = A,T,C or G
cccttagcggccgcccgggcaggtactatttgcagacactgttttgttggaaagaagagttggaaggactttaatatgttaatgcttttcttaaggattatgctgacaatttgtcatttgactgaagcctgtataaggaaagagactatatgagcaagttaagttgaaaaatgtttagttttagagtaggtggggagagtatttactttgagcagatagagaaattggggtttcttgcgctttggggaatactgggatgaanaaaatatgttatgggctgataatagggatattgccatacagatagtatttccagagacattttaaagcaaacacatttcttcgtgttttggctctttcaagagagatattcaagcatttttgtgtttctttttattgagttgccctctcttggtcaatgtgggatgactgtanttggaattgaaagtgcagagggatctccttccttaa

SEQ ID NO: 3459 - DNA, 389 bp, Homo sapiens
  misc_feature 323: n = A,T,C or G
ccctttcgagcggccgcccgggcaggtacgcgggggagacagtgttttcgcttggctgacattaatgacaacccaatgctatgtgctcactgagtgttttcatttcagaagagcatcaaaaccactgagtcctttcaagtcgtcttcttttactgtgaaaccagaaaccatgccgacgactactttcagtaataacctgtgtcccaactgcaggctgaagtaaacttcttctcatataatttctaatttctgtgtaggggtagttgtagcaaacaacttagtttctttcagagcgtgacttcagaaagcgtattttcatgcancagtgatgggtaatgaaatcagaatttccacaaagtctgccctaattgaacagcattatcaggaaa

SEQ ID NO: 3460 - DNA, 327 bp, Homo sapiens
cccttagcgtggtcgcggccgaggtactccaaccaacaaatgtagacagaccataatcagtcacatacataattgtgggttctaaaatatcattttgtctaaaaaaaactccaacgaaacatgtaaaaataagattttggataaattaactttgacgacatttgactaacattatctcaaaaataattctacaggaatcattttatgaaaaaaatatacaatccatattggtttaattatgaaattttgactcaacgaaacttaagaaacgagccaacattttactcatggtctctagaggcatctccttattactcaccttgatct

SEQ ID NO: 3461 - DNA, 254 bp, Homo sapiens
  misc_feature 22, 67, 70, 85, 90, 94, 103, 108, 117, 124, 139, 158, 172,173, 214, 224, 246, 252: n = A,T,C or G
attcgccctttcgagcggccgnccgggcaggtacctagcatagtatctgacccacgacagtcatttntgngaatatctattaagngaatnaatnaattatttntcatnctttccccnatgaaancattgcttttataanattattatttcatatttantatcttactaatanntataactaaacctccctaatcccaaaccctctatctacttncacaccactnctaaaattataattcctaaatncttttntt

SEQ ID NO: 3462 - DNA, 322 bp, Homo sapiens
  misc_feature 103: n = A,T,C or G
ccctttcgagcggccgcccgggcaggtacaacgtgggcaagcatctgtgcatatgaaatgctgtttttctaaaagatttctcacattggcaaactgagagatnttcttctggaacacaggaaagattatattaatgcttatagccataccatgcctgaatatgggaggatgacagacacagaacgagaccagatagaccaggatgcccagatattcatgaggacctgttcagaagcaattcagcaactacgaacagaagctcacaaggagatacattcccagcaagtgaaggagcacaggaccgctgttttggattttcatt

SEQ ID NO: 3463 - DNA, 735 bp, Homo sapiens
  misc_feature 137, 149, 153, 159, 188, 192, 198, 201, 227, 231, 238, 266,270, 278, 279, 290, 291, 293, 294, 295, 303, 316, 368, 490,508, 517, 530, 539, 545, 603, 605, 608, 610, 620, 638, 647,657, 673, 674, 682, 689, 698, 703: n = A,T,C or G
attcgcccttagcgtggtcgcggccgaggtacttgtgttgtttgaatggtattttgaaagcaattgcatagttactattgattcctcaaaatgcataatggggatgcttctgaccaacttgccttttaacaagttanaaagtaagtatncacnacaagnctcttacttcaccaaaactaataaattanattncaatantangaaacacatataaataatgaacgaanctanaattatnaccgctttctaaaaaaatattaaaattnaaanaaaatatnnaaaaaaaattnnannngaataaanactaatacaatanaaaatattaattttataaaaaatatgaataaaatctaatattccataaaatnaatcttaaaactactaatactacattttttcaacttacattttttaaatattttaattagtaaaatcactcttataaaaacttttaaaaattttcacctctcaatcacatattttatatttntatacctacatatactanttttttaancccaaaatattanttaaatttnctatgnaccctacttttttaaaaaccataaacctaacattttaaaaattaatccaattaaattncntantnattttttttntttaaaaccatttttccnaatagatanattacctttnaaaattttaaaaaatnncgcttaanccataanaaccttacnccctntaaatccttaccctttaaaaaaccccaaatta

SEQ ID NO: 3464 - DNA, 401 bp, Homo sapiens
ccctttcgagcggccgcccgggcaggtacaggaaatggagaagatgactgatgaatataatagaatgaaagctattgtgcatcagacagataatgtaatagatcagttaaaaaaagaaaacgatcattatcaacttcaagtgcaggagcttacagatcttctgaaatcaaaaaatgaagaagatgatccaattatggtagctgtcaatgcaaaagtagaagaatggaagctaattttgtcttctaaagatgatgaaattattgagtatcagcaaatgttacataacctaagggagaaacttaagaatgctcagcttgatgctgataaaagtaatgttatggctctacagcagggtatacaggaaccgagacagtcaaattaagatgctcaccgaacaagta

SEQ ID NO: 3465 - DNA, 458 bp, Homo sapiens
  misc_feature 171, 190, 344, 385, 402, 434: n = A,T,C or G
ccctttcgagcggccgcccgggcaggtacttgagtaactcttagaatttcatagcatagcttggaattaagacctcagtgcagatcaactggatttttatttacattaatatcctgtggcatcagtaatatctagctgattcattttagtagctttctatttcttcttaantctccttagttgtgctttnagcagttttctccaaattttaaagtttcttgcataataaagtaaaaattccaaaataattagggataagtgtcctaataataattagggtaagtatcctaataaaacattatcccttccaattacactatctttttgtgtaagggaataactgngttgattttggataatcaaacagacataaactacattgggntaaaaatacttttgaanagctgggtggtggggggcccacttcaagcctngtgatttccagcacttttggggag

SEQ ID NO: 3466 - DNA, 338 bp, Homo sapiens
ccctttcgagcggccgcccgggcaggtacgctggggacagtgggagagctcagcctcactgatagccggggatctctcctgttcgagggctgagatctccggtcccacaaccgcccacaaccaggggcacttctggaagtcccctttctagggacatttttcttctaagctctgtaacgcgggccgaggcagaccgaggcttctttcccggatccaatcccctgcccccatgcctaagaaagaaaaaatgaccaagacgcccctgcccgatgagaagcagctgcttctgtttcagcagaagttgctggcagagggggagatggccaaaaagaaggaga

SEQ ID NO: 3467 - DNA, 290 bp, Homo sapiens
cccttagcgtggtcgcggccgaggtacaacgtgggcaagcatctgtgcatatgaaatgctgtttttctaaaagatttctcacattggcaaactgagagattttcttctggaacacaggaaagattatattaatgcttatagccataccatgtctgaatatgggaggatgacagacacagaacgagaccagatagaccaggatgcccagatattcatgaggacctgttcagaaacaattcagcaactacgaacagaagctcacaaggagatacattcccagcaagtgaagg

SEQ ID NO: 3468 - DNA, 519 bp, Homo sapiens
ccctttcgagcggccgcccgggcaggtacgggaagcagcagctctagccctggcaaacctaaccacttgcaaccctgctaatgcaaacgctgctgctgaagctgatggtattgatccattaataaacctcctgtctagtaaacgagatggagccattgccaacgctgctacagtattaacaaacatggccatgcaggagcccctgcgcctgaacatacagaatcacgacatcatgcatgccatcatcagcccactgcgttctgcaaacacagtcgtgcagagcaaagctgctctcgctgtcaccgcaactgcatgtgacgttgaagcccggactgagttaagaaattctggtggattggagcccctggtagagctgctacgctccaagaatgatgaagtgaggaagcacgccagttgggcagtgatggtctgtgctggtgacgagctgacggccaatgaattatgcaggctcggggctttagatatccttgaagaagttaacgtatcaggaactcggaa

SEQ ID NO: 3469 - DNA, 503 bp, Homo sapiens
  misc_feature 252, 356, 373, 471, 484: n = A,T,C or G
ccctttcgagcggccgcccgggcaggtgaattaaaaagttggtgcaaatcaagacaaagcagtttgattgttaacacatggcccagtttccgaaggcaaactcagctcatcagcctactgtgggattttcccctaggctgaaaagccaggtttgattctaataaacgtatacattgcagtgtaattaggcaagggaacagggttcttggagccacaaagccccatggtcagtatttgggtgacatctacttnctgactgtaaacagatttaaatataccatctgttttgcagatatttctcagaacctgtttttaatcagtttttctctctaattttcggatactgacaatcttgntttctttttctttatgnggtttaaaaaatgacataaacccagtattgcttttatttttttcatgtgcttggcttgattattttaagctaatttatataccttcattcgttcccgnacagccaaaaagngaaactttttttttcccgg

SEQ ID NO: 3470 - DNA, 389 bp, Homo sapiens
  misc_feature 284: n = A,T,C or G
cccttagcgtggtcgcggccgaggtactgtttcatgttatgctgacagacctatccttcattattctagtcactaatatagtccttttgttgtaatctagtcatacattctaagcttgatttagacacttgccaaaagaagttccaatccagtggtttcgagattccaaaggcacctttctctcatgacccaaaggagtaattttggcatcttaaatggattaatttgtcttcctgatgggagcacatcagaagaatggtgatgtggatgttagatagagctgnagggggccatactcgaactcccaaaggtatctgcaggggctggggcaggggaaagtcttaacccactctaaacactttccagaggtattttgtggggggtagggg

SEQ ID NO: 3471 - DNA, 303 bp, Homo sapiens
ccctttagcggccgcccgggcaggtactttgttttgttttctgcctataatgtaaaaaatgctttctaaagacaaacttaaatctgctgaattgatgctgcaagagcagtgagccttgggtggaggaggatgcaggtataggaggtagaaagggcaacggccctgtgatcagtgaaaggatgccctgtgaattcaatccttgaaaatgacctttgattcccccccaaaagcactcaaggatgtcctgaggttgttactagttgctcataccacctgggggcacatagccggagcctcagagct

SEQ ID NO: 3472 - DNA, 407 bp, Homo sapiens
ccctttcgagcggccgtccgggcaggtacaacgtgggcaagcatctgtgcatatgaaatgctgtttttctaaaagatttctcacattggcaaactgagagattttcttctggaacacaggaaagattatattaatgcttatagccataccatgtctgaatatgggaggatgacagacacagaacgagaccagatagaccaggatgcccagatattcatgaggacctgttcagaagcaattcagcaactacgaacagaagctcacaaggagatacattcccagcaagtgaaggagcacaggaccgctgttttggatttcattgaagattacttgaaaagagtatgtaaactttactcagaacagagagccatccgagttaaaaagagtggtggataagaaaagattat

SEQ ID NO: 3473 - DNA, 447 bp, Homo sapiens
  misc_feature 180, 299, 312, 360, 410, 415, 419, 420, 422: n = A,T,C or G
ccctttcgagcggccgcccgggcaggtacgcgggtggtcagatgggatgtataattcagcttgctgtgggagatgatggaaactttttcactctgaggcagtagggaagatcactgtggctgcaggaccttgtaggagagggaaagaagatagtgtgggtaatgccaaaagaaaaaccanacctttcaagagattttttttccactgaattgctttttattattttatcataagatttgggttttttccttttttttccacccaagctagaagtggatgcgtgcaagaggtgtgaaganaagagtcaagcanaattctgtaaagtgggctgttgacttggttttatcctttttggggcanaggtttgaactcatcagccacagtcaggattttaacttgtttaggcatcngaatnacanntnttatcaggaggttcctccccccttc

SEQ ID NO: 3474 - DNA, 427 bp, Homo sapiens
cccttagcgtggtcgcggccgaggtacaacgtgggcaagcatctgtgcatatgaaatgctgtttttctaaaagatttctcacattggcaaactgagagattttcttctggaacacaggaaagattatattaatgcttatagccataccatgtctgaatatgggaggatgacagacacagaacgagaccagatagaccaggatgcccagatattcatgaggacctgttcagaagcaattcagtaactacgaacagaagctcacaaggagatacattcccagcaagtgaaggagcacaggaccgctgttttggatttcattgaagattacttgaaaagagtatgtaaactttactcagaacagagagccatccgagttaaaagagtggtggataagaaaaagattatcttaagctggaaccagaaccaa

SEQ ID NO: 3475 - DNA, 406 bp, Homo sapiens
  misc_feature 307: n = A,T,C or G
ccctttcgagcggccgcccgggcaggtactcctacacacataaatccaggaaatgactagatgagcctgagtggctttatcattattgtgcaaatacagtttctataccaacaaacccaaattaaattattataggactaatggctgtaaggtgggtgagggaggaaaaaattcagaagctgttgcacgaatcacctatacaatgaatttcatccgcgtacctactattgagcactgaggataacagcagttaaaaaaaaaatccaaaaacatcttcctccatggagatgtcattgtaatgcatgancaaagtagagaaaataagtaaaatatttggtatatcagatgataaaatgcaccatggagaaaatcagaacatggaggaattgaaaaggccagggatgga

SEQ ID NO: 3476 - DNA, 329 bp, Homo sapiens
ccctttcgcgcggccgcccgggcaggtacagattatctggcaggctttaaaaaatttaagtgattcttaccaaaaagcaaatactatactaagtcatatgttatattaatttcaaagtatagatttaaaaataactataaacattatatctcaacatattaaatgcatatcctccttgtcccaacaattctacctctagcaatatctcccacagaaataagtcaaaggatgcaactcaatatgaacaaagttgttcactgcaccattatttaagagtgaaaggccagaaataatttaactctccatcaggagaaaggttaaataaataa

SEQ ID NO: 3477 - DNA, 310 bp, Homo sapiens
  misc_feature 172: n = A,T,C or G
cccttagcgtggtcgcggccgaggtacgcgggggtgcatatgaaatgctgtttttctaaaagatttctcacattggcaaactgagagattttcttctgggaacacaggaaagattatattaatgcttatagccataccatgtctgaatatgggaggatgacagacacagaangagaccagatagaccaggatgcccagatattcattgaggacctgttcagaagcaattcagcaactacgaacagaagctcacaaggagatacattcccagcaagtgaaggagcacaggaccgctgttttggatttcatt

SEQ ID NO: 3478 - DNA, 533 bp, Homo sapiens
  misc_feature 329, 402, 425, 426, 445, 451, 454, 458, 483, 501, 502, 505,507, 509, 512, 514, 519, 522: n = A,T,C or G
ccctttcgagcggcccgcccgggcaggtaccatctggtttagcattttagcactctcaaaagtgtcctggtttagacaataaactctatagtcccccaattatgaggcaggtgcctggctgcagaggctgaggagcactggggtggtcctaagctaagtgtgggtctgtttgagaaattggtgatgctggtgacccagagatgtctgcttgttttgcgtgcagagaagggcatagaggagaaacttagacacccgagggccaagggcagaatcaagtggaggagagtaaggagggtctccaagactacacctaaactctagaagaaganggctcctcttctcatttcttgctaagaaacacacccattctaaggcagtgaggatggaagaaaacagctttcntttggttcttttgaggcttgganntgtattattaagacacaanggaatnaanggcnatgaaaccaaaacttaaaaaaatgncttgcaattctaaacctnnagngnanggngnaaacnacntaaacctgggt

SEQ ID NO: 3479 - DNA, 444 bp, Homo sapiens
  misc_feature 319: n = A,T,C or G
cccttcgagcggccgcccgggcaggtactttgcataatattctgtcaatttaaaaagaaatgcaaaccacaagttttgcaggtcctgggagggcattgccctcaggatgctcactcctgtcccagtccaaactaactccaattcaaggaaggaaaaaattcatactggtttcatagaagtcgggaatcgatagttcttgacaatcacttcttccctataaaccttaagcccaggaggtcctcaagagaagactcagtgctcacagaaggaggggcaatttgagggcagacatattgtctttccatgcacaacctctgangtatcctagcaactcctgagagcaaaccctttatgatctgagttcagggccatccagttctgtctccttaacgctgtcagtcagagctacccaggaaacatcattactcagaatttcaccttgca

SEQ ID NO: 3480 - DNA, 395 bp, Homo sapiens
  misc_feature 367: n = A,T,C or G
cccttagcggccgcccgggcaggtactgagatccaatgagacataaaacagctaacatcttgatttctctatatcaagtgtgttttaaatacagtcatttgaatgcaaaaacaaaaacagacacatacaccttcatgcctgaatattaagagacaaaactcacactagagaaatttattttatggtccatttgctgcttcacttctattttacagaacaaaggctctttaggaagatgcttagaagtttctttaatattaggtttcttgaaggggggattaccaaattgcttttctagtttatgaatgactatgtaacttgccagataggcacatttatgcaggtatcttgtcacaggactgtaagnttaccttaaatcccacacattcaggcgg

SEQ ID NO: 3481 - DNA, 200 bp, Homo sapiens
tctgcagaattcgcccttggccgcccgggcaggtacatcataaaggaaacttagacaaatgccaagcttaaatattttccttttgcaaacaatgctggctccagaaacacattacaaacagctgggattgtgaattttctctcctttagaaacaagaatgttctcatgtcaaaggtaacccattgtaaaaaaaaaaaaat

SEQ ID NO: 3482 - DNA, 244 bp, Homo sapiens
  misc_feature 164, 197: n = A,T,C or G
cccttagcgtggcgcggccgaggtaccccattgctgtagaagttgagttcgaagactgatgggacagttgtgctgggggtgataaaaaactcatcattcctgctagtgtgggtgattgtgacacaatttcccagcagctgtatggcatgcattactacatcttntgaatttcctgagaaccccaggtcaaaattacnagccaggacttctctttcatcacaaagaagtcttcgaccaatgtgga

SEQ ID NO: 3483 - DNA, 206 bp, Homo sapiens
cccttcgagcggccgcccgggcaggtacgcgggaaactccatgtgcaaggcagggattgtcaccaagacccaactccatctacagacacccacgtaagatacaaagacaggttgggtgtctaaaggatagaaaaagatccacagtggtccaggagtggtcccagcattgtggtaggcacaagagtgaggatcacttgagtcttaga

SEQ ID NO: 3484 - DNA, 432 bp, Homo sapiens
ccctttcgagcggccgcccgggcaggtacatgacacaagcaggggcttcaaacgtgcttatgctgttgagtgtggcctttcgtgccactgccattgccttgctggcggtcccaggagaagggtaagagacacatggaactgactgaagatcagcagacctgcctagcctgcatcaaccaaccaccaaaatgtatgcttattgttgaacattattgagattttgtggttgtatacagtaagcgcatagcttccatgaaaacagtaaccgggagctacaagaacagagtgaggagagatgctaacagagctaactaaaacatgaataaaatgtaaggaaaccaaaatgaagtagagaaatttaagtctttaaagcttcagagagaagatctgaatcactgatgtggagggaaaaacttttcttgatgaagagga

SEQ ID NO: 3485 - DNA, 360 bp, Homo sapiens
  misc_feature 121: n = A,T,C or G
cccttagcgtggtcgcggccgaggtactgacaggttttctactgaatgcaaagtattcttttatggtcttctgttttcatttattttcctcctccgatcccccataattcttataaattangggctcttttgcggggtttcaacaattcattacttaccccagtcatgtgctgggaaattttattattgcttactaaggcaattttaccagggatttaaatccagactcttgctttcttgagtcaacttttgttctcactgaatgattctacaatgttatcttgtgaaagcccctctcacaacgatctggaaagtcatatcctttctaaaatatgtaacaccttatggattcataatagg

SEQ ID NO: 3486 - DNA, 322 bp, Homo sapiens
ccctttcgagcggccgcccgggcaggtacgtatattatgaatgtatattgctgtgcttctccttcctgcctgactccggaagactcctgtctcagtctctctcaacatgtctgaaggacttaggggcaagtgtcagtggtgaaggccctagtctgagtttaatgtctggggccagcttgaaacagcagctagtattttgagctctaagctaacactctggactttcagtcatgttttctttccccagtgaaatagaaaagtttgatttcaaagaggaaaagtgtgcaatacctgcaacatacataaaacctatttaatttta

SEQ ID NO: 3487 - DNA, 322 bp, Homo sapiens
ggtggagaaggcactggtattgaccaggaaagttgtatgtaatagaaattgtagagcacagtaggagaagaaaagtgaaatgaagtagacatgggaggcagaaagacaaagagagaggagagaacaacctatgttgtaattgaagcttaagaaaataccatccttggacactttcttgtttctgattttatctaagtatcttctggttgattcttaaactgcatgtatttatggcacatgtatttgccagtttaatggacacttttccatctaggactgtttatattctggcacccatacgtacctgcccgggcggccgctc

SEQ ID NO: 3488 - DNA, 245 bp, Homo sapiens
  misc_feature 132, 155, 157, 182, 212: n = A,T,C or G
cccttagcgtggtcgcggccgagcagagagagagagatcacagcctgggaaacactgtgtgtgtagaggtggaaaaacacatgggagtgttctcatggcttgtgcataaaactcccacgaggtaggatatanttggggaaggaagatttggtatntngggagtcaagattggcccagtcacncagattgccttttggtgggtcaaagctgangggacttttgggttttggtgctagaacttttga

SEQ ID NO: 3489 - DNA, 331 bp, Homo sapiens
ccctttcgagcggccgcccgggcaggtacaacgtgggcaagcatctgtgcatatgaaatgctgtttttctaaaagatttctcacattggcaaactgagagattttcttctggaacacaggaaagattatattaatgcttatagccataccatgtctgaatatgggaggatgacagacacagaacgagaccagatagaccaggatgcccagatattcatgaggacctgttcagaagcaattcagcaactacgaacagaagctcacaaggagatacattcccagcaagtgaaggagcacaggacccgctgttttggatttcattgaagattac

SEQ ID NO: 3490 - DNA, 382 bp, Homo sapiens
  misc_feature 3, 5, 8, 11, 34, 40, 41, 101, 294, 302, 321: n = A,T,C or G
ctntnatnggntatctgcagcaattcgcccttancggccnnccgggcaggtaccccgggtgaatttgaaaggtatgctccaaatgctcacccatccagtanggtttataattctagattttaatttttattctataatattaatctgggaagtcaatatttaagtattgaaatagaacctttagtttatcatagttctttccagtctcaaaagcttcccccgccactattaaataattcaaaaggaggcccggccgtggtggctcatgcctgtaagtcccagcacttttggganggccgaancggtggatcacaaggtcanggagatcaaagaccatcctcactaacacaggtgaaaccgctctaagtaaaaatccaaaaat

SEQ ID NO: 3491 - DNA, 446 bp, Homo sapiens
cccttcgagcggccgcccgggcaggtacccctgtttaacaaggggtaggggccttctgagactgtttcctctacagagtaagggttcgttcagccttttccgtggcctgccaagaactcaactccatgttccctcacttcctgtaattgaccttgtccaggactttctgaccttggagaattcacctttgctctttctgctgcttcgtgcattcttccaccaaatgtctaactgactggctcctctccaaactcaaggctttgccaaatgccaccagctcagggaggcctttcctggccatgacacttgaagttgcaacactcccccgcagtctcccgtgccccagatgtaagttccatgagggcaagccctgtgcttttaccaccatatccccagcatcttgagctgtgcctggcccaagaaatattttgttgaatgaatgaatt

SEQ ID NO: 3492 - DNA, 301 bp, Homo sapiens; identical to SEQ ID NO: 3441

SEQ ID NO: 3493 - DNA, 324 bp, Homo sapiens
cccttagcgtggtcgcggccgaggtactgaggacttgtagctagtaaggaggaaaatggaaagatgaagattgctttgaacaatgaaaagagacagggtctgatttataatcagctctcattgctatgttaataataggtggaatagggacaaggggagaattagagacaccatttttgtctgattgtgtgattgatgtgattgtgtgattgatgtgattgagatactccaactgacagatgatggtggactggaggggtggtaaaaatggaagtggtgagaatgagcacatttgagatatattttgaaagtagaggcaacaga

SEQ ID NO: 3494 - DNA, 534 bp, Homo sapiens
  misc_feature 376, 436, 441, 454, 456, 505, 506: n = A,T,C or G
cccttagcgtggtcgcggccgaggtacgcgggagattaataggatagatgaaccttgactattctgctcctttagtttgattagtcttctaccagcagaaacactggagcactcctcctatatgtaaaatagagcatttggagagaataacttttggaaattgctgttagtaatctcaaaacagagcagtccaaacttagtgttctggattaattttccaaaactgagttgagaacgggatatgcattcattcttttagcaattttttttttcccgagacagtcttgctctgttgcccaggctggagtgcagtggcatgatcggctcactgcaacctcctcctcctggattcaagcgattcttgtgcctcagcctnttgagtagagactacaggtgtgtgcccaccatgcccagctaatttttcctgggtattttnattanagacagggttttngncattgttgaccaggccggtcttcgagcctcctggtctcaagtgatcacnntgcccggggcggggccgtttcgaaaagg

SEQ ID NO: 3495 - DNA, 534 bp, Homo sapiens
  misc_feature 191, 318, 353, 355, 375, 429, 473, 484, 496, 503, 514, 529: n = A,T,C or G
ccctttcgagcggccgcccgggcaggtacatgcctgaccttggcctacaagaggcccagatatgagtcttcctagactggcatccaattcaaagcaagtcagggcacttttcagaagtagaaatcagcactgggctgctccaaagcaacagacacccacagcaagttaaaggtcatgagtcaaagaccatnactcgtgcacctgtaataacccgaagttagaattaggaggcactgcagaggaaccatggggttgttgcataaaggagggaagttgagatgggcttataggacttggggttttgctttgggtgattcntaaaagagggatttgagggaaagaagaggggtcantnctgggaattgggatattggncctggggaaagtgggggtgccaatttaaatgacctaaggttaaccctttaaatnatttttttatcttaagggagggcaaaaagaagaatttgaaaagntccaccttggnttttaagaaagncaggttngtccaccttcnattgtttaaggccangggaa

SEQ ID NO: 3496 - DNA, 327 bp, Homo sapiens
ccctttcgagcggccgcccgggcaggtacaaaggttagctatctttatagaactaagaactgtgaatttcagtgactcagcaatcaataaaaagtcaataacacacacatcttgtagatgatggtcattttaaattttctcaatgaatagtaaagagagattaacttagttatatttaaagcaaatagaatcaattaagtataaagaatgaatattataaattgatatatagaacgactattagaaaataaaaatgttgggctgggtgaggtggctcttgcttataatcccagcactttgggaggctgaggtgggcagttcacttgc

SEQ ID NO: 3497 - DNA, 505 bp, Homo sapiens
  misc_feature 445, 455: n = A,T,C or G
ccctttcgagcggcccgcccgggcaggtacaatgccagaagtattttttttctttcagctgtgaaccagcctgttttgtttgacaagcctttccagattcatgcagctcaatcacgtgcttgttgccagtttgagagtgaacctattatttcaaacttgttgccgtgaccaatttttacaaaactgaaagtagcactgtgaggtggattggacctagtgatgaggtgtctacacttgcatccttttcttccaagagaatattctgacactccaactctagaagtcatgtcattagtaaaatgaaaataataattgcttaatcactgtttagaattagttcatacttcttcagagcttgaagccttcacgactcaacatcagatccatggatagtattactatacctttacccaaagactgggatttattttgtaaaaatatcaanaatgggtctnggtccctttaaagcaactgacaaggtatttaacaacattttaaaacaatg

SEQ ID NO: 3498 - DNA, 318 bp, Homo sapiens
  misc_feature 251, 306: n = A,T,C or G
ccctttcgagcggccgcccgggcaggtacgcgggcagttgaatttgaggcacttgaggtgtccaagagacaactgaatgatctagaactcaaaatagagatctaggccagagatagaaagagagcatacggggataactgaatccatggggttggatgaaggtagccatgaagactgcataggaagggcagagccctaaacaatcatatttaggcaatagagtatgagctgctcacagaggagattaaganggaacagctagagagatgaaaggaaaacaaggagaatgtgctgtatcggcacccnggggaaatgagt

SEQ ID NO: 3499 - DNA, 442 bp, Homo sapiens
cccttagcgtggtcgcggcccgaggtacatgtagtctataaattaaacagcaattgattctgaaaaaaacatgattgtggcttagtccaaatattaatatatgtattgagaacctgctattgtggacagtggaattatggcaataaataagatagacaatgtccctaccctcaagaaatatagtctatggcatagagagagactatcaataataaccttcacaaataaagatagtgatatgtgtaataaagacagtatattaaagagatgtgctagaaagtgatgatagaagaggaagctactttagatattctgaataacaagaagtcaagtgaacatttggggatcagagcaatctacacagagagcctaaagtaactttaatgctatacactgcagatttttaaatcctgacctcaccctaaaaacataacaagtaaat

SEQ ID NO: 3500 - DNA, 325 bp, Homo sapiens
cccttagcgtggtcgcggccgaggtacaacgtgggcaagcatctgtgcatatgaaatgctgtttttctaaaagatttctcacattggcaaactgagagattttcttctggaacacaggaaagattatattaatgcttatagccataccatgtctgaatatgggaggatgacagacacagaacgagaccagatagaccaggatgcccagatattcatgaggacctgttcagaagcaattcagcaactacgaacagaagcccacaaggagatacattcccagcaagtgaaggagcacaggacccgctgttttgggatttcattgaag

SEQ ID NO: 3501 - DNA, 342 bp, Homo sapiens
cccttagcgtggtcgcggcccgaggtacgcgggtattttctttagatgtgataatgatgtttggcagtggaatagtataatgtctgggatttgccttaaaatagttcagaggagagagcttggtgatagctgcatatacatatgggaacataatattctttctctgtttttatgtgtttgataattctaataaaaatgttaagaaaagataaaaatgacaaagccaaagatagtaacttatttagaattgaggttgtgtgatggagtttttactttaatgggaagaacttaaataaactgaaggtctgtcctaaattctttgggtgaagctttaagtctata

SEQ ID NO: 3502 - DNA, 328 bp, Homo sapiens
cccttagcgtggtcgcggccgaggtacaggacagctagcaccgtaaagacagtttttaaaaaatgtataactacagtaaatctaccatcaaagaaagtcaaatacaacgttttcgaagacaactcagctatttattgtaaagtcctagatatttacacaaaaatgtaaaatgttgtattactgtttatatacatccaaacttttttttaatgattaaaaagtctctcgtaaacattttataaacatgtttaaaaagtggtatattttctatgcagcttaatttcagatttaattctaatttttcaaaactatatgcatactgaataat

SEQ ID NO: 3503 - DNA, 552 bp, Homo sapiens
  misc_feature 499: n = A,T,C or G
ccctttcgagcggcccgcccgggcaggtaccagccataattcctacagaaggtcacttaacaaaatgtgcagtgtgtgtgttttcttagaggttttggctaccatgtcttttactagaaatctattatgtcatggtttttcaagttgtatgcagctgataaaggatcttacatgtctaatagttaaagataaaatactgagtcactaagtcaactatatatactgctgttttctcagagactgtcagatttggtgagtttatgagctcacttcataaatagcatttccatttatggtaagcctgatgcatattcagtgacctattggattctaattctttggttgaattgctccgtaactggaattgcagtagagttgaacttcaagcaccttataatgggggactatgtgagctgccccagattttaaagatcaagatgagggagttttgacatcagcataaaaggaagggtgtcctcttatatttcctaaccgaccnaaccaggaattagaagaaaaaatcttttgtccatagcttaaaaaaaaaaaaac

SEQ ID NO: 3504 - DNA, 359 bp, Homo sapiens
  misc_feature 189, 205, 229, 323: n = A,T,C or G
cccttagcgtggtcgcggccgaggtacgcgggtccatgtgtttgtttttttctttttcaaatttttatcctttcttcactctgcatatacatcccaagatgcctgtcccctcagtgctatgtttatgtcatcagtgtttgacagaagagagtgtcttgggtaagggtgtccaatcgtcattcttatcangctaactgtcctgaanaactgttgttctattgtttgggtnttcttgctatgaatttatactcatcattttatttgcatttgactttgttggtagataacatacgagaatgaactcttgatctgcttgacagttntatattttgctataaattaacaaaatgccattttta

SEQ ID NO: 3505 - DNA, 411 bp, Homo sapiens
  misc_feature 163, 185, 258, 265, 275: n = A,T,C or G
cccttagcgtggtcgcggccgaggtacttctaccaaaatcaaaagtaaaagttgagattttgttgtgctaacatttgtcgttagaatgtatccaccaagtgtgtagaatcagagtatgtgtttttattttagttaagtaatgtgggttcatccacatcttcanagtatttctttaatctttttgngtttaatttaattttttgagtatttaaagtatttacatgttcaaaactcaaaattaagtgaaaagtagtagtnttgcttnaattttactncatcactctttacctatccaccaaatatataataaatattttcattagcatcttgttttctcacttttttagcatttacattatatcctataattcactccatatcagctaaaaaataatatctttcattcctttt

SEQ ID NO: 3506 - DNA, 439 bp, Homo sapiens
  misc_feature 344, 347, 392: n = A,T,C or G
cccttagcgtggtcgcggccgaggtactgttttgatattgtagctctgcaggctgttggggtagctacacatggtgatgttctcattttctagtaaatcagaaagaataagatttagtatagagaaaaataatagttaacaacattttataattgttttatctagaatttttgacatatttgtcattcttaaaggcattataagaaattcctgttgtatttgtctagcaacataatgaaagaatgatgcacatttctgtttattattttataaatatggcctaaatgcagtatctttgttatttagtttatctgtattagtgtagattttattattaatattgnggntaccatggttacaatctggatctcaggcacagtatggtttgcagntaaaatacctcacttggtttcacttagtctaggaagcacttttaaaa

SEQ ID NO: 3507 - DNA, 370 bp, Homo sapiens
  misc_feature 126, 130, 133: n = A,T,C or G
cccttagcgtggtcgcggccgaggtaccatcttctgattcagtcacagagaggtaggccatgagggaaataaggaaaaaagtagaaacaagaaataaagaaaaatcagaaacaatttaagaccctnttgnggngcaaaagggaaggtgggaaagaagagacaaggaaaatacataaaggggttaaaagagaggaaaataattagatagtattgctgttgtgttttggaaaaactcttaattagaaggaaaggaactaactttattaagctacctctatgtaggaaaactaaattaccaggttgatgtggggggttttttttgaaagattttatttcaacttacaggcatcaccaaaattattttcctcat

SEQ ID NO: 3508 - DNA, 412 bp, Homo sapiens
  misc_feature 242, 357: n = A,T,C or G
cccttagcgtggtcgcggcccgaggtacaacgtgggcaagcatctgtgcatatgaaatgctgtttttctaaaagatttctcacattggcaaactgagagattttcttctggaacacaggaaagattatattaatgcttatagccataccatgtctgaatatgggaggatgacagacacagaacgagaccagatagaccaggatgcccagatattcatgaggacctgttcagaagcaattcancaactacgaacagaagctcacaaggagatacattcccagcaagtgaaggagcacaggaccgctgttttggatttcattgaagattacttgaaaagagtatgtaaactttactcanaacagagagccatccgagttaaaagagtggtggataagaaaagattatctaagct

SEQ ID NO: 3509 - DNA, 444 bp, Homo sapiens
cccttagcgtggtcgcggccgaggtacgcgggtgactagtatccatttggcccatagtgactacagcagtattgacagatacttctaaggattttgatcatcagtagtcttcttactattttggtagcaggattttatccaaatgttgacctggaagttcttaattgtgttttcaaatatttgattattttaaggtagtggtgtttgtttaaatatatgttatcaagtatttttgttggtggtttcagcaagagtgttgacctgaataacctagcctgctattgccagaaaccagaacctctgagggagtttataattgagtcttaataaaagcattttaaagatgaaagacaataatagcggtaagttattctgatttagaagtagatgaaagaggtcaaggcttaattggcaaggaactgcataatggaatagtagctacat

SEQ ID NO: 3510 - DNA, 366 bp, Homo sapiens
  misc_feature 127, 129, 135, 161: n = A,T,C or G
ccctttcgagcggccgcccgggcaggtacaaaataaacagaattttatggaggctacacagttctatttgttcaaatcaagtattatcctttttaaaaaaatgccactaaagctagtttcctctatntngaaccnttctgcttgtgcagtaacaatacaanggcccacaaaagagggcttgagttccttcccacatgcactgctttttctccagtaatagactgcattttggatgactgccaggcaacaatagttgactcgtgctggccagctctcaacataggtctctgaagaagctggggaacagggcaaattgacgcttctagttttctctcaataatccctccccagggttcaggttcacat

SEQ ID NO: 3511 - DNA, 171 bp, Homo sapiens
  misc_feature 8, 27: n = A,T,C or G
ccctttcnagcggccgcccgggcaggnacaatcttggatttccaatgacaatagtaaccaaggctgagaggaaatccttcaggagacaaaatctttacacttggcctgagacattccattcaagtgtggtaaagaggtggtgacaacagctagtggttgtgacaagacatc

SEQ ID NO: 3512 - DNA, 260 bp, Homo sapiens
cccttagcgtggtcgcggccgaggtaccattcatttaaaggcataaatgtccaatggggccatcttgtgatacatgcactgtcacaggaaaagtttccaggaaaagtcaagccagggcttcacagaagatcaaaagaaagagacaaggagaagctaagtgtattagtcaggattctctaagggacagaactaatagaatatatatacacacacaaacacacacacacacacatatatatacatataaataaaagggagtt

SEQ ID NO: 3513 - DNA, 755 bp, Homo sapiens
  misc_feature 536, 582, 664, 673, 684, 685, 744: n = A,T,C or G
cgccagtgtgatgggatatctgcagaattcgccctttcgagcggcccgcccgggcaggtacgcgggggtttgtttcaatgttgcttgctcggaatggccctcctgagcaaacaacagacggtgctcaaagtaacaactggcttaataaaaggagcttacacgaaggaggagctgaaggctactgtggtcgtgtgctgggggctgccccagctccagctgcaggaccccggccgtctgccttccgactccggtgatgattcttcctgcggtctgatcaagattctatgcagttaactttgtatccaaggatctatagccaagaaatttggagctcagtttcaaacgtaagtattctgggtccaaattttctgccttttcccttaaaacaactgaattttattttattgggaaacagaaatacagaattcaagagttattagatattataaaatctaacactctaagttaacatacaaggagacatagccgtttcaatgacaaatgtcatacataaaactgcttcatatcagaagcanaaagagagcttgcttttcctgtagtttctgtaacacagaagctgtncagctcattctatgtatgaaattgatatataaatcaagacagaatttcccatcccataaattttatgccactttgattgggnctttgttanttggtaagcanncagtttatgtgagaagaatattttggagccaatttcaaatctgccattaattaatttantgaattttaag

SEQ ID NO: 3514 - DNA, 461 bp, Homo sapiens
  misc_feature 337: n = A,T,C or G
cccttagcgtggtcgcggccgaggtactctgctctgggaagtgcaacctttatttctccttcatgtttttaaagtcaccttcttaattctggtagaacataactcaaacaactgaaaatgttaggaatggatttacagtccctctggctactctctatctgggatggaaaagaaagtgatgctggagataacttttcctgccatcaagggacatctatagaggagaggcaattaattgtaatgtgccaactagttttgattattcagggacttgtgatggaatttgtggattattcaaggtccctggttttctgttttggctaatttcactgctcantggcgcctccagaggtcagggacagctattctcctatggagtgtccccagagagacagtggcaaaaggaaccacccccttttgagcaactactctgtgtcagacacagggaggattttttttta

SEQ ID NO: 3515 - DNA, 434 bp, Homo sapiens
ccctttcgagcggcccgcccgggcaggtacgcgggtagcccatctcctgttccactgtttagtgaaaagaatcctccattgtcttttgttcattctctccccatcagtggacatgagagaaagatcccatagccctcttggtcttggttggaacaggaggaaaatgaaaactggacatccatcttaggacttaatcctacggagaccacaagctggaagaggcactcaatactagcatggcttctgtggcattttgatgagtagtatgggctccacactgaaatattaatatcttattgttttgatgatgatgatgatgttcattggcccagggcaaaaggtaaaggttgtgttataaagctgatctattcaatatctgtggatgttaactccaccccatccccttattgaacaattacgatgcctataaatat

SEQ ID NO: 3516 - DNA, 286 bp, Homo sapiens
ccctttcgagcggccgcccgggcaggtacaatacttttaagtgattaaaaagatttgatgaaaaagtgcagttctgtgttgactttaggaaacattttctcccagctaatgtcctaatactcagcaagcaaaattggaaaacagtttatattgctgtcaatatgtataagccatgtctcccaccattacttttccatattaaatatagaaaaaagcagaatcccatgtgtcccagtgactgtcagaaatcttccctcttcattaaataaaaatttaaataccacat

SEQ ID NO: 3517 - DNA, 402 bp, Homo sapiens
cccttagcgtggtcgcggccgaggtactacttcagtcattttcttaatttgcaaatcaatagctctcattttacttaataatgcctgatatttgcatgttcttcctcaaatgtgtccaactgcttaattttttcttcaagttccttttctttttcaaatacttgggtttgtaattggtcaagttgtgaaaaatcccagtttaagtccaatatagtcaaacacttttttaagtttcaatacctgtaagatgcaacacttaatagcggtgagtctgtctttaagattatagatctcctctttaacacctttatttacttcttgattaaagtaatagttcattgcgctgtatactgtcagcctcctcctgaagcgctgatgttttttcatggaattgtctgcaaa

SEQ ID NO: 3518 - DNA, 675 bp, Homo sapiens
  misc_feature 621, 649, 653, 660: n = A,T,C or G
cccttcgagcggccgcccgggcaggtacaaatgctctcccataggctcttttattgaatctatgaaatgattcaatctttcccaaaaggtatttgccaattatacaaagtatttttaaaattcttatgttatttaactagtaactcaatttctaggaatctttccaaggaaaataaaatcagaactgtaaataaagttttatggattgggaagttggaaacaacttcacattcaaattaataccaatcttttttcttcatgaacatttatcaaacattatcattatcaaacattatttatcaagtcattatcaatgacttgttcactgttctacctgtatgttatatgctataaagtgcaaaagtaaaaagaaaatgtttaaatacatataaatcatatttttattaaaaagtcaatgaagtgaaaatgttcataattgaaaaagcagccatatgtatgatattacccaatttgtaaaaagtaattgtataaaagtaaaaaaaagttatagaatcttgtgttatagcaatgcattacattattttatcatggtatctaaaataattatattggaaagatgatatttgtgtaacaaggttgaccaaaaatggttctatcaangcatatcttatttgggtcattggggaancccnttcctanctggttatttctgga

SEQ ID NO: 3519 - DNA, 344 bp, Homo sapiens
  misc_feature 296, 332: n = A,T,C or G
ccctttcgagcggccgcccgggcaggtacatatacatatatatttatttatacacacacacacacacaatttttttcttggtagcacttagctatcctcatatccttacagatgaggaagtatttggttatccttccctaagtcacttagctagtaggtggcagagctaggggagaggaatatcaaattaagtgctttaggcaacttgtttctcctacactgcagtgcacctttccccctcaaacacttaacgatcaagagactgttttaagatgggtcttatcacgctaaagctnagtcaaatgggaaaaaaaaaattgttccctttaaanatttcttcaaaa

SEQ ID NO: 3520 - DNA, 522 bp, Homo sapiens
  misc_feature 244, 335: n = A,T,C or G
cgccagtgtgatgggatatctgcagaattcgccctttcgagcggcccgcccgggcaggtaccaactactagcaaacataattaagggatcattgtattgtctaggtgcggcttagtagaatatgtaaagttttttagctgtccattaccctggtataatcttggagccataacccaaaactatattcctggcaagcatgttaagaagtggaaaatatgggttttcaaatcttgtggaaatactngcctttcaaatcatgggtgagaaaaaaatgctaaattattttcttactatgaggaagatttcttgccatttatctatgtatacaatattgnatcacaacagttaaggtataatatttctactcagaacaacagattacaaaaaaatcatatgcccctttcagtgttcatattgctttgttaggccatctctcagaatatattgtgtaaaaccagaagttttaagttttgtgtttaaaaatgaatgcactatgattataccgtaatattttcttttaat

SEQ ID NO: 3521 - DNA, 327 bp, Homo sapiens
ccctttcgagcggccgcccgggcaggtacgcgggtgaaataaagaaataaacactgtaaaacccaacccccaaatgcttgaagatcactcctgggctgagttgttggtgtttcagggttggacatttaaaggggatttcatgaaaattaaatttcttgggtttgttttttcaaagttttaaaatatatgtttatagatgacatggataaaatgaactaaggtaatataaatagtgcctttcaaagagcaataaaagaatgcctttggtccataaaaggagagattatcaaaaagaataaacttgattagaagaaataaaagtagatt

SEQ ID NO: 3522 - DNA, 330 bp, Homo sapiens
cccttagcgtggtcgcggccgaggtacctagcttttattcattttattattcatctttattgctttcattgcacatgctgttaacttcttatgaactctttgttctaataaataagcatatccaggtttttcataaataaatgaggagtctataaattcttactagttttaatagaaacattgccactaaaatggtgtattctagctgtgtgagcttttggaaaatgttttcatttcctttatgtttgaatgttccttccaggtctttgaaaatatacattctgagttgaaaagctttataataggtaaaactcattaacccatatactt

SEQ ID NO: 3523 - DNA, 331 bp, Homo sapiens
cccttagcgtggtcgcggccgaggtacaattctttcatcttttctgtttgcaattttgcataataaaatgctaaagggaaaacatttgatgagcagagtatcaaacacaagagtaataatactactacttacatgaaattctaaaacaaagaaaactcatctatgatgtcaaaaatcagatgagtagttgcctgaggcaggagatgtgggtggctgatggcaaaagagcacaaaggaactttctagagtgatggaatgttttatgtcctgattggggtgctaactgcatggacagacacatttgccaaaattcatccaactatacataaaa

SEQ ID NO: 3524 - DNA, 622 bp, Homo sapiens
  misc_feature 407, 484, 545, 562, 577, 602: n = A,T,C or G
cccttagcgtggtcgcggccgaggtactcactgcacacttctaggagtctctctcacctctaccctgttcctggtggaggactatgaaatcctcaaaagcaaaagtgacagtttattttctctgaacaacttctgcatatacttagttggctacacagaaatcaactgatcctgaatttgaattacccagcctttagaatgtgggagaggccttccttcacagtgctgttaagcagactggagactatctacgtaaaacgctagcacagttgctgacatgtagcagtcgctcagccaaatggaagcttttattattacctgtttttttcaaacattcaaaaaccgtaaataactatgaaatgagaaattggctatacagttttatctcaagaaaatctgtatattgntcttaacttcctaatatgtataaaatcatcatttcgtgacatttactagtatttctggagggtaaaatgcctaatgncttggtttttttaaccattctacttaagtggggacccaacattcagaatgggaatggaatnaagcaagactctatttnggatctttgaaaggnatttaatgaaatgtttctattgggnaaacaattaagtttcaaaaa

SEQ ID NO: 3525 - DNA, 569 bp, Homo sapiens
  misc_feature 403, 526, 527, 529, 563: n = A,T,C or G
ccctttcgagcggccgcccgggcaggtacttactagaggagtatttcctgtgtaactgagcactgtgataaatccacctaatactttagctcacttgttcctcataacaatcctattttacagatgaggaaatgcacttagactaggaaacttgcccaaggcttaggataaatatatttcatcttaaaagataggtgtgattcgagctgtcactggcattatcagactttttatatcagattttattgatgatagatgacataaattgggttcttaatatgttaagcattgttctgttaattaacttatcttcacaagcaacataaagagggaggtaggattattacttgtattttggagatgaaaaatgcccacattgaggggtttagtagccaggcctcanaggtcctgtagctagctgctaaaataccttgccaggatttaaatcatggaagtctcttcaatggtatggctctctgctgaatttggtaatacagcccgttatttaaaattaggttttaacccnncncatgatatggaagattatttaagatttcattttncccatt

SEQ ID NO: 3526 - DNA, 196 bp, Homo sapiens
ccctttcgagcggccgcccgggcaggtactcctcattttagacatattctctatgcagtggagataaatctattaaaaggtgctaacagactctcttacaagtgtaagaggaatctactgttgctatgttagtgtgaatgttgaaggtgcaattatcacattgtttattaattgtataacagattattactagaaa

SEQ ID NO: 3527 - DNA, 536 bp, Homo sapiens
  misc_feature 524: n = A,T,C or G
ccctttcgagcggcccgcccgggcaggtactgaatcatatgtagtgtcaaaactggaagattccaatggcctattccaacatttcccaaaatgtgttccacacaatactagttccaagagatagacagtgttagctcccattgaagaggggcagggggagggatttattcattcaacaagtattttggttaaaaatttgggaaacagttcatactgtattccatcctggaaaatcataatgtatatcaatattttaaaggcttagagaagtcttatagtaaactgtcttagtttactttagtcaactgaacatttcccacactttttgatataggaactgtgtgtgtgggacacatgtatgtcaaatgttaacccacagggcaaattttggaaaacagtcatctgttctatggtatttatatacattaacactaaaaaaagtgaattagctcttacatttgtgtcacccaatatgagtatgttgaaaccctaatccagtgtgatgatattttgaaagtgggggncttggggaaggt

SEQ ID NO: 3528 - DNA, 356 bp, Homo sapiens
  misc_feature 343: n = A,T,C or G
cccttagcgtggtcgcggcccgaggtactttataaatttaatctataatgatgtattagcaatcatagggaacaccatgatggtcagtgttcagacttgatgaagactgaagcatgagagagggccagacagatattgtggagtccgtgcagctttctactaatttctatttaccaataaatatgcctggggataatataggagaattatagaaaggaacaaggaaactaatcaaggagaaagtagagggtggtttccaatgagagaattcatctgcttctaatctaaaaaaaaaaagacattgacatattcaatttgtagtgtcttatataacaagttcttnagtaatgtaaaag

SEQ ID NO: 3529 - DNA, 381 bp, Homo sapiens
  misc_feature 91, 103, 108, 135, 158, 232, 255, 274, 293, 312, 324, 328,336, 342, 344, 345: n = A,T,C or G
cccttagcgtggtcgcggccgaggtactttttttttttttttttttttttttttgagacggagtctcactgtcgcccaggctggagtgcantggcgccatctnggctnactgcaagctccgggttcacgccattntcctgccttaacctccggagtanctgggactacaaggcgccggccaccatgcccggctaatttttcgtattttttaatagagacgagggttttcacntgtgtttaagccaaagaatggtntcgattctccctggacctnggtggatcccgccccaccntttggttctgccaaaaaanttgctttggggntttnccaaaaanattaangnnccactcgggggccccaataccctaaaaatttttttt

SEQ ID NO: 3530 - DNA, 365 bp, Homo sapiens
  misc_feature 135: n = A,T,C or G
cccttagcgtggtcgcggccgaggtacatgagatggctcattgatacaagcaaagccttggtggctctgcgctgaattaaggaagagatttgaaagcaaggctatttccctggcggcagtaaaactggcttcctnggaaagagagcaagctatgggattaagatacttaataaaattttaggcaagagaaagagtccaggtcttttacctaaattgcacaccaattgagctcatctgcttattctctacacactcaggctagggaaaaagtgggcacatttcaaaactcaatgcttaaactatagcttgatgtgaaaaagtagagacaaatttgcccatgctacatcaaagtgtaagaactgtcc

SEQ ID NO: 3531 - DNA, 516 bp, Homo sapiens
  misc_feature 483, 509: n = A,T,C or G
cccttcgagcggcccgcccgggcaggtacaacgtgggcaagcatctgtgcatatgaaatgctgtttttctaaaagaccatagaccttagacggaggcacctgtgaatacattctctctggacagaggcatattacctccttacattcttgtgtcttggaagatttctcacattggcaaactgagagattttcttctggaacacaggaaagattatattaatgcttatagccataccatgtctgaatatgggaggatgacagacacagaacgagaccagatagaccaggatgcccagatattcatgaggacctgttcagaagcaattcagcaactacgaacagaagctcacaaggagatacattcccagcaagtgaaggagcacaggaccgctgttttggatttcattgaagattacttgaaaagagtatgtaaactttactcagaacaagaagagccattcgagttaaaagaagtggtggatnagaaaagaattattttaactggaccnggaaccc

SEQ ID NO: 3532 - DNA, 316 bp, Homo sapiens
  misc_feature 302: n = A,T,C or G
ccctttcgagcggccgcccgggcaggtacttttgtgttcccagatgctatttatccaaggtggctagtaaattgccttagtgatccaatgggttccccccaccccaccttggccacagtctctgcattgcacagccagctccccaagacatgtggcctgaggggtgctatctgctatagggctgaatcatgcagcttcactttatggggaagaaacaggaaggagactgaatgcagataaagagagctttgggtttggggtcaaaatgcctgactccagtcctgctacagcacttgcctcangcaaagtgccttcc

SEQ ID NO: 3533 - DNA, 362 bp, Homo sapiens
  misc_feature 127, 128: n = A,T,C or G
ccctttcgagcggccgcccgggcaggtacaaagaatagtcccctaactccctgagctcggtgagggcaggcagggatcactgctaataagaagtaacacagaagccaaatctttaaggataaacaannaaagggaaaaaaagccgaaaaatgcattattgtcaaaaagcagtcctacattcaaggagtcatgagataaaatgaagtgcctgggggaaactttgagaagcttagtttgaatgaacagaggagaattgggacttcttaaagagcgataacactggaaatgtgtggaagagtccaaaccacatactatccaaggacaatccactgtctgacatactcaactttttaactgtgttt

SEQ ID NO: 3534 - DNA, 456 bp, Homo sapiens
  misc_feature 363, 390: n = A,T,C or G
cccttagcgtggtccgcggccgaggtacgcgggtatttggtatttaaacagaatttcagtggaaatctttcaaaaacttaaacctttttatacagaaatccatattgaatatataaggcaacactttgttagtttgctttttgagttattattatgtttgttacttgtaagtttgtaagcagctcttcctgttttcaaacagatgaagtttttaaacagataacccagcatgtttcaattttttgtggaataatagatgactcacagtaaagttacaacatattttcttttaaagtaaaaaacttaaggaataatgatacttgctttgccattcaagggcctttttttatctgtttactttgngggatcttacacatacaccagataccnagttttgggtgaaataagggtggttataattatttacttattgtcagcaattgctttgtggcctat

SEQ ID NO: 3535 - DNA, 679 bp, Homo sapiens
  misc_feature 457, 498, 509, 512, 515, 521, 552, 570, 576, 579, 605, 618,670: n = A,T,C or G
cccttagcgtggtcgcggccgaggtacttggacttaagaagaccaagacacaccaatcattatgctagttttaaacgttatcccctttctctactgtatattctgcctcgaacctattcttacagcaccttcaaacttattttgggttccctgtgatttgcacattggaagtggaaataattgtgagagtgcttgtaagtgtttcgcactgtatgagatagtttttatgccatatgggaaaaacacaataaaaattcactattatgaaataaaatagcatcattggtcatataattcacttccttttcctacaaataaattttattttcttgtaaggagagaaactaacaataatttgagtagttagagaataaaggaaatatttgtgagccttactggaatttattcaatatacctgaaaaaaattggtctgcctgtcctggttgctctcttttcntttaatattccaaggaatgtgaaaacttgtggggaaacctnagtgcattaancancanccaatncttgcttaatgaaatggggaacaaaagccanacccatttaaaagctttnaggaanaanaaggattgaggccaattccaattctncaaacttcacttncataaatctatcattttttaaaatatttaacaacttcaaaatccaaacttanaaaaaaata

SEQ ID NO: 3536 - DNA, 338 bp, Homo sapiens
cccttcgagcggccgcccgggcaggtacagggagcaaaggagagtcacagaaaataaagttttagaggaagtcaggagccaaaacatgtaatgtcttttagcccatgaaaagaaacttgaaatttattttaaatgttatgtgaagttatttgaaacttttggacagataattaatttatgttttaagcaaatcaccggctattgtgtggaaaatagggaacagagactagcaatgaaaatggaaggcggggggctgatagatggaggcattagaagtaatgagaattgatagaagttgatgaggttgagccagcaagacttgctgatgaaagaatcag

SEQ ID NO: 3537 - DNA, 361 bp, Homo sapiens
  misc_feature 253, 298: n = A,T,C or G
cccttagcgtggtcgcggctcgaggtacatagaactcagtctacttatttttgttctatttaagtgttctaacctgtcatcactattaaatagtggaatttgaattttttttgttttttaaacaaatttgtaggggggcagatctctttcttgggtttttctttcaacttagtaaggcctggcataatgaatcgcacattatagatgtaaaaattacttaactatgaaagcatgcagtggggtcaaagttctncagccatagcggactttggaaatttaagccaaaaagacagttttnggtaatttggctctccagttacatgttttaactccttgagggtgtatgggttatttcacattg

SEQ ID NO: 3538 - DNA, 373 bp, Homo sapiens
ccctttcgagcggccgcccgggcaggtactggttaaggaagagtattgttgaagatacacttagttttgtaagatatattaatttgatcacttgcacgtgtagttgaattattgcaaagaattgtccaagtataagaaaatgggcttccagagacactgcaatctctactgtgctgattcacactgcatcatatgatatagaggttgtatcttaatttagcatggtcctactggatttgctttttattactaaattactaaataaccttagagactaaaaacaacacagcattgtgagataattagggggtattgtctttagcctctaggggttgtggtaaatctgagcatcgtctcactggattctcgactc

SEQ ID NO: 3539 - DNA, 402 bp, Homo sapiens
  misc_feature 140, 355, 393: n = A,T,C or G
cccttagcgtggtcgcggccgaggtacctagcttttattcattttattattcatctttattgctttgattgcacatgctgctaacttcttatgaactctttgttctaataaataagcatatccaggtttttcattaaaantaaatggaaggagtctataaaattcttactagttttaatagaaacattgccactaaaatggtgtattctagctgtgtgagcttttggaaaatgttttcatttcctttatgtttgaatgttccttccaggtctttgaaaatatacattctgagttgaaaagctttataataggtaaaactcattaacccatatactttccatgctgggcacagcangtgtgggtagggtaagaaatataaagatgactcccaangattttttg

SEQ ID NO: 3540 - DNA, 346 bp, Homo sapiens
cccttagcgtggtcgcggccgaggtaccatcttcaccactccaggatttaaggcgtaaatcctcttaccaattagtcattcgttcaacagaacttcatggctaggaagtcacacttcaagttgcactagcacactattactttggggatgaaaagtttacatttcctaaaatgtgctacacaaaaacatttccataagtgtttttcagagagtcagttgcactacaagcctgatgaaactttttcaaccataaaaagactcgagttccataaaccgtcacaaagatgtgaacaggagaaactgcagactctccatcagatatatttattgaataagctgaatggaa

SEQ ID NO: 3541 - DNA, 330 bp, Homo sapiens
ccctttcgagcggccgcccgggcaggtactcaggtttcacatgaaccttagaaaacttggaagccactgtgtccccagatctcactccctcctggtagagccctgccacaagacagaacagatcaagaggcacgtggaagaaaatatgagccctccaggaatttcagtgaaaaccagctgagattcgagagtgagacatggcttttccaaatacagctggtgtgtgtgaattcttacaaaattacaggagcagcattgtcactgtgagtgagagatgatgtggtccatttgagaaaagtctgttttcttccttaaatcacattccaattt

SEQ ID NO: 3542 - DNA, 741 bp, Homo sapiens
  misc_feature 83, 90, 367, 368, 369, 370, 371, 373, 374, 375, 376, 377,379, 380, 381, 382, 383, 384, 385, 386, 387, 438, 465, 491,538, 541, 549, 555, 558, 571, 579, 586, 602, 615, 634, 641,648, 660, 669, 670, 671, 672, 673, 674, 675, 676, 677: n = A,T,C or G
  misc_feature 678, 679, 680, 681, 682, 683, 684, 685, 686, 687, 688, 689,690, 691, 692, 693, 694, 695, 696, 697, 700, 703, 704, 709,715, 718, 721, 727, 729, 737, 741: n = A,T,C or G
cccttagcgtggtcgcggccgaggtacaaaagagatggtaatttaaacttttaaaaatttggaacttgttgaaaataaccgtngtctcanaaaaaaaattggtggagggaggaatacatgtccactgaatgtcaatgctattaaatgaaataccattaatcagtgtttatccatcattttacagtcaggacttagaacatgcttagcaaagaagtcttccaaaatttgctgatatgcccaaaagaaagaaagtcagtatattgaagcgatatctgcactctatgtttgatgcacactgttcacaatagccaagattttgaaccaacttacgtgttaactgataaatggataaaggaaatgtggtctnnnnntnnnnntnnnnnnnnntcctttttgaaaaagtcatggaggccatggggttggcttgaaaccactttnggggggtccgattccttccttttttgnctaaaatttatgtatacggttcttcnaatgtgtggtaggggggggggcatccatatagtcactccaggttatngangggtcttntacttntangactttccctttnaagcgaangcttttnaaattcatgaaaattnttaattttaccgntggtaaaaaaatgaatggncctcccnatgaatnggaggttcatgngggggcccnnnnnnnnnnnnnnnnnnnnnnnnnnnnnccnttnnccttnctttcnttnttncctttntntttccttncccn

SEQ ID NO: 3543 - DNA, 486 bp, Homo sapiens
ccctttcgagcggccgcccgggcaggtaccaggacttcttaaaaacaatcatccctgtgttccatttactaaggaaaattccctcgtcgcgcatcagaaagactcaggacgctaaagagtatagctagctgctcatgtcagaaaggggggaaccaggaaggctatggtatcccacttaaccattagccagcacatattgtggacagatttaaattagaagacacttggtgatatcacttaagcctatttctggactcctgcaggaaaacaaatgctggcacaaaagaaaactgccaaacaccagctggtctggtagtcaacatttatgagctcttggcatttcataatgtgtcttacatgtgagaaaatccattgccattaaactcttttatccattcgtgatctcactttatagattatgtaagaaaacatcccaacaagtggacacatgcttaaagtatctaatgagcgaataaaatgaaaatt

SEQ ID NO: 3544 - DNA, 334 bp, Homo sapiens
cccttagcgtggtcgcggccgaggtactgaagcatgtgaagaagcatctgcccaaagcacatgtgaaggagcttatcagttggctcgtgggtcaggaattcgaattagaaaaaatggagtccatatgccaggctcgagcaaaggagcttgaagactccttgcagcagctactgagactccaggatgaccatagaaacctgaggaagtggttgactaatcaagaagagaaatggaaaggaacggaagaaccaggggagaaaactgagctgttctgccaagctttagctagaaagagggaacagtttgaatctgtggcccaattgaacaactcttt

SEQ ID NO: 3545 - DNA, 327 bp, Homo sapiens
cccttagcgtggtcgcggccgaggtactttgaagtgtcttcttatgagttccattttcccatgcctggtccccattaaatatagtcctaatctatctgtcttgattaatttctattgctcagttacatgaacccttttctctagccagactacataactcactctgtctgccacatatcccctgtattcccataaccagacttgacatgggggactcaatttggctggattgaccagccccttttctctgagatctgcactctgtgttcctcattaaactatcagcagttatgtttctgccatatgaccctcctctcgatccataaa

SEQ ID NO: 3546 - DNA, 592 bp, Homo sapiens
  misc_feature 55, 57, 539, 582: n = A,T,C or G
cccttagcgtggtcgcggccgaggtacttttttttttttttttttttatttgggngnttttgagacagagtctcgctctgtcacccagactggagtgcagtaatgcaatctcatctcatttcaaccactgcttcccgagttcaagcaatcctcccacctcagtctcctgagtagctgggaataccggcaaataccaccacacttggctcatttttgtctttttgtagagacagattttaccacattgctcaggttggccttgaactcctgagatcaaataatccagccttttgggcctcccaaagtgctgagattacagtcatgagccactgtccctggcctgtgtgctcaatttttaatgaagagtaaatgaatgaataatttgctcttctttcatcaagactggaaatataagcattgtgtcagccaggaagctaaagagaaaccattcagctccaaatcttaactactttgcctattctagctggcctgtttatgatgccgcagacagttagctgaaaatatcagctttgtttaangggaacacatcccaataaggcagaatgaaaagagttttttttnttaaaaaaaa

SEQ ID NO: 3547 - DNA, 398 bp, Homo sapiens
  misc_feature 325: n = A,T,C or G
cccttagcgtggtcgcggccgaggtactccattcaggagcacacaagggcctaacttatgccaagaatagagaagagttagaaatgactctcaatagtgtgatttgtagagtcccccggatcccaaggcaagggtctatggaacctgttcaggtcaggtgtttctgtggtgttcgctgccggtgtgcgtcagcagatgtggcaggaggaggtaaatagccacgtgcccttggggtgagtttcggtttctccagctttcaaggacttctaaaaagtgagcctggttgcagcttctacaatgcagtaatcctggcccttctctgaangtctttgaatcattgctcttggaatcacttctgggttgctcatcacctcaactttttcacccttcctttctta

SEQ ID NO: 3548 - DNA, 426 bp, Homo sapiens
  misc_feature 332, 338, 365, 402, 406, 412: n = A,T,C or G
cccttagcgtggtcgcggccgaggtacacgtttacaaaaatcttctacgtgcctagtattcttgctatcctgtggcctagaaacaagcataagtggctagagaataaggcacaaaatgtgcaacggagagaatctttgtcttatactagtgttcttataaatatgaccaagagaatcatcaaaacaaaatgaaacagcctggggataacagcaagatggagggttcccaggagcagcacaggatgggagatggaaaaggacatcagtcagtgcctgtggtctgtcagctgcttgacatgggccatcttcattcaacttccttaacacttganaattangtattggcatccctgctttagatgaanaaaaccaaggcacaacatgattaaattgtgcaactgntatnctgcanaaccaagattttca

SEQ ID NO: 3549 - DNA, 502 bp, Homo sapiens
cccttagcgtggtcgcggccgaggtacgcgggaaagcagtggtaacaacgcagagtaaggtagagggtgcttgaagatcaatttcatcttcataagggattctccttgccttgggctctgaggaatgttgggatgccttaatcccttcagcacaggtcactgttgatttagagagttgggtgcagctaccatggcctgagttgttttctcagctgaatcagattcagacagggcttcttctgagacggtgggatgttcttctaacaggtgtgaggaataattatctcactgtgtctctctgagtttcacttacctttccttaactctgttattgccacaggctgtaatgccagaaatgagggtttttggaaagtcgctgcatgtctgcttggttgtgagtctgggcagctgatgaatgggttgctgttatggtgtttacttttctgaatcaagtgttcctttgcagaagcagggggcttcagccattatgtaagctttcaaa

SEQ ID NO: 3550 - DNA, 398 bp, Homo sapiens
  misc_feature 314, 319, 324, 325, 377: n = A,T,C or G
cccttagcgtggtcgcggccgaggtacgcgggtgtcagaaagtagggtcagttttttgttcctatgtgctacttccagactatgatttttcctaactgttctctgagactcctaacatcaggtctgttaaaaaacgatgactttagccgggcatggtggctcacacctataatcccaacactttgggaggcagaggcaggctgatcaactgaggtcaggagttcaggaccagcctggccaacacagtgaaaccccatgtctactaaaaatacaaaaattagccgggtgtggtggcatgcacctgtagtactttntattnttttnncttttttttacacaatatatgattttattaataaatagtgcaaaagcatcantgataactgtttgaacattaa

SEQ ID NO: 3551 - DNA, 365 bp, Homo sapiens
  misc_feature 134: n = A,T,C or G
ccctttcgagcggccgcccgggcaggtacatgagatggctcattgatacaagcaaagccttggtggctctgcgctgaattaaggaagagatttgaaagcaaggctatttccctggcggcagtaaaactgcctcntggaaagagagcaagctatggggattagatacttaataaaatttttaggcaagagaaagagtccaggtcttttacctaaattgcacaccaattgagctcatctgcttattctctacacactcaggctagagaaaaagtgggcacatttcaaaactcaatgcttaaactatagcttgatgtgaaaaagtagagacaaatttgcccatgctacatcaaagtgtaagaactgtc

SEQ ID NO: 3552 - DNA, 576 bp, Homo sapiens
  misc_feature 371, 442, 458, 478, 502, 519, 528, 553, 569: n = A,T,C or G
cccttagcgtggtcgcggcccgaggtactagacaggtcaggcctgagtgattgttttatgtgccaaaggaagatatagcaaactgacctttttgctacattgagatgggggaatactctggcttcctgtcatttctaggtgactaaaactatcttgacacctatgcagactttctgacttagatttatagaatgaaagacatgaaagatgaaagataccttagaaattaactggctttagcactgcattttataatgaaaataataagactatgtgagaagaaaagaggcatgttggcaaatgggaagatttatggatatgacatcagaaccatggggaagggtggaggagggcatagagtgatttggctncgtcctctaggtggaaggctctcaaagcacaacttgattgatgagccggacaaaagcttgggagactatgncaccccgcgtacctgnccgggcggggcgctcgaaanggccaaattccagcacactgggcnggccgttctagtggatncgagctcgnacccaactttgggggtaatcatggncataacttgtttcctnggggaaa

SEQ ID NO: 3553 - DNA, 530 bp, Homo sapiens
  misc_feature 208, 213, 231, 301, 330, 334, 344, 353, 376, 407, 415, 429,449, 466, 480: n = A,T,C or G
cccttagcgtggtcgcggccgaggtaccctgactccctaatttgttcctacagattttaattttgacatggatggcttagggagaaagcagaaaggaaggaaaaagagaagaaaacagaaaggaagaaaggaaggaggggagccctggtagaaatttcattttgtccagggcaacttggggacttacaaaggaaagaccagagagcanaggcngagagaggaaatggagcnagaagtgtgaaaattaaaggggaaccccagaaaagaggaaaaagtttgaaaattaagttgtacctttctnttgagcttttttgttcagaaagtgccccnaaangggggttggngatacttanaaaaaagtttacaaggagaaacncttaattgaagaaggaaaattctttgatganggttgttntgtttttgaaaatntcttaaaaagacaaaaatcntttattaccaaatattnttgccccaaggggngaatttaaaactccttaattttgaaagggccttttttttttttttttttt

SEQ ID NO: 3554 - DNA, 580 bp, Homo sapiens
  misc_feature 67, 73, 121, 126, 159, 188, 192, 207, 208, 221, 236, 237,241, 249, 262, 264, 269, 291, 301, 304, 320, 367, 370, 372,386, 399, 418, 421, 423, 435, 437, 457, 458, 460, 467, 475,486, 496, 502, 516, 525, 526, 527, 529, 530, 535, 538: n = A,T,C or G
  misc_feature 544, 550, 552, 553, 558, 559, 561, 562, 570: n = A,T,C or G
cccttagcgtggtcgcggccgaggtactaaagtgatattaggatgtaggacacctacacaacttggnaaatgnttgtatataaggaatttaggatgagtttgtttattgagtaataagatnactgngagtacccaggctacctgtcaaagggtaagggnaagaattttggccccatgtgaaaagtttngggngggtgaacaaggggnnaaaggggccttgnttaaatggaaatttnngttnttttgggnaattgtttggttntngaagntttccaccaaaaaaaaattttnctttctaggnggntttctcaatttaaatnctcaaaaacttttccaagatttttttaaaaaaaaaaggttccaaaanttngnaaaggttttaaaanttttttttaaccnttaaaattcttttttttgnggngnggggtccttttngntaaattttcccccaatttgnncnccttaantttttatncccccctttcntttttttttncccccnttttaaggtaattnctcctttannntnnttatnaanaaatanttaagngnnccccnncnnaaattttntttttttttt

SEQ ID NO: 3555 - DNA, 331 bp, Homo sapiens
  misc_feature 264: n = A,T,C or G
cccttagcgtggtcgcggccgaggtacatttggaggggaaaaaaatttatcttacctccagcaagaagagatttctaaaatattgtgctgaaacacaatatcctaggattagacacttttagatagttaaatataagaaatgctaggcaagcataatttgtatatgtataatacaccctgaaaattttattctcaacttcacttctgtttagatctgagacactaaaaatatttcctttagcagaaaattcttcaatgattatnagaaaagaaaatttgctggtatagtcacaaattttaatattccaaaattaaagaagtgcccttaaaa

SEQ ID NO: 3556 - DNA, 685 bp, Homo sapiens
  misc_feature 345, 348, 365, 442, 448, 479, 489, 497, 513, 523, 526, 530,531, 532, 533, 547, 556, 557, 560, 564, 565, 573, 574, 580,582, 590, 596, 597, 598, 599, 604, 631, 638, 640, 641, 651,667, 669, 683: n = A,T,C or G
ccctttcgagcggccgcccgggcaggtacgcggggatgcccgagtggacatctctcattacacacccaaggcgaaacttagaaatagcagtggaggtagggatggatgtattgccagtcttcatattccgagctatttattctctatgagtgcttaaaaaggacagtaggaatgtgtttttaagtggggcatgtgtgctcctgtgagtccagagaagttggcaattctgtgtcaaaaacttgtatttttgcatatgtatggcaaaagtaaagacttgatttctgattttgaagacacataatctaattggcaacacaaaatttacattcactatacaagaatcantanaagcaatatgtaatcangtattctataattttatttggataataaatgccatggaaactttacaatggggcaaacaaatttggatggaaataanggtaantgacctgttgctttatttatttaaaaacctnaaagcttgtnctttttanaatggaaacaatttgnaaaaaaaatnaanaatnnnnaaacaaaaaaggtntttaaagcnnggncctnntgggccannacaatntnttctaatnaaaacnnnncttantattttccttaaaaatattatcctttnaaaagcnannaataattcancctttttccaaaaatntnttcaaaaaaatttntt

SEQ ID NO: 3557 - DNA, 561 bp, Homo sapiens
  misc_feature 552, 556, 558: n = A,T,C or G
ccctttcgagcggcccgcccgggcaggtactaaaggtaagtctatgagaatgcaagcgggtttatttggttttaaacaacactttactcgttactctgcgtgaactctgtgagatggcacgatgattttaggagagctgatgtaagtgaaaagttacactctcagcattgattgcttaataataagggaatactatggaaagaggaacatgggtttccctcagatttttcagaattgcctaaaagagcagcaattgttttagcggcgtctgtcaattccaaactattctgaaagaaatttctgcccatcttaaaagaaagcatcaaaatgtcataaaaagttggaagcccataagcttgcatagccgctgctgaaattctctggggtgaggagcgggaaaggggttaagatctaatcttgaacctcttctagagttacctgggggatctgaatctgcactttctgggtaaatcatagcttattagtgccagaagtgaggttagaattcatctggtgaaaccactgctattttacacattggagaactgaatnccantnaaa

SEQ ID NO: 3558 - DNA, 672 bp, Homo sapiens
  misc_feature 473, 475, 502, 548, 555, 562, 571, 574, 582, 598, 620, 633,639, 645, 647, 657: n = A,T,C or G
ccctttcgagcggccgcccgggcaggtacgcggggtctttcttccgaggttttataaaagtcagagaacccagaaggcccataattaggttttttgcactctgcctttcaggcacggtgtgtaggaattccagtttggatgatatttgcacattttgatgtgtctcctgagttgagtatatgatactcttgtgggaactacaggtgtgttttcctctaagaaggaacagtgcttctgtgtttgggaaggcctttccaagacaccatgtgccatcattattacatctttttttatgtgtgtcttgggatctttccatcactaatttaataagcatagcttattatagtgagcagccatttttggacctgccctccttttcaagtttcatttttttcttgccttttgttgcccttgtcattctctacttgaagttctcagatccagaaattgggctttaatttctttgattaggncntaaaaaatgccaacacatatacactcnagatgacacttaatgggggactgataattgcctaaaaaacaatccngctttanttggatnggggggaanaanaaaacttngggaataattatggtnaataaattaacccaatggggtntatcaaaaatttnggaaangaattncngaataacctncctgttaattaaaaa

SEQ ID NO: 3559 - DNA, 387 bp, Homo sapiens
  misc_feature 294: n = A,T,C or G
cccttagcgtggtcgcggccgaggtacaggctctctcagtggccaactatttggtgatctgcacatttttagcatagaaccttgaaatgatacagctgtgctggtcattacggaattctctttttgtgtgacaagaattgtgacaggctcccaggacctaaacccagaaggaagcaggaccatattgctgcctagagaaggggatggagcatattccaggacaccgatgaaacagaagcttccatcacagtgctttctgctaccttatgagacagtttcgcatctcaacagctntaggatacaaaggaagcacatacatttatactttataaggtggccaaggaatcctactgtgaacaaagaatttctaagataataaaatcccac

SEQ ID NO: 3560 - DNA, 310 bp, Homo sapiens
cccttagcgtggtcgcggccgaggtacctatcagatacagaaactgcaaaatgctacaaaaaattcatctaatgtataatatggagtgtaacattggaagagcagaggggctgtgaagtgagagtctctgttgactttgtctttcacagactcaaacaaaataccttcgatgtgactttactggcccctattttagtcccctgagcctcaactttctgtatttcattgggcttttgatcactaattttacgtaaatttcactaatacttactggagttttcttacatttggtttgcttaaatgtcagcaa

SEQ ID NO: 3561 - DNA, 502 bp, Homo sapiens
  misc_feature 88, 126, 217, 403, 426, 439, 445, 481: n = A,T,C or G
cccttagcgtggtcgcggccgaggtacgcggggttcatttattaaaataatacatattgatctcttctgggttccagaccttatactnggctttgggtaaatgttggagagtaaaagagacattgncaccaccgtcatgactgaccctttgattgtgtgattagaagtctctgtggcagcatggcccacaatgagcaacatacgcgatgtgtttcantatccaatgccaatggagtggttaagtcatttggggacataatatgatggaatgttattaatcattcaaagtagtgttcattgacaattttgatgtaatatgttcaagatttaagtgaaaaagctggttacacgtgaactggaaaaaaattctactggatattatattactgatttcatgggatgnggaattatgaagattttcattgncttctgtgtctgnttctgnattttctattagagaaatatttttctacaatgagcntatgctttaatactaaaaaaa

SEQ ID NO: 3562 - DNA, 316 bp, Homo sapiens
cccttcgagcggccgcccgggcaggtacgcgggggttaacaagatttctatgccaaattttcaaagtttttatcatccctacctcattaggcttagagcaagactttggtaacaacggaaataatttggagtcatgctctcagctgaaacacagagtttccttccataaggtctagaaacctgtgcagaacatgaaatgtaaacccttgagcagccataatttttctcaagtatcacacttctcagtttccagtgggatcttttcagctttcacggtctcagcatcctatttatcagtggaaagtaatcagggaaa

SEQ ID NO: 3563 - DNA, 504 bp, Homo sapiens
  misc_feature 499: n = A,T,C or G
ccctttcgagcggcccgcccgggcaggtacaagaccctcaaaatatgtaaaatctttgacacttaggtgtgtcaaagatgttgagctcagcacagaatatgcttcccattctgctgggcacagttgttgcttctaagaggctgctcagcagaaaataaatttcccagtatccattgcagttaggtgaagccaaaaaatggagttttcgccaaaaacatgtgaatggaagtgatgggtccatagaaactacccatgtaagcctcctccatgtgctctttcctttctggctgggttgaatggaaagaagcacaaagccatcatcattttgggacctcatatgattgcatgaagatggactatcatacccaccagctcattcaaagaggattgttctgtctgcaagattgtgattaagacacatgtttgtagatccaattattacaaagttagcctcactaactcagtaaatttagattttaaaagataagttgatctttancttta

SEQ ID NO: 3564 - DNA, 716 bp, Homo sapiens
  misc_feature 488, 502, 591, 599, 607, 609, 611, 632, 641, 650, 653, 665,679, 681, 682, 684: n = A,T,C or G
cccttaagcgtggtcgcggccgaggtaccatgaaacacgtctatacaatatggcattgtaaattggtgtcacttttgcacaggaatatggtaataacggagcaaaatttaaagtgttcatatgatttgactccaccataatctcaaaatttcatctaaaatatactggcaaaagcatgtcaagttatgaataagaaggcttgtcataacactacttgtttagcatcaaatttccagtttacaacaaattggaaacaaccaggacgtctctagctagtaacctagaaaaatatgtaacaagattaaaaatttagttaaaactatatattttgtgtgtattggggatatatgaataatagtcacacttctgaagaaatgggatccagatgtcataaatatgaacaactttcttattgacaaagatgactctaacaatgtggcataatcactagccaagttaactactttattcccagaattaaacatatncatgtatcattaanggatctccccagggtaatagtggaccctgctttttagtaaacctcatttaaaattgggaaccagaatttaaaataacctggagaacaanagtggctnccaaaaanangngaccttgagaaccatgttcanaacctttantttcctttnttntccccaatctgnaaattctttgcttncnngngggggaagggccggagtttattaaaaaaaggt

SEQ ID NO: 3565 - DNA, 422 bp, Homo sapiens
  misc_feature 65, 72, 114, 120, 131, 135, 144, 193, 269, 341, 358, 373,408, 409: n = A,T,C or G
ccctttcgagcggccgcccgggcaggtacgcgggtctgaaaacaatatctttaagaataaagganatgaaantgggcatggtggcttgcatctatagcctcaatgacttggganactganggagggaaaanttgnttgaaaccnaaggaacttgaggctacagtgtgctattgaagcatgtgtgtgaaacagncactgcattccctccagcccagacaacacatcaaactgctgtctcaaaaaaaataataataataaataagaataanggagaaattaacacatttccaaatattataaaaccctaaggtagttcattacttgatagacaaaaaatgctncaggcaagtccttcaangctgaaagggaaagnaaatttactttaaacaagcaatttttgaaagcccnnaaaaggaaaaaaa

SEQ ID NO: 3566 - DNA, 441 bp, Homo sapiens
  misc_feature 428: n = A,T,C or G
ccctttcgagcggccgcccgggcaggtactgggcttgcaaggtagacagcactgtgagaaaaggaatcatagaaaattagtgctgagatgaactctgagataatagaatctaacatcctcattttagagaaaagaaacctgttgtttataaggagttgactgatgtgcctagggtcacacagctagagccctttaagccaaattgttgctctattatcctacacatttcctcataaataagttcatgggcaggaggtgagagatgaagaaaatagatacaccagtcacaatgttaagagaaaagctctaagagccaggaagagaataaacaaaaatgaggggaataaaagaatcaagaaagaagtaaatctttctttgttcaaagacaagttccagacagaactgggaacatttaaagcagagaaggnagaaaaaaaaaaa

SEQ ID NO: 3567 - DNA, 338 bp, Homo sapiens
  misc_feature 271, 286, 290, 292, 298, 299, 300, 301, 302, 304, 307, 309,319, 320, 321, 324, 326, 332, 335: n = A,T,C or G
cccttagcgtggtcgcggccgaggtaccacacatatacacttctggtagttttctttcttcattttctaactattttgtgagtatgttaaatatttattgcaccttcatttttaatgaatttatctcccagtgcgtagctatagcaatgcttttagataagtaaccttgcacattttcattattttcaatatttcactgttacataaaataagggtgaccatcaaggttgattttgacttgagaaccaaaagttctcactggaggcaccangaaaaaaaaatgtantatngnccatannnnntnatntnatatacaatnnnatntncaatanatnata

SEQ ID NO: 3568 - DNA, 543 bp, Homo sapiens
cccttagcgtggtcgcggccgaggtacgcgggggaaactgaaattgccctattgggttagaaacctataactgcccagaagtagcaacggagctgaagtcagaaagacaatggaagaaaatgatggaagtcttaggatggcaacgaggacacattaatcatggtagcgctccaaatataaagcctgtggtcataagatgtgaccatttggaatcccttgacttgagtttgttcccgtcatccttccaacctttcagtttggaggcaaaggaggttgtatccagaaataagtataatcttcaaatgtgcctgtggtcaaagccttagcaccaaccacatgagtttaatccaacggcaaaattatacagtggaagaggaagtaacgtgcgtgccaacgtggaggtgagtttagttcaacatgaggtcccagtctcaaaaatgctctcatctgaaaagagttcaaacctctgcttctggcctgagatagccttgaataacaggtgggagaagacaaataaccagaactaaaagggtggaaaaacta

SEQ ID NO: 3569 - DNA, 582 bp, Homo sapiens
  misc_feature 447, 563: n = A,T,C or G
ccctttcgagcggccgcccgggcaggtacttggtttatgggaattttcgctttctgctccaaggctgaatctgtcagatgactgactactcagcaaacatttgctggtactctctgtgttctaggaactgttctgagtggtcgtgacaaaaagatgaaagtcagtgatccagaagaattgagcttagtggcagatcattgtttagtgttcttagactcaaagaattgaggattagaagaaccctttgaggatattcaatttgtctccttcctgcatagaaggctttacccaaacaattagcagattgatggattttttttttcttaaacagctctagagaactgtgtcctatacagagtgcatgtttttaggggtagacaggaatgccaacttgggaatcattctaaatacataacatgtttatgttaactcttttcagatccaaangttgtggacacatatataaaatttaatttgcttctgttaattcagagatggagtataaaacttcaggggaaaaatattgtattcacaatttattaagggagaggaattcctccctnaaaaaggtaaccttggaat

SEQ ID NO: 3570 - DNA, 319 bp, Homo sapiens
cccttagcgtggtcgcggccgaggtaccttcatcccccatttcaccagtcttttcctggcactttctccctctattcctcactctaagactgagtggggaatcaatatttggctgtaaaggagtatatggtgtcttaccttgtgtgctgaaacaatgtatttactcaaagtgttatggattttcttttttctctacattatgccaagacataaattctgagagtgtttatgagggtgcctcttttcccctctgctttctttccaagttagagacatcaaaataataagccttaaccattttcctgtttttaaaagaaat

SEQ ID NO: 3571 - DNA, 717 bp, Homo sapiens
  misc_feature 530, 577, 586, 631, 694, 701: n = A,T,C or G
cccttagcgtggtcgcggccgaggtacatgagatggctcattgatacaagcaaagccttggtggctctgcgctgaattaaggaagagatttgaaagcaaggctatttcctggcggcagtaaaactgcctcctggaaagagagcaagctatgggattagatacttaataaaattttaggcaagagaaagagtccaggtcttttacctaaattgcacaccaattgagctcatctgcttattctctacacactcaggctagggaaaaagtgggcacatttcaaaactcaatgcttaaactatagcttgatgtgaaaaagtagagacaaatttgcccatgctacatcaaagtgtaaagaactgtccatcttaagctgggaaacctgaaaatcatggcaagtataaaatcactttttagtaataagacaaggaaataaaataacataaaagcacatgcaaagaaagtattaggaatccaccctacgaaatgcaatttttaaaaatgaccacaaatatcccaggaataattattcngaaaggatgcaatggaaaacaaaaattcaaagaatccatcaagggcnttccccccnaaattaaaatgaaatgagaaatccagagccgaaagaaataccttntgttggctaaaataacactgttttccaaaattaggagaatttgaaattagccaaagcaaagtnttctgtnaatataaaataatttt

SEQ ID NO: 3572 - DNA, 325 bp, Homo sapiens
ccctttcgagcggccgcccgggcaggtactttgtttgaaatcttcttcccccaaatgtcacgtttggaaataggagcattttatttgacaaaggtaagagttggagatcattaactgctatctttaaataagttaaatttatggtatagcagagtaactggacttttaataaggttttagaagtcaaaataaagacactagtgtgaatgatggtgggtttcaattgtctcctgggcattttggtctattgggttaggagagtaggggtcccagaatgttctgtttcttttcctcctttaacaaattttattgaacacttactagt

SEQ ID NO: 3573 - DNA, 335 bp, Homo sapiens
ccctttcgagcggccgcccgggcaggtaccatgaaacacgtctatacaatatggcattgtaaattggtgtcacttttgcacaggaatatggtaataacggagcaaaatttaaagtgttcatatgatttgactccaccataatctcaaaatttcatctaaaatatactggcaaaagcatgtcaagttatgaataagaaggcttgtcataacactacttgtttagcatcaaatttccagtttacaacaaattggaaacaaccaggatgtctctagctagtaacctagaaaaatatgtaacagattaaaaatttagttaaaactatatattttgtgtg

SEQ ID NO: 3574 - DNA, 347 bp, Homo sapiens
  misc_feature 288: n = A,T,C or G
ccctttcgagcggccgcccgggcaggtacgcggggttacagcattttttccttctctgtgcaccactcacacagaccccacgaaatgcatacaatgcacacaattttatggtcataggagaatgattcattcttagaaaaaagattccactgatatccactcaatacttgtgtctcacttggcaattggcatacgtgactgttcctctatttttccatctacctaatttcaaaggatttccagaaggaaaagaagatttaaatgcttcatttcaaaatatttctgagnttttgacaaaaggtgccaaagaccacacatttgggagaaaaatacagtcctttttaaat

SEQ ID NO: 3575 - DNA, 615 bp, Homo sapiens
  misc_feature 375, 496, 497, 525, 550: n = A,T,C or G
ccctttcgagcggccgcccgggcaggtacacaatctctgatttgcaagaatgagacatcatactcattcttagaaagttaaaaagcttagctatccgtcctcaacaagcaataaaaggaaattagactgagaagatggaaaagtgagacagttaaaacttccaggatcatttatcaactccaataaccaagcatcataactttatctaactttagctccacaaccttgacgaaaaatcacagtaacaccgtaaaaggctaaaaaaaactacttaaacttagtgttatttctctcccttgttaacctgaaactaaacattttatcccacctcaaagataatgtttaaataacaaatatgtatctaaattaaaattncagtgatttttttaaatttaaaaaccataggggtgctttttatactcattataaggaaaacattttttagcctctgcaggaagaatgataatactatttttaattatataggacattttannaaaaactcaaaatatttttgaaatagtnaagtctctggatatccctgggaggnaggttgaatatgattatacccaattgtctaatggggtaatctggaggcacgaaggttaaacaatt

SEQ ID NO: 3576 - DNA, 409 bp, Homo sapiens
  misc_feature 230: n = A,T,C or G
ccctttcgagcggccgcccgggcaggtacgcggggggaaacccattgaaagaaccgagtctgaaatagagtaaggtctttttaacaacaaaatgactttgcatgggtgtaaagccaaccaactaggtcagactttctaggaatgaacttcagtagaatttaaactttgttagagacaattcacacctcaagtctctatccagtggatcaagctctttctggatgaagctntatgtaacctagtaaatcagagctttctttgggtgggcctggaagtttgatatcaagaataaccagcctgtaatcccagcactttgggagctggaggcaggaaaattgcttgaggccaggagtttgagaccaacttagataacatagcgagaccttgtctctacaaaaaataaaacatt

SEQ ID NO: 3577 - DNA, 384 bp, Homo sapiens
  misc_feature 370: n = A,T,C or G
ctgcagaattcgccctttcgagcggcccgcccgggcaggtaccacctaacaaattggaggaaatgaaaagacgaatcaacaacattttggagaaaaaatttattctacttctagaatttcattctacaagtgcttagttcttggtttggtagatgaagtgaaatcaaaattggatatttggaacattaaatatgggagcagagaatctgtggaattattgctggaagactggcataaatttattgaagaaaaagaattcctagctctacttgatacttcttttcaaaaatgtggagaaatttataagaatttggctggagaatgtcagaatattaataaacagtatatgatggtgaaatctgatgtttgnatgtatagaaaaaa

SEQ ID NO: 3578 - DNA, 384 bp, Homo sapiens
  misc_feature 28, 62: n = A,T,C or G
ccctttcgagcggccgtccgggcaggtnctagagacaatatcagaattcaaaaaaggacttntttatcatacataaaagatccataaagaatagtgaaatctgaataaagtctacagttttagtttacagtaacatatatataccaatgctggtttcttaattttgataaatgtaatataaggtaatttaggtcatattggtgagtaagacggtattgggaaataccttaaagttcagttaccttaagtcagagaactggcctgctaggaagtgttgggaatttgtctttggggctttgtcttcctattatctttgcaactttgctgtaaatctaaaattatcctaaaagaaaaagttactttaacaaaacaagattcataatg

SEQ ID NO: 3579 - DNA, 585 bp, Homo sapiens
  misc_feature 574: n = A,T,C or G
cccttagcgtggtcgcggccgaggtactaaaaacaaaaactttctattgttttgaaaccttcaagtcctttacctattgcccttttcccactttgttttaataatacaaaaatgtaaaacatctcttaggaacgtaaattatagaccaggcatggtaactcaggcctataatcccagcactctgagaggccaaagcaggaggatcacttgacctcaggaatttaagaccaggaggagacctcttctctacaaaaagtaaaaaagtaaaaaaaaaaaaaaaaaattagccaggcgtggtggtgcacacgtgtggtcccatctactcaggaggctgaggtgggaggatcacttgggcccgagaggctgcaaggctacagtgagccatgatcatgccactgcactccagcctagacaacagagcaagactgtgtatctaaaaaaagaaaaaaaatagaaatttattgttacagtaaggggtgctgattatctcacgtatgttaatgttccaaaattgataaaagctggcttaaaccacaatcttcccttagggaaaaaccactacattatattaatncaaaaatttaa

SEQ ID NO: 3580 - DNA, 266 bp, Homo sapiens
  misc_feature 194, 206, 234, 235, 236, 245, 251, 252, 254, 255, 257, 264: n = A,T,C or G
ccctttcgagcggccgcccgggcaggtaccagggattaggatttcattatattttgttggggggcagaggagggtcacagctcaaaccacaccaatggctttgtcagatttcctgttttacttctgttgcagttttgtctgttctctctttagtaaactatccaaaaaaacctcttgattttattgcaacttantgtaatacttangtattcattccattatcagaatattttnnntatttttgngaccanngnnanggtgcanta

SEQ ID NO: 3581 - DNA, 402 bp, Homo sapiens
  misc_feature 342: n = A,T,C or G
ccctttcgagcggccgcccgggcaggtacctatttaacacagaaaaaatatactagatggatgtatacaaatatgcaatctagaatagtttatgggagtgcattccactaaatgcatgttttaatttatcatttatattacagctagtaagaatttgcacatgctgcattcttttcaaatctgcctcactaccctgtatcttctatttttaccaggtcgggtcctagtagaaacagcaactctgggaccaggccacctaagcctgaccttcaagcagaaaatgtccagtgtgaaaatttatcttaagtcatcaatcatatcaagccatataacatttttatncattaaaataaaaaaatacatatgttgagatgagcagctaatagctagtgctcccttcaa

SEQ ID NO: 3582 - DNA, 509 bp, Homo sapiens
  misc_feature 108: n = A,T,C or G
ccctttcgagcggccgcccgggcaggtactttcccaggctattagtattatctaatgagtggcttaaagataccagaaacactgactgaggtctccacctgcttctgntgaatgaatgggagcttctagccattgaataagaggcagtagccaatgtttcttattctgaatggtccaggttgacttttataagagaaacactcagccttttaattgctgaaggtctggcccatagactaagattgcacattcttagtctaggttacacttgaactagactgcacccactgacgatatattcaggttcaggtgttaactcacttggattagcatctggcctgcctatctgaatataggttgagacgtgtattggaatctctgactaggtcagaatacgttcttaagttatattctcaatactgaggaatttttacttgtagaaactgaaggctcggaagaggatgataaagaaaatgataagactgaagaaatgccaaatgattcagtcc

SEQ ID NO: 3583 - DNA, 234 bp, Homo sapiens
  misc_feature 54, 128, 202: n = A,T,C or G
cgggggcggaccgtgtcaaattcatggaacgtggcatcgtgctctgacaagganagcaagaggtcaggatccacaaaacaggccggatgaaatcaccatctccgtgcggggaggtggagagagcatanccctccctgccagtctggcaactccagcaaagtcctcatgctcatcccacacactcggtgctagtcactgctgngtgtttacattgagtaatggagctgccggggg

SEQ ID NO: 3584 - DNA, 464 bp, Homo sapiens
  misc_feature 191, 297, 376, 424: n = A,T,C or G
ccctttcgagcggccgcccgggcaggtacgcggggacagcgcgcggaagaaaaaccagcaagaaggcggcgggggaagatggcggtcctggggtagagtttgcaagctttctgactaggctagtcgagtaactattcgggtcatggcgtcaaactcaactaagtctttcctggcagatgccggctatggcnaacaggaactggatgccaactctgcccttatggaattggacaaaggcctaagatctggcaaacttggtgaacagtgtgaagcagttgttcgctttcccagactttntcagaagtatccattccctattcttatcaattctgcattcctaaagttagctgatgttttcagagttggaaataatttnctgaggctatgtgttcttaaagttacccaacaaagtgagaaacatttngagaagattctaaatgtggatgaatttgtggagagaattt

SEQ ID NO: 3585 - DNA, 551 bp, Homo sapiens
  misc_feature 390: n = A,T,C or G
ccctttcgagcggcccgcccgggcaggtacgcgggtgctcccagggaggcgtcagcgggcaccgggcacacgacagagtgctcagcaccatcagccatgagggagccacagatccaaaccacaagacgccacttcactcccgcggggacggtgtcagtaaaaacaggtgagaaccagtttgggtgaggatgtgaagaaatgaagcctgagactgcgggtggcatggaagctgctgccgccacttcagaaaacagtctgacggtttttcaaacagttaagcagagtgaacccagtgcccacttggggcaggggaaggatgagcatgttccatatgcacacaatggactattaccctgcgagaaggaacgagctattgatattgatactcanaacgtcagcgatgaatactataaacatcctgctgtctgaatacagccagatcagaagaaggcctactgtagagtccatttgtagaaagttctgtaaaaaccaaattcagatgacagaactaagagcacttgtatcccctgaatggcggcacgggctggaaa

SEQ ID NO: 3586 - DNA, 322 bp, Homo sapiens
cccttagcgtggtcgcggccgaggtacatctggtcaccaagtcctatatttttctcaaatgtctcttacattagttactttccaagttttacaatcagaaaaatagtctagatttttttcaccacctaaatattttctggcttccctttatccttactttaatttatccactaaaaagacaccagaattactccccaaattggccatttttctgatttttaaaaggatggatagtgtattttggtgggaaggatgagaaggttaaaaaatattatctaaaattaaaatgcaatattttggaaagagagatctttggtttaga

SEQ ID NO: 3587 - DNA, 511 bp, Homo sapiens
  misc_feature 127: n = A,T,C or G
ccctttcgagcggccgcccgggcaggtacttttttttttttttttttttttttttagacagagtcttgctctgtcacccaggctggagtgcaatggctcaatctcggctcaccgcaaactccacctncaggttcaagcgactctcctgcctcagcctcctgagtagctgggattacaggtgcacatcaccatgcctggctaattttgtatttttagtagagatggggtttctccatgttgatcagcctggtctcgaactcccaacctcaggtgatctgcccacctcggcctcccaaagtgctgggattacaggcataagccaccgtgcccagcccagtaatgttttaataaatacccatttaataattttgtctgacacctaaactcataacaaagatattttaaaatgttagattttcactcacattagtatacatttacaatttaatgaaatgcaaaaacataatgcactactgatcctgtaaaaaataaatttaaagggtttattttt

SEQ ID NO: 3588 - DNA, 545 bp, Homo sapiens
  misc_feature 23, 531: n = A,T,C or G
cccttagcgtggtcgcggccgangtacaagataaataggatattactagagttatagcctacaatgtaattcattatttagaaccacataacatttattgtgaaatttccaaattctgtaatgatcaatttataaggtattgtcagtattattgcattatagtagttttcaaggcttaacttttatattcctagagtgctcactgtgttgaattcattataaagacaatgttccaacatatataaagaaaaagtagaagagacaagtcaacatactgccctcatattttggaacattttcttgcagtcttagcctattccgtgcatttacagttctgtatcctcccttaatactaatttaattagctacttccatattttttaatttaaattttattttattttgtaattttaaaaacaaagttgaaaaatagtcttaggaatacttcaaactggtgggtattatatatttctgggtataaggctttttttcataaacaaaaagtctgaaagaagattcacaaacatggtnaaaaaaaaaaaaaa

SEQ ID NO: 3589 - DNA, 412 bp, Homo sapiens
  misc_feature 58, 338, 397, 399: n = A,T,C or G
cgcggccgaggtacgcgggtgaaaggatcagaacttaaaaaagctgcagaggtcccanatgaggagctcatcaatcttctactcaagtttgaaattaaagaagtgattttggaatttactaaacagcagaaagaagaagatcaattctagtatttaatgttactcagttaggaacagaggccacaatgagaacatttgacttaactgtggtatcttatttaaagaaaatcaagcttggattatcatgaaattgaaggatccaaaagggaagccccttcactttgattagctcttctgacaaacctggattagatcttttgaaagtggagtatattaangctgataagaatggacctagttttcaaactgcttttggaaaaactgacaaacagttaangngggccttttcatc

SEQ ID NO: 3590 - DNA, 265 bp, Homo sapiens
cccttagcgtggtcgcggccgaggtaccattcatttaaaggcataaatgtccaatggggccatcttgtgatacatgcactgtcacaggaaaagtttccaggaaaagtcaagccagggcttcacagaagatcaaaagaaagagacaaggagaagctaagtgtattagtcaggattctctaagggacagaactaatagaatatatatacacacacaaacacacacacacacacatatatatacatataaataaaagggagtttatta

SEQ ID NO: 3591 - DNA, 539 bp, Homo sapiens
  misc_feature 443, 535: n = A,T,C or G
ccctttcgagcggccgcccgggcaggtactcaaatatagtgagctctttcagttctacatttgaggaaaccttactctcaaagtgccttttacataatacttcagatttgtcaatgaatatttctatgcatctaggcatcatgacaatggaagttaaaaataatgtcctggagacatttcaaaaccattaggtatcatctgaatcatcaagatacaattatgcttactatagtgttatcattaaacattaacatttacttttttcaaaatcagtgatctgtattgatacatatttagtagcactctattaataagaatatgtaattaaccacagcactccactgcttgaccatatcaagatgttagagaatttgcttaaagagttctgtttagccccctacttctaacagcttcccgtctctctactgagagataaaagagtnatagaaaatagagtaatagaaactcttttatattcatcaaagccttaggatcatataaactctcgaactaaaatatcttctgagggtaaatnaaaa

SEQ ID NO: 3592 - DNA, 733 bp, Homo sapiens
  misc_feature 450, 709: n = A,T,C or G
cccttagcgtggtcgcggccgaggtactgggaccccaaaaatatcagaacctataacagtttttgttaactagacatctggaaaacacctcactgaatctttacgtgaatattttactttaaattatattttaatacctaagaacccagaacttcctcttgtgaaaaaaacaagagagtttgtcactgaagattcttcagtttatattccttgaggtttggacttagttcgttttagtaatcatttctccatgcccatttccttgttcttaatcacaaatctaatcatgtatttttataaatattcaaaattaaatatatttatctacttatgtaaatactttttagttactgtctaccaatagcatgtatagggatctcatcaacaaacagatttagaactttttagatttgttccagcagcttgtaaattcatcttagacttaattgnttaaatatatcaacattctaatcattttaaaaagtggacagaaaagattaattccaagttttcttttacttaccaagctctgccattccaccccgctggcttaacaatattatcagctctttggatctcattcttgctaagtaaaagcatatttcttctctagctgggataataatcaactttctagaaaggtcatttggaattctcttctgggtaacccttagcattacagcagtctggccaacttatgctaatcaantttattgaagggagaaaggaccag

SEQ ID NO: 3593 - DNA, 605 bp, Homo sapiens
  misc_feature 285, 298, 323, 326, 352, 353, 354, 355, 356, 357, 358, 359,360, 361, 362, 363, 364, 365, 366, 367, 368, 369, 370, 371,372, 373, 374, 375, 376, 377, 378, 379, 380, 381, 382, 383,384, 385, 386, 387, 388, 389, 390, 391, 392, 393, 394: n = A,T,C or G
  misc_feature 395, 396, 397, 398, 399, 400, 401, 402, 403, 404, 405, 406,407, 408, 409, 410, 411, 412, 413, 414, 415, 416, 417, 418,419, 420, 421, 422, 423, 424, 425, 426, 427, 428, 429, 430,431, 432, 433, 434, 456, 462, 467, 468, 469, 470, 471: n = A,T,C or G
  misc_feature 472, 473, 474, 475, 476, 477, 478, 479, 480, 481, 482, 483,484, 485, 486, 487, 488, 489, 490, 491, 492, 493, 494, 495,496, 497, 498, 499, 500, 501, 502, 503, 504, 505, 506, 507,508, 509, 510, 511, 512, 513, 514, 515, 516, 517, 518: n = A,T,C or G
  misc_feature 519, 520, 528, 539, 553, 560, 563: n = A,T,C or G
cccttagcgtggtcgcggccgaggtacgcgggatgtttctatatgccagtaacaaactagctaaaatagaaatcaaggaagaaattctatttacaatggctacaaaagtgaaatgcctaggaataaacttaaccaaggatgaggaaaaaaaaaacccaaaaggcctctacaatgaaaaccacaaaacactgataaaataaactgagaaggacacaaacaaatggaaaggcatcttatgctcgtgggttggagtaactaatactgttaaaatgaccatactgcccnaagcaatctaaanattcaatacctgcccgggcggccgntcnaaagggcaaattccaacacactggcnnnnnnnnnnnnnnnnnnnnnnnnnnnnnnnnnnnnnnnnnnnnnnnnnnnnnnnnnnnnnnnnnnnnnnnnnnnnnnnnnnnctcacaattcacacaacatacnaacccnaaacnnnnnnnnnnnnnnnnnnnnnnnnnnnnnnnnnnnnnnnnnnnnnnnnnnnnnncctttccnctcactacccnctttccaatccaanaaacctntcntaccaacttcattaataaattcaccaaccccccaaaaaaaag

SEQ ID NO: 3594 - DNA, 340 bp, Homo sapiens
  misc_feature 336: n = A,T,C or G
ccctttcgagcggccgcccgggcaggtacctaaagtcaatgtaattgaagatataaaattgttctttccatttttgtcagcaattttgactggagtcaaattaaagtgtgatgggcaaacttggtctgttgcattctataattattgctgtcaggatactttcaactacagataggattgtttctgcatttatcattctctgttcctgcttatgtatttgtcagtgcagctgtgattcatttattttacaatactgcagctaatcgtgtatgggctatttgattaaaaacaacattttaacaagaccaaaatagccaaggcaggggaaaatgtggntata

SEQ ID NO: 3595 - DNA, 614 bp, Homo sapiens
  misc_feature 335, 419, 422, 450, 516, 535, 539, 550, 552, 553, 563, 569,600: n = A,T,C or G
cccttagcgtggtcgcggccgaggtacataaagtcaattagcactatatttgcaaacgatcagtgttaataaatgttagctttctctcttatcacattctacgaaaaagaattagcaaatggaactcttggggaagtgagctgttttcagaaggaagagatttgaggagtttatgataggaataatagaatgtaaggtgagaaaggtggttctatttcataaagggtattcgttaccactcagggtatttttgtgcttttgttttctgggttctgtgtttttgtaattgtcttacgtttgtattacatacgctttttctgtttttcttaagtagnagtagtataaaagcaatgtaataaagatttttttcttcagaaaggacaaataggacagccatatacataaggcattggagtaangangaaatagaggaacaggaacccagtatanagaatgcccataagccaagcagtggtgatatagatgaatggccaataagaagaattgaatacatgngggcatttaaggatttaanaaancccctaccttngnntagcctaatnggattngcctgatttatttcacctgaaaaaattttantggggaaaaagttt

SEQ ID NO: 3596 - DNA, 501 bp, Homo sapiens
ccctttcgagcggccgcccgggcaggtacataactgaaactgttagcttcattacaacctacatgaagaaaatagaggaatgtgaagaatttatcagatgaatagcatttctacacaatgattttcctttactcccctaatgaatctttaacttcaggaaacttcagacttgagagagatttgcagaggtccaacaaataagcctgaaataaatgaagctatgagtaagattttggaaacaagtcctaagtagagacttcctaaaccaaagaaaacaaaaacacctccttagtcaattttgtctactttattctcccaggatatttttctgcttctcatgtaaatttagtaacatttaaggaataaaaagagagctgcctggatatattagcagtgtgattggtcatattattagagagattttacaatcagttctacaaatgccccactgaaattgcactgaactcactcttacaaccttgctctactgggctccaaacc

SEQ ID NO: 3597 - DNA, 305 bp, Homo sapiens
  misc_feature 113, 137, 184, 186, 198, 201, 206, 250, 253, 258, 260, 266,281, 282, 284, 295, 298: n = A,T,C or G
ccctttcgagcggccgcccgggcaggtactcctaaaattcagttaggggaattaaaataatatctttttactcagacagtattcatgtgtgcaccatgtataattattaaagngatagttcacaaatggaagtgatnaaataaaacacatagccttttttctgggttttttttcaattttcagnanggaaaaaattgntancttgnaaaaatatttgggttttggattaaaacaaaaattggggggtggnagnaaaananacctangggccacctgggaannanatttttggttnaanttttgaa

SEQ ID NO: 3598 - DNA, 262 bp, Homo sapiens
  misc_feature 32, 55, 142: n = A,T,C or G
ccctttcgagcggccgcccgggcaggtacgantaatttaaatttaaggtattttncataggaattttacccctacataagcaattctacttcataagatatagccactggatatatacagtatatcttcatggaatattgantttccctgaaaactttgggggaaatccatttttacattaaatagataaaaggggacccaaaggtgcctcatttaaggaaggctaccttgcctttactctcaaaaccttctggggcgaaat

SEQ ID NO: 3599 - DNA, 727 bp, Homo sapiens
  misc_feature 625, 635, 649: n = A,T,C or G
cccttagcgtggtcgcggccgaggtacaattatgttttaatacagtgtgctgaactgagtatttctaccaagtgttgggttgttctaaatgctactgaaaaacacaactaccttatatcagttttatggcaaagctactaacaggtgtttttagaaatatgtcagagataaactttaaccagtgtcttcttagtggaattttaaaaatttgttaagttcattgtagagaacaccattcatagaccaagatggtcccctattagctgatattttcatttatgtaagatcctggacattctgttttgtgttggaacaaattttcaatgtttttaattctcccttttctgcctgttcctaaaaactttcaaaataaccatttcaatgtaatttgtcttgaagaagtttacccaatatctttgtcattgcaataatgtaagtatggtgatggtcaatttaattattgcttataaaatgaacttgattgcagtaaccatggtatcgatgagactaatgcagtgaaactttattactaatatatatagccttatcaaaacaagctaagaaacttgctttaataattaaataatttaaaaaatatttatttaagatgggatcaagttgtttnaagaaatgangataaatttcaaanggaaaatagggtttctttggccaaaattaaatcttttaaagaaatagagattaggtttttaattgggggttaatttaa

SEQ ID NO: 3600 - DNA, 224 bp, Homo sapiens
  misc_feature 88: n = A,T,C or G
ccctttcgagcggccgcccgggcaggtactgcctgcctttccctatctcttctagaatgtaggcagaattgcattttcaaagtgaaanatgagcaaatggaatggtgccagagggattgctgcttaatccacatacatttttattttgtaggtcacttgaagcttcttaattggtaatctctgctttgttttgctttattatttaatttttaactataggagga

SEQ ID NO: 3601 - DNA, 332 bp, Homo sapiens
  misc_feature 88, 96, 101, 124, 187, 197, 214, 219, 228, 240, 285, 290: n = A,T,C or G
cccttagcgtggtcgcggccgaggtacttttttttttttttttttttttttttttgggatggggttttgccattttgccccagctggnctcaaacncccanactcaagcaatccacccaccttngcaaaatgctaggattacaggcatgaaatactttttgaattaataaatatagagtgttttatnactcattganaagcttgttttttgttngtttntggtcaaancccaaattcttnttcatacagtaagacaaaaaataaaccaagcttatttaatattgntagtnaaagccatgtgcttatctgcaaaaccaaagcagttatcatgg

SEQ ID NO: 3602 - DNA, 596 bp, Homo sapiens
  misc_feature 588: n = A,T,C or G
cccttagcgtggtcgcggccgaggtacaaatttcaactgaaaaacaacaaaaaaattcaactctgccaaaagcgattgtatcctccagagatagtgacattattgtttcaggctatttgccaagttgaatgctttctgtgtcattgtttgcaacgaaaagaacaatatcgccgaaatcaagattcaaggactggattcctccctttctctccagtcaagaaagcagtcactttttgcccgactagaaaatattattgtcacagatgttgatccaaagacagttcataagaaagctgtgtcaataatgggaaatgaagttttccgttttaatttggatttgtatccagatgctactgagggggatttgtatactgacatgtccaaagtggatggtgtgctgtctctgaatgttggctgtattcagattgtctatcttcataaattccttatgtcacttctgaacttcctgaataatttccagacagccaaagagtctcttgagtgctgccactgcccaggctgcagaaagggctgccacaagtgtgaaagatctttgcccagaggagttttcgggttccatcaatattngatttgaa

SEQ ID NO: 3603 - DNA, 521 bp, Homo sapiens
  misc_feature 474: n = A,T,C or G
cccttagcgtggtcgcggcccgaggtacgcggggttacaagccagattaatataaaatttttcctgagggaaaagtatctatgagaatttaaaaataaacttagccctcttcctctgcaaagtccagagacaaattaaactctttagttgccatattattattgttctttttctctgaaaaaaacctagaataaaactttactacaaaggatatatatacaagatagtaataaaatatgtcaatttctaaatttgctgtagaaatatatgcaagatagcaataaaatatggcaatttctatattttcatatattcttgtttctgctatatagcctataaagcaagagcaaaaaaactctcagattactcataaatattttaactcttccaactagtaagtgacattttgaactctatgaaagttatcttgaccagatgagagaattattagaaagacattgcatttgggatggnatctgatcatttatcaagaaactggatttggtatttttacccttttt

SEQ ID NO: 3604 - DNA, 429 bp, Homo sapiens
cccttagcgtggtcgcggccgaggtaccaaatatagagacaccattaaattattcagttttcatgtcctttccccttaacttgggaattctgggtaagcagcaaaaccctgcctagccatccatgggtaacaagaagtcatgcttgggccagactatacagctgatgtccagtgtgtgactccctaagtaaaacaggttaggtcccatccatatgagagaaacagtttttcagaatatggggaaagaaaagtaatgttattagaaaaatcaaataaggaaatcgtgggaaaatataaaattactgatttgcaatcttgtcttcaaatacaagataatcttggggacaagactaaatattttactcagcatctgaacaataccaagaaaaaaaatactgccctactgaagaacaccatttatagctttaa

SEQ ID NO: 3605 - DNA, 209 bp, Homo sapiens
  misc_feature 131, 167: n = A,T,C or G
cccttagcgtggtcgcggccgaggtacttcacatgatttcaagtatggtttgatgcctggtccttcaaatgatttcaagtatggattgataccaggtccttcaaatgatttcaagtatggattgataccangtgcttcaaatgatttcaagtatggattattgccanaatcttggccaaaacaagaaacctgggaaaatggtgaatcat

SEQ ID NO: 3606 - DNA, 654 bp, Homo sapiens
  misc_feature 578, 583, 636: n = A,T,C or G
cccttagcgtggtcgcggccgaggtacacctctgattctcactagttgaatgcaagaacttgaaaggttcaggtaagtgttttgaaaaattttgactttccaacttttgccacttgctatctgaaactcaggaatcaaaaaataccgacaggcactgttactttcaaaattctttctataagttgagaatgggacagatttgcagagcaagggaaacttgaacagttacttctagtggtaggaaatgaggcggctaggatattacccagctggtgggtgacttgggcaagtgtgttcctgctttcagtggttagcctttagcaaatctgctttagagtgagagtagagggcaggctgttgtattacagtgctcttgtttttgtaaaatttaattcactctactgttattttgtctccttgggtaaagtgttatttaatttttcttcattttttaagtaatatataacagtcagtgagagaaatttggttttcagagatgtcatccaaagcagattttacagttggtttcctgggtataaaattgtctcaaccaatttctctttttaagtccatttaanattgnttaaatatggggaaaaacccggggtggtacaaacatgttgtaaaaataaaatntattttactttttttctt

SEQ ID NO: 3607 - DNA, 242 bp, Homo sapiens
  misc_feature 145: n = A,T,C or G
ccctttcgagcggccgcccgggcaggtacaaaatcatgtggatagatgtgcatttgtgggtatctgtgaatacaaatacacaattttcagatagaagtagtataagaaaaagaaatcaaacaaagtcaaacattttaagtgtttntcttggtgcactttaaaaaaattattaaattgaagctgtagtttattctcatcattgtcatcctatattagtggattttctttagcttttgaaataa

SEQ ID NO: 3608 - DNA, 294 bp, Homo sapiens
  misc_feature 284: n = A,T,C or G
ccctttcgagcggccgcccgggcaggtacttcagtcgtgtttatttataatatgggtgtggggtaaaatatcaaaccacaatgcattatatacatccatgtgaacctttcctctctgcccagagctatttctgccgtccttcttaagcctaaatttaaaaagtgatcttgtcaaactgtgatgaattgttacctgaatggcaaagaacttgctaactggaggtggcttcagtcttctttgagtattcttttatgtaacaaattgaatatactctttggactttntttttttttt

SEQ ID NO: 3609 - DNA, 441 bp, Homo sapiens
  misc_feature 410: n = A,T,C or G
cccttagcgtggtcgcggccgaggtacaagttgtgctaatcattattaaaaagagactaatctattatggatttggcaattgggggtaggaaacatgatgtttgggaatgaaatgattagaatataaataaattgtcctattattgtaggaatagtgaaagatgtgaataaattttagcttgtctttttcccaagggggtctcacgttttaaggcttcagtgttctttggtgatggattttaagaataggcatatttcaaaaatttcaattgaagttaataatgctagaattattgaaaaaaattatgtggatgtttctagttttggtatttaaacatagatgctggtcacttttcaaagtgttatagtggaactaattcaagtgtaataggtgtcttagttcatactgngttactataaaggatacctgaggctgggtaa

SEQ ID NO: 3610 - DNA, 302 bp, Homo sapiens
ccctttcgagcggccgcccgggcaggtacgcgggtgaatgagagatggttccttggaacagagctcccagttcagagacagagactaaaacataaacctatgtttctaaacatatggtcaatttcaggcgaaagaatttcagatggcttctggactaacatttgctttttattttaacgttacaagtttattttgatgatcaatttctatatatgatagaaatataaattttctttttaaatacatttaagcaaataaataaagagttaatttaaaaaaaaaaaaaaaaaaaaagtacctcg

SEQ ID NO: 3611 - DNA, 581 bp, Homo sapiens
  misc_feature 300, 340, 368, 472, 549, 554, 562: n = A,T,C or G
cccttagcgtggtcgcggccgaggtacatatacacaaaaaaggagctaaaaacccttcgtgtggcttttagatagaatgtcacattctagccttcatagggtctagaattttttttcaaaaataaaatctgaaggacataatcattgttctccatactctcaagaaatctgttcaaccactctgatttcagggttgcttttcattagcaaaagttaggaagaggaggatttgtggagttttcagggctgacttatgagtttcaaataattaccttatagacactggagcaggcagtgcantgagagggtattaataaggcctcgcacaaaaagtgtgcanaaagacagaaagggaaaataacaagcanaccccgggctttcttcctaaatttccaaaatcctgattttcttattaaaaataaatgttaaaatatttatctttcctaacctctacaactaactttgtattctnaataaaaataactttcaattataaacaaaactataaaaaaagtcaattttaaaacaccttggaatgattaaatttanaaaanaaattccntaaccaacaaaaaaatctc

SEQ ID NO: 3612 - DNA, 509 bp, Homo sapiens
  misc_feature 124, 131, 142, 146, 147, 149, 155, 167, 176, 182, 212, 214,218, 237, 299, 314, 350, 363, 372, 373, 379, 415, 421, 431,435, 436, 448, 470, 479, 489, 493, 499: n = A,T,C or G
cccttgagcggccgcccgggcaggtacaggattttctacccccaaatcagcagaatgctcatccttctcaagtgcgcatgaaacgttcttcagaatagatcatgtgttaggtcacaacacaagntttttanaaaattttaangaannantggaantccataccaatnttcttttanacccgnaagtgggaattgaattctaggaaatcaatnancagnaaaaatttgggaaaatttntgccaaaaaatggtggaaaaacttaaaacattacaagtttggaaccaaccttattttgggtnaaaaagggaaaatanaagggggggaaattttaaaaataaattggcccttgnaaagccaaaattngaaaaaacnnaaatantataccttcaccttaaaaattttttgttggaaggantggtangccaaaaaancaanngacttctttgangggggaaaggttttataaggtnaataaaaanttgcccttancacnttagtntttttcttaa

SEQ ID NO: 3613 - DNA, 299 bp, Homo sapiens
ccctttcgagcggccgcccgggcaggtaccaaaaaaaagatctgtgaatattctctaacacctctcaacacaagggcaagtgtcacagatggaagtgaagactaaagagagacaatagaattcactgattaaggtttaaatatcttactttagcaactttttatttgcaaaaatagaaaactgatcatgtgaacacatttgcattaaaagatgtttctgcaaattaggggccctgaaattaagcttcatcaggttcatggtaagtctacctctctctttatctatagcacttggcaaag

SEQ ID NO: 3614 - DNA, 587 bp, Homo sapiens
  misc_feature 530: n = A,T,C or G
cccttagcgtggtcgcggccgaggtacacctctgattctcactagttgaatgcaagaacttgaaaggttcaggtaagtgttttgaaaaattttgactttccaacttttgccacttgctatctgaaactcaggaatcaaaaaatatcgacaggcactgttactttcaaaattctttctataagttgagaatgggacagatttgcagagcaagggaaacttgaacagttacttctagtggtaggaaatgaggtggctaggatattacccagctggtgggtgacttgggcagtgtgttcctgctttcagtggttagcctttagcaaatctgctttagagtgagagtagagggcaggctgttgtattacagtgctcttgtttttgtaaaatttaattcactctactgttattttgtctccttgggtaaagtgttatttaatttttcttcattttttagtaatatataacagtcaggtgagagaattggttttcatagatgtcatccaaagcagattttacagttgtttcctggntataaattggctcaacaattcttcttttagtcatttaaaattggttaatatgggaaa

SEQ ID NO: 3615 - DNA, 697 bp, Homo sapiens
  misc_feature 394, 546, 662, 676, 685, 690: n = A,T,C or G
cccttagcgtggtcgcggccgaggtactcaaacattgagggcagattttgaagttaccctttatgcttctatatttggcatatgtgtcatattacaagtttggaaaatgagcttactgacagaagggaccatggaaaaaaatcactttccttatttcaaaagaaaataaatctttttaaaaattagcccttaaaattatctccaaacttagccatttgtcttatgttcactgacagtatgcttgggacttgtagggaagggacacacacacaatggtaaataaaaactggctcaagtgcctgactttgtaaagcacatgtttttaatagatgctaaattttatgcctggaaatgtaggctacaatggaaatgtgggaagggccaggtaaacaangatcaaattaccgccaagtcccccaaaaagactaacacaaagtgaacatcagaaggtcatcggaaaaaccaggagaatggggtattaaaacacaagaagacaggaaaagcagtgctaatttctgtaagtatgggtatggatatttggtgtgncatggtattttttttttttcacaagaagctttcatatagattatcatgtcctttactgatttaaaggatcctctggttttaggattagaaaataatttcattttgtccctgtaatnaatgtacctgcccnggccggccngttcnaaagggc

SEQ ID NO: 3616 - DNA, 657 bp, Homo sapiens
  misc_feature 13, 400, 420, 422, 479, 485, 560, 625, 640: n = A,T,C or G
cccttagcgtggncgcggccgaggtactgagtcttggttttcttaggtctgaaacaagaagattggatttagttatctctaagttcttttccagctataaaatctttgtatttatgtaataaataaagggctgctagttctatgatcctgatgtttactttttcaatgcatgtttgattctgttcagagaaaatacctggtaagccctaatggaaaccatctgttagaaaaagaaggagacagaatcgtggagctctgttgacttccctcgtcttaccagcaaagagaagaggtgtagtaattcttaaaaaggaagaaagaagagagatcaaagtgggagaaggaaaaataaaaagaaaaaggactaagcacctttcttctttcctcttgagagactgcnggtggctcttcccacctttncngaggactcgtcagcaccctgcctggggggaccagcacccccatctttaaattcttanggtctnaccccctttatttcccaaaatctggagttcacttaccaaagtgggttttcattctttaaaaaaatgaaatgaaanccaaagaaggggccccccagaggggctttccaaaataaaaaaggcttagaaccttaaattggggngccttgggtttatgnaaataatttttgggatt

SEQ ID NO: 3617 - DNA, 675 bp, Homo sapiens
  misc_feature 348, 418, 439, 452, 508, 537, 553, 571, 575, 600, 601, 620,629, 638, 656, 658, 673: n = A,T,C or G
cccttagcgtggtcgcggccgaggtacagcaggaggagtcttcagtaatggctgggtttgcgactgatttggtagtgtttgaattctctgtgcattccattaaaaggcatattaggattataagtagcttcaaccaatactctgtcacctacttggggggttttccctttgacagcactaagctgaaagaatacatcttcatccacaaatccaaatgtatcatgtagttttgtaaccacccctgtgaaaacacgctgcttctgaggctgggtttgctgttgactggaccttggtgttggatatgatacaagttatttgtgctgttggctgaggagtaaacaggctaangcttgtagcagtgcaacagctggctgtgttaagagggtttgctggggttgctgtaactgttgtaatgcanctactgcagctgcggctttgntgctgcaatgcancaagttgtgttaactgatagtttgctggaatttgtgtggtaaaggcctgctgctgncaatgcaatttggtgtgtattaatggtangaagatctccaaggantgatgggttgttgaacanccantgcaactggcttgtgaatcctgcannggctggaaacctgaataancccatgggnggattcttnttgtcctccaaattgagncnttgatgccaaaaggnaa

SEQ ID NO: 3618 - DNA, 560 bp, Homo sapiens
  misc_feature 387, 409, 435, 476, 493, 552: n = A,T,C or G
cccttagcgtggtcgcggccgaggtacgggggtaggcaaatccatagagacagaagacagactagagattgccagagggtgggaggaggaatgagtaactgcttaatggggatggagtttcctctgggatgataaaaatgtcctgggactagatagtggtaatggctgcacaaagttatgaagacacttaacatcactaatgataaatctgacgttatgcatacgtcaccacagtaaacatacccctgcagtgggaataggttctgagaccatttagaggtcacacagaaaattagaagatttaaaaagaaaaattgattcccagacaaggggcctgaataggaacagctccagtctgcaagctcccaagtgagaccaacacaaaangcagggtgatttttgcattttncaacttgcggtacgccgggcaagaancagttttggctgggcccggtggcgggtgtctatggtcgcangggccactctggcttangatctgtttttgcatggctgaggcaaaagaactttctttcttggtgggatgggttgttngaaatggt

SEQ ID NO: 3619 - DNA, 348 bp, Homo sapiens
  misc_feature 129: n = A,T,C or G
ccctttcgagcggccgcccgggcaggtacagcaatttttcttgccacaaacctgaattaaccttacagattttttaataggagccctgagatataattttactttttggagaatatacttacccttttnatagccttttctttttttagaataaaaatgtttggaaaactagactcctgtttctccagattagaaatgaaatttgatcctgtggtggcagtttttctctctctcatcattacatatgttagaaattctgataaggagattgttagaagcagagataaagattatataaaagagagaggagacagaaaaggaggtgaaaatgtaatctcacaattccct

SEQ ID NO: 3620 - DNA, 391 bp, Homo sapiens
cccttagcgtggtcgcggccgaggtacaattctttcatcttttctgtttgcaattttgcataataaaatgctaaagggaaaacatttgatgagcagagtatcaaacacaagagtaataatactactacttacatgaaattctaaaacaaagaaaactcatctatgatgtcaaaaatcagatgagtagttgcctgaggcaggagatgtgggtggctgatggcaaaagagcacaaaggaactttctagagtgatggaatgttttatgtcctgattggggtgctaactgcatggacagacacatttgccaaaattcatccaactatacataaaacgtgtgcctcatattgtatataaattatacatcaaacatcaacttggtttggtttttaaa

SEQ ID NO: 3621 - DNA, 527 bp, Homo sapiens
  misc_feature 512, 519: n = A,T,C or G
cccttagcgtggtcgcggccgaggtacaacgtgggcaagcatctgtgcatatgaaatgctgtttttctaaaagatttctcacattggcaaactgagagattttcttctggaacacaggaaagattatattaatgcttatagccataccatgtctgaatatgggaggatgacagacacagaacgagaccagatagaccaggatgcccagatattcatgaggacctgttcagaagcaattcagcaactacgaacagaagctcgcaaggagatacattcccagcaagtgaaggagcacaggaccgctgttttggatttcattgaagattacttgaaaagagtatgtaaactttactcagaacagagagccatccgagttaaaagagtggtggataagaaaagattatctaagctggaaccagaccaaatacaaagacaagagaatccccattttctgagaaagtttcacagagtccttcaaaagactttgaagaaaaccctgccactgaagaaangttccanaaaaaatt

SEQ ID NO: 3622 - DNA, 190 bp, Homo sapiens
cccttagcgtggtcgcggccgaggtacttgttactcttacagatgtctcaattaattttaacctctatccctaatggtgtttaaattttggtaaagaaaaattcattttttctttattttccaagaaatggtaagctatctttgtccctatgggagatgtggacagagagaactttctgtctctgatgtc

SEQ ID NO: 3623 - DNA, 662 bp, Homo sapiens
  misc_feature 273, 344, 346, 438, 445, 467, 537, 589, 601, 603, 640, 643,652: n = A,T,C or G
cccttagcgtggtcgcggccgaggtacgcgggtgaggctggatgagaaggctgattgtcatctgtggttctgcttcttccttatgcatttttgacccatttcacagatttcataataactcattatgaaaattttattcttttcagaaccaccgatttttaaaactttaatcaagacagctttctttttgcaaaagatttcaataatgaggattccaggttggcacaggctgatttgggcaactgagaaaagtctttccgacctttgtcaganaagtagcttaactgagttccgttcttgttgccaccttgcttttgaatctcttggttaatgtatgaaagcanangaactgctttcatctgaggcacacagtggcaaagttcccatggcaggaaatgtttgttcttacaaatctcatacatggtggtcacaaggganaccttcntattttgttttgcttgtctggnctttatcataatttgatgattgtttcaatgtgtttgcctgacaactaactatctaaaaaaaaaaactgtnatgcacttgcccttaaaggaccttcttaatcaccccaatctaccctttcaantttatctccctncnttccctctttacaaaatcctttttttaccttccccgnccngccccttcnaaaaggccaa

SEQ ID NO: 3624 - DNA, 746 bp, Homo sapiens
  misc_feature 478, 611, 619, 632, 641, 653, 664, 669, 698, 718, 733: n = A,T,C or G
ccctttcgagcggccgcccgggcaggtaccttatatactactttcaacaaaaattagttaatgtttgtttgcatttgagttggaatgtcatgtgcttgatagaatgaaccttagtcttagttccttagtctaacctctggtttcttagtcttagttccttagtctaacctctggtttgagtctcaggaatatatttacatccaggtttggtcctttgaagatatcacagactagtccctttttcacatgatgtcctttaaatatttgagtaatatctgatattttaacatttactatgtgatacatcctgtgctaagcattttgtaactaaaataatgaagatttttgttatgcattataaattgttcttaagtaagccttcaaatacaccacaatctgtgcagttaggttaaattcaacagcagttcatttttgcagaatctgggaagtggggcaaaaccgccttcaattatcagtnagttacctacttagctcttgcaggcagggtaatgcattgcactccatttccaatcaataattatgtgatgagcatccagagaattatataaaaaatgattattgaagaaaattatcttggatttgattttganggacattnaatatgaaaaacncaaaagccntaaaaatggatnccaatatactngcttntgcaaaaaatcttgaatggaggaagttcntaaataatatgttttcctgnggccagaaggggaantaattttttttaa

SEQ ID NO: 3625 - DNA, 307 bp, Homo sapiens
cccttagcgtggtcgcggccgaggtactgggcttgcaaggtagacagcactgtgagaaaaggaatcatagaaaattagtgctgagatgaactactgagataatagaatctaacatcctcattttagagaaaagaaacctgttgtttataaggagttgactgatgtgcctagggtcacacagctagagccctttaagccaaattgttactctattatcctacacatttcctcataaataagttcatgggcaggaggtgagagatgaagaaaatagatacaccagtcacaatgttaagagaaaagctct

SEQ ID NO: 3626 - DNA, 675 bp, Homo sapiens
  misc_feature 467, 529, 543, 553, 580, 595, 625, 659, 662, 669: n = A,T,C or G
cccttagcgtggtcgcggccgaggtacaaatgtgatcccagagtcaccaccagaactattttaattattcaggaaggaagaaatgtgggatgctcagaagtaaacaaaagtctcaattttcaaaaagaataaatttatggctacattagatattgacctctgggggaaaagttatagaatggatatcaaatagatttgtcttgtattttaaatttttttgtaaagtctaaatgaaaagattaagagaaataaatggaatactataaaatggccagaaatatgctattacatatgtttatatctatatatacagatacattaagagataaattcctttttcttcacaaattgttttataatttttcaaaatctgcaaagtgaatggtatagcctagaagtcactgcagtctgcatattagcaaggaagtcacacaggtagggtttcttgctacaatttttattgcttncctgggttctttctgacaattcagaaagttagaagactttgggaagacccggttatgggacntacattgaatcaancctcaaaatncaaaggcccagttatatttccactatnttaaaagaaaaaagnggctaggttaaaattatatttttctttaanttgtccaagtttcaaaatgggtaagccaatcaanaanttttggnttcctt

SEQ ID NO: 3627 - DNA, 350 bp, Homo sapiens
  misc_feature 71, 118, 129, 131, 132, 155, 163, 173, 175, 176, 177, 178,187, 203, 207, 211, 231, 232, 262, 302, 329: n = A,T,C or G
cccttagcgtggtcgcggccgaggtactgtcattggcccaggcctgacttgcctttcttactggctttttncctaattttccttcaaaactcaagttaaccttttcttctgagacagntttttcttatntnnaaaaaaattttacttggcttttncacttttnttggttttantnnnnattttaagntattattacccacttnctantttngagggttcttttggtggcannaaaacctattcctacttttctttgtattcnttaccacataacgcaagtttcctaatatatagccatttgntttactaagtattttaatttaaaattncagcccatttatagggttttt

SEQ ID NO: 3628 - DNA, 410 bp, Homo sapiens
  misc_feature 375, 379: n = A,T,C or G
ccctttcgagcggccgcccgggcaggtacgcgggtgactcaatgactgtgtgtaacactggtaaaatatgaatagatagagtgtatcaatttctattttttagtcatgacaatgtaaaatagttatgcaaggtgttaccattgggggaaactgggtaaaactatataggatttatctgattatttattgccctacatgtaattcaataactacctcaaaagagaatgttaataaaaggaatgaagatattattttttagctgatatggagtgaattatagggatataatgtaaatgctaaaaaaagtgagaaaacaagatgctaaatgaaaatatttattatatatttgggtgggataggtaaagaggtggatgngagntaaaattggaagccaaggactactacttttt

SEQ ID NO: 3629 - DNA, 464 bp, Homo sapiens
  misc_feature 85, 276, 374, 438: n = A,T,C or G
cccttagcgtggtcgcggccgaggtactcattctgttgatatgtaaacagattttatttatcatctgattaaagccacaaataanaatgctaagtgaaattttctaattcattaacattaggaagtaaacagttggcctctgaaataaacaccaatctttagtattgtgaagtcccagtttaaggtttctcagaatgtttgtctttcagtgttaacgtttgttctaatgcccagcttttattgtatgctttttctgaaggctgtgaaatcctggtnttactgggatattggggctggagggaggagtggcaaatgagatatctgtatctcaaatgcctttctggaatccttttctgttacatttcccagaatgnggctgttttcatttgatcgttacaaagagtggttgtttaactttggtgttaatgtcatttattngacatttcaaactgtctttttcaaac

SEQ ID NO: 3630 - DNA, 448 bp, Homo sapiens
ccctttcgagcggccgcccgggcaggtacaaaattttattcaaagattaagatgtgctgctttccatacaggtaattttgttcaaaagttggcatctaacctcttagacaagctgagtagtaaccaaatgatgccatgtgttactgtgcttttatttttaacctcatgaacctctgatattttaattcaatatcagattatttctttgtaggagatgctttggggatatggacaggaattgtatttatgaactgtaagtggccattagccatttccaatttagtggaatcagaacttgtttttataatcacacaaatgctctgggtttaaaaactacttctttaggagtatgtgaggacttacagccaataatgtttgtcattaggcttaccataaaaatatccagggtttatgacttgatgccttctatttttgctgcaatcctagt

SEQ ID NO: 3631 - DNA, 790 bp, Homo sapiens
  misc_feature 287, 504, 506, 518, 520, 521, 529, 530, 532, 537, 567, 571,574, 583, 591, 599, 603, 606, 619, 635, 645, 646, 647, 672,680, 687, 693, 696, 697, 701, 723, 725, 730, 735, 742, 748,750, 758, 759, 765, 776, 777, 778, 782: n = A,T,C or G
ccctttcgagcggccgcccgggcaggtacaaacattagccatgcatggtggcatgcgcctgtagttccagctactcagaaggctcaggcaagagaattgcttgaacctgggaggcggaggttgcagtgggctggtatggtgccactgcactccagtctgggcaacagagcaagactctgtctcaaaaacaaaaacaaaaaaaaaaaaacactttcttctataaaatggctcccatgagtagtaaaatgacacagtagttaggtttatgtccagtcacaagcctcttnccatttccactgggaatgccttacctaatgagttaagacaatgaaaaaagtaaaccagttagaatacttacactttcttgatttaaaactcagtaaaactatagtaataaagacagtatgttactgacataagaacagacatacagaccaatggaaccaaattgagaattcaccaataaatctttacatttatgatccctgattttcaacaagggtntnaagatattcaantnnaaaaaatnntnttttnaacaaagggggctggggaactgggtctacncaanccnaaagggatnaaattggncttttatntatnccncattccaaaattnactggaaaagggtcanaacccaaatnnnaaacttaaacctgtaaaaattttanggaaaaantccaatntaaatnttnngggnttggattaggcaatggtttttnanattgnccccnatgcccnccccananaaaaaccnntttttnactttcaaaannnaaantttttttt

SEQ ID NO: 3632 - DNA, 519 bp, Homo sapiens
  misc_feature 373: n = A,T,C or G
cccttagcgtggtcgcggcccgaggtacaggttggtcccaaactcctggcctcaagcagttctcccacttccgcctcccaaagcactgggattataggcatgaccaccaccctcagcctcagttggtatattttgtaaaccatgcctgtgtaaccaacatccagcaatgagagtaaaaggtgaagtttagactgttctccagaaacaaacaatcatgaaatgagacttgcaaagcaaagaattacacaagtttttgtgtgctgttcgtgaaagaaggattttcttttattgaagaagattgttctctttgaccaagtttaagaatctatgtaaagaaggtagataaactgaaccaagtaggacaatggaagtnccagttagactgactgtcctcatatccacttatgtaactataggggagaaagtctataattaaatttcaaaattttgtggcaagattctaaattctctgggagtttgaagagaaagatcagtgggaggtggagtcattgggaaacc

SEQ ID NO: 3633 - DNA, 319 bp, Homo sapiens
  misc_feature 281, 303: n = A,T,C or G
cccttagcgtggtcgcggccgaggtacaacgtgggcaagcatctgtgcatatgaaatgctgtttttctaaaagatttctcacattggcaaactgagagattttcttctggaacacaggaaagattatattaatgcttatagccataccatgtctgaatatgggaggatgacagacacagaacgagaccagatagaccaggatgcccagatattcatgaggacctgttcagaagcaattcagcaactacgaacagaagctcacaaggagatacattcccagnaagtgaaggagcacaggaccgntgttttggatttcatt

SEQ ID NO: 3634 - DNA, 510 bp, Homo sapiens
  misc_feature 115: n = A,T,C or G
ccctttcgagcggcccgcccgggcaggtacgcggggcagatggagtagtttctgaaaatgacagggtccaaggtgtgaccacgggaccaagtggctgaactggaatgaagttaanaagcagtaagaaacatccgataatatggtgatcagttcaacagaatgacatattcatcatgtccccaaggaggagatgactgagatttcaaattctcaagcagcctcaatgcagccagagatttaagagggctatgtgtccagaaggagactctgggcaaacgcagaatggattcagattactcaaattcctgtcagatttcttaacctggtgggctataccaaacccaaaaagtttaagcagcctctacttttgcttattttctcctaagcccaaccttggctttcttttgaatctctatgagcggagacatggctccttaagaaaggagacacttcaatcctgttataggctaaactgtgtcccccaaaaatttatgcattgtggccctaacc

SEQ ID NO: 3635 - DNA, 592 bp, Homo sapiens
  misc_feature 517, 521, 528, 535, 537, 546: n = A,T,C or G
cccttagcgtggtcgcggcccgaggtacatgagatggctcattgatacaagcaaagccttggtggctctgcgctgaattaaggaagagatttgaaagcaaggctatttcctggcggcagtaaaactgcctcctggaaagagagcaagctatgggattagatacttaataaaattttaggcaagagaaagagtccaggtcttttacctaaattgcacaccaattgagctcatctgcttattctctacacactcaggctagggaaaaagtgggcacatttcaaaactcaatgcttaaactatagcttgatgtgaaaaagtagaagacaaaatttgcccatgctacatcaaagtgtaagaactgtccatcttaagctgggaaacctgaaaatcatggcaggtataaaatcactttttagtaattaagacaaggaaataaaataacataaaagcacatgcaaagaaagtattaggaatccatcctacgaaaatgcaatttttaaaaaatgacacaattatnccangaattanttatacngnaaggatgcnatgaaaaccaaaattcaaagaatccatcaagggccttccccccaaa

SEQ ID NO: 3636 - DNA, 451 bp, Homo sapiens
  misc_feature 95, 119, 281, 315, 320, 349, 373, 394, 423, 441: n = A,T,C or G
ccctttcgagcggccgcccgggcaggtactttctacagtcacacctgacaagccactctcacatttaaagcctctggcggctccccacagagcanatgccatgcagatgcctttgcttntgcactcagggccccgtgtaacggaactcctgcctgcctccctagcctcacattgttgtctcctgtttcagcctttgcaggtgctattctctccaccctgggttcccttctcctcattgctttcaacctatattcctccttatccttcaaaactcagctcangggtgacttcttctgggaagctttccctccaccntgcanactgatttattctgctccaaaagaacttnacgctatacttactggaaatcagnggataccttatttgtctcttnccacttgggttagaggacatgaagatcantgagccacaaaaactgtncccacaaatg

SEQ ID NO: 3637 - DNA, 434 bp, Homo sapiens
  misc_feature 54, 55, 352: n = A,T,C or G
cccttagcgtggtcgcggccgaggtactttttttttttttttttttttttgggnnctttcttcttttctttttattctttccctctctttctgtccttccctatctctctctcccaaccccctcactggccgccagctttccaccccccaccacatacacaccaacacacacacagagcttagcctcgttagttcctcttctttgcttctagccttttccactctacctctccaaaaacatccacgtccttctccttttcagggagagcagatgccttcttcttcagagcttctggttgccagtctgacactcagtcctagtcactaccctccaccttacagccgggttgtnatagcgttttcttaacaaaggctgccttctccctcttccaaggaattcttgcactgcttacaaaaaagacaatttttttttc

SEQ ID NO: 3638 - DNA, 480 bp, Homo sapiens
ccctttcgagcggccgcccgggcaggtaccgtagaaacataaaggaatgcctagataggagggaggaattgaaatgctgtgatttaaaggcaggtcttctggctcagagattgaaaatgagggtcctaaaagtaaaccaaagacactgtggtgggaagacagaaaaacaaaaagcatttcatttactctcactgttaccaaccaaccagaccagaggaaggagagagagatgaagaactaagactcctcctggaaatctgctgttgctaagctgtggaataaaacaaccacagaaaataaaagcaccaagtggatggaaaggacacccaaacacaaccacccacatgctttcttttatactgattcatgttagggattaaagtatcctaacagcaacttcaaaaataggaaggccaccaggagatagtatgcttgcttgaaacaagaagaactgatacttttctgggtgtattatattga

SEQ ID NO: 3639 - DNA, 510 bp, Homo sapiens
ccctttcgagcggcccgcccgggcaggtacacttaaaacttttgcctatttttgagttgtctgtctctctattattgtagaagttcattatgtgttttgcatgcaagtcctttactggacatatttattattaatacttttcccaacttttacttgccttttcattttcttaggtgtcttcaaagagcactggtttttaattttgataaagattatgtcttttttcttttatggttttaaactttttgagtcctaatttaaaaatattttccacctcaaatttgcaaaaatgtcttctacatttttcttctggaagttttaaagttttaactgctacatttaggtctatggtctactttcagttaatttttgtgtaagtgtgttaggtaagagtcaaagctgttgtttctcccacaacatcctccagcaggttttgcagaaatgactctcatttctccaattgattgctttacaacttttgttacaaatgaattaatataaagggtacct

SEQ ID NO: 3640 - DNA, 272 bp, Homo sapiens
cccttagcgtggtcgcggccgaggtactgggcttgcaaggtagacagcactgtgagaaaaggaatcatagaaaattagtgctgagatgaactactgagataatagaatctaacatcctcattttagagaaaagaaacctgttgtttataaggagttgactgatgtgcctagggtcacacagctagagccctttaagccaaattgttactctattatcctacacatttcctcataaataagttcatgggcaggaggtgagagatgaagaaaat

SEQ ID NO: 3641 - DNA, 326 bp, Homo sapiens
  misc_feature 273: n = A,T,C or G
ccctttcgagcggccgcccgggcaggtaccagcattagaagagctattggaggaagctgcagccctcaacctttccatcatgttcgacttgcccgacccccacagaaccacacatactatgacacttttgtgatccagacattggagactgtgctgaatgcaagggtgccccaagccatggtcttttggctaccagatgaagatcgggctaatgtccaacgacgggcacctggaatgcgccagatatatggacctcagggaggcaacagaacngagaggcccagtttcttaacctccctatcaagatctgccactattggatatca

SEQ ID NO: 3642 - DNA, 386 bp, Homo sapiens
  misc_feature 361, 366, 377: n = A,T,C or G
ccctttcgagcggccgcccgggcaggtacaacttcctgacttatgctatttcagtgtttgcttagagatgaaatatgcatttatctaattcaagcataaatctgccttaccaattcatgcatttttatttctgtagctctttgtgatgtatagagttaggcagccaaaggacacagggaaatgggagctgggagctgggaagggacggggcatattgagagatcctagagagcccatgctcagatgccttcaggtaaaatcgggccagtgaaagctggggcctggagggaagttactggaggttctggttcgtcttttgtttcttatatttagaaagcctaagtcagaggtttgtggtttngttgngactgtggttntttttaaac

SEQ ID NO: 3643 - DNA, 677 bp, Homo sapiens
  misc_feature 433, 459, 472, 577, 649, 650: n = A,T,C or G
ggcaggtacaactcaggctccgaaatatcctgcttgtttgttttttttctaccatggtatacatctctacatattctacctggtgtaggaaattgtctgaaaacatctttagaagcagcaaaaaaaaaaaaaaaaaaaaaggagtgcccacagcacatttatatttgagagcactgacatctgctttatcacccttgtcagtcccaaatccagcaagggttgaatctaaaaactgtcagtttggctgacagtaggtgtgagtgacaagcacatgcagctgaaagtgggcatgtaattttacagtttacttattgtgtgggtaatgttgataatatttctgtagctcatttcattcttaacactcagagtccttttgtataaaaacgttaagtttattttatagattaaagccaacatcttgattttggtctangaaaacctaagaaataaactggagtngatttaaacaganagagagaagagttattctgtgcaatcatacaaagttaagtgattgcatttcatttctaaaatggccacctaactgtgggttccatgctgccatggggcttgcaantttgatgcaacacttttataccttgcatataaattaagcctaagccaataaattaattatctttcttaaaanngaaagggtttggtgggggttttttgga

SEQ ID NO: 3644 - DNA, 432 bp, Homo sapiens
ccctttcgagcggccgcccgggcaggtacatcctcattaattgcagatgtctgtatcagaaatgccaactaaatctttagcatcagacatgttgagaaaaatttacaaaattattttcatgaaaattttgtgatttttcaagtatcaacgcacccatatacagaatggccttcacaaaaacaaaaaaaacaaaaaaaaaacaaagaaaaacaaagtcaaaacaatgaataaaattttcatttcctttgaaagtgctaatcaccttcaaaccacaggattaagattgatacttgagctatcttggatttctaggatggaaatattggggttttaaaatcaagacatctcttcaggtgtaggtatatgtgtatggataatattgcttttaacttccactaacctatttcagacagttcacaaaacaggttttta

SEQ ID NO: 3645 - DNA, 344 bp, Homo sapiens
ccctttcgagcggccgcccgggcaggtactgtgccagggataatcattgatgagattatcaggggtcttcattcccatctgggtggtggaagatcaagctcaaaatcccatcttaggatctgctttcttgaaccactcctggcacccaactctgacaggttgcattccccagggaaaatttctgaaatgatatcagtatacaggtatttcttaagaagtattcatgagatcaacaccacagatgcagggagaaggaagctgggtccatcactggatcctgctgaccccatggggaacccagacgctggaatggccctgtagattgtcaccacttggggcaaggg

SEQ ID NO: 3646 - DNA, 350 bp, Homo sapiens
  misc_feature 228, 300: n = A,T,C or G
cccttagcgtggtcgcggccgaggtactgttacattttcattatgattttctcatagtttttccttggaaatttccatgtattccttaaggatgtgtttgtcacatatgggagatttggatcttgctttcaacttaggggaatgataattttccattaaatatccatcccatatactaaggcaaggtgaaaagctgaatggaagatgaaatggcaaatgttagcctangcaaagtgctgggattacaggcgtgagccaccgcgcccagcccatcagttcctttagagcatatttgtgcancagttgtgaaatctccctaacggtattcgggattcagactaaaatttccc

SEQ ID NO: 3647 - DNA, 674 bp, Homo sapiens
  misc_feature 87, 89, 90, 93, 95, 117, 124, 127, 135, 138, 149, 163, 167,174, 181, 183, 196, 202, 205, 221, 229, 247, 254, 261, 262,271, 277, 279, 291, 302, 303, 312, 342, 348, 358, 374, 386,390, 398, 406, 421, 427, 444, 447, 448, 450, 455, 475: n = A,T,C or G
  misc_feature 476, 481, 487, 494, 497, 511, 518, 524, 526, 528, 535, 539,541, 542, 545, 564, 567, 570, 572, 576, 577, 578, 580, 584,595, 603, 611, 613, 616, 617, 628, 632, 633, 634, 636, 640,643, 647, 648, 650, 663, 670: n = A,T,C or G
cccttagcgtggtcgcggccgaggtactttttttttttttttttttttttttttttttttttttttttttttttttttttttttttnanntanangctcaatcacccaggctggaanacagtantgngatcttanctnaccgcaacctncaccttccaggttnaagngattttnctgcctnancctcccgggtagntgggantanaggggcctgccaccanacccgggngatttttgtatttttagnaaaaacngggtttnnccatgttgntcaagntnggtcttaaactnccgacctcaanngacttgctnacctttggcctcccaaaaggctgggattanaggggngaaccactgnacccagcctggcaatnaattttaagccncctnttttccangttttaanccttaaaaaatcccnaattgnatttttaaaaaattttntgnnantcttntttttggggggttttttttnncttantggggnccttaanagnaatttttaaaaaanatttatnaaatcnantnttggganagtnanntantaaaatggggtttttaaanttnttngngggnnncnaagngggaaaaaaanaaaatttnccttaaananacnnggttaattgtncttnnntntttnctnattnnanccggggggggggnttttttngggg

SEQ ID NO: 3648 - DNA, 461 bp, Homo sapiens
  misc_feature 99, 347, 408: n = A,T,C or G
ccctttcgagcggccgcccgggcaggtaccaggcttgctgtaaaaattagatgatttaaggtagtttgttaaacattttttattgcattaaacttttangaaattttaagaataactgtgagagattcaatagatacataggtaaaggacacaagcatgttatctacaatagaggaactacaaatgtctagcacatagttgaaaaaaacatttggcccccacaattatgccagctatgtagtatttctatctcaagctcaggccactcccccaagctccagattcaaatgtccaatcgctcatgtgagatcacttagaagtctactggcatctcaattcaacatgtncaaaaacagaatctttgatcactctcctttttcccacatacctggtctcctacctcaattnaattgcattactttgttcatcagggcaaaataaacaggaatcatgcttacttt

SEQ ID NO: 3649 - DNA, 322 bp, Homo sapiens
ccctttcgagcggccgcccgggcaggtactctaaaaggagaatactgtaattgcaacataaaatttcaagcctctaagctaccaccagaaaaaaatgcagactagcaggaaacagaactttccttatgttgtttgttttgtatttttaatctgactcatgtaagaaaggttttgcaaaatttaggtggctttataatcacaataatacaaaagaaagtgaccctcgaaatgggttttaccactaattttcgattcttgaagatcacttcgaaacattaccagcccaaacatttttactgctcctcagaatacataacacctg

SEQ ID NO: 3650 - DNA, 361 bp, Homo sapiens
  misc_feature 231, 345: n = A,T,C or G
cccttagcgtggtcgcggccgaggtaccaagcaccattcaattaaacaacttcagctttctccaagacttctggaagtgacaaacacaatcagggttgaaaacctgccgcccggtgctgatgactacagtttaaaacttttctttgaaaatccctataatggagggggaagagttgccaatgttgaatattttcctgaagagagttcagctctgattgaattttttgacanaaaagtgttagacaccatcatggccacaaaactcgacttcaataaaatgccactttctgtgttcccatactatgcctcattgggcacaagccttgtatggaaaggagaagcctntgatcaagcttccagc

SEQ ID NO: 3651 - DNA, 427 bp, Homo sapiens
  misc_feature 25, 27, 37, 47, 295, 297, 298, 299, 300, 304, 387, 389, 410,423: n = A,T,C or G
tggatatctgcagaattcgcccttncnagcggccggncgggcgggcnccagtcaatgtgatgagttgagaaagtgaaataagattacaaatatgggaataaaattatcaacctacccagaactatacccaactgaaaaaggcgaaagaaattaacaacagcaaaacctttagaataattcagtaactggctagttacaaaatcaataaccaatcgccaagttaaactattatacaactacacactactctcttatgcagaggtaagaatgaggtagattgatgtgtaccttcccncnnnnaaantttttttctctcgctccatttcacacatactaagttccttctgtaatcgcttattttcttctatcagcttgccttcatccctntnaaactcttctacaatcatctnatttggttgattngggt

SEQ ID NO: 3652 - DNA, 379 bp, Homo sapiens
  misc_feature 131, 137, 142, 143, 152, 158, 163, 194: n = A,T,C or G
ccctttcgagcggccgcccgggcaggtacatgctgccagcttgtcactcagcgttctaaattcagcctcacttggaactctattacacatgcaggccatcaaaaatcagagcaggccggacggagatgaanagtttngagannaaaaaaaanggaaantctgngggagggtaattgcctaaaacttctcttggngctttcacttttgtctttatggtgtgtgggaggatcagccaggtgtaaaagatgacagacagaagggacactatgaaactgtaatgggcctagtgctcaagtttttaaaacagtccacataagctctgttatggttagaatacaaatgccacctttttttagcattaacataattatattctaac

SEQ ID NO: 3653 - DNA, 484 bp, Homo sapiens
cccttagcgtggtcgcggccgaggtacgaaataaaaatctgggagaaacccatataccttagagtgatctaaattgaaatactaagattctagaaagaggagaacccatcaggacttgataacgatgtcagtgagagagcagagaggaacattcctgacagacctctcaattagaacactaagttaacatcaatactacttacccttctttctagccatacctcctgccttttccattttttccctaaaattcttgctgtcttacaatatgtcacatgcttccacacacaaggatttgcacatggcattccttctgcctggaatattcttcctccaactctctccacccatcttgaatgcccctgtgactgttctagtccccaggtgccatgtctaattcatatctggtgagcacatagcaggtgataataatgaagtagagattaataggtaaacaggaaattacaatgtagggattcaagga

SEQ ID NO: 3654 - DNA, 594 bp, Homo sapiens
ccctttcgagcggccgcccgggcaggtacatgagatggctcattgatacaagcaaagccttggcggctctgcgctgaattaaggaagagatttgaaagcaaggctatttccctggcggcagtaaaactgcctcctggaaagagagcaagctatgggattagatacttaataaaattttaggcaagagaaagagtccaggtcttttacctaaattgcacaccaattgagctcatctgcttattctctacacactcaggctagggaaaaagtgggcacatttcaaaactcaatgcttaaactatagcttgatgtgaaaaagtagagacaaaatttgcccatgctacatcaaagtgtaagaactgccatcttaagctgggaaacctgaaaatcatggcaagtataaaatcactttttagtaataagacaaggaaataaaataacataaaagcacatgcaaagaaagtattaggaatccatcctacgaaatgcaatttttaaaaatgacacaatatcccaggaataattatacagaaagatgcaatgaaaacaaaaattcaaagaatccatcaaggacatacacacaaaattaaaatg

SEQ ID NO: 3655 - DNA, 447 bp, Homo sapiens
  misc_feature 405, 425: n = A,T,C or G
cccttagcgtggtcgcggcccgaggtacttcaaatgatttcaagtatggattgataccaggtgcttcaaatgatttcaagtatggattattgccagaatcttggccaaaacaagaaacctgggaaaatggtgaatcatctctaatcatgaacaagttaaaatgccctcattgtagctatgtagccaaatacagacgaacactaaaaaggcacttgctcattcacacaggagtgagatcatttagctgtgatatttgtggaaaactgtttgctcgaagagaacatgtaaaaagacattccctggtgcataaaaaggataaaaaattccaaatgtatggtgtgtaagaagatcttcatgttagcagcccagtgttggaaataagacatggatctcgaccgttatggnggtttgggtaagactgtcanataaaatcacagccaggagggc

SEQ ID NO: 3656 - DNA, 567 bp, Homo sapiens
cgccagtgtgatgggatatctgcagaattcgccctttcgagcggcccgcccgggcaggtacgcgggtgaagatatgttacaaatggatatacaaaatatttcaagccaggagtcctttcaacatgttctcacaactgggcttcaggcaaagattcaagaagctaaagagaaagtccagatcaatgtggtaaaactcattgcagcgttgaagaacttaactgacgtttcaccagatttggacatcaggctgaagatggaagaatcccagaaggaacttgaatcatatatgatgagggctcagcagttactggggcaaagagagagccccggtgaactcatttcaaaacacaaggaagcactaataatttctaatacaaaaagtctggccaagtatttgaaagctgttgaagaactaaaaaataatgtaactgaggacataaagatgtctttagaagaaaagagtagagatgtctgtgccaaatgggagtctcttcatcatgaactgtctttatatgttcaacaactaaaaatagatattgaaaaaggaaagcttagtgacaatatttt

SEQ ID NO: 3657 - DNA, 525 bp, Homo sapiens
  misc_feature 184, 494: n = A,T,C or G
ccctttcgagcggcccgcccgggcaggtacctaaatatattctacttccatcttttcaagctcggtgcctgcctaccacaataaaaagttacagctcaaactaatttaagttgttaagagacagtgtattaacaatgattggctacactgggtgggttgtctctgctgttccttttcccacagnccctcagtatttatcccagggagagaaatcacattttacctatagtaagactgtatttctctcactctgtaatcctctctctgtcagaaaaatgagcaaaggtaaaagatgaggctgacccttttgttttgatgcaagaatgctttgaacattgacttaaaatcagacaaagtgaagagtgctacgattgtggtttcactagatataaggttatcttatttaagtagcctttttaatgaaatgattagaaatacaactttaaatgtttaattcttttttccttcctttctaggatatagcatttcaacanaaatgaaggatattatgacatactaaaagaa

SEQ ID NO: 3658 - DNA, 488 bp, Homo sapiens
  misc_feature 70: n = A,T,C or G
cccttagcgtggtcgcggcccgaggtacttgtgagcccagtatacaaaagataagctccagacccctcangatactgtaaagttcacaaatacaatgatgaaaacatctagattgcttcatgaccccctcacacccccaaagcaggaagcaaacagcccgactgagataacaaagaatactccgcatcaagatgggaccaaatactctaataaacccacacccagttagcctcagggaattttaaatttttgatctgaaaaagacaaggatctcaaccctgagttccccttttccttcattataggaaacaaatatttcatagatatgcctgctatgtatatagggaatacaacacagaaaataaactttttgctacatgcttaccttaatgagaaccacattcatgcaccaattaatcaaaataccaatgggatttgctttggatgttatggggtccttattagcaagggtacaggtaaccaagaag

SEQ ID NO: 3659 - DNA, 304 bp, Homo sapiens
ccctttcgagcggccgcccgggcaggtacttagtgttcctgtcaggaaaacctgcaacagcaagaccattctgccaaagtccagagactcttaatatattagccagcgttcattaacagtaagtgacagaaaccctaatcagcccaagcaacaaaggagaatgtcttgctcacagacctaaaaattccagaatagtagaattggcctcagggatggtgggatcctggtgctcagatggtctctcgggaagctgtttcatcacttagctttacacttctctagcccagtggttctcaaacttgga

SEQ ID NO: 3660 - DNA, 526 bp, Homo sapiens
ccctttcgagcggccgcccgggcaggtacgcgggttgagcagaaattctgagcctatatgtgtgaggggggatctttgattaattaaaacatcttcctcacagtatgcaggaacatggtaaaagaaagcatttactacttttgtaaacattttggattgaagagaacttttccatcatcctgaaaatcactttcaactcctgggatcagagaaatagcagtgaatacaccgaagtctggcctaagagggtcagatctaaccacagggccagattatagagaaaaatgaaagctcaagaagaaaccccataatatctgcagctgcctcaaaaaggtggttaatttccacccccacctacactcctgaaggtcctttcctagttgctttgaaactaatgggctaaaattagattttgggtggcattcttgtggagaataaatctctcaagtctttacatctcttccaacatctctgcctccttctttctgcttatttataaagcatactgcttattgtccattaaaac

SEQ ID NO: 3661 - DNA, 204 bp, Homo sapiens
  misc_feature 204: n = A,T,C or G
ccctttcgagcggcccgcccgggcaggtacaacatacaacagcttcgcaatagccagtgttggaggctccaagaacgagggtcctgtggctatgtggagagtagcagcagagccaggactgccactcagagctagttcacccttgctgccgccattcgaacccagagctcctggcccaaacagtctggaatgttctggactttn

SEQ ID NO: 3662 - DNA, 526 bp, Homo sapiens
ccctttcgagcggccgcccgggcaggtacagcaatttttcttgccacaaacctgaattaaccttacagattttttaataggagccctgagatataattttactttttggagaatatacttacccttttaatagcttttcttttttagaataaaaatgtttggaaaactagactcctgtttctccagattagaaatgaaatttgatcctgtggtggcagtttttctccctctcatcattacatatgttagaaattctgataaggagattgttagaagcagagataaagattatataaaagagagaggagacagaaaaggaggtgaaatgtaatctcacaattccctgcaccacttatttatttcctaaaatcttgtctcacacaaaagacatcagagacagaaagttttctctgtccacatctcccataggggcaaaggtagcttaccatttcttggaaaataaagaaaaaatgaatttttctttaccaaaatttaaacaccattaggggatagaggttaaaaatta

SEQ ID NO: 3663 - DNA, 373 bp, Homo sapiens
  misc_feature 142, 186, 199, 221, 261, 321: n = A,T,C or G
ccctttcgagcggccgcccgggcaggtacttgacaacagctgaatctgaggaggtctttgttcactcaaaaaattagttaatacaaggggttgttgtcagagattttaggggctaaaactgtctattcccctttgaaatttntagaaaatggacttttctgggggagcttgtatttaaaaaccagnaaccaaaccactnggaaaccagtgcttgttaaatnggaaagaaagaaatttgagaaagtgatataaaataaaaanataggatgaattaataagatatgatttaaaataccaagttggaaaggggggaaaaacaanagccaggggaatcttcagggaaaatcaaggacattatattttagttttacac

SEQ ID NO: 3664 - DNA, 494 bp, Homo sapiens
  misc_feature 333: n = A,T,C or G
ccctttcgagcggccgcccgggcaggtaccttttcacatttaagtctctcaagcctctttggcattattcagttatggtcaaataaataacctaatatcgaaaaggacaagtcacctgtcattgactcaatatatgtcatagagtgatatgaaattgtgaaatcagaaaaaatctctgtgcaaagacctggcctaccacctacagtctgggtgtctctctgagactcagattctttatcttgaaaactgtgaagaaaattctgcctcatagtgttgtaatgagcattaaagaaagaaagcagggaacttgtcaattaaagcatctttcacatngggggtgtttagaaatcttagtgttctttccttgtatctgttttgtttatagttttcctttgttttaccacattgagaaaactattgtatttgtttctgcgtattcggatagattcctgttgtttccttggggctttgggtgtgacctgtttaaacaaaaa

SEQ ID NO: 3665 - DNA, 512 bp, Homo sapiens
cccttagcgtggtcgcggcccgaggtacagtgttcagtggaaacagtcaattttagtgggcattcctgtattcctcaattaaaagggtatggtgaagtataaagtttcaccattaagtatgaggctttctataggcttttgattattagccttactgatgttaaagaatttcaccctttgctagtttgcaaagatttttttttaatggaagttgaattttgtcaaatacattttctgtatattttgagatagtcatggggtttttcttcttaaatctcacgtggctttttctttaagtaaagcttactctttgaagtgttaaaatttaatcactctaaaaacacttttaataaatctcttagattaaaaacttttaaatcttgagcatactttaatcccttctccatgactcggattgtattatggaacatcatttatctatcatacgtgatgttaattcttgactataaatcgctcaaaagtaggagcccatgtcttaatcacatttgatt

SEQ ID NO: 3666 - DNA, 231 bp, Homo sapiens
  misc_feature 178: n = A,T,C or G
cccttagcgtggtcgcggcccgaggtaccattttaaatggcaacaaaactggaattattcagatacacatctaaatttgtccaaggttttaatgttggaaaattattaaatgagaaaaagaactaaaacaggaagtgttatcaagaaaagactgtattgctaagataccacttctctncaaaatcatttattagattcgatgtaaacttagtcaaattcccaagtggcttt

SEQ ID NO: 3667 - DNA, 394 bp, Homo sapiens
  misc_feature 382: n = A,T,C or G
cccttagcgtggtcgcggccgaggtacatctgcccaaggcacccttcagctaaggggttatgtataatcctttccccaactgccagtcccttgccttgctacaaatgcatttgtttgaaatcaatatatgtattcatttatcaaaatatcttcacttacatatttactacatgttagaattacagagtggttctccagacatctgctttgtgggttaggccaggctgaagttatcacatccattttgcagacagggttgccaggattcagaaaccccgtcacttgcccagaaacacagttgatagcagccacatggactttctgactcctactccggtgctcttttgctcattgtctttgtgaatattctgtgtaattattngctcctttttgc

SEQ ID NO: 3668 - DNA, 431 bp, Homo sapiens
  misc_feature 48, 63, 346, 350: n = A,T,C or G
ccctttcgagcggccgcccgggcaggtactcatgctcctggtagctgntatcattcgttattnctaacagaagtggtttctatgtgcacaaccttaagagaaaacatcaggaacctgattaaaaactatcctcatcaccgcaaactccctatttatagaagacttacctactgaatgatctccgattagtcctttaacaattcagatcctaaatctaaaggctaaaagagaatcatttagggcatttcaaaggtagaaatcttctggtgttatatactattctcagggaccgagcaatcagcagctatactaaaactggaaaactcgtgactttatttatttattnattntatttctatatagagataggggtcccatcatgttgctcaggctagtctcaaactcctgggctcaagccatcttcctcctgc

SEQ ID NO: 3669 - DNA, 617 bp, Homo sapiens
  misc_feature 35, 101, 140, 147, 187, 189, 205, 211, 217, 243, 268, 288,325, 329, 357, 388, 400, 419, 421, 447, 448, 460, 470, 482,489, 492, 498, 503, 521, 527, 530, 534, 547, 550, 558, 595,606: n = A,T,C or G
tttagggacgaattggggccctcttagaatgcatngctccgagccgggcccgccagtggtggatggggatatcttgcagaaattcgcccttttcgagtcgngcccgccccggggccagggtaccgcgggggggaggggcnaatttgnagggcaagcccaagccgccaagggggggcctttcttggcntngaagagggggggcaanggccgnggaagnctttggaaggggaaaaaccccgcaanaaataaaaggttttttttttcctcntttttggaaaaaagggattnaggaagggaatttaaaataacccaaacccttaccctnttanaaaaaaaaaaaataattaagggttccanaaattaaggggggggttaacccttaaaaagnaataaatttttnggcctttaaaaaccgggtntnaaaaaggttttttttttaaaaccggnncaaaaatttttntttaaaaatnaaggcccttttnaaaaggnaantttttntaaanggggaaggaaaaaaaaantaattnggnaaanggaaaccttttangtnaaaaaagnaaagtttacccccacttgaaaggggggaaaagggggnaaaaaaaaggnaaattaaaaaa

SEQ ID NO: 3670 - DNA, 462 bp, Homo sapiens
  misc_feature 402: n = A,T,C or G
cccttagcgtggtcgcggcccgaggtacttatttcataaccaagtaataccaatattctctaagcatcatatagttccaaactgtaatctaaaaaattaatctaactgaatgatgcagtgtttgatcatgatttcctttagtcctttaaacttacgagtcttgctctttaatatcttcaacctcgttcagagtgactaccaaaaagtatatgactaagtgccacataaaataatcttgagtctcattttaatagagaataaatctgccagaaattttggtgaattatatactaaataataaaaggtaaatatatgatcttccatttaactcattttttataaagtgagccagttctattttttttaatccttaaccaggagagtatgaatcacccacatttncaaacttggaatacttagagaatatgtttttaataactatatttaaaattggattttttc

SEQ ID NO: 3671 - DNA, 326 bp, Homo sapiens
cccttagccgtggtcgcggccgaggtaccaccttgagcctggcatttaacctctgtgggcctcagtctctgcacctataaaaggagggatttgggcgagatatgctgaggacactaacattctacacgtctaaacttcgaggaacttttctaaagcaagaaaaagaataagggctaaatttaattcgtcagagtggaaagagaacaaagagagaggactgggagtgggagattaaaaggctgtggaaagtggtcttgagatagatgttattggggaccaaccttctcaatgcactggtcaagcgcccggacgttgttgagaacagc

SEQ ID NO: 3672 - DNA, 377 bp, Homo sapiens
  misc_feature 368: n = A,T,C or G
ccctttcgagcggccgcccgggcaggtacgcgggtattcttagaattgtattcataatgaagtcaattcaggcaggcacagtttcaatgatattatgagcttcatcttaatagctttttccaaaagttttctgatataggtttgccatgttccatttaaacccagctgtggaattcattattgtgtgctaaattcatttggccactgactttttgaaaaggagaaaatcaggttttttatacacacatacccacataagagtatacactttaatcagtctttttttcttaaaagttcagttatttgctgaaaaaggaaatatactgcttaaaaaaggaaaatatattcaaataaggcaaatatgattnggaaataat

SEQ ID NO: 3673 - DNA, 189 bp, Homo sapiens
cccttagcgtggtcgcggccgaggtacacttcaaaccacagcagccttggtgaattgtttagcatttgaaggcttgatcttttgtgccgtctactggacaatagaaaaactgcagccttgatgacaaactttaatcttgttttacgggggtgggaggtggtggttgggggtatgatttggtgctggtaa

SEQ ID NO: 3674 - DNA, 322 bp, Homo sapiens
cccttagcgtggtcgcggccgaggtacttggatacctactagtgcttactcattagcatacagaagacaatacttgagggctgtagcaaaataactgagaggattttgaaatgggcaggggtcctgcagtaggatagggggtgaaactcagcaaaatgtcaggttatctgctgctaacataaccccatctgtaacctccaaggtccttgggcctttcaggaacatgtttttcacatttcatagaccactgtaaatctaaatagctaatacaacagctaaagatcttaaagcaatttggagacattcatatagtaaattccct

SEQ ID NO: 3675 - DNA, 700 bp, Homo sapiens
  misc_feature 487, 496, 532, 565, 624, 643, 673, 690: n = A,T,C or G
cccttagcgtggtcgcggcccgaggtacaattctttcatcttttctgtttgcaattttgcataataaaatgctaaagggaaaacatttgatgagcagagtatcaaacacaagagtaataatactactacttacatgaaattctaaaacaaagaaaactcatctatgatgtcaaaaatcagatgagtagttgcctgaggcaggagatgtgggtggctgatggcaaaagagcacaaaggaactttctagagtgatggaatgttttatgtcctgattggggtgctaactgcatggacagacacatttgccaaaattcatccaactatacataaaacgtgtgcctcatattgtatataaattatacatcaaacatcaacttggttggtttttaaaataagttcactatataaaatctggaatacacagaaaaagcaaagagaaattaagtcccaatcccatcaccccaataaaatcaccaacctttccttntcttgacantgaccacgcctactggagataaaaaatatactttanatggttttccttagaaggaaatcagaaataggngacttcctaaattttggaattctttgctcaggcactcaaaatgcattgatttaaatctncacatcccatcactgctgngactcattagcaaattattaatcattctgngcctgaatttcctcatntgaaaaatga

SEQ ID NO: 3676 - DNA, 439 bp, Homo sapiens
  misc_feature 179, 253, 298, 318, 335, 384, 392, 421, 428: n = A,T,C or G
cccttagcgtggtcgcggccgaggtactgggaaacaggctggaggactatggtcctcaagtttagaccaagaggactatggtctcaaggttcaccatgagaaatgtgttgaacattttagtatgctctattgtataatttttttggagggggggatggagtttcgctgttgttgcccangctggagtgcaatagcacgatcttggctcaccgcaacctctgcctaccgggttcaagtgattcttgtgcctcancctcctgagtagctgggattataggcatgcaccaccatgcccagntaattttgtatttttattanagacagggtttcttccntgttggtcaggctggtctcaaactcctgacctcaggtgatctgcctgtnttggcctncggcgttaacactttttaagaccagtgtnacagaanagagaatgtac

SEQ ID NO: 3677 - DNA, 435 bp, Homo sapiens
cccttagcgtggtcgcggccgaggtacaacaagtatacgcatcactttccttaagattacccctaagactaggtaagaatacaaggaggagatcagacatgctctaaatacatttgaataagttgcataaatatgtttgaataagttactcaatttaaaaattagactgtttacactaaatataagatctctaacttctttcaaaaaatcagaaggtctagcaacactaagtctatatttcagctggctgatcatgagcattaaccaagcagcagtctctccccttaagtctgtgtgctcaaggccattactgcccccacttagtctcttacccatttccactccatgcctcgcccctgtagtcacctaagtttgcaaaccttgaattaaaagatgatcatttatttctacagtaaatatatcaagagggcttta

SEQ ID NO: 3678 - DNA, 310 bp, Homo sapiens
cccttagcgtggtcgcggccgaggtacttattgccactggccgccactttgacttattttctctaatagtttatttgccacagtctttattttgaatatgctcctagtttttttttagggtgctgttcattatgaaggcttctttatagaggcctaataagaatgcctttttataaagcctgtgcatttaggtaggttgaagctaggaggattttctttagaatgctcttttgcatgtaaagcacaaagtatgtttcagtttaaatgcacttcttccggttaatttttatggggaagacaagtgagtcac

SEQ ID NO: 3679 - DNA, 483 bp, Homo sapiens
  misc_feature 62, 286, 379: n = A,T,C or G
cccttagcgtggtcgcggcccgaggtactttttcactctgaataaaaaaaaaaaagaaaatnctctttgggaatcgtgctgccccctggtgatgaatggaataataaaatagaacctttaaataagtttactaataacatattgttcattaataaatgcaaaatttaacacaaagtctgcacaaaaggtaattcaataaaaagtgtgcatccacaacttagtcatctgatattacagtgattattagggccaatcttagaaatggaaagatggagaaagaaggatnaatcacagaaaagggccacaggcttgagaaaaataaggattccaactccccacaattgcaaatatgaagaaactttatgttacctcagtttanaaagccagtttcttcacggggggttaatggtaggcttcagataatgacagccaaaacaaaaactttacaatggtttctcaaactaacaaaattttggattttat

SEQ ID NO: 3680 - DNA, 408 bp, Homo sapiens
ccctttcgagcggccgcccgggcaggtacgcgggatgatgtgaggtgtaaggcttatgacttcattatgagaaggatgaagacttgaataagatttggcacatttaggacaactagtctaactgcaagtgaaaaacggactgtaggtaaccaatggtgaaggacgatcatgatttgaactaaaatggtatcaacggacatagtaaggagttgagaaataaagaggaagtagtaattgattctggatatgttttgagagtaaaacaacataatttcctgagagtttggatctagagtgcaacaaaagtagagtcaaaaacaattaactttttggtttcaactacttgttgaatggtaatgccactaaataagacaaacaactctgaaggatgaaaaatttgagagaaaa

SEQ ID NO: 3681 - DNA, 732 bp, Homo sapiens
  misc_feature 188, 308, 377, 453, 467, 490, 571, 596, 628, 631, 639, 649,652, 665, 669, 679, 715: n = A,T,C or G
cccttagcgtggtcgcggccgaggtacatttttctccacagagcaacaaagacacctatacaaagtcataggagatcaaggtcaataactaattttaacacatattcattcacagatatgaattgagaacaaatagcacccagaaatttcaagaagtgaagaacaaatgtagagaagcataatgatancgaatagaaaaaaaaaagatgccccaaaaaacagaactcaaggaacagaaaattgtattttggagtttccttagaagattccagaacattctgcagtaaataaaacaagatcaagctttntgttttaaaaaaattttcagaagaattagaaaatgttactggaaaggaaaaccatttaaaaaggtgttngaaaataaaagaaaaaaaggtctcaaaaagatagagccaaaaagtcaaaaaaatggagaaaactctgagaggaacntccaagaggaaacntcgagatagagaggcttgaattncatcatggtgacttatgcgaacttttggaaagatccgaaaaaatttgaggcccggaaacttgtccaaaaaacttattggcntttttttcccacatttggccacccnattttcaaattggggggaacccggccaggttnctngaatggtnggaggaagtnctnttttttaaccccnttcntgaaattttngaacctttaagattccaaggttggctttaaaggggnttgggggaaaaaaaaaa

SEQ ID NO: 3682 - DNA, 618 bp, Homo sapiens
  misc_feature 495, 498, 547, 583, 591: n = A,T,C or G
ccctttcgagcggccgcccgggcaggtacagacaaaagtggaaaacaaaccaggaaaaaaaaattgtgaagcacagagctgcttaaaagaataaagtcacagaaataagtcagtattttgtttagagactagaactccaactgctagccaactgcctagaatatagtaaatattttctagtttcttaaatgactagtaatattcctacattatgtgatggcatttcccaaactgtttaattagatgttagatttgtagccaaatatgtctaggaaatgcttaaacaatataaaacagttttaatgattggctttttagaacgttatatattaatgtgctttatgcatatccaagaggtgagtgaggtatttggggtttttcagacttacttgattacagatctggagtatctcaaaacagttgttttgtggaaaacactctggcaaactctgagtcttaatcattaaaaataggtttttggggtaaacaacaggngtnatagaaatggaaaattactgattcacattgagccatgaagaatttattntcaagcaatttttatagaagttgctttatgacaaanaagctttngttaactggcatttggcattttcatgc

SEQ ID NO: 3683 - DNA, 507 bp, Homo sapiens
  misc_feature 45, 47, 49, 61, 62, 65, 76, 84, 100: n = A,T,C or G
cccttagcgtggtcgcggccgaggtacgcgggtatctatggaaancngnttatttttactnnatngggagatttanttttttanttaaacattgctctgngtttattttccatattccatcagtgagtaaattttagtttagaattacagctttacccagggtttatgtcatcaagttcccttcaagtagattacttgcaaggaaatcttactttgatatttcctaaatattaagcaattgatataaaagtttgacttaattacttgatttatagaattacttggtctataaggttaattatttggtcatattgaataaatcagattttttatattctttggagatacgtgctacatccttttgttaaaaagtctttttagtgatactaattctgtgttcagtgtgtgaaaagtaaaataccacaattttaaaagtctaattatttttaatttggttaatgacagagatatagatcagctatcaggaaggggacttctgccattcaa

SEQ ID NO: 3684 - DNA, 471 bp, Homo sapiens
  misc_feature 40, 73, 78, 86, 112, 137, 146, 171, 175, 228, 243, 263, 310,333, 338, 360, 374, 417, 441, 444, 452, 455, 456, 462: n = A,T,C or G
ccctttcgagcgggccgcccgggctggtacaaagaggcanaagtaggactcctgctcagtcagcctcagcctntctcntctggatncaccaccagacttagaaagcttgcancttacataccacctggtgaaagttnccttttctnatcttccatttctctcattttcatnaagngctaatctgtctgttgtatggtatatagctctgaagtagttccagcaagacantatgatcaagcttcntttaaataaatcatgatctntttctctctctgcaaagcagcaacagctgtcaaaggtagaactgaanccaaggcagcaccaatggagcangctgntaatgaaaatatgacaagaatntttgaaactagaancctcaagccacaactttgttaggttttcctgcactctcccctnggggggcattattcagaggtactntantacgttcntannaatttnctttttggg

SEQ ID NO: 3685 - DNA, 394 bp, Homo sapiens
ccctttcgagcggccgcccgggcaggtaccctgactccctaatttgttcctacagattttaattttgacatggatggcttagggagaaagcagaaaggaaggaaaaagagaagaaaacagaaaggaagaaaggaaggaggggagccctggtagaaatttcattttgtccagggcaacttggggacttacaaaggaaagacgagagagcagaggcagagagaggaaatggagcaagaagtgtgaaaataaaaggagaaacaaagaaaagaggaaaaagtatgaaaaataagttgtaacatttctctggagctttttgtttcagaagtgaccacagaaggaggatggagatactaagaaaaagttaacaggagaaacagtaatgaagaggaaaatc

SEQ ID NO: 3686 - DNA, 407 bp, Homo sapiens
  misc_feature 198: n = A,T,C or G
ccctttcgagcggccgcccgggcaggtactggttaaggaagagtattgttgaagatacacttagttttgtaagatatattaatttgatcacttgcaccgtgtagttgaattattgcaaagaattgtccagtatagaaatggcttccagagacactgcaatctctactgtgctgattcacactgcatcatatgatatangaggttgtatcttaatttagcatggtcctactggatttgctttttattactaaattactaaataaccttagagactaaagacaatacagcattgtgagataattaggggggtattgtcttttagcctctaggggttgtggtaaatctgggcatcgtctcactggattctcgactcagggatctcataaggctaaactcaaggtgttggg

SEQ ID NO: 3687 - DNA, 326 bp, Homo sapiens
  misc_feature 283: n = A,T,C or G
cccttagcgtggtcgcggccgaggtactattatctctctaatgaatcacatgtataacgattcaaatactgtgtttgaaatgcaaagtcattttaaccgctcaaactaggaaactggcataattatggtcacaaacttatcctacgtgcctaagcttatgaaccagcaaatgaacataccaccaaatattcgcttacctggtcaaaaactactactgcactcattagaaacttttaggatatcaaaatcataaaaccgttccaggactatagttttatttgcnaagcaaactattcaatgtgttttgaaacaagcagtcttctgac

SEQ ID NO: 3688 - DNA, 377 bp, Homo sapiens
  misc_feature 12, 325: n = A,T,C or G
cccttagcgtgntcgcggccgaggtactgagcctgtgtgtcaggtaatgtggttaacttaacattcattacagcatgtcatcaccacaaaggcctcttgtggctggtgctattttttttccattttgccgacaaggtttagagagattgaatcacctgcttagacccacacacccagtaagtgttggaatctggattgatgctgtaatgaccattatccagatccttatcaccgtttggggaaattgtctgaaaatccctctgggtttatttagagtcaagctttcatctgggtcttcagaaagttgtagtggaagccatctggnaccaccacacacctgaaagacatttttagggacttaacctggattgaaaaag

SEQ ID NO: 3689 - DNA, 325 bp, Homo sapiens
cccttagcgtggtcgcggccgaggtactaatgacttaggaacttccttctccatcaatctgtcttccatgttcaagttttatgaatttccattcctgtattcttgaatggaaacatttctgtcttagaaattccactcttccggtgtttacaacaccattttgaatggtgtttctccatctttttcaaatatactccagtattactgagctctatttattatacgtataggatcatgaattataaatgagtatgtgttaaatgaatgagaaggaagtggcttaatggtctataggagaaccgtaagttttcttttgaggtaaccg

SEQ ID NO: 3690 - DNA, 382 bp, Homo sapiens
cccttagcgtggtcgcggccgaggtacatcactcagatcctataactgagttttcagaaaaactgtttgggatctatggtatcatgaattaattttgttatgagggaagctatcttttgtgtgcccctgtaaggaccggactaccatgtcccacatttttcctcccaaagttgaaaaaatctccaaatctctgatttacacattttgggacccatcaaagtggtaactatctgtgttcagatttcacagtctttaggggctggtgacagagatgaagcaagcagcagtgcagataaacatgggagtggaatgtgacacacacctagctcccaaaaaataattagggaaagatgattcttgcacgatagaaaggctgaccctt

SEQ ID NO: 3691 - DNA, 313 bp, Homo sapiens
  misc_feature 130, 142, 165, 272, 281: n = A,T,C or G
cccttagcgtggtcgcggccgaggtacaatgccagaagtattttttttctttcagctgtgaaccagcctgttttgtttgacaagcctttccagattcatgcagctcaatcacgtgcttgttgccaagttngagagtgaaacntattatttcaaacttgttgccgngaccaattttttacaaaactgaaagtagcactgtgaggtggattggacctagtgatgaggtgtctacacttgcatccttttcttccaagaagaatattctgacactncaactctanaagtcatgtcattagtaaaaatgaaaaataat

SEQ ID NO: 3692 - DNA, 601 bp, Homo sapiens
  misc_feature 372, 384, 385, 413, 470, 505, 544, 570, 590: n = A,T,C or G
cccttagcgtggtcgcggccgaggtacagcttggagagaaattatgtgaaactctggcctcttccacaccagtctggttggagaaagatttcaggaaaggattagggagctggaatcatgacatagtatagcaaaggtgcataacgtctgctaatgttacagcacattaaatgaagttgtaaaatagtagcttaaagttaggcaggccaaacataacacaagaagtatgaaaagcaaggtgccatttttccaacaaataagttcattatatgaagacccagctttggttgatttagcatcttggtatccaatgcagctgctgtgactttcttttctttctttctttttgttttttttgtgttttgtttttgnttttgtttttgnnttttggtaagccatcttttaaagacctnacaccagtaagtatgcattccagtttaattaatcatacctattttcttactggaatncctttttattatgcccagggcaatcccacaaatantgaatttctttaatcctggccactagttctaccaagggngggaaccttgcttcatttttaccgangaaaggaaacctaaccattnccaaggggggg

SEQ ID NO: 3693 - DNA, 330 bp, Homo sapiens
cccttagcggccgcccgggcaggcactatattatttatgcagtatggtaaaatgtcactttgcctcaaggtgacctttgaagttatagggagcctatgttttgattaaaatacattgtgtggggtgttaagcacttttagtgtataagggaagatgaaggatttcacagggcaagtgggtggctgtaaatttttacatagagatcaagatttgttttttagcatgagcagaatccacgtggtatttggagaagaattgtgtagacttatgctatgttatggctttttttttaagaaaatgcagaacaaggcaaagcgaacaagaaaaaaa

SEQ ID NO: 3694 - DNA, 544 bp, Homo sapiens
  misc_feature 456: n = A,T,C or G
ccctttcgagcggccgcgggcaggtactcttcctgatggaaactatagaaaaatatcatgtccttctattttaacatgttttatcaaaatcaaaatagttaccaaaatctcaaagcattttgtttcttagtatcaaaatccatggaaaaggggagaaatcaacattaagggataatttgaacctatatataatgtttccttaacaattaaatgttattaccatgcaatagtgcaatcaattctaggaaaacacctccaggaaatatattaacctctgaactaatgttaaagaagctcccatgagagtatgttttcacaaatgagctttctgttgacctttttgtaaaacttcatataacgtatttcagttaaacctatgatgcctttagtgttatctctttcctagaaatgagatgtttggttattttatgtctgtgtgtgtgtatgtgtggctgngatagcactggtatttatagtttccctgctaaattaccgtatttctgaaccttggtaaactgaacagaattggaacgtttgggtcccc

SEQ ID NO: 3695 - DNA, 467 bp, Homo sapiens
cccttagcgtggtcgcggcccgaggtaccagatacttgaaggacccactgacctggaaaaaagtgggatctagtttcagcttgaaaaaatccttcttcataattacatttcccttaggcaaatctctaacatgcctaggcttttgtatatctgtttttactgcgtcacaaacctcccccaaagagaagggagacgataactggagaaaaccacaaattaatcttccaatatttttttcttccatataatcaagcagtgcctcagaatcaaagcagtctctaaaaatattttgaagaaatttattttcttggatcttcaaagatccaaagttactgagatgcaaagaatcttccacagtatcatccaaggatactgaagggctccttcaaacctcgcccttgtatatttcttcttccagttgtgatactgcagttacatttgcaaaccaaatgatccctttgggtggg

SEQ ID NO: 3696 - DNA, 341 bp, Homo sapiens
  misc_feature 292, 321: n = A,T,C or G
ccctttcgagcggccgcccgggcaggtacgcgggatttctttctttgacatggctcctcagaatgcatagagatttggagctgtgttgtctacactggatgtgtgagagtgattggtaatctggaggctgactacacttcaggcctgccccgtggtggagtcactgacttccaccttctggctgcaacctgcccaagcccatcctgagtcctaggctgtgtttacttagataggtcccttctctgactgacgaacatcaagtccttgtgattgttcatttttttcactttancttgtttgttttcaagtcatccaagtcanaaaagtgtcaaaaagaaacc

SEQ ID NO: 3697 - DNA, 643 bp, Homo sapiens
  misc_feature 505, 642: n = A,T,C or G
ccctttcgagcggccgcccgggcaggtacgcgggttctgtcattttttgttaattttacttccaggaagtcagggctgtgatttgaggcttttttctctaagcttctgtgatggagatgaatttattaaagtggggccataatgtctttttgagcaacattaaaactgagccatcagaattaggaagtatcagaagtcaagatcaattttcaagaacaggagcataaaattcgaactcaatctgtgttaacattaagagatttagaagctcattcagactgataactaatgaataatatagctttcatttgttggagactttatgtgagccagccagttatacatgttatttataatccccacagtaacactgcaaggtagttatcaactctattttgcagttgaggaaattgaggctaagaaatatgccatttaacttttgctgcataacaaactaccccaaaagctaatgggtttaaaacaatatgcatcttttgtgtctcancattttgaggtccccagtgagtagctcttctggtctgggattagttcaactatctgcagtctgctaaacataatctgggtgctaggatgatctacaatggcctttaccccccttaagtaaatctaagttggatgggna

SEQ ID NO: 3698 - DNA, 302 bp, Homo sapiens
ccctttcgagcggccgcccgggcaggtactcgctgaactgtgttcactaataaccactggggaatgattattccccaatgtctttctaatgtcttagaattcgtgacctagggtttgccaacctgagggcccatagcggccagttcaggatgtcggggactgcagtaaaccagaggatttatccggtggtcgctccttattttggccagcagggccgtctggaaatgacagttcagtgttgccaaatcttctaccagttttgaaacactgacgatatggtttggctctgtgtccccatccaa

SEQ ID NO: 3699 - DNA, 739 bp, Homo sapiens
  misc_feature 272, 296, 325, 349, 420, 447, 452, 469, 490, 502, 510, 511,520, 526, 532, 548, 559, 565, 582, 599, 601, 623, 624, 630,661, 662, 664, 676, 682, 683, 686, 688, 697, 718, 725: n = A,T,C or G
cccttagcgtggtcgcggccgaggtacttatcattacaagtaagaatttctgatggctacacgtcattctattatgcttacagatgagaaagctctattatttgaactgtaagagtcttttcaacctccaaataaagccccttccaaaaaaccccaccaaacccttcactataagaaagataataaattattgcttagactaatctatatgcaaagtataaaagtgctgcatcaagctgcagcccatggcagcatggaaaccacaggtaggnggacattttagaaatgaaatggcnatccacttaactttggattgattgcacanaataacctctttctctctctctgnttaaatctacctcccgtttatctcttaggttttcctagaccaaaaatcaagatgttgggctttaaatctantaaaataaacttaacggtttttattcnaaaanggactctggggtggttnaagaatggaaatgggccttcnagaaaatttttnttccaccnntttcccccncccatnaaggtnaacctggaaaaattancatgccccacntttcangctggcattgtgcctgncacctccacctacttgncngcccaactggccaggtttttannattcancctttgctgggatttgggacctgacaagggnngnaaaaaccagaantttcanngcncntcaaaatanaaaattgggctggggggcccnccctttntttttttttttttt

SEQ ID NO: 3700 - DNA, 545 bp, Homo sapiens
ccctttcgagcggccgcccgggcaggtaccaattcttaagtattcctgataggccactgccttcagcctagaacttgagaggacccagttcttagcatgcccatctaggaacacactgaatcacacattttggcatacctcctttattaccatgagatgtagggtttgctttcatgaagaaaacaaaagagtaaacaatcctggatctgaactgatagcactttataaataaaagcattttacatcaataaaagatttttattatttcaataccagaggtttcaaaaagcccaccatgtatccaaataaggtgtctttatttcccccctttcactcataagtcatctcagtttatcagtttgcaggaatgtaagcttcacacacaaaattccagtctgggaagaagaatgctgcttattacagggttttatgccacatgactcattgggatttcctgacggcctttgccttactataccaaattgaccctggagctcctaatggtgattcccagctgcatcaattttgagatttacattgcccct

SEQ ID NO: 3701 - DNA, 410 bp, Homo sapiens
cccttgtggtcgcggcccgaggtacgcgggttacactggctacccagatctgcaaagcagctgaaacaaatgtagtttattagctgggcaggaaaccatctgacaatacagaagttcacttactgaaaaaaagagtagctattagcaactggactctgagccacaaaacccaaggtttcactagaatgtgagctatcgccttttcttttggctgctgtcagcacacagtatgtaaaatagagaaaacagggaactttctaaaagaaaactaattttaattctaaaaagatatgagtatggcttagcaactaaatctgttagatggggttgacttcatcattactccttgtttttgggaccactcatccacgacttggaaacgtacctgcccgggcggccgctcgaaaggg

SEQ ID NO: 3702 - DNA, 601 bp, Homo sapiens
  misc_feature 443, 552: n = A,T,C or G
ccctttcgagcggccgcccgggcaggtactaaatgttttaggaaacaagctactccaaacttcagtttcttaggggttatctgttacacagttcaattagttagtttcccaatccatctagacttcaacattgaatttgattttacaatctcagggacttgaaaagcttccacttctgcaaatgctatttcccagctctagtctgtctaccacttactcacaattagctgctttacactctcaccacacccttcagcctctctgagagccaggcagtaatggccatttctggggctacatctaagtagttcacaagctgtatcctaaactctcagcatagggtctggttcagagtaacaacttaatacgtatttattaagtgaacaaacaaatgtctgaaatcctctgtcttggatcagcaattatcggttatcttttctganaagcttggagagaaggtgcgcagctatttatttaacaagagtgttaatttttatttcctcccctttttatctgattactagatgggcagacaggagaaaatggtattangcaaagtctatatgactaagtctcttcaagatgtccacgtggggaaatt

SEQ ID NO: 3703 - DNA, 576 bp, Homo sapiens
  misc_feature 511, 518: n = A,T,C or G
cccttagcgtggtcgcggccgaggtacagtagaaacattaagagagcaagtgagcctcatttccagacacatgggagatttctctcaggactgtgcaaagcatttcatgttccaagaccctgcctttgttaaaacatagatgcattttttttttctttggggatgttcagagccttccagaattatgctttcccaggagagataacaacagtcacatagccaaacgtctagcagtgcttctgcctaccgaacagaatttcctgagaatcttctggaaaagcagtgcccagtcactcattctgcaaaatgcactcagcagctcctctgagagaagccgtggatatagggggatggcaggagagaaaggcagctctccctgccaggcgggtgaggggcaggactatagacccttctactgagggcgagctggtggaatttctctcaatgctcaagaccgaggagtttatcattcccttgacccctgggctttagctagaaatgtccagaactnccccatnctaactgagaagggcagttgcttgccccaaaccccaaaagactaattctttttttttt

SEQ ID NO: 3704 - DNA, 458 bp, Homo sapiens
ccctttcgagcggcccgcccgggcaggtaccatatttgacataacacctcaattccagaggggaaacttggatgggagagaaaaatcctttttatgggttgcttctagagattacctagaacttaagcgaggtgattttactctttcttcttttcataagcagtaggattcacttcagagttgagggcctgttgcaatagagggacatgttgattataaaagaattgggttatttttggctaaagcaggcagatcacctgaggtcaggagtttgagaccagcctggtcaacatggcaaaaccccatctgtaataaaaatacaaaaattagttgggcatggtggcgcacacctgtcatcccagctacttgggaggctgaggcaggagaatcacttgaacccaggagatggaggttgcaagtgggccaagatggcgccctgcagtccaccctgggcaacc

SEQ ID NO: 3705 - DNA, 590 bp, Homo sapiens
  misc_feature 53, 97, 407, 527: n = A,T,C or G
ccctttcgagcggccgcccgggcaggtactgagtctttatcagatcattgcanaaatactgcgtatctttagataatatttttaaaataaataattngacaaatgactattgagtcagccagaaacaaagagaaattgttccattttgtttggttttactgttgccatttaaatttgattcccatagtggaaaatcatccctacttctgttcagagctgaactcataaaattataaaatgttaatcaaggtatagataaaatcattaattttcatgtcaatcctgccatactgctcaatccaaatcttagcaaacaatgtgtaaagagggcatctattattagaagaattattgactacctactagtagcttggattccattaatttttgaggttttatgtaaattnggggcatttgtcataatgacatttaaatctctatcgcatcatgagttagggttttatgtgtatattatatttcttcaatatacttacatacacattagcttctttttatgattttgtgtnagggatcccttttattaatcaagctttttttcccaggtctggtgggtaataaagccaatccaa

SEQ ID NO: 3706 - DNA, 336 bp, Homo sapiens
cccttagcgtggtcgcggccgaggtactgaagacaaaggttgtaatcaatttatggtcttaggctatttgcacgactgaaatctgaaaacttcatgaaatcagggatcattacaaatatcccaatgccttgtgccagccacagaaactcagtaacagactatttgacagaatggtgtcaatttaatcatgacattgcaatggactataggaagagtcaataaaacactgatagtggagcaaaaatctggcgtgacacctgacattgaaaaagtcggatggaatacaaccacatccatttgttctatgttgtctatagcggctttcacacagaaact

SEQ ID NO: 3707 - DNA, 287 bp, Homo sapiens
cccttagcgtggtcgcggccgaggtacctccaaagaggtaacactaggaaacaatatagatgaaccaccttttcaatagctagcattaaatgtgaaatgcaaactagggcttcagtttcagaacctaacagagacatgcagaataataaaatgggaagtttggaaacacttggaaatggagaagcaaaaacgtctttaaattcttattttgataagtaagcctcaaatctaatagatcattttagatgccaataactggcaattcattgtcaaaatgacttttttta

SEQ ID NO: 3708 - DNA, 479 bp, Homo sapiens
  misc_feature 99, 123, 127, 133, 135, 138, 149, 156, 167, 175, 176, 179,190, 201, 202, 208, 214, 220, 230, 243, 250, 261, 263, 271,287, 289, 297, 321, 336, 341, 344, 365, 385, 390, 392, 393,404, 414, 416, 418, 419, 437, 472, 479: n = A,T,C or G
cccttagcgtggtcgcggccgaggtacctctataacgttggatgagttacttaacctttcagtgcctgtaaaacagataataatagtaattacttgccncataggaagtttgttaagtaaggnattnaaaatngnganttaaattttanccataantatattgttanccaattannatnggccccttatnccaataattgnnttaaanggccanatttgnaaaaattggncccaaggcccttngtaattntttattttaangntaattttnggggccaaattttaantncctttttnttggaaaaaggaaaaagggggggnccccccaattttttnttaanaanggaaattttttggggtttttnccttcattttaaaccccctnttggncnnttaaaattaanaaaaattggntngnnttttaaggattggtttgnaaaaaaaaaagggttttaaaaaaattaagggtttncccccan

SEQ ID NO: 3709 - DNA, 366 bp, Homo sapiens
ccctttcgagcggccgcccgggcaggtacgcctcacccaactcaactcttcacatagctcaagtcttggcataaatgatatttctcaagagatacattttctgaccactttatccttgtctttccttcataattaatccataacattatgcttgttagcttccttcatggtatatatcatagattgtcatcatatattaatatgtttgtctatagactgtctctcatattatattctaccaatatgagtgcagcatccatataccatagacctagcatggtcttagataactaagatcaaataaatacaaagggttcaaggggcaaataataacgataataattagggattctcaaaaagcataaa

SEQ ID NO: 3710 - DNA, 319 bp, Homo sapiens
cccttagcgtggtcgcggccgaggtacgcggggggagaaatgtagcataaatttcatatctcaatgtgggagaggtgatgtcacattgtagaagactttgtgagatgggagatatttctgtggcaagcttgtgaagatataatatgtcacaagggcagaagcataatagatgtaacccaaaattttaaaaagaattatcaaaagccaatataaaatattttattcacacaaaatctgagacaattgattatgaaaaaaccatattaaaagatcttctataagatacacaccaggaaattgaatcaaaaatgaactaaaa

SEQ ID NO: 3711 - DNA, 351 bp, Homo sapiens
cccttagcgtggtcgcggccgaggtacatgactaccctggtctaagccaccatcatcaaaagcctaggcacccatagtatctcctaacttgtttttccctctacacttttgtcccattttctaaatgtaatcatgttgccctgtgctaacaatttcaattgttcttaaggaaaatatattattgagtgcttcttatatgttaggtattgtgctaaattccaagaataatacaaataacaaaactgaggaattatttttatgttgctcagcagcccctaactaatctgaagcctgagtattattccgaaatcagtgtctcagctccaagcacaccagctttctggacagatg

SEQ ID NO: 3712 - DNA, 139 bp, Homo sapiens
  misc_feature 44: n = A,T,C or G
gtaatacgactcactatagggggcgaaattgggggccctctagnatgcatggcttcgagccgggccgccagtggtggaatgggggataattcttgcaagaaaattccgcccttaagccgttgggttcgccgggcccgga

SEQ ID NO: 3713 - DNA, 348 bp, Homo sapiens
ccctttcgagcggccgcccgggcaggtacgggaagcagcagctctagccctggcaaacctaaccacttgcaaccctgctaatgcaaacgaatttctgctcactcaccttgagttgattcgagtcaattaaaatacattgatcttctcagcacccggaaatataaataagactcaaatattacctctaagaggatgttttaaaaagtgaacattctcgagggaaaaccaccaagtgacaaaggaatcatgcattttggccaagcatatttataatgattaacaaatacaagcgctgctgctgaagctgatggtattgatccattaataaacctcctgtctagtaaacga

SEQ ID NO: 3714 - DNA, 366 bp, Homo sapiens
  misc_feature 134: n = A,T,C or G
cccttagcgtggtcgcggccgaggtacaacgtgggcaagcatctgtgcatatgaaatgctgtttttctaaaagatttctcacattggcaaactgagagattttcttctggaacacaggaaagattattttaatngcttatagccataccatggtctgaatatgggaggatgacagacacagaacgagaccagatggaccaggatgcccagatattcatgaggacctgttcagaagcaattcagcaactacgaacagaagctcacaaggagatacattcccagcaagtgaaggagcacaggaccgctgttttggatttcattgaagattacttgaaaagagtattgtaaactttactcagaacagag

SEQ ID NO: 3715 - DNA, 347 bp, Homo sapiens
  misc_feature 134, 137, 138, 161, 186, 254: n = A,T,C or G
cccttagcgtggtcgcggccgaggtacccagggggcagagaagaagagtgcagcatctattgcctgtttcttggcagccaatggtgctgacctgagcattcgaaataagaagggtcaatcgccacttgattctntgnncctgatccgaaatcttctgcaanagcacttggcaaaagtgtcataagngaaaaagtcagtggtcaagtgggttctcggagtccttctatgattagtaatgattcttgaaaccttanaagagtgtatggtgtgctcagatatgaagagagatactctttttggtccatgtggacatattgctacctgttctttatgttctccacgtgtca

SEQ ID NO: 3716 - DNA, 518 bp, Homo sapiens
  misc_feature 447, 486, 487: n = A,T,C or G
cccttagcgtggtcgcggccgaggtacctaaaagctgagccactacttctccagagcaattggtctccttgattgttttgcaacagggatattttaaattggaaaactgaaaagataatgaagagtttttatttctatttccagataagttagcttttacagcatttggatgttgcttccgcaaggggaagacaagccctcacttagctcagctaaagggttatcttaatgttttgaggggtaataagagaaattactgttagttggaaaaaaaatagaaagagacaaatagaaaatttcctaagactctgtaagagacattcttggctctcttctcactccacatttgccacagtgattgggtgacttgaagcaccatgacttgaagtatcagctaagtgagtattagtctcaattttttcctttcaatattaaatctatctctgnaaatctccatcccatttttctactacccttctaagcatnnataaccctttaaaggataagttaagagaaaa

SEQ ID NO: 3717 - DNA, 593 bp, Homo sapiens
  misc_feature 567, 581, 584: n = A,T,C or G
cccttagcgtggtcgcggccgaggtacatgagatggctcattgatacaagcaaagccttggtggctctgcgctgaattaaggaagagatttgaaagcagggctatttccctggcggcagtaaaactgcctcctggaaagagagcaagctatgggattagatacttaataaaattttaggcaagagaaagagtccaggtcttttacctaaattgcacaccaattgagctcatctgcttattctctacacactcaggctagggaaaaagtgggcacatttcaaaactcaatgcttaaactatagcttgatgtgaaaaagtagagacaaatttgcccatgctacatcaaagtgtaaagaactgtccatcttaagctgggaaacctgaaaatcatggcaagtataaaatcactttttagtaataagacaaggaaataaaataacataaaagcacatgccaagaaagtattaggaatccatcctacgaaaatgcaatttttaaaagtgacacaatatcccaggaaataattataccgaaagatgcaatgaaaacaaaaaattcaaaggaatncatcaagggccttnccncaaaattta

SEQ ID NO: 3718 - DNA, 314 bp, Homo sapiens
cccttttcgagcggccgcccgggcaggtactcagtttattgaattgatgaattgatttttttttagtaatcacataaatttctgtaagatttgttatacattgtttactgtcacagaatcatgttttatatcttcaagctcaaagcaagctttcaaacttgaatttagttcttgcataaatatggatgattgtttctccattactgaagcagtgtattatttccataatgatctgtaaagtaggtgggtttcatgacctaagtgttatagttgatctttatatatacaaggaaaacgcagagtcatcgttcatt

SEQ ID NO: 3719 - DNA, 295 bp, Homo sapiens
cccttagcgtggtcgcggccgaggtacgcgggtaaccaaatgtttcaacctggaactttgaacacctgggcttacataaattgctcagaatcagtgtggaaatcttcggaacagtggatgtagaagatttggggtaaaacaggcactagatggtgaggggttttatgctctactcattctttacgcaaaataaaaacagacgagtaagtgttggcctctttggaacagatgattcccagcagcagttggcatgctttatgtactttctataatactaataaactagtttacagaa

SEQ ID NO: 3720 - DNA, 332 bp, Homo sapiens
cccttagcgtggtcgcggccgaggtactacttcagtcattttcttaatttgcaaatcaatagctctcattttacttaataatgcctgatatttgccatgttcttcctcaaatgtgtccaactgcttaattttttcttcaagttccttttctttttcaaatacttgggtttgtaattggtcaagttgtgaaaaatcccagtttagtccaatatagtcaaacacttttttaagtttcaatacctgtaagatgcaacacttaatagcggtgagtctgctttaagattataagatctcctctttaacacctttatttacttcttgattaagtaata

SEQ ID NO: 3721 - DNA, 626 bp, Homo sapiens
  misc_feature 381, 478: n = A,T,C or G
cccttagcgtggtcgcggcccgaggtacaaacgagttgtatttaaagagtgctttttgaattctagggctctctgtaagttacttcatcaggatcctgtttctttgatcaagtcagcatgggtgcctaccaaatcatttctactttgctgtgtagcttttaaatctattttctgggtcactgggcttactcatggaatttcttttccttagtttgtttctctactatagtcagagtaaaatgagatgaatggatctgtatttaaagtgtggcattttcccagaactgccatggcctttacattcattctcaagaagatcaaggatgagcagaaatgatcttcacagaaccaacatttactccaaaggcatcaaaactctanttcctgaaatgcatttgagtcacttaccagcccagtgggatctctgtgccaacaatttgaatttatatcagtttacaaattcactgaaaagaattgngtcttttttggtagttcattcctgaagtcttccaggctctactgaataacccagatgatttatatataccatcaaacttgcctaaaccctaagcactgccctggttatcttggcctattaaatgcccagtcagtaattcagtttaaat

SEQ ID NO: 3722 - DNA, 368 bp, Homo sapiens
cccttagcgtggtcgcggccgaggtaccttaatttatccacccacagaaagtttttcagatggggtgggaaggaatggagagagaatgtgtctatgagcttccagcgctcatctctgcggctcagaagccatcaatagctcgaacagaaaacgtcctcacatctgtcacacaaacacaccccatggaaccaaaaataaaccccacactgatgaaagccagcatgtcgaaagataattttagatctatttgaagactgcagagactgtctcgctgaaattttaaaaccacaccaccagaatacccaaccccttacgattatgctcagccctgatgaggaggcaaaaacacttcattccattttataaac

SEQ ID NO: 3723 - DNA, 551 bp, Homo sapiens
  misc_feature 31, 33, 34, 35, 42, 43, 46, 47, 48, 49, 54, 55, 56, 58, 59,63, 68, 71, 76, 78, 79, 90, 91, 92, 125, 144, 172, 187,218, 236, 243, 254, 287, 300, 305, 314, 363, 371, 392, 469,505: n = A,T,C or G
ccctttcgagcggccgcccgggcaggtacantnnntgctatnngtnnnntgaannntnngatngaatntanaatgncnngaacacagatnnngggtgtattgtgtgctgcattggaactgaaagnattcacaaaggaaatgctncaattcaatccccaaaataaatgaacantgacaagaacacgtngaaaatctactgagtgtgtatatgatcatcngtagttgttcaaacgctntatgaancttatgctctngttcatgtcccatttttgagttgtgcctacatnatgctggcaacanataanacatgttgntttaataaatactaacctttatattctgcttatttttaaattataaatnccatctgngtaaatagtttctctcttctngcactttactaaaaggcagttaaaagaaacccattctgaggctgggattacaggcgtgagccactacacccggcctnatctgctctttaggatatggcagcagatcatctatntatcagatacaattagaaccacagaaaaaatttaagaaccttaaaa

SEQ ID NO: 3724 - DNA, 418 bp, Homo sapiens
  misc_feature 235, 251: n = A,T,C or G
ccctttcgagcggccgcccgggcaggtacaacgtgggcaagcatctgtgcatatgaaatgctgtttttctaaaagatttctcacattggcaaactgagagattttcttctggaacacaggaaagattatattaatgcttatagccataccatgtctgaatatgggaggatgacagacacagaacgagaccagatagaccaggatgcccagatattcatgaggacctgttcagaancaattcagcaactacnaacagaagctcacaaggagatacattcccagcaagtgaaggagcacaggaccgctgttttggatttcattgaagattacttgaaaagagtatgtaaactttactcagaacaagagagccatccgagttaaaagagtggtggataagaaaagattatctaagctggaa

SEQ ID NO: 3725 - DNA, 253 bp, Homo sapiens
  misc_feature 132, 242: n = A,T,C or G
ccctttcgagcggccgcccgggcaggtacttatcaatcttttgattttaactcatgtgttacaatttcaaacagtatattatatcaccattatcaccacgctgaagtttaaatgtcagaatgacaagccccncgtataattcatatttttagacttaactattaatattttagttagaaaaacttgagacatatgcacagacacctgtaaacaactacttgttcactgaaaaatgatataanaatatcaattt

SEQ ID NO: 3726 - DNA, 546 bp, Homo sapiens
  misc_feature 49, 239, 360: n = A,T,C or G
cccttagcgtggtcgcggccgaggtacataagaccacacaatgatggcnttcaagagaaagaaaagaggtaaggatgcaaaattaaaaaaaaaataggacttaatgaaagctaatttcatcaagcccaggtcactgatgagaaagatgtaaaatcaagaaaccagtgaaataacacgtaacaggtgagtcaaacattaccagccgcatcaaacagtggaagtgaaatggcaccatctancccacctggtgaaatccaaagcgagaacttaaagggagtaaggatgattcacaaaatgcggtcgggacacaagaaaagtgagtttggaaggacagtgaagagagaaaaaagaataaggaanccaccaaaatttcaactcaaagatacattttaaactgcatggtatggcccactgtcaataccgtggctgcctgggaacaaaaagggtggtctccagatcccccagaaccccactatacaccaggaggacaaggaggaaaggaagaaaccccctttgcctgccagaatgcacatgaggggaggaagg

SEQ ID NO: 3727 - DNA, 537 bp, Homo sapiens
cccttagcgtggtcgcggccgaggtacatcaattcttatggcacaataaaataaatccataatagctgtgggattcagaaacaaagttatttacagaaatgtttttgatataaaaaataaacagctaatatgatgagtttctacatcagtaaaaataatttcatttgaaattgattacagtctgagcacatactactatgtaagagactccactgggggccctgagagatagaaagatggcttaaatacaatgttgacacctttagttattgataatttactataacatggcagtgtgcctagtagctggaacaatgtggcaaaaactaataaatctgctgcgtgagatccttagtaattactgttccatctgcctagaactatgcagccatataaaagtgtatcccaacatctttttagttgctcccttttagaattcctgtcttaactgaaatgtcccctcctcaataaaattttctctaatatttgatctatgttaaccctctctctcagttttcttcactgcaaacaacattt

SEQ ID NO: 3728 - DNA, 353 bp, Homo sapiens
ccctttcgagcggccgcccgggcaggtaccataaaaatataagggaaaataagctttcctagaatttttcagtgttctagtttttaaacagtgatgttttttattaacctatttcatccattcaaagacaggcctttctccacaccacattttcctctaaaatcatgataacacttttaaattgatggtgtcttccagtgtgtatcagccagatggcagtgtgttacagttccaggaaaactcgttcacatcttccgtaagatcaagaaggctctggcatcagataagatcaaatgttgtctttctgttttaaatatgtgccgcaaagagatttgcttacaatctattgagaa

SEQ ID NO: 3729 - DNA, 296 bp, Homo sapiens
cccttagcgtggtcgcggccgaggtacagattttcgtgatatatttatacacgcatgggtttgtagatccctgaaacttagaggtcatttagctaaaatctacattttttttaacttttaataggattgaaatgatattttacactgtatcacagatacagtattttatataactttttgtaactgaccttatcttggccttgagtcccatcctctctggtggtagcgtaaaactgaaaattccagtttgggtcaatatttagtgaaagttctactttcttttcagagagtttgtt

SEQ ID NO: 3730 - DNA, 330 bp, Homo sapiens
ccctttcgagcggccgcccgggcaggtactgtgggaaaataccatgggaacggcgctaagcccttggctttccgattgaagggagcactagctattagctgctcatctcaacatatgtatttttttattttaatggataaaaatgttatatggctgatatgattgatgactaagataaattttcacactgggacattttctgcctgaaggtcaggcttaggtggcctggtcccagagttgctgtttctactaggacccgacctggtaaaaatagaagatacagggtagtgaggcagatttgaaaagaatgcagcatgtgcaaattcttac

SEQ ID NO: 3731 - DNA, 326 bp, Homo sapiens
cccttagcgtggtcgcggccgaggtacaaatggctggactattctttgcatggatagctaaagatatcttggccctttgtcctgtaataaaagttgctgccagaaaatacaggagaccaactactataaaatataaaatgtaatttaatttttttctaacctacgcccttattctaggcctttaaaagcactaaattgagaatatgggaaaaggaatctatagagtttcggccagataatacaggaaagatcaacctagatcaggattcagaaagccatcctggctaggcatggtggctcacacctgtaatcccatcactttggga

SEQ ID NO: 3732 - DNA, 366 bp, Homo sapiens
  misc_feature 127, 225, 326, 330: n = A,T,C or G
cccttagcgtggtcgcggccgaggtaccaaccattttgcttttaaaatactgaggcaaacctctctgaggtttcttcaaagccaatggcaacaaacatatttcagcatctgttttgcttcactgtangtctgtgtgtgggtaggttataaaataaaaatgagcttgccattacagatactacttaaaaaccaaaaaaactatgatcatgatgttgataattctgnattcattatcctaataaaaacacataaatgtctagaaagaaatagacaattatgtattaggccttccatctcttatttaataatagcagggtcattgttcntagntaaaacccgctctgatcttaataaatctgatgtaaa

SEQ ID NO: 3733 - DNA, 308 bp, Homo sapiens
  misc_feature 230: n = A,T,C or G
cccttagcgtggtcgcggccgaggtactttttttttttttttttttttttgttttttgcctacaacacatggtgaaggttgccaaattaaatagtgtttctatatttgaaaatgggaaaaagtcattaagaaaaaaaaggataaagaaaaaagtatggtagctaatgtccaacaagttgaaatgacagtagctttgaaggccaattaagtcgatacaaaacgaaatcganaatgacggcggtggttgtaggctgcatcctggggaataaaagagccactccgcgaacacagtattttcttcagagcaa

SEQ ID NO: 3734 - DNA, 451 bp, Homo sapiens
  misc_feature 24, 378: n = A,T,C or G
cccttagcgtggtcgcggcccgangtacgcgggtgaaaatgtgagagctctgctcacatctgacaggtctattggttgaagtttcaagtggcaactggtttgttagaaccagtctcttccagtgaagaaagttgttcactatttagcaaacgctaaggaggaagttcatgtaattcagataattcctatggtgtctccacagatactacgtggaaaagatggggagtagtgagagaaaacacatgaatatgtgaacccttcgggtctgtgagggatggaaggattgggattattggagaaaaataaggatagcattccagctgggcagatctaattcgagaataaacaggatgtgcctgtagatcaatgaaaagaaangccaactggagtaggggtggcctgttggaatggcatttaaagccagttagggaaaaaaaaaaaaaaaaaaaaa

SEQ ID NO: 3735 - DNA, 446 bp, Homo sapiens
cccttagcgtggtcgcggcccgaggtaccgaaaagaacagaggaaactaaggcaagctgtgaaagatgctgtgtctaagaaacccattccattggagaacccaaaggaaaagcgaccaggtaaaaggattgagagggaagaagaggaagaagaagaagcccttcctttagatatgatggatgaagatgacttacagttaatgaaggatttaggacaaagagtatcttttctaacaagagatctttcttctagtgagcctgttcatgcgaagaaacggaagcatgaacgcattatagataaatatgaaaaaataccaagaactctgcaaactgcaccagagaaggaactgattcatttacttcctatcaaagataaaagtggtataatcccacagactagggagaagccagttactgatagtacaaagatgaagaggatcaaagaag

SEQ ID NO: 3736 - DNA, 586 bp, Homo sapiens
  misc_feature 134, 145, 160, 165, 192, 206, 259, 261, 264, 275, 282, 306,312, 328, 353, 371, 411, 415, 420, 429, 433, 447, 484, 508,519, 530, 531, 547, 551, 554, 561, 569, 585: n = A,T,C or G
cccttagcgtggtcgcggccgaggtactatttctcttctactccttaattacattgaatacagatattaattttgcaattgcatattcagtttcctttcaatcatctatttttttactcatctcctttttcccnaatttttgggnccttttaaaaaattnaccangttggaaaattttaattttttttttgntttgggcctttttnaccggatttttataattttcctccttacccttggttttggctggaattttttncncanaaaaccaattnaattttncttgggggggttcccccttggccnaagctnaattaacccttaaatntctttttttggggaagggaaccaanttggcctttccttttttnttgggaaaatttccaatttttcctttttcccccaattttntgcnccttnccaaccaanaaanaattaaattttttnacccaagggaaggtttttttttcccaattgggggaanaaccaaaacctttttctttaaccnaattggggttnttgggggaagnnttaacctttccttggnaagnggnccttttnggttaagngggaagggggggttana

SEQ ID NO: 3737 - DNA, 354 bp, Homo sapiens
  misc_feature 177, 296, 309, 340: n = A,T,C or G
ccctttcgagcggccgcccgggcaggtacgcggggtgtgtgtagtcgggtatgagaacgattgcaagcaaaagcagctgagggacgctgtccaaggagtaggctcagtagcacgaactgcaaatactttgagaaaggggaaaagttcagcctttgttgcctggaaaagttggtttanccatgcttggagcttggttttctgcttggtaagccctacaacttttggcccaactacttggcctctgggactcaaattcctcctctttaaaatggtgctaataaatagcacccaccctntgtgaggaggatnctgtgaggacaaaatgaggatcatccacatnagccgtgaaccctg

SEQ ID NO: 3738 - DNA, 450 bp, Homo sapiens
ccctttcgagcggcccgcccgggcaggtacttacattgagtaaagttataccccactttcttggttgatactgtcatttgataaaattcatcagtggataaattgctatgtatgtgtgtgataaagatacttgccttaaaatagaacacttctgtcttgcaaacagtttatggtcaaattgccttttcagttactgttctttccatgcacctagtgaatttaagtctgataaagtccctggatgtaagaaagaagatgaaatgtcttttcattgttaattatctgcacctggattaaaaagtattttcaacatgtgaaagactttatggaaaaaaataatatgtgtgtgttgtttgacttttactgctaaagacagcaagtgattgaacagataaaaattatgtattgggttttaaccattatttttattgaccctatcctcaatggaga

SEQ ID NO: 3739 - DNA, 700 bp, Homo sapiens
  misc_feature 77, 184, 407, 448, 498, 519, 560, 597, 601, 611, 644, 651,673, 685: n = A,T,C or G
cccttagcgtggtcgcggccgaggtactttatttttttttttttttttttttttttgggattttgtatttttagtanagatgggatttcgccatgttagccagctggtctcaaaactcctgacctcacgtgatccgcccacctcggcctccctaagtgctgggattacaggcgtgagccacctnacccagccaataattattttttcacatatcatttgggcatccctaagtttcactggtaatggggtaatggcaatctaacatttttcacacatatatatatataaagtctgttgattttcctttctgaaatgctaacttgatatgtgcctcttaaggactttgacatgagcagatgatatggatgcttgcttccgggtggagtgagtgtctgtctgacctctanaatatgctctatttctgctgggactctaacttagtcttaanaggagacttgactgtttgaacatttaaatactctaaatagtccactggcnctattaacaaataaatataantggcttttaaaaaaaagctttttttattttgcattacatgnggtacaatctttcaattactgggagggaacacaaggngaanagctgcttanaatatttatgtttaaaattttatgggaacatanaattaanatttttgggatacttaaaacanatgcccccgggnacttttttttttttt

SEQ ID NO: 3740 - DNA, 326 bp, Homo sapiens
  misc_feature 292: n = A,T,C or G
cccttagcgtggtcgcggccgaggtacaccagaaagcagtatcattatttgagtcacacctggtaacttgacacctgctgacacctttctactgtttacttgcaatgtctcaattttccacccttctaaaggactcagtgtcatctgaaagcttggcactttcactatgtgcccagggctggagatcactgataaagacgttaaataaaacccattttagttccactctctacataatgctcgctatttaaaggactcactcaaagaagtgcctgtttccctctaccctttngtttcttctgtctgaactacttccttctctttga

SEQ ID NO: 3741 - DNA, 555 bp, Homo sapiens
  misc_feature 528: n = A,T,C or G
cccttagcgtggtcgcggcccgaggtacctctaatgaagttgatggattctcttgggacagggttataatcatgctcatcaaaaagtcagaatatttagcagaatatgcaataggtcataaaaataatttaaatattttattaagaatgttttccttagccaagtgtggtggctcatgcctgtaatcctaacaatttgggaggctgaggcaggagaactatttgagctcaggaattcgagaccagcctgggcaacatagtgagaacttatttctacaaaaataaaaaataaaaaaattagctaaggcttggcgtggtggctcatgcctgtaaccccagcactttaggaggctgaggcaggcagatcacttgaggtcaggagtttgagactagcctggccaacatggtgaaaccctgaggcaggagaatcacttgaacgcgggagacaggggttgcagtaagccaagattgcgccatttcacttcagcctgggcaacagagtgaggctccatctcaaaaaaaaaaaaangaaaaggaaaaattaagtacctgcccg

SEQ ID NO: 3742 - DNA, 500 bp, Homo sapiens
  misc_feature 89, 109, 110, 111, 116, 120, 123, 125, 126, 133, 138, 140,142, 143, 150, 156, 159, 162, 163, 167, 168, 173, 184, 188,191, 192, 195, 197, 200, 202, 203, 205, 215, 219, 222, 225,227, 228, 229, 235, 238, 240, 245, 246, 247, 252, 258: n = A,T,C or G
  misc_feature 260, 262, 263, 264, 269, 270, 274, 275, 281, 282, 283, 290,291, 293, 294, 296, 299, 300, 301, 307, 311, 313, 315, 318,320, 323, 324, 327, 328, 345, 350, 357, 358, 360, 361, 367,368, 380, 385, 387, 388, 400, 404, 407, 415, 417, 418: n = A,T,C or G
  misc_feature 421, 426, 430, 432, 434, 439, 440, 447, 450, 465, 470, 472,473, 485: n = A,T,C or G
ccctttcgagcggcccgcccgggcaggtacttttttttttttttttttttttttttttttcctttttttttttttttttttttttttanttttttttcaaaattgaaannnttggntttnttngnncctttcntttangnannccccttngttttnggnttnntttnnaaaantccttttaatncctnccnnaancnttnanngnaaaaaaaaantttnccnggntnnncaaaanttnanttttnnnttccnaaaatntngnnnaaaannaaannaaaccnnnaattttnntnntnggnnntccccntttntnanccntngcnnggnnggccagaatggggggtnttttnggaaccnnannaaaacnngaaacctattcnccttntnngggccctaaacntttnttngttcccangnnttntttgnaaancntngggcnntttaacnggngattgaccctttatnggacntnnggaaaaccaccnttttttttttttttt

SEQ ID NO: 3743 - DNA, 329 bp, Homo sapiens
  misc_feature 2, 17, 18, 24, 25, 40, 91, 118, 125, 129, 139, 152, 156,168, 170, 181, 184, 189, 196, 201, 202, 208, 209, 217, 219,222, 225, 226, 227, 229, 232, 240, 242, 245, 248, 250, 251,253, 254, 264, 271, 292, 297, 302, 321: n = A,T,C or G
antactgttatccaccnnaatcanngggataaccgcaggnaaaggaacatgttgagcaaaaagggccaagcaaaaaggccacttaacccgnaaaaaaggcccgcgtttgctggccaantttttcncatnaggcttccgnccccccttgactnagcntttttaaaaaantnggagcttctanttnaaaangtggtgnaatannccgganngggagccnanacncgnnngnggngaaggcgngnttngcngnnannggggccgctncttcccnctttactttgggtcacttganttcgnttganactttgggcccccccgggngggggggg

SEQ ID NO: 3744 - DNA, 360 bp, Homo sapiens
  misc_feature 153: n = A,T,C or G
ccctttcgagcggccgcccgggcaggtactatgggaaaaattaaaggaggataaggaggatttggaaggatgggggacacagtttttgagggtgtcctaggaaggcctcattgaggaggcaatatttgagtatagaccacatctggccgcctnttgttagcccatgagctgagaatggttgttacagaacatttgcagctgggtatggtggctactgcctgtaatctcagcattttgggaggccaaagcaggtggatcacttgaggccaggagtttgagaccagcctggtcaacatggcgaaactccatctctactaaaaattaaaaaaaatcaaccaggtgtggtggggtgtgcttgta

SEQ ID NO: 3745 - DNA, 395 bp, Homo sapiens
  misc_feature 71, 190, 260, 285: n = A,T,C or G
ccctttcgagcggccgcccgggcaggtacgcggccacctcaggcatgcttagtgttcagcacagtgcctgnggtatagcaagcgcccaaaaaatgtgagtggctgtgattggaataattattattaagtagcagagtctcccatagggattagatacccaagtcgctatggcctttcccccaaaccctangcaatcacgtgttggcattttaaatggaaggcacagggctggcattggtggctcatgcctgtaatcccancactttgggaggccaaggcaggcanatcacatggtcaagagttcacaaccagcctgccaacatggtgaaaccccgtctctactaaaaatacaaaaaggaaattagctgggcatggtggcggcacctgtaatccca

SEQ ID NO: 3746 - DNA, 625 bp, Homo sapiens
  misc_feature 569: n = A,T,C or G
ccctttcgagcggccgcccgggcaggtacctctttaggggacagaactattttacactttgtgtggtttccatggctgtaaacatttgttaaaactcactagccaggcgtggtggctcatgcctgtaaccccagcactgtgggaggccgaggcgagcggatcacgaggtcagcagttcgagaccagcctggctaacatggtgaaaccccatctctactaaaaatacaaaaattaaccgggtgtggtggcaggtgcctgtaatcccagggaggctgaggaaggagactcgcttgaacccgaggcagaggttgcagtgagccgagatcataccactgcaagccagcctgggcaacagagcaagactccgtctcaaacaacaacaacaacaacaacaacaacaacctcactcaactgtatatttaacatgggtgaattttatcatatgcagactatatttaataaagctaattaaaacaacctctatccaaatcccgcgtaccttgagactacaggagcgcgccattatgccctgctcattttttttttcatattgtaagagatggggtctnactatcttggccacactggctttcaaactcctgggctcaagtgatcctcctggcct

SEQ ID NO: 3747 - DNA, 179 bp, Homo sapiens
  misc_feature 8, 23, 32, 36, 111, 151: n = A,T,C or G
ttggtaantacggactccacttngagggggcngaanttgggggggcccccccctttttctttaaaaaaatgccatgcttcggagccggcccgccaggtgtggatgggatantcctggcagaaatttccgccccttttaagcggtgggtccngcggggcccggaggggaacctttttttt

SEQ ID NO: 3748 - DNA, 348 bp, Homo sapiens
cccttagcgtggtcgcggccgaggtacatagcaaagttacattaattacattttcatattagcagactttgagtcggttgtgattaattataataagtgcctaagaactaatgtgttcatttagaaaatgaattatgccatgcatttctcatcactaaaagagtttagagttttgaaagtggctgtaggagagttttatcaaagatgaaggaataagatttctcttaactgctccatcaactcttcctcttagaaaccatttcagctctccagaggcctacaaagtcttctgtattatgtgatctcttgggctttagattgcttctagattactctttcaataaacta

SEQ ID NO: 3749 - DNA, 271 bp, Homo sapiens
  misc_feature 15, 52, 58, 193, 263: n = A,T,C or G
cccttagcgtggtcncggccgaggtacattacaatttcagcaaagcatctgncagaantaatatagtattacaaactaacaattagggctcttaacacagataaaactcttaaatgctgcttctatcacttactctttatgtcactctgtccaagcatttaaactctctaagctatagcttcccccttatctntttaaaggggaaccatgatgataactatctcaccaggttttagtaaagaccgaatggtaaaaatctacanaatgcatt

SEQ ID NO: 3750 - DNA, 403 bp, Homo sapiens
ccctttcgagcggcccgcccgggcaggtaccatacagactgtttgtggatggtgaaaaaccctttaagctttttgatttctctttccaaacttttgatgtccctttgggtatttggtggcgtggtttactgtccttgaaagggagttcagtggtttgggactgcaactaaagcaggaatagcagagtttgatatcaatctgagttctaggactgtgaataaactgtctttatcttatccaaacattgaatatatggtaattttatgaaagcggaggaaaccagaagccacatcaatctctgaacctatgaatatatcagataaaattttagatatgatctttttgagaaaagtacctcggcccgcgaccacgctaagggcgaaattccagcacactggcggcc

SEQ ID NO: 3751 - DNA, 310 bp, Homo sapiens
  misc_feature 56: n = A,T,C or G
cccttagcgtggtcgcggccgaggtacaaaatataatttagactgctaatccacangagacaaattacttactattacaaattacttcttagcttcccattagcttatataagttctaaatcataaggaatgagtaaaatcatgagattctatggtccttttgccatgtatgcttgctgtgttgtaatagttttgttagagaagatagaaagcttaccactcagtgccataagtgagaaggaacaacaacaacaaaaaggactgtggccagacatggtggctcatgcctgtaattctagtgcttttggag

SEQ ID NO: 3752 - DNA, 281 bp, Homo sapiens
  misc_feature 257: n = A,T,C or G
ccctttcgagcggccgcccgggcaggtacaatgtgacatccataggacgctactgaaaaaagccttggtttttttcatactttttctgctttgcagaaaggtgaggtgaagctttcaaacagcctgtggttgtagccttctttctattatttatggccatgtgtcctggcaacagttacaactgcaactctgggcaaagaataggttggaagactgtttcaacgttttccatcaggacaagatcatacccgacacanctgaggcctctccggatgggcaag

SEQ ID NO: 3753 - DNA, 393 bp, Homo sapiens
ccctttcgagcggccgcccgggcaggtaccagtgtcaatactttctattttctaactatattactaggcatgagatttgaaatatcccatgtagatattggtagctggaatttcaaatctgtaaaaatagaaatggcaacaaaacaatgaatctggaagactactgtgttgtcattaattcctttaaaaaactgcaggctaacaatttttttagtgaaaagtttggggtgtaaatattaggagctttctataaatcacctaatatttaccaaaaaataaaacctatgagataggtgctactactgatctgtttcttagtaaggatacttaaagaggttaaaactggccaggcatggtggctcacacctgtaatctcagcactttgggagggtt

SEQ ID NO: 3754 - DNA, 528 bp, Homo sapiens
  misc_feature 72, 334, 452, 461, 485, 498, 507, 509, 521: n = A,T,C or G
cccttagcgtggtcgcggccgaggtacttttagtagagacagggtttcaccgtgttagccaggatggtctcnatctcctggtctcgtgatccacctgcctcagcctcccaagtagttgggattacaggtgcccaccaccactcccagctaatttttgtatttttagtagagatggggtttcaccatgttggccaggttggtcttgaactcctgacctcgagatccacctgcctcggcctcccaaagtgctgggattcaagtgtgagccaccacgcccagcctctttactttcttaattgcctcttcataatgtatttaataaactatggcaatnccagaatgacagattgttaccactgccattggatttctaatttcaatttggaatttaaaaaccaaatacctgaattggtgtcctaattctgacattgcctatttatagccttggttangtaattganctttctgagtctgtaatttcttancttattaaatganaaaaaaatngnctaagatttgcnagttaaa

SEQ ID NO: 3755 - DNA, 388 bp, Homo sapiens
  misc_feature 4, 43: n = A,T,C or G
gtgnatgggttttctgcagaaattcgcccttagcgtggtcgcnggccgaggtacttgaaatgtgggtatgggcagctgaggaacttaactcaatgttttaattttattaatttgaatttagccacatatggctagccagtggttaccatattggacagaacagatgtagactagtagagtgtcagtttcagtcatttgaaccatacatttgaaccatagctgagaaccagaaaatcagtaaataaggcctctgaacagaataaatactggtgtataatatcaaagaatccatgtaaagatacgtattttactgataggagctcctgtctggtagtccttagagtgtgttgctctttactatacaagattgttttccaaacttcagtgg

SEQ ID NO: 3756 - DNA, 324 bp, Homo sapiens
  misc_feature 200: n = A,T,C or G
ccctttcgagcggccgcccgggcaggtacgcgggtatcagagggcaaacactgtgacaggagctgtcaggaggactatacaaagagaaagcattattgacatagcaaagacatgaggtgacctagatgtttgtaagccactctggcagctacagctgagggagcaggcctggttagagatttctcacaggtgttctccanacccgaacactgtagttttatgtagattgctcccctcttgggaaggaagtagagctgttttgtttctattcacgtgttatgtattacctctctcactatctcattaaccagtgttgtcaccacc

SEQ ID NO: 3757 - DNA, 298 bp, Homo sapiens
cccttagcgtggtcgcggccgaggtacgcgggggagttctggatggagaaatacgataaggacacagaaatgaaacagaatgaactaaatgctctcaaagccacaaaggccagtgacttagcacaccttcaagacctggcaaagatgataagagagtatgaacaggtcatcattgaagatcgtatagaaaaggagaggagcaagaagaagctccaggcctggtggcgaggcactatgatacggagagaaattggtggtttcaagatgcctaaagacaaagttgatagcaaggattcaa

SEQ ID NO: 3758 - DNA, 119 bp, Homo sapiens
  misc_feature 12, 26, 40, 71, 82, 103, 119: n = A,T,C or G
attttggggggncccccttcttaagnaattggccaatggnccttccggaaggccggggccccggcccaagntgggtggaatnggggataatactttgccaagnaaattttccgcccctn

SEQ ID NO: 3759 - DNA, 472 bp, Homo sapiens
  misc_feature 14, 27, 29, 35, 39, 42, 44, 48, 301, 361, 373, 382, 417,440, 442: n = A,T,C or G
ccctttcgagcggncgcccgggcaggnanaagtcntttntantnttgnaatagccataatgaatgagaagtgaactgctaatggcagagaatgtagactacctgcttgagagatttggtgaaggaaagcaataaagtaatattttagtgggaattatgcctgagagactttatttagagtagactggtaggtaggaacaaatttaggagtctaaggcatagctttgaagatgaaagaaaaaagaaagttacaaatgtggcatgggcccgccagaggagaaaactgaaaacccaaacctggngaaagaccaggaagttttatccttaagaaaggagaggaaaaaaccatccttttctcttgncaccaagaaggnaatgggagnaaaaggataggtgggaaggacccttaaagaaactngggaaaaggaaaaattggaggtngnaaaaagggggggcttcctttccttttttcc

SEQ ID NO: 3760 - DNA, 434 bp, Homo sapiens
  misc_feature 140, 143, 193, 243, 273, 292, 320, 337, 346, 365, 377, 391,412: n = A,T,C or G
cccttagcgtggtcgcggccgaggtaccctggattccacctctcggctcagatgagcatgccgcatggaacaggatatgctcccggcgttctcttggacggtcagagagatctccacatcaaacaggccatgcatgtctntgnttgtcctggagtctgtggacaaatcctgtccttgtggacctttccacttngctgtgggccgggggaaccagcccgaggactgacagagtagctggatgtntctatcaacatatcccgcgatggaaatganaggaactgagcccagtgcntgacacctgtagctcccagatggccttnttggtatgtaagactgngaactaatnctgcacccatagaggccancatccaacacangtaatgtttttcancctcagagagatgcgcccctncgcaataagaatccttcaccag

SEQ ID NO: 3761 - DNA, 752 bp, Homo sapiens
  misc_feature 393, 483, 484, 485, 486, 487, 488, 489, 490, 491, 492, 493,494, 495, 496, 497, 498, 499, 500, 501, 502, 503, 504, 505,506, 507, 508, 509, 510, 511, 512, 513, 514, 515, 516, 517,518, 519, 520, 521, 522, 523, 524, 525, 526, 527, 528: n = A,T,C or G
  misc_feature 529, 530, 531, 532, 533, 534, 535, 536, 537, 538, 539, 540,541, 542, 543, 544, 554, 555, 557, 560, 572, 575, 577, 585,594, 613, 618, 619, 643, 644, 662, 666, 669, 677, 678, 691,694, 705, 711, 715, 717, 723, 724, 725, 732, 733, 736: n = A,T,C or G
  misc_feature 737: n = A,T,C or G
cccttcgagcggccgcccgggcaggtactttgacagaatttttaagcagtgtttgacatcatagtatcctgtaaagtaagtaagaaaaggtttgttcttcccagaaattgaaagtggttgctctgaaaataaaactagtaattaaaaatattaattttgttctaatcctttctttgactaattaacatttatctctttctcttatatttccaccacacctcttcccactaccatttattctgtgacctaatcagttctgttgttttacttggctgtagtgttttggttttttttgttttgttttttttgagatggagtctcactctgtcacccaggctagagtgcagtggcatgatctcggctcaatgtaacctccgcctcctgggttcaagngattctcatgcctcagcctcccgaatagctgggattataggctcgtgccaccaaccccccgcgtacctcggccgcgaccacgctaagggnnnnnnnnnnnnnnnnnnnnnnnnnnnnnnnnnnnnnnnnnnnnnnnnnnnnnnnnnnnnnnaatatgggcnnanatntgcggttttganggngnaaaaactnccgtgccancttcattaatgaaattggnaaaanngccggggagaaccccccccccccnnttgggccccccttccggntttnttngttaaatnnatttggatggggnttnggttatttttnggtttngggntngggggnnnccccccnngannaaaaccccccccccc

SEQ ID NO: 3762 - DNA, 209 bp, Homo sapiens
  misc_feature 13, 44, 53, 168, 171, 178, 195, 198: n = A,T,C or G
cccttagcgtggncgcggacgaggtacaatcatgcactggggtnaagaagatncatctgctcttagctacctaccatgccaacactcctgagaaagctcacagaggcccatgatgcccacctggatctgaggacctagaaagccacaacaggcaaccataatctgggnctnccctcanccaactcccctgcatanagngaatgaatgaa

SEQ ID NO: 3763 - DNA, 419 bp, Homo sapiens
  misc_feature 129, 340, 375, 386, 402: n = A,T,C or G
cccttagcgtggtcgcggccgaggtacctgtgtggccattacaatgccttacatgtaataagtccttgttaaacattagttgcagtgggttaatttggaaatgattttgcaatgtaaaagtcatcgtantattatattaagtatgttctattccacccgacttaaaacatgattcaattcaagaatttttaatgtaaataaattttcaaaaataaatgtctagggcaaaatcagacctgtctacttgttgcatcttgactaaaaattggtcaaggtatctgtaaataagttgctttatacaagttgctgttcaacattatggatatacacagatgatcangcaagttctgctttgtacctgcccgggcggcccgntcgaaagggcnaattccagcacactgncggcccgttactaagtg

SEQ ID NO: 3764 - DNA, 398 bp, Homo sapiens
  misc_feature 318, 383: n = A,T,C or G
cggcccgccagtgtgatgggatatctgcagaattcgccctttcgagcggcccgcccgggcaggtaccgggagagtgcttacagtctagcaggcaagattgatattaaacacatattcaaaaaaagggtatgagttttttaaagagaggtagtgctaaatcctctgggaacatcctctgatctcatctaaatttgaaaccctaggttctctgggaatctatagcaagaactaatccaagttaggggtcagagaagatgtgaagaatgagtaggatttagtcagctgaagagaatgaggctatggggaagcgtgttctangaagaggagaaatatattcagcctcagagatgtgcaaaaaagaacttaaactgcagagactttcnggaaaaaaaaaaaaa

SEQ ID NO: 3765 - DNA, 315 bp, Homo sapiens
cccttagcgtggtcgcggccgaggtaccgtgtgactgctttgagacatttctttattgaattctaacaaaaacaatcagtgaggcagaagttacagtaattttgatttgataggtaaaaatattacatctcagggaagccgagaaactcatctcagtccctgaaccagacgcaggggctctgatgcagacccactgggcgtgcctacctctgaactgcctttttggggagtctcggctctacctcgggtcctgcactgcaacctgggaatatgcttgtgcatgtcagtaaacctactgatattattaccactctt

SEQ ID NO: 3766 - DNA, 469 bp, Homo sapiens
  misc_feature 48, 357, 437, 464: n = A,T,C or G
cccttagcgtggtcgcggccgaggtacctagacttattgttccactgnggcaggtagacttcaatgattccatctgactcctctctgcaatgtttactacaataaaacaagaggcctcattgctttgaataaaaatggggagatcctactttctggcctagggttcaaaattaagccttgcattttcctaggggcccataatcaatcacagaggcatttagatggacaaactatttgaaaaacctttccagatctttgcttaaccaattaataggctatccttaatacctatccattggaacctataaaaagatctggtaatcgaaactgcctttcaagagctgcagttttcagagngtgggtcccaggaccaacattatcaagcatcaccttcttttattagtttattaggaatacacatctttgaacacaacctnggacccactgaatcagaaatggagggnggggg

SEQ ID NO: 3767 - DNA, 330 bp, Homo sapiens
ccctttcgagcggccgcccgggcaggtactggaaccaatcttacttagataccgaggaatagccatattgtaaatacctccactgacctgtggcttgcattttcacatcttaaatatcttttgataaatttctatcagtgttgaaattgataaataattgggatatattcatatgagaattctatacagtaataaaaatgaataatcagcagttaattgcaaaacatgcatggatctcaaaaacatatttataaagaaaatagtctaacaaaaataaaatatcctttatgatcctctttcttacatgttacaaaacaggcaaagataacc

SEQ ID NO: 3768 - DNA, 483 bp, Homo sapiens
cccttagcgtggtcgcggccgaggtactcttggtgtgagtcactgtggtgacagcagcatccaggacgtcgatgcccacccgttagccccctgaagctgccctccctaagaacagaaacatcctccttgttgaaaatgaaatggacactgtttagtctcgcattgactctgctgttgatcgtctctacttgaaagtaggatctattgcagtgcactctcctggttttccttcattcttttctgaatatgcaccttgcacatgtgtggtgtttatcatgtcagcagtcagtggtgccctcaaaggtcttgttcttagagttctctaggaactgggtctaaatatctcaggatgcatagtgggacctcacatttggcaaaaagaattaagagtaaaaattatgtgaggtcgatcacacttgaagaccttttattcctttctgatttagttggtgcacaagcagtacccttttttttctttaaaaa

SEQ ID NO: 3769 - DNA, 342 bp, Homo sapiens
ccctttcgagcggccgcccgggcaggtacacatatgcgaatttaacctcagcttaaaatggtaattcctcaccagggtttgaagtgcctgccaccttcataatgcatcttaaaggtcagctggcaatcagtgacaaattctacattcctgaatagttacttgtgaattcaggatttcatttagcttaatttgtgtgtttttttcctcctaagtgctcaggtctgaaatagtcaaattttaaccatctaattggaatgaaaagaaagccatggttcccggcgtgtccctaggaggtgaggatagaagagtgctgggaagaggaggcacagactcttttcatga

SEQ ID NO: 3770 - DNA, 290 bp, Homo sapiens
cccttagcgtggtcgcggccgaggtacaactatcaaaaaatgggataacatacgcaaaaaaggcaactttccagaaatcatattgtgatacttgattttgttaactaagactgttgtgtgcatacatgtggaatgatgcaaatgagtaattatgtgatattattattctaccattctcttgtgtccctgaacatcaggattcagatatggaagaaagagacagagataaaagatagaataggtaaaggtaaaaatgctgtacaaaaagggctacattctaaatagtaaaa

SEQ ID NO: 3771 - DNA, 332 bp, Homo sapiens
cccttagcgtggtcgcggccgaggtaccagctgtaaccaatacgattctggggcaggttgtgggcgagtagaagaacctccttcccctctgcgacattgaacggcgtggattcaatagtgagcttggcagtggtgggtgggttccagaaggttagaagtgaggctgtgagcaggacctccttccaggggacatgcaatctgcagggaggggctgaggggggtcccatggtctctgctgtcttctctgtccacctctttgtagaggagcttgagctccaggaatgctctggtcagggctgctgtgactgttggccctgctgtccttcctcctt

SEQ ID NO: 3772 - DNA, 357 bp, Homo sapiens
  misc_feature 153, 216, 249, 279, 302, 335, 344: n = A,T,C or G
cccttagcgtggtcgcggccgaggtactggactaaatgttttcattacctcatttaaagcctggagagttaagtattttctctgaagtcacataacttgtaaagaaagaagctgagattagttttacagccctcactcaaaaaaaaaaaaaanaaaagtacccagcaccacctaggaagtatttttgccacaaaatcagacctccagatctaactnccattttataggaaagataagttcagagaaccntgtcaaatgacacctcgggatttcaaccancaacgttcaaatgtgctaaactnttgtagatggaaaagagacttacagacattttnaaataaatncaatatatgggcc

SEQ ID NO: 3773 - DNA, 270 bp, Homo sapiens
  misc_feature 1, 3, 4, 210, 242: n = A,T,C or G
ntnnttagcgtggtcgcggccgaggtacatggaggtcaaaagtcaggtaaagtcatcgaaacatgacattgatttaaagcaaactgagattttgttctaaaacaagagtttcaaaattatttatacacaaccaaacagactaacctgaggaataaacaattttgtgagtaacctttttggtatcctcatcctatcttattggatcatcantagaaatggagcaatgaagttctttcaagtancctcaggttatttcgaaataataccttg

SEQ ID NO: 3774 - DNA, 348 bp, Homo sapiens
  misc_feature 6, 17, 18, 20, 22, 27, 28, 49, 341: n = A,T,C or G
cccttnccagcggccgnncngncgggnncagagacagtgaatactgtanggtcagagcttttatgtaataccttttcatatctacaatgtttagcacaatgcttggcacatagttagagctgttcaatagactcataaatttatctttctgttgggactactgaggaataaacttgaactggaggaaaaaaagtcaaggagagttgcctaccttctctctaaatccttacctataatccttcagctcctattatagagaccacttcattttggtaattctctttggggttgatattaaatacgaaacagaaaatcaagatagtacctcggccgcgaccacnctaaggg

SEQ ID NO: 3775 - DNA, 220 bp, Homo sapiens
  misc_feature 186: n = A,T,C or G
cccttagcgtggtcgcggccgaggtactaatcagggcatgtgtgggaggaaaatacttgaggttgtggaaaaaaatcacctgaaggattagaggtgcccagtattcacacagggcccgggaaaagtgtctgttcccactgaggctggaaacctcattattcacggggcacggggtagagtgcatanaaaggtgtttgcctgatagtggggaatctaccct

SEQ ID NO: 3776 - DNA, 283 bp, Homo sapiens
  misc_feature 39, 46, 58, 101, 107, 221, 222, 224, 233: n = A,T,C or G
cccttagcgtggtcgcggccgaggtacccagaactactnaggcgtngtaactttccanagcaaaaaattggaatttcctcatgttttacagggggagggtnaaggcnattctatgaaaattaacaaagggggttgggggaggagggctttcctttttgctaaaggaaaaataacacattcttttcgaatgatgacttatttttgaaaggcatcctgcccgnntncatgctaanacttcaccagtcaaagcgaactactatactcaattgatccaataacttga

SEQ ID NO: 3777 - DNA, 361 bp, Homo sapiens
ccctttcgagcggccgcccgggcaggtactttctttctagaccacacctactactacaaccatttctaatttatattgacttttggcaggggaggcaagggtaggaaggaaagttttataggaggacaagtctttttagtaagtgatcaagcaggctgggcttggtggctcctgcctgtaatcccagcactttgggaggccgaggcgggtggataatgaggtcaagtgttcgagaccagcttcgccaacatggtgaaacctcgtctctactaaagataagaaaattagctgggcatgttggcgggtgcctgcagtcccagctactcgaaaagctgaggcaggagaattgcttgaacccggg

SEQ ID NO: 3778 - DNA, 463 bp, Homo sapiens
  misc_feature 73, 108, 118, 132, 142, 147, 152, 173, 177, 180, 196, 205,212, 215, 216, 218, 229, 236, 255, 277, 286, 291, 297, 310,321, 337, 342, 343, 352, 359, 362, 370, 379, 403, 421, 422,424, 427, 440, 441, 444, 456, 460: n = A,T,C or G
cccttagcgtggtcgcggccgaggtacacatttggtgcggctctgttcgtgggctgggtcagctggaggcctnacactaattgggggtgtgatgatgtgcaatcgccngcccggggcnttggcaccaggaantaaaccaacntaccnatagnccgtgttctttatcattggcncttnaanggcccaccagttgttngcccttacnatagacnctnngnaagggcttttnaaaaggncccaagacaaccttggtcnttttttggggggttcccaaaancacctcctnatatnacccanaggtaaaggttantcacttatccngaattggggaaagtgntttgnnctccctgtncaaaccnaantaaagtgnaaccctaanggcgttttatccaatccaacctancaaataaaaggtggttgnngnaanaaaatttttggtnnttnccgggctttttnggcncca

SEQ ID NO: 3779 - DNA, 388 bp, Homo sapiens
  misc_feature 311, 326, 361: n = A,T,C or G
cccttcgagcggccgcccgggcaggtactttgacagaatttttaagcagtgtttgacatcatagtatcctgtaaagtaagtaagaaaaggtttgttcttcccagaaattgaaagtggttgctctgaaaataaaactagtaattaaaaatattaattttgttctaatcctttctttgactaattaacatttatctctttctcttatatttccaccacacctcttcccactaccatttattctgtgacctaatcagttctgttgttttacttggctgtagtgttttggttttttttgttttgttttttttganatggagtcttcactntgtcacccaggctagagtgcagttggcatgatctnggctcaatgtaacctccgcctcctggg

SEQ ID NO: 3780 - DNA, 326 bp, Homo sapiens
  misc_feature 41, 319: n = A,T,C or G
cccttagcgtggtcgcggccgaggtacctttgagcccttgngaatgtctctgaatgtgcagttagactcttctcactgaactgctggttctgcttgggcctggaaggccctgtcccacaggcccactaggcagattcctatgcatctttcatgattccatgtggatcacatttcctctgacattcctctgaacatgtaaagatgctgaatatcattcatcattagggaaatccaaatcaaagccacaatgagataccacttcaaacccgcaaggaaacaaaaaagacattaaaaagtacctgcccgggcggcccgctcngaaaggg

SEQ ID NO: 3781 - DNA, 351 bp, Homo sapiens
  misc_feature 136, 215, 220, 228, 287, 309, 312, 313, 337, 339: n = A,T,C or G
cccttagcgtggtcgcggccgaggtacgcgggtaattttgtttgaaattaaaagctatgctacctgttgcttaggcaaagagttaagagaggtgagatttctatcagctgtggaaatataaatgttcttatagaangagagtggagctgtggaaatataaatgttctcatagaaggcctgagtggacttttcctgggggaaacgaatggtattgncttantaggtatntttgtaaatagtagagtcatagatggcctgtatttgagtacagtccagggctgctttcntggattcagatccaccttgcancanntctaagggccaaaatcccacaccntnccttgggtcaat

SEQ ID NO: 3782 - DNA, 294 bp, Homo sapiens
  misc_feature 7, 79, 99, 121, 128, 178, 180, 181, 190: n = A,T,C or G
cccttancgtggtcgcggccgaggtacctgtgtggccattacaatgccttacatgtaataagtccttgttaaacattanttgcagtgggttaatttggnaaatgattttgcaatgtaaaantcatcgnagtattatattaagtatgttctattccacccgacttaaaacatgattcantnnttgaatttntaatgtcaataaattttcaaaaataaatgtctagggcaaaatcagacctgtctacttgttgcatcttgactaaaaattggtcaaggtatctgtaaataaagttg

SEQ ID NO: 3783 - DNA, 194 bp, Homo sapiens
  misc_feature 7, 9, 11, 18, 20, 22, 33, 51, 52, 54, 57, 70, 82, 149, 151: n = A,T,C or G
cccttancngnggccggncngncgggctccatntagacaatgtcaaagcanngnttntttcatttccttntatccacatgtnggggtgaggctatttcacagagatagtgtatcattttactaaaacattatttattttaactatattnangacttaaattaaaaaaataattttctcattcatctagggacaa

SEQ ID NO: 3784 - DNA, 502 bp, Homo sapiens
  misc_feature 39, 170, 336, 489: n = A,T,C or G
cccttagcgtggtcgcggcccgaggtacttttagtaganacagggtttcaccgtgttagccaggatggtctcgatctcctggtctcgtgatccacctgcctcagcctcccaagtagttgggattacaggtgcccaccaccactcccagctaatttttgtatttttagtanagatggggtttcaccatgttggccaggttggtcttgaactcctgacctcgagatccacctgcctcggcctcccaaagtgctgggattacaagtgtgagccaccacgcccagcctctttactttcttaattgcctcttcataatgtatttaataaactatggcaatnccagaatgacagattgttaccactgccattggatttctaatttcaatttggaatttaaaaaccaaatacctgaattgttgtcctaattctgacattgcctatttatagccttggttaggtaattgagcttttctgagtctgtaggtttcttancttattaaaatga

SEQ ID NO: 3785 - DNA, 361 bp, Homo sapiens
  misc_feature 303: n = A,T,C or G
ccctttcgagcggccgcccgggcaggtaccacattttgtttattcgttcattagttgatggacatgcaacttgtttccacattttgactattatgagtattgctgctgtgaatatttttgtataacttttaaaatacagttttagcagaaacataccatacacgtattttcataatccacttttttcatttacataccttcaactttaaaaactaaattcggattattttgtttttcatgaggacatagtaatttttgtgcatatgtaaaattttcttcataaccaatccttgttgttattgnttagatatttaagggtagttttccagtgttttcccttattataggttattaatatctt

SEQ ID NO: 3786 - DNA, 584 bp, Homo sapiens
  misc_feature 564: n = A,T,C or G
cgccagtgtgatgggatatctgcagaattcgccctttcgagcggccgcccgggcaggtacaattatgaaacctccatactgagcttgttttcaggggtatgcacactgttataatgcttgaatatacagcagtttgcttcataaacaaggcacaaagaatttataagtgatgatagccattggaggccacattgttccttgttttgacgaaaagtgtatgacttgtcacaatgagaaaatgatagaattggtcagaatttttatcatagattagcctcttatttaagaattttcatttttattttatgtgaatttatttgagttttggcaatgtgcccctttcttacaatattctgtgaatagcccatctgtgaataaattggtgtgaataaccttgcccacactttgaaaaaaagtaaaaaatagacactcaaattcattatttaacaaagcaaagtttagccacatgtattcaaatgaatactaattgaattttgcccctttaatttgtatcgaactatcatttaaacgttattttcatagtatactaaagtaattgctatnaaaattagcttatcaaaaaa

SEQ ID NO: 3787 - DNA, 420 bp, Homo sapiens
cccttagcgtggtcgcggccgaggtaccacttgcacaccaagcttaatagagatggggtggctattactatcttctgcttattggtggggatgcctgagacacaaaggagctgaggaacatggccacagccaagtggccaagcccagaccaagtgtctggtgtccagtcacctagtccccagatgtctcctgtgtctcttgcaactcagctcaaatcacaggttccttgtctcacccatgaacagatccatcatctgttcttgggacactgaggttcctcctcatcttgagggacattttccaaaaaaaaaaaagtgccttgacctttccttaaaggaaaaataaataataaataaaaagaaccctgaagtcaagtcacttatgtagtgatgtgatcccgcgtacctgcccgggcggccg

SEQ ID NO: 3788 - DNA, 415 bp, Homo sapiens
  misc_feature 218, 234, 334, 338, 366, 381: n = A,T,C or G
cccttagcgtggtcgcggccgaggtacttttagtagagacagggtttcaccgtgttagccaggatggtctcgatctcctggtctcgtgatccactgcctcagcctcccaagtagttgggattacaggtgcccaccaccactcccagctaatttttgtatttttagtagaagatggggtttcaccatgttggccaggttggtcttgaactcctgacctngagatcacctgcctcngactcccaaagtgctgggattacaagtgtgagccaccacgcccagcctctttactttcttaattgcctcttcataatgtatttaataaactatggcaatnccangaatgacagattgttaccactgccattnggatttttaaatttnaatttttggaatttaaaaaccaaatacctgaaat

SEQ ID NO: 3789 - DNA, 315 bp, Homo sapiens
ccctttcgagcggccgcccgggcaggtactctgtattttattgaggctgtttcccagtcagaacagcgtctctctttgtttgtcattccaaatctttcagtgtctttagggctctgagggccctggagagcctcatccaacctctcatccttccatggctgtccccacctctgtgcacttatgagtcaatgttgccgcacttcattacatgctgttcatattacagcattataagattttttcttttaaaagcctatcttcttcaatcgggtagtaagaccattgtgggttgaggcatgtttcatacttcccaca

SEQ ID NO: 3790 - DNA, 365 bp, Homo sapiens
  misc_feature 323: n = A,T,C or G
ccctttcgagcggccgcccgggcaggtacctaatatagagttagcatccagatctattcaataattgcttctgggaacacagatacaaaaatgttgattagattccagtgggggttttttacacgatgtttatttataagactaatctgtaaaaaggaatgattacagccaggagttgaaggttatttgaagagatcattcagtgtttaagttcttggtttgaaacagttaatcactttaggttggattctcttcactctagaaaacaattcctttggatacaccaagggaaaaacatattttttgtcttgtgatttggtaancaccatagtcacatcttgggaggtcttgtcttataaaacccc

SEQ ID NO: 3791 - DNA, 582 bp, Homo sapiens
  misc_feature 8, 153, 279, 298, 310, 322, 323, 327, 329, 332, 348, 357,364, 365, 370, 386, 388, 409, 416, 422, 430, 442, 462, 465,480, 484, 485, 488, 501, 514, 517, 542, 551, 555, 561: n = A,T,C or G
ccctttcnagcggccgcccgggcaggtacgcgggtcggtctccagggccccagcacgtcttcccttcagttggtcccacttatctccactaggctagtttctcataaaatgctcatcaacctcatttctcccttctcagtagctggccccgtntacagcaatgccatcacagacctagctctaatgtaaaatgctagctttcatcccgcccacctgtttctgaaatgtgctagtaagcaataccacagcagtaggcaagctttagcttgttaaaaaatnttttgccctggtcgaaaangtagtattactnggcattgccttnntaananggngttataacctggcttncaatttcanttttttnntgccnaggaatggttttcctngnttccttaaaaagggttggggnaaaccanaggtanttcaattncattttaatagnttaagaacccgccccctttntgntggaaaaatggttancccnnggngggtgggttccanacctggtgggatngtncatggaaattgggtcctttaccaanttttcttcntttntaaaangaaaaatgggtcctttttttt

SEQ ID NO: 3792 - DNA, 524 bp, Homo sapiens
  misc_feature 415, 437, 480, 486: n = A,T,C or G
ccctttcgagcggccgcccgggcaggtacgcgggactgccaaatgtcccctgttgttgcaaagttgccccctgttgatctagtggccactgcactggacggcacgagtccagcaagccagggaagatgcaattgagcaatggcatgcaagggtgagtgccagggaggggccgcacttcgaggaagagtgataccggactggcagctgaccagactggctcagaggaggttcccagagggctagggtttaagctgagacctttctcaagtccagcaaccacatgtcccacagaaggctaagccaggatccggtggccccaagagattacatcctggctctgagccttggttcacatcccaccatacaccaaggctgctgggaggctcaaaggcaatttgggatgtaaatattactngtgcagaatgaaagtgtgcttnaaaacaaaacatatttgcactgctgttcttcaactccctcttnccatcnaaaagctcttggggaccctcatttcaaaaaaaaaggcc

SEQ ID NO: 3793 - DNA, 355 bp, Homo sapiens
  misc_feature 185, 243, 245, 256, 257, 285, 288, 289, 307, 321, 330, 334: n = A,T,C or G
cccttagcgtggtcgcggccgaggtacgcggggaattactggaaattatctgaactgtgtccaaccagtaaatattgcataatttgaatagatttttataatcttaatcatattaaattcgaatagattttttcagaatgctttctaccaaaatttctagtcaaaattcaccgaaagtacttttntttttttttatttttttttttgggatctatcttcttccttaacatttcagttggagtntntagcatttagnnaccactggctcaatgccgctcaccctangtnnagaagtgtgacccaaatncttaaagcattaantgctatttntcantttacccacccattttggggg

SEQ ID NO: 3794 - DNA, 326 bp, Homo sapiens
  misc_feature 1, 102, 107, 122, 132: n = A,T,C or G
ncccttagcgtggtcgcggccgaggtacgcgggttggcctgaaaagccttgagcatagcaatgactcagtcaaaacattaacttggacacttgatataccgntccanaaacaacaatttaanttgggttggncttgtgctactgtatggttccaaatattttttattcttatgtttttaaatataacacataaaaggtaatatatgtaggttgaaattactaattttcataactgactcttcttgatctcacctgctgatgatataaggcctaggtgagccccattctttgcaaaaattagaaaatgaaatgagaatttaaaggtc

SEQ ID NO: 3795 - DNA, 296 bp, Homo sapiens
cccttagcgtggtcgcggccgaggtactaggtgtgaatgcagatgccttatttcctgtggctacagcttagggtggaaagtggggagtggcaagataagcaactagagaggaaagaagccatgcacaagctaaactctatgcacagaacacaagaacttgttgaagaagttactctataatacaacatacaagagcagaatttatctgtctgcagaaaactctaccaaactcccatacagtgagatttcaaggtttggtagacatacaaagaggcaggtatcttgcttttaagtcc

SEQ ID NO: 3796 - DNA, 441 bp, Homo sapiens
  misc_feature 408: n = A,T,C or G
cccttagcgtggtcgcggccgaggtacagataggtgtggtctagagtagatgggtatgggatttgtttctgagctcaacttttctttccaatgaaaaacctactttcctttgcagtgatctttgagaggctgccagaaccaaggtcaggaagatgcccatgcttctggactggtgataagtgtttattctttggtaggtgcaatgaaacattatttgaagattgcatgttttaatttgtttctaaagcaatggctatattttaacaaaatgctaacaagtggtctctaggctactttattttgttggacagctccctttctggttccttggaaccctgaaaagaaagtgttactaaagcaaagaagtatcaagcttcaaccagaactttttctttggatttgcacctntaaaagaggtaaatgtacaggtggtcccttttt

SEQ ID NO: 3797 - DNA, 342 bp, Homo sapiens
  misc_feature 8, 101, 190, 314, 327: n = A,T,C or G
ccctttcnagcggccgcccgggcaggtacatattatatgcaaggttacaaaaaaaaatcaatggttaatgattttttagctcaaccaagctaaaagatgtnaacaagaaattgaactcaaaacaacttaagatacaaagctcttgttactgataatgtctaataatattcatcaatttaccatatcttgntcttatattaaaatgttctatcattttcctaattattttaaagtcgattacaaaaatatatatatatattcttgtagtgccccgaaaattgaatacatttaataaatggggtaggaatagatgnaatctccccattnaaggaagaaattccc

SEQ ID NO: 3798 - DNA, 378 bp, Homo sapiens
  misc_feature 23, 68, 75, 76, 77, 78: n = A,T,C or G
cccttagcgtggtcgcggccgangtaccactatgtggtaactctgttgctacaaggccaagaagttgnaaactannnncttactctcaaggagtccaatagtgaaacacaatgatatctgaacagacagttgtatccaggatgcccccccacccccagctatggcagaggaaagcacaaaggtcaagttttacctgctccaactcccaagtaaggatagctaacacccacagaggactctacaacttgtagagcacacggagcatcattaactttaccagatatcaatagcaactttcaactatgaaaaacatttttggctggggcgcagtggctcatacttgtaatcccagaacctgcccgggcggccgctcaaggg

SEQ ID NO: 3799 - DNA, 770 bp, Homo sapiens
  misc_feature 442, 538, 549, 553, 566, 573, 576, 581, 584, 606, 612, 638,643, 663, 669, 680, 681, 682, 683, 686, 702, 711, 733, 736,750: n = A,T,C or G
ccctttcgagcggccgcccgggcaggtaccggttgctctctagaattggggcatagctgttaccctgggacttttgttccttgctctcctgtggtaggaactgtttcttggatcccaggcttcttgtttttttgttttgttttgttttgttgttgtttttttaaaattaccagtcggttttgctgaattcccgtaaaacttcagtaactttaataactctcccacaaaagggaaatatactatttaagtccttgcatattagaaaatgtcttctgtcttcatgcttgattgatagtttggctggttatataattataggttgattagctttttctgtgtacatggggctaccccttccacgacggggattatctcaatgatgaggccttatggaacaagtgcccgaaagcctctcaatgtggttccctggaatctgaccctnttcttcatctgctggtccgtaggaggaatccaaaatgggtcttctgcgccatcaagtggtcaatggcctctggggacccttttgggggactgcaangttttggcttnttgnggggaaaatgganccctttnaanctccnaangaacttgttaaaactttacagntggacnattccaattttttttaaaaaaaattnttttnttttttggaaaaattaaatnccaatntggtttcctannnnganaaaacttaaaaaaagncgtttttcnttttttccaccaacttttgttnaantaaaaaattttttnttttaaaaaaaaaaaaattt

SEQ ID NO: 3800 - DNA, 442 bp, Homo sapiens
  misc_feature 336, 405: n = A,T,C or G
cccttcgagcggccgcccgggcaggtactatcttttcaacttttctgatggcttgatatttttcaaaattaaaaatatcagaaacaaacatccgacgatgggggtttaatgagattccagtatgtaaaatattctagaatggctgaaaataataaaatagtaatatttttgatatcggagagaccttcaagcaatgtattaaaaaggcaagctattgaacattgtttacattttgtaaaagcagatacaaccgcaaacacatgcagaagcactgggacaaactttaacagaaattgataataataaggagacggggaaaagcttttgtttttttgnttcacattatagctttcttcactatttgaattttctacacatgtgctacctacctttttatgtcagcancagttatctgggtggtaagttggggggcatttttttt

SEQ ID NO: 3801 - DNA, 340 bp, Homo sapiens
  misc_feature 331: n = A,T,C or G
cccttagcgtggtcgcggccgaggtaccttaagtatgactaaatgatggtttacactacaacaacccaccttgagctctctattctactttccaccatatgttttctgtttgggggcttgggcattactctattatttgtgtttccatattcaaactcttcaagagagtatctgattggcttgtcagttactctccagtataaatgccagattggccatatctacttataagattagcccacaggctgactttgggccagccattgttccctgattcaatgcaatgtgaccagtattagaaggtaatgcaggtacctgcccgggcggccgntcgaaaggg

SEQ ID NO: 3802 - DNA, 360 bp, Homo sapiens
  misc_feature 142, 328: n = A,T,C or G
ccctttcgagcggccgcccgggcaggtacctagggagtggcagagtagtgatgtaaactcaggtctctattactcctcggttcccagacatcttcctctttgttccctctgttttcatagagaaagtctattcctctccacnagctcattttctttcctgggacagagtctgggaaaccctttcttcactctgtttctctcccctttttatacaattattcaggactcagctcagactttgctggggttgctgtgtcagttactctcagtgtaaacttgggaaagtcatttatactcatgctgtatggaaatgttctgtttaaatgtncgcaatcctgcattaatcctgggggctttcta

SEQ ID NO: 3803 - DNA, 384 bp, Homo sapiens
  misc_feature 351: n = A,T,C or G
ccctttcgagcggccgcccgggcaggtacagattaaatagcttaaaggaagaaaaaatcatcatagtaaaagaatttgagaagataacaaagccaggagaaatggagaagaagatgaaaatattgagagaaagcactgaagaattacgtaaagaaataatgcagaagaaattagaaattaaaaatttacgagaagatttggcatctaaacaaaagcagttattaaaagagcagaaggaactagaagaattgttgggacatcaggtcgtcctaaaggatgaagtggcccacccatcaaaccattccagttaccctcggccgcgacccaccgctaaggggccgaaattccagncacacctggccggcccgttacctagtgggatcc

SEQ ID NO: 3804 - DNA, 468 bp, Homo sapiens
  misc_feature 307, 402, 451: n = A,T,C or G
ccctttcgagcggccgcccgggcaggtacgcgggatccatattaatggagaagagctatggaatagttaatgccaatttatgaataatccaaaatcatttatgttggacttgattaaattatttataatgcaaagcacagccagctgtcatggccaatatgtttgatcacatttttctctaattgtttctttcttttgtctctggaaatctgctgttatgtataatgaatgtttcttctaatgcttaaaattgttagcagattactgtcatcatgagcagtaaattatcaaagtctgaacatatcanatcagcatttaatatcatactaagatgaaatttagaaagttaatatcaagcgataattatatgcatcatcattactgtgtttgcatgttaattangtatatgtagttagtatatcatataaatgactgcagttaccattatggngacacagacatttctct

SEQ ID NO: 3805 - DNA, 359 bp, Homo sapiens
  misc_feature 62, 128, 131, 160, 203, 208, 216, 237, 283, 292, 309: n = A,T,C or G
ccctttcgagcggccgcccgggcaggtacttttttttttttttttttttttttttttcgttngcttatttgtttggttagtttagtttattctggggcctttttgtagttaagttcatttttatgganaanaataatgcaagtaaaagttcaccttcctntaggccattccacagtctgttccgagtctttttccatgccctnttttntgggctgnccagctcaaactgggaggcanttgggtctgttgcaaagtcccttccttattcagggttggttcccanagctccaanatctaattatccactanttaaactgctgcctgcattgctgagctcttcttcttgattaattaaagaa

SEQ ID NO: 3806 - DNA, 266 bp, Homo sapiens
ccctttcgagcggccgcccgggcaggtaccttgggcctattagagatcctgtagagaacatcaaggaaattgcagccactttatccagatcttgattaaatcttgcaagtagactcacttggtgatacttctgaaatgtggtgggttcatgattgattttggattctgtggtgtttccagctttgtctctcaatttgatggtaatgtcccctcttcttacattcttgttccatgttataatatccacaaagtaatgatacatgcag

SEQ ID NO: 3807 - DNA, 291 bp, Homo sapiens
ccctttcgagcggccgcccgggcaggtacgcgggtattgactacagactgagtaatctgagttacttcggaatccaggaggaaaaaacatactttagtaggatgatgatggtaaagacaagttgtgattttgaagttcaggtggaaatatgagatacaagaacaggattaagatagaggttggtgatacctagtcctctcagctgttagttcatgagataagaaactatgccaatcaggttgactgttgtcagaagctagcacagtgccagatatagagtgggaactgact

SEQ ID NO: 3808 - DNA, 365 bp, Homo sapiens
  misc_feature 352: n = A,T,C or G
cccttagcgtggtcgcggccgaggtacgcgggacctgggttccagtgttaactttgcctctagctggtgtcatgattgtgggaaactcttttatcttctctgttacctcacctatcaaattaaagagtatgagtctccacatttcttccttccataaattaaggcttagttataaccacaacatactgtatttcttagaatacgacatcactattttatacattactaaaaaattgaaaattctactaaactatgaagcaatgttttatcactttgaattttaactttctacattattttaaaagctttttaggtataaccaaataaaggattttatcatatattacacttnggatacatgtaaa

SEQ ID NO: 3809 - DNA, 392 bp, Homo sapiens
cccttagcgtggtcgcggccgaggtacatcttttgccagtttccaaatttgtgttgagttctatgaccaacattttacagaaacattgtgtgagacagaaaattttagggtattattaaattaaggcatcatttcctaactttactattgaaataaattattatattcacaatacacttttatatttaggtatacatcttaaaatctcttagcttagtgggcccgcttgttcaacttgaccttcatcaaccaatgctatcttaagataataaaaagaagaggcattgaatacattagagaaaaaagaattgatttattccaactcagggttggaactatgcctcttaactcttaattaaaaaatacttcaatgaataataaagacaatcctt

SEQ ID NO: 3810 - DNA, 461 bp, Homo sapiens
  misc_feature 445: n = A,T,C or G
ccctttcgagcggccgcccgggcaggtacctagggagtggcagagtagtgatgtaaactcaggtctctattactcctcggttcccagacatcttcctctttgttccctctgttttcatagagaaagtctattcctctccacgagctcattttctttcctgggacagagtctgggaaaccctttcttcactctgtttctctcccctttttatacaattattcaggactcagctcagactttgctggggttgctgtgtcagttactctcagtgtaaacttgggaaagtcatttatactcatgctgtatggaaatgttctgtttaaatgtcgcaatcctgcattaatcctgggctttctaaggcgggagaataccttcatagcctcagtagctggcatgtggtaggtgcttcgttcttgtttttttgtttgtttgttttgttttctgnttttcattggctagtt

SEQ ID NO: 3811 - DNA, 444 bp, Homo sapiens
cccttagcgtggtcgcggccgaggtacatagaaaagatatctacgttcccatgtttattgcagcactatttacaatagccaagatacggtaacaacctaagggtctaacaacaaatgaatggatgaagaaaatacagtaaatattcgcaaaatactactactctgacctaaggaagaatgaaatcctgtcatttgcagcaatatggcaacatagatgaaattggaggtcactttattaagtgatatatgccaggcacagaaaaacaataccgatactgcatgatctcactcgtatatcaaaattgttttttactgacattgatatcatagaagcagagagtattaccacagacactgcggaggggcgacacggtatgagggaaggacaaggagaagttggtcaacaggtacctgcccgggcggccgctcgaaagggcgaattcc

SEQ ID NO: 3812 - DNA, 275 bp, Homo sapiens
cccttagcgtggtcgcggcccgaggtacgcgggtgtgccatgtggttctatacaacatcagaaggacatttaaaattaaatggttttttcaatttttaaatcaagttcttagtttgcatgtcttgcataacatccttctattatttctgtatggagtgagggatggaatcagtgtgagcatgtattaacctcatggctaaaagtaggaaagaaaaagatttcctcatactgttatgtatgtgtctagtacctgcccgggcggccgctcgaaaggg

SEQ ID NO: 3813 - DNA, 625 bp, Homo sapiens
  misc_feature 500: n = A,T,C or G
ccctttcgagcggccgcccgggcaggtactggtgcctcagacgagtttgggtgcagcagaatagtgaaaagtaatttggaggtcaaaccaacaggacttgccacaggatggatggatgaaagaagtagaataaaaaatgaacccaagtttgggggttaatcaattgcatgactgatgatacaactgtcctaaatggagaagataatgaagaaacaggtctggtagaaataaagatgggttctacttggagcttaaagacatctaaatggagtttgtatacagggctagagctggagagaggttagagctaaagagaaccagaaagtattccccaattttcttcctaactctatttttgaccttgaaatatcatttaaatttctctgatttaatttattttgaaatatatttctaaaaaacgtttttcataaagaccaggtcttgctacgtcgctcaggtttggacttgaaccactgggtttaaagccttcctccgctcanccttctgagtagcttggactacaggcacacaccacccacacccagccagatattttttaaaatatgtaaaaatataactttgttacatatttacccagtgcttttaaaatgcttttttgaaaatt

SEQ ID NO: 3814 - DNA, 182 bp, Homo sapiens
ccctttcgagcggccgcccgggcaggtacgcggggtcattttctctctatgttatagaatgttttcagagcagaaatatattttgtggtggaaatcagagtagtgccttaacagtagagttttggttgatttctaagcctaagttatgttaatccttggctcactgatccttttaataatct

SEQ ID NO: 3815 - DNA, 320 bp, Homo sapiens
ccctttcgagcggccgcccgggcaggtacctgagagaaataattcagttaaggatttctacagttagtaaccacatattcattttttatcgcaaaacacaagtttggaggttggccctatagagctacttcagctattcttgaggaactcattatgctccaatattcctgttccattgtccagtgtggcttctggactcatggtcatagatggctgccctactttctgaccagcatacttcttccaggcaagaggaagcctgaaaggagaagggcgtgtggctggaaggtgtgtacctcggcccgcgaccacgctaaggg

SEQ ID NO: 3816 - DNA, 268 bp, Homo sapiens
  misc_feature 68, 74, 85, 86, 132, 144, 244, 257: n = A,T,C or G
ttttttttttttttttttttttttggtatctgttccaagtttttttattgttaaattgaatgactaanaatcgnatctttcttgnntgatttttgtgagtagtaatgtaatgattcttagaatacttggtanaattattcttgncataaagtgattgtcagtaaatgttcactgttattactatttttcttgtattgggattttagaatctaagtggctttcagtattttactttgaggcattngtagtcccatttngtttctagttt

SEQ ID NO: 3817 - DNA, 389 bp, Homo sapiens
  misc_feature 272, 288: n = A,T,C or G
cccttagcgtggtcgcggccgaggtacgcgggttatttatgtgtaacattcaaatgtgtgcattaaatatgcttccacagtaaaatctgaaaaactgatttgtgattgaaagctgcctttctatttacttgagtcttgtactgggctctgtgtaagtgtcgttggggtaggacctatattttaatactgttcctaacatttcattttactagcgagaaatctttgatttcattttattctttgtaattctagacactaggttgtaagtttanccataacccgatgttntttaaaaaggggatatattttctttgcacagttgttcaaaaaaagagacaaggtttcaagtcctcaatgctggcctttgttttacaaggtacctgcccagg

SEQ ID NO: 3818 - DNA, 311 bp, Homo sapiens
cccttagcgtggtcgcggccgaggtaccattatcccagtggcagagatacacagaaagccaaggctcagaggcagtaagtcatgggtccgaggcctcttgctgatgacaaaactggaatctgaacccacgtcaggcttacatttacacatacatgtatacaaatgtactttttttttttttttttttttggcatatttaggttatttattaatgaaaatatatgacattttcaggaatacaaattctgcaccctgatgacctcaaatgcgtgcaacaagatgtttaatacagaaaataacacaaaaactgt

SEQ ID NO: 3819 - DNA, 326 bp, Homo sapiens
cccttagcgtggtcgcggccgaggtacacaagttttaaattttggtcaagtttatcagtattttcctttgcagtttatactttgtactttgtttggtgttaggaacattctctcatttttatcctaaaagaattttgaagatttgcttttcatatttgggatataattcacctagaaataaattttgtgtctaatgtaagatggatctaatttttttaaagttaaactgtgtaaacacaatttattaaatattctactctttccctactgatctgaaacactacatcagatatttacagtttccataaacacatatgtggctcgtt

SEQ ID NO: 3820 - DNA, 378 bp, Homo sapiens
gatatctgcagaattcgcccttagcgtggtcgcggccgaggtactcattttatacaggcaaaaatatttttgcaaaaatgaaaaaatattttgaggattgttatattccagatatatttttatatttttagctaccattttgatactgaaatctggataaaaaattaggcttcatgttttccatttaagtctccatacctgtcctcaaaaatcacattaatccaggtgtaattgaatatgaatttatagaagcacatgggaaatgaaattttatgtctaattagatatttttcacagttggatgagaagccagtgtttcaagtggtttcctgccaggaacctcaattttctaagccaaaatatgtttgacattaaccc

SEQ ID NO: 3821 - DNA, 266 bp, Homo sapiens
cccttaacgtggtcgcggccgaggtactttttttttttttttttttttttgggcttttgaggctcctgttcttaggcagcaccagctccttctatttctgcagccaaggcatcaagatcaatgtcatccttggtgcttaaatgaaaacaaaaacatcctaaatgctacttaaaagcaaaataatcattcatttatatagattttatcattttaacctttttcatgcattagcagcacaatgagaaaaatcatttggcaagttcttt

SEQ ID NO: 3822 - DNA, 533 bp, Homo sapiens
  misc_feature 140, 170, 196, 208, 224, 225, 255, 302, 305, 347, 351, 382,431, 443, 445, 450, 460, 473, 479, 515, 520: n = A,T,C or G
cccttagcgtggtcgcggccgaggtaccctggagaaggataaattggcaagaaaactggcatctttaactccagggttttcaggtgctgatgttgctaatgtctgtaatgaagctgcgttgattgctgcaaggcattctngtcagaatttcccattaaattcaggaaaancaccttttgaaccagggccaatttgnagccgagtgganttgggtgggctttagnngaagaaaaaccgcaggtttcttgccaagcnctggagggaagaaaagaagacttgtgggcattaccaccgaaagcagngcncatgccggtttgccccggcctgggtatcctgggaggcaccgncaanaccccgcttttttaaaagggtattcccatcnatccccaccgttggccaaaagggacctaaggtttattgcctccaaggtntttttaacccananaaggnaaaccaattnccctttttattancccaanaaggaaggccaagccttctttggggattaaggggantggtngttattggaactt

SEQ ID NO: 3823 - DNA, 255 bp, Homo sapiens
  misc_feature 30, 43, 51, 56, 60, 63, 66, 79, 86, 177, 218, 221: n = A,T,C or G
ccctttcgagcggccgcccgggcaggtacncggggttgcaaanttcttcantagcnttanttngantttatatgtaaangccattnagtggttgagatggatatgaattttttgcaaagaggcagttggtcactctgttttctgcgcccaattattgcggagagtttgacaatgcangtgccatgatgagtgtggatgaaacactaatgtgttctttncanattttaaagcctgcagagaaaaagaagccaaatg

SEQ ID NO: 3824 - DNA, 308 bp, Homo sapiens
cccttagcgtggtcgcggccgaggtaccctgtggtcagcatagtagataacatagttacagaagaattgacaacaggaaagttgttttatagaggagggaataagggctccgtaacatgacatcataatttctagacaaacgcttaacttccctgaagcagattccgccgagagggattgggccatgtcggaaagagaccagtttgcctgtaatatttcttccttttctctaatcctgggctcccttcaggtagaaaccccagatcaccatcaggaacccagagaatggagaaaaaagtagaaaagat

SEQ ID NO: 3825 - DNA, 836 bp, Homo sapiens
  misc_feature 496, 528, 621, 647, 673, 691, 700, 729, 731, 733, 735, 741,742, 746, 755, 788, 795, 805, 813, 819: n = A,T,C or G
cccttagcgtggtcgcggccgaggtacttgcattaatacgtgcatactttctccctttttacaaaacctctattagaggctctggaaggtgtaagccatgatagcaatgaccgtgtcaaactctttttctctgtaactcagggcctaggactgtgcctggcacatagcagacacttgatacatatttgttaaataaatgggtagctggaacatatgctccatgaggaaaatgaatgtatttgcatgttgttaagttaggaatctggccctgggagtcagaattgcagtgtttgagtcaggctgcattatttcctagctgtgagagctctctaaatctattccctcacttgcaaagtggaatgatattagaatctgactcatattgttaccgtgaggattaatcgacataaatacctgacacatgggtagcactcaatacaggctagctgttattatcattatcaacatcatcactatcttctttcatttttcttgnttactacttaatctcctgttttaagcaccatnacatatgctcaataaaaatttggttaaataggaaaaaatgaatcaatgaagtgtaacttacctgtatacccaaatatgttttgcttccctcantataccattttggtcagggattccanaccaaatagtaaaaaattttaaaggnccaacttaaaagttagtngggattgangtttatttaatttgaaacttgttttaaananancnagcccnnagtncccttgganaaaaaagtccttttaatttccttttgaatttcngggatangtaaaacaanaggttgcntaattnggacttttttttttttt

SEQ ID NO: 3826 - DNA, 389 bp, Homo sapiens
  misc_feature 88, 201, 225, 239, 308, 379: n = A,T,C or G
ccctttcgagcggccgcccgggcaggtacttttttttttttttttttttgaaacggagtcttgctctgtagcccaggctggagtgcantggcacgatctcggctcactgcaagctccgcctcccgggttcacgccattctcctgcctcagcctcccgagtagcggagcattttttataatagctgctttaaagtctttgtnagataattcaaatactgtgtcatntcagtgttggtgtntgtttattgtcccatgcaagttgatatttttctgggtccttcatattctaagcaatttttagattgcantccttgggcattttcaaatattacatttataaaggacttctgggatctttacttaaaatttccatgggaanaaatgttgct

SEQ ID NO: 3827 - DNA, 614 bp, Homo sapiens
  misc_feature 428: n = A,T,C or G
cccttagcgtggtcgcggccgaggtactgttccttccatgcatctaaaccctgtaacaattctgtgaggaaggcattactatccctagtttacaaataaagaacggagacacagaaaagttaagtcattcaccctaataattggaaagctgagattcaaacttgggccggcctgtccacccccaaagcctgagctcttaatcactgtagcacactgccttctaaaacttcagagtttttaagagctgtgcaagctactcttcccctaaattaagttgctccccctgaatgccccagaaacaacatctctcattggcttcctggcttctgctgcagtgaaagctaagctgtcagcagggctccctggtcatttaacttgttgatcaatcctgacatttctaccaccaaacaaattcttcttttccttgnggctctctctaacctgcatttcccgctgtgggctactgagcctggactaaaatttatgtattctctatcccccaaatgagcaagaagaatgcagttctcatgtatctatcagcttaattaagaaagagaaaatgagggtaacaaatcatgaaaagcttatgacacagaagttaccaaggatgaaag

SEQ ID NO: 3828 - DNA, 325 bp, Homo sapiens
  misc_feature 57, 58, 63, 76, 79, 80, 81, 307: n = A,T,C or G
cccttagcggccgcccgggcaggtacgcgggtgttcgtttacagttcttaggactcnntgatngaaaaaaacacanagnnnaacacaaaaaaacccaaccaaccaaacaaacaaacaaaaaaaaaacacaggagtttctcccaaaaagaagtctgcagtgtcttttctgttttctctgaaggtatcccagggtgttagatttctgttgtttttcccttatgtggcaccgaagttggcaagaagaaggaagtgctgatataaataaatagggaaatgaacagagagagtacctttggccgcgaccacnctaagggccgaattccaa

SEQ ID NO: 3829 - DNA, 518 bp, Homo sapiens
  misc_feature 364, 367, 384, 387, 388, 389, 391, 400, 410, 417, 419, 446: n = A,T,C or G
ccctttcgagcggccgcccgggcaggtactggaagtgctatataatgcagtgttaaaaaaaaagaaataaaatgcacatagatttgaaaggatgaaatcaactttgttcacaagtaacatgattgtctttgtagagaattctaaataacaaaaaccctgctgacattaataagcaattacagcaggattgcaggatacagtcctcaggtagatgataaaaaggaattggacatcaagtcattaaaagacacggagaaaccctaaatgcttattgttaagtgaaaaccaatctgaaaaggctttctattttgtatgattgccaattatatgacattttgggagaggcaaaactatttgatccagngtnaggacccatggttgctnaannntnaggggatangcattattgntgttgcngntgctacctttggggcctaaaaaccaancacctgttggggtatcaattaccttctttgataaaaggaaataaataaataatgttatccgaaaaaaaaaaa

SEQ ID NO: 3830 - DNA, 476 bp, Homo sapiens
ccctttcgagcggccgcccgggcaggtacatggctccatggaggttctccagtcggtgttgctgctgctgttttcgagtcttatctcgtctgtgctcctcataagtgtcgtcatcagtgggcagctcatagcggcacaagggacaggaatttgtcttgcttagccagggcagaatgcagctggaatggaaaaggtgatggcaaggcatctcaatggcagtctcctcctcctcaaattcccccgcgtactcaaaatgggattaagcccttcctgagggtggtgcccacctagtaaaatcccccttattaccttacctgttccccaaagacattcaaaatgtaattaagaccaactactatgaaggcagagataaactcaaatttccttttgaaccctcattcctccagttccttcctcagccaaagacttaagggctacatttcttttttgttttaaccaataaaacacaatgggac

SEQ ID NO: 3831 - DNA, 328 bp, Homo sapiens
cccttagcgtggtcgcggccgaggtactagaaaccagaattgctgggtcattggacatgcatatgttgagtgtttctttgtcattgttagcctgcaccctccacattggctttaccatattatactctccatcttgctaatgattattcacctttttttcttcttcttcatagggtttactctcagaaacctacctggaagcccatcggattgtgaagatgaacaagagtgaggatgatgagtctggggctggagagctcaccagggaggagctgaggcaaattgcagagggaggatttctacgaaaagctggcagctttcaatcgcc

SEQ ID NO: 3832 - DNA, 405 bp, Homo sapiens
  misc_feature 290, 348: n = A,T,C or G
ccctttcgagcggccgcccgggcaggtacccacctattttgtgagatttctcaaagtatttctgttctcctcagtctgaatgaggttaattttcctgagcaacaagaacaagtgtgaatgcccactcctcaacttggagtcttctacataacttggatgttgagaacttaaatacactatggtgagctgcagactcttcttgcagatgtaacaatgctcttggtttaagcaggtgtacaccgcatatggggccaagttccacatatttggcaaccagaccagcattccangacaacaccaaaagtattgttggtttggttgtttagaaggggctttggggacattttnactttttttgccagcctcagctttaaatcccaaggaagacaaaaagaattaattttt

SEQ ID NO: 3833 - DNA, 438 bp, Homo sapiens
  misc_feature 170, 175, 176, 179, 222, 262, 331, 378, 387, 401, 412, 427: n = A,T,C or G
ccctttcgagcggccgcccgggcaggtacctcagccagcagaacatcgctgggacgtgcctggcctaaggcatcctaccaacagcaccatcaaggcacgttggagctttcttgccagaactgatctctttttggtgtggggaggacatgggggtaccccattatcttagnaaaanntantttaaacctgttttcttttcacccgcaaaaggaaattaaaatngggaaaaaatccatttttggtttaatctcttaaagtttantacctaaattaggtaggaaaccaaaaccaaaatttattctttcttttttaaaaaaaataaaattcttantagggaaaaaataggaacaggtcccaaaaagtccattgttcttttgnaacaaggtnggatttggggaatnttggtggcccnagttaatttggaccnaaaatttattt

SEQ ID NO: 3834 - DNA, 420 bp, Homo sapiens
  misc_feature 404: n = A,T,C or G
ccctttgcggccgcccgggcaggtacgcgggggctcgaggttagctcttcactgccctgtgtcttctttccaagggtctcggtgattcggccacagcctcagcctccatcacgcggtgaactgatggtgctggaagattcatagactccaggacattcctgaagccgagaaaaggttaagtagggtctggcctggaatactctcctagatgaagatagcccaaccatgagccaccttcgaagcagatgagatgaaattaaagctcttcaactcctaaaggcccagagactatcacaaaagaggtcagaaatcctgaaggtcactttctgacaaactcaggaaccccaggtttatcttggagcctcaagaggagataaattcacccaattcaggctggagtgcantggaatgatcttggct

SEQ ID NO: 3835 - DNA, 375 bp, Homo sapiens
ccctttcgagcggccgcccgggcaggtactacaaggactggttagagggttgaatgaatctgtatactcagcacttaacacagcactctgggtaaaagaaaaaagatcctcaaagatattagttggttacatcaagaaaggacaaacttaggttaatctataacttcatctcagaggaacaggaactttggagataaacagggctctgccacttgcaagttgcaccatccctggtttctccatctgtaaattgattaaaacactgcctatctaataagattaaataagttagaagcattcagttaaatgtcaactgaaactattgttcatgtaaattgtgcttgatgctttttctttctagattcaatgattatt

SEQ ID NO: 3836 - DNA, 657 bp, Homo sapiens
  misc_feature 575, 613: n = A,T,C or G
cccttagcgtggtcgcggccgaggtacgcgggggactgactccccggggacatgaggtggatactgttcattggggcccttattgggtccagcatctgtggccaagaaaaattttttggggaccaagtttttaggattaatgtcagaaatggagacgagatcagcaaattgagtcaactagtgaattcaaacaacttgaagctcaatttctggaaatctccctcctccttcaatcggcctgtggatgtcctggtcccatctgtcagtctgcaggcatttaaatccttcctgagatcccagggcttagagtacgtcttaaatagctcaataaaacagaagagatttaccctcaaatgaaagaattacatctatactatataacactataaatatttggcaagtgggtgagattattggctagcaattgggaaaatggtttagacctatacaacattatgaaaatcaagtttcagagaatttacaaagttaaacactttaaaacagaaaatctagaagaaagtggaactgaatttcttcattttatgcattggaagagtttcctaaggatagaaacnaacagaagtcaataaaaagaaaaacacatggatttggntaccagtgaaattttaaaattttgtgtgtatgagtttaaaagga

SEQ ID NO: 3837 - DNA, 675 bp, Homo sapiens
  misc_feature 88, 89, 93, 668, 669: n = A,T,C or G
ccctttcgagcggccgcccgggcaggtacaagcaataaactctggcctcgaattccactgatggtaagtgatataataatgagtctgnntccnaatccactgttgcccttagtcaggaacctataataacatgatttgcctttcccatattgcattactaaaaggaaaatagagaaatattttttctttaattcatattatataaagattgttttttaaccaaaagctatcatttacatttaagtttacacatactattatttttctggccttttgataacatatatgtcaatatgaaaatgttattctttagagctagtttaaggtcccaagcaattatcaagatctacagtgcccaattcacagctagtcactgctgatcttacaatctttccatacacaattaatacttaagaattcacactgctgacttcctcctgcctagatatacagagggtaataacaataaataatcacccctggagtttttttctcctaactactctggcaggcacagaatctttgaagcattttaatttaaacctttaactaaccaaaatcaaagtaacctgagtctggaagtaactgagtgcagtaattggccaaaacatgtggctgggggattttaagtctggagccgttttaaccagatttttaaaccaaaaaanngggttt

SEQ ID NO: 3838 - DNA, 614 bp, Homo sapiens
  misc_feature 521, 559: n = A,T,C or G
cccttagcgtggtcgcggccgaggtacaaggtgatacattctagccttctacaaagtgcacttagaccaggatattctttcatgatggcagacaaatgaggagtttcttttcattatctaatgaaaaaagagttggtctatattttctcagtgtattcctatagggaagagagtcttattgttgataacctttcagacaagtagatgcttctgcatcctatgaggtattcccaaagcccctctttaatctccaccattgtgcataattttgtgataatgaagcagttattttcttctcttgatagacattttatgaaggcagagactatgccactcttgcttacagttgtagctccagcatctaacatggtgtcttaacacatagaagatgctcagtaattacttgttaaatgaatggatgggtgggtggatatgccctaatatgatgcagcttgattatgctgtagtctggctggattaagacatcatccaaagaagtaaataccagtatctttaactgntgcctgtatctacacactggaagaagacatctttcaanggggatgaaaaaaaagtcatacctttggaaaatcattaaactcttatttttaaaa

SEQ ID NO: 3839 - DNA, 320 bp, Homo sapiens
  misc_feature 68, 140, 154: n = A,T,C or G
cccttagcgtggtcgcagccgaggtacttttttttttttttttttttttttttttgcacaggagtaanaaaaagggaatttgctttaggggcatgaaactaaaatatcagaatgataggactaaaatcaacagagtttanacttcagtagtcanaataaaatacttctgaaatattccagatatcgtataaaaccacagataaatatgcaaagaagtcattaagcatattttattataattaatgaatatgacttttaaagctatatgtattctccatgttaaaaacttccttagtgaataagcccagggctgcccataa

SEQ ID NO: 3840 - DNA, 321 bp, Homo sapiens
cccttagcgtggtcgcggccgaggtactttgctttttaattgttagtaatttttccgcaacaggacacaaagagcaatctcattctttctggaggtccatgcagaatactgccctcaatggatgtcacctatgtgaccagttcccactgatgacccttacactgaaaaccggcttacacaggagtggtctatgatctatgatgtattaacatggacatttcctcttccattatgaatttgtaaagttttgatttccataattctttttttaatcagtgaaaacataaaataaggttctgggagagagatacaggaagccaa

SEQ ID NO: 3841 - DNA, 261 bp, Homo sapiens
  misc_feature 165: n = A,T,C or G
cccttagcgtggtcgcggccgaggtacttgagtggttatttcatcattcattccattggtcattgaaaaaaatcttgatatgacaaataataatgactgctaaatctctgattgttaacctgggaatgtcactacacagctcactttttcttttttatgtcttangttgggttttttgtgaagagaggatgttctagaggcatggttgaaattgaatttgtaagtgttaaaagtgctaaaactcctttttcctataaaatt

SEQ ID NO: 3842 - DNA, 713 bp, Homo sapiens
  misc_feature 375, 401, 505, 552, 600, 636, 639, 652, 655, 681, 688, 694: n = A,T,C or G
cccttagcgtggtcgcggccgaggtacctgaaaagaatatcaacctgaaaagaatatcaactcacccagaaattagttctttgaaaaaaaagaaattaagttgtgaatttctaaagaccttgaaataagtgtttcaaatttaaagaacaaagaatgatgtgaaaatgagattatgattcctactacatgaattaacgtttcgagattgctgtttattacttcccagagtatctttaacagtattctctgaagcagttccaatctagttgggagaattaacagccagtttgatttaactatctcatttttattaactgtaaatttacattaaaaaatatttgcaaatcatactcattagttatttggatcattggntctatgcattttaaaattaattttgnggtggtcctctcaatatttggttttaacatttattcccatttttaattttaatactattggctgggcatgccttatgtattcccaataaggtgtcttggaaatnctttgtgggggaaagggcaggaccaaaaataattagtttaaattaanatttggaaaaaatggtaatttttcccatttttaaatattttcatttgnataaaaaaaatatttcaaagaaaccatggatgaatnatnggttatgttgggnctngttttggaatttttttcttcaaattnaaaacanttttgntttgccaaaaaaaaaaaaa

SEQ ID NO: 3843 - DNA, 400 bp, Homo sapiens
cccttagcgtggtcgcggccgaggtacctgcttttgccgcttctggtttttgcagacatccactactccccagctgattacaccaacttgaatgaaacgacttctcttgtgaactatcaaggggccgccagaatcacctctgcaagtattggggtcagcatagggactcactcctccagtacagagagataaaagctgcacagaaaataaaacaggattatgggataaagtggtgggaggtgatgaggatattattctaaaaagggtagtcaagaaggttcccttggaagataaaagggatggggaaacagcaaggagaaggcccaagtgaggagcaggtctgagggggagaaggaagacccatgtggctgcagacagcaagccaaatgggggtgacagg

SEQ ID NO: 3844 - DNA, 376 bp, Homo sapiens
ccctttcgagcggcccgcccgggcaggtactataggaatggtaagttaagagacaaaagagcagctacacagatgaagaggaactgcaaaggagaatgttttgaaggagaagacaaatagaatttggcaaaagtagctggaaaggttgttgcagaaaaggacaaatggtgtcactgtgagaacacacaataaataaaactgaatggaagagtcaacagcagaaactgggatcagggagtaaaaagcatattatgggacaaaacagatacatgatgtgcaaaacactgtctgcaatttaaatgtgatgtgatggaattttgggagccattacaaatctgatttaaagagaaggaactggcccaatgatgcccaagca

SEQ ID NO: 3845 - DNA, 406 bp, Homo sapiens
  misc_feature 16: n = A,T,C or G
ccctttcgagcggccntccgggcaggtacaatatgaaggtaacataaatgtgtcagctgctgctttatttgatagaaagcggcttcagtatctggaaaaactcaaccttcctgagtccacacatgttgaatttgtaatgttctcgacagacgtgtcacactgtgttaaagacagacttccgaagtgtgtttctgcatttgcaaatactgaaggaggatatgtattttttggtgtgcatgatgagacttgtcaagtgattagatgtgaaaaagagaaaatagaccttacgagcttgagggcttctattgatggctgtattaagaagctacctgtccatcatttctgcacacagaggcctgagataaaatatgtccttaacttccttgaagtgcatgataagggggcc

SEQ ID NO: 3846 - DNA, 508 bp, Homo sapiens
  misc_feature 350, 399, 406, 449, 450: n = A,T,C or G
cccttagcgtggtcgcggccgaggtactgaaatgataggcgtgaaccactatgcccgaccttaatgttttactttaaattttgtctttattttacacatacttatttaataataaacacctgataattctattatttgaacttcccatgtgtaattcattatttgttgtattgactgactctcactcatatgtagttgtttcttcttgagttttgtaatttttaagagtgagttcgcttcatttgggcttcatatttgaaatactgagcaaccttgaattcctcacagataaattttggttttgctttgtctgggtgccctgagaccactcttttttttttttttttcgngagatggagtctctctctgtcacccaagttggagtgcagtggcgcaatntcgggtnactgcaagcaccattttccgggttcacgccattgtcctgcctnnccttccaaagtagctgggactacaggcgtgtgccaccatgcctggctaaattttttgg

SEQ ID NO: 3847 - DNA, 483 bp, Homo sapiens
  misc_feature 178, 193, 232, 242, 243, 300, 318, 327, 333, 372, 387, 398,421, 435, 436, 441, 455, 463, 473: n = A,T,C or G
cccttagcggccgcccgggcaggtacgcgggctggttgtagaccccaaaagtagggaagaagataaacacctgaaatttcgtatttctcatgaattagatagtgcatcttctgaggtcaattaaaaggagaaaaaatacaattttctcacttctgcatttaattcaaaaagaaaaaanaatgccttttattangcaaaaaatggaaaggaagaaaccatggaaaatgccttncttttctcannttttattgggtttgaaaatggtggttattctatttttggaggtcctgggaaaaatanacctaaattggtgggttntggattaanttaagnttttaagttttgtggggctttcattgggaaaacctcccnctgttaaaacctaanaagctttcaanggggtctaatggttctaatggtntcatttcctattannaaagnaaaatggccataancctattcnacctggttanttttttaaaa

SEQ ID NO: 3848 - DNA, 316 bp, Homo sapiens
cccttagcgtggtcgcggccgaggtactcaggagactcaggtgggaggatcgcttgagcccaggaggtcaaggctatagtgaggcatgatcatgccaccgcactccacaccccaggcaacagagcaagaccccaatgcagaccaaaaagaaaaaaaaaaaaaaggaaaagaaaaccaccatttggaaaccactacagcaacagctacagacatacctcatgttacttcactttgcttcatctcactttacagatatttttcacaagtagaagtcctgtggcaatgtcatgtcgaataaatctataacaccattttt

SEQ ID NO: 3849 - DNA, 459 bp, Homo sapiens
  misc_feature 122, 141, 147, 184, 187, 193, 198, 213, 215, 234, 243, 257,263, 274, 279, 293, 304, 312, 335, 337, 358, 365, 387, 389,390, 398, 406, 426, 431, 438, 448, 450: n = A,T,C or G
ccctttcgagcggccgcccgggcaggtactggagggggaggatgtcttgtggaattcagacgtaagcctaaccctgcattagaaaaaatgttcaccgggttagagcagtggtttttcctggnggattctttatgcctaaangaatcnttgaagtttaccattacttcctgggggaaggggttanggnaagaangaaangggcccctcaatttntncattttcccccttctttgngcgggttgncttgtttcaaaatnccaagngggccaaattntaatnttggccttaaaatnattttggaacnttttttcnccccttttttggtcagtggtaantnggttttcaaagaaaaaccttngtttaanaggtttccaccaatatccttgngnnaggaaggntataaggntcttctccccaaccttttgnttttntaattanaattttcccncntttttttaa

SEQ ID NO: 3850 - DNA, 566 bp, Homo sapiens
  misc_feature 467, 492, 533, 537: n = A,T,C or G
aattcgcccttaccgtggtcccggccgaggtacgcgggttctagtgttcttcattttttgcagagatccatatttaatctgctattatttctcttctgcttgaagaaatctctttaacatttattatattgagagtcagttggtgttgagttctcttagcttttgcatgtctgaaaaagtatttgccttcggttttgaaagctattttcattggatataaaattctaggctgacagttttttatttcttttaatactttaaacaatattgcttcattctcctctgcagtgtttttgaagataaattagctctcattcttttccttgttcctctttgttttctctgcctgctacgaaacttttctctttacattgcttttgagcaatttgactatgatgcatgtgtacccggggggcaatgttgacatttgaggtggcaggcaggatgcctgccttctaatatatttngggtgagtaactgagcccagcccangggaagggtggaatggattaaatcaagaaatgggattcttnggtnaactgaagactttatttggggaatgaaaa

SEQ ID NO: 3851 - DNA, 405 bp, Homo sapiens
  misc_feature 318: n = A,T,C or G
cccttagcgtggtcgcggccgaggtacttcacaatatattcaagttaatcttttacccagtggtgccaaattcttctgagaatagctaagagggaatttcaggctttccttgactgtgggcaagtcaaatactttagtctcttccaattatcatatgtaaggagtagaatatttaaaataaaaataaaaataaaaaaaatacacgttaagttcattggaggactgctactagatctaaaatataagcagtaaaaaaactacatatatgtgattatatatacataaaatgtgtgtatttatattacatatatatgcagngttcattttttgaccatttctagttatcagattttttttgccagtgataaatttggaatgagtgaccagaagggaaattaatatcag

SEQ ID NO: 3852 - DNA, 641 bp, Homo sapiens
  misc_feature 366, 421, 442, 462, 469, 478, 482, 501, 536, 551, 575, 579,587, 590, 593, 596, 610, 612: n = A,T,C or G
cccttggccgcccgggcaggtactagtttggcactgaactgtttgggtgcccatgaggtaggcagaccttatgctttttttttttgagacggagtcttgctctgttgcccaggctggagtgcaagtgatgtgatctcggctcactgcaacctctgcctcccaggttcaagtgattctcctgcctcagcttccccaatagctgggactacaggtgtgcgccaccactcccagctaatttttgtatttttagtaaaagacagggttttgccatgttggtcaaggctggtctcggaactcctgacctcaggtgaatccacccgctctgcctcacaaaagtgctgggattacaaggcatgagctaccgtncctggcctaaaccttacgcttttgaggttgagtgcaggccttgtgaaaaactaanccgcacttttgacgagccttnaacaagctggccaagtcctnttccttnagcaaaacncatnagggttgtaagtggcattntttacaggtggtctttcccttttttttaaaatctntagccagtggaaatntagaattggattccaacttttaanttcntttttttnaanaantcntaattaaacttttnantaacctttttaaaaaaagggaaaaaaaaa

SEQ ID NO: 3853 - DNA, 447 bp, Homo sapiens
  misc_feature 389: n = A,T,C or G
cccttagcgtggtcgcggccgaggtacacatttcctgatgtaggaaatagtaaaatttcagagcctatggcattggctttcaccacctatgcaattttctacacatctgaaaattaccagtttatctaactccttaaatgttcctctcttcaacaacaaaaaacacaaacaaaaattgctggaagaaacaggaagcatccaggtccaaatgacagcataacagactatgaagaaacagggcttaagtgcccatctagaacaagatggtctagattacaataaggaccccatgggacagaacatcaaaacattcaactttcaagtaaatgtcttggaagtaaacatttaaaatttataggacttcctctggcatgtaggtatgatattanaaagagtttcctttgacaaaggacaatgacccaagaagtagggtttttttttttttta

SEQ ID NO: 3854 - DNA, 360 bp, Homo sapiens
  misc_feature 59, 60: n = A,T,C or G
cccttagcgtggtcgcggccgaggtactccacgagattagaagtgcatattcaactgcnnagaccggaaccagcatggggggtctaaatgttaccagataaggtttttagggcattttggttatagtgctaagcatttttgggaaaccgtaaagagggttaggataggtggtgggaatagaggctgacagcagttttcagatgtccgtgtgttcatgcacgcagtatggcccaggtaagttcaaaaccttattcttaggctatttcgatcaaccctgccaggcaattttaaattcttggtgatgtagggcagggacactgtggatggctgaggaaactctgggctctgctggctaaccag

SEQ ID NO: 3855 - DNA, 487 bp, Homo sapiens
  misc_feature 241, 245, 308, 354, 367, 472, 475: n = A,T,C or G
cccttagcgtggtcgcggccgaggtactctctctgttcatttccctatttatttatatcagcacttccttcttcttgccaacttcggtgccacataagggaaaaacaacagaaatctaacaccctgggataccttcagagaaaacagaaaagacactgcagacttctttttgggagaaactcctgtgtttttttttgtttgtttgtttggttggttgggtttttttgtgttttttttttgngttnttttctatcagggagtcctaagaactgtaaacgaacatgttagcactagagaacatatcctantcatgtggcaccaaagtatgttactggtggcaaatgcatacacgtnttgcagcaacctnaattcctgcctgctcagaagaaagaattcagctgaggggcataaggcacagtgagagactgaggcaagttttagagcttgagtgaaaatgtacctgccccgggcnggncgctcgaaaggg

SEQ ID NO: 3856 - DNA, 429 bp, Homo sapiens
  misc_feature 48, 265, 287, 321, 349, 355, 381: n = A,T,C or G
tgtgatgggatatctgcagaattcgcccttagcgtggtcgcggccgangtacttcgggaaaacaagaactgtgcttcaatgtctttataaccacactatatggctcattgtaaatgttcaacaaatgcttgatgaatgactcaatgagcaaaattacgcgaaaacacttgctaacctatctctttttcatcaagtatgtagcaaacacatgcccacacctggcaccagaaactataagtgctatctaaatatcaacattttattnggcctgtgcacttatcagctantggaaagcataaattattccaataaacagacggnaggtgtggaggcaaaatatcacacctangtctanaagaactgatgactttcaaatcaaanactgtattacctgataaagacttaactttatgattattttaacaggga

SEQ ID NO: 3857 - DNA, 479 bp, Homo sapiens
  misc_feature 72, 159, 160, 341, 362, 366, 405, 416, 431, 453, 464: n = A,T,C or G
ccctttcgagcggccgcccgggcaggtactgtttttaaaatcctaatttttatacttagttatttttagcantgtcatattgaattctgttacgagtttcatggttacttataataaccagtttcctcattacatagtagaatggtatttttccaattnngaactcttaattttaaattttcttctacctttaaaattctgtgattctgtttggtcaaaagggtctgtggaaataatacttgatatgtttatatagtggttattcaaaacttactcatatattatttgctgacatctgatgagatatagttctagagacattttttatttctggactttantcttggatggatgaaaatttnatcncgatttcagggaaagaaaaggattataaaattagaatcncataacatggntaaaaggaagtttgntttttaatgtcaaatcttaatnggtaatttttngatcattttaatttt

SEQ ID NO: 3858 - DNA, 327 bp, Homo sapiens
cccttagcgtggtcgcggccgaggtaccatagtatttggagcttctataggagtggagaggggcagctcattgttgagagttgcatgctgcaacctaatggtcagcaatgaaataaatacttgtagaatgttcacttcagtgtgaagttttgttatctagttaatttatatacatatatcctttgtagatacatttctatctaatcttgttgggctaattaagaaataaggggtggggtaattgtcaacaaagggagaagaaagtggtttaagatcagggcagcagaaaaattagagaacaagaatatcataatatggctcctggtt

SEQ ID NO: 3859 - DNA, 685 bp, Homo sapiens
  misc_feature 568, 608, 611, 624, 629, 647, 665, 667, 678, 680: n = A,T,C or G
cccttagcgtggtcgcggccgaggtactaattctgacagaagctgaaactaaagcctatgttttctttagtcaacataaggccttttttcagagatggtgtgaattaatagtttaaaccaccaaaataagaatagacaagtattttcttaacatatccatttccattgctagagctgcggtgatcagcagaagcatctgcctggctgtcaatatcaaggtggatccaggctgttggaactggtggatccaggggttggaacggaggaatactaaaaatgagacttggaacttggaaggcctacaccacgagggccaattctgccataagccctattgcccagatatgttacataaaacatccagatattacagtgaaggtcaagtgtgtggccagacacagtggctcacaattgtaatccagcactttgggaggccgaggctggtggatcacttgaggtcaggagtttgagaccagcctgaccaacatggtgaaaaccccatctctactaaaaatcaaaaattagctgggcatagtgacacaagcctgtaatctcaattgcttgggangctgaggcaaagaaaaattgcttggaacctggggagggcnganggttacaatgagnccganatcgtgacacttgcactnttaacctgggtgacaaantnagacttccttntnaaaaa

SEQ ID NO: 3860 - DNA, 512 bp, Homo sapiens
  misc_feature 168: n = A,T,C or G
cccttagcgtggtcgcggccgaggtactgatttttctaaaatcctggtttctttaagtaacaaatgggtcattggtaaatagtaggcagcagcaagacaaagtccaagtgtgtgaagtttaaagtgaaagaactggtttaaaatgctcactttgcccattagctctgnggtcccgagaaagtcatttaattctctgagcctgtttcatcacttacaaaatgtgaataacaacacttattcatagggttgtaataaggagtgggagatggtgttaggcataaaaccagcacagtgccctgaacctattttaacaaatggtatttccgaggtgttagtccatgccaacatgaaacgtgagtctaaggaagcttataaatactgtttctttttattacaaagattataattccagtataacaaaattcactggaagaaaaccatttaacacagcttattatctgttcaaaaaataccccgcgtacctgcccggggcggcccgcttcgaaaggggc

SEQ ID NO: 3861 - DNA, 447 bp, Homo sapiens
ttcgccctttcgagcggcccgcccgggcaggtacgcggggcagaaggaatagaagatatagaaaaagaggacatcgaaagtcaggtccttagccagttttttttaaaacatgacacagataaattaagttttaaataataaaaagtatttttttctagttcaatttggaagtctcagaatttttaaaagatgtgttactaaagctacttataagtcatctaaaatcctaccaccttaggcaaccttttaaatttttgcttatttcatataatatatatttatacatagttgttatagagtaagttcctatttattctgtattttcacatgacgtataatttcataatttccccataatttattagactgctttctacatatctaatagacactcctttaattttggacattttaagttttaaggcttttttcctactccacgatgaa

SEQ ID NO: 3862 - DNA, 483 bp, Homo sapiens
  misc_feature 68, 477: n = A,T,C or G
cccttagcgtggtcgcggcccgaggtactggtggagttgtggttcgcccccaggctgtcacagagcantcctacatggaaagtgttgtgacttttctgcaggatgttgtgccacaggcttacagtggaacacctctaacagaagaaaaggagaaaatagtctgggtcagatttgaaaatgcagatttaaatgatacatcaagaaatctggaatttcatgaaatacatagtacatgaaaccccagatagactataaataattctaaacaaacaagtaggtagatatgtatgtaattgcttttaaatcatttaaatgcctttgtttttggactgtgcaaaggttggaagtgggtttgcatttctaaaatggtgacttttattctgcaagagttcttagtaaccttcttgagtgtgggtagactttggaacatgtaaatttttttgcttgtaatgttatcctgtggtaggattttggcanggtacc

SEQ ID NO: 3863 - DNA, 321 bp, Homo sapiens
cccttagcgtggtcgcggccgaggtacgcgggatatttatgaagtatatgagatgttttgttacaatcatgtgatataaaataatcatcatggagaatgagttatccatcccctgaagcataaataaatgtaaattctgatgttgaatttatacaccaaattgttagattttagattttatcctcattttactttgcttattttcttatatactggtaagatcttatagatgctgtaatatagtaaaatgtagaatgtatgccataaaattaacctgaattagagtatttttgcatgcatgaggaagtctgttaaggacat

SEQ ID NO: 3864 - DNA, 384 bp, Homo sapiens
  misc_feature 334, 339, 340, 341, 342, 344, 345, 346, 355, 356, 357: n = A,T,C or G
cccttagcgtggtcgcggccgaggtacgcgggtggtgaggaaattgggatccaatgtcacactgagacgtagtgcaagagctaaaacccaggattcgtagcacccctttcaccgcaatatggttcctcttagatgttaagacaacttttgtctttataggaaggagggtcgatcagacctgtcaaagggagatagacttttatatcgaaaagtctatatcgatatagacttttatatcgaacacgatttaacctgggaggcggaggttgcaagtgagccaagatcgcaccactgcactccagcctgggcaacagagtgagactctgtatcaaanaaaannnnannnaaaaaaaannntccctgcccgggcggccgctcaaaggg

SEQ ID NO: 3865 - DNA, 286 bp, Homo sapiens
cccttagcgtggtcgccggccgaggtacctgaggcctttctgtgcagcttagcattgccagaaggctatggcctcatagtagtcaaactactaatgcagttggctcagagctccaagtgtaaatgttttagtgaacaaagtggaagttgcatcatcttttattacccagacttgtatacgacttagcaccgcttcttgctataatccattactcagagaaatcacagccctcctagattctataattaaggaattttgacttcatctttgttggggaattacaagg

SEQ ID NO: 3866 - DNA, 327 bp, Homo sapiens
cccttagcggccgcccgggcaggtaccctggcaggtgaggtggcagatctcttgaggccaggagttcgatacagcctggttaatacggggagaccccatctccatttgaaaaattattttttaaaaatgaaaagaaaaagaagctagcaaagtgtaataacgcagtaagaatgttaccttgacagtagatgttacaaaactacttccatgaattttaggaacaggggaacctgttccttgggagacctgagaagccgtggagatcttgtttgtaggacttcctgataagcaaggcacaattaaaacataaacaaagtaaaatttaca

SEQ ID NO: 3867 - DNA, 548 bp, Homo sapiens
  misc_feature 424, 461, 485, 516, 548: n = A,T,C or G
ccctttcgagcggccgcccgggcaggtacaacatcattataatccacatcattaatcatcagggaactgcaaattaaaaccacaatgcgatacctcaatgcatccactagaatagctaatatggaacctaggaatcattgttaaatttattgaagaagttaacggggcataattgctgggaccaaaactagagtgaatggctttatatattttggaaagatgttggaaagcaaactgcatttgcatcaatgacaatgacaatagtaagaggaaaagaggctactctttctgtgctcactcatgtgccaagcactgtgccttacatccatacacacacacgcatgcacacacacacacacacacacatattacacacccaaagaaaacacattcagaatagaagcaatggaataaagaaccactnaaattaattatcaagactctagattggggaaaatgtngaaaaaaaatcaagacttttcagnctatagaagacaaaagctttgatagggtttncatttaagtttgccaaatttttaaaaaatttn

SEQ ID NO: 3868 - DNA, 308 bp, Homo sapiens
cccttgagcggccgcccgggcaggtacgcgggggtgtagtcgggtatgagaacgattgcaagcaaaagcagctgagggacgctgtccaaggagtaggctcagtagcacgaactgcaaatacttgagaagggaaaagttcagccttgtgctggaaagtggtttagcatgctggagctggttttctgcttggtagccctacaactttggcccaactacttggcctctgggactcagattcctcctctttaaaatggtgctaataatagcacccaccctctgtgaggaggatgctgtgaggacaaaatgag

SEQ ID NO: 3869 - DNA, 496 bp, Homo sapiens
cccttcgagcggccgcccgggcaggtacagtgcacagatgtttcacataaaatatgtgatcagtcaaagtcagagccacccttagagtcatcttttaacaatcttgaaacaaacagagttattctagagaaaagtagtttggagcatgccactgaaaaaagcacagctaacgatacgtgctcgtcagctgctattcaggaggatatttaccctcaggaaatagatgcatccagcaactatactccccaagatcctgcaagaaatgaaatccacagtgataaggcacctgtcttatacctacatgaccagctgtcagaacttctaaaagagtttccttatggcattgaggctgtgaatacacgtgaaggttctgtgggccagcaaactacataccagacctcagaagatcaaactgctgataaaaccagttctgactccaaagacccagcagatcaaatcaaattacaatattaagctcagagcaaatgaaagaaat

SEQ ID NO: 3870 - DNA, 391 bp, Homo sapiens
  misc_feature 43, 58, 88, 89, 92, 97, 105, 129, 136, 164, 200, 222: n = A,T,C or G
cccttagcgtggtcgcggccgaggtactttttttttttttttntttttttttttgganatgaggacttgccatgttggccaaggcagnnttnaactnttggcctnaagcaattttcccagcttggcctnccaaagngctcaaattacagatgtgagccaccctncccagcctatatgctttatttaaagccctaattgtntcaacagtgaggaatggtaaanaaaattatattagatgcagtaaaaagagaaagttactagtaagcaagagatctgggttcacatcctgactcatctacttactaaatgtataaactcaggaaagttaaatctgaattaatttccttagcaaaataatgcttactttaaaaagttgttctaagggtttaaa

SEQ ID NO: 3871 - DNA, 310 bp, Homo sapiens
cccttagcgtggtcgcggccgaggtacataactatctatatattttttttctttgggggagtgtgtagagctaaaggctggtatatgctgctcctgctccccgaaagtgacattattcccctaagctaatatttcaggctttcaatttattcgtggtttcacctgtttaaacataagtagaaattactttttctctccatatttagatttgatctatctactttaattgctaatagtgtcttagtcatagaatagattagttagaaaaaagtgtttttgacattataaatgattctttcaatttgtgtct

SEQ ID NO: 3872 - DNA, 388 bp, Homo sapiens
ccctttcgagcggccgcccgggcaggtacagctcatgacaggtctggactcaaagatgcataaagtggacaaaatacaggcaagacaaattctgctgtcaagaacctgctgggctcctctcttggggggctaacagcgcagctaggttgacaaggcaggaatttaggcacaagagaattgatagccatctactaaaactagagtttggggtggggactctgtgccatgaacagggcagaaacccaagtcagaaccaaactgatgctggtagatgccttccattcaatctccttcacctcccgattacaagcctgcaatgagacggaccaagaggtggaagatgtaggcacctcggcaccgtcttcattgatttgctccttcatttaga

SEQ ID NO: 3873 - DNA, 481 bp, Homo sapiens
cccttagcgtggtcgcggcccgaggtacatgtttgtttaatgaggggatacatgaatacagaagcagaactaataactgtaatagatttagaggactatctatggactttattttcacaaaattgcacagtcctttgaaaaggaagttgggataatgagaataccttatttcccctcaatgtggagctgggattaaatgtcagcattgctgggattatgcaatacatactaaaaaaaattacccttttgcccctgatctgatattcttgaaatatctggacagaaacaacattttgtataataaaaaaagttttgtctggaaactgcaggttccataccagtagtcactatgtagctaataagatttggaaattggattcttattaatacagttatgctccacataatgacatttcaagtcaacaatagaccacatatctgttggtgggtcctacagattataatggagcttgaaaaattc

SEQ ID NO: 3874 - DNA, 563 bp, Homo sapiens
  misc_feature 426, 508, 556: n = A,T,C or G
ccctttcgagcggccgcccgggcaggtaccattggtagttgtttatgaaattaccagatattcataaatgtgacaaatgaacagcaggattatgaattatcaaaggaaaaagtatttgctgaggtgaaaaaatctgatgtttgaggaagtttttatttttatttatttgttttgtttttttttttttttgaggcagactctctgtcgccaggcttctcctgcctcagcctcacgagtagctgggactacaggcatgcaccaccacgcccagctaatttttgtatttttagcagagacagggaggaagtttttatttttataaacaaaatctgatgttcagaggccccgtttcttacaataaatgtggagtcttagttaagcaggaatttatgaacacccatttcctgactttttgctttaatttanatttttctccatcctgtttctagcacaaaaatttgcctgctgtgttacaaaaataaatttatgttggcctgtgccataaagngatatatttaatatttttattctttggggtttgaacattgtaaagttnctaaaaa

SEQ ID NO: 3875 - DNA, 558 bp, Homo sapiens
  misc_feature 408, 492, 535: n = A,T,C or G
cccttagcgtggtcgcggccgaggtaccgttatctaagacaggacagttactggacttatcttatgacaaaattatatataaattaggcaaaagagctacatataaaccagaaatggaatctagatgtcttattctcagttcttctaccctttcctagcgactccttgaaaaaagagtaagtcaaaatacttttatatttctcgctataaataaaattccctcacctatgtatgagtgaacacaatgcttattactcctaccttaacccattcaaaattgttcatctcagatatctgatttttgctttggaatttagtgaaatcaaataaagtaatatttagaagaagctaatattttagtaagtagaaaacataaaaactgtatttcctatctgggttcatctttgnctctaaaaaaaaaattaaaaagccagaagcaattaataccttttcaattttgattttaaaaaagtagttacagagtcaagcagntatgcccaaatatgccatttgtccttacaggctcatgatatcncagagaaaagggaaagggaaaaa

SEQ ID NO: 3876 - DNA, 545 bp, Homo sapiens
  misc_feature 75, 122, 125, 158, 178, 230, 237, 247, 261, 264, 265, 280,346, 356, 373, 381, 387, 393, 407, 417, 421, 434, 473, 489: n = A,T,C or G
ccctttcgagcggccgcccgggcaggtgcaaaatggctttcttaattttaaacttacacatcacttaaaccattnctaaacaaattgcagttaggttactgacttcactagtgctccagtancanaatctacaataaaaccaaaattcaaaataggcntggtttattcagaacgtttncattttggaaatggcaatatggtaaggtaaaggtcaccataggaaggggaantggacgnttctaccgtnaaccatttactctnatnngtaaaagggaggtgnctttgggttcaatcctattttttcatataaaacccattagtcctttggttctggctaggtatgatngccgtccgcncaaagtatggtttcatntttcaatncccacnttcctnggggaatttttttntgcctaaaanattnaaaaagaggaaanaaaaaaccgtttttttttcccccaattggccaggaaaanaaggaattaaaaaccncttggaaattattccaaaataatttccaaccaaaaattgttcccaaaatttttaaa

SEQ ID NO: 3877 - DNA, 316 bp, Homo sapiens
  misc_feature 11, 33, 39, 56, 78, 97, 173, 176, 203, 251: n = A,T,C or G
atgcatgctcnagccggcccgccagtgtgatgngatatntgcagaattcgcccttncgagcgggcgcccgggcaggtnctttttaattagttaccantactcttaaaaatacagaaaactccttattttgatatatctgaaagttaatagaaggaagtaaaagaacaatgaanatnattatacttgaaatgttttatgattgngtttttctcaaaattatttctcaattttctttatagataacatattcncaataaaatcttgggccaaaagaaaatttgggtttgaagaaaataaaattgatagaacttttgga

SEQ ID NO: 3878 - DNA, 552 bp, Homo sapiens
  misc_feature 414, 426, 444, 521, 545: n = A,T,C or G
ccctttcgagcggccgcccgggcaggtacgcgggtgattttgaatacttctatccattatgtaaacatttatcagtagaaaaaggtggcagctcacacttctttgtatagcattttaaaaagcaaacaaaaatatttgaccatccaaattgtttttttccaaagtccttttaaattcaaaagggaaaataagattattaaaggtttgatgttttaaatcagtgtttcattacaatttaacaaataccattgactgcctactttgtgctaggttcagcaatagtgactgaaatactgtctttgcccatttacagaatttaatacatgatttaatattttaatgataattataatgatttcagatacctctgtttgctccatggatgtgttatttatcattcatgacttgcttctnaaattgagagcncattactgtttgtcatanaacaagtccatataacatgcaaaataatattttttatttaaaatataaggttattccctttcatggatggtttcttntaaagatacctgcaggccttaaanttttttt

SEQ ID NO: 3879 - DNA, 323 bp, Homo sapiens
ccctttgagcggccgcccgggcaggtacttttttcacacagtcaggggatgaggatctgatccgaattacattttgtcgagtcactcattcccacagatttgagtttgaatgcagcttgtggggtactcatgaattagtatagtattcaaagcaaatatatatatatgatagttaaggaacattttgtaatattcatatgacacttaaatctatgtatatgtaggtctagttctaacatgtagcataataccaatataattttgtgcaataacaatttaatttctcttatgctactttgttactaaacttgaacatatatgca

SEQ ID NO: 3880 - DNA, 423 bp, Homo sapiens
ccctttcgagcggccgcccgggcaggtacccggctatcttatcttctttatatagatatctaataagatgtaaaatactgacctgcattatctccatgttaacatttacacttcaaaatctgtaaacggacccacgttcatacgcgtgaacagaaatctttcagcaacaaaagagaaaattgtatttctcgatagaaaggaagtggtcagatcatgccagccaaacaaatctgtcaggctttgaaatatagaaccgttaggtaagatactgagaaaaaggataaagtaagatcagcctaaatgtttcaagtctagttaagttgatttgtatattacttagaaatttcattttcagggaaatagttttcagatttaaataactgtaaagagctgagttattctttgacttggatttaaaaaaaa

SEQ ID NO: 3881 - DNA, 431 bp, Homo sapiens
  misc_feature 394: n = A,T,C or G
ccctttcgagcggcccgcccgggcaggtgcatgggagggcaacctttactgagtagctaatatgtgggggtcactgagctagagatttctcatgttgctgtagtgaatcctcatgagtccaacgagggaggtcctcttctgccatttaagagatggctgcttcttagagagtgtatacgacctgctgaaggtcacacagctgataaagtggtgggccaagattccaacttgggtctctctgaagatctggcaaggaccttcttgccagttccctgtgcaccttcttttcttttcccttctttttctaggttagggaaagagggagaaggaagtcgcttattctacctttcttgatgaaagctggggggaaaggcaacacttaaagcacatggcngaggaactttggggaaccagaaagtttttatttccta

SEQ ID NO: 3882 - DNA, 264 bp, Homo sapiens
  misc_feature 76, 143: n = A,T,C or G
ccctttcgagcggccgcccgggcaggtacatacttttttccctaaccacaacaatagcagctaagaggacgcacanagaaacagaaactggggtataacatgaaaatgtagacagagagtgacaacagtgtctgtcgtctttnacagatttaaggaaaaagaagtgaaatacagtcgtggggctggggatcagttataaggtctcattggaatttaatgaaaaagtataaacccacatacccaaggtgtttaaaaaactccagg

SEQ ID NO: 3883 - DNA, 322 bp, Homo sapiens
  misc_feature 33, 57: n = A,T,C or G
ccctttcgagcggccgcccgggcaggtactttntttttttttttttttttttttagnagtaaaatggaaaacaggccttagagaattgtattcctcaaggctctgactgcctgcttccaagcttttgttaaagaacagaatgtgttgaattcttctcaattggcaggggatcaagcacaatactacataatgaggtagctgagaacagagtttttcctataaacacaaagaacaactgaataagtgcatgtaattcttcatccaattaaacaggaaacatgataaagcaagttagtacctcggcccgcgaccacgctaaggg

SEQ ID NO: 3884 - DNA, 362 bp, Homo sapiens
  misc_feature 1, 4, 9, 17, 46, 64, 87, 88, 89, 124, 136, 148, 149, 156,176, 183, 222, 225, 266, 284, 288, 309, 320, 325, 335: n = A,T,C or G
nccnttacnagttttcntccgggcaggtactggccggaggaacccnaccagaacaagtggactnatgctggaagccattatggaaannntatgacattcctcaaaacattaaaaatagatctgncatatgatccantaatccctactnntgactgnatatctgaaggaaacaaaanttggctnccttggagagatctcaaagagatatctgcacgccgggtncantgcagcattcttcacaataagctaatatatggaaacattcnatatgtgcaccaatgganaaancagataaaagaatatgtgggnatatatcaaanggaanggaaataccnatttaagtaattaaaaaaaagaaggga

SEQ ID NO: 3885 - DNA, 321 bp, Homo sapiens
  misc_feature 252, 255, 263: n = A,T,C or G
cccttagcgtgatcgcggccgaggtaccttagcaaacaagtggaaggatgggaaaagatgaggccagacatgtaggaggggccagatcatctgggtcttatggccattttatggaattgggtgtgacacgggggtgacatcagagagtatcaagcagaacactaatatcacctaatttatgtttttaaaacgtgagccaccatgcccggcctgagactctgtcttaaagaaaaaaaaaaaaaaaaaaaaaangtncctttcanaacctgcaggagcagatcaatcccctcttggtaacacaccagagcctgcggataccgc

SEQ ID NO: 3886 - DNA, 619 bp, Homo sapiens
  misc_feature 530, 535, 540: n = A,T,C or G
cccttagcgtggtcgcggccgaggtacatatagaatagtataaatacaataaatgtttgaattatcgtataactagagtcttatttttaagttagtatcctgtattaagaactgggttgatcaaatggttctttctttgcacatatcaaggctttcgactattcccaatcaggtcttcccaaatttgggcatattcctgcctctgcctaccctgttctaatttggcactctaaagatagttcataaaaagcaagccaaagatagaaaagagagctaaggctacaggaggaatttactctttaacatttgggggaaggaaaatgaggcttgtctacagcagggactggctgtcttccagaaatggtttcccaaggtgttccctacctctctttttcttggatatctttttgcattatagatagccttgggaaggggtgtcacctttatcctatcagttccacctaatcaactgtagtcatctgagaccagaattattattgatagaaggggcctgggaaagggagaaaaangaccnagganaagaggaaggtttacttaattgcagaggagaaaagcccaaagaaccgttgccccttgggcagtcttaagctatttaaaa

SEQ ID NO: 3887 - DNA, 329 bp, Homo sapiens
cccttagcgtggtcgcggccgaggtacctgaaaagaatatcaacctgaaaagaatatcaactcacccagaaattagttctttgaaaaaaagaaattaagttgtgaatttctaaagaccttgaaataagtgtttcaaatttaaagaacaaagaatgatgtgaaaatgagattatgattcctactacatgaattaacgtttcgagattgctgtttattacttcccagagtatctttaacagtattctctgaagcagttccaatctagttggagaattaacagcaattgatttaactatctcatttttattaactgtaatttacattaaaaa

SEQ ID NO: 3888 - DNA, 355 bp, Homo sapiens
  misc_feature 31, 33, 101, 113, 118, 123, 127, 167, 242, 262, 314: n = A,T,C or G
cccttcgagcggccgcccgggcaggtacttncntttttttttttttttttgtgccagaatcaaactatttaattaaatgtttaaaataatacaataatcanttcgatttattncatcncaacnaatntcttatttaccttgtggacatattttaaagattaaatganataaaaaagctctatgccaattaagggcagttttatataaaacagaattaaagttttcacaaatgtcagcattanaagaacgctgaatgaacatncaaccaaacccttttattttatcaatggagaaataaagctacctggagacanattttcatcaaatgatcatgttcccattttagatatttcat

SEQ ID NO: 3889 - DNA, 323 bp, Homo sapiens
cccttagcgtggtcgcggccgaggtacaaaatcaatggtcagtctgtaaagtccagcacctttcagagtaaaccatctcactctgattcacttaaacaatttagatacactagtaggaaggtgaagtcccttttttggagggggtggaataagcaaatggatggatacatcaaaccaaaagcagaagaaacacctacattttttttacacggtgaaatgaatagttaacaacccagttatgtcttttgccccctcccggtggtttaaaaagcgtaaagagcgcagtgggaatattttggttttgaagccccttgcacagggaa

SEQ ID NO: 3890 - DNA, 466 bp, Homo sapiens
ccctttcgagcggccgcccgggcaggtaccagccagttttgagatatacctggtttgctttaatgttattaaattgttttggtgagttttgcaaatggacaattgaactttgttctgccaaattcttttttattgcatttaaacttcagggttttttatttccggcttattatgaatggattagtcattttgtgaatataactcttcattgagtttagggagaaataggacgttagatccgaagatgctatttgtttaatcaccagaatggacaaaattatacttcatttactatcagggaggcatggggagaatagaggtctaggggtgccgtcttgtggctcttactgtttttgtgtatctgggtttttttttttgagagggcttcccattatgttgcccgtgctggaccccaactcctgatttactggctctagagatcttctcgcctcagtctcccaaggga

SEQ ID NO: 3891 - DNA, 330 bp, Homo sapiens
ccctttcgagcggccgcccgggcaggtacataaaagaaagatgcacattctaaccctgtatcttcttgaataccttttctagttcacatattattaaagcaagaaacatgtaagccctctcttcctagtccttaggttggcaatactgtggtgtcagtaatttataacatgctttctcatatataataagaagcactggactaaagagtctgctggtttgactcttcacgcaagtcaattcaaattaagtcactgtgcctctctgagcctcagtctccccaggtgtaaaaagggaaaatatggtcaactcttctgcgtccagtgttgtaa

SEQ ID NO: 3892 - DNA, 371 bp, Homo sapiens
  misc_feature 28, 32, 36, 41, 42, 43, 45, 46, 166, 216, 259, 266, 292,316, 337: n = A,T,C or G
ccctttcgagcggcccgcccgggcaggnactntatnttttnnntnngttttatttttccttcttgcttaatctccctcagtcacacagacctctttgctctgtctctctgtatgctgagcacaagcccaccctaggccctttgcacatgctgtcggctcagcctgnagtatttctcctccagttaactccttggctaactctttcctttccatcanatgtcttcccaaatgttctcttatcagataagccttctctggngaccctntataaaatagtatctcggccaggcgnggtggttcacacctgtaaccccancaccttgggattgcaggcgtnaatcagcgcgcttggcccctgtatgcattattta

SEQ ID NO: 3893 - DNA, 318 bp, Homo sapiens
  misc_feature 178, 311: n = A,T,C or G
ccctttcgagcggccgcccgggcaggtacaaatatttggcaaaggaatgaaaaaagttagaaagttgtctgtctgtgggctaggctctgcctgcaagatacttacaatctaggtcagaggttcctaaatccttctcaatgctgtttgcactggccctgaggaaagtgtgaaaatgaanactattgtagagtcttacatgaagctaaatttgttcatttatatcacttctcttttattatgagattatgtcctctgcagttttttggtattaaaatgtcttttatgaaaggatagtaagagttagatagtangtctttt

SEQ ID NO: 3894 - DNA, 576 bp, Homo sapiens
  misc_feature 515, 557: n = A,T,C or G
cccttagcgtggtcgcggccgaggtaccatacagaataaaaatacatttgagaaaaactggaataaatctccagcaatcaaaccaattacatttaatttttcagaaaacagtaaattttaaaacatgccttaaaatattaatggcataaatatatcttcaaacgtgtgcttacaaattacaaaataagtggcaaaattgtcaaaagtaaagttttacttgttattaaattgtgatcaacattaaaacaaatacaaacacacaatgtgagaaagcgaggacagcagatccatagcaagtgagggggtgtttctgtcatccctatcccagggtaaatatcaagaagcaatcatttcatgcctatgggctagtgaagaaaaaaaaaatcaatcatcgcactcttcctccctaggccaagataaaccctcggaatcatttaaaaaaaaaaaaaaatacttcaggaggccgggcgtggcagttcgcgcctgtaatcccagcactttgggaggccgaggcnggtggatcacctgaggtcaggagttcaagaccattccgtctnttccaaaacaaaaaaaaaa

SEQ ID NO: 3895 - DNA, 349 bp, Homo sapiens
ccctttcgagcggccgcccgggcaggtaccacaaagacagaagcttcacaggaagagcggtctgattcaagcggcctcacatctctcaagaaatcaccaaaggtctcatccaaggacactcgggaaatcaaaacggatttctcactttctattagtaattcgtcagacgtgagtgctaaagatgagcatgctgaagacaatgagaagcgtttggcagccttggaagcgaggcaaaaagcaaaagaagtgcagaagaagctggtgcataatgctctggcaaatttggatggtcatccagaggataagccaaccgcacatcatcttcggttctgacagtggaatgtgaaac

SEQ ID NO: 3896 - DNA, 351 bp, Homo sapiens
  misc_feature 15, 26, 29, 76, 79, 84, 101, 126, 133, 159, 167, 231, 290: n = A,T,C or G
cccttagcgtggtcncggccgacgtnccnctaacctcattttgcatgtgagaaaaccaaggctctaggaggttaancanctttnccagggtcacacagttngcaactgggaaaggaagaaactcangcccggncaggtctgactccaagacccatgctnctcacttnatatcaccccttgtccctcctcttcatcaaccttgccctccatttccactccaccaatcttggntcaaggtgagaaactgggatgggaatgagaggatgaagaaaactaggtaagatgcaggnacaggttgggaaaaaatagtaatgcatacagcagatgcagggggaagttgggaaaaaaata

SEQ ID NO: 3897 - DNA, 404 bp, Homo sapiens
ccctttcagcggccgcccgggcaggtacttcttaatgctcttgctacactatcaccaacaacaatcacactggctaccatgtctttggacctactgagtgccaggtgctgtcctaggtgtcttgcagacattaacatatgtagtttaacgttcagagcaatattccatggcaagttatattatccctattttaagatggcaaaccatgtagcatgtgtacttggtcatgtttcatactgttttcagaggatggctaggaaaccagtgtttattctacaaacttgatcctgcttggtctcaaaatgatttttcagttatattaaagtggcagccagttcattgactaccatggaattaaaataagagaaagtggcaagcctattttcatcattctgatgtaaagc

SEQ ID NO: 3898 - DNA, 449 bp, Homo sapiens
  misc_feature 368, 416: n = A,T,C or G
gatatctgcagaattcgcccttagcgtggtcgcggccgaggtacttcctctcttttatgcttgaagcagcctcacttcggttctagtttttgaaatttgattaagtcttattcattttcaccatgctcttaatgattttattgattttagttatattccttattcacgttcatttctttcattcagaaagtcctgttatcctgaataaatccagtctataattgtggtcattcagttctcttttgctagatcttctttacctctactctgttcatcacaggggagtcccgcactgactccaaatccatgaatgaaagagatgtccatacaccatagaaattgtctacacactgttatttcaaatagangaagcactcacaaatccatcaccatttcacaacaactactttcattgnctacaagcacttttaaggggctggttggttggt

SEQ ID NO: 3899 - DNA, 469 bp, Homo sapiens
  misc_feature 63, 64, 65, 66, 75, 79, 84, 85, 86, 87, 88, 89, 90, 92, 97,98, 99, 101, 103, 107, 113, 114, 120, 121, 126, 134, 141,143, 148, 150, 157, 160, 164, 166, 168, 176, 177, 180, 182,183, 193, 205, 206, 210, 215, 225, 228, 230, 231, 236: n = A,T,C or G
  misc_feature 237, 247, 248, 260, 262, 265, 356, 372, 431: n = A,T,C or G
ccctttcgagcggccgcccgggcaggtacttttttttttttttttttttttttttttccaaannnnaaaaaaaangggnaaaannnnnnnanttccnnngnangggnaaaaanngggggnnaaaangggggggntttattnanacccnanctcaaanaantttntncngttaaaannttngnnaataaagcantttggggcgganntttncgacnttctcaaaanaanannccaannggggttaaanngcattttaaacntnggngaagactaaattaatttttttaactgacatttatgtttcatttgacaaccttttgctgtatattttatgtggacttttaggtattgtaagngattcctttaatgaanaaataaaataattgtcatttaaaaatgcatattattattaccttatgctataaaaatangttttaaaatagagtatgtttattaagatttaaaaata

SEQ ID NO: 3900 - DNA, 726 bp, Homo sapiens
  misc_feature 458, 531, 551, 558, 589, 612, 623, 649, 669, 681, 704, 713,717: n = A,T,C or G
cccttagcggccgcccgggcaggtacttgaagatagggcctatgaaaagataataaaggttacatgaagtcctaagagtatggcttttacccaacagggctagtgtaaagctcttatccaacagggctagtgtaaggctcctttccaacagggctagtgtaaggctcttatccaacagggctagtgtagggctcttatccaacaggactagtgtagggctcttatccaacagggctagtgtagggctcttatccaacagggctagtgtagggctcttatccaacagggctagtgtaggggctcttatccaacagggctagtgtaaggctcttatccaatagggttagtgtaggggctcttatccaacagggctagtgtaaggctcttatccaacagggttaggggtagggctcttatccaacagggctagtgtagggctcttatccaacaagggctantgtagggctctttatccaacaaggctagtgtaaaggctttttatccaataaggggttcgtggtaaaggttctnaatcccaataagggctagtngtttttnccaagaaggaagaagaccaccagagctcttnttttgccatgtggaggaccccancaaggaaggcnagttattctaacaaacccaggaaagnaactcctttaattggaactngcattggccaancacccctgatctttggacttttnaaaccctcncaanttttgaaaa

SEQ ID NO: 3901 - DNA, 438 bp, Homo sapiens
  misc_feature 332: n = A,T,C or G
ccctttcgagcggccgcccgggcaggtacagacatggtttcatcattttggccaggctggtatcgaactcctgacctcaagtgatctgcccaccttggccttccaaagtgccaggattacaggtgtaagccaccatgctgggccagccactgcgcccagccatctttccttttcttttccttttggttaaaatcctagagaaaaacttaggaaaaactctactggatgctggccaagatttgcatttctaacaagctcccaggtgaagctgatgctgctggtccggagaccacacttagagaaacgccaggttatgagttcgtgggctttanaattagacagacttgggtcggaaccttgatttttccatttgctttatgtgcaagtcacagaggcagagctacttatctaaaaaagagaatatcactattgaataaa

SEQ ID NO: 3902 - DNA, 413 bp, Homo sapiens
  misc_feature 35, 36, 37, 38, 39, 44, 58, 63, 76, 267, 328, 404: n = A,T,C or G
ccctttcgagcggccgcccgggcaggtacttggtnnnnnttttntttttttttactgntttgnacctatttttaantgccataaaatctgctgtcattaaacttggcaggctggccaagattgggccagggcactttctgagttggttagtgcataatagcacaataggaaccagacccaaatgctttggggggatggagtggggggctggctcttccttgaggagaacggcttggaaaaaatctgcagctaactgaaactgctcanaaaaccaccctgtctagaggctgaagggaagccctgcttacctcagctttttagttctggnaagctatggtctgagaaggcagaggggaggaattgggctgagctgtgaaggtaagggggaagaaaaaaatcaaagnagaatttgg

SEQ ID NO: 3903 - DNA, 382 bp, Homo sapiens
gatatctgcagaattcgcccttagcggccgcccgggcaggtacagtgtctcatctaaactaggcacctttgtgtagtatctcatctaattctaacactgtttgaggtaagacttgtctatctccatttggggttgagaaaactgaggcccagacagttcaaataaattgccaagtccatataactaagtgcagatattcaaatccaggaataagtgatccaaaagccactagcctatgttacattgaactatgttggtctgttttcttattgctcttctctactcataagtgggaatgctgagaggcaaaatcatcactcattatccatatctcagtattttctgcagtccctgatgcaaaattaggcatggagtaaatatt

SEQ ID NO: 3904 - DNA, 305 bp, Homo sapiens
  misc_feature 280, 300: n = A,T,C or G
ccctttcgagcggccgcccgggcaggtactttccgcatactgttgcccgtatgactttcctgtcccatcggaaaccagagtttccccaggtgagcccttcctatctgcggttacatgatttagccaattttctcttctcttcctccatacgggaatggaaatgtattactcagtagatcaagttctttctcaggctggtaacattacagaatccctgtcgaagtgcaagttgggctggtggaaatcagatttccacatccttttgtaagctttgtttgtnaaggtaaatcccatacattntaaaa

SEQ ID NO: 3905 - DNA, 344 bp, Homo sapiens
  misc_feature 84, 106, 135, 146, 156, 219, 226, 239, 260, 283, 326: n = A,T,C or G
cccttagcgtggtcgcggccgaggtacgggaaggcatagtggcacagggaaggaatggcgaactgagaacacttatcagataantgactggaagtgccaatcatantgaaggcagctggaaaacaaacacaattnttaactcccanaggccagggnttatcttctttggttatctagtcaacggatatcagatataaacacacattgcaaggaatccgncgtgctnaaacagacaaggnccagagaaggagattcatttnagatgtttaagcagcttactttnactggcttgaaaaaaaccattttgactacaaagttaaataaancaggattaaattacatat

SEQ ID NO: 3906 - DNA, 449 bp, Homo sapiens
  misc_feature 357, 422, 428, 429, 436, 438, 439: n = A,T,C or G
cccttagcgtggtcgcggccgaggtactgctaacaagtattcattaagtgtatgatttcatttttaatgacagttgccacagatctgatgttgtgtctacttgttcactccagcccctgccccctacaaagatataatttgtctttattcatattgttaaaatgggtttagtttctctagggaaaattgttatctcagaatagggacctggaaagtgaacgatattttatactctacctgtgttcatattattttgtaaccaatgttttaaagatagagaagcagaggcggatagaaccggataaagcagaagcgggcccagctgcaagaacttctcctacaggtaaagataccaanatgttttcattaccttccctgtttctccacttggctgcctttgggacccagggggttttaaaatngggggnncctgtangnngggggggggg

SEQ ID NO: 3907 - DNA, 521 bp, Homo sapiens
ccctttcgagcggccgcccgggcaggtacaaaagcagaagttctcatgttaatataagacaaacttgtatttaaggcaaaaagcattaaattggagagagaaagttactttttatcattaaaatttataacaaaatataatcgtcccttttttgcacattaatgctttcatttattacataaatattgagtgtctaccacgtgtcaggcacttttctgttactggaaaatttgaaaagtgagtcaatatttctgccatcaaaaagcttctagtggagatgcagaaagacacatgaaattaacaattatgaatgctgtaggaagatgtaaagtagggtgatataatacaagcatctatcagacaagggatttctgggatgcattattaaccatgcacaaaacaggaagaaagtgggactatccagcagagatgctctaatatgtgaatgagcttgtcctgtctgaggaagaaagagatgggcgagtgtagttaagtgtgctgggaaaaggggaaatgggtca

SEQ ID NO: 3908 - DNA, 512 bp, Homo sapiens
  misc_feature 425, 449, 455: n = A,T,C or G
ccctttcgagcggccgcccgggcaggtacttttcattagtctgttgtcttatctaattttttcttctgtaacagaatactacaacacatctttgcaggattctttgcaaattctgccattcctggatctccacaccctttttcctggtaagtaactaattgttttctatcttactctattggagtgacatattttaggtgctgtcatttctgtgcagtagagaaaaagagctgcataggccgggtgcggtggctcatgcctctaatcccagcactttgggaggccgaggctggcggatcacgaggtcaggagatcgaggccatcctggctaacatggtgaaaccccgtctctactaaaaatataaaaaattagccaggcgtggtggcatgcttctgtagtcccagctactcggaggctgaggcangaaaaaatcacttgaacccgggangtggangttgcaatgagccgagatcgcgccattgtaccttcggccgcgaccacctaagggcga

SEQ ID NO: 3909 - DNA, 418 bp, Homo sapiens
  misc_feature 226: n = A,T,C or G
ggtacaagaccagaaatttgaactacactatgctgaagagttggaattaaatctattaatgaggatgttattaaaatgacatttgtggggtatttttgtgagtttttaaattgaataatataaactgggagttttacataatttatagatttgtagaaatatgtttaagtatacagaaatttcattgagtcattgaattttagggttaaagggacatctgatctancctttttattttaacagatcaagacactgcagctcaggggttcagctatttacatgaggtcatacagtaagcattaatatttgtagtctcttaatggagtatcatcttattgtagattgaaacatgacatttaatctgctatcaagatactgggtttgtaggggggatgaggagttgtcagaataacaaaat

SEQ ID NO: 3910 - DNA, 524 bp, Homo sapiens
cccttagcggccgcccgggcaggtacttcttattagtgaataatgattctctagtcataataacttagacattacatataaattttaagttaaaactactataacaatattgggaaaaatgaaaaaggggagtagatagtgtaaaagggccatatccttctctaccacagcaggaagtgaacagataacgtctcaaatcaaaaaactgtagtataggctttccaccccagctctgccccgcccatatagatacctattacagaaggagggaaatagcttttaaaaaaggagagttaaatgaaattgcctgtaggaagtaggaggaatacttccgattttgtcataagcattgtaataccattttactttttcaaccatgtgtatgtattaatttgattttaaaaatttaaaacagaaaatgtagaaaaattttttgtgactgggaataaatataagatctcaaatcacaagcataaggtgaaaatattcgtgggctttatatcaaaattaaaaatgcttttaca

SEQ ID NO: 3911 - DNA, 319 bp, Homo sapiens
cccttagcgtggtcgcggccgaggtactgggattagaggcgtgagtgaccgcacccggctggactggtaaactttcctaggaaaagatcttcctagagttggttttcccctatccaaacctatcttttccatttcttccattagacctttgctttgatgatgatgatgatgatgatgacgaccaggatgcttttgcatttactgagtttctactttgtgctcagaagtgtgttaaggtttttgcacttaataacataaactttcatttaatattcatgacaaccctacagagtcagcatcctattgtctccatattaca

SEQ ID NO: 3912 - DNA, 299 bp, Homo sapiens
ccctttcgagcggccgcccgggcaggtacgcggggcatgagccatcgcacccagtctccgaattcttttatcctctgagagcattggtcacactctccccctccatccttgggggtcctattccaaaccccctgccattgttctctcttggatggcgttcctcctggaccacaggtgcctcaaactcagcatccaaggccaacctcagcatcggcccccaggaaagactggccctctagcttctaccctttgtccctgtagcctatacagtttagaatatttatttgttaattttatta

SEQ ID NO: 3913 - DNA, 299 bp, Homo sapiens
  misc_feature 50, 52, 114, 129, 132, 134, 135, 141, 142, 144, 145, 146,147, 150, 151, 159, 160, 161, 162, 171, 175, 184, 189, 190,191, 193, 196, 200, 201, 202, 205, 206, 213, 217, 219, 220,226, 235, 246, 256, 257, 265, 266, 267, 268, 273, 274: n = A,T,C or G
  misc_feature 275, 276, 277, 278: n = A,T,C or G
cccttagcgtggtcgcggccgaggtacttttttttttttttttttttttncnggtttttttttttttttttttttttttttttttttttttttttttttccttttttttttttnttttttttttttttntgngnnggaaannannnnccnntttttttnnnnaaaaaaaanaggngtccttttnccttnnngnggngggnnnacnnctttttntttnanngggggnaaaaaaaantttttttttanaaaaaaaaanngggggggnnnnaaaannnnnnggaaaaaaaaaaaaatttttt

SEQ ID NO: 3914 - DNA, 458 bp, Homo sapiens
  misc_feature 154, 371, 402: n = A,T,C or G
cccttagcgtggtcgcggccgaggtacacatgtatctagtattgtgctagcaataccacagtaaggaaaccccagtttcctttctatataaaatgaaaattttagttcacccatccagctgctagggcgttttataattagggccaggaagaanaactggattaggctaggaagtgaatttgtctcaggttagagaaataagagtttaattgttttatattttaaatggctttctctttcccaaggtgctgatagcttattggatataaagttctgaagctgaccaacaaagatcttctctctctattgcaagcaaaagttgcttcccttaccttacacaataaggagttacaagataaattacaggccanatcacccaaggaggcgggaagcagacctaanctttgactcataccattccacccaaactgacttgggcccatccctgggaaaaacct

SEQ ID NO: 3915 - DNA, 491 bp, Homo sapiens
ccctttcgagcggccgcccgggcaggtactatactcattattgggtgatgggatcattcataccctaaacctcagcatcacccaatatgccaatgtaacaaatctgcacatctaccccaaatctaaaataaaagttgaaattataaaaaaagactagccttaaaaattacttccaataaatacatacaaatatttcatatgtatgacagacagaaatatctgctttattatagataagaataatgtttgttgcttaatacgacagaagaatgtgtaagtgggtaacacagtgatctatctactataattttatatgtcatatgtcatatgtttacataacaccataatgatgttactaagattatacccaaaaaagtattctcatatacatgcactatcctatatttgaaaatactttttttaatcaaagttttcatttttcagtttcacacagcattgcttaattatctatttcaaatgtaaaactttta

SEQ ID NO: 3916 - DNA, 588 bp, Homo sapiens
  misc_feature 378, 423, 439, 507, 532, 565, 566: n = A,T,C or G
ccctttcgagcggccgcccgggcaggtactatgcacttcccatgctcctagggttaggaatagtttcaaacatgattggcagacataacaacggcaaatactcggactggggcataggactccagagtaggaaaaagacaaaagatttggcagcctgacacaggcaacctacccctctctctccagcctctttatgaaactgtttgtttgccagtcctgccctaaggcagaagatgaattgaagatgctgtgcatgtttcctaagtccttgagcaatcatggtggtgacaattgccacaagggatatgaggccagtgccaccagagggtggtgccaagtgccacatcccttccgatccattcccctctgcattcttcnggagcaccccagtttgcctttgatgtgtcccctgtgtattgttanctgaacttttgatganccaaattttctgagcgaaacacttccaaaagataggaaaacttgccgcctctttttttttggcccttnatcaactcaataacttaaaaaaatncttggaaaatatggacatgtgaaatgaacattnnttcttttttctttttttttttt

SEQ ID NO: 3917 - DNA, 342 bp, Homo sapiens
ccctttcgagcggccgcccgggcaggtacgcggggtatgccattttctctacagtgagggtctgcaggctcatatcattgtggctactagctagactgaagtccatgaagttgataaattgcctattttatcagacatgataatctgccattaattaacaaaggaaatgcaggttacagaaatgatattatgctgtttcgtggcttcaaatgaggttacacagataatgctttcaataggatgtgtgtttagcttttctattaacatgggttattttgttttgaaagatggaaaaacagggcccagccctactccctttgattcgtctctttaaaaatgact

SEQ ID NO: 3918 - DNA, 545 bp, Homo sapiens
  misc_feature 441, 499: n = A,T,C or G
cccttagcgtggtcgcggccgaggtacgcgggtcactcgcattactgcctgagttccagctcctgtcagatcagtggcattggattctcacagaagcataaactctattgtgaactacacatgtgagggatctaggttgcacactccttattagaatctaatggctgatgatctgtcactgtctccctctctgccctcatggagcttgtattctagctgggggagagaacaagcaagtaaactatatgtatgtcaaatgattaaaaggggaataggaagtgctggaggtgactgcagttacaaattgttgatccaggaaggtctcactgtgaaagtaacattttaatagagacctgaggaagggagggggctgaggttatgtagataactgggagaagagctgtccaggcaatgcagtgtggctggaggggcatgtgccanaggaagagattaggttggagaggtaagaaggttttgcaggatgtagggggccttgaanactttttgtaaggagttttggctttattttgagtaatttgggggaa

SEQ ID NO: 3919 - DNA, 423 bp, Homo sapiens
ccctttcgagcggccgcccgggcaggtacctgaacaaaacctaccatcaactagatttactaagtgggtaaagtcattgtagatcatctagcaccagatatgttagcagactgcagatagctgaactaatccagaccagaagagctactcactgggacctcaaaatgctgagacacaaaagatgcatattgttttaaaccattagcttttggggtagtttgttatgcagcaaaagttaaatggcatatttcttagcctcaatttcctcaactgcaaaatagagttgataactaccttgcagtgttactgtggggattataaataacatgtataactggctggctcacataaagtctccaacaaatgaaagctatattattcgttagttatcagtctgaatgagcttctaaatctcttaatgtt

SEQ ID NO: 3920 - DNA, 456 bp, Homo sapiens
cccttagcgtggtcgcggccgaggtacctttttttttcttttttttttttttcttcttcctcctcttcatcctcttcctcttcttcctcctcttcttcctcctcctcgtcctcctcctcctcttcttcttcactgctctctttagacagctccagcagctgccctctctccgatctgggccgtctctcctacctggcatattggaagagcgtcatcttggagtatctctaccaccaccatgagaggcacatcagcatcaaggcaattagcaagagcgacgggcatgtgcccacatgacattgccaccactctgcagcacctccacatgatcgacaagagagatggcagatttgtcatcattagacgggaaaagttgatattgagccacatggaaaagctgaaaacctgttccagagccaatgaacttgatccagacagtctgaggtggaccccaat

SEQ ID NO: 3921 - DNA, 413 bp, Homo sapiens
ccctttcgagcggccgcccgggcaggtacacatctgtgtctaaatttcctcttctgtaaggacaccaggcctattagattcgggccacccagatccctcattctaacgtttcctctttcaagcccttatctctaaatacagtcctgtttctgagagactagaggttgggacttaaacacatgatttttgggaggataaactcagctcataacacgactcggtaaagattcatggaatggattaattaacaaagtgtgtgctctgtttagattaggtttggcttttgctttcaaggcatgggtttagccagacagtcctttgccagaactcactgctgttccccctttgcttctgggcaccactgctgcttcgacccctcagcatggaaagttcctgggacttcatggatgttt

SEQ ID NO: 3922 - DNA, 716 bp, Homo sapiens
  misc_feature 397, 550, 559, 574, 610, 634, 641, 673, 675, 709: n = A,T,C or G
ccctttcgagcggcccgcccgggcaggtaccctacaaaccagaaaacaagtttttaaggaagatgctgggcatgctgatagcttttctggtctcctaaggaagagtttttaaaactaaatccaaggaagaaaaatgtaacaacacgtggaagtgaacactggatgaataagcttgtttcccaaattagaatcctaacgtccatatttagcttcatgtattcccctttggcttcacagttcaactccttttattttgagacggggtctcgctgtgtcgccccagctggagtgtaatggcgtgaactcggctcactgcaatctccgctcccaagttccagcaattctgtcttagctttccaagtagctgggattacaggcattgcaccggttcttccangctaatttttgtattttttagtaaaagaccggggtttctccatggttggtcaggctggtctcgaactccccgaccctcaggtgaccccaattaccttgggcctcccaaaagtgctgtgattacaaggcattaaccaccctgccctgggccatntggcaagcntttaactggctgggnaatgtcagttcaagtttcttcattctaaaaaataanggatcaatggtctgggtaacatancttggcnaaaatttttttaagtcttccaaagaaatcacngntttaataattgtttagccttttccacttttcccnaatttcc

SEQ ID NO: 3923 - DNA, 637 bp, Homo sapiens
  misc_feature 236, 295, 397, 498, 522, 544, 554, 597, 604, 610: n = A,T,C or G
ccctttcgagcggccgcccgggcaggtacgcgggctggaaaccagctgtctttgtgtcttatgaaacctcaagtcaaaatgagaccgcatttaattattctgctttgctctttttttggggtgggggggagatagagtttcactctgtcacccaggctggagtgcagtggcacaatctttgctcactgtaacctctgcctcttgggttcaagtgattctcgtgccccagcctcccnagtagctgggactacaggcacgtgccaccacgcccagctaatttttatatttttagtanagacggggttttgctgtgttggccaggctggtctcaaactcctgacctcaagtaatccacctggcctgctcttttcatgtcttaacatggcatgtcttttantttcattattttcctactccttgtatgtcaagaaattacattttgcatgtcttatggagatgctgttaattgcttcagtggagtgcttttctaatctgcanaccatttacatttcctgtttgcancatgctgtgtgcaaacactcantaatttggantattcaattatttgttagggctcttcctatttccaaatgtgcngaattgnctattngatgggattttcaaatcttttcatggg

SEQ ID NO: 3924 - DNA, 296 bp, Homo sapiens
  misc_feature 275, 284, 291: n = A,T,C or G
cccttagcgtggtcgcggccgaggtacatacctgtatatgcatatatatatgtgtgtatatatataatagaaggtatgtctcatgcaatatttgggatatacttgtattgaaaaattacttgtttattgaagaatcaaatttgactgggccctgtatttttatttgctaatttggcaacttaggggttctggttaaaaaacatttcttacattgcatagataataaacagcctaaagaagtttgggaatggttacacaggggcccttcatgcttncatgtcagngcctaantacct

SEQ ID NO: 3925 - DNA, 636 bp, Homo sapiens
  misc_feature 64, 79, 298, 334, 403, 415, 517, 583, 602, 635: n = A,T,C or G
catgctcgagcggcgcgacaggagtgatggataatctgcacaattcgccctttcgagcggccgnccgggcaggtacgcnaggctctcggagctgcctctcctctgaccctcaggtcctcaccgagtttgctccaggagtatattgaaaacatacccagtgctctctcaagcacccactgcttagagggcccagatttcttttccttctttcccttgcagagctggagactgcatcgggcatctggtgtttaaactaaacaggaaaactgactaaaggtccacagtgctcattgtgtanactagctgccctccgatgggtgctctgattatcagnggttccagtgcagggcctgtcactaagcaggcctcacttcctccttgggggctttcccatgggaggtgnggctttttactntacatggaaatgactctctgcagccacagaacacagtcattttctgaattatcccagtctctcatgcgccctggattcctccagatgccttatatctcttgngcaaagttggtctaaaatttggttcccaagcttccaagcctttgccttttggccttcctggaaagnatttttgttgatgagtcgnctgcattattctctaaaatgatttgctttttgnt

SEQ ID NO: 3926 - DNA, 439 bp, Homo sapiens
ccctttcgagcggccgcccgggcaggtacaacctcctcctagcgtttctggttaactatgtgaacacacaggcagacagatcaagccgctatgtgagggacaaataaacatactgaagacctaaaaatgtgaagtcagctgagcctcaattcaatccaaacctttgggggcttatgcaccattagtctgtatcatggcctccagtcatttgtccctctagaacaggaactctgaaaggcctgacaaagaagaatggacaatcacagatgctggttttgccttctcattccctgcaagtctactggatgcaggaagggggtggggggttcaagctgcctgcttaggagcttaaacatgacaaggattttctaatgaaaagctaacccagagattcctctttttcctatgataccacagcatccatcattcaaaaaccgaa

SEQ ID NO: 3927 - DNA, 351 bp, Homo sapiens
  misc_feature 72, 109: n = A,T,C or G
ccctttcgagcggccgcccgggcaggtaccatttacgatttataaatcagccacagagtcctaggcacccanaatggacctccccttccttgtctacctaatgcctgtntagctccaaaatcacctcttggaaacactgccttattcctccccctcccaggagaggttgagtgccacactcacctcttttagattacttcagtggctatactgcaatcattgacttgtgtctgctccacttgactataagcaaattgaaggcagggtttgtgccttcataatctctgaatgatctgaagatggaaataactgctttgtgctttcagggagctcatataccttagcttcccg

SEQ ID NO: 3928 - DNA, 265 bp, Homo sapiens
actgtgctttacagagtaagcatttctccaacaaagagaagtaaaatgtttataacaccacattgtatattataaatgtttagtattattttatacagcattttagctcagtaatttgtattttgaatggataaaaatgaattaagacactgacgcacacacacaccttataaaaaataattttaaaaaattgtagaaatggcatgttatcttttctttatatattttaaagatatgccttgttcttagcagttttttttttctg

SEQ ID NO: 3929 - DNA, 323 bp, Homo sapiens
ggatatctgcagaattcgccctttcgagcggccgcccgggcaggtactcaagttataaataagtaatttctttcatttcttattatgaagtaaaccactatatagtaatatacttttaagcatttataaaatttgatatgttctgataggactagaaaactgtgaatcttaataatttaaataaaaccttaaagtttataacttattttaaatagcaaacagtttgtggctttgatttgttacgggccaatggacagtcctatgtctgtgatgtcaatggcttcagttttgtgaaaaattccatgaagtattatgatgactgt

SEQ ID NO: 3930 - DNA, 352 bp, Homo sapiens
  misc_feature 29, 31, 33, 35, 36, 38, 39, 42, 43, 44, 48, 50, 51, 52, 55,59, 62, 63, 65, 66, 68, 70, 75, 84, 85, 95, 101, 138, 147,207, 208, 275, 308: n = A,T,C or G
cccttagcgtggtcgcggccgaggtactntntntnntnnttnnntgtngnnngcntatnttnncnnantnagccnctgggactnngtttgtgganccccancgacactttagggacctatggggccttcgtggcatcnctgagctgngtgctggggaggaggttgatgtaatggtgactcttttctgatcagcaccttggccgtganncccaaggtcccagccaaaccaaagggccagttgtttcaggtttaaacagacatgtctttagtctaanaaaattagttaactgccagtaaagttatttgtnagctttgatgaaaagctattgtttggtatctttccctaatcatc

SEQ ID NO: 3931 - DNA, 447 bp, Homo sapiens
  misc_feature 436: n = A,T,C or G
cccttagcgtggtcgcggccgaggtacaaagaaatgatgcattacctgaagaacattatgatagctgtggtcgagtctatgattaacaagtttgaagaagatgagacacgaaatcaagaaaggcagaaaaaatccaaaaggagaaaagccatagttaccgcacagacaattgctctgatagtgattcatcattgaatcaggtgtgttgttcagttttgcatttatgtcttgaaatgctgtttaataataattagcttcaataaattatttcttagccatatttttcctgccttcttaagattcaggagaaaaataataaaactaaataacctaatattaaatatttagtccatgaaataacatcttatagaattatatttggtgagtagctacgttatatctgagataattcttggtgatatgagaaattaatggntgttagaatta

SEQ ID NO: 3932 - DNA, 414 bp, Homo sapiens
  misc_feature 141: n = A,T,C or G
cccttgagcggccgcccgggcaggtactagagtggaaatcatccaatgttggcaaaatacacactccagcctttttctttttgtttcttgtcctttatttgttttcttgtttgaaagactgggtcttgctctgttgcccangcctgaatgcagcagccttgaactcctggcttcaagctcctcttgccttagcttcttgagtagcagggactccaggcacgcaccaccctgcctggctgatgacttttccttttttctaaagtcttttttgtttgtttaaagcagtttgtggactatcggatctttatttagaatgaacaagttgcacaacaacaaaatggctcttccatacaaaatcagaatggatccacttgggaaaactcaggcttttagtgtggatattgatattccaaa

SEQ ID NO: 3933 - DNA, 550 bp, Homo sapiens
  misc_feature 497, 514: n = A,T,C or G
cccttagcgtggtcgcggccgaggtacctattataagaaactcagtgttgcagcaatgtatgtattataatggatttgaaatttgccctaaccaagagtcacagacagaaaaaaggaagttaatgtatctcttgatcactatcaagatgtggtattgaaccttcaagatccttttcagggaatatgtgagatcaaaatttttatactggcactatgatgttatttgccttttcctcatattcacaagtgaacagtggagttttacagaagctatataatgtcatgacatcactgatgggtaatagaatgtgtgcttgtatattccgaaactttcagttccaatttcttcgatcaatgtaatcctcataagtaaaagttatttgaggacctcagacatttttaaaaatgtaaagggggtggggtcaggctcagtggctcatgcctgtaatcccagcattttggaaggccgaggcgaacggatcacttgaggccaggantttgaaactagtctggncaacatggtgaaaccccgtctcactaaaacaaaagt

SEQ ID NO: 3934 - DNA, 472 bp, Homo sapiens
ccctttcgagcggccgcccgggcaggtacgcggggaaatagcttgagttagggcacaattttatagccatacaaattcatattgaagcaagtcagcaaacgtggtgcatttcagatggaacctcaacgtgaagatatatcagttttagaccaaagcagaagtttatataaaggatataagcttttgccctgtatactcaggaattaaactaaaaagaaatctacaaattcatttatagattatttcaatttgaggcctatagatatgtgagaaaggtttctttaaggtttaatgaccaagttccatgtgagctcttacttgggaaacaaaattctcacatggcattaatatactataaattgtgatttatcaaaacattctcatatcctatctagggtgaaatttaatattgccaataaactttccactcgaaaaaaggtggtaaaaggtgtgcatgctaaagcatgttttg

SEQ ID NO: 3935 - DNA, 378 bp, Homo sapiens
  misc_feature 7, 10, 30, 41, 42, 89, 135, 139, 140: n = A,T,C or G
acacatntgngtctaaatttcctcttctgnaaggacaccanncctattagattcgggccacccagatcacctcattctaacgtttcctntttcaagcccttatctctaaatacagtcctgtttctgagagactanaggnngggacttaaacacatgatttttgggaggataaactcagctcataacacgactcggtaaagattcatggaatggattaattaacaaagtgtgtgctcttgtttagattaggtttgggcttttgctttcaaggcatggtttaagccagacagtccttttgccagaactcacttgctggtcccccttgcttctgggcaccactgctgcttcgaccccctcagcaatggaaagttccctggg

SEQ ID NO: 3936 - DNA, 449 bp, Homo sapiens
cccttcgagcggccgcccgggcaggtacataggcgttaatgttcagacttttttgttttcacttaagtatcattgttgtgtctgaaattcttttctattggagaattaggagaaatccagttttgggcactctgcctaaggaatagcccttcttttattcctttactttcttaataaacttgctttcacttaaaacaaaaagtcactgcaagttgggctgtcttatttttttaaaaaatcatcaattaattaattctatttatttgcatggagcccatctacacaaaccactggcactttggacggggcatttagctggctttacccacacgcttctgcccttttatgcttcatcaatctctgagcccacccaaaagcctcacagttactgggactcccactgctcattattcatctccccctaaatccacatcatttggcaatttcaa

SEQ ID NO: 3937 - DNA, 437 bp, Homo sapiens
  misc_feature 113, 138, 180, 202, 204: n = A,T,C or G
ccctttcgagcggccgcccgggcaggtacatttttttttggctatttcaatttgcatatttgaaaacaactgaaaaggcaattaattcaaatctaaataacttccatgctcanaattatgtttatggtcttccagcanacaaatttatggggacgtctggggaccaggcctctgacacanaataagcatcagtctctcctananactagttgcgggtttatttctgaaacttgtgtggaatgagggagcaaatctagaatgtttaagacctaataataatcacacactttaacacattcaaatcatgatgttgcaggagacagccttggctttgcttatagttctaagcagggctgttcccagaggatgactgtccttccgaggaaagaagacacagagctggttcaatcccaggggaatgtctgtcatggatgaaa

SEQ ID NO: 3938 - DNA, 266 bp, Homo sapiens
cccttagcggccgcccgggcaggtacgcgggggtattaaagcagtggcagccgctgcacgcagacatgagggctaggctaaaacagtaaagtcaagttgtttggacagaaaggctacagggggcggtcctggctcttggaaataagcacttggaacagaaaggagctctacccaactacccggaatgcaggcgggtctgggactatgtgactaccaccctctaagtgaggttttgaaaataaacacttgaaagtctgctcaaaaaa

SEQ ID NO: 3939 - DNA, 362 bp, Homo sapiens
  misc_feature 125, 153, 260: n = A,T,C or G
cccttagcgtggtcgcggccgaggtacagtatattaaagcaagcagctcagcctctcactagtggtgagatgtatgaaaatcctggcaatgccagggggaaaagaatctatgagtcttcccttcngacatctctcctatttcttgcattagtnttttcagggttaaatacacatctcacagaagagctagctatatatgggctgggtggtcttcagtgaatctgcaaatgtatcaaacaaaaatagcaagctggaactgnaataaagggtcagggaatacaggaaagaagaaaacaaagggttctaggtgttcatgaagtcaaatacatcttcagggcttaaaaaaaaaaaagtaaagtacc

SEQ ID NO: 3940 - DNA, 311 bp, Homo sapiens
ccctttcgagcggccgcccgggcaggtacatacaagtgcgtgtttgttattatgaaggaaatcctatcactaaatacagaagctactcacagaacactgattacttcagtggatagaggaaaaatatcaagtctatttttagttcttcaaatcaagttaaagattgacaacatgactaatctcttttgtgatgtgttagaagactccctctacctacctgttaaaaaaaaaatgactttttttgcaattttttgctgtttccttaaaactaaagctgtgttcttctgttttgaagggtttccgcccccaac

SEQ ID NO: 3941 - DNA, 231 bp, Homo sapiens
cgggcaggtgtcgacccacgcgtccgtggagacacacttataatctcagcactcaaaaagctgaggcaggagaattgcagcaggtccaaaggattgtctgggccacatagtgattcgttttctctctctctctctctctctctctctctctctctctctctctctcacacacacacacacacacacacacacacacacacacacactaaagtgtagctacttgaaagacct

SEQ ID NO: 3942 - DNA, 319 bp, Homo sapiens
  misc_feature 110, 118, 133, 191, 252, 277, 281, 285, 298, 299, 300, 307,309, 314: n = A,T,C or G
agaattcgcccttagcagtggtcgcaggccgaggtacttttttttttttttttttttttttttttttttactaagttataaaaaaaaaccccatcaccaaagacacctgngcacaagngtctgtcccttctgncaccaacctagggcactaactcctaacactgggaatggacacttgaaggaagatcagnaattatcctgtcttttctctacaaattgcaagtcagggaaaccttgttgattagggaaagntctttacataagaattcctgcaagnaagngagnaaagaatgacagnnnaagaatngncccancctgg

SEQ ID NO: 3943 - DNA, 632 bp, Homo sapiens
  misc_feature 452, 457, 498, 526, 543, 569, 594, 601, 617, 632: n = A,T,C or G
ccctttcgagcggccgcccgggcaggtactgaaaaccacttccagagtctaaagcagctcagatgtcatctctgggggaattagtgttcccctcatttagcaacctccataccacaaggtctctgtctgtagttactgggattatccagatacactatcaatgatacaaattcataggagtattaatgcatttctttaaacacaacttgattaagaagcaaatatgttaagcagttttctttttctgctgctaaattacagttagacacttcagtatcttctctttacatgtgtatataaattagtaagaacctgcatccaaagcaatgtagtgtgtgtatgtatctatatatatttattctaactcagcacttcaaaagcctttttgagttacaacaatattttagtttgcctcatctggtagaggtaaaaatttctatattaccaagctncagangaatatgatatttttacagacccaattttcttggctggtantcctgggacattcatttggctgggcctncatgggatgctggtaanaacaaattggtaagcccggccaaganaaagaaaaggcttcccaggaccagncttttantaatttggtagaaaangggagcccttttttn

SEQ ID NO: 3944 - DNA, 646 bp, Homo sapiens
  misc_feature 400, 403, 493, 510, 528, 531, 585, 591, 592, 600, 620, 625: n = A,T,C or G
ccctttcgagcggccgcccgggcaggtacaaatctatcttaatgttactaacaacagatcagcgacaacaaaaacctcccaacattccaatatttaggtatttattggtgtccgagtttcctggcagtgtatgaatacatgggtcgaaatgaactggcctcatattatttcagggtagcatggctatgattattaaacaccacagacacccatttgcttatttttgatttttgacattctaagacatagactttttaaaaaatcttcttaaggggacaaatctcctaatttaagacctagataaacccaagatttaccagtttttgaaaacagtgatgttacttaaattcacaagaaacaccattctctttcagatataattacttcaatggagtgccanganggggttaaaggttacaaaaattgggaaaaatactgacaattagatactggcttacttggtcagagaaacaatttttttttttttgagacngaatctttgctttgtcncccaagctagagtgcagnggnggtggatctcagcttattggtacccctgcctcctgggtttaagggatttttctngcccanncctccggngttacttgggattataggcnccccncccccatgcccggggtaattt

SEQ ID NO: 3945 - DNA, 312 bp, Homo sapiens
cccttcggccgcccgggcaggtacttgcaggaagatggaattatgaaggaacagcattagttacagttggagaagatggacaaataaaaatttggtcaaagactgggatgcttagatcaactttagctcagcaaggaacaccagtgtattcagtagcgtggggccctgattcagaaaaggttctttatacagcaggcaagcagctaatcattaaacctcttcaaccaaatgctaaagttttgcagtggaaagctcatgatggcattattttaaaagtagattggaactcggtcaatgatcttattttatctg

SEQ ID NO: 3946 - DNA, 382 bp, Homo sapiens
ccctttcgagcggccgcccgggcaggtacttttttttttttttttttttgcttatcttatttttgaaatgatttattaaatggacactttaggaatttgagagaagcagcttttcccactcaaatcactttgtgtacctctgacagagaacaaattctttcacaaggacctcaaacctctgggttggaaaaaacctcagtggtcatccgctcattcacccatgcagctggatccactgggcagattgacttggagcgctatgtgatttgcccacggctcaccttctccagtgcgtcattcagggcatccggtgtctgtattttggcaacatttgcaatggcactgtgaagatgaaaagaaactttgaacaggacttaaaaaa

SEQ ID NO: 3947 - DNA, 380 bp, Homo sapiens
  misc_feature 352: n = A,T,C or G
cccttagcgtggtcgcggccgaggtactccattaacattactatgacccccgggcaccctgcacatatagcggcagtccccaccggcgtcaccaaaaccttggatcatcttggtgtataaatgtcagcatcagctggctggcaggtaaaaacaaacagaacacaacaacttgactgtgtttcatttgttctgattatggctaccaaggttcggtgaaacccgagcagggacaagaaataaaaatgccattttatttggggagcccgtatgtgggcagtctgtccttacacaggtttctgtaagaacagattaaagctagtttgaaagtcgtgccagattagaaaactttgtnaaaatctaaaacgaaatgttcctcaaaa

SEQ ID NO: 3948 - DNA, 627 bp, Homo sapiens
  misc_feature 52, 82, 88, 564, 566, 567: n = A,T,C or G
cccttagcgtggtcgcggccgaggtacctccgtgaatgtgtattcctaaatncatgctggctgaattcaggtgtaattaganactganacccataaaatgaggggcaaggagctaattactcttgtcggtaaccagctgtggccataagtaaccctgttttgacccaattaatagtaaatccaatttttaatcctacagacagttgatggtgcactcgtagctgcaaaatgaaggacattaaatttggctgtgacattgagtggttacacagaagacctgcttctacaacatttgggaaacattgtgaaacattactattcaagttgctatttttccatctcaaaatatttttttttaagttgctgctcacttatggccacagaacagtccctttttgagtaaagcagcaaggttgcttaatgacatgctatgtggttaacaagattcaactgccacatcaagggactttaaataatttcaagattttaaatgtatttatgaaatgaactcattacagcagctaaatccaatgcaaactttgtcctttttcttttggctttttnannagaaactgaatttaatttaaatttaaattaccaggggctaaaacttggtaaaaatatttt

SEQ ID NO: 3949 - DNA, 711 bp, Homo sapiens
  misc_feature 190, 192, 193, 195, 199, 201, 202, 205, 221, 234, 237, 239,244, 247, 249, 251, 255, 268, 269, 273, 274, 278, 282, 284,287, 292, 296, 303, 307, 310, 312, 323, 326, 328, 329, 332,336, 350, 364, 378, 392, 399, 403, 404, 406, 410, 414: n = A,T,C or G
  misc_feature 426, 430, 436, 443, 448, 452, 462, 477, 480, 485, 488, 498,504, 509, 510, 511, 519, 520, 522, 527, 529, 532, 537, 556,565, 568, 581, 596, 599, 611, 616, 624, 626, 630, 640, 641,651, 654, 657, 685, 686, 688, 690, 692, 701: n = A,T,C or G
cccttcgagcggccgcccgggcaggtaccttaaaagaaatacattttacttgaaaatatttatcttttttaaataagcaacttatttttgctataacaaatttatagatctaatatgaaatccacaggtaacatttaattttaactaatatgatgaagtcagttgaaaatctttgagttttttttttttngnnanaatntnnctntttcccccaggctggnggacaggggcgtnatntnggctnacngnancctngggctccggggtnnaaannattntccngnttnacccncccnagtagcngggnttncnggccccccccnccncnnaangctntttttttttttggntttttaaaaaaatngggggttccccctntttacccggggggncctaaanctcnngncctngggngacccccccccntggncccccnaaggggnctggnttancgggggggancccaaaaacccgggnccnaaaanttnggtttttaanaaaaangggannnttcaaaanntntcttngnaanttaanaaaaaaaatttgtttgggnaaaaaaaanttnccccgggtccccnaaaaattgggggccnccnggggaagggggnccttntttttttncngggngccacaaaannggggccttcntcnggnaaaaacttgggccccccattttttttanncncnangggcccccngggggggggg

SEQ ID NO: 3950 - DNA, 266 bp, Homo sapiens
acgcggggactgctgagcataaatgctttaaagtgtcagcaattgatgtgtggagagaagtatgactgcattacagcttaaagagctttcacattcaggtctctacaggagaagacgagatcgccccgatagtttgagagtaaatgggttaccagaggaagagctaagcaacatggccaacgccctggccagcgccacttgcgagcgctgcaagggcggctttgcgcccgctgagaagatcgtgaacagtaatggggagctgtacc

SEQ ID NO: 3951 - DNA, 373 bp, Homo sapiens
ccctttcgagcggccgcccgggcaggtacgcgggtatttaggcggatggtatgagggcctccattcacactcttgccctggaactggcaaatgtgaatggaaggctgagtaaaatcatagttttgtgttgttggcctttgagtgttccatctctcttacaattttagtttgtcacaccttgcaccttgtatgtgtaagtaaaattaatggcataggaaagaaaccaaaagaagtgaacaataagagactaaagaaactctacaggccgggcatggtggctcatgcaagtaatcctaacacttttgggaggccaaggtgggtggatcacctgaggttgggagttcaagaccagcctggccaacatggtgaaacc

SEQ ID NO: 3952 - DNA, 435 bp, Homo sapiens
cccttcgagcggccgcccgggcaggtactggggggatgcacttgagtgccatttctgatactgtcattgtatgactgctgatgctcgtttatgttgttctttggaagctatagtgagcctgatgttttcacattttaaaaaatgcttcctgagacttctttaagctcctctaacttcttcagtgcatttgggatcaaacttagctcttagatcagcaaacctgacttgcttctacttttgcaatttttcaggccttaccatatttcttatctctgtcttcccacctgataggaaaatcttgcagatttgaaacagtggtttctggcctgctgctgcagcaaattccctatgtttatttaagaagtcgggcctatgcttttaacctacaaatgatgagtaaatttacttgcaatgaacacaggtagcctgctgctg

SEQ ID NO: 3953 - DNA, 640 bp, Homo sapiens
  misc_feature 456, 521, 594: n = A,T,C or G
cccttagcgtggtcgcggcccgaggtacaatgggcagtgtttggatccttccctggaatcagtgacgaatgcatggtgttctgcccaatgagaatgaaccatttgaacaaatcaagtaacctcaaaggtgtaattctcttggcatcgttaatgattattggtaggagtaaataagtgcaattcttttgttgttcttttttggagatgaggtgtctctgtgttgcccaggctggcctcaaatccctgggcttaagcaatcctcctgcctcagccttgagtagctgggatcacagacatgtacgcggggagctcaaagcccgcaagagggttctggaagcaaaggagctggcgttacagcccaaagatgatattgtagaccgagcaaaaatggaagataccctgaagaggaggtttttctatgatcaagcttttgctattcatggaggtgttaatggnctgtatgactttgggcccactcggctgcgctttgaaagaacaatattattcaaacctggaggcancactttatccaagaggaacagatcctggagatcgattgcccatgctcacccctgagccaggtttaaaaacctntggccatgtagacaaatttgctgcttcatggtgaaagacgtaaaaa

SEQ ID NO: 3954 - DNA, 383 bp, Homo sapiens
  misc_feature 61: n = A,T,C or G
ggtacagcctgcagaactatgagcaaaaggcacctcttgtcttgataacttacccagcctntggtattcctttccagcaacacaaaggggctaaggcagtgacaacattcagaatattcttcatttgggggatgagtattgactggcaaggaccacatcagaactttgtggcatgggggaaaatgttctctgtctttaactgggtgttactttacaattataattatattaaaatttattaagctgtgcctttaggtttttttgcagtatactctacgcaaattttacctcagtgaagaactgttagcatacaacagacagataacaaacactcaaaaatgtgaaaattgacagaaaataggtaacaaatatttagcatataa

SEQ ID NO: 3955 - DNA, 332 bp, Homo sapiens
ctgcagaattcgcccttagcgtggtcgcggccgaggtacaaaattaacaggattttaaagggaaatgaggaaatcacaaagagccagtgttagaggctgagtgaaccagagatctgaccccaacacacagcacacacccagatatgttgcctaatatgtgtaagggtttgttttttgttttaacttccaaactaaaacccctgatgatttcagaacactgtaacactggacagtttctcacagcatggttgtgaggatgaagtaaaaagagaatgtaaagaataagtgttttctttgtaagtgtggtccaggtatcacttatgcatatgcat

SEQ ID NO: 3956 - DNA, 232 bp, Homo sapiens
cccttggccgcccgggcaggtacgcgggggtatttcggggccctaggcgcgcgagcggtcagcatccggaatctggcccctgcaggcgtggggttccacgtgggaggagacttgaatgaaaattctgtggagaatcttcaacagaaaacacttcaggatctgttacatgagctttcctcctgactagttttggaaggcatggccagtacctcggccgcgaccacgctaaggg

SEQ ID NO: 3957 - DNA, 327 bp, Homo sapiens
  misc_feature 296: n = A,T,C or G
cccttagcgtggtcgcggccgaggtactacaagaagttctccattcctgatctagatagacaccagctacctctggatgacgccttgctgagctttgcccacgccaactgcaccctgatcatctctgtaagattcacccagacttcttggacactgcatcagggagagtcttcctctttccctgcccacttcccatcccataagagtcctcagttctagccccaagccctagggtatgcttgtgggagaataggcatctctaattcagcatgggggagagcagggagggggctcangaaggagcctgaccatataattcacagctag

SEQ ID NO: 3958 - DNA, 327 bp, Homo sapiens
cccttagcgtggtcgcggccgaggtaccttttaactatgtcaaagatagcaaatacagttcatctgtgtcaactttaatcagttgatagtggctgtctagcacattgtgaatggggtcaatcagaaagaatgtcattagatcaattagctattactttatattacctaaacttagtataatttaaaatttgataatgagtttattcagtttataaagagttctgtttttggcatggcctagtagctccattgcacaattccttctgcagaaaactactataacctatgaacaaaataggaaaaataactacccgaaagcactggaga

SEQ ID NO: 3959 - DNA, 252 bp, Homo sapiens
ccctttcgagcggccgcccgggcaggtacatgctaaatttagtttagaaaattctgggttaattcgataaatatttaaggaacatcaattacatgccaggctgtctactagatgcagagtaagacagatttataccagaattttcttaaagcctcgaacaagctactgttcacaatgagcacagtgaccatatatcctaatttgctgtagacagccccagtttacaggcgctattccagcattaatatcatc

SEQ ID NO: 3960 - DNA, 599 bp, Homo sapiens
  misc_feature 476, 490, 498, 502, 507, 509, 537, 546, 566, 577: n = A,T,C or G
tagcgtggtcgcggccgaggtaccattttagagtgcaaacaacctgctactttcattcctaataacgtcatacttactaaacactagttccactctctatgcatgtcccaccattgccacatttcattaaactgcagggagaagcatgacactggccaacactgcgtccagcatttgggtggccctcaggatttcccagtcctctgaaatggccatccttctcagtgcgaacttgaagagtgaaaatacagccttgaagaaatgcaaaaacacttcgtgttaacaaacagaagaaatagaaaaaacaagaagaaggttatttttcatttttaaagtagaagtttttcaaaataaagtaatacatgtaaattttaaaagaaatataagaatacagaaatgcgcagagaaatttttttttaaaaagtcattcatgatatcatttcacaagcagacaactattaacattttggtgtgtntgtgtgtgtggggnattttttntagncctangnatattttcttttaaacaaaaatgccatntgcactaancttgtaaaaaatattatttntcccaaaaggngaacattcataaatacattact

SEQ ID NO: 3961 - DNA, 334 bp, Homo sapiens
ccctttgagcggccgcccgggcaggtacctttaaaaatacatcttttaaatgaactcttactgagagaataactactaaaagtttaattgtagttttttattataatattttgctttgattttatactaaaaactgccaaccagataacatctaaatgtatctttttcaatatgacaaagttacataagaagactccccttgcacgtaaagaaaaatgcaattattttctattctgaatctccagactgctgttttagaaaatcatatctgattatttgctcagcagaagattattgagttgatttagctgtgattttacttaacaaagcttca

SEQ ID NO: 3962 - DNA, 499 bp, Homo sapiens
  misc_feature 349, 375, 382, 405, 426, 430, 475, 478: n = A,T,C or G
cccttagcgtggtcgcggccgaggtacacctaggaggtaatactagaaacaattgggtatacccaaccctcataccacaatgcaaaagtaacattaattaacactgtcatgaaatgcagttctaccaaaacaataaagttgtttagtggagaaaatattttattttgctttcatttttaattttaaattaagtaaaatttgaaagttcttttgcactagcccacctatcaagtagtcagcagccacgtgactggtatagtggctctggccatcttttcctcatgtggaagaattttctatctttaataaactttttctttgttttttttttccaaatggagtttcgctnttgtcccccaggctggagtggtgcantggcccnatcttcaggtcactggcaacctntgcctcctggggttcaaaacnattntcctgccttaacctcccaagtagctggggattaacagggcatgcnccnaccaagcccaaaacaattttt

SEQ ID NO: 3963 - DNA, 363 bp, Homo sapiens
  misc_feature 26, 71, 73, 82, 83, 84, 89, 90, 91, 94, 96, 97, 105, 107,108, 109, 117, 118, 119, 120, 127, 137, 140, 141, 142, 144,145, 146, 147, 148, 149, 152, 156, 157, 160, 161, 162, 164,166, 177, 179, 180, 181, 182, 183, 184, 189, 190, 194: n = A,T,C or G
  misc_feature 203, 206, 207, 208, 211, 218, 219, 220, 221, 222, 224, 226,227, 229, 234, 235, 246, 254, 256, 278, 280, 284, 285, 289,294, 297, 301, 306, 311, 312, 321, 322, 323, 326, 327, 328: n = A,T,C or G
ggtacttttttttttttttttttttnccttttttttttttttttttttttttttttttttttttttaaaananaaaaaaaannnttttnnnaantnnaaaaaaancnnntaaaaaannnnttttttnaaaaaaaaanacnnnannnnnnttntgtnnttnnntntnaaaaaatgcanannnnnnaaaannaaanacccccttnttnnnccnggggggnnnnntnanngnggggnncttcccccccngggggggngncaaatttaattcccccaaggcnanaatnnggcnttatngangggnaaaanggaannagaaaaaannntannncaaaaaactttaaaaccctgatcaacttaaaaatg

SEQ ID NO: 3964 - DNA, 415 bp, Homo sapiens
  misc_feature 8, 22, 32, 185, 233: n = A,T,C or G
ccttaccntggtcgcggccgangtacacaganaaagcttgggtgatggaactagaatggctgattcaacaacaatgttatcaataagtgatccaattcatatggtgctaatcaaaacagacatatttggtgagacgactttagtagcaccatattttctggaatggcgatcggttttgggctcanaaaatggagtgaccagtctgactgtggaacttatgggtgtaggcacanaatcaaaagtttctgtgggaattttaaatataaaacttgaaatgtatccaccactcaatcaaacgttatctcaagaagtagtgaacacacagcttgctttggaacgtcagaaaactgcagagaaagagccgattatttcttgtatatgctaagcagtggtggagaaaatatttgcaaattcg

SEQ ID NO: 3965 - DNA, 757 bp, Homo sapiens
  misc_feature 100, 185, 211, 213, 297, 307, 316, 323, 350, 351, 382, 393,406, 414, 498, 516, 531, 565, 635, 650, 651, 653, 658, 661,677, 688, 703, 723, 729, 738, 741, 743: n = A,T,C or G
ccctttcgagcggccgcccgggcaggtacaatcttttagactaaaatggttttgctttgaccccaataatcacaattattattataacttcggaaagatnttcaatcattcattcactcaatcattcaattggctttttttcttaattatctcatctgaacagtgttgctaatggcactgtgaangattttataaaaggaggaaatataancngttctctcatcaactgtagtaagaattggagagaaaagaaaaccttgaagaactaattgaataatataaataaaattctgttancaattctacntttaagtantgtgaangggaaaaagctatttctgcacaggtanngaagcaggtattaacaattcaaatccaactntttaggctcanaatataggttcangattattngttgtgagaaataatgagaatattcaagaataaaggctaattcttggaaatgggatttagaaatttttcaacttggatttcatnagcaaaaacataagggcntttcatttcataaanaacttttaaaaaatgttaactatgtcatcctggntaagtgattaaattcaactgtctaaaaaattaccaaaatattttacttttattgaaaggtttattagtanaaataccttgtgtgnngnttttnaangcttgggggcttgggnggatttaattnggtggcccttattcnaacttttgcaatatcttccntagttngggacatgnaangnaatttggactggtt

SEQ ID NO: 3966 - DNA, 343 bp, Homo sapiens
  misc_feature 29, 30, 36, 46, 59, 71, 84, 161, 239, 242, 246, 250, 256,266, 276, 278, 280, 303, 306, 309, 314, 319: n = A,T,C or G
cccttagcgtggtcgcggccgaggtactnntatgangttatactanaaacaattgggtntacccaaccctnataccacaatgcnaaagtaacattaattaacacttgtcatgaaatgcagttctaccaaaacaataaagttgtttagtggagaaaatatgntattttgctttcatttttaattttaaattaaagtaaaatttgaaaagttcttttttgcactagcccacctatcaaagntantcanccancccacntggactgggnataagttggntntngcccatcttttttcctccatgtnggnaangaaanttttncttatctttttaataaaccttttt

SEQ ID NO: 3967 - DNA, 357 bp, Homo sapiens
ccctttcgagcggccgcccgggcaggtacgcggggtatcatttatcagccaatatcatctgtttgaaaattacctgagacatagaaaacagttggggaggaagtcctgagcaacaaatagaaatgtctaaatgtggagattaagtagacacatatgtaatacaactagtggcttagagaaggtattcaataaatgatcactatattattatcatcattattgcctctgtatggctacacagagaacctgaaatcactaacaaacttatttagccttaaagcagataagaagcaatcagctgaaatggaggacacattttgctatagtcaggcctgcttacaatagcaaagagttaca

SEQ ID NO: 3968 - DNA, 605 bp, Homo sapiens
  misc_feature 409, 410, 411, 412, 413, 414, 416, 417, 418, 419, 420, 421,422, 423, 426, 427, 428, 429, 430, 432, 439, 465, 480, 507,519, 537, 558, 570, 571, 573, 588, 590, 601: n = A,T,C or G
cccttagcgtggtcgtggccgaggtactacgcaattttggaggctctatcatcgtacacattggagacacacataatagtttagacagcaatttttcaattgtttctctattttttccacatttatatcttactaatagtaacacaaccattccccatgaacatgctaaactttgaatgtgtaaatataaacaatattgttgtaatagtgtttttatactgtcagctatactgggtgtaagtccaaatgcagcaatacaccaatcgcaacacgttgatttattacttttaaatggtcttactaattctgtaaaactcaccccgtataactctttaaattttgctaacattgctgcctttgcattactagtttttagtacctgcccgggcggccgcccgggcaggtactnnnnnntnnnnnnnnttnnnnntntttcgangggtaaaaaaatttgggttttattgnttttgctaaataatnctaaaaaaaaatttcattttgaaggcngggcttgaattntttaatttggaccatttntttaaattaaaaaaaagggangggggaaagaanncntggccaaaaaaatantntttaacccccncccc

SEQ ID NO: 3969 - DNA, 382 bp, Homo sapiens
ccctttcgagcggccgcccgggcaggtacgcggggtggactgaacaaacatttattaaaggagtaattgaataagtgtctgggcaactgaatgttacagtaggtaaactgaaggaattcaaaggagtgggggaagggggagattgagagagagttggaatgattaggtctttacctgcttaaggaaaaggtaaagcttattaaaaattgttatctctgtaatagaagcaccttgagttaaaaactttcttctttaaatgattctgaattttaaaagtttcaacatggaacttacatttaatgctagtaaaaatgattacttaaaaaatgctggccctcaacaagagctgttgtaagggtgagtagggtttggataaagaaaa

SEQ ID NO: 3970 - DNA, 339 bp, Homo sapiens
  misc_feature 50, 57, 107, 281: n = A,T,C or G
tgcagaattcgcccttagcagtggtcgcggccgaggtacgcggggacttntagcctncaaaactgtgagaaaataaatgttttcaacctcagtctgtggtattttgntgtggcaacccaagcagactaatacactggccatgggcaagacgccctgaccacagtgatcttgacaggggtgtgggcgcaggacatgctggggcatcttgaagctactgcaggccccacagaatctagagggtccagaataaagtctttatccctccatgagctatctctttntgttgcacatttttttctgcattaaaacagtttgattatttgccccatgcccatatag

SEQ ID NO: 3971 - DNA, 323 bp, Homo sapiens
cccttagcgtggtcgcggccgaggtaccatcctccgctttccatttgtggggagtgggagattgattaagatgccttttatatgaattgacagtattggcattttataatatacttttttgttcccagatatctactctttatgtttcacatttgcctggtttctaagttttctaggtgtatttctaaccaaatcagaaaactttattatcccaggttaccttatcttggaaccagtttatagaatcctgttgagggaggatgataatttaaatagctgatacttcatgagtatgccctgttagcataagcatgcttccaaca

SEQ ID NO: 3972 - DNA, 413 bp, Homo sapiens
cggcccgccagtgtgatgggatatctgcagaattcgcccttagcgtggtcgcggcccgaggtacgcggggagaccaacttaacactgaacccattacttttccaagaccagaaaaaaatattacatgaacaggaactactttccttcagataagaattcaagctttgacattgtaaaccacagacgaattggagcttggcattgaaaggaggtgttctgcaatgattttttttcttgtttagagaagtttacttctacaagaagaaatctgaaaaatgacaggagcaaagaggaaaaagaaaagcatgctttggagcaagatgcataccccccagtgtgaagacattatacagtggtgtagaaggcgactgcccattttggattgggcaccacattacaatcttgaaagaaaa

SEQ ID NO: 3973 - DNA, 608 bp, Homo sapiens
  misc_feature 405, 503, 538, 576, 586, 591: n = A,T,C or G
cccttcgagcggccgcccgggcaggtacaaaatggaacctacattaatcatctaaaacggcattatcataacagacttgcctgagccattacttaccacaatgaattggtatgacacttctaacaaggtcagaaaaatcagattctgttttcttaatattgaggatctttcccactttccctgagctaatgagacacaggtctgtggcaaatacatttagtattttcctacacatgaattcctaacaaaaccaagcaagagcatacaaagggaaacatactttagctaatttaaaggtgtcttatgttattttgcttattgaaaaaactgaaaaggtagtaaggaaaagatgtaatgtggtaatagcaaattgcatctgtggtctctaatgaataatctcgcttncagtaaaaaaaactatcaaaagagcttaaactcaaggtaaacaaaaggatgaaaatattaaaataagagcagaaatcaatgaaacagaaaacagaatnaagaatgtcactgaaaacaaaagtaggtattttgnaaagatcaataaaattgtcaaacctttggcccgactgnccaagaaatnagacncaatttcccatttaatt

SEQ ID NO: 3974 - DNA, 291 bp, Homo sapiens
  misc_feature 25, 41, 44, 46, 47, 55, 57, 66, 76, 80, 89, 96, 97, 106,108, 110, 113, 117, 120, 126, 136, 143, 174, 198, 213, 219,244: n = A,T,C or G
cccttagcgtggtcgcggccgaggnacttctattttttttnttntnnctttttananattcatttncttttttttnttcnctgtttggncttgccnnttttttatncntncantttnacnattgancacatttcangcctttntattaaaaatgaaaaatgaaaaaacaaattnaaaacctattcaaatgggttctanttcaatttgtctagnataaantgtcataactggtttactgaaaacnaacacattttaaaaattggtttacctgaggatgacttgcataaaaat

SEQ ID NO: 3975 - DNA, 674 bp, Homo sapiens
  misc_feature 298, 526, 550, 561, 570, 596, 615, 617, 630, 636, 639: n = A,T,C or G
cccttagcgtggtcgcggccgaggtacaaagactagattggcttaaatatttaaatatccttacactttttttttaaaagatattttcaaaatatatattttgagattcttttctataagcaggttgctgcactctacacaaaggtttatttgttaaataaacagatgaggaaactatagcccactgtgtttttgttagttttattgaaacacagttttattggaacacactcatttatttgtatattatccacagctgctttcaccctacacaggcataaatgagcagttgtggcanagacagtatagcctacacaatttaaaatatttactctttgacctttaaagaaaagatttggcaacccccagattaaaagttttaatggcggccgggcatggtggctcacccctgtaatcccagcactttgggaggccgaggcgagcaaatcacctgaggtcaggaattcgagaccagcctggccaacatggtgaaaccccgtctctactaatatacaaaaatcagccngccatggtggccggccctgtaatnccactactcangaggctgangcaagataattgcttgaactcaggangcaaaattgcagtgagccnanatcaccccctgcnctctanttnggcgataagtgagactttcccaaaaaaaaaaaaaa

SEQ ID NO: 3976 - DNA, 419 bp, Homo sapiens
ggatatctgcagaattcgccctttcgagcggccgcccgggcaggtacaaattagccattcatgcaacaggcagtgttcaaagaggcttcaagttcaagggagctcagagttccattttccaccgaaaagctttaaacagactgaatattagtggacatttttgaatagttttaaaacataattttacacctgatcttagccagaaggctgagaagtgataacaaaagtgtcagtattctggagagatattcctcagttgttatcacttaccacagtaactaacatcgatgttggacatgctgtttttataacaacattctttttttatattattctttaattttataagacttcataggacacaggcaatacaaatctgctatgttattcctttttgtctctccttgtaatttacaacc

SEQ ID NO: 3977 - DNA, 396 bp, Homo sapiens
  misc_feature 247: n = A,T,C or G
cccttagcgtggtcgcggccgaggtacgcgggtatatcatgatcttacctgttgtttgactatgaaaaagaaatttgatgctgatccagttgaattatttgaaattccagtaaaagaattaacatttgaccaactccagttgttaaagctcactcatgtgactgcactgaaatctaaggatcggaaagaatctgtggttcaggaggaaaattccttttcagaaaatcagccatttccttctcttaanatggttttagagtctttgccagaagatgtagggtttaacattgaaataaaatggatctgccagcaaagggatggaatgtgggatggtaacttatcaacatattttgacatgaatctgtttttggatataattttaaaaactgttttaaa

SEQ ID NO: 3978 - DNA, 431 bp, Homo sapiens
  misc_feature 223, 232, 262, 307, 358: n = A,T,C or G
cccttagcgtggtcgcggccgaggtacgcgggattgtaatccaagaagactgatctcttctagtgattcagattggttttatctttgatttttagatttcatctgcatttcttgattaattactcattttggtttagttgacagttgagcaaaaaaaaaattactttctccggagtaaatcatctgttttatttatgctttctatgttgttctatgttgtagngcagtagcncattaggaggtatctttgtggagtgaaaanatttttgtggctggacccggtggtggttcatgcctgtaatcccancactttgggaggccgaaggcaggtggttcacctgaggtcaggaagtttganaccagcctggccaaaatggtgaaaccctgtctctactaaaaatacaaaaattacccgggcctggtggcgggcc

SEQ ID NO: 3979 - DNA, 401 bp, Homo sapiens
agcggccgcccgggcaggtacataataggtgcataacacatcttaaagttgtttaataatagataagaaccaagaggaaaaagaaataagaaaagatgggggaaaggaaggagaaaataggaaatgaaaggattaggacttgggcatttatattaatacaaaatggtgtaaacggcctgaatatcactgtagtagtatcatgcgggggaaagtgtgatggaaaataggtttaaaaatcttaatttttaaaactttagtaagctttatttatattttttaggattttctgaacatagcatgaagggtttagattcatttttctgaaaaacgattaaaaaaactaccaatttttttttgagtgcccacacttgccgttgtgctgtatacatgattttacctta

SEQ ID NO: 3980 - DNA, 533 bp, Homo sapiens
cccttagcggccgcccgggcaggtattaacaatgtcccagcatcttcctctacagctacagcttccacacagacgcagcattcgggaatgtccccgtcacctagcaacagttatgatacttccccacagccttgcactaccaatcaaaatgggagggagaataatgagcgattatctacatccaatggaaagatgtcaccaactcgctaccatgcaaacagcatgggtcagaggtcatacagttttgaagcctcagaagaggacctagatgtagatgataaagtggaagaattaatgaggagggacagcagtgtgataaaagaggaaatcaaagcctttcttgccaatcggaggatttcccaagcagttgttgcacaggtaacaggtatcagtcagagccggatctctcattggctgttgcagcagggatcagacctgagtgaacagaagaaaagagcattttaccgatggtatcaacttgagaagacaaaccctggcgctacactaagtatgagaccagcccccattccaat

SEQ ID NO: 3981 - DNA, 311 bp, Homo sapiens
ccctttgagcggccgcccgggcaggtacagggagtatcaaacggtctgggttctacatgtgctcttccctgagactgggttttctaatttataaagcaaagagtttagagggatgatcttcaagcctcttgtagttctagaattctgtagttctgggagtttgtaaactattaagttttcttttagcccagaacttccattttcctgctctctcgtgtctgctctagactcagctctagctcggctaagtgtggagctctctgctggggagatccctagaagctttgaaggagacattgtgaggctggaga

SEQ ID NO: 3982 - DNA, 519 bp, Homo sapiens
ccctttcgagcggccgcccgggcaggtactggatgttagtatgcatggtggaccttttttgggccttttattacttgattgcaaatcattcttcattgttgccaaatttatggaaggacattgctccctgaggtgccatttcctttcaggtctgtaactgaacatgactgatggcaccagagtaacagttgcttattacagcgttcactgagctgtgattgctccaatactttatgttggcagatgtgtttccctaggaacagcatctctgagacagaggtcattgatcaaaccccctctggctgttccattatgtgcaaattattgctaaaagcagagaggctgcaagggaggtggtgtgtacaaaagatctcattgaaaatttaaagtcatcataatttgtttgccataaatatgtaagtgtcaataccaaaatgtctgagtaacttcttaaatccctgttctagcaaactaatattggttcatgtgcttggtgtatatgtaaaatcttaaattatg

SEQ ID NO: 3983 - DNA, 618 bp, Homo sapiens
cccttagcggccgcccgggcaggtacttaaccagagttcgtggattttgtggactttaattggactcaattcactctgtgagcatcctggattgcatcgatgaacactgaattactgtaagaacatagacaggctctcactatgacctggacagtttaagttgctacactggtaacattctagtatcaaggagaattccattcatcatgacattcacattttacttttctcaatggaatgcttgcttcaggcttaccaatcacacctagaactgaagtctgagtgagtggtattaataatttttctgaaaggaataaaattggaatgtttctaaatgtggagaaattcttcagtatcctaataatatacccaaatgctttttctgggagagagcattcttttacaaaagaactttccctataaaagcatcacagtataatgtgaattggcattaaaatctttggatgcttttgcattattaagttcatggagaaatatattctttttactatgtatgtattaataaaaagtgggcaaagtaaagtttgcaaaatttagtttctctaaatttttgcacagtgactgcagctggctatgggtcagctcttaatacaacaa

SEQ ID NO: 3984 - DNA, 311 bp, Homo sapiens
  misc_feature 246, 272: n = A,T,C or G
cccttagcgtggtcgcggccgaggtactgggattacaggcgtgagccctgcacccagcccagaccttcttcttatcagtcaccaactgagctttccctgggaccacttcaaaaatcggctgttcatgagccccggtgccaaatgcccggcttctaagagatacatgaaaaccctgattcctcttttcatggggaagacgtctctgtccacccagtggacagcacaaacagctccccgcgtactttnttttttttttttttttttttttgggntttttttttttttgagtttcacattaactggaactttat

SEQ ID NO: 3985 - DNA, 356 bp, Homo sapiens
  misc_feature 3, 34, 39, 66, 75, 121, 126, 130, 155, 156, 157, 222, 245,258, 263, 292, 320, 331: n = A,T,C or G
atntgacggcgcagtgtgatggattctgagatcnccttngacggcgccggcaggtcataataaganagtataagnaatttaaagactttacccagccggtatatgtctatcctcggcttgntaggnctcnccacttacaaaccccaaagaggagnnnctcacttaccttgaaaaggcattaaaatccatactgatttcaagcctggtgtgtcaaggcgaggncggtgtgtgggtggcccttacanctagactttggtnacgtnccctctaccgaagtcttcacaagaggatngctgctggtgtaattttatttattgagntgtcagtttgnttctctgttctattgctgccttttt

SEQ ID NO: 3986 - DNA, 323 bp, Homo sapiens
  misc_feature 250, 257: n = A,T,C or G
cccttggccgcccgggcaggtactcaaaacagcacaacatacagtctaaaatcaagatttctgtcattcatttaaactttgcatatattgccatgatggcttaaacataaaatttctcttgcactaacaactttttaaaaccgatttcaaatcacttcatagttttattttttatattttgaattctagccagtcttaaaatcagctttgggaggggggtgcatataacatgttttttgttttgttttgntttttgnttttttaaattattgcactagaatttaggggtttggtgcctctcccgtattttttttaaaaaataa

SEQ ID NO: 3987 - DNA, 632 bp, Homo sapiens
  misc_feature 555: n = A,T,C or G
cccttagcgtggtcgcggcccgaggtactccagcctgggtgacagagtgagaatatgtctcaaaaaaaattatcagcagaagataatatagaccccaaggctaaagggaaccattatcatctctaggcctgaaagcctaggagagggtgctgtatggagaggactgcttctgacagagggatatagccaaccttggtggcctaatagagaggaaagtagggaatagcttcaccttccttctctaatcttctgctagtatccctattaatttagcctaattagaagctggaaggtaggagagcctccatgggcaaaaagctgtgtagagaacatggatcctgagggggtaaatggcagataatctagcacagattggtatgattatctatacttttcagatgagaacactgagagtcaaaattaagtagatttgcccaaggccatatagctggtaggagctataaataattatctcaaagaagtcattattacgtgggatcattcaagaaatttctggatttagaaaatagccttaaaatatgaaacaaatattancatttgttaatttgagatgttatgttcacagatattggtaagatatcattttaatttatggggtttaaatttctttt

SEQ ID NO: 3988 - DNA, 326 bp, Homo sapiens
  misc_feature 23, 175, 231: n = A,T,C or G
cccttagcgtggtcgcggccgangtactattctctctcccagatcaaattttctccggtggctaaaaagttgtttgtggtaactgcagtgagtgctatatctgtaatttttctggctcatcactttaaaagaaaacgtggaaagaagaaaggaaaaatattaccataggaaccanagcacctcatacttgaatacactaaaagagcagcatcagacaaaggttcaagttgntccagtagcagacagaatttgacattatctttaagttctaccaaagacaaaggatctcaagtttgtaactatgctaatggaggacttttcagtaa

SEQ ID NO: 3989 - DNA, 322 bp, Homo sapiens
cccttagcgtggtcgcggccgaggtacgcgggatttgaagtcaattttgtctggaaaggattgatctgaggctttcaaggagaaccagaggaatgtatatgtgtctcagaagccaagagtttggaattttaagatagagcatgatccccaaatgcacagaatcagtatcacctgggaaattatgaaaatgcatattctcaaactccacgtcagacttacagaatcagattctggaaatgggacctaacaatatgatttttttaaacagtccttcaaatgagtctttgagaaacccctgaggtaaaggaatccacctaaagta

SEQ ID NO: 3990 - DNA, 486 bp, Homo sapiens
ccctttcgagcggccgcccgggcaggtaccgcgggagggaatttcatctctactgattgtctcctaaaatctgaaaaattgatgctttgccctaaaaaacaatctctcaaatgattgaggaaacaatggaataattgaataccctcaacttaattctaaattaagggagaatttgttggtcaagtgaagactgtgtatagctagaactgtaactgagaatttaggcagcagatttttaaacaatccaaataaaaaaaaattttgccccgcttaatacagagccagtgtctctgtagcacttggcccatggtagataatctaaaaatgtgatatgtgaaattccatgacttaagactgtaaaagactgcgtggtatttagtggacatagcaatattcatggaatgaatgaatgaatgaatgaaaaggtgattgagtgatggcctgtggatatgggaggctctaataataaaattctgacaataactg

SEQ ID NO: 3991 - DNA, 462 bp, Homo sapiens
  misc_feature 402: n = A,T,C or G
ccctttcgagcggccgcccgggcaggtcgcgggctagtagaagaacttaaagaaaataagcaacacaacaatatatttgtaatacaccttgtcttagtctatttgcattgctgtaaaggaatatctgaggctgggtaatttataaagaaaagagaggctgggcatggtggctttatgcctgtaatcccagaactttgggaggccaagggaggaggattgcttgagcccagtcttgacaacataggaagttcaagtccagtctggacaacataggaagactctgtctctacaataaatttaaaaattagagggcatggtggcacgtgcctctagtcccagctactcgggaggctgagcggggagaatcgcttgaacccgggaggcagaggttgcagtgagtcnagattgcgccactgcactccacccggagtgagactccgtctaaaaaaaaaaaaaaaaaaa

SEQ ID NO: 3992 - DNA, 670 bp, Homo sapiens
  misc_feature 160, 468, 490, 586, 599, 605: n = A,T,C or G
ccctttcgagcggccgcccgggcaggtactcctggatgttcagtaactgcttctaggagaaaaggtagagtcctatcactaagccgcagatatttatttgtgtgtggctagaatgggatgttttgaatcttctgttacaaccttgggaacgtggctgttntttcaatttatgagccagaaattttcacatcccgaaactacaaaagagaaaaagagccttattaagtgtcatgctttcccaagactaccttcaaagaaatatgaatcaggataacctgtgatctaaataatgtcatcttaaaactgaagagtttcttttgactcttctgctacaatagcttataaaaaaatctgcttgcagacattttagagagaaaggacaatgaagtgattttctgaatgggaatgacagacctctgggaagccagctaccactgaatctcggtatcagttttttttaaagtttanagttagaaggggtggtcgcctncttttcaccagatgccggaagcctagggacccagcaaggcgggggtgcccaccgcttgccccactagttcatatcaaaaatttgggaagtgggaanggccactgccctncccacnttagcaattccataaccctaaccaaaaggaccttaaccaccctatctcactggccagggtttttt

SEQ ID NO: 3993 - DNA, 767 bp, Homo sapiens
  misc_feature 100, 125, 127, 141, 142, 148, 149, 152, 156, 160, 162, 164,167, 173, 180, 183, 185, 188, 197, 201, 217, 226, 227, 229,233, 237, 243, 244, 249, 266, 270, 272, 279, 283, 293, 297,300, 308, 315, 316, 323, 335, 336, 338, 342, 344, 346: n = A,T,C or G
  misc_feature 367, 371, 374, 381, 386, 387, 390, 414, 424, 433, 434, 440,444, 451, 473, 476, 488, 493, 499, 503, 506, 507, 524, 531,546, 550, 554, 560, 563, 572, 575, 579, 584, 608, 611, 612,623, 635, 639, 640, 655, 656, 659, 660, 673, 682, 689: n = A,T,C or G
  misc_feature 690, 708, 717, 718, 721, 730, 731, 733, 735, 736, 737, 743,752, 755: n = A,T,C or G
ccctttcgagcggccgcccgggcaggtacttaacccttgtttttaatatgagttacagatttttttttttctggtatgtcatttgtcttttgaccttggngttttgttatggatttttttttttntnaaacttattttttnnggcttnngcntttnaagncntnctnaaaaanggccttnccntnttnaaattttanggantttactaggccaggcntggtacctnncncctntttntaaacnntttgnaacctgaggggggggcntccntngaccttngganttaaaggctncagnganctttaatngctgccnnccacccngataaacaaagnnanaccngntntccactccccccaaaaaaaantttntanggaattntcctnnaangttaattttaatacttccgggttncttttttttnaattaaatnnttgggncggnttttccnaacgaactgtttgaaaaacaanccnctgttttttttntaaanagctcnccanttnncccaaaattttttaagntttttgnacccccccggaaggnggangccncttttnaanaataaaaanccnattnggaantgggcccctttttcggggaatttnggnntccggcccttngaacccccgggntggnncgggaaaccaataannccnnttttttttttttnaaaaggggnccccaannaaaacccacctttttttnaaaaaaaannttnaaaaaaaanntntnnntttttntccccaaanccnaaaaaaaaaaaa

SEQ ID NO: 3994 - DNA, 295 bp, Homo sapiens
cccttagcgtggtcgcggccgaggtacaacatcatcaaggcagaaacagtttcccaacaggttatattttcttaatggtagtcatgaagtcaccccacctgctctcagttaaaacagagcttaaggcttttccacaggtgtaagatatcaaacttttagcctgccctgatatcctccgggtcttctgcagttttttctgtatccactagaaagtgaatgaataattcattttttaaaaatattttctttcctgtctcagtattcttgctgctgcatcccattgttagattgattt

SEQ ID NO: 3995 - DNA, 508 bp, Homo sapiens
  misc_feature 423, 479: n = A,T,C or G
cccttagcgtggtcgcggccgaggtacttccatttgaaagcttaaaaaagtgagtgtaacaacaagcactcaggaaactttagaattaagacattaatagcttatttcttttaagttttaaaattatagaaaaatagtaagtggcatggtattgtttgacttaattagaatgtgaaaactctagtgcttttgtaatgctccaagaagaaatccaaatatttgaaataagacattattattggtcattttaagatacttcatgtttttcttagatgcctttgagtaatggacagatgggccagcctctcaggcctcaggcaaattatagtcaaatacatcacccccctcaggcatctgtggcaaggcatccctctagagaacaactaattgattacttgatgctgaaagtggcccaccagcctncatatacacagccccattgttctcctagacaaggccatgaactggcaaaacaaganattcgagtgagggttgaaaaggatccaga

SEQ ID NO: 3996 - DNA, 382 bp, Homo sapiens
  misc_feature 189: n = A,T,C or G
cccttagcgtggtcgcggccgaggtactctccttctagtgaaggattgtcacagagtttcactggatgaaactatgacccagtattcttactgtattttacatatgcctgtaaattatttgcaaaaaagaagaagaagaggaagaaagaaaagaaagaaaagaaagaaagaaagaaagaaagaaagaangaaagaaagaaagaaagaaagaaaaagaaagaaagaataaaaaaaaatgataacatggcaaccaccaaactcccttaaaaacaaacattggtgacatggccaattaagtatcagtgagcctcctatctgggacttatctgttcctattgtttcaaaaccatttcatgtacctgcccggcggccgctcgaaagg

SEQ ID NO: 3997 - DNA, 596 bp, Homo sapiens
  misc_feature 536, 560: n = A,T,C or G
ccctttcgagcggccgcccgggcaggtactgtggaaatcagtggtaaggaaaaaaatggacaggtcatctaatatgtaaacaatttaactttgatgtaatctcttgtttgctggatttggtcctggggaaagtcaaaggactttcttagttacttagttgaatctctcaccttttctctgtcttctcatttaacttctcttctcttaccttgcagagcattttgatgatgagtccagctgaaaatagtgttgtgtcaggaattcagacttacggcctaaccctttttcttgtggggaaatctttaggtgtataggactgtgctaatggtgatttaaagtagaaccagcagaggtttggtctgagggaaggtgaaagcaccgtattttatcaaagttgagaacctgtagagaatttggtgggttctatgtttcaaacagagctcaaatcttttgaggctcaagttccattttgctcttggcaaaacacaatttcctggttcaaaagaaaataagcccataaaaaaagggccccccangcttcttggacatcaaagcttacnaagaatcctctttataaaaacagtatttgggatgaa

SEQ ID NO: 3998 - DNA, 324 bp, Homo sapiens
gatatctgcagaattcgccctttcgagcggccgcccgggcaggtactccctgcaagatcacatttatgattatagcaagaaaatgtgtgaggaaatgtgcaatttgaatttacctttagcctaaaatacgtagaatgtatgaagtctgaatttcaagatacatggggtatagcactacaaactacaatccactggacatgacctccaatgaactttggagattttggaagcagtcaaaagaacataagggccacggggttctacttttattacagcattaggttgtttgctgcttttatttctctactttgtttttctgtacct

SEQ ID NO: 3999 - DNA, 273 bp, Homo sapiens
  misc_feature 54, 55, 56, 57, 58, 64: n = A,T,C or G
ccctttcgagcggccgcccgggcaggtacttttttttttttttttttttttttnnnnnacctcngggaagacaatgcaatagcctaggcaaggccataggacaataaaagaaggtgtcatcatgacaattacttcactattgtatatccaccccagaggctttatcattcttccattttcttatgattttcatctcatctggcatatttgggagtagatgatgaatagttttgaaataattatgtggaataacaaatagcaaaacgttcaaaa

SEQ ID NO: 4000 - DNA, 571 bp, Homo sapiens
  misc_feature 103: n = A,T,C or G
cccttagcgtggtcgcggccgaggagcaagagcaagtctagtgtgagaagcacttttcaggcatcatgtttgctgaccaccctttggcccaaacactcacctnactaagcctagactcaaaatatgagggcactgcaaagattcacagcaaagattcatggcacagggcctagacacagggaggagtctctgtatttgttttttctttgtatttgttttatcaagtgaaaaacaaataaggatctctgcttccatcaacattattcatctttgtttcaggggtccctgtgattttagttggccaagatgtaactggcataatgaatacaaccaaatgagaaatattacctttttttgttgatgatgtgattgtatacctgtaagagtggaaggactccagtaaaaaactggagtgcaacaatcagtaagaatatttgacaaggctgttgggactaaaaaataaatgtagaaaaatcagtaagtcttctttatagcccattccttcaacaaatatttattaaacactcactgaataataaagcattcattctggtccctagtacctgccccg

SEQ ID NO: 4001 - DNA, 404 bp, Homo sapiens
cccttagcgtggtcgcggccgaggtaccagaattagaagagacaagcatagacttgtatcatagacttatatgcttgtaaagaggaggtatattcaacacataattacataaatatttactcatttttaaagtggcattttgaaatgattcagtgcacaataaccttgtctgggttgggttaaggggtagtgacaggaatgaaaatgatacctgaagaatgagtagaccagagtgggagtatgtcaaacaggtcagcatatgcaaggaccttagttagggagaagtttgataacttccaagaagaaaagccatatgatacacagtcaaaccaaaaagaaaaagatgtattaaaataatatctatagagatctaaaatattatctctagaaatgtcctgcccggg

SEQ ID NO: 4002 - DNA, 531 bp, Homo sapiens
  misc_feature 8: n = A,T,C or G
ccctttcnagcggccgcccgggcaggtaccaaattcatcattgcatttctccacctggaaatggtaagaaaggaatatcttcatcatgctcttagacttagtatgatggacactgtgatattggaattactctttcttggtcatatccatctgcttgcataggacgagactgaaaatctttagcaggatttataaacgtctttggaatgatgtagcacaacagtgttttactgtggggaatggggaatgactatctgaaagggaaaattgtttggcattttatattatttccaggcagtgcaaactgtctagcaagtagaatgttcatatatgaatctaatatagcaaatttatccctcataatactgtttttgaaacatcaagtttattctcaatgtgtggctctaatgacaatttcttggggaacgtaatagaactgcaataatgactaatggaaaagactctaaagctgtatctgatgggaaatgatttactttttaaactctttctatttaaggaattagcttaccc

SEQ ID NO: 4003 - DNA, 365 bp, Homo sapiens
  misc_feature 57: n = A,T,C or G
tatctgcataattcgcccttagcgtggtcgcggccgaggtacctagaacaacccctntctgaaaagcttgagccaaaacagtcccaaagacaacaagacccctctcccagcctccacagaatggaagatctaaaggttctcttgagatgatccagctagtatggaagatctaaaggttctcttgagatgatccagctagtgtcctattctcctgcagtccctgttcctaggtttcctcaacgaagtttgacaaaaatctaaaccaacatagccaacgaacttgccttgttacacaagagtggctaaaatagcatctcaaatattctttcagttcactgtaaaaatttttcccatgtacctgcccg

SEQ ID NO: 4004 - DNA, 317 bp, Homo sapiens
cccttagcgtggtcgcggccgaggtactataggaatggtaagttaagagacaaaagagcagctacacagatgaagaggaactgcaaaggagaatgttttgaaggagaagacaaatagaatttggcaaaagtagctggaaaggttgttgcagaaaaggacaaatggtgtcactgtgagaacacacaataaataaaactgaatggaagagtcaacagcagaaactgggatcagggagtaaaaagcatattatgggacaaaacagatacatgatgtgcaaaacactgtctgcaatttaaatgtgatatgatggaatttgg

SEQ ID NO: 4005 - DNA, 309 bp, Homo sapiens
  misc_feature 203, 285: n = A,T,C or G
cccttagcgtggtcgcggccgaggtacgcgggtttacctgcagcatttgttgaagaagcagaatgctactgggagagagccacttgggaacatcatattttcctctctacaaaaacaaagcatttaagagattcaggttcaatcagccttgacacaaattccttaggtaataacatgctggaggtttacttttaagcttgaanacttcacccaactacaatacttggtaaacattattaactaaaaaaaatcaatttcttggctgggcgtggtggctcacacctnaagtcccagcactttgggaggtca

SEQ ID NO: 4006 - DNA, 333 bp, Homo sapiens
  misc_feature 328: n = A,T,C or G
ccctttcgagcggccgcccgggcaggtacaaatatttggcaaaggaatgaaaaaagttagaaagttgtctgtctgtgggctaggctctgcctgcaagatacttacaatctaggtcagaggttcctaaatccttctcaatgccgtttgcactggccctgaggaaagtgtgaaaatgaacactattgtagagtcttacatgaagctaaatttgttcatttatatcacttctcttttattatgagattatgtcctctgcagttttttggtattaaaatgtcttttatgaaaggatagtaagagttagatagtagtcttttttgtgcaaaanaaaaa

SEQ ID NO: 4007 - DNA, 404 bp, Homo sapiens
  misc_feature 260: n = A,T,C or G
accaaacatctgaaaataagaagacagcgctgcagagccctacacagtcaatggggcactttggccgagcctgtctcacctcatctttacaactcttggaggcaggtcctattacctccaatgaacacaggagaatatgagcgttagaaaggagagtgacttgggcagggccacagggcccccaaactggagagctgatccttatcctctgcttctcaactctttcactatgccatgctgcctttctgaccctgtcttantcttgattgtctgctgaaaactgctgtgagtaagaacattcaccttccccaggtcgagcaacggttgcacctcaatccattctctgcaggcagcatctgcttggtgttatacaaagagcgacacattttcaaaactttattccc

SEQ ID NO: 4008 - DNA, 409 bp, Homo sapiens
  misc_feature 10, 19, 22, 50, 66, 91, 105, 113, 194, 200, 253, 254, 273,320, 332, 340, 376, 391: n = A,T,C or G
cccttagcgnggtcgcggncgngggacctatacaattacttggttgcttnactccccccgcaattntagccaagattgagcagactggatngaagactaacttangtgaggtntaaataaagagcttaatgtcttagaaaaggccttttgcactttttgaatcttctgtatccttctgggtcttaggccattantaaagngggcacaatcatcccataatggctccttcaaactagggacacagggcccgtgnnttttagaagtttcagtganaaaggtagaaatcaagtgcatttatgggctgtcaccacttactgctnctatggccctgntatggggngactgtgtcaagtcaaagactaattggccactcctntatggttacacaggnaatgaaaaaatccattta

SEQ ID NO: 4009 - DNA, 491 bp, Homo sapiens
  misc_feature 446: n = A,T,C or G
cccttagcgtggtcgcggccgaggtaccaggttgcagttaagaatttttctcttttctttggagagaagttaaagtccctggcagtgtttttcctcagatcatctgcatcacctaagctggggttggccagatctttgaacctacaacacttcattccggttttcattttctttgtgttcatggactctagagagcacggaagtaattgggtttcattgggtagcagagtaaggtagagtgcactttctcaagacatgttcattggtctgagcaaagttctgtctcttggaaggagacagtagcttggtggtgctattaggcagatgagggcttgttagatcaagatgtaaactctctttcttcagtctgattttaaaatgaactgtcatttgtagtaattattaaatgagaagcataaattaagtattttactttttttatttgnaggaaatacaactggagcacgcaaagcaagcctttgtgcaacggg

SEQ ID NO: 4010 - DNA, 696 bp, Homo sapiens
  misc_feature 182, 183, 456, 462, 464, 473, 476, 477, 487, 488, 501, 509,510, 511, 515, 516, 520, 525, 530, 559, 562, 575, 599, 611,615, 616, 617, 625, 638, 639, 652, 658, 661, 663, 676, 683: n = A,T,C or G
cccttagcgtggtcgcggccgaggtactccatgttgatgggtctatgtttctttccatttgttatgctcccaccactgactggccaatcttctctctaccaatacctgttatagatcaacagatcaccatttgcttctctgaaggcctccagatgatttctggatgaaccttccactgtctnnctaaaggcccacgttttccattctcccacactgcattgatccccatgacactttatgcccagaatgctactctctggccattcctgtcatccccaaacatttttgtttttaattccaacataacattttcaccttccaaaaacctttatagagaagatgaaaccttactttgccctcatggtctggcaatgacataccaatagctactgattctctctaaatgtttccccaaaacacttagccatgaaaaaaaaaaaaaaaaccatttaattnaaaagnanttttggganccnnccaattggcnntaaacttttggangtttaaannngggnncccnttttncttanccgggttttttttcccccctttaaaaaanttngtttttggggagnattttcccgggtaaaaatcaaaanttcaacaaaaangggnnngggggctnttttttacccttnnaaaaaagggaaanggcctntantnaaaacttgctttnaaaaaanttttttttttttt

SEQ ID NO: 4011 - DNA, 323 bp, Homo sapiens
atctgcagaattcgcccttagccgtggtcgcggccgaggtacttctgtggccttgagtattttttaaaaggctcaactgtaagcctcttagccagttggataaatatttggggtcacctagccattgaaagcagaaagcagtagtgacacagctttcccttcaaagagtcattgagaaacatttctcaaacaggaaatccttcttttactaatgtggacatatagattattcgtattatagtttgtagaactacctagttcagaatcttgactgccagttttcttggtttcttaggcttgaattttcatagacaattgcaaca

SEQ ID NO: 4012 - DNA, 565 bp, Homo sapiens
  misc_feature 494, 525, 531, 552: n = A,T,C or G
cccttagcgtggtcgcggccgaggtacaaaactaatgatcttcagttacacaagaacatttaaaagttttacatttgaaatagataattaagcaatgctgtgtgaaactgaaaaatgaaaactttgattaaaaaaagtattttcaaatataggatagtgcatgtatatgagaatacttttttgggtataatcttagtaacatcattatggtgttatgtaaacatatgacatatgacatataaaattatagtagatagatcactgtgttacccacttacacattcttctgtcgtattaagcaacaaacattattcttatctataataaagcagatatttctgtctgccatacatatgaaatatttgtatgtatttattggaagtaatttttaaggctagtctttttttataatttcaacttttattttagatttggggtagaatgtgcagatttgttacattggcatattggggtgaatgctgaggtttagggtntgaaatggatcccatcacccaataatggagnttaggnacctgccccgggccggcccgntccgaaaggggcg

SEQ ID NO: 4013 - DNA, 326 bp, Homo sapiens
cccttagcgtggtcgcggccgaggtactcttatatttattattttacattacgattttaggaaagaaaaatattttctttgctttaataaataaatcattgtctgagtggcatttagcttaactgctgtgtaagacaaacaggatcagagtggtcagctagttttccatttggctttttccactgccaagtgggtttaaaggaaaactatttcatacttatatttgcttacttggttgaatattaccacctctgcttactaaacaagtctaaatatacctttctaggggtaactaaagagtatgttacgcctacttagttacacta

SEQ ID NO: 4014 - DNA, 424 bp, Homo sapiens
  misc_feature 408: n = A,T,C or G
cccttagcgtggtcgcggcccgaggtacacgccttgtatttataaaattaatgtaaacattagaaatcaggaagaatataatgtaacactgcactgttttcttatttatagccacttttctaaaaatacatattttttttttttaggtcccgatcacacagcaagaatccaaaaaggtaggtgtattacataagacaggtataagtagtgaagttgtctttttcaaaggtagtttttatagattgattaaatggtcctttaaaaattttcttttttggctgggcacggtgatgcatgcttgtgatcccagctactcaagaggctgaggcagaattgcttgaagccgggaggcagaggttgcagtgagccaagatagcaccactgcactccacctgggcaacagaatangactctgtctttcaaa

SEQ ID NO: 4015 - DNA, 537 bp, Homo sapiens
ccctttcgagcggccgcccgggcaggtacttttttttttttttgtttttttttttgccctttagcttcacaggtttgttctgaaatttatgaggtataaattcttaagagcagcaagaaaaatttcgaatctatttgtagaaactgcatatgatgatggttcataccagtagagagaaagattggatttgggggtattactagtagtaaggggattcactagtagtaagggacatgcaaaataaaatcacattgaactagttcaaaatcatcacattggcaaaagcattagagtgccaattactggaaagatgtggagcaataggaacactcatacggtgctataggaagtagttgtgtttagcataatttggcaatgtctagtaaagttgaagatgtgaataatctttgacccagcaattccatgtttaaacctctacatagtctctcctcgtgtttcaaggagatcatatgatggtccattgcagaactgtgagaatgagaagttgaaagcaatctaaccattaggttaaataca

SEQ ID NO: 4016 - DNA, 227 bp, Homo sapiens
ccctttgagcggccgcccgggcaggtacaaaaagaaagagagagaaagaaaaggctacttggtatttctcacctcttactttcaaaccattcagttaagatgacttagtggcatacaaacttcattctataagaatatacctttccctggatgcttcatctgggatacctaggcatatttctcggtcgaaccttcccgcacgtctcaaagcagggtctaacgagtct

SEQ ID NO: 4017 - DNA, 431 bp, Homo sapiens
  misc_feature 85, 102, 106, 109, 110, 111, 112, 118, 120, 123, 124, 131,137, 139, 140, 142, 143, 146, 159, 161, 168, 169, 170, 176,177, 178, 180, 200, 207, 210, 211, 214, 218, 231, 233, 236,248, 249, 253, 259, 277, 278, 280, 282, 294, 296, 301: n = A,T,C or G
  misc_feature 302, 307, 309, 314, 315, 316, 317, 321, 324, 329, 330, 339,353, 372, 373, 381, 390, 391, 392, 397, 399, 400, 401, 406,407, 411, 412, 414, 415, 416: n = A,T,C or G
ccctttcgagcggccgcccgggcaggtacttttttttcttttttttttttttttttttttttttttttttttttttttttttttnttttttttttttttttngggnggnnnnaaactnanttnnttttttnaaaaananntnnttnaaaaaaaaaaaananaaaaaannncccccnnntnttaaaaaaaaaaaaaaattnttttttnttnnaancccncaaaaaaaaaaantnggnccttgaaaattnngaangggtgngccaaaaaaaaaaaaaanntntnggctgcctgccncnccgcnnggggnangaaannnncccncanggggnnaaccaaaanaaaatacaatgaanaccaccccaacacacacannaaaaaaanaaacatttnnnaaacngnnngaccnngaanngnnnaaaaaattaaagggg

SEQ ID NO: 4018 - DNA, 615 bp, Homo sapiens
aatcctatagggagtcgaccccgcgtccggtaggtttgtgagagaagatgaccacggccacatgaggaggtgacgagcagagatgtctttgaatgtcactttactttgagcatgaaaactcccatgtcacgtctctatctaccaccatctttaaacataaaatttgtagatatgctgattcattttaccttgaaatcacgaatgtaatacagataaagcaagacatcaaacaggaaagactaaggcttgtgataagcaataacagcttataatcaagaccccattcaatctgtcctagtccactgataaaataaatgtgcagtgctgtgctgcacagaagataaagcacatggcccgtcatgcagactttaatttcaataaaatcgttactctctgcaggagtgtacaaatgtcaagcctgtattgcatgcacaggttctgtcctcaaacatacattaatgattccagtgtgttgctcaaatagttggcttagcagctcaacttccttcctccccctccaaaaacaaaaaacaaaaaccaaaaacaaacaaaccaaaaaaaacccagcctaatacattccaggtagtctatgaagggtaaagctgactaccttgg

SEQ ID NO: 4019 - DNA, 334 bp, Homo sapiens
  misc_feature 325: n = A,T,C or G
aggtgtataagctagcttgagtcgacccacgcgtccgctggaatatggcgagaaaactgaaaatcagggaaaatgagaaatatagactttaggacgtgaaatatggcgaggaaaactgaaaaagttggaaaatttagaaatgtccactgtaggacgtggaatatggcaagaaaactgaaaatcatggaaaatgagaaacatccacttgacgacttgaaaaatgacgaaatcactaaaaaacgtaaaaaatgagaaatgcacactgaaggacctggaatatggcgagcaaactgaaaatccagaaaatgagaaatacacaatttangacgggaaa

SEQ ID NO: 4020 - DNA, 505 bp, Homo sapiens
  misc_feature 24, 47, 121, 132, 134, 142, 153, 169, 267, 303, 304, 314,320, 335: n = A,T,C or G
tgaagtgggaggataagctttagnttgggagttcaaaactgcagtgngccatgattgtgccactctactccagcctgggcaacaagagtgagaccccatctcaaaaaaatttattcagttnaaatctttaanantaaagcanttttgagtcgnattttgcgacattctnaatatagttttccaacttgcattaaaatacattttaaacatttttgaagactaaattaatttttttaactgacatttatgtttcatttgacaaccttncgctgtatattttatgtggacttttaggtattgtanngattcctttnatgaanaaataaaataattgncatttaaaaatgcatattattattaccttatgctataaaaatagttttaaaatagagtatgtttattaagatttaaaaataagtatagtcatgcactgcataacagcgttttagtcagactgcataagattacgatggagctgaaaaattactgtcacacaaatacttac

SEQ ID NO: 4021 - DNA, 318 bp, Homo sapiens
cccttagcgtggtcgcggccgaggtaccccctgtagtagtaggcaaatgcttcccctcctgcacccccaacaaagatgtcctcatcctaatcccagagatctttgaatgcgctatcttgcatgacacgtgggattttgcggattgcctgctctgaaatgcaggaactacacaggaggactagagagaggcttctaggagaaaagtccagcctctggttcacagtcagcaacaaatctgaacgtttagtcttacaactgtgaggaagtgaattcagccaacaacccaaaggagcaaggaaatgaattcttccccagagt

SEQ ID NO: 4022 - DNA, 561 bp, Homo sapiens
  misc_feature 400, 401, 448, 460, 471, 487, 488, 489, 495, 500, 501, 527,538, 542, 544, 549: n = A,T,C or G
cccttagcgtggtcgcggccgaggtacagattgaggtttgtttatcctttttaattccagtttgttcttggctttcttagttctgaaaattgaaatctgcttcattttcactgatgcctgtgttgtaatgtgtcagtaaactgggtattcttccaagcagttggttgattccaggcttctgcatatctttgtgctgttctggaatttgttttctgtccatcaccgcatttacctgcccatactctgaggctaacatatccagaaacttttaaacttaacttccatttttcagaacaagccatctgctttagaataaatgatttccgtttatccagagaaaagtaactaggtcttagagacttcgtgtattcgtccgttctcacatgtggcaaaatatggnnttggtttttcttttttttttttgaaagtgttatttcttcgtcctttngggttaaaaagntttcaccgtcnttggtgcccttttgtnnngatgcnccttnntaatgggctttgacattgtgccaatngtgaagggacntgcntnacctntaagccttaaag

SEQ ID NO: 4023 - DNA, 523 bp, Homo sapiens
  misc_feature 514: n = A,T,C or G
cccttagcgtggtcgcggccgaggtactctaaacaaaccctctactcgcaagtttttgtgtagatactcaatcagttggtatatctgggcaatgccttcctccgtcagtggggacccaaatatcactcctttttcctttcgcttgagagacatgagagaccggaagaatcctgatgctgggccagccccgccaggcaacttaaggtccacttcccccatcagctgagccaactcagttccaggtaaatcgatgagccttgtgatattgctgaccaccaactcagtgaaaatctcaggtttctcatgtcggagtttctccacaaaaaagtcaggattaaagataatgggctgacctcgaagggaagaatcattgcagatcacaaaactgcagatggcatcactccggccggattcgcgggctggcacctccccttcactctgtgcctcagtcgccatcttcgtcagcaaacttctttcaccgccccaccttacgtcccccccgcgtacctgcccnggcggcgaa

SEQ ID NO: 4024 - DNA, 413 bp, Homo sapiens
  misc_feature 99: n = A,T,C or G
cccttagcgtggtcgcggccgaggtactcaggagaaaaacgaaaatgggctgctgtccaaagttcttaatggtcaagtgtctctcttctcctctcacanaaccatccacacgctcatagctgtagcctttacagagaggaagaaaaacagaaatcttaacccttttcaagtagtctttggggaataaaaaattaagcccaaaaccaaaggccaattttgtccctttccatatacaggcacagccctactttaagcaaatcccaaagggaaaaatttaaattaacagggacaattatcattttacaaaataactcaccataacatactcctctggattttttaaatacatgcagttgaagtctttggcacttatgaagttaatactcagttttggctattctcaagcaaccctg

SEQ ID NO: 4025 - DNA, 478 bp, Homo sapiens
  misc_feature 9, 10: n = A,T,C or G
gccctctanngcatgctcgacggccgccaggtgtgatggatatctgccagaattcgcccttacgtggtcgcggccgaggtctgatcatactcaacaaagatgaatgttaaaaacattaaaagaaccagtcacaaaagacaacatattgtatgatttcacttgcatgaaacgtccagaataggcaaatctaagagaccaaaaaaaagtagattagtgggggcccgggagggaatggagagaaatggggtgtctgctaccgggaccagggttttttggggggtatatgtgtttgaaaatattatacagttcactgtggtgatggctgcccaactctatagtatcctaaaaatcatatcctctaaataggcaaactgtatggtatgtgaattatatctggataaagctgtcattttaaaatggagggctttaatatgctttcattatcgatttcatttttcaaatccattctttttttaac

SEQ ID NO: 4026 - DNA, 625 bp, Homo sapiens
  misc_feature 183, 184, 185, 585: n = A,T,C or G
cccttagcgtggtcgcggccgaggtacatcaccctgctgagggacatccaggacaaggtcaccacactctacaaaggcagtcaactacatgacacattccgcttctgcctggtcaccaacttgacgatggactccgtgttggtcactgtcaaggcattgttctcctccaatttggaccccagnnnggtggagcaagtctttctagataagaccctgaatgcctcattccattggctgggctccacctaccagttggtggacatccatgtgacagaaatggagtcatcagtttatcaaccaacaagcagctccagcacccagcacttctacctgaatttcaccatcaccaacctaccatattcccaggacaaagcccagccaggcaccaccaattaccagaggaacaaaaggaatattgaggatgcgctcaaccaactcttccgaaacagcagcatcaagagttatttttctgactgtcaagtttcaacattcaggtctgtccccaacaggcaccacaccggggtggactccctgtgtaacttctcgccactggctcggaaagtaaacagagttgccatctatgangaatttctgcggatgacccggaatggtacctgcccgggcg

SEQ ID NO: 4027 - DNA, 402 bp, Homo sapiens
  misc_feature 383: n = A,T,C or G
cccttagcgtggtcgcggccgaggtacttttttttttttttttggggggggagaagttattttggatatatggctttaatcaggatagactagtttatattactgcctgattacttttgaaattccagaagatgtgtaatcctaactgcatgatcacagtgaatcttatataaggtgaaaaataccactattactgaattataatatgctagaaaagctgttgatggtaatgtggtctatttttaatttacttcatttggaccatcaccatgaaaataaatctcaggatggtttgaacaaatgaataacccacttgcccagcctatcctccaagaaaatatattgtggcaaatccattcttcagcttttgctgaccctgttgngttattctccccattccct

SEQ ID NO: 4028 - DNA, 318 bp, Homo sapiens
ccctttcgagcggccgcccgggcaggtactgtttgataattgatgtttattatgatgactgagtcatgacttatgctcaagtgtgtcagtctgttttgttcagggacatcatcaagtattgggcaatgtttctcaaactgtgttccatgaactgtttataagtattctacaaatgtggtcgattaagttttagaaatactaaaatttattaattttagaaaattaataaatatattagaaatataggacagcttccttttgggaattcataatacacattagtatattaaatgctttgcaactttttatttcagtaaa

SEQ ID NO: 4029 - DNA, 775 bp, Homo sapiens
  misc_feature 6, 22, 31, 119, 148, 156, 195, 199, 200, 211, 228, 245, 259,262, 273, 274, 287, 326, 327, 332, 334, 335, 336, 343, 345,349, 434, 451, 454, 455, 458, 463, 471, 472, 479, 492, 500,516, 531, 534, 537, 540, 555, 556, 559, 565, 580: n = A,T,C or G
  misc_feature 582, 583, 598, 609, 613, 616, 623, 631, 635, 653, 674, 681,684, 691, 693, 711, 721, 722, 723, 724, 729, 744, 753, 764: n = A,T,C or G
attcgnccttagcgtggtcgcngccgaggtnccacactggggagacagcatagaagttaagaatgaagatcagattcaagggcttcatcaggcttgtcagctgcccgcacgtcctcctnttggctgggaagagtttaaaggtggcgtntcaccaancctcagaacgacttacataaggggcaacaaacactcctntttnnttccttctccntaactcttcttttaggngtgacatctaatttgtnttaaaaatttattngtnttaaattaatnngtttttaaaaatnaagtacagccttgggatggggaaaaggaattttattatnntatgngnnnattcaanangtantttaaaatccaaattcaattttaactagcagaattctagaagatactttggtctcagtcaacctatccaagttgatcaatggcanacagctttgatttttgnccnnctnctttntgcctgtnnttaaagnttttctccccacnttatttcngagtgcttggaagatntgccctaacttgganctntgnctncctattatacttgannttnggcgcngggaaagaaagcatncnnaatcaaatcccccanggctggggggngatntancaagggnaaaatacnttcnaactttcctactaaaaanaatttaaatggttttaaggcnacgcccncgngcccatngnttgtggatcatttgaagngaaggagttnnnnaccancctggccaaaatggngtaaccccncctttacccanaaaaaaaaaaa

SEQ ID NO: 4030 - DNA, 639 bp, Homo sapiens
  misc_feature 245, 266, 267, 268, 269, 282, 287, 294, 295, 305, 308, 312,316, 318, 327, 330, 332, 345, 359, 363, 364, 366, 368, 371,377, 378, 379, 380, 382, 383, 384, 385, 386, 388, 389, 394,399, 400, 430, 431, 442, 448, 449, 460, 468, 472, 473: n = A,T,C or G
  misc_feature 477, 478, 479, 480, 484, 489, 492, 495, 496, 504, 511, 522,527, 528, 529, 531, 533, 537, 547, 569, 579, 581, 584, 595,599, 607, 611, 619, 623, 625, 629, 630: n = A,T,C or G
ggtaccataaaaatgtgctgctaacctacaatacccttatagaaatacaattcaataagaaactcagttgggaagatgtctcaatagaacaacatgaaaaaaatggtcaatacaagaatgattcactttacttttacaagggatttcgatgctacgaatagaaatgcctttggaacttataaaataaaatccagataaacagagagtcacatttttaattcttacacatctctaatgtgcctttnttttttttttttttttttttnnnnaaaaaaaaaaatnttttncaaaaanntttttttttnaancccntttntnggggggggnttntnacccccccccccnggggaaaaaaaaantttnncncntgngccccnnnnannnnnannttttnccccnntttttggggggggggggaaacaaacttttnnaaaaaaaaaangttttnngggaaaaattncgggaaancttnnaaannnntaanaaggnaanaanntttttttntgggttnttggccggganacccnnntngngggnagggtgtttnaaaaaatttttttttttttggnaaaacccccncnccncttttggggtnaaangggggggnaagngccccccnaaantncccnnaaaaaaaaa

SEQ ID NO: 4031 - DNA, 254 bp, Homo sapiens
  misc_feature 216: n = A,T,C or G
ccctttcgagcggccgcccgggcaggtaccactgtctgttttcaggggttaaatttggagaatatctttagagcctcaatctggctattttggaagattattttgaaaataatttcaaggaaaatactagatgtcttttagataaggcttttcaatttgaactcgttatacatgtaaatgctttttcttcatctagatgaatttaaaggccactcnttgctgcaagctgcacgagaagctgatgttactcaaat

SEQ ID NO: 4032 - DNA, 496 bp, Homo sapiens
  misc_feature 483: n = A,T,C or G
cccttagcgtggtcgcggcccgaggtacttttttttttttttttttttttttttaacactacaggtttcaaatgaatacttttcttatgttgccttcagaggttcaggacttctgcttttaaaacctgcagcctaccgtgggaaaccaaaaaagcattccctatttccaactgcagtatgtataaatacatatcactacaaaatgtatagaaagtgtgatgagatacatgaatggcatttttattggtcataacattttgatgaaaagcatttaaagttttaactttataaggcttttcaaaatgtgtttttctgagatacattgttatttattcatatccagaaaaattacaaggataatacagaatataataaataatttatctgagggcaggaagtatcctctcatgcttaatcaagtttggggttttttaattataacacaggaaactcataacaggacctggtcagagagcatcccanatccattaaagat

SEQ ID NO: 4033 - DNA, 437 bp, Homo sapiens
  misc_feature 156, 160, 338: n = A,T,C or G
cggccgcccgggcaggtcagttttatataaaactctgagactagaagaaattattaactttttttcttttttaattctaattcacttgtttattttgggggaggaagactttggtatggagcaaagaaatccaaaactactttaaatggaataaanccanctttattctttttttcccccatactggtagataaagcaaactttataagtgggctattgaaagaaaagttacaagcttaagatccagaagcatttgttcaaaggatagaaagcatctaaaagtttaggctcaagatcaatctttccagattgatattttcagtttttaatcgactggnctgcagatgttttttcttttaacaaactggaattttcaaacagattatctgtatttaaatgtatagaccttgatatttttccaatactattttttaaaa

SEQ ID NO: 4034 - DNA, 381 bp, Homo sapiens
cccttagcgtggtcgcggccgaggtacagtctttatggtgggaatgcagtggtagagttagtcactgtcaagtcatttgacacctccctcattaggaagacaaggactatccttgaggcagaacaagcgaagaacccagcaagtccctataaccttgcatataagtataattttgaatattccgtggttttcaacatggtacagcctcctgaaatgattgggcctatgcggcccgagcagttcagtgatgaagtggaaccagcaacacctgaagaaggggaaccagcaactcaacgtcaggatcctgcagctgctcaggagggagaggatgagggagcatctgcaggtcaagggccgaagcctgaagctcatagccaggaa

SEQ ID NO: 4035 - DNA, 765 bp, Homo sapiens
  misc_feature 416, 569, 575, 614, 617, 626, 627, 628, 687, 711, 721, 738,739, 749, 754: n = A,T,C or G
cccttgcactgtgacaagctgcaccacgcccaccaggcgggtatgattgagcacccattttagtgacttgccgtagccttgttgcagggctaccaacatgcgaccaaaaccacgcagtcgcttttgctcgcgcggcttgctggctctcagcatccagccacacatcattggcgttaatgtcagagaaaccggcaacgatataccaatggcgacagaaagcgtcacggcaaattcgcgtaacagtcggcccggcaatccgcccatcaacagcagcggcaggaacaccgccaccagtgacagactcatcgacagcaccgtaaaaccgacttcgcgagtaccttgcagtgcggcttgcaacggtttcattcccgctttccagatgacgtgcaatgttttccaagcaccacgatggcgtnatccaccacgaaaccagtagcgatggtgagcgccattaacgaaaggttattgagactgaatccgcacaggtacatcgccgcaaaccgtaccaattaagcggaaaccggcaccgaaacggcggggaataatagttggcgcgaaccggagcgcanggaatnaaaaacacccaccagaaattcaaccagccgccaaccgangantaaatcaannnttttggcttcgaatttcttttccagcgaaggcgcccaaattggttggggggaagccgantccctgggggcaaatttttgcaangcccaattcngcccgcccgggaatggnnttccttgcanacttncgggtaaattt

SEQ ID NO: 4036 - DNA, 516 bp, Homo sapiens
ggtacacactagaaatcatctgaggggcttataaaaacacaaattgctgggcaccacccccagagtttctggctgagtggatgtggggtagagccaaaaatccgtatgtctaagttcccaggtgaatctgatgctgctggtgaaggaatcatatattgagaacacttctctatgatcctgtgacaacctcagcgctaatattcacccaaatgcattatataaagtcagccctctgttttcttagattcaatcaatagcagattgaaaatattcagaaaataaacaataaaaataacaatacagcaataaagataatacaaacaaaatacaacacagtataacagctatttaaatagcatttactttgtgttaggtattatacataatctacagattaaagtatatgggaggatatgtgtaggttatatgcaaatactacactattttatatcaggaacctgagcatcataaattttgctatcttgggggtcctggaaccaatcacttgtgaatatc

SEQ ID NO: 4037 - DNA, 312 bp, Homo sapiens
  misc_feature 219, 222: n = A,T,C or G
ccctttcgagcggccgcccgggcaggtacaagcagttaacttagcaattaggcctgggcagggcataaagtcctcctcagcaagagttctttatcataaaagattggggacttaaatctcaacaagtaaattttaaccgtgatcatagtttctctttttccaactttggaaattctagactggacaggaccccaaaaaaaaaaaaaaaaaaaaaaaaangtncacctctgattctcactagttgaatgcaagaacttgaaaggttcaggtaagtgttttgaaaaattttgactttccaaacttttgccactt

SEQ ID NO: 4038 - DNA, 482 bp, Homo sapiens
  misc_feature 464: n = A,T,C or G
ccctttcgagcggccgcccgggcaggtacccaggtagcagcactcgaaaacttggatattcaagtctgattttggattccactggctctactttatttgctaattgcacagacgataacatctacatgtttaatatgactgggttgaagacttctccagtggctattttcaatggacaccagaactctaccttttatgtaaaatccagccttagtccagatgaccagtttttagtcagtggctcaagtgatgaagctgcctacatatggaaggtctccacaccctggcaaacctcctactgtgctcctgggtcattctcaagaggtcacgtctgtgtgctggtgtccatctgacttcacaaagattgctacctgttctgatgacaaatacactaaaaatctggcgcttgaataagaggcttagaggagaaaccaggaggtgataaaactttccacggtgggttngggcctctcaagaagaaa

SEQ ID NO: 4039 - DNA, 670 bp, Homo sapiens
  misc_feature 524, 594, 654: n = A,T,C or G
ccctttcgagcggccgcccgggcaggtactgaattatgccttggcagaggggagactccaaaagagtcatcgcaggaagaagttaagaacactgaacatcagaacagtctaccaagaaggacattggcatcctgggaaagtccgccttttcccttgaccactatagggtgtataaatcgtgtttgcaaaatgtgttatgatgtgtttatattctaaaactattacagagctatgtaaagggacttaggagaaaatgctgaatgtaagatggtcccatttcaatttccaccatgggagagcctaaaaataaattatggcatttagtatctaaggttagaaaaccacgcccacatgctaaaatgggtgttgaaaactaggttacttataatgcaaggaatcaggaaactttagttatttatagtataatcaccattatctgtttaaaggatccatttagttaaaatcgggcactctatattcattaaggtttatgaattaaaaagaaagctttatgtagttatgcnatgtcagtttgctattttaaaatggtgtgacagtgtttgtcatattaagagtgaatttggcaggaaattnccaagaatggacattgggcttttaaacttagaaacttgtaaagaacattatgtgaatatncctttgcccatttttt

SEQ ID NO: 4040 - DNA, 610 bp, Homo sapiens
  misc_feature 15, 23, 28, 107, 145, 209, 225, 269, 273, 274, 283, 286,432, 503, 553, 554, 572, 574, 587, 596, 598: n = A,T,C or G
cccttagcgtggtcncggccgangtacncagggatttgaagtcaattttgtctggaaaggattgatctgaggctttcaaggagaaccagaggaatgtatagtgtctnagaagccaagagtttggaattttaagatagagcatganccccaaatgcacagaatcagtatcacctgggaaattatgaaaatgcatattctcaaactccacnttagacttacagaatnagattctggaaatgggacctaacaatatgatttttttaaacagncctnnaaatgagtnttngagaaacccctgaggtaaaggaatccacctaaagtaacatgttaagaaattgttatggaatgaggactgaaagaatactgttaagggtggcatttaaggtggtaagagtggcatttaaggtgtttagtgaccattggcatggtatnggaaagttaaaggtctgccaaatagttgaaagatattcaataaggtaaattcaaataagcttgcagttaanagaaaagcttttcttgggtaagaaggaacccagttaagagggatagaatnnaggaaggattgaaaaatnanggtgaggctattnaacaaatcncngaaggtgggaat

SEQ ID NO: 4041 - DNA, 449 bp, Homo sapiens
ggtacgcggatgttgggaacaccatcattttctgaggctgaatttggtctgggtttctgaggatgcctgaaatggcatcgctgaaaataaatcaccccaatcacatatgtgcttttaattttgtccacattgcatttcagaaaattgtgagtaacgtgaacataaacttctaactaagaaaaagggtaactgatgatcttgctttcttaacaaatatactgtctttttaatcatagttctattctagacctatatataaataagctgtattccactgtaatcatactgtgatgtttggctttattcaaaaactatgtattgtaagtatcattcctgtgactacagacttcatatttatcattttagtgactgcataatattccactgagaggatatactccttatggccctgttagtggacatttggtttatttggtttttattttaaa

SEQ ID NO: 4042 - DNA, 558 bp, Homo sapiens
  misc_feature 250, 263, 343, 403, 477, 488, 499, 501, 525: n = A,T,C or G
ccctttcgagcggccgcccgggcaggtactttttttttttttttttttgcagaattgttagtgactggggaaaaaatgaaaacaactgaaatgaccatcagtagaggaatggccaaataaattatgatatactcataatatataatatcaagtatctgttaaaataatgcagtagtttattctatacatcatgcccgcgtagtctgcgttgttaccactgcttactttttttttttttttttttttgggncccagaaatactntataaaaccgggtgatcaaaacaaaacttatgtcatgaattttaagagtttttagcaaaaaagatatttttgaactggcncagcaaaagcaaagttgaacatcatgatacacaagactaatcatgcaaacaactgtaagngggatgtgttacttaaacactaagctcatgactgacattctcaatatataccactgatttttttaagccatggnggggtaggatntagttcaaggncncccattctaagatataagtagccncctcaaagggtacatatactattactttttggg

SEQ ID NO: 4043 - DNA, 304 bp, Homo sapiens
ccctttcgagcggccgcccgggcaggtacataataggtgcataacacatcttaaagttgtttaataatagataagaaccaagaggaaaaagaaataagaaaagatgggggaaaggaaggagaaaataggaaatgaaaggattaggacttgggcatttatattaatacaaaatggtgtaaacggcctgaatatcactgtagtagtatcatgcgggggaaagtgtgatggaaaataggtttaaaaatcttaatttttaaaactttagtaagctttatttatattttttaggattttctgaacatag

SEQ ID NO: 4044 - DNA, 567 bp, Homo sapiens
  misc_feature 517, 544: n = A,T,C or G
cccttagcgtggtcgcggccgaggtactatggaaacagtcatgtataaacattcgtgcagaagcacttacaaacatacactgtgcataaagttggttaagaagatgcttgttagaaatgatttatgtaggtgaactaagaatttgaaataacttaataccattgaagacatcatacacatacaactttggacattatgcattcttctggggatgaaccattgacaacttctggacttcattgctagctattttttacattgaggtgggaaaccaaagaagtgcagaacagaagcaatctactaggcacaaagctccctggttactgcccagatagactgtttccactcatcaaattgaagtacatacttaatttaggaagggcagaccagtgcaaaagctactgatagtgaactggagggcccggtttccatcccttactctgcccactccaaagttcgatcttctgtaagtcactctaaatttatggcctttagatttattgcctctattaaaaanggcattgcaacaagtgacttaaacctnccccttttttattctcaaggatt

SEQ ID NO: 4045 - DNA, 582 bp, Homo sapiens
tactatagggagtcgacccacgcgtccgacgcactccgcaccaaccattaagctgaaaacaagctttttctagtgcgtccttcccttcacctgcatttacattccatggagttagtgacaaccccacgccattccaggccgtggactgttttatctgtatatcggaattataatgctttgcggttggttaagtgaaatagtgtttatacctcttactgatttttaaaaatcatgtggtaaatatattttcatttttatcctaatgatatttctcttttgttgatttatttttgttgttcctgttggggttttgtttctggtttttggtacaggtaactggacccagagccttgctcattgtaagcatgcactggactgtcatatgcccctagaccctaattaacttattggttttaactctaagccatggtgtttttaaatttgttagaatagaattgtattcatgtagttgggcagcccattggataggtatcaaagaaaaaagaaaaatggggtcaattttttaagcgtttggccatggataaggttaatttgaaaaagccaaacaagaattggtaaagg

SEQ ID NO: 4046 - DNA, 464 bp, Homo sapiens
  misc_feature 20, 24, 68, 70, 83, 91, 96, 104, 121, 129, 130, 133, 149,152, 198, 200, 214, 222, 304: n = A,T,C or G
ccctttccagcggccgcccnggcnggacccgggggaaatagggtgttttcttcccgagagaggactgntnatagggggttaangggggacnatgtnaaggatanaacctgcggtccttcanaaggccannaanaaagaaaggggaagcnttnaagaaagggacggatatactgggacagggagaaaaaagttgtgganantagcttttaaggantcatttgntggccatggatccaacgtgctcttctgagtgcgtttataacctcatacccagtgacttgaaggagcctccccagcctcctanaaaaaaactttgatcggaacgtgcccaaaaagcctgctgtgccattgaagactgatcatcctgtcatgggaatacagagtggaaaaaattttataaatacaaatgcagctgatattcatcatgggagttggctaaaaaagcctaaaccaatttatgttga

SEQ ID NO: 4047 - DNA, 459 bp, Homo sapiens
ccctttcgagcggccgcccgggcaggtactttcacaaacaaaggcttagaattccacatgaaagtccacatgaggtaagtgtgcattcatgagcatgtgtgcactctgggcaaaccaacagaagataaacagcaaggaagagcagttgttttgtgaaaaataatcatctgttagctgtaaatcagaaatattggccaaatcagaattcttgtttctaaaatgaggcttctaaaattttcacataactgccaaactcttatttgtaattcttaaatatgccctaaagatcatctttctcttttatagacatttagtgtatacagtccacataaatgcatatactgattacctacagacaataatgagacttcagaaagaatcaaaagcaatagtgatggtggaatttttaaataatattcagctggggggaaataagactgagtttgtgtgatttcaggt

SEQ ID NO: 4048 - DNA, 344 bp, Homo sapiens
  misc_feature 25, 64, 115, 176, 239: n = A,T,C or G
cccttagcgtggtcgcggccgaggnacttttttttttttttttttttttttgctacagcagganaagcgtgcgtgctacaggcatctgtcaccaaggccagagcaacttcccagngtggcaactgcacagacagcttcaaaatgacattttagaaagtataaaattcttcaagaanaaaagaagtcttcatataagaaaaggcaagagaagcctacaaaagtaatataaagcattactntttgcaccccataaaattccattccctgatccctcttggtagatggaagaggaaatataatgctgaaaaaaaatacaacttctgacaagatattttatttggctt

SEQ ID NO: 4049 - DNA, 484 bp, Homo sapiens
  misc_feature 475: n = A,T,C or G
cccttagcgtggtcgcggccgaggtacccattcatacttgcatcatctcttgtgctggagaagcttgctcaggcatatggggtgtcacaggagctgcggcacctgccttccaggagcctgtatataacctatatcctcgtgttactgctttaaaatcaggccctggagctgggaggactctcaagagacgaccctgtcctctgggccagtcctgacccactctggcagcgagtctaccgcagcctgctggagcactatttcaccctggcagtcagagggttccactgcagccatttctgccaaaaacctctcccaggatgggcccagatcccgaacagaaaaggactttgttctttcacttcttgatgccctcttcaaaggagtcagaggcatcaagtgtcacctgggactggaaagaagggaaaggggaggggatgagttggaatgagactcaagcccaaggcttgatgggaanggatggggg

SEQ ID NO: 4050 - DNA, 918 bp, Homo sapiens
  misc_feature 18, 29, 61, 83, 117, 127, 164, 171, 184, 206, 208, 210, 212,216, 223, 227, 229, 246, 254, 258, 262, 266, 268, 271, 277,282, 284, 288, 317, 319, 321, 345, 353, 360, 376, 382, 396,397, 404, 430, 435, 469, 470, 530, 538, 540, 543: n = A,T,C or G
  misc_feature 573, 600, 643, 712, 723, 725, 761, 766, 773, 788, 829, 831,852, 866, 886, 891: n = A,T,C or G
tggactccgggagccggngcaccgtgcangatggtggaatagtgcatgatactagactaancagatctccttctccctatganggcgctcgggctccgcggggccacgggaagagcnaaccttatanatatgtgttgtaattgtctttatatttacttttttanaaaaaantggtttttatatngtattatttatgtattttttananananaagnccatttnggtnanaaaatataggtcattanccttggcnaagnttgngtcncngtncttacnattgngnccanttttgtgtaaccaagggggacccaattanantnggttaaaaaaaaccaattaaaaanaaggttgnccaaaanttttggttttaaccancctttnaaccaattaaattnngaattangggttggggaaaaattgggggccaanaaccngctttggaacccccaaaattttttttttggtttnnttccaaaagggttttaaaaaaaaaattaacccccaaaaaaaaaaaacccttaatttttanccaaaggntnggnttcctttaacccttgggggggaattttttnaattgggttacctttaattaatttggnaaccaaaaaaaattcctttttgggaattaacccttgggccaanttccccaacccaaaaaccaattttttaaccctttgggggcccggttggcccttttttttttttggggcntttttttgggncntttttttttgggtgggtgggcccttttttttttggntgggntggggtncctttggcccccttnaatttttaaaaattaacccggttccccccggcctttggccntntttttttgggttccctttggngggggtccctttanccacttaaacccaacccaantttcnatttttaaaattaaacccttaattttt

SEQ ID NO: 4051 - DNA, 466 bp, Homo sapiens
  misc_feature 445: n = A,T,C or G
cccttagcgtggtcgcggccgaggtgcactgtcagatcctttggcatccggagaaatgaaaagattgctgtccactgcacagttcgaggggccaaggcagaagaaatcttggagaagggtctaaaggtgagcctaatcccctaatggagtgatattgatcagcactcctttagtaacacatgtagataagttacatttaatgttctgttctttggtgtcttgatatttatttacttaagcttctaaaaggctttttctacaatcagcagggttaaactgttcttggtggtttaaaagatgcttgaggctgggcacggtggctcaacgcctgtaatcccaacactttgggaggccaaggcggttggatcatttgtggccaggagttcgagaccatcctggccaacatggtgaaacaccatctctactaaaaaaagataaaaattanccgggcttggtggcgggctcc

SEQ ID NO: 4052 - DNA, 521 bp, Homo sapiens
  misc_feature 9, 363, 395, 434, 443, 484, 489, 492, 507: n = A,T,C or G
gccctctanagcatgctcgacggccgccagtgtgaggatatctgcagaattcgcccttacgtggtcgcggccgaggtacagtcttttgggggtggggagagaatatgaaaatgttgtaacattgattgtgatggttgcacactctgtgactatactaaaaatcactgaatggcactttcagtgggtgaattagatggtatgtgaattatattgcagtaaagctgttaaatacacacccactcacacacacacgcccgcacacacacgtaactcttctctgcatcaccttcaatggttcagcgcacattctgtgcttcggtcatcatctattaaggcgggttcttctgtaatcaaggtatgcanacttaatctgttattacatttcttcatgccancccttattggcttaaaatatatcttccacactcatgtcnatctttcanaatccttaacaaaacgcatggataactccctggtattttcncaagntgntgaaacacttaaaantaaaccacctaggc

SEQ ID NO: 4053 - DNA, 401 bp, Homo sapiens
ccctttcgagcggccgcccgggcaggtactttaaatatgcagattttatggtattaaattatatcttttaaaaattattatatatgttctaaaaagactaataacaaaattaaaagaaaccacagactatgaggaaatgtccacgtatcatatatttgataaattaaggacttgtaagccagagattattaagaactcatttaactcaataaaatgagaagacaagacagacaacccaaattaaaaatgagcaaatgatttgtatacatttcaccaaacaaagtcaaacaaatggccaataagcacataaaaaaagctcaacctaattagatattatggaaatgcaaattaaaaccaccatgagatgccactttgtacctcggccgcgaccacgctaaggg

SEQ ID NO: 4054 - DNA, 303 bp, Homo sapiens
cccttagcgtggtcgcggccgaggtacaaaactaatgatcttcagttacacaagaacatttaaaagttttacatttgaaatagataattaagcaatgctgtgtgaaactgaaaaatgaaaactttgattaaaaaaagtattttcaaatataggatagtgcatgtatatgagaatacttttttgggtataatcttagtaacatcattatggtgttatgtaaacatatgacatatgacatataaaattatagtagatagatcactgtgttacccacttacacattcttctgtcgtattaagcaac

SEQ ID NO: 4055 - DNA, 502 bp, Homo sapiens
ccctttcgagcggccgcccgggcaggtactgacagactttctggaagaaaaggcttgtaggaggaaacttcagaattctattaaatggtgtaaatgatgaaattatagttgatatatgctagagcatcagtgctgggtattttagaagggatggagtcatcattggctaatgttcccagtgaaggattgagggaggaacattgtgctgaaggatcaacagagtctggatgtgctctgagcaggagcacatgggctttgcaggccacgaaacagcaagagtaaggacaaggtgaacacgataggttgatgcagtgcattaatgcccatgagcggtttagagaagcagtcagagatgagaggatggcagctagctgaaagataaggacagacaatggaagaccttgagtggctggatgtagatcgagtgacattgcataggttgaaccaggtgttttatacagttaatgaaatccatttttgttttgttaacttttagcatttt

SEQ ID NO: 4056 - DNA, 548 bp, Homo sapiens
cccttagcgtggtcgcggccgaggtactggagtcctatttcctgataaactttttagactagtgttattttgcagagatagttaatatcatgaccgtaaccttttaccaggagtttttcagtaaaataattttaagaacctgcggaaaaatacaaaatgaaacataatttaattgatttttactcatgtagcacaataaatcacttcatttcgagaggacctctgagcacttatttctcccaaatgggatcctcaccaattagtggaatgaatacgggtctagtttctgttaatgaaaactcattgacatgataaatacaaggcctaacttgtgtgataaagtttacttgataagcagaaaccaacatgaatttagaggagaaaaacagacgagaaatgaaagaccttttaatttaagttatactgatattgctgaagttaattgtttattttaggacgccaggagaagaaaatcacactgttacctttttctttccttcttttactttcatctaagctgaaaggtatcactgatactattagcccct

SEQ ID NO: 4057 - DNA, 752 bp, Homo sapiens
  misc_feature 277, 316, 317, 318, 319, 320, 337, 346, 347, 353, 355, 357,358, 364, 365, 368, 369, 376, 377, 378, 379, 380, 385, 388,390, 392, 395, 396, 398, 399, 402, 406, 407, 410, 417, 419,420, 434, 437, 438, 444, 445, 447, 448, 449, 459, 460: n = A,T,C or G
  misc_feature 463, 481, 482, 488, 491, 492, 494, 496, 501, 503, 504, 507,509, 510, 512, 545, 547, 548, 550, 561, 563, 585, 587, 592,596, 599, 601, 603, 608, 615, 619, 621, 622, 623, 624, 627,632, 633, 640, 641, 642, 644, 646, 648, 649, 651, 661: n = A,T,C or G
  misc_feature 664, 670, 686, 696, 698, 699, 705, 715, 720, 724, 727, 732,735, 737, 738, 739: n = A,T,C or G
cccttagcgtggtcgcggccgaggtacaggaaggatgttaaatgaaggggtggtattgcaggagagcattttaaatggcagaagtaaaaagttataatatttataattttgatgggtttaagtttatttttgtagggaagatttttctcccctaaaatagtttctagaatggcaaaattgtttccattattaaaaattgaagttattagttaaaaaaaaaaaaaaaaaaaaaaaaaaaaaaaaaaaaaaaaaaaaaaaaaaaaaaaaaaaaaaaaanaaaaaaaaaaaaaaaaaacaaaaaaaaaaaaaaaaaaannnnnccccccccccccccccnggggggggnncccccncntnnttaagnnatnnttttttnnnnnccccnccntngnggnnannaanaccnnttntttttcncnngagggggggggggnggnnttttgnngnnnccccccccannaangggggccggggggggggnnccccgnttnntntnttttntnncanannanagggggccccccccccccccccctttttttttncnncncgggggggggngnttttttttttaaaaaaaaaaancnccccncccncanananaaaanatttttngggngnnnnctnttttnnaaaaaannncncntnntntccccccccnctntttttngggggggggggggggnaaaagagagngnnaaaaancccccccccncgggngcgncgnttatntanannnacccccccccccc

SEQ ID NO: 4058 - DNA, 648 bp, Homo sapiens
  misc_feature 1, 177, 192, 211, 216, 285, 350, 354, 377, 399, 418, 427,435, 449, 461, 477, 478, 491, 507, 511, 518, 520, 530, 538,545, 555, 559, 568, 576, 577, 578, 612, 615, 626, 637: n = A,T,C or G
ncccttagcgtggtcgcggccgaggtactacctccccacaatgtggactgcaaaatgctggctggctgtgttgcttggtagcaaaaggggttgcatgctgctcagctctctgtttctctccaacccaagcatttggatgtgggactgtgccccgcctggtgtctggggctctgggangggcatttttacttncctgtttacaagaagggtnacatnctattccaagtccaaaggtggacactttgttcctttgctcaagcatcccatgcagactcagcaaggttnccccgcttcccctgggaaggtggctgtggccaagcacttgcttccatgggacctacaccccgggntggncattgggaaacaagcataacagnttttttgcccctccactttttngggaaaagggggcctaaanatggtttanaagttatnacccattccctttnaatggaaaaatnccaactctttgttttnnaagggggttttgntggggggaatgccaanaatncctaaanangggggccaanaaacttgnccttaanaaaaaattgnaatnccctttctnaatggggnnnctaaatttgggggtcttccccttaaaaaattaantgnttggcaaaggntatggaaaaanaaaaaaaaaaa

SEQ ID NO: 4059 - DNA, 465 bp, Homo sapiens
gagcggccgcccgggcaggtacccaaattaccttgatttaaaccccagctcgcccatttattagccgtatgaccttggacaagttatagaatctctttgggtctgttgtaacatggtaataataatacctacctacctaacacacagggtggttgtgaagattaaaggagttgccacatgttggaagcatgcttatgctaacaggcatactcatgaagtatcagctatttaaattatcatcctccctcaacaggattctataaactggttccaagataaggtaacctgggataataaagttttctgatttggttagaaatacacctagaaaacttagaaaccaggcaaatgtgaaacataaagagtagatatctgggaacaaaaaagtatattataaaatgccaatactgtcaattcatataaaaaggcatcttaatcaatctcccactccccacaaatggaaag

SEQ ID NO: 4060 - DNA, 597 bp, Homo sapiens
cccttagcgtggtcgcggccgaggtacttcggtattacagcgccacccactggctagaagtcctcatagcacatatgagatgtagccataaaatagatgaattcttgaaataaggaatataacactgactattctgattcagtagaacataaaaaatgtctaacaaaacagaaccagacacattatattatttctacaagtaaacagaatatctattagatatgttcacaagggttttatcaattttgaaatccaagtgtataatccccaaatgctgtaaggacttaaattttatagccaaaacaattaacacataaaatgctatttcatctctgtagctgaatacataaatagtatctttaagtaaaagatgcatacttgcatttcattgctaagcaattcataatatatttaaatgctggtaaaacctacaatggcatctgcttcacttctacctttactagagaagtaacaaaatacactgagcaaaggatatgtccaaaaaactaaactgaaaaacagtttctaaataaagtccacagaccattcagataagctagtaaaatagtttttctttaaagtacctgcccgggcggg

SEQ ID NO: 4061 - DNA, 648 bp, Homo sapiens
  misc_feature 525: n = A,T,C or G
cccttagcgtggtcgcggccgaggtactactgtgttatttctaaaaccctgcccgctttttccatccccgcacatgcacaacaacggatgcaatcctggacattttaaaaagttgatagttttcattttcgctcctcaaaggagcctggggtaggaggaatccgcagtgggagctaacgatcctaagcgttgtttctctgttcttcttttcttctatagaacattataaacatcactggttcccagaaaagccatgcaagggatcgggttaccgttgtattcgcatcaaccataaaatggatcctctgattggacaggcagcacagcggattggactgagcagtcaggagctgttcaggcttctcccaagtgaactcacactctgggttgacccctatgaagtgtcctacagaattggagaggatggctccatctgtgtgctgtatgaagcctcaccagcaggaggtagcactcaaaacagcaccaacgtgcaaatggtagacaagccgaatcagctgtaaggangaacttctcttgggcagaacgagccctttcaaaaactacaatatgatgactggtatcaggttaagaatatagtctgtggatggatcatctgatgatgatgggataaatttggatttttgcttt

SEQ ID NO: 4062 - DNA, 301 bp, Homo sapiens
  misc_feature 151, 173, 189, 258, 280: n = A,T,C or G
ccctttcgagcggccgcccgggcaggtacttttttttttttttttttttttttgctttttttttaatttaactcttctttgctctgacttctttatgtctgtgccctatctacaccctttataacttaggaaaaacctgtatataaacatngggaacattctgtattttctgngtataacaagttctanataagtcaaaggtatgataacaagtagaaacaaaactaatttattgctaaggaccttttggggaaatcnaatcatttaccaaatcagtatntttctttctttctttcttttg

SEQ ID NO: 4063 - DNA, 521 bp, Homo sapiens
  misc_feature 372, 388, 446, 488, 504: n = A,T,C or G
gccgcccgggcaggtacccgggtggaaaagtatacagattaacaaaagaaccttggttaaaagaggaaatacaaatcaatttttataagaaattcatagtgcatctgctgggtgtaggagaggaggcaaaaaaacagtggaagcactctaggtatctctggtagaaaaacagctttgattggtttttgatttgcattggcagggaaacctaaacgttagtcttcaaaaatcaaacatttctcaggtgtgagcaactttacttatttcttccccatcttttacaattttcttcaatattggtaaataaaatggattactatcaggctttaaaaactcttccttttgccaagttattctgaaataacttcttanactctaaagaaattanccttgctctgggacttggagagagaggagccttcagtaagtaataaataacctatccnggttggaaagggaggggccacctccagcgtgaatcacaggcngaatcaaaacctctgngaggaacttacccacct

SEQ ID NO: 4064 - DNA, 472 bp, Homo sapiens
  misc_feature 217, 239, 263, 269, 290, 291, 304, 306, 320, 327, 328, 329,330, 332, 337, 339, 344, 345, 347, 348, 352, 358, 376, 379,382, 384, 385, 387, 388, 393, 394, 399, 400, 402, 404, 406,407, 408, 409, 412, 415, 416, 424, 425, 431, 432, 433: n = A,T,C or G
  misc_feature 434, 435, 436, 443, 444, 450, 454, 460, 463, 469: n = A,T,C or G
cccttagcgtggtcgcggccgaggtacatgaacctattaataaaccattcatgcttcccagtttggcagatgtgagcaaactatgtataggaattccaaaggtaactttttcctttcattactttacagaaatactgtcaagtccaatagagagcacaaacttgggaggcggattgggtgggttggaatctctggtctgcccttttattaatcatgngaggtgagtttgggacttaatntttttaacttaatttcccatttgnaaaatnggataataaaattccggcttnnaaaaggtttgggngnacaattaaaaagcnttttaannnngnaaatngnttttnnanngggnaaaaancaaaatttttaaattttnggnccntnnannttttnnaaaanngntnannnnccnttnnggggaaanncccccnnnnnnttttaannaaaaangggntttttnccnaaaaanttt

SEQ ID NO: 4065 - DNA, 566 bp, Homo sapiens
cccttggccgcccgggcaggtactcattaatcttaagtatgttcttaaggttatcgggtgatcttactgtgcttcctgagtctatatgatactttctcctctctccttaaacactcagtgcctctgtctacaccctcactctcagatgatggccatgcttcctattcactgataaaatggagaacatcagaaaggaacttccattgacactcactgccacatctatccatctaccagcacctgctcccacataatctacctcctttcaagttttctcacagagccctggtggaatttcaacaagttgtatcttagtagaatgcaatgtagaaatgggtaaatgcaatttgccaatgaaaaagactattcccttagacctagaacttctatttttatttatttaaccttaggaaataatctgggtttcagtcaaaaatttatataaaggaagtttctttgaatactgtaaaaattagaaacaatacatctgcccaaagatgggaaaaaagcatgtttatcatcattaaaaagcattttttttaaagaataacctatttgataaggta

SEQ ID NO: 4066 - DNA, 467 bp, Homo sapiens
ccctttcgagcggccgcccgggcaggtacgcgggccctacctgttttttaagcaaagttttattggaacacagccatgctctcttgtttatgtattgtctatggctgctttctcactgtaatggcagttgttagttgttagtagttgttacagagaaagtatgacctgcaaagccaaaaatatttactatctgtaaatattttggctacattatgctacttctgtgaacctccacagacttctaattctacgactcagttattctaagactttagttggaggagagtgacacagcacaagctaggttttgaaaacctactttcttctatactaacaagaaatgagggcagctctagtgctacttagctaaagcagatttcaaaaagtcctagggagagctgggtgtggtgtcatgtgactgtagtgcagctacttgggaggctgaggcaggaggatcacttgaaccc

SEQ ID NO: 4067 - DNA, 537 bp, Homo sapiens
  misc_feature 8, 20, 24, 27, 28, 32, 39, 41, 44, 46, 82, 86, 93, 108, 128,154, 262, 270, 283, 291, 292, 293, 294, 295, 296, 297, 298,299, 300, 301, 302, 303, 304, 305, 306, 307, 308, 309, 310,311, 312, 313, 314, 315, 316, 317, 318, 319, 320: n = A,T,C or G
  misc_feature 321, 322, 323, 324, 325, 326, 327, 328, 329, 330, 331, 332,333, 334, 339, 342, 345, 352, 355, 361, 366, 372, 374, 468,507, 508, 520, 526, 536: n = A,T,C or G
ccctttcnagcggccgcccnggcnggnnctcnaaaaagnangtntnagcaagccccattcacaaatgtggaggtaaaaactnaganaatgttnaggttaagtcacacncttaaaaatagaaggcaacntataaatcaagttagtctgatttcanaattgagtgttggccttgagaaagcaggaatgacagatgcaaagataaagcactagagagaggaccagcctatctggagggttggattgattgtatgagtctttcggnagtacctnggccgccaccacnctaagggnnnnnnnnnnnnnnnnnnnnnnnnnnnnnnnnnnnnnnnnnnnncggtnccnagnttggcgnaancatggncatanctgttncntgatgaagagtatctgggctggaaaattttgcaaagctggtttacatgaaggtgttttgtccccaatttcagacaatttccctccaaccattgncatttttttgggtataaaactgggtttaacttaatggtnngaaaagccaaangaaaancaaggacccnt

SEQ ID NO: 4068 - DNA, 482 bp, Homo sapiens
  misc_feature 301, 318, 371: n = A,T,C or G
cccttagcgtggtcgcggccgaggtactgacataggaagatctattgcaaagagaaaaatgctaacagcagaagggttgtctcatatggtcaaagtgctaaaacatactttaggaaaaaactgatgaatatgctgttgactttttctgggggaaagggattttaattatgggggactttaattttctacattatgtttttaaataatgtttacacttacataagtctaatgttttaaagtcataaaagcgatagatttaattttcattttttaaagtagtaggatctcatttacaatagtnaccacactaaaaaaatnacctatactagaaaagataggctgataaacataaaacataaatttactgaaanggttaaatattataaagatgttagtcctcttgtgtaaaatatgtaaattttacctcaatccaattttctaatttttctaaacataaaaattacctcaaacttctttttggg

SEQ ID NO: 4069 - DNA, 549 bp, Homo sapiens
  misc_feature 272, 384, 444, 445, 459, 543: n = A,T,C or G
cccttagcgtggtcgcggccgaggtcacaacttcaccttaaaattaagaatccttgtcaaaatgtttaacctaaaacaaatcattaaaaacaatgagacagatctaaaatgtggaaggcttgtattcttccaaacctcactgacaggacaaacaaaaagaaggggacccattctagattaagacagactaagagaaatatcaaaccacctgcgattcataaatcatttggggatgttacattagaaccggcggggtgggacctccagaaganatttttgggacaagtttcaatatggcctataaagtagctgacatgagattcctgctaattttcttaagtgtgataaaatcgtggttatgtatgtgaatgttctcattcttangaaattcatgctgaatacctaagagataaagtataatatctccaatggttctggaaaagnntatttatagaaaangcaaagaacagcaggcaatgttaatagtcatctagggaaaagtaataggggttgcctactcttacttaatctttctggggggtnaatttt

SEQ ID NO: 4070 - DNA, 439 bp, Homo sapiens
  misc_feature 420: n = A,T,C or G
cccttcgagcggcccgcccgggcaggtacatcaataaaaaggattatggtgtcacacctgaatacatatgtaagcgaaacgaggaaataaagaaagcccaagaagactatgatcgttatatccaggaaaaccttaagaaagcagctatgaaaaggctctccgatgaagaaagggaggcagttttgcaggggctgaaaaagaactggggagaggtgcataaagaattccagtccctctcggtctttatagattctataccaaagaagatccgcaagcagaggctggaagaagaaatgaaacaactagaacacgacattggcataattgaaaagcacaagattatttatattgccaataagtaagaatggatctttaaagtataaccaatttcaatgtaggggaaaaaaacatggaaaattntaaaaaacctccaagtttt

SEQ ID NO: 4071 - DNA, 317 bp, Homo sapiens
cccttagcggccgcccgggcaggtactttttttttttttttttttttttttttaggggttatatatttacatgccaatatttagggcaccaaaattaattctgtaagatgcttctctgtcttttcctctttcatctaacagccacagaatgcagctatacttaccccagggtgaggaggtagtccctggaaggataatactacatttagttaagaaggctcccaaggttaagtagagttacttggtcccaatttggctcatctctctgcctttgaacagtgtgtgtatctgcctcccatgcctcttttcttctccct

SEQ ID NO: 4072 - DNA, 513 bp, Homo sapiens
  misc_feature 27, 69, 105, 149, 174, 187, 353, 417, 457: n = A,T,C or G
cgagcggcccgccagtgtggatggatntctgcagaattcgcccttagcgtggtcggcggccgaggtacngccgggaacatattgtttttatatctcttgcatatncccaagagtgaaattgcttgggtcaggtgggttaaaggccgtanagaagtttcttttttattggccagngcaccagtgggcntcatgccctattaaatcccaagaactttttggggaaggcccaaggggccgggggccttggatcaaccctggaagggtttggggggaagtttttggaagaacccaagcccttgacttgaccccaaaccattggggaagaaaaacctcttgtccttcttaccttaaanaaaaaataccaaaaaaatttagccttggggggttggtaagtggacccgccaccaaccctggttnaattccccaagcctaccttccgggggaaggggctttgaanggccaagggaagaaaattttgccttttggaatccccccggggaaggggtggggaaa

SEQ ID NO: 4073 - DNA, 722 bp, Homo sapiens
  misc_feature 181, 295, 303, 375, 408, 438, 456, 468, 479, 539, 551, 586,602, 620, 621, 626, 683, 690: n = A,T,C or G
cccttagcgtggtcgcggccgaggtactattgaatttcgtttattcccttgtcttggctccattctgggacggagaggaaagacaggtgcctgagagcggagcccgcgtacctcagctgcgcagcctgtatccagtttttttaatgtaaaagtaagaatgccaccttaacctaccctgcanataaaagctaacttttattaataccaccctgaataatgggcactaatccacactcttccttaaagtgatgctggaaaaataaaatcaggggcttcaaattaaaaaaaaaaaacnaaataacnaaaaacaaaaaccaaacctttgcctggccctgaaggtctgtttgcaaaacttctttgtaaatctaatttctnaacactcactgcttcatttctatttcctccctngttgcaaggaaaaaattctttttccttttntctcaaaacctcttaccncaaaataatctngccccaccttnaacccttcccaaatgtttgggaattgccaggaattgaacccaccccaccccaaccctttnttccctattttnaaaacatatattcccaaaatcattttccccaatanaatcccacttaatctnattacttttaataaaacnnctcanttaaaaataggaaaatatttttttcaatttccttaaaaaaaaaaaaaatacctggtnggttctncccttttaaaaaagtaaaatttcccaaaaaaa

SEQ ID NO: 4074 - DNA, 312 bp, Homo sapiens
cccttagcgtggtcgcggccgaggtacttaatattatgtcatttatttggttcctagtatacttgccctccactttatataaaactaatttatgaaaatctggatttattttaaaaagatatcttgccatgaaggtatttgttttatagaaatatttacctccagatttctttctctaataagatggtgaatttaaaacactgtgttatttagaaacactgcatttacacttcatttattgtataaagcaaattgcattgaatcttcgccacttgacccaaaggccaaaaattgacatgagaacaatttgga

SEQ ID NO: 4075 - DNA, 207 bp, Homo sapiens
  misc_feature 26, 39: n = A,T,C or G
cccttagcggccgccgggcaggtacnccggggggcgacngcgatgggaccccagcgagagatctgcagctaggctggctgcacttgctccacgggtcaaggggatcggagggggattgaagaatgcgccattaaaaggaaagatcaaggagtaaaccagaagaagaagaaaaagaggacttcaaagctgggaaggatgaattcttgc

SEQ ID NO: 4076 - DNA, 605 bp, Homo sapiens
  misc_feature 47, 70, 82, 105, 120, 180, 189, 205, 239, 304, 310, 311,312, 335, 338, 347, 364, 372, 388, 389, 473, 498, 509, 518,520, 538, 560, 575, 581, 585: n = A,T,C or G
cccttagcgtggtcgcggccgaggtacaatagattgcagcaaaagtnaactatctgcagtaacatgtganattgaattgttntattacaattattttaatacagnttcattttgaaattnatcataatgtataaagttgactaaaaataaaaagcctaaagggggaaataattaaccagnagattaaancaatccacccccaggnatcaccattacaacttcccctcaaccaccaccancaatggccaaaaccaccaccaattttttaccttaaaataattgccaattggcaaccaacaaccanccaacnnnctccaaaccaattaaccaattgnccnaccaaccgnccaattaaccaaggggnggaattgnttttttttggggttanngaaaaagtttataaaaaaaccttggaaggggaaccaattaagggtttttccccccaattcccctttttttttttcctttttttncaaattggttaattttggggaattnggaattttttnttaaggggntnaattaattaaattttttncctttccttaaccccccttttnaaaaggcctttgggnaaaagngccntaaccggtttggttttcccc

SEQ ID NO: 4077 - DNA, 554 bp, Homo sapiens
  misc_feature 373, 412, 418, 433, 466, 470, 488: n = A,T,C or G
cccttagcgtggtcgcggccgaggtactcccaagtcatgttgcaaaatccttttcaacatgcttgaaataaagaaagctcttaaagttaattttcccttgagaaattcgcaaattcagaggcatctacagctctgaatcaaacatggggtatgagagaggatcagatcaaaacttgtaattttttagtataaggttcactctggcagggagaaagaaaagtttaaaagagggagaagaggtaaagtgagagaaggagaaagatgtgaaaaatttgcacatattgaacttcataagatttgtatatttaacatggaaataaattgaatatattatcttatttgtcacataaagagaattttaagtatcttctanaaaggatttcatttgtaatggctggccaaacacagactntgattnaagaataaacctggngtatcttttgtatcaccctggtgcatttctctnttcnttttaaaaccatgccctnatggaaatttattttttaaaaataatattaaattggtgaaaaatggccggaattttaatctttttt

SEQ ID NO: 4078 - DNA, 361 bp, Homo sapiens
  misc_feature 307: n = A,T,C or G
cccttagcgtggtcgcggccgaggtacgcgggtcagctgggatgcctactgggaccgcaacgacccgctccgggatgtcgatgaggcagccgtgcctgtgctgtgtatctgcagtgctgacgaccccgtgtgtggacccccagaccacactctgacaactgaactcttccacagcaacccctacttcttcctcctgctcagtcgccacggaggccactgtggcttcctgcgccaggagcccttgccagcctggagccatgaggtcatcttggagtccttccgggccttgactgagttcttccgaacngaggagaggattaaagggcttgagcaggcacagaacttctttcttggggggccc

SEQ ID NO: 4079 - DNA, 492 bp, Homo sapiens
  misc_feature 420, 465, 487: n = A,T,C or G
cggcccgccagtgtgatgggatatctgcagaattcgcccttagcgtggtcgcggcccgaggtacaaaataacatcataaataacataaatgagaagttttcaagtatttcaatgtgccttgaaaagtttcaaacagtaattctcacaattggttagacaatcattttttttcttttcttttcctctcatttaagtctcagagcctaaaaagaaatgcctccagtctctgttagccccgatgcttggaatgaaattaacaagattctaccttaaaagagaaaacttatgtgggcttttcaaattgtgaaaatttgttccctcttataaaatataatctttcccctgctgctggtttataaatatgggcatatagcccagagccattataaaagaaaaaacaaccaaccacaataaactaangagccctcatcttgatgggctaaagttctcaaggaaaaaatgaanaagagcaccttgatcaggaaanggaaa

SEQ ID NO: 4080 - DNA, 310 bp, Homo sapiens
ccctttcgagcggccgcccgggcaggtacatacagtaagcttctgccttcccagctgctgtctggttagtggaactaacaatttccttgatggaaattgaataaggtaatccaaaaagaaggctcttttagatgaaaaaacatggatagattattaagcgccaagttttctcttcaacctactgctcaccagtgctccctcctcagctccaaggctgtggagggctcatgaagtcacaatgttctactgagaatttagctttttttttttttggagtgggtataccattttgtaattccacttgataatg

SEQ ID NO: 4081 - DNA, 384 bp, Homo sapiens
  misc_feature 380: n = A,T,C or G
ccctttcgagcggccgcccgggcaggtacacttcccaacctgaaaatggaacaaggattttaaactctttccagtggttcctctcttataaacaattaaaagctaaaaataaaagctagatattaaggagaaaaaaagaacaaaaagatgaaagaggggtggttttcttttaatgcttccaataccatagactgaatgaggatctgagttttgatgcacagtcgtagtctagacttgatcttgttatatataaaaagaagaacatctgcaggacagctctagaagtcacaaggaaaccggtctgatcttggctctgcaatttatcaaccatgtggcctcagggaagtgatttaagccttggttttctcatgtggtaaatngggg

SEQ ID NO: 4082 - DNA, 281 bp, Homo sapiens
  misc_feature 135, 212: n = A,T,C or G
ccctttcgagcggccgcccgggcaggtacaggtttttaaaagccccacagaagtttataatacgtttaaaaacccatattaaaatttgaaaacttaaaaaaaaaactaagaaaacaatggcatatattccttttnttaaacccgtgaagtccattactttttgttcttgttatattctgccaaaaatgggatggggtgggagagatgcatanaaattgttttatctgccttgttaacaaagtgaactcaaggaccagcttttcttttctttcttcttttct

SEQ ID NO: 4083 - DNA, 378 bp, Homo sapiens
cccttagcgtggtcgggccgaggtaccctttcagacacagtatgctttaatatttaagatctcattcaaaaaaaatttttctgatttccctcataccctctctgtctgaaatatttaagatctaaggaatagttgagctgcttattttacatagaggcactattcttttaactcctacattctgaatgctgaagtcagtgttaatttacgttaggccagattgattgggctgcattggcccaagcttggattgcccaaagagaagcttcaggacagcaaagcatggtagaacaaccaccaggaatgatgccaaatggacaagatatgtctacaatggaatctggtccaaacaatcatgggaatttccaaggggattca

SEQ ID NO: 4084 - DNA, 221 bp, Homo sapiens
  misc_feature 45, 87, 99, 112, 116, 125, 133, 134, 140, 156, 161, 163,167, 179, 181, 183, 184, 185, 189: n = A,T,C or G
cccttagcgtggtcgcggccgaggtacatccagagggcaacagtnatagccaacaaccagacaaactagttgaagttaaactgtganttgatgattttnttgaataccttantatnccaaaattnaaaggccnngaaagnttagtttttccttttntcaananaatncccctttttttngncnnnaaancatttaacccaattttttttcttttttccccc

SEQ ID NO: 4085 - DNA, 308 bp, Homo sapiens
cccttagcgtggtcgcggccgaggtacgcgggggggcgctggcacctcctcttacagctttactcctgccagcttgggaaaaggccggagaaggtgaaattctgtgtgctccctccggcgagagactttgtcagctcccgcacagtaacgtaagttttcttgtattcttagtgtagtttcgttaccggaagggggtctcgatccagaccccaagagagggttcttggatcttgcacaggaaagaattcagggtgagtccgcatagcaaagcaaaagcaagtttattaagtacctgcccgggcggccgc

SEQ ID NO: 4086 - DNA, 433 bp, Homo sapiens
  misc_feature 48, 83, 189, 205, 213, 226, 257, 274, 275, 291, 294, 307,309, 334, 338, 342, 345, 364, 366, 373, 384, 393, 399, 404: n = A,T,C or G
ccctttcgagcggccgcccgggcaggtactcggggactaagagccctntggcacaaatggaagaagaaagaagggagcatgtngctaaaatgaagaagatggagatggagatggagcaggtgtttgagatgaaggtcaaagaaaaaagtttcaaaaaactggaaaggacttcttgaaaagcttgaaggnttccaagccgggcggnccaattgnaggccaaaattgnaaaaaaaaagaaattttttggggaaaggccnccaggccaaccaaaaannaaaattttggggaagnggnaaaaaaaaaccgntnccggttctaaggttttccggaaggngganttgnaanaaaaaaaaggccaaaaaancnttggggnggaaaagggcntttcaaaanccaaancccgnttaattttttttttagggaaaaccaaaac

SEQ ID NO: 4087 - DNA, 511 bp, Homo sapiens
  misc_feature 510: n = A,T,C or G
ccctttcgagcggcccgcccgggcaggtaccagtcgaggaagagtaaggagaaggagcacatcacgaggaagaagaggatccacacgcggaagccagcgttgttttaatggcctctcttatgtcttcgttgccttccttgatattttcagttgcccccacaactaactggtgaatgctgtcaatctcagcttcctgttgcaaaaccttttccgtgaatatctcttggagtctggaaatctcaaccactctcccttcgatttgcctcacttcatcaaacaagctgtcatttcaccaattaagcgctgattttcctgttcaaacatttgtatttcttctggggataactcatcttcgcctttgccatctccccacgttcccaattcaggttgtgtttcaagccaaaattttttctggacgttcttcagtggcagggttttcttcagagtcttttgaaaggactttgtgaaactttctcagaagatgtggaatctcttggctttggatttggnt

SEQ ID NO: 4088 - DNA, 267 bp, Homo sapiens
  misc_feature 194: n = A,T,C or G
cccttagcgtggtcgcggccgatgtaaagtgaaagcgcacacatatctgtaagctctgagctcaggatttcacgtgaggtcctttgttcgggaggcaggggggttctccctgttgctggctgaggtcactgcattcatagtgtgacaggagacagcaccatttcagcaaagcagctggagggattgccttgtanagtggaagaccttccgcagaacagaacgcttctctgtcctgttctgctggaagaatgaaaagggatgggtggc

SEQ ID NO: 4089 - DNA, 324 bp, Homo sapiens
  misc_feature 203: n = A,T,C or G
cccttagcgtggtcgcggccgaggtactttttttttttttttttttttttttttatggaaaaattgccatctgacaaatgaatcatagtaaggattaacatcagtggtgatgaaggaacgacgccagtctaccttcaaacccattctttttaaatcctgaatagccagtggcgggaaataatcaagccaatgttctgcttcanaaaattttactatctcttcatcagacaggccaagggatttcataatgccccactggtattttaaaagaatccagctttagcaacagctttactcttttttcctttagctttatccttaatt

SEQ ID NO: 4090 - DNA, 633 bp, Homo sapiens
  misc_feature 550, 574, 602, 612: n = A,T,C or G
cccttagcgtggtcgcggccgaggtacaagctgaaagctgctgaaagctacaggccaatggggctctgctttacttctgccttccatatcttgtgtcctgcatcttaatggtggaatcagatttgtatccagaatactagctataaaggagtctggaaaagacagtttttagttttccaacttctgcgtttcaggaaggcatactacaaggaggaagtcgctgagtgatggctgatcctttcccaggcactcatcttcttaaacatagtatattaattacaatttagcccattcttgatggctcattgtcatttctgtgagcttctcttttcataatggcctgtagttggaataatcataggggccaagggattttaacatctgtagtaactttttgtcctaggttagcttgtatctctcccaccttccataactgctgctgagacatctatgtttgatatcatttgacgtcaacctcccctgcaagccacaagcagggagagcaccttacccaaagcaaccaagttatttggctggtcaacaacctggngatttctggagcttaaaaagaatngggggggcttaattgtcttttgaactangacaaaaaanggagaggaaatttccaattgg

SEQ ID NO: 4091 - DNA, 311 bp, Homo sapiens
  misc_feature 30, 294: n = A,T,C or G
ccctttcgagcggccgcccgggcaggtacnccggggaccacaaagaacatgtgagtcttgtgaacaaggaatgttgttttgttcagcgctaccaagagccgcggcaaccgagaaaacacggagtcgcccctagtggcgaaagtgcggatgcgaaaccgctggctcggcgtaagagcagagccgcggaagagaaccctagcggcggggaactagctcgccttcagtgctcacgggagaaggcaagttagaaagaacctgagacgttgacactgaaaattcagtagaagaaatacnccacatttattctaccg

SEQ ID NO: 4092 - DNA, 300 bp, Homo sapiens
cccttagcgtggtcgcggccgaggtacgcggggggggacaataggtgtcaagcagctggctctggagctgggaagtccaaggcctcttagtgggaaagtgaggcagggtcttgcagagcccactctacacacggccagatacaaatggctgtagaggtcttagataacaccttctcggtcatttatttgcacctcagaagaagccagggcttcggttttctgtttgtttcatcacagttgacaggttaaaagcattcactgcagcgatagctgttaatcccagcactttgggaggccaag

SEQ ID NO: 4093 - DNA, 676 bp, Homo sapiens
  misc_feature 140, 149, 219, 267, 272, 276, 277, 283, 286, 332, 390, 400,418, 427, 430, 443, 480, 487, 494, 501, 511, 525, 547, 551,564, 587, 612, 616, 629, 635, 658: n = A,T,C or G
cccttagcgtggtcgcggccgaggtactacaaagcatatctgaaaggaaagattgagcgcaccaactatttgcagaaacgagctgcagccattcaattacaagctgcttttaggagactgaaagctcataatttatgtanacaaattanagctgcttgtgttattcaatcatactggagaatgagacaagacagagttcgatttttaaaccttaaaaanactattatcaaatttcaagcacatgtaaaaaaacatcaaccaccacanaaatnttannaagatnaanaaagcccttgttataattcaaactcatttcccaacttatatttttnccataaaaattctaacctcttaccaaaaaacaccctcttctatcatttgtcctgcaanctgcttatanaaggattccaaccccaanaaaaaattnttnttcacattcctcncattttttttttaaaaaattcaaccctattattcccnccttatntttcttnaaaaaanaaattttttnacccctaaaaaaanactttccattaaaaaattccantccncctttttaaaaantaaaccaacccccttaaccaatnttttccatttaaaaaccaccttccncttntttttttcccccntttttnccccttcccaaaaaaataacttnccccaaaaaaaaaaaaaa

SEQ ID NO: 4094 - DNA, 388 bp, Homo sapiens
cccttagcgtggtcgcggccgaggtactgtgggttgcagtgtgcttagcagaatgtttgaggcattacatgttgtccatgttggacaacatggacaacatgaaccatgttgtccaaaacaatggctaccaggcacatatggccaattaagcaattgcaatgtcccttagtaagaaatgggatgggcttacagagtataatacacatcagatttcaaagacttcgcaggaaaaaaaagaatgtaaaatatttcactaataattttttttatcgatcgcaggttgaaatgatgctattgcagagataatgagttgaataaaataaacaactaaatgtaatttaatttcacctttttctttttacttttttagtattgaccactagaaaat

SEQ ID NO: 4095 - DNA, 308 bp, Homo sapiens
cccttagcgtggtcgcggccgaggtacaatgagagtgcactggactctccattctctggcacccacacactgcgggggccaatgacctgggtctcactcctgaatcaggtgggagatagggttagcaggaataacttcttgggcttccctgcctcagagctccaggcccggattcgaacttacaatcagcattacaacaacctgctacggggtgcagtgagccagcggctgtatattctcctcccattggactgtggggtgcctgataacctgagtatggctgaccccaacattcgcttcctggataa

SEQ ID NO: 4096 - DNA, 712 bp, Homo sapiens
  misc_feature 382, 421, 429, 536, 596, 638, 659, 660, 662, 677, 688, 702: n = A,T,C or G
cgccagtgtgatgggatatctgcagaattcgcccttagcgtggtcgcggccgaggtacacttctagcttctgccttggcgcttacgacttcagcttttacacttacgacttaagcttttaaaaaatcaaaatgtgattctcaagtagagtgttgatgaataatgaaataaaatgtttatatatggactaatttaggttgaagattattaagtaaaaatacagtttgttgttatcaggtgaatggtaggaagtgaacactgtcaactttttggtgagctctggtttgagaagtatataattcatgataaagatgatttatttggaatatcctatccagatcttttaagtggaaaagtgaagcatgagtctaaactcataccangtcccatctcaagttggtattaaagactaagcctggccnggcgcaanggctcacgcctgtaaatcccaccactttggggatgccaaggcaggtgggatcatgaagtcaaagggatccgagaccattctggccaacatgggggaaaccctgtctntactaaaaatccaaaaaatgggtgggtgtggtgggtcccacctgtaattccacttcctcnggaagctgagccaggaaaaatcgttggacctgggaagcaaangttgcaaggagcccaaaatgnncnctacactccaacctngtgacagaacnaagactgggttttnaaaaaaaaaa

SEQ ID NO: 4097 - DNA, 364 bp, Homo sapiens
  misc_feature 56, 122, 129, 137, 143, 169, 185, 229, 311: n = A,T,C or G
ccctttcgagcggccgcccgggcaggtactttttttttttttttttttttttccgnaggcgcatacaaattaaaccatgctgctaaactaaaaaaaaaaaaatcatcatcatcatcatctgngcatttntttggcanatgaanaatctgattccaaaacaaatgatttntaaggtcctagggaanaacaaaacacatcccttcactaagtattattaatactttttganaaaaacttcaccataagtaaaatttgaacgaagtcaaataacaatagaagttaagcttcaactgatcaattactagtcactntttgtcagttactatacacatgacacttgatagaataatcatttgtaagttaa

SEQ ID NO: 4098 - DNA, 212 bp, Homo sapiens
gatatctgcagaattcgcccttagcgtggtcgcggcccgaggtactcttggcagacatcactaatccatcacagcatgccttcccactgatcacagatgtagcttcagggcattcgagttaccacttaagatggatatgagtgacccttccttatctcactcttctcctcctttcacagaagcaggatttgaggcccagagagggaaagcta

SEQ ID NO: 4099 - DNA, 282 bp, Homo sapiens
  misc_feature 275: n = A,T,C or G
ccctttcgagcggccgcccgggcaggtacagtagacagttttcctgaggaggaagaggaagatgaagaggaagaaggtgaagaggatgaagaaggtgaaggggatgatggttatgaacaaatttccagtgatgaagatggaattgctgacttggaacgtgaaacatttaagtatccaaactttgatgttgaatacactgctgaagacttagcttcagttcctcctatgacatatgatccatatgacagggagcttgtacctcggccgcgaccacnctaaggg

SEQ ID NO: 4100 - DNA, 519 bp, Homo sapiens
  misc_feature 433, 495: n = A,T,C or G
cccttagcgtggtcgcggccgaggtaccctggtgctataggcaagtattcatgttgaagttagtattaagaccaaaattataatgcttttcttaatgggggaaccctaaggctactcactcagtccattgaggggataagagagatggctcattcccatccagttttgtttacaaacgatgttgctcaaatttaggtgactggctactagggaaataaatgaatgtggaattgaggatggaacaaagaattcaatgctttacaataaatggactgtatttgagagttcaagagaggattggagaaaataactgagtatgtaaaaaatggtaagtttctgattgttcagttgaaggcaagtggctggctccgatgaaatgacataactgataagttttcatcttgtgaccctgatatcttagcctctatctcangaatttgagaaaatgagccagagtttatcaagaaaggaattttcattgctggtatcttttgnggtgtgcatgatgtatagtacctg

SEQ ID NO: 4101 - DNA, 366 bp, Homo sapiens
  misc_feature 277, 283: n = A,T,C or G
ccctttcgagcggccgcccgggcaggtacattttcaagacgctagcctcagccttgcacgagagaggccaccatacagtgttcctcctctctgaaggcagagacatcgccccatctaatcattacagcctccagcgctacccagggatctttaacagtaccaagaagacacctgctatggcgatgcgggcagtgcctttgccgttcacgacctggaggaggacacctggtatgcgactgggatcttaagctttgataagagctgtgctgtggctgantatggngtgtatgtgaaggtgacttccatccaggactgggttcagaagaccatagctgagaactaatgcaaggctggccggaagccctt

SEQ ID NO: 4102 - DNA, 415 bp, Homo sapiens
  misc_feature 355: n = A,T,C or G
cccttagcggccgcccgggcaggtacatatagaatagtataaatacaataaatgtttgaattatcgtataacttgagtctaaattttaagttagtatcctgtattaagaactgggttgatcaaatggttctttctttgcacatatcaaggctttcgactattcccaatcaggtcttcccaaatttgggcatattcctgcctctgcctaccctgttctaatttggcactctaaagatagttcataaaaagcaagccaaagatagaaaagagagctaaggctcaggaggaatttactctttacatttgggggaaggaaaatgaggcttgtctacagcagggactggctgtcttccanaaatggtttcccaaggtgttccctacctctctttttcttggatatctttttgcattatag

SEQ ID NO: 4103 - DNA, 372 bp, Homo sapiens
  misc_feature 83, 92, 137, 166, 305, 349, 363: n = A,T,C or G
cccttagcgtggtcgcggccgaggtacttttttttttttttttttttttgccgttaaaagaaaaagcagaaaataataaagtnatataatgnggtcttgcaaaaaacagtctgagatcttacatttcaaaacatgtnttgcccgttcccggcacctacaaggccanatgagctacctgctccatccttcccattctccctgcacgtcccattcaagctcttctgcaagtggccatgttaaaaatttataaaaatatccgagtctgcctggcacgctcagagattctcatgacaagttcttccctnactgagcacttccctgaccacccaaaataatcaccccctccatntacctacacacatntgcacgtgc

SEQ ID NO: 4104 - DNA, 519 bp, Homo sapiens
cccttgcggcccgcccgggcaggtactttttttttttgttttttttttttttctataaggtagagtggatattcaggctcagattttagctaaattaagaaggacctttctctgtccagaatagtatcacaaaattaagactggctctggaagagagacagaggatgccctcttttcattgtcatacaccatttgaattgtatttgataaatttatattgtgaccttgaaaatgaaaccactcagaaatcctggttaatttctgccccatgcgtcagtctcaaaggggagacctgcctttgccaacagaccattcagtaagaaacaaaaatattaaaactccacaatcacaacttatatggtcaataatggtttcaaaaattaaaaaaattgatcctggcatatttacaagcaattatatataaatacaggaacatgtatattatgaattttctttaaactatttgcctgcattgattatagagagaatgaacctccaatgaaatctgattgaataaat

SEQ ID NO: 4105 - DNA, 302 bp, Homo sapiens
cccttagcgtggtcgcggccgaggtacgcggggctcttttctcgggacgggagaggccgtgtagcgtcgccgttactccgaggagataccagtcggtagaggagaagtcgaggttagagggaactgggaggcactttgctgtctgcaatcgaagttgaggtatctcatttgccatgaaactgctacacctgctcatggcgtttaaaatccttacaactttttgagaaaacgacgttgcactatgtggcaagagtcacaggatagattctatttttaagaatttatcctatggaaataattaa

SEQ ID NO: 4106 - DNA, 510 bp, Homo sapiens
  misc_feature 32: n = A,T,C or G
cccttagcgtggtcgcggccgaggtacatggnaagggtttagctcatcctcaggaaccccagccatggtcaagagtcgagccacttcctctccaggctggcagtagcgcccactagctacaggtgcattcccctgcctattaatattctgcttgacccaaggcaactccagccagccccactgaactattcttaccagccgctgccatggcctgctatctctcagcagagtcaagcaacgctgcaaggctggagaatccagccaagagaagagccaggtagccttatccctccagcctaaccggtcacctagtcccaccagaaaccgccatcccaactgtagaaagcccaaaaagagggccagagccaggagcagcaaagcacccagcagcttaagaaaacgagtaaacagtcctactccacagtaaaacccctggcttagaaactgaaacatgacctgggcccaaccccctaaccgccctgtccacacttccatcaaacttcgaaaaag

SEQ ID NO: 4107 - DNA, 294 bp, Homo sapiens
cccttagcgtggtcgcggccgaggtacagtaatcctgtgagaaagacaggacagaaaccactgtgcctattttacagatacgaaaactgagacacaggtaaaggggcttgtctgtagtcccatagctagcagatggctggagccaagactgaggctcgttcttcaatgctgagccagggctccttccgctgcaccacaagaacgctagtccactcgccaccagccttctcattccctcttcctccattctaatcatttctagctggctggcctccacagagcataggaaaacag

SEQ ID NO: 4108 - DNA, 540 bp, Homo sapiens
  misc_feature 139, 221, 241, 244, 255, 277, 304, 311, 321, 350, 385, 387,392, 400, 402, 411, 413, 415, 417, 450, 453, 459, 460, 466,478, 510, 518, 523, 530: n = A,T,C or G
ccctttgagcggccgcccgggcaggtccttctatggattatagaggtagggaggcacctcatatgaactacagagacagggatgctcacgctgttgacttcagaggtagggatgctcctccatctgacttcaggggccnggggccacttattgattttaaaatttttagaagggcccgggggaatggggatcccccatggccagaattttttagggggggnaaaggggggatttttattcnagnaatttttgggnaatttttttaaggggggcccanggaagaaaaccaaggtcccccggtttnccttggnattttttttnagggggaaatttatggaaggaattggttnatttctttggaattttttggggaaccttttttttngnaaggnaccaatananggaacccgngnananccaaccaaaatggttaaagaaacctttttttanagnaggggnnccctgnagggggttttcnaaggggttaccccctttctggggcccccggtngaaacccnaccgncctttanaaggggggcc

SEQ ID NO: 4109 - DNA, 444 bp, Homo sapiens
ccctttcgagcggccgcccgggcaggtacttacatccccccagccctgggagcaagaggacagcgagacttcaagccttcacaccttagcacaaagtgtgtcagtccccacacatcactcctgtgagaactctaggacccagcatactaggaatatcttatggatcagagctgtcaccacaacggtatccattatggtaatgtggaaatcataattggcttgtgaggttaggagagagaagaaagttactgtatttgaagttcaagggagcagtatttgcttctaaattgctataccaaagcagggaggaaaagacaaatgctatcctttttgttttaaatctgtaaagaactaaagaaatggagcagtattttgatttatcctttttatctgattacagggaaaggcaagactacaagttactgagcacctccctgagaaaat

SEQ ID NO: 4110 - DNA, 462 bp, Homo sapiens
  misc_feature 407: n = A,T,C or G
cccttagcgtggtcgcggccgaggtactatgctcttgcattcttttttcttgtctcttctaatctgctttgattttctattatacatcagataaattgccttccatagaagcaagggactagtgtaatttcaaagcaagaatttaccattaaattgcattaaattgtataggaaattgttgagataaagtagttaaggtatttatattaatgtgaccttgatagaactttagagaaacaaagtaatcagagtgggcaatactacttctgaatttccactctgagttaaaagcgaggttaagctttatttctaatataaatttgttttttcctgctgtttgtatgattataaattatattaagaatcgtgtttcttaggatttacccaaaagagttatattgttattnagaaagtctctggggttaaattgcttgtgtctattaattctttaaatatgatttt

SEQ ID NO: 4111 - DNA, 321 bp, Homo sapiens
cccttagcgtggtcgcggccgaggtactctattccttttacctagccccttatatttttatagcactttccctaatatcacatatgtatttgttgactttcttctctggcagaaggtaagttccatgaaagcagagttttgtttggttcatttgcctgttccaagtacgcgggggtagatcttcaatttggatatttggaggagtgaacatcgttgttttgctggagggaagatcttgatggtgtttctttccccaaaaattgacttagatattaaaatttggtgcttataagagagagttaaaaaaaaataggattgctt

SEQ ID NO: 4112 - DNA, 523 bp, Homo sapiens
  misc_feature 504: n = A,T,C or G
cccttagcgtggtcgcggccgaggtacaaaatcatgtggatagatgtgcatttgtgggtatctgtgaatacaaatacacaattttcagacagaagtagtataagaaaaggaaatcaaacaaagtcaaacattttaagtgtagctcttggtgcactttaaaaaattattaaattgaagctgtagtttattctcatcattgtcatcctatattagtgattttctttagcttttgaaattaaattcataatattacaattctgaattcctatgtatgtatatgttaagaatcctttaatgggactgactttcatatgtgtgtggctgcattctgaaatagttgtctagttgatacataaagccagtgagtgctatttggtaaggatatatttatatttaaaggtcttcataccggttattaactagctcccaatattactggaaatggattttctcccaaaatatcctattatttaaattatcatgcctggcaaaatttaattaatnacctttgggttttgaaaaa

SEQ ID NO: 4113 - DNA, 328 bp, Homo sapiens
ccctttgagcggccgcccgggcaggtacatgattgttttggttataatttatttatagaatgtatcttttctatattacattcttaatattcgccagatattatattgaccattctctttaacttcttaatgtggcatatttcaactctcctttcccacaaacagcttcatctgtctccaaggttaacattctgaagctggagagtccttggagaaactctgctcagcttttttgtgacatttagaaaaatgcatttggtattctccaaaccagaatgatacattgtctcaaaatctgttagacagctgatgggtgtttttgagcaac

SEQ ID NO: 4114 - DNA, 366 bp, Homo sapiens
  misc_feature 52, 307: n = A,T,C or G
cccttagcgtggtcgcggccgaggtacaatacatcatatgaaatagagaaanctaactataaaccagtatattacaaatccttgataccgttctcaaattgattaattcagtggtcttcaaatactaggtcttgtatgaccctcacatatatttaagttgccatctaaaactttatcataagcttcctagttataaaacatggagtttcctgtgtacaaagcagactgcccgcaaatcgaccggtggtaaagcacccaggaagcaactggctacaaaagccgctcgcaagagtgcgccctctactgngaggggtgaagaaaccttatcgttacaggcctggtaccttgcccgggcggccgctcgaa

SEQ ID NO: 4115 - DNA, 422 bp, Homo sapiens
  misc_feature 287: n = A,T,C or G
ccctttcgagcggccgcccgggcaggtacgcgggataaaggataatttatatcttattacagactgatattttgccttttcatgtgtcatcatactgtcagtatattaaaagaaattacagcctaaaacttaacatataccatacatatatattaaggtgtcaaatagctattctcactcatcttacaaatattgtaagagcaataaaaattaattgaggaattataagcctacaggtcatcagccttgaggtgattactgatgatttgggcttacacacatgtcancaagatagggagtgtggataggggagggctggtagctaacaaggggcctcacagagaaatattagtgactttaaccaggtttcagaatctgggccttacctttacaggttcaacaaaagaatggcatcaatagag

SEQ ID NO: 4116 - DNA, 212 bp, Homo sapiens
ccctttcgagcggccgcccgggcaggtacaccttcactaacctataataaatccttagaagctatcaaaaagagattactcttttaaaggtcccatctggagtaaaattccatgactacaatagtcattctcgctacgctttcttataatttctaaagtaaatctagtagttactcaaataacatttttcctctttgagttttttttttttt

SEQ ID NO: 4117 - DNA, 389 bp, Homo sapiens
  misc_feature 354: n = A,T,C or G
ccctttcgagcggccgcccgggcaggtacttttttttgttcgagaataaagactatacaattagtttgaacttctgttatgttttttaattaggacatggaaaggaatatagggtaaggtcaataagcctcgctgtttttgatctcaatgaaaaattctagggccaggcgcagtggctcacgcctgtaatcccagcattttgggaagctgagggaggcggatcacaaggtcaggagttcgagaccagcctggctaacacagtgaaaccctgtctctactaaaaatacaaaaaattagccaggtatggtggcgggcgcccgtaatcccagctactcgggaggctgaggcaggaanaatggcgtgaacccggggaggtggaaggtttgcaa

SEQ ID NO: 4118 - DNA, 304 bp, Homo sapiens
cccttcgagcggccgcccggggaggtacaagttgtgacattcgttcaagttgctgctacatgggtattctgagctggctaccaggaaggactcctgcgtttccgagagccaggtcagcgtctctaggagccgtggtgcaggtgcatggtgcccagcacggcactgtcgtaccacctcaagtgcctccccagctcaatctccttgttacagtaaccagtcagatgacggctcagatacagagatggcttctggttctaacagaacaccagttttttcctttttagatctcacttactggaaaaga

SEQ ID NO: 4119 - DNA, 311 bp, Homo sapiens
  misc_feature 244: n = A,T,C or G
ccctttcgagcggccgcccgggcaggtacccagatgccacttgtcagcagcaggatactttttgcaacacgaaagcataattattttagaagaagagagtagaagggcagaatagaattcaacttacagaagcacggagtagtgtgtggttggctgttatctgtccccctgggaggaggactgttttgctcccttgttttgatgttaaacagtagcttaaaggctttcccccccataccaactnacagccaaatgacaaaagaaccgtgggggtttcaacagaattctacaaaacatgcatttttcccttt

SEQ ID NO: 4120 - DNA, 414 bp, Homo sapiens
cccttagcgtggtcgcggccgaggtacacatcctgtatgtggggtccatgcctcttaagaactcctttcgaggaactatccggtaagaagtatccttttcacatataccttagcaactggaataagattaggatagactaggacaccagaatttttgagcaacagttacaattcctattttttcttttgcccgtttttctttcttctttgtgctttgattctcccctagtagtatccaaaaaatacatggatgatctaggacaaaaggaaaatattaacgagagggtttaaaagtaaagcaaaggctgggccgcggtggctcacgcctgttatcctagcactttgagaagctgaggcgggtggatctcttgagaatcaggagtttgagaccagcctagccaacatggtgaaacc

SEQ ID NO: 4121 - DNA, 425 bp, Homo sapiens
  misc_feature 229, 284: n = A,T,C or G
ccctttcgagcggccgcccgggcaggtacgcggggggggcgcgggcctgtgagccagttggagttgcggcggcgggaacgattgggctgagcagaggacgacatgttgcttttcgtggagcaggtagcatctaaaggaactggtttaaatcctaatgccaaaagtatggcaagaaatttgctcctggaaatactgatgccaccccagtaactcatggaactgaaagctnttggcatgaaatagcagctacatcaggtgctcatcctgagggtaatgcagagctntcagaagatatatgtaaagaatatgaagtaatgtattcttcatcttgtgaaaccacaagaaatactacaggcattgaagaatcaactgatgggatgattttaggaccagaagatctgagttgccaaatatatgatgtttcc

SEQ ID NO: 4122 - DNA, 359 bp, Homo sapiens
  misc_feature 17, 24, 28, 60, 61: n = A,T,C or G
gcagaattcgccctttngagcggncgtncgggcaggtacctgattttatttccagttttnntccgaattcactggggaatgggacgattttgcttttgtttcttggccaggaatcgcttaatcctgaaagtcttgtgagaagacatggcgagcagcggagtcaagaacacaccacgatggcggagaaaggaagagccccgcgtacgcgggcagaaagagctgaacactctgtgcagcgagttacatgttgagccatttcaggaagaaggagagacgaccatcttgcaactagaaaaagatttgcgcacccaagtggaattgatgcgaaaacagaaaaaggagagaaaacaggaactgaa

SEQ ID NO: 4123 - DNA, 298 bp, Homo sapiens
cccttagcgtggtcgcggccgaggtactcttctgacttttcccccacaagctgctaaaaagatcattgcttttcgttatattttggactggtatacctggctaatcagcattcactggcaaacagcactgtgaggaagacagctgcctaaggcctgtttgtcaccctggaagggaagcagcagagaggtagaagtatcctgagagaagaaaatagcgtcaaagagggagaaagcagcagctccatcaagcccttaccacatgctgtgcctggactttggtatctcatcactttgggtg

SEQ ID NO: 4124 - DNA, 331 bp, Homo sapiens
ccctttcgagcggccgcccgggcaggtactcggtccgggacccttggcgacagaagacagcctccgagagcgcgggcttcctgtataaatgcctacttgtctggcaataaagcagctcccactaaccccaacccaggccttaagactggttggatgactgatttaagcctccattgagctttattttcgcacctgtttaatgggaaaataataaaagcttagatttattgagcactccctgtatatttgaagcatggtgctaagcatttaatacatattttgtcatttaattctcattaaaccaaatgagatagggataattattttggcc

SEQ ID NO: 4125 - DNA, 382 bp, Homo sapiens
ccctttcgagcggccgcccgggcaggtacctactttttgaggctgcaagattaaatgagatgatgtttgtaaggcccctaataaaattggtgtaagccaagccctcatcaagtggtattgataccatgttggagatgatggaggagaacaacttatgttaattgtctttaaaatgccttaacttcaatttttgggaaatttagcatatttcaaacagaaataagatgtaaatatatattcaacactttagtaacaggataattattccaacaacatattagttgatcttaggtatcaaggataaaaggaatacattgtaagtgtgataatataaataaatgtaaattctttaaaaaaatttttttaatttttaacttttgtg

SEQ ID NO: 4126 - DNA, 389 bp, Homo sapiens
cccttagcgtggtcgcggcccgaggtacctttgtgtctagttttaaccttttgatcccaggtcctgccatgaccttcaacatgggggccaggtcttcagcatagcggcacataggaccagtgcacagaaacaactcttgggctcccacagccaagggaaactgacctttgttgggaaccacacctggagaaggcttgtgtccaaatataccattgaagaaagcaggcattcgaatgctaccaccaatatcagagcccacaccaataactgagcaggcagctgccagtgtgcagccctcaccaccagaacttccacctacaatatgctgtaaatcatatgggttgtttgatcggccatagatcttgttactggattaataccacatacac

SEQ ID NO: 4127 - DNA, 736 bp, Homo sapiens
  misc_feature 600, 656, 676, 684, 699, 705, 735: n = A,T,C or G
cccttagcgtggtcgcggccgaggtacgcggggggacaaacagtgtgcacccaggtgccactcagatcagtggtgcatgatcggccatgcagaccagagctgctggggttagaacattcttactttgtttcctccccatattctccattcaaggaggggtctttctcctggcatgattacaaaggatagatttttgcctgtttatggggaaatcacaaccagaaatattcaacttgagaagaaactaatgggcctagcaacttaatatagagcagactcacaccagaactacattccctggccctctgcctgtgtgcttctggccaggccttggttggcaagtctgacccgagaaaaggatctgcagaaaatcagactatgggatcactttgtttgtgcattgggaatgacattctttcccaccccaggaaaacctttgggactttcagagacattgtggctagccaaccacatggtcagcctcaaagttgagaggctcagtaaccctcctatccctagagaattccaaagtgtggatgtaatttaactagaaagccattggggactatcttgtgatcctttggaaagtatgctatggtnggggatatctttgcatcccaagccagagggaaccccaatgactagtaaaaaccggngggctcaatgccccacttanccctctgncctttgaattttgancattantggcgtttcaacctgataaaaccggggaana

SEQ ID NO: 4128 - DNA, 375 bp, Homo sapiens
ccctttcgagcggccgcccgggcaggtactaattgcacttaacacaatgaacctttagtttccaaccagttttcattctctgcagacccgggctttctttttataaaaactgctttcaaagggcatagagacaccacacatggtccacagtaaattcaaatagagaggtgcaatagttgcagtggtaaacacacaaaaaaatacatttttttggactaaaaatctggtcacggataaaagcatgtgccttttcattcttctctgggatgttacaacagcaacacgctctaaaacaattaagttacatgcataatgctaaaagaatgtgagcaatcctataaccagctttaagccatctgcttgatttcttttttt

SEQ ID NO: 4129 - DNA, 458 bp, Homo sapiens
  misc_feature 58, 74, 80, 396, 409, 413, 421, 436, 438, 455: n = A,T,C or G
cccttagcgtggtcgcggccgaggtacttcccacttttcataacgagttggagcctanagttgatctactccancgactntttcgacttctttgcggccaccatatgtcttacctgaattactgcaacagcctcttaatttgtcccccattgctaatcttatttcatatccttcaaattcgtgtccatagtttagctaaaatgatctttctagaatgtatgtgtgatctgtctagagcaccatttaagcctcccagtgctttccttgtctctctagcttttatccgtcaccaagcccaaactccacattctgaccataatacgtgctttctaagttccaccatgccatgatctcctgctttcaatacatgcccctttggctcttctttaaacctcncctacttgttttnctgntatctcangtggtattaaatganangaaggaaataaaattgnaaa

SEQ ID NO: 4130 - DNA, 433 bp, Homo sapiens
  misc_feature 1, 2, 5, 13, 17, 22, 23, 26, 65, 67, 68, 76, 89, 93, 99,103, 105, 146, 210, 211, 273, 279, 313: n = A,T,C or G
nngcncttcggancggncgtcnnggntatgtgctcaattcccctttcgagcggccgccggggcangnnctttactnctccttattttgngggngggaangcancncggaaatgccctgtgactggcagcggaaaaggcgaccaccncttgtgtatcttcactttagatcttgcaggcatatcaactgtggttctaaatggctatgatgtnntaaaggaatgccttgttcatcaaagcgaaatttttgcagacagaccatgccttcctttattnatgaanatgacaaaaatgggagatgagatggatcaaggtnaaaatgacccatcatctactttctccaaagaaaacctaattttctcagtgggtgaactcatcattgctggaactgaaactacaaccaatgtgctacggtgggcgattcttttcatggccc

SEQ ID NO: 4131 - DNA, 663 bp, Homo sapiens
  misc_feature 372, 390, 400, 547, 550, 556, 569, 574: n = A,T,C or G
ccctttcgagcggccgcccgggcaggtacaatattgtagctatctgtttacctgtctttattccccatccaactctaagctcggagaagacgggaacactggaatctccacaatctagcagagtgactggcatacagcacagtaaaggcttcacagctagttgctgaggaataaaatgatgcctaaagtaaagacttttcaacaaaaaataattaatttaatgttttagaaagccctccatgtaacttttgtaaatcatatttaatcctctcaaaatacaaagaactttgatattttcttctgtttctttcaaaattcaataaaaaggctttaacttaaaccctttgtgctgatttttcttataaacatgcncaactcaaaaaaaagttnaaatccccanaatactaaaatcaaaaaggagatactttactggcttaagtgaaaaattctaaagtcttgccatgtgaaaaactctttctatcctaatcataacaaaatcaaggcttactaatttaaacaaattcttggaaagtatttctaccttatnganaacaanccaaacccccatnttttntttcaacaaaaatatggtattgttgtattaactctccacatcctttttttggttattctcaaaaaattttaaaaccctttaaaaaaaaa

SEQ ID NO: 4132 - DNA, 316 bp, Homo sapiens
ccctttcgagcggccgcccgggcaggtactgtggattgtattttcaatttttattgaaatctgtcctttgcccacagtcgggtttcttttcagcctggcccaatctctttcagttcctgggcttgaaggcctgtgctaatctgtatcagacatcaaggcagataattgaagggagaactctcagggggagagggaaagggaaggtcacctcaatctgtcccacttaactagggaaaaatttctagatgaaatttgtgaaatgttcaaattacaaaagggggaagatgaagatggtttgggtctgaaagaaaagtat

SEQ ID NO: 4133 - DNA, 351 bp, Homo sapiens
  misc_feature 89, 189, 232: n = A,T,C or G
cccttcgagcggccgcccgggcaggtacaccactgtgcctgctttgaatcctttacgaagagaaaaaaaaaattaaagaaagcctttanatttatccaatgtttactactgggattgcttaaagtgaggcccctccaacaccagggggttaattcctgtgattgtgaaaggggctacttccaaggcatnttcatgcaggcagccccttgggagggcacctgaaagctggtanagtctgaaattagggatgtgagcctcgtggttactgagtaaggtaaaattgcatccaccattgtttgtgataccttagggaattgcttggacctggtgacaagggctcctgttcaataa

SEQ ID NO: 4134 - DNA, 156 bp, Homo sapiens
  misc_feature 106, 145: n = A,T,C or G
aattcgccctttcgagcggccgcccgggcaggtacttcgtgtaattccacctacccagacaggaatggcacaagtgattatacctcaggggcaacttgtggatgtngaaatagtcctcgggatgtccctgaagagaaacccagtnacagaaactta

SEQ ID NO: 4135 - DNA, 428 bp, Homo sapiens
  misc_feature 54, 76, 77, 118, 170, 175, 185, 213, 226, 241, 242, 245,248, 261, 265, 274, 276, 282, 304, 316, 338, 347, 355, 364,366, 371, 372, 380, 397: n = A,T,C or G
cccttagcgtggtcgcggccgaggtacgcggggtctatattctaactgtagccnttcctgtgttcctggttatccnntatctgctgttctggaaagaaacagaccagtggtatggagnataagaaaaactgatgcacctcaacccgggattgttgaagggaagagggaanaagantaagggaagnagggaaattgggaccaaggggaatattnaagggagggaagngaaaggggaggaaannagnaanacccttttgaagngagnaaaaaccangnaaaaanaggttgaattgccttggaaagnaaaaaaattggngttggggccacctttgttccanggtccaaangaaggggnaggggaaangnaacannggaaaaanaaccctaaaaaaagtcnaagtaaggggaaggggaattggaaaaaattt

SEQ ID NO: 4136 - DNA, 515 bp, Homo sapiens
  misc_feature 366, 371, 477: n = A,T,C or G
cccttagcgtggtcgcggccgaggtacttttcaatgtgggaaaggtatagaatcaatctccaagccttgaatagagcctgatgaaataaacgcgttcttatttatcaggctttattactagcgatcaaatatagcacagagaaggattagtagaggaagacattctgacatgaagggacatctgaaaaggctggagataggaagactaaaaactaaaaaggctatttagtgttagcgcaaatgttttactatctcacctcaaaatttaatgaagtattttaaatatattgtgacaaagtgtgataagtaatcttaagttaaagtctttaagaatgatttaacaccgatattcactttctctatttnaaaangcaaatagctggacgtgggtggcacacgcctgtaatcccagctactttggaagctggggccgggaaggatcactttgaccccaaaatttgaaacccaccccgggcnatataacgaggaacccgtctttttaaaaaaaaaaaaaa

SEQ ID NO: 4137 - DNA, 423 bp, Homo sapiens
  misc_feature 1, 4, 7, 178, 215, 221, 231: n = A,T,C or G
ngtncanctttctatttttagcctatatttggaaagaaagcacttaacattttaggaattctttttaaagctgcttgcaaagtgttggtgattttactgaaaacttttgagatcttcattttacaggcagacctgtctaactacaagccagacttgggttttctcctgtagtttgaanacacactgactcctgacaaaatgcagcctgcaacttnctgganaacaactcantgtcacattaaagtttattatgtatttaatgatacactgtttaattgacagttttgcatagtttgtctaactttagagaattaagagcctctcaactgagcagtaaaggtaaggagagctcaatctgcacagagccagtttttagtgttcgatggaaataagatcatcatgcccacttgagacttcagatta

SEQ ID NO: 4138 - DNA, 185 bp, Homo sapiens
  misc_feature 102, 110, 137, 161, 168, 176: n = A,T,C or G
cccttagcgtggtcgcggccgaggtaccaactagagtggggaaaaagaagaagaaaacaaagggaccagatgctgccagcaaactgccactggtgacacctnacactcangtgcccgggtaaaaaattaacttgaanttagaagaagaaattaaaagactntcttctnatgggagngaagaattc

SEQ ID NO: 4139 - DNA, 426 bp, Homo sapiens
  misc_feature 297: n = A,T,C or G
cccttagcgtggtcgcggccgaggtactcagtttattgaattgatgaattgatttttttttagtaatcacataaatttctgtaagatttgttatacattgtttactgtcacagaatcatgttttatatcttcaagctcaaagcaagctttcaaacttgaatttagttcttgcataaatatggatgattgtttctccattgctgaagcagtgtattatttccataatgatctgtaaagtaggtgggtttcatgacctaagtgttattgttgatctttatatatacaaggaaaacgcanagtcatcgttcatttgtagctgcatttatctctggttttcaagcatttctataaaataacaattaagcttagtgtgatggttaatactgagtgtcaactttgattggatggaaaggaagcaaaaatatt

SEQ ID NO: 4140 - DNA, 529 bp, Homo sapiens
  misc_feature 78, 299, 467, 495: n = A,T,C or G
ccctttcgagcggccgcccgggcaggtaccccatcgcggtgctcatagacgaactccgcaatgaggacgttcagcttngcctcaacagcatcaagaagctgtccaccatcgccttggcccttggggttgaaaggacccgaagtgagcttctgcctttccttacagataccatctatgatgaagatgaggtcctcctggccctggcagaacagctgggaaccttcactaccctggtgggaggcccagagtacaaaggcatggggctgtccatgggcaccatgatctgtggctgggataanagaggccctggcctctactacgtggacagtgaagggaaccggatttcaggggccaccttctctgtaggttctggctctgtgtatgcatatggggtcatggatcggggctattcctatgacctggaagtggagcaggcctatgatctggcccgtcgagccatctaccangccacctacagagatgcctactcaggangtgcagtcaacctctaccacgtgccgggaaggat

SEQ ID NO: 4141 - DNA, 246 bp, Homo sapiens
ccctttcgagcggccgcccgggcaggcaacacattaagttacttcctattatagcccttatgcctttgcctatgtcagctatcccaatggtctctaaacatttttgatcaagcatccttactactaaaaaaatttgtaacacaccctgaaaagttatatgtattatatccactttcttatgtatttacataataaatacatagtatacacactaatatataatgtatgtaatactaaagtattaca

SEQ ID NO: 4142 - DNA, 439 bp, Homo sapiens
cccttagcgtggtcgcggccgaggtacaagacagctcataggagaagggggaaaaaattaaaaaaattaaaaaaagctctgggcagcaggcagccaatcaaaacgccagagcccgtaatgagggcgattgatggctgtttggcttttactgcagggtaatgaactagaatccagtctgaggagggggaaaaatatgaatattcatgagactgtgctcctgcctttgatgattaaagaaatttttaatattcaaataagcgcttgccaagtgattaacaaagaacaagcacgcagaaatatggaaatgggagccgggaaagatttgagaggcgaacgtacctgtggaagttacttcaaccctgggaagtagggactttccagcagtcccatattctggatgggatttaatgatggtaaatgtaaaactggaagtggagat

SEQ ID NO: 4143 - DNA, 270 bp, Homo sapiens
ccctttcgagcggccgcccgggcaggtacaaaatcatgtggatagatgtgcatttgtgggtatctgtgaatacaaatacacaattttcagatagaagtagtataagaaaaagaaatcaaacaaagtcaaacattttaagtgtagctcttggtgcacttttaaaaaattattaaattgaagctgtagtttattctcatcattgtcatcctatattagtgattttctttagcttttgaaattaaattcataatattacaattctgaattcct

SEQ ID NO: 4144 - DNA, 330 bp, Homo sapiens
  misc_feature 160, 161, 162, 163, 164, 165, 166, 167, 168, 169, 170, 171,172, 173, 174, 175, 176, 177, 178, 179, 180, 181, 182, 183,184, 185, 186, 187, 188, 189, 190, 191, 192, 193, 202, 232,244, 256, 268, 300: n = A,T,C or G
ccctttcgagcggccgcccgggcaggtaccaagaaactgaatgctcatgtttccacctgcttctcgagaaagacaagacagaagcgtgatctcggatggctgcaagacaggtataacccccccgcgtacctcggcccgcgaccacgctaagggcgaaatnnnnnnnnnnnnnnnnnnnnnnnnnnnnnnnnnncgaagctcngtaccaagcttgggcgtaatcaatggtcantagcctgttttnctgtgtggaaanttgttatcccgntcacaatttccacacaacaataccgaagcccngaaagccataaaaggtgtaaaaagcccttg

SEQ ID NO: 4145 - DNA, 390 bp, Homo sapiens
  misc_feature 86, 190: n = A,T,C or G
ccctttcgagcggccgcccgggcaggtacaatagaggatcacgtaattgcaggaaatgtagaagaatttcgtaaagatttcatttntagaatatggctgacctacagggaagaattccctcaaatagaaggctcaactttgacaacagactgtgggtggggctgcacattgagaactggccaggatgctnttggctcaaggactcatactacactttcttggtagagcttggacctggcctgatgctttgaatattgaaaattcagactcttgaatcatggacttcccacactgtcaaaaaatttactgcatcatttgaagcatcactttcagggggaaaggagaattcaaaaacccccaacaaatttcttctgaaggaaacaatttggg

SEQ ID NO: 4146 - DNA, 496 bp, Homo sapiens
  misc_feature 286, 337, 395, 423, 434, 437, 438, 467: n = A,T,C or G
gatatctgcagaattcgcccttagcgtggtcgcggccgaggtacttttttttttttttttttttttttaaacagatggtcatttcagctcctggctaaggccacaaagcaaagtgtcctttattcactgattgttgtttgagcaagggtgccctcctcccccttgccaggctgctgggagtgagacagatacagccttggcagcagtgtcttggagtgattgtgaataagggatgttttctctcctgtctctctcccagtgtctggatgccagccgcccatggctntgctattggatcctgcacagcttggaactgctagatgaacccatcccccanatagtggttacagagtgagtctgtctttgggaaatctggggtgttctctgaaattgtnttttgagtttgggattttgtttatgatnctgttttggtngtnngggaatggaaaaaaaacagtgccacaaanaaaatctttgctctttttaatgacctccg

SEQ ID NO: 4147 - DNA, 590 bp, Homo sapiens
  misc_feature 202, 213, 229, 256, 259, 278, 280, 286, 297, 335, 338, 344,348, 357, 361, 366, 388, 414, 415, 428, 464, 467, 477, 490,506, 517, 527, 540, 548, 550, 552, 571, 577, 588: n = A,T,C or G
ccctttcgagcggccgcccgggcaggtaccttaattactactgtatttgcaaattaagggaaatttaggtcatcattatgattttctgaaatctaaaaggaactgaccatcattaccaagtctttctagataatcaaggggttagatggcctgtttttaatggtagggaaatttaaatggtagggcatttccctgctttttncagggtttttnaggtatggaaattcanaaggccaattaattttttaaatttttngcntaggttgccaaaaatgggnanccccanttaaaatttgngtaaagggggccttattgttaaaacttatccaccaagnttnttggcnatcnaccccaacnaggncccanttggcccccagtttggttccanccaaggaatttcccttctttttggtnngccaattttccantccttttttccttttaaaaaaaaaaccaccaatttnaanaaaggggccntggcccattaaanaaaagtccttccaatnaaaaaaaaaanccttaaaaantttggaaaagggnaaccaagngntnggggatttccggccccttngaaggngttttgggggnaa

SEQ ID NO: 4148 - DNA, 650 bp, Homo sapiens
  misc_feature 444, 450, 498, 503, 506, 536, 569, 601: n = A,T,C or G
cccttagcggccgcccgggcaggtacgcggggatcgatgatgactataaaaaaaatggatctcatcggaatctgaacaaaatgagtgaccaaatcatttctgtgccacttctgtgagctgaggtccagcactgggaccatgccaggcaagcatgaggagggagtttacagggactagggtattggaaaactaacctacccatatatattagagcaaatgaattgttctcagttctgtaaatatccagctgtggtttgacatagcaactctctttgtatttgcttggcagcatttatagaaacagctggtagaccctggggaaccagggcatagtgagattcgtgggaccgttatttcacctactcttgagccattcacacatttgagctccagaattatctggtcaatgagcagtctcttgagggtaatgagatggtcaacatncaaatncaaagatactaatggagatttacttttttttttgagatggagtctcantctgntgnccagctggagtgccatggcataatcttggnttaatggaaccttcaccttctggggtcaagaanaattttcccgcccaacattcctggggtagctngggattacaggcgccccgccaccaccctgggtaaatttttggggttgga

SEQ ID NO: 4149 - DNA, 203 bp, Homo sapiens
cccttagcgtggtcgcggccgaggtacgcgggagagaagcatgaaaaaggtgctcagaaaacagattgtcaaaaaacttgggaaccgtgggtgctgttgcttggactgcaaagggaatgtagcctacgcaacctccacaggcggtatcgttaataaaatggtcggccgcgttggggactcaccgtgtctaggagctggaggtt

SEQ ID NO: 4150 - DNA, 338 bp, Homo sapiens
  misc_feature 150: n = A,T,C or G
cccttcggccgcccgggcaggtactttttttttttttttttttttttttttttctttaaatactattttccttatattgttatccactcactttctaaaaattcattaagtcatttaacataaatctgagcaccaatcatatgccaattntatattggcaataccaaattgaataagacatagtgtatcttccaagtaattagagaagatgttaacctacaaaatactgtatagcgctataattggctagaatatttttagtcattaggtaatgaatgcaaatcactgcatatcattgttaaatctactttgggatattttatgttttaatagaaaaa

SEQ ID NO: 4151 - DNA, 332 bp, Homo sapiens
  misc_feature 147, 159, 306: n = A,T,C or G
ccctttcgagcggccgcccgggcaggtactgctccctgcacgatccagtcagcccctgcccggctggttatggaacaaacaagtctgtgtctgtgtggagtgttgcaggacgagtggaaatgactgtttccaagttcatggcaattnagaaggcccttnagccagactggttccagtgcctctccgatggagaagtatcttgtaaggaagcaacttccataaaaagggtcagaaagtctgttgaccgatcacttcttttcttggataactgtctgcggctgcaggaagagtcatgaagttcttcanaagagtgtgatcattggagtgattga

SEQ ID NO: 4152 - DNA, 266 bp, Homo sapiens
  misc_feature 186, 212: n = A,T,C or G
ccctttcgagcggccgccccgggcaggtaccccggggatacctctttacggactccacttatgactccctaaagcccatgtcgaacccccatcgctgggtaataattatgctttgttgtttggatatatggaggatggggattattgctaggatgaggatggatagtaatagggcaaggacccctnctagtttgttaagggacggatcgganagttgtgtaggcgaataggaaatatcattccggcttgatgtggggaggggtgtt

SEQ ID NO: 4153 - DNA, 456 bp, Homo sapiens
  misc_feature 143, 225, 262, 293, 298, 396, 406, 420, 421, 456: n = A,T,C or G
cccttagcgtggtcgcggccgaggtacgcggggcctgtagccaggcgccatctttgacgctggcagtcttggttttctgctagtgctgctgcgctggggggacgacggacggcagcggccaagcaagaagaaagacgtggcancaagcgggagtcggggatagtgtcatcggttcggtaaagtttctgttctctgatttggggatattccctgcccaaaaaattnctggaaaattgactagtattaagtgtgagtaaaaggngtccacttttttttaaagttttgattttagntttgncttggatagtatttggcaagaataacctaaaaattatgtagttttattacataagaatcaaaaaatgctttggtactgggctgggttcaaaagtttanaactcatttntatgtattaaaaannggtttttttgggtttgaatttttttttttaaaatn

SEQ ID NO: 4154 - DNA, 480 bp, Homo sapiens
  misc_feature 70, 90, 97, 116, 117, 121, 213, 227, 241, 250, 255, 348,383, 392, 410, 429, 463: n = A,T,C or G
ccctttcgagcggccgcccgggcaggtacatgtgcacaatgtgcaggttagttacatatgtatacatgtnccattttatattttttgtanagacctnatttcatcatgttccccannctantctcaaacttctaaactttaaacaatcctcctatctcaacctccaattacaaaacataaaccaccttacctaatcacatctattttatttcnatttttactttttnaaaaaattttccanaacataatncactncatttttccaaacatccaatatcaaaataaaaaaatttttataatataatctaaatcaataccaaaaaccattccattaacatttattaaatnaaatttctttctttaaccttccctaaaaacctttnaaaatttcnatttttaaaaaaatcttnaaaattcctaaaaaaatantttttttcccatataaaataaccccaaacctttnatttcattttttctttt

SEQ ID NO: 4155 - DNA, 557 bp, Homo sapiens
  misc_feature 142, 160, 161, 167, 180, 196, 199, 214, 217, 227, 241, 251,252, 255, 257, 286, 293, 315, 317, 324, 328, 349, 350, 378,392, 397, 406, 408, 412, 415, 417, 421, 422, 423, 445, 457,469, 471, 475, 495, 497, 498, 502, 535: n = A,T,C or G
ccctttcgagcggccgcccgggcaggtacttcacactactagatgttaaaactatatgattattggcatatactgactgactgcaatatttgtagtaaatagggaaaataagtatttagttggaggggataattttgaatcnaatcaccttgaaatgttnntatggnaaatggtaaaaantattttccttttttcnttngctttttcctttggnggntaaaaagggntaataataaatttncctaattttnnctnantgggaaaatttcctttaattttccaaaanttaaccnaggtttccttattttaaaaaangnagggttnattnacccttccctttatttttggnnaatgggaaaaaaaaaaaacaaccccttnattttttttttggnaaaantaagggtcnangttnttngnccannnccttttggatcttttggtgaantaaaaaaattanctttaaaaaaananaaantaatttctctttaaatccangnnaatntttttttttttcccccccccttttaaaaaaaanttggaaaaattttaaattcctt

SEQ ID NO: 4156 - DNA, 343 bp, Homo sapiens
ccctttcgagcggcccgcccgggcaaattcccatgatgtcagaccactggagtttccaggggcaacaccccataaccgtcccgctgcagaagagcatcagaagttcagaagaatgcaaaggatctcagtgggaacgcggacaggagagccccaaaccaacacatgctagggctctctaggccctttcaggctagatcttgacgagagaagagtaaagatctttctgaggttggtgcaactgaggaaacgaaagtttcggcctctgctgtcagatctatgaaaggaaagaactgtgaccttgtccccttttgttttctttgacttaaaacaaaaagaaaatcac

SEQ ID NO: 4157 - DNA, 390 bp, Homo sapiens
  misc_feature 332: n = A,T,C or G
cccttagcgtggtcgcggccgaggtacgcggggaaggttcttttccctcaacactgtggccagttgttttaacttcactacttgggatggtaattggcattaggcgttttaccaagttctttaagcctttcttaatataacatctgaattgggagatagctcattgtggcctgggtgctggacttttcatattaagtcctgtcttagccaagggagaagaatgtaaggataggaccaccaatatcacaggggctgtctgagcctttacctgtgattttctaccactctgtggccttctggagcaatggacaaccaagtcagctatgcagttnataaaaagtgggacctggttatatgtcatccaacagcatatgggccctgcaagcctgt

SEQ ID NO: 4158 - DNA, 578 bp, Homo sapiens
  misc_feature 350, 560: n = A,T,C or G
gatatctgcagaattcgcccttagcgtggtcgcggcccgaggtacctagcttttattcattttattattcatctttattgctttcattgcacatgctgttaacttcttatgaactctttgttctaataaataagcatatccaggtttttcataaataaatgaggagtctataaattcttactagttttaatagaaacattgccactaaaatggtgtattctagctgtgtgagcttttggaaaatgttttcatttcctttatgtttgaatgttccttccaggtctttgaaaatatacattctgagttgaaaagctttataataggtaaaactcattaacccatatactttncatgctgggcacagcaaggtgtgggtaggtagaaaatataagatgactcccaagatttttgcaccctggcatacacatatgcctttccagttgttgaaacactaatttaggtgctgctgtgaagggattttgtagatgtgaataatgttccaaatcaagtgggccttaagatagaaagatgatcctggatgggccaagaatcttatcaanttgagtccttaaagggaa

SEQ ID NO: 4159 - DNA, 364 bp, Homo sapiens
  misc_feature 79, 196, 244, 277, 286, 288, 298, 316: n = A,T,C or G
ccctttcgagcgccgcccgggcaggtacgcgggtgataaaaaaaaaaaaaaaaaaaatgactgcatttttaaggcctancgcttcaaaggctatattgtcttatgtgtctgactttggcatctgccctttctgacttttgaccctgcagccttcagcatgccggaagtgaatgtggactataatgccagctcaaanaccttgcggtgtgaggctccccgatggttcccccagcccacagtggtntgggcatcccaagttgaccagggagccaacttntcggaagtntncaataccagntttgagctgaactctganaatgtgaccatgaaggttgtgtctgtgctctacaatgttacgatcaac

SEQ ID NO: 4160 - DNA, 544 bp, Homo sapiens
  misc_feature 125, 139, 203, 208, 215, 224, 289, 299, 320, 351, 362, 364,383, 413, 486, 501, 504, 508, 513, 524, 531, 540: n = A,T,C or G
cccttagcgtggtcgccggccgaggtacatacaatataatgaaaacatgaagagattcaaaagcttcaatcatatctcaatatataaaatatcttcagaacgtaaaatattaaagcaaaaaagtnggagaaaataattntataaatgatccaaaaataggaaagcatgaataaccatctcaaccaccatttttaaaaaaaaancatgnttccaanaaaattacnagccataaacccctttccaatactttacttttggtggaaccttaaaccttccaaaaaaccttggntttaattaantccccaaattaattttccttncatttaagttggccctttaaatttgggtttnaattttttacntnggaattaaagataattaanctttcccccaaaggccggtttaatttcaancaaaaattggcctttaaattttccaaccaacccttttaaggccttcccttccttttctccaaccttaaaaaanccttgggttaaaaangtnttcnttttnttgggaggggntccaaanggggaaccncaat

SEQ ID NO: 4161 - DNA, 398 bp, Homo sapiens
  misc_feature 85: n = A,T,C or G
cgccagtgtgatgggatatctgcagaattcgcccttcgagcggcccgcccgggcaggtacttttttttttttttttttttttttngcacaatgaaatacattacctcttcaaaaaaatttttgtgaattaatcaaaaccaagtttgatatgaaaataagaataacacactaaaatgatatgcagcagacaggtcgcaaacttggagtgatatttacaattcaaaaacctaaatgattaatgtcaaaatacataaaagactcctacaaatcagtgaaagaaagcaatccagtggtgaggtggaaatgaacaagagatgcacatacatttcactgatgatcaacaatcaataaacatgaaataatactaaacttattaatcagcagagtgaaaagtaaaa

SEQ ID NO: 4162 - DNA, 325 bp, Homo sapiens
cccttagcgtggtcgcggccgaggtaccattcataaaatgcccaaaagagagttggaatggttatactatatgatgtgttttgtttttgttttcaatgaaattataaatgaaaatgaaaacaaattatgcaaaaatttatagaatgcagctgaagcagtgctcagaaggagattttacaggcctatttttaaaaagaagaaagatggcaaatcaataatgcagccttcaatcttatgaatttttttaaataaaaaaacatactaaacctggagcatgtattagtaataatacatactaatacatattaatacacaaggaacaagc

SEQ ID NO: 4163 - DNA, 327 bp, Homo sapiens
  misc_feature 65, 257, 279: n = A,T,C or G
ccctttcgagcggccgcccgggcaggtacttttttttttttttttttttttctgttccccagcanaagaaaagaaaatctaataaaggatttcacaacctaccatcgggatgatcttggtcacgcacagaatgatctgtcacttcaccgccttttgtaatattttcatcctttgcaaaatctaacaacaaacaagcaaaacctttggtcagcatttttaacttggaaacagagcagctttcagcactaacatgatanatttatgtttgaggaaaaatanaatttattcgttttaaaaataaccactcaaatacatatgtttgccaat

SEQ ID NO: 4164 - DNA, 376 bp, Homo sapiens
ccctttcgagcggccgcccgggcaggtacataagaaataaattcaagcagaagagcataatatttttattcttcatgaatacagtgtatatgtaaactacttttgtttggtctcctagttttaaaaaagcacttttggctttcactcagtaacactccaagtacaagactcaagtaaatagaaaggcagctttcaatcgcaaatcagtttttcagattttactgtggaagcatatttaatgcacacatttgaatgttacacataaataattttaacgatggagtccaagttctggattttacattagatctgcatatataagacacttgtggtcaaatttcaagattggtaaagccagtttcaagctgcttatatt

SEQ ID NO: 4165 - DNA, 483 bp, Homo sapiens
cccttagcgtggtcgcggccgaggtacttccactcttgtttccaattcaccccaggtcattcaactctatagccactcctaatgcctctcctgaggtaggcaaaagtgggcttcccaaaccaaaaagattcacagatccatgaagaaactgaacattcacttcaaatttcctcctctgatcttggcaactgcaggaaatgaaagcatttgtccagatctctggcaaagatggcactgtggtgttttctctggggccaggttgtgcaaaaccttatagaagagaaggctgatctcattgcttcagacttgggccaaaattccacagaaggaagacccactacattatctgagacaatgggggaaagctgacgtatgggcttattcgaaactcctggaattttcaagtttccatatccacttcttaccaaatgtttggattttggttggagggacttccactggcaaacctgccaaacccctgcc

SEQ ID NO: 4166 - DNA, 468 bp, Homo sapiens
  misc_feature 427: n = A,T,C or G
gatatctgcagaattcgcccttggtcgcggccgaggtaccaagcattctgcttggtattgatgtgcattatcttttacaactattatctccattttacagatcaggacataacggtatagagaaattagacagaggaccagttttccaacagagtgctatgtagcttccactaagaccaaaagcctccttctactgagcacttaataagtatgtagggccgagctaagcacttttcaaatattatcttttctactgtagggtaaaatgttaccttttctaaactagtcttaatagttttctaaggaagctgttaagctggatatatataaactaaagtaaaactcctggtaattatctaatgaaaataagattctcaacataaatatgttttgaacttcggggctgaaaaattataaacataatctnaacctgcattattttttccatttcctttaaaatataaccca

SEQ ID NO: 4167 - DNA, 299 bp, Homo sapiens
cccttagcgtggtcgcggcccgaggtactttaaaaaaattttaacctgggaatattttaactctcagcattgagatgtataaggaaaagctctctgtgatatttacacaggtccatttacatttttaatgttgactttggagttggcacactggaaaagaattagaggtaagatgacttgataaagaagcttttttgctgcttacagaactaaatcccttcatattgagcctagagttggtccttcttatcacaaatgctatgcagtggcttggcagcaggatgctagctgacctttat

SEQ ID NO: 4168 - DNA, 330 bp, Homo sapiens
  misc_feature 95: n = A,T,C or G
ccctttcgagcggccgcccgggcaggtactgatgttaatagatattcctgaaataaataaaggaattaggatggttaggaacgtccttccagaanaaatgcaaggctggccatgaaaggtgactatatcgtaataggcagaaggtggcagcgcaggtatgggtcgtaagaagaaccttataggaaaggaggtcaacttgccccagtgccatgagctcagcactacaacctggtgcaggacttcgaagtaatagaaagcgaggctgcaaaggtggacagggacctgaagacagagggccaggttagtgagagcagacttaccacgggcata

SEQ ID NO: 4169 - DNA, 345 bp, Homo sapiens
  misc_feature 138, 152, 293: n = A,T,C or G
cccttagcgtggtcgcggccgaggtacaaaatcatgtggatagatgtgcatttgtgggtatctgtgaatacaaatacacaattttcagatagaagtagtataagaaaaagaaatcaaacaaagtcaaacattttaagnggtaagctcttggngcacttttaaaaaaaattattaaattgaagctgtagtttattctcatcattgtcatcctatattagtgattttctctagcttttggaaattaaattcataatattacaattcttgaattcctatgtatgtatatgttaagnaatccttttaatgggggacttgactttcatatggtgtgttggctgcattctg

SEQ ID NO: 4170 - DNA, 420 bp, Homo sapiens
  misc_feature 346: n = A,T,C or G
ccctttcgagcggccgcccgggcaggtacttgttactcttacagatgtctcaattaattttaacctctatccctaatggtgtttaaattttggtaaagaaaaattcattttttctttattttccaagaaatggtaagctatctttgtccctatgggagatgtggacagagaaaactttctgtctctgatgtcttttgtgtgagacaagattttaggaaataaataagtggtgcagggaattgtgagattaatttcacctccttttctgtctcctctctcttttatataatctttatctctgcttctaacaatctccttatcagaatttctaacatatgtaatgatnagagagagaaaaactgccaccacaggatcaaatttcatttcttaatctggagaaacaggagtctagtttttcca

SEQ ID NO: 4171 - DNA, 652 bp, Homo sapiens
  misc_feature 501, 512, 628: n = A,T,C or G
ccctttcgagcggcccgcccgggcaggtacatcagaaacttctccataaggaaagaaaactgactctctcttgaactagtgttgataaaatacactaatgtctttcttaattttattttattaggagaaaaatcagaatattaaatttgcaaacttttgaacagcagtaatagctccttagacactcagtatctttcttccctatctttcaagcacatttaatttctttcccctggtatttgtttgctttgtgttttttcaatattttgtttgctaaagaacaataacaacaacaaagctggtccagccctgacacctacttttgctttttttctttctttcttttaatttgttgaactataggtttctttctgagatgtatttttcattcttccaataatgctctctttttcatttcaaaaccattaccactttcaatatgtaattaacatcctcattcatcagaaagctggtaagtccacacagcatttgtgcagtatnccttctgtgtnaaatggtaaaggctttaagatgaaagaaaaaaagaactttctgcaaaagacaaaagcatcatactaaataaaatggatgacatatggccttgattttttcttaatggaggtcacantggcatttaagaaggtaaaaaaat

SEQ ID NO: 4172 - DNA, 870 bp, Homo sapiens
  misc_feature 5, 407, 552, 568, 622, 637, 648, 679, 701, 716, 736, 751,796, 799, 801, 809, 810, 813, 835, 836, 839, 842, 851, 855,857, 869: n = A,T,C or G
gctcnagcggccgccagtgtgatgggatatctgcagaattcgccctttcgagcggcccgcccgggcaggtacattttattgtggccggtggccaggggggagtgggggcggtagtcttttgcatttactaactccttatttagacattactcctccaggtttagaaaaaaaaagccataattttttatgtcagcaactgctattgataacaacaacagtaataatagtagtagctatcttttataagatgccaactacatgtcagtcactatattgggtgtttttggctgcccggattcctttctggaataagagctctgtagactgtttttaatataagtaagtgacagagaaaggaggcaaaccagcttgtctacttcttaaactatgccttcagtatttattangaacctcgatatgcttgaagtagatgatacattttccccagcattcagactcttgaacaacttgtgaaatctacccaagtgaattataattaactgcgtcacatttatcattatactgacctttgagcattcccccaactcacantattttgtttcttaantatgggatattcgcttgctttgtgaaaaacatgaaaatggtaagcagaactcantgctttccccaccanaaggcatttgngggaagttttcaaggatcctttggaatttgncaattggccaatacccaatttnttttgaaaaccttgnattttccagttaatattgcnccatttacattaaanaaaaatgggcccaaaatttccggaatccggtctgggaaacaaaanctngncggcgggnnaanggttaaattacttttggttaannggntanccggaaaangggntnaaaaaaaatccnt

SEQ ID NO: 4173 - DNA, 384 bp, Homo sapiens
ccctttcgagcggccgcccgggcaggtacgcgggtaacaaagaagcaggtcttatggcctaatcatctcataaaagcaccacctcttaatactatcacattggcaataccttgattttggaggggacacatttcaaaccatagcagagaccactaagtatagggaagactaaacccgagaaccaagtggccagaagcctgcactagctcagctgattctgctattacacttagataaagtatgagccttttgctactgaatcaacagaaaggctgcccgaaagcagtgagtctcagatgcctcccatgaagttcacacatcacaccagggacttctactcatacgtggaaaagctagagaatcatggttttaggtaggcaaggg

SEQ ID NO: 4174 - DNA, 365 bp, Homo sapiens
  misc_feature 340: n = A,T,C or G
ccctttcgagcggccgcccgggcaggtacgcgggggaaagtgtgtagcacctccaccttctctctctctctccctctccctctcctgccagccaagtgaagacatgcttacttccccttcaccttccttcatgatgttaccattggaatgacatactgcatcctatagttataccatccactctgaaatcaatgtgaatttaacttcagttccatacagaaactttttttccacaggagtttaagcccaagctggagtgcgatggtgcaatcccaactcactgcaacctctgcctcccaggttcaagctattttcctggcttagcctcccggagtagctngaattacaggatgtgccgcccccat

SEQ ID NO: 4175 - DNA, 388 bp, Homo sapiens
  misc_feature 170, 185, 200, 222, 229, 231, 244, 253, 311: n = A,T,C or G
ccctttcgagcggccgcccgggcaggtactgaagataaagggccttcttatatagtctcccaattctatctgggccattttgaagatagatattggaatgttccctgcaaagaaaaacaagacaactctatcagaagccatcatttctagggatgacattatcattatanttcaataacattatnattagagaaattaangagcacatcacattgaatgttngcctgtngnagggatgcctccnaaattgaantggagggctggtagttagccctgttattttaatgatgtgaggctttccatatcaggtntattgtcagagaaccatctgcgaaggcatcatagaaatgtaggtgcatcttactgaagtattttctccatgattttt

SEQ ID NO: 4176 - DNA, 364 bp, Homo sapiens
  misc_feature 32: n = A,T,C or G
cccttcgagcggccgcccgggcaggtactttntttttttttttttttttttttgcacaatgaaatacattacctcttcaaaaaaatttttgtgaattaatcaaaaccaagtttgatatgaaaataagaataacacactaaaatgatatgcagcagacaggtcgcaaacttggagtgatatttacaattcaaaaacctaaatgattaatgtcaaaatacataaaagactcctacaaatcagtgaaagaaagcaatccagtggtgaggtggaaatgaacaagagatgcacatacatttcactgatgatcaacaatcaataaacatgaaataatactaaacttattaatcagcagagtgaaaagtaa

SEQ ID NO: 4177 - DNA, 322 bp, Homo sapiens
ccctttcgagcggccgcccgggcaggtacgcggggttcacatggggccaatctgtctttgcaaaaaagaagtgagaaaggaatccttgatactttcccctagaagtccagcatctgcttgtttaaatacatatctcatgtaaaacgggaaagataaaaaatattgaaaagtgaagttttaaaaccttatactaaagatctttatactgcagtctgtctcacacaatatatcattgtctggctttcaacaacaaaaaattactaggcgttctaaaagacaaataagtcacagtttgaagaaacagagcaagcattagaaccag

SEQ ID NO: 4178 - DNA, 621 bp, Homo sapiens
  misc_feature 482, 618: n = A,T,C or G
ccctttgagcggccgcccgggcaggtacagaccgttcatttagcaaactcaaatccagcccacccttaccgtttccaccgcagccagctggagctctgtgacagcagcatacaattctttctttgaaagccgattctggtgataaatgtcacaaaggaaatctgcactaggctgctgagaatacttctctaaccggttgtcgatacaagctttgactattagagcagagaagaaagagaggaagtcagctgaaaattgggatgaggaaaatcacagaagaaaacctcagtccaaactccttcttgcaatatctaaatagtcttttcaggaacactgacaatttgctacacacactaattatattattgccttcttgtcaagtcggcaaggatttttcaataccgacatgagcaaggcttctcaaactttaatgtggataggagtcacctaggcatcttctcaaaatgcagaatctgaatcanggcttgggtaggcctggaactctgcattcctaataaagcttctaggtgatgcttgatgccactgggctgcaggtcatagttttgagtagtaagaagtttagatcttgggagaaaaaagtgtaaaagaaggtagganttg

SEQ ID NO: 4179 - DNA, 322 bp, Homo sapiens
cccttagcgtggtcgcggccgaggtacgcgggtatattggttttatttatggaattgttttatagtgcatacaaatcagcgatcagccagcaaatatttttctttgagcttgtgaaagctctgtgttcttttgccttcaatctgttgtcttcaaaacaaacaaacaaaaaaagcttcttgcgcctttccctcccctgttttcttcctttttctttttgcttgcatgcacaaggtaggacttacttcgtaagaaacaaaatgccagtattttcttaagccatgatgtgaaaccaatgaccctgtgaccacatggcacagaaca

SEQ ID NO: 4180 - DNA, 622 bp, Homo sapiens
  misc_feature 572, 587, 589: n = A,T,C or G
gatatctgcagaattcgccctttcgagcggccgcccgggcaggtacgcgggataaccatgcacactactataaccaccctaaccctgacttccctaattccccccatccttaccaccctcgttaaccctaacaaaaaaaactcatacccccattatgtaaaatccatttgccactccaccatccccccatttccagagcttgtttgaaattgctcatctaatggtatctctcctccaattttctttgttcttaaaaatacacatatttaaaatattttttaaaaataactcagtgcttattattttggtggcatcttgggcatagagggaggaactaaaggagcatcgtaaatatgccatgatgaggtgcaagtgatattaaagacactgcaatttttgaatgaaaagcagtttatccagctggttaataattaatatcttgtaataatgtcgaaatgatagtatttggaaattgtaagggaagtatacttaaaggatatgctctttccatgttttgcttattagaatccactgatgttttaccaaatgagaagaagcatagcattcttaanaaatatgagaatccntnaaaaacaacatttccaggattttatctggtatt

SEQ ID NO: 4181 - DNA, 289 bp, Homo sapiens
  misc_feature 48, 51, 52, 135, 250, 259: n = A,T,C or G
cccttagcgtggtcgcggccgaggtactttattttttttttttttttnttnngaaatgaacaaatatttatttatcttttataacaagtaaggcaatgttgcttaaaggaagacaaacaaacataaaagattccngttgacaatgcattttttcatctgttcggcacaatgcttttgtcataatggagatgtgacagcaaactttccaggacattcagtcttcggcggcagcacttagggcagatgactngccgctcanattctctatctttgtttcaggacagtggaa

SEQ ID NO: 4182 - DNA, 435 bp, Homo sapiens
cccttagcgtggtcgcggccgaggtactggttaaggaagagtattgttgaagatacacttagttttgtaagatatattaatttgatcacttgcacgtgtagtgaattattgcaaagaattgtccagtatagaaatggcttccagagacactgcaatctctactgtgctgattcacactgcatcatatgatatagaggttgtatcttaatttagcatggtcctactggatttgctttttattactaaattactaaataaccttagagactaaagacaatacagcattgtgagataattagggggtattgtctttagcctctagggttgtggtaaatctgggcatcgtctcactggattctcgactcaggatctcataaggctaaactcaaggtgttggcttggttgcatcctcatctggcattcaaaagttccttt

SEQ ID NO: 4183 - DNA, 570 bp, Homo sapiens
  misc_feature 288, 390, 431, 443, 515, 548: n = A,T,C or G
ccctttcgagcggccgcccgggcaggtactcgtcctgagtgagttggaatttaaaaccttggtctcaggttcgtaaccttggtgctccaggattagattaggcttttctgagtggaatactaccatttcaaccattctaaggagtcaacgttcttatatgattaactacagaaatgactttcaagagctggtgtgatcagtctaaccctcttgcttaatgaccaaatcacttttactatttaattctgttcttctgggggtgagttaaatgataaaatatcttaaganggaaatcttattgaacaaatattatcttggcaaaacatttgtcacaaataggtgagtttatcctggcttcttagggaaaggaggcttggaatatatttaatngtgttaagataagctatttgcttcttttccctttctactgnattcccatttgnaaatttggtccccaaaccatgccagcttttacattcaaaggatacatatttcactctcctttttcccccttntgctagtggcctaaatcaggatcctattcgctntcattctgatctataaaaaaaa

SEQ ID NO: 4184 - DNA, 326 bp, Homo sapiens
ccctttcgagcggcccgcccgggcaggtacgcgggtattcagacttaagaaacatcaggccttagacttttgaaaaaccacatctttaaattctgtagcagtgaaagtccagagctctcacacaagctctgctcttgtcttaaagaagggaaagaaaaatatatctcacttttaccagtgagcttacaactgaggaaacaagacaaaacttattcctcagtcagattactcggccccacaaatgttgagtagaaattggtaaagtatcaaagatcaataagatgaaagaaggcaacacacacacacacacacacacacacacacac

SEQ ID NO: 4185 - DNA, 318 bp, Homo sapiens
ccctttcgagcggccgcccgggcaggtacaaaacttgtggatccatcaatgaggcatctgccattttttctttcttcccctctatattacaagttctggaatgcctgttctaattctccaaggagaattagaaaataaaaggcagagtctagagccatgtcaatatcctcccacagaatgtgtatggagaatattccactgggaaccatgatagataaaaacttaccaggaagagcaaaacatcaagagagtctgacaaaagctctgccctcctctgtaacccagcagcctctgcagaatcatcctttcttcattgtt

SEQ ID NO: 4186 - DNA, 640 bp, Homo sapiens
  misc_feature 14, 28, 55, 60, 61, 72, 89, 109, 116, 124, 131, 151, 155,190, 192, 200, 205, 245, 247, 248, 264, 317, 352, 358, 368,389, 412, 413, 416, 423, 430, 436, 439, 446, 480, 491, 508,515, 516, 531, 534, 535, 540, 558, 565, 587, 596, 605: n = A,T,C or G
ccctttcgagcggncgcccgggcaggtncaagtgcatacaaggggatgataaccnactgnnccatatgcaanagtttgttttccctaantaaacaataaatgtgctggngcaaatnttttgttntttgttntttaaaaaatcttcttcttncatntaaaaattgttaaaaaaaaaaaatctctttatttntntatcacancccanacatttcaaaaaactatctataataataaacatatttttnanntttccaatccaacccnaaaatataatcaaaataaatattccattccacattaacaattccaatttaaanaattctttacaaaaaaaattttttaataaacctcnttaacncaatatattntccttataaaaaaccctaaantctttattaaacatccaaacctnnctntataatnctttttncaattnaanaccttcnacaactccccccccttcattaaaaaattttaacnaaattcttcanctatttaacacattccntaaccannaatatactcctcttnttnncaccncttacaaaagtttaaaanaactttntaatatttcctccaaaaaattnaccccactnttttttttnaaattaaacattttttattgcaaattttttttttt

SEQ ID NO: 4187 - DNA, 438 bp, Homo sapiens
  misc_feature 420: n = A,T,C or G
ccctttcgagcggccgcccgggcaggtacggggaccggcaagatggcggcgcggacagcgttcggtgctgtgtgccggcgcctctggcagggattggggaatttttctgtaaacacttctaagggcaatacagccaaaaatggtggcttgcttctcagtacatacatacatttaggatttccatgtcttcttggagaatttataatgtgtcctgttggttcgcaataatacttcttattctgaagtctcctttatctgaaattaatatagccactctagctttccacactcacctaaattcagcctttattagttcattaaaaattattattttaatcttcctactgatttgtatggcatttggtggcatcaatccaaataagcagatgcataggtcctgtttctcccttcaagttcctntctccctacagatttcaa

SEQ ID NO: 4188 - DNA, 537 bp, Homo sapiens
  misc_feature 459, 505: n = A,T,C or G
cccttagcgtggtcgcggccgaggtactcatttctacttggtatatgaaaataatatatgtttgatgtattcagtgaaattccagttaactcataactctttgaggccatggatggagaggtggcattattagtctctacctccagtgcctcacacaattcctgggcacagaaagagacatacaattcatgttgggtcaatcaaagaatgattgatcattggcacctcctgattctatttggtggtcagagaaagtggcaggacttaagttattttacatataaacatttcttgcaaaatttggagaggatgttttgatggcttgagatcttttaatttctttgagttactttcattgtccttcccaccccccaattaaaggcaaacaatgggcactttgctcttgcttaacctagattgtcttcaaaaaactattaaaaatgttaaaaggcttaacanaaaaaacaaaaaagacgtttaacagatgtcaaaaaagcttccttantgtttgaaaaataaatgcttaaaaccaaaaga

SEQ ID NO: 4189 - DNA, 531 bp, Homo sapiens
  misc_feature 512: n = A,T,C or G
cggcccgccagtgtgatgggatatctgcagaattcgcccttagcgtggtcgcggccgaggtacaaaaaggtatacagagtgacataatggacactagagactcaaagtggggagggtaagaggggggcaaggtataaaaaaccacatattgggtacgcggacttgtggcaattctcttgtcttgctgcaactgttattgaagccttacttccaatttcactttgaaaagcacataataatggcattaattttgctttgatctgaggctttctctgatgactgaatactataatttgcccaatgcgctgactttgatatgtttttcttgattaagcttacataggtattgcatgtcacaactggtgggctataataattttatagttgactgaatgtcaaattaaaaatgtgtatgagataagttaaggatcctatcccagttaattattcacatgggattcctaaaattttgtgttaatgagctgaaacattctgaaagaccaaatgcctgnaatgttttaaaagggagaa

SEQ ID NO: 4190 - DNA, 225 bp, Homo sapiens
cccttagcgtggtcgcggccgaggtacaaataatatccaaagtctgaaggcttaagctgtcatcacagagttactagaggacacttatctttgacatgatctgatatcagaaacgagtgtagacttgtagtcatttagaactcaaaagagatcttagagtcttctagatcagtggctcctaaaagctactcaagaatagggctcatgtttttaatggggaacttt

SEQ ID NO: 4191 - DNA, 512 bp, Homo sapiens
  misc_feature 43, 131, 207, 210, 224, 243, 246, 255, 268, 280, 283, 298,309, 324, 331, 339, 342, 357, 359, 375, 383, 387, 388, 393,401, 404, 405, 427, 466, 486, 500: n = A,T,C or G
cccttcggccgcccgggcaggtaccccttcacatactcaaggncaagatgggtttgcagaaatcatatctgaccatctggcctctgctagtagatatggccccatcccagcatttttaagaagatgttttntgtttgtatttattttcccccaatggggggtataaaaatctaccaaataagggaattattaaattgaaattccaanganattaaaaaatacantcttctaccttccaccaanagnaaaaaccgntttcctttagggngtttaaaatggngtntttttttaagatttnggcctgggaanccctttaattttccnagtccancaattttnatnttttaaaaaaaaggntngggccaaaaaaaaatnttccaagngggnncaaanttccttgnaannaaaatttccaaaaaaaaggatnggggccggggccccaaccaagggtttttttgggggtatngggaaccaacctaccaattnccaattaccaaaanccccccccattt

SEQ ID NO: 4192 - DNA, 500 bp, Homo sapiens
  misc_feature 494: n = A,T,C or G
cccttagcgtggtcgcggcccgaggtacaaagaactattgggaaggtcacacaagagatatgacccaggcttaaaaggaaacatgcatcaaggatacattaatataaaacttggaatctagtaagaaaggaaaaaggaaagtggtatattcttaaagtaatgacagattgttggaagagatgatacaaactttttaaaaaaaaatgccttttaacaaatattaaaacctgcaaaatggcacttgtggtgattattctggagaataaacagattacataagattttgtcaggtgacaaatgtacaactcggactaaatctggtgaaaagtgtttaattggacaaataactgataagcttaaagataacccagcacaatttcacaagagaaccagctcacccaactaaaaatttcttaatagcaattgacactgaagttgtattaagtgtataaattagttgatgaaactgaacaaatagaaaacccattcctccntttcct

SEQ ID NO: 4193 - DNA, 579 bp, Homo sapiens
  misc_feature 515: n = A,T,C or G
ccctttcgagcggccgcccgggcaggtacaacgtgggcaagcatctgtgcatatgaaatgctgtttttctaaaagatttctcacattggcaaactgagagattttctttggaacacaggaaagattatattaatgcttatagccataccatgtctgaatatgggaggatgacagacacagaacgagaccagatagaccaggatgcccagatattcatgaggacctgttcagaagcaattcagcaactacgaacagaagctcacaaggagatacattcccagcaagtgaaggagcacaggaccgctgttttggatttcattgaagattacttgaaaagagtatgtaaactttactcagaacagagagccatccgagttaaaagagtggtggataagaaaagattatctaagctggaaccagaaccaaatcaaagacaagagaatccacatcttctgagaaagtttcacagagtccttcaaaagactttgaagaaaaccctgccactgaagaacgtncagaaaaaattttggctgaaacccaacctgaattgggaaccgtggggagaatggcaaaaggcga

SEQ ID NO: 4194 - DNA, 316 bp, Homo sapiens
ccctttcgagcggccgcccgggcaggtactttaaaaaaattttaacctgggaatattttaactctcagcattgagatgtataaggaaaagctctctgtgatatttacacaggtccatttacatttttaatgttgactttggagttggcacactggaaaagaattagaggtaagatgacttgataaagaagcttttttgctgcttacagaactaaatcccttcatattgagcctagagttggtccttcttatcacaaatgctatgcagtggcttggcagcaggatgctagctgacctttatgcaaattgttcaaaca

SEQ ID NO: 4195 - DNA, 276 bp, Homo sapiens
ccctttcgagcggcccgcccgggcaggtacttttttttttttctttttttttttttgtggtatatgtatataattccgtgggcatgaatataggcatatgttaataacaaaacagtatattccatcagtaatgctgtgtcattcttcttcctttccccactattcacaagtaacagtaacaactaccatttatcaatcataggtagatgctaaggggcttttatgcattatctgattaataactctatgaggacagttctattatccggataagga

SEQ ID NO: 4196 - DNA, 516 bp, Homo sapiens
  misc_feature 23, 291, 356, 368, 388, 445, 453, 460, 469, 473: n = A,T,C or G
cccttagcgtggtcgcggccgangtacctgctgcctatccgctgcatctgaaagggtagcttatctaagaagttgaatgaaacagacttcaaatgataaacagaaagttatttcatcagtctttaacacttccacctaaaggttcacagaagaaataaaagtcatagagactagcctcaagttttcctcttttcttgttaaaggtctgtgggagagaaggtaaaaataatcaaaacatttttcttttaattcagttattcatgttctttctattttaaattgttgaagatnagctagctgtaggtttattgttttaaatcacagctctgacttgacatactgtttttaaaacttgnggatgtgtgtgngtttttttttataaagaaangagaagtcattactttgattttatattcatcatagtcattgaaactcctgacctcanggtgatcngcccacncttggcctnccanagtgctgggattaataggcataagccattgcaccctggcccca

SEQ ID NO: 4197 - DNA, 330 bp, Homo sapiens
cccttcgagcggccgcccgggcaggtacgcggggggttttgtttgtttgtttgtttttcaagtagaggagtgacatttcaacagaatcactgtgcagtggtgagaatagactgaagggagaaagggacaacaggaggctgtttgataatctaggcaagaaatgatggtggcttgggctagggtcgtaacattggtagggatgagaaacagtagaatgctggaatactttgagggttgagccaaagagatttgctgctggattggatgtcatatgtgacaagtggaatagtcaagggtgactccaaggtttttgacctgagcttctagaaa

SEQ ID NO: 4198 - DNA, 379 bp, Homo sapiens
ccctttcgagcggccgcccgggcaggtacgcgggtgtcatgttcatcattttatctgaagttcttatcaacaaagtagctttcagtaaatatttattaaatgaagataaaaattttaagagccatctgcaatgtcaaatgtagcccacagttgaatgaatatgaggacagggaagtgtcccttgattttggtgttaagcagctgattgccaccttctgtagaacagcttcagtggagtctccataatagaaataaatgccaggttgctgaggactaagcgtggatatttgttgagagtggagacagtaagtgcaaacattcttttcagaaagctttgctctttttgaagctttgctcatagggagatacaagatagtag

SEQ ID NO: 4199 - DNA, 303 bp, Homo sapiens
  misc_feature 291: n = A,T,C or G
ccctttcgagcggcccgcccgggcaggtactgtggacacctgtcctgcctcttagagtttctacttggatgtggcctctgtcatgtctgcttttgttcctttggtcaaagccaaaagccgatgggacagggatgcatgggcctcccactggggacatagaaagctgcatggcagtgggcaggaatgcactcctcttacagggagaggggtggtgtcaggttttaactggggtccgaggggagttggtggggtgagtggcgggtagctggagaaacactcaaggaatcgtanacagttttgaca

SEQ ID NO: 4200 - DNA, 485 bp, Homo sapiens
cccttagcgtggtcgcggccgaggtacttttttttttttaaagaaagcgctttaaagtatggaaggcccacagactgtgcatttaattactgttcatatttcatgcagtcaaactgaatttcatttgaaaagaaaatgatttacctatctttaaaaagccttaatgttctgctttgttttgttttgtttttttcttccagggttatatatttacaaatagaaaaactaaatttatctctagaatttggaaaatcacaggacatatatgttaaataaagattctgaatattacagtgattgaaaagacatttacccccacttaatgcaataatttgaaccagaaaagccttgcattttgaaaaagtttagaaatctttcttttaggtttacaaagaaaaagcggccttcattttatcccttagacttctgtgtcctccacctgctacattacacttcaagaaatttaacttatatcaatcaaaatt

SEQ ID NO: 4201 - DNA, 272 bp, Homo sapiens
  misc_feature 40, 73, 94, 103, 104, 106, 170, 173, 231, 247, 264: n = A,T,C or G
ccctttcgagcggccgcccgggcaggtacagagactgcancagtttattctaggggagttggggaagactttnaaggtaagacatccaagctgnctcttgaannangaaagattcatcagttaaaatgttgtggaagaaggacatccaaaagggagagcttgcactgaancanggaggcataagaaatcctgatgagtcaaggaaatggggttttaggatgaatggacttntgagtgtgagataganaaaggctagagactggngtgttgga

SEQ ID NO: 4202 - DNA, 522 bp, Homo sapiens
  misc_feature 120, 132, 432: n = A,T,C or G
ccctttcgagcggccgcccgggcaggtactttttttttttttttttttttttttggggggaatacaagctttttatttaattacagggttcctccagaggtagcagctgttgcgattctntcaagttgccanaccatcagtttctctactccttcaaagctcttctgagaatgaactactaccagaagattttaagggcagacaggcagtctgcccaggagacagtaatattcctaccttgacatctagcttggccaagtgctgtaaaacccagatgcgatgggaccaagcattatagttgcttgggtatctccctgctgcttcaccacagacctccatctcttcttgtatgagtcgctgtgccctttctgtgggaattgttcccaagtttcctttggtcacaaaggaaggcaaggaggtttcctgaattanctgttgtagcacccatcgcctgtgaatccatgtttctggactctttggaaacttggttaaggcgagttttccagatgtaaatccttaatt

SEQ ID NO: 4203 - DNA, 525 bp, Homo sapiens
  misc_feature 240, 283, 460, 475: n = A,T,C or G
ccctttcgagcggccgcccgggcaggtacgcgggggtctgcaccgaggagagcggcctgtcggaagtgggccaccatatctggaaactacagtctatgctttgaagccaaagggaataaacatctaaagactcccccggggacctggaggatggacttttccatggtggccggagcagcagcttacaatgaaaaatcagagactggtgctcttggagaaaactatagttggcaaattccnattaaccacaatgacttcaaaattttaaaaaataatgagcgtnagctgtgtgaagtcctccagaataagttaggctgtatctctaccctggctctccagttcaggaaggcaacagcaaatctctgcaagtgttcagaaaaatgctgactcctaggatagagttatcaagtctggaaagatgacctcaccacacatgctgttgatgctgtggtgaatgcanccaatgaagatcttntgcatgggggaggcctggccctggccctggtaaaaagcttggtggatttg

SEQ ID NO: 4204 - DNA, 312 bp, Homo sapiens
ccctttcgagcggccgcccgggcaggtacagagggaaaagcatgtatgtgcaagggcctgtggcagaaagacccaatgtgctgaaattttgaaggccagcttgactggaatatagacaatgaaagggagcctggcacaggatgtggcccagaccacacaagactttgtagccatgataatgatttttacttttagcttaagagcaaagggaagccacaagtcaagagaatgacatgatgaactttgattttgattctgacttctgcgtgcagaatgaattgtagaggagcaagagtggaagcaggaacagct

SEQ ID NO: 4205 - DNA, 325 bp, Homo sapiens
ccctttcgagcggccgcccgggcaggtacagattgcagaggataatactcaagatgttctccaaggccaactagtcatcagtttattcatgtttctgggattggattcatgaactcatcctttgaactatttcaacaagcttcttcatgtaactaatctgcggaaggtagaaaggggaaaactgttgggtgctaaaatgacaactggttcaagacccaagtaggtgttcacagtcagtcctgcaggaagagattagaggatctagttacccaggaatcatctccattccttccaactgaaagggaaacaaacaaggaggagcacg

SEQ ID NO: 4206 - DNA, 747 bp, Homo sapiens
  misc_feature 357, 374, 477, 544, 545, 549, 563, 572, 643, 657, 658, 667,673, 681, 687, 726, 736: n = A,T,C or G
ccctttcgagcggccgcccgggcaggtatcagaatcggattgtcatcatattcacttcatcatagagttgatcataaatcttccactcctgtaaaactgactgcatggaggttttgagctgattgacctgagtgagaacactgcttctcttttgaaataactcatcaattcgggatgctgtatcttctaacaatggcactgccccactctccaaagtcagataactttgtttcaactcatctagtgctttggatttaattgcaagttgattttctatatcctgacagtccaggagcagcttctgcactgagatcacactttcaagtttttgtaaagttttcaagtctctcttcttgngcttccagccagttgtncaagatctgtattttattttcactctcagtgatactttctagaaagttgggtctaaatggttggatctttctattcagcaattcccatgtactgaaagggaanaaagaagaggtctggggaaacagctttcacaattggtattttactcatcaaccacttatttcctggnntggncctttcctggttgnagcaaaagnccttttgcaactggcaatccttgtaggacacaaacacccccccaggtcttgggtcaaccggtgaaaaaaanccttccagcatcanngggcttttntcttcnacctttcntttgangcggccaacttgctttgggtgggaccaagccccgatagncccccttccntgatggggcgg

SEQ ID NO: 4207 - DNA, 527 bp, Homo sapiens
  misc_feature 26, 38, 441, 501, 510: n = A,T,C or G
cccttagcgtggtcgcggccgaggtnctgaagacaaangttgtaatcaatttatggtcttaggctatttgcatgactgaaatctgaaaacttcatgaaacagggatcattacaaatatcccaatgccttgtgccagccacagaaactcagtaacagactatttgacagaatggtgtcaatttaatcatgacattgcaatggactataggaagagtcaataaaacactgatagtggagcaaaaatctggcgtgacacctgacattgaaaaagtcggatggaatacaaccacatccatttgttctatgttgtctatagcggctttcacacagaaactgcacagttgagtcattgtgacaaaagactgtatatcccacaaagcttaaaatatttacaatttgggccttttagagaaaaagtttttatgacccttgcaatattanacacagaaatctcagagatgctgtcttcttcctaaactttaatatttaatttctgattgngggattganattagatttctccaact

SEQ ID NO: 4208 - DNA, 435 bp, Homo sapiens
  misc_feature 294, 295, 298, 309, 312, 417: n = A,T,C or G
ccctttcgagcggccgcccgggcaggtacaaagaaattgtggcattatcctagggggtaaactgggtaagactgcagatcaggtctcctcaccctcggccccaggttcttttctttcaactttgtttagtgagaatttaagtaaaaatgtcctggtgttgatttagaattggatattatagattaaatttatgcaggtatctcttacctgtttatcttattttctgtctcttacctgtgttcaattaaattgaacttgatattaatctttttcctcaggatacttatgcactannccnaaaactatagntgnttggagagaattcaatattcagtgacaataaatacatccccatatccttttacctattgataaaacttagtaccctttcaaaaatttaaaacaagaatccactgnttgctactgaaaggcaaa

SEQ ID NO: 4209 - DNA, 537 bp, Homo sapiens
cccttagcgtggtcgcggccgaggtacgcgggggtgtgtagtcgggtatgagaacgattgcaagcaaaagcagttgagggacgctgtccaaggagtaggctcagtagcacgaactgcaaatacttgagaagggaaaagttcagccttgtgctggaaagtggtttagcatgctggagctggttttctgcttggtagccctacaactttggcccaactacttggcctctgggactcagattcctcctctttaaaatggtgctaataatagcacccaccctctgtgaggaggatgctgtgaggacaaaatgagatcatccacataagccgtgaaccctgttcctggtaaggaaatgaataacatgaagtgaagtcttcgtctccattcccaacagtccccattctacttgcagaaaggttgcttacactgaaaatcaatttattttcccctggtgcaaaaaacagtcgtttctccaaaactgaagctggaaattatctgaaatatcaggtccttcggaaaaagggacgcgaaaccccctt

SEQ ID NO: 4210 - DNA, 566 bp, Homo sapiens
  misc_feature 33, 142, 161, 163, 234, 332, 355, 381, 423, 451, 468, 476,483, 488, 520, 524, 540, 549: n = A,T,C or G
ccctttcgagcggccgcccgggcaggtactttntttttttttttttttttttttttttttaaaggagagaccagacagtcctacatagcataatgggtcaggacaagatgactagatacagcaaaatgttgctgggaagcanagtggaaaacgcaattgtnanagggggtcacacggatgggtgggaggaggccctgctaaaaggaatcccccgagggcaggtgagcagagctntggactaccaaaatcaacagcatgcagacagacacaaatcagcgtccagggcattccctggacttgggctagcctaggttcactgaggcaaggtcttncttggcggtcaaaagccacctantttccaaggaaaatgagaatcagatncgcacgtgataatcctggactctggaagtgggctcaaacctntgcgttcttacctgtttttgttttccanttttgcaataaacctgncttttgtngtttgtnggcancaaaagttaaagctcaagtcagtggggaggancaantttaaaagtggggaangtggggganaaaagtttttttttttt

SEQ ID NO: 4211 - DNA, 325 bp, Homo sapiens
ccctttcgagcggccgcccgggcaggtactcagatgtgaataataccacatttgtaagttgacttaaaattctgaaatgatgcttcatcagacagggttcttgtataaaagagagtttaacctcgagttatgagcctgggagggaaaaaaataagggacagtgaagaaggattagtagcgttggtgagtcattaccacccttcaggctgaccagtccaaggagagttgaaatcatgaaggagagtctatctggagagagctgtagttttgagggttgcaaagacttaggatggagttggtgggtgtgggttagtctctaaggttg

SEQ ID NO: 4212 - DNA, 676 bp, Homo sapiens
  misc_feature 556, 561, 639, 645, 655, 660, 665: n = A,T,C or G
ccctttcgagcggccgcccgggcaggtacttttgagtagatgcattgagcctctcagtaatgtgaaagcaggctgcagagatcaccatcccagcaacaggattattctgtttgatatctgttgccaacagccacatttcccagcatcttggatgcaaaagggggtttactgacaaagcaaagcttttacattgggccttacaggcacaggaaaatcaccagctacctcaatgcacagtcccacggtagcattcctccggtcactcttagaaaaggcccaagtcatctgggcgcctggactcacccgccccaagcagagtggccctcatccttcagaatgtggatctgccgaattgaagaggcctgatttcagctccaccagatgcagatttgtgttttgttttcttgttatcactgtcacacaagcttataacatgtatgcttttcagaatacagttgtctagccaagccatcaagtgtctgaaattcaatattggtttatgcaaatacagcaaacttttatttaagtagataggaaaatatgtttaaaatattangaatnctaaaccatattttcaagtcattttaacagctaggattcttaaaatggaagtgttatatataatatgttaaaaaacantttgcnttcctggctnaatanttganccctttaaaat

SEQ ID NO: 4213 - DNA, 327 bp, Homo sapiens
ccctttcgagcggccgcccgggcaggtacctagcttttattcattttattattcatctttattgctttcattgcacatgctgttaacttcttatgaactctttgttctaataaataagcatatccaggtttttcataaataaatgaggagtctataaattcttactagttttaatagaaacattgccactaaaatggtgtattctagctgtgtgagcttttggaaaatgttttcatttcctttatgtttgaatgttccttccaggtctttgaaaatatacattctgagttgaaaagctttataataggtaaaactcattaacccata

SEQ ID NO: 4214 - DNA, 328 bp, Homo sapiens
  misc_feature 315: n = A,T,C or G
ccctttcgagcggccgcccgggcaggtacgcgggtgggaatatctttacagcagcagtggttacatgactttatatcactatatatctttgtcaaagctcagaattgtatagctagaaggttatattttactgtatgtaaacaatatctcaacaaacctgactttgaaaaataataaaaagaaaagaactaggctcaatagtgaattagactgaaattacctcatgaacaggcaagcacactgattatgtaaaaatctttctgatgtttacttttgaattgtttattctccatttttctacattaaagtattaanattaaatgtgtta

SEQ ID NO: 4215 - DNA, 565 bp, Homo sapiens
  misc_feature 543: n = A,T,C or G
ccctttcgagcggcccgcccgggcaggtactctatttcagatttcctcaaagctgggcagttgttagcgagaatgaccaatttcgctttgccttgtctgatcatcttcagagtctgcttgtacagtatagtcacttagagaagctttcaaaacaaaacaaacataaaccaatgtccaagatccaggttagaagaggggtccagagaagctgaccaacaaagttgggaagctctgagttctcttctcctgggacccaccacccttagtatattcagtaggagggtggtgatggctgcaggcagtggtcatggcagccgtgacattttggcttcaccataactaaactggccaacagatcagactgcaagtttttattatcctttattggatgcttacatctgaaatgacaaaatgagatagttcgaaagaatatatttgatctttttttctagttacagatatcatcattgttcacaggagaaaactttggaaacacacgaagagaaagttaaattcatgcccgttatatcaccgccattgctnatcacttagtaaatgttcagcc

SEQ ID NO: 4216 - DNA, 555 bp, Homo sapiens
  misc_feature 21, 241, 252, 391, 396, 482, 495, 496, 520, 528, 532: n = A,T,C or G
gtatgtatatgtatatgtggngatcgtgggtagggggaagaattcagagggaagaagcttgtggcgtctttgcctggacgatttctaaaaactagctgactcgtcatctttaaaacaacaacaataaaagctatcatatgcatatgttactttgtttaatatttacaacaaccctttgtggtaaatattttcatttttcagatgaggaaattcaggcacagaatgattaataatttgctantgaagtcacancagtgatggggatgttggagatttaaatcaatgcattttgagttgcctgagcaaagaattccaaaatttaggaagtcactatttctgtatttccttctaaggaaaaccatctaaagtatatttttatctccagtaggcngtggncattgtcaagagaaggaaaggttggtgattttatttggggtgatgggattgggacttaattttctcttttgctttttgctgtgtanttccagattttanntagtgaaacttaattttaaaaacncaaccaantttnatgtttgatgtataaatttatat

SEQ ID NO: 4217 - DNA, 560 bp, Homo sapiens
cccttagcgtggtcgcggccgaggtactttattaatatttttttcaagttttggtaaagtatgaaataactctggattaagaggagaagaactagaacttaataaccatgacatttgggcaaattgtttgaagcctcagtttcctcaacctaaaaataggaattataactttttgaattgttctgttgtatgagataatgacagtgaaatattttggagccaaaaagcaatgcatactattgggggttattattattttttgatctttcagcaagccagctatagtagcttttcctatataaacacagtatgaattcagtgccctcgctttactgaccctcacagcattcaagccctgtatggaccgctgagctctcccttgaagcaccccttagtccagtattctttactattttcccctttaacaatttaaacttctttcaaaacaactggcagtagttttttaaaaaagaaaacaggctactcttcaaattaaaaaaaattgtcttgctttaggaaaaatgttcttctgtcttttccaattatcttatttcttctgc

SEQ ID NO: 4218 - DNA, 395 bp, Homo sapiens
  misc_feature 379: n = A,T,C or G
cccttagcgtggtcgcggccgaggtacgtttatatgaaggcaaacgtttccaggagccatcttcacatttcttcataaactggtcaaagagcagtcttaggtccttgttccagctggggttggggacagaacagtccttaagaatgacttcctcagaagaaaatgacctttagcagcaagaatccaaagtatctttggtgtctgttgtcttcccatgttgtgcgtgcagatggaggcacgagcataacgtaaatctcttccatttataagaaaactgaatgtcagcgtgatgctagctgctttaatatttcttgctgaatttttcttggatttgttgtccgtaggtctcactcttggaaaggatgtattcttgaattgntatccatgggggcaag

SEQ ID NO: 4219 - DNA, 514 bp, Homo sapiens
  misc_feature 282, 374, 456, 459, 465, 474, 502: n = A,T,C or G
cccttagcgtggtcgcggccgaggtacaataacttcacctatctccttaaagctgggattaagggaaaaagaatcagtcaacaagaaggtaagttcacagaattatcagccataatagtgtaaatttgccattaaaattagaaaaataaatagatgaaatttttttcattcaaattttcataaattttctgatgcatatgaactttcaaagttaattaaaatgctatgaacttatatttttaaaaacttactctgcagactcaacaaaataattaaaattgnattttctcttaagcactgctttttttttttttaaggtacattctaagagcaagtgtggttaaactctccagttttctatgacagtatggtgnttagtttaacctactaattcaatcaggcatttttttgattccccgggaaaaggggatacaaccagaacatttttaagaaggncanttttancagttttanttcaccagatgccataaaattaacttcntttagggaaaaa

SEQ ID NO: 4220 - DNA, 533 bp, Homo sapiens
  misc_feature 262, 337, 338, 441, 462, 507, 526: n = A,T,C or G
ccctttcgagcggccgcccgggcaggtacgcgggtattccaaacacagatcagccttatctagcgaaccatcactctgctcttgaattttcttttggcctcaaactctagagctataacatgttaacggtttaacaccagaggagaaagctattcttaaactactcaaacatggtttttttttctatttttcagactcctgaaacagactactctttgcctttttgctgcagttggagaagaagctgaatttgaaaaatgtntgttatgcaatgctggagacatggtgaaataggccaaagatttcttcttcgttcaagatgaattctgttcacagnnggagtatggtgttcggcaaaaggacctccaccaagactgaaagaaactaatttatttctgtttctggggagtttccattatttctactgcttacactttagantgttattttatggggactaanggattaggagtgtgaactaaaagggaacatttccactctcaagtnttctactttgcctttgacngaaaata

SEQ ID NO: 4221 - DNA, 563 bp, Homo sapiens
  misc_feature 381, 465, 498, 504: n = A,T,C or G
ccctttcgagcggccgcccgggcaggtacgcgggatgttaaatattaagaaaaaaagactaaataatggacacctatgtatctgcaaatacgcattcagttgtctttaataatcctttgctaatcttgcttcagatggattaagtgtgcgtgcctgtgtgtggtgtgtgttttacattacagattagaacttaggtcctctggattcacaaccccgaatcccatttgtttttcttcctttccaaagttgtcattatcgtgaatttggtgtttagctatcccatgcatatttttacactactgctataacatatgtagttataaaatagcattggtttgtatgctttaaaactttatttaaatgggaccaactgtttatatnatcctgatcttctttcccttatcaacagtatgcttttgtgatttatctgtgatggttccatataggtcaaattctttcattttnattgcttttataatatttcatcatatgaaaaanaatcanggatttatttatctatttcccctattgctagaaatgcatgtcattttaaaaccttttta

SEQ ID NO: 4222 - DNA, 312 bp, Homo sapiens
cccttagcgtggtcgcggccgaggtacgcgggggttttgcaaaatttagatggctttataatcacaataatacaaaagaaagtgaccctcgaaatgggttttaccactaattttcgattcttgaagatcatttcgaaacattaccagcccaaacatttttactgctcctcagaatacataacacctgttttttgatactacttttgtaatcatggtaataacagagtatggatatgtatcattcttgtgcaatttacaatgtattggactgattttctttctgactttgggcttggggtaacatatagcttt

SEQ ID NO: 4223 - DNA, 410 bp, Homo sapiens
ccctttcgagcggccgcccgggcaggtactttgtgtatgttccagcaaaacaagggttcctccagttttggtggtggaaatgtcacagacatcaagcattggtagtgcagaatctttaatttcactggagagaaaaaaagaaaaaaatatcaacagagatataacctccaggaaagatttgccctcaagaacctcaaatgtagagagaaaagcatctcagcaacaatggggtcggggcaactttacagaaggaaaagttcctcacataaggattgagaatggagctgctattgaggaaatctatacctttggaagaatattgggaaaagggagctttggaatagtcattgaagcgacagacaaggaaacagaaaccaaagtgggcaattaaaaaagtgaacaaagaaaag

SEQ ID NO: 4224 - DNA, 359 bp, Homo sapiens
ccctttcgagcggccgcccgggcaggtacaaagactattgtagagactatccgggttagtttgcaagggaagccaatgatgagtaatttgaaagaaattcacctggtgagcaatgaggaccctactgttgctgcctttaaagctgcttcagaattcatcctagggaagagtgagctgggacaagaaaccaccccttctttcaatgcaatggtcgtgaacaacctgacccttcagattgtccagggccacattgaatggcagacggcagatgtaattgttaattctgtaaacccacatgatattacaggttggacctgtggcaaaagtcaattctacaacaagcaggagttgaaaatgaa

SEQ ID NO: 4225 - DNA, 550 bp, Homo sapiens
  misc_feature 538: n = A,T,C or G
ccctttcgagcggccgcccgggcaggtacctagcttttattcattttattattcatctttattgctttcattgcacatgctgttaacttcttatgaactctttgttctaataaataagcatatccaggtttttcataaataaatgaggagtctataaattcttactagttttaatagaaacattgccactaaaatggtgtattctagctgtgtgagcttttggaaaatgttttcatttcctttatgtttgaatgttccttccaggtctttgaaaatatacattctgagttgaaaagctttataataggtaaaactcattaacccatatactttccatgctgggcacagcaggtgtggtaggtagaaatataagatgactcccaagatttttgcaccctggcatacacatatgcttttccagttgttgaaacactaatttaggtgctgctgggaagggattttgtagatgtgaataatgttccaaatcagttggccttaagaaagaaagatgaacctggatgggccagatcttatcagntgagtcccttaa

SEQ ID NO: 4226 - DNA, 323 bp, Homo sapiens
  misc_feature 260: n = A,T,C or G
cccttagcgtggtcgcggccgaggtaccaccctgagccatcaaccttgctctccagtcccttcttagtatccctttctggctctttttactactcctgacacacagacattttctaagattctgcccttggtcatcttctcttctgactttccaattcccgtagttatgttctgatcacttgattttgatctccaaatcttctagcacaatattttttctgagatctgaacttttatttctaacctcttgtagttactgncacatatctattctactgccacctcaaatgtaaatttccaaatggctatctcttactctgcct

SEQ ID NO: 4227 - DNA, 538 bp, Homo sapiens
  misc_feature 126, 140, 144, 157, 189, 203, 218, 238, 240, 242, 258, 260,265, 270, 286, 306, 310, 317, 324, 333, 340, 345, 352, 355,369, 371, 408, 410, 415, 416, 430, 433, 441, 444, 450, 461,468, 475, 477, 484, 489, 494, 503, 513, 515: n = A,T,C or G
cccttagcgtggtcgcggccgaggtacacaaaccaagacaatatcagggtgacaggtgaatgaacttaaattctcagttcttgtctattcaccaaaaaagtatacctgcctgttttttctttaatntattcaaagggttnaatngaacttttttaangggaaacaattggtttcttattaaccccggtnatttttttttttanaattttaaaaaaggncaaaaggtggcccctttggnantngtttaaatttttcccnanttggnttaanaaaatttcaaattttnggctttttaaaacctccccnttcnttttaantgggggngtaattggnaagtggnaattngtaatgnctnattaaatttttaananttggttaaatttttgggccaatggtcccccttaaacntntgggnnaaaaaaaaggggtnagntggggggnggnaaaggntttttgggggnttttaanaattaangntcccaangtaanttaanccttttttnttcctttttncntaaagaaaaaaaaggcccttttt

SEQ ID NO: 4228 - DNA, 517 bp, Homo sapiens
  misc_feature 98, 123, 165, 266, 282, 293, 305, 342, 351, 359, 395, 408,411, 416, 436, 450, 463, 468, 473, 500, 503: n = A,T,C or G
ccctttcgagcggccgcccgggcaggtacataattatcaaatgctgtgagttcagaaaagatgtttctgagtaattaagggattggggaggagggaanaccttgaaaaaaccccgtgtggggnatcatttagaagctaccaaagcattgttagaaatgaaagagnattccgggttgttaagtctcaattcttaacaaaattaaagggtaaggtttaaatttcttattccaaaaaaactgggccagttgttaaattggtttggaagncaaagttttaccttancccttaagggnccctttttaacnttttttttttcaaaggggaagggccttggggaatttncttggaatncctaattngaaggttttaatttttttccccaccccaaggaaaanaccccttttttcnaanccganttagggggggaagttttttngggccttggcccancaaggttccaacnttggnttttncccaaaaaaattaaccaaggaaaaacntgnttggggggggtttt

SEQ ID NO: 4229 - DNA, 394 bp, Homo sapiens
  misc_feature 218, 260, 281, 287, 301, 306, 311, 322, 380: n = A,T,C or G
ccgggcaggtactgacacatgatgtcccctaccatgattacttctataccgtgaacagatactgtatcatccgatcttcaaaacagaaatgcaggctaagagtttccacagatttgaaatacagaaaacagccatggggccttgtcaaatctttaattgaaaagaattcctggagttctttggaggactatttcaaacagcttgaatcacatttgttnaatgaagaatctgtattaaatcaggccgttgaatgaccctgnaaaacttactggcctacgaangagaangccgaacccttcancccgnacagnagaaacagttnctaaacttttcctttcagcattcctctggagatgtgggcttaggtgccaaaggggatnttacaaggaaaaga

SEQ ID NO: 4230 - DNA, 318 bp, Homo sapiens
  misc_feature 284: n = A,T,C or G
cccttagcgtggtcgcggccgaggtaccatatttcggaggatggatttctgatttccaacaatgacaattcctctacttgaggactaatcatggtttatcttaagaatatagatgcgataggttatatctgctcggttatatagagttttttctgtctttattatctcttaagtgcattgtctgtgatccacatcacatatttgtttgaggcttattcactaataaaaccatttttcttttctttttcttccttagctggggagctttgtttgagccttgcaanaatacttttaattttaaattacccgccgtaccct

SEQ ID NO: 4231 - DNA, 378 bp, Homo sapiens
  misc_feature 1, 15, 43, 70, 73, 79, 130, 140: n = A,T,C or G
ngcccttagcgtggncgcggccgaggtactttttttttttttnataaatttttctttggaatctaatttnatntttcanggatccattaagcattttcaaggaatacactgacattactaaattgttcancaatgcacanaatttgaaaatacacttgaaaaatagaactttgatataaacttgtaaaatacgtaggatgtataccactgattaaataaattaaaaaactccattcccctattcagtgctgtgttgggtagaaaaggggtaagtgaacaaacaagtggaaaagaaagttaaggaagaacatatagaaaaggattgttttgcgcaaacatctggctttgcttccccaaagctactgaatacaaaattta

SEQ ID NO: 4232 - DNA, 478 bp, Homo sapiens
gatatctgcagaattcgcccttagcgtggtcgcggccgaggtaccagcttataaataccagcttctgttattgataagtagaaagatgaatggaaaacaaaaatacgtataatcaataggcaacagctagttttttgaaaagaccaatatgatacagaaaactcaggaaaaaggagtaataaaaatcaatatgctaaaaatgaaacagagatataacaatagtgatttttttggggaaaaatggaaaggttttacatgaaaaaatataattactcttaccgaagaataaagaggaacttgaattgaccatgaaacaatttgagttcataactaaaaaaagagatatgggccaggcgctgtggctcatgcctgtaatccgtgcactttgagaggccaagttgggagattgcttgaggccaggagttcgagactagcctgggcaacatggtgaagatcctgtccctaatacaaaataaaa

SEQ ID NO: 4233 - DNA, 460 bp, Homo sapiens
  misc_feature 3: n = A,T,C or G
atntgcagaaattcgcccttagcgtggtcgcggccgaggtacgcgggaccacattgtattgagttttgtgtataaaagctacagatgagtctaaataaaataaaaattgtaatttagcccaaatgctgaactaagtcagatacctctagtcctataatggaataagctctatgatatgtgttagtattgcatatggtatgattgtaaggtttttggaaagcagtttaatatgccagtcttgcatgtgagcagatgagttttctccttgagctggatgtctctttgaaaactatcagtcacctagaaaatatatttgtcctcatatgggaaactaggtctaggaaagcagggtgtagggagaggtcttagattcttgggttaacaatttaacaaaggagatttggctatcacagtcatctagtgaaagtagaataggacagaaaagaccttgtaacttggg

SEQ ID NO: 4234 - DNA, 796 bp, Homo sapiens
  misc_feature 448, 466, 489, 637, 673, 684, 735, 738, 744, 762, 785: n = A,T,C or G
cccttagcgtggtcgcggccgaggtacgtccaaagccacaggatgaaattatgcagaagtctatcttgaaaaggtcctgattactttcactaaaattctacctattagaaagatgacaatatcccaaaataataaaagctcagaactaaaactttaggaagtataggagaaaggaagaatgggtaggtagactggggtaaagacggaggagaggatagtttagtttattacctaacagaaaggctattaaaatggacgaagttgtagtcctatccctgacattttatgtccttgggttaatgtgcttagccatcttgtgcttcagaaatgtcctctatctgttcaaacctgtaatttttgaaggtttaaaccatgattttctgataatctcaaactgctcacatctccttgttagaactagtatcttagaaatgctaaaacgattagntctgaaatcacattgctnctaaaagaactaaatttttttgnattatcttcggcttactattccctttcactttttataaagtcacaagagaggaagcccttaagggtaaaaatgaatgctatggtttgaggttttttacccatatttttaaccttagagcctaaattttaccctttcaaaacctctagnttttccataccctgtcaacctcctaaattggtggtnttttatactgngagcctcacttgggtattccggaacaccaccccctgaaaaagccttaaccngangtagcncaatgggaagaaaccaanccaacccccaaaccaaaaccaangcccaaaaatt

SEQ ID NO: 4235 - DNA, 544 bp, Homo sapiens
  misc_feature 416, 519: n = A,T,C or G
ccctttcgagcggccgcccgggcaggtacgcgggaacctggaagattggagatctctctctaatccctaccccgcagctggttcggtgtgagtttatagaaaccttggggtctgagtttatgttaaaaaaaaaaaaaaaaaaaaagttgaataaatagatcagtgatatccagaccctgggatttcgtggctcaattaaaaactgtggggttaccatacatagtatctgactgcttattttgtcaagtaaagacatatacaggcataccttgttttttttgcatttcactttgttgtacatatcaagtatgattaacggttcagtgttcattttcaggaatctgattggataactgtcgtttcatttgttgaaacatataattcaaaaagcattgatgaagttgtccaaaaaaganagcaatgcaagtccattttacttattatgaacaacaaagcttggtaagtttattaagtgtaaataggctctctatgccagtgtattccctggggataaactangtgattgagatgggtcgtttaactt

SEQ ID NO: 4236 - DNA, 559 bp, Homo sapiens
  misc_feature 358, 463, 544: n = A,T,C or G
cccttagcgtggtcgcggccgaggtaccagaacctttcacaacctggagaatggcaataagacattgctgaaagtagtctacagatatgttacttcccaacaattacagtaatcgagagtgttgcatagtttgcaaagtacttcatgagttcttttaattagcaaaacaaggtattggctaggaagaaaagttattattattttcattttatagatgagaaaacagaaccacagaaactgagggagttacccaaggttacgtggcaaaggagtgacggtggcacatctagaatccaagtccactgactctcatcataatggcctttttatatcatgcttctcttgaactatgacttgncttctagtatatgtagatatcgtttatacttaaaaatttgcctaatactatctcataatgatgctaagattattaaaatgggaaattaaagtttgtagatatcgnttatacttaaatatttgcctaatactatcttataaatgatgctaagattattaaaatggaaattaaagtttggtaacagtngttactttaaaaatt

SEQ ID NO: 4237 - DNA, 739 bp, Homo sapiens
  misc_feature 473, 477, 503, 513, 535, 559, 567, 593, 595, 608, 612, 626,630, 632, 638, 648, 651, 682, 684, 686, 697, 698, 702, 709,710, 712, 713: n = A,T,C or G
cccttagcgtggtcgcggcccgaggtacctggctatcaattccacttggtcatgaggtttgttttaatacagtgctgaatttgatttcccagtattttgtaaggatgtttgcatctgtgtttttgaaatttatctttttaaattgataaactaagacttaatatacatttattgtgtggaacatgttgttttgaatctatgttaatgattaatacagatcttttgatttccttgtaatatttttggttttatttcaggctaatgatggctacttagaatgagttgggaagtattctcttttctgttttctggaactgtttgtgtagacttattccttacatgtttggttgaagttcactagtgaagtcatctctttttggaagggtttaaaactgtgaaagcattttggttaatagatacaggtcttttattggtacctctttcttcttgaagtgaagtttgggaagtttggncttncaaaaggaatttgtccccttttatcntaaagttggnctaagtttactattattaaaanatggttattaatagggaagttaanaaatttcncaatggtatccctttattgggctggnanccatgggactggntttnacatcttcctcttntcgntncctganactggataanttngggggcttttttttttccttttttcttgacnancntggcctaggannttantaatggnngnngacctttgcaaaaaaaaaaaaaaaaa

SEQ ID NO: 4238 - DNA, 311 bp, Homo sapiens
cccttcgagcggccgcccgggcaggtactaagagctttacatgcacccgctctttaaataaccctatgagctatgcttattatcctcattttacaaattaggaccctgaagctgtggaagattaacctacttaactgtctggagtctctcaataaatatcaggcaggatcttatttgctaaaattgtattttatttctataagtgatgttttgaaagatataaaaaaattttatgcctatcatgaataaccattaaatggtgcaataaacataacattgtatacagtaattgtttaaatgaaagaacttct

SEQ ID NO: 4239 - DNA, 650 bp, Homo sapiens
  misc_feature 499, 598, 603, 607, 609, 614, 633: n = A,T,C or G
gatatctgcagaattcgcccttagcgtggtcgcggcccgaggtaccattcatttaaaggcataaatgtccaatgggtcataaaggtcaaagctaatagacaaaaaaagcttcagcatggatgatgagcaaattagatgcctctctgctcagcatgaggttttttcagctgcaaaagtaaaatgaatcaaccatggaattaccccaatgcactaatagctaccgctgtagtggtagatcgttatatatctgggcaattaaattttaaatgctaactgtgagaccaagtcagcaaattctaattgagacacgttctacaaaaacacctgaccactactcctgaaacagtcaaggtcttcagaaataaagaaggtttaaaaaaattattacagtcaagatacacggcaactaaatgtgatgtggtataccgtatgggatacagaaactgaaaaaggacattagggccatcttgtgatacatgcactgtccaggaaaagtttncaggaaaagtcaagccagggcttcacagaagatcaaaagaaagagaccaggagaagctaagtgtattagtcaggatcttctaagggaccgaacttaatngaatntttntnccccnccaaccccccccccccccnccttttttttccctttt

SEQ ID NO: 4240 - DNA, 572 bp, Homo sapiens
  misc_feature 531: n = A,T,C or G
ccctttcgagcggccgcccgggcaggtacagtagaaacattaagagagcaagcgagcctcatttccagacacatgggagatttctctcaggactgtgcaaagcatttcatgttccaagaccctgcctttgttaaaacatagatgcatttttttttctttggggatgttcagagccttccagaattatgctttcccaggagagataacaacagtcacacagccaaacgtctagcagtgcttctgcctaccgaacagaatttcctgagaatcttctggaaaagcagtgcccagtcactcattctgcaaaatgcactcagcagctcctctgagagaagccgtggatatagggggatggcaggagagaaaggcagctctccctgccaggcgggtgaggggcaggactatagacccttctactgagggcgagctggtagaatttctctcaatgctcaagaccgaggagtttatcattcccttgacccctgggctttagctagaaatgtccagaactcccccatcctaactgagaanggcagttgcttgccccaaaccccaaagactaattttttttt

SEQ ID NO: 4241 - DNA, 601 bp, Homo sapiens
  misc_feature 418, 499, 501, 539, 570, 571, 573, 577, 587, 600: n = A,T,C or G
ccctttcgagcggccgcccgggcaggtacagaactggggcataaaaatggcctatatctgaaaataactccaaaaatttattattaaaattaatttcatttgcttctttttaaatttttttcatgtggctactagaaaaattaaaatgacagatgtggctcacattatatggctactggacagcactgatataaattatgcttttcatggttttatcataaaggggaccagaagatgggatggtagctggtggtgaagtggggtaaagagaaacttttttcccctgaaatgggagaattgcagcatgtttgtatgtgggaataatatagtcaaaagtagaagttggtgatgcagcagaagagacaggggacaaatgatgtcctggagtaggtgagtgcatttgggttccagcgcatangtggaggggtggccgaagggttatggactgttcatacagagtgacaggagaggaagccgaatgtgagggttgcaaacaaangngagtatttatggacatgggagtgccttggaagtccctnttttggaatcttaagggcctaagggagccanntnttanctgaaaaaanaaggatggggggna

SEQ ID NO: 4242 - DNA, 564 bp, Homo sapiens
  misc_feature 186: n = A,T,C or G
ccctttcgagcggccgcccgggcaggtacgcgggatgttaaatattaagaaaaaaagactaaataatggacacctatgtatctgcaaatacgcattcagttgctttaataatcctttgctaatcttgcttcagatggattaagtgtgcgtgcctgtgtgtggtgtgtgttttacattacagattanaacttaggtcctctggattcacaaccccgaatcccatttgtttttcttcctttccaaagttgtcattatcgtgaatttggtgtttagctatcccatgcatatttttacactactgctataacatatgtagttataaaatagcattgttttgtatgctttaaaactttatttaaatgggaccaactgtttatattatcctgatcttctttcccttatcaacagtatgcttttgtgatttatctgtgatgttccatataggtcaaattctttcatttttattgctttataatatttcatcatatgaaaatatcatgatttatttatctatttccctattgctagaaaatgcatggtcattttaaacctttttactattat

SEQ ID NO: 4243 - DNA, 320 bp, Homo sapiens
cccttagcgtggtcgcggccgaggtacacaataattttttgtggctactcaaattttcataattaatctagatttaaaatcaaggaatattcttacttgtagttggcaatcaatatgacatgccaaaattatatgtaagtattttattgttggtgaggatataagaaatttaccatcaaaagagagacgataatctatgcttgcagactccggaaagctgcctctcacataagaatttgcaatttctgggggaaaagaaaaagttgattgtgcaaataaacattaccatggagtcttctctatggcaacatcaaaaatga

SEQ ID NO: 4244 - DNA, 285 bp, Homo sapiens
ccctttcgagcggccgcccgggcaggtacctagcttttattcattttattattcatctttattgctttcattgcacatgctgttaacttcttatgaactctttgttctaataaataagcatatccaggtttttcataaataaatgaggagtctataaattcttactagttttaatagaaacattgccactaaaatggtgtattctagctgtgtgagcttttggaaaatgttttcatttcctttatgtttgaatgttccttccaggtctttgaaaatatacattct

SEQ ID NO: 4245 - DNA, 589 bp, Homo sapiens
  misc_feature 540: n = A,T,C or G
cccttagcgtggtcgcggccgaggtacgcgggattgtgcattttcctcagaaaattactgaaaggatttttgcctttcttggaattcctttgtctcctgctagtttaaaccaaatattgtttgccacctctacaaaccttttttaccttccctatgaaggggaaatatcaccaactaatactaatgtttggaaacagaacttgcctagagatgaaattaaactaattgaaaacatctgctggactctgatggatcgcctaggatatccaaagtttatggactaaatgctgcaggtcagcagaaatttgcactaataatacttaccaacccactttgtggatatgaatcagaagagtttgtttattctttagtgtgtgtgtgtgtgtgtgcacgcgtgtatgtgttcaagtgttgtttgcacagagagattgttttaaaaaatgggcaccatatttggcctacaggatttatttttatgtcatcacctcccttgcctttgtttctgaaaatttggctgctaaaaagtttctgcttcagagnggtagaatgaaagttatatcatggggggcagggggagaagggaaaaatt

SEQ ID NO: 4246 - DNA, 535 bp, Homo sapiens
  misc_feature 527: n = A,T,C or G
ccctttcgagcggccgcccgggcaggtacttttttttttttttttttttggtgggggtagggtggcaaacaaaaattaaattagtattaacatgcttaacattgctaagcttctctttggatcccatgtttctggttctccaatgccactaatggaaaaagagtatggccacaataactagtctttggcatataatccttaccaagataagtggaaagattcaaaacctcactaatctatttttttctgttctaagaatatccacagtttcccaaatgtgattatgcatccccctcacattttcccttttcactaatgtcacctaaatattcggctctatcctattcaggaaaccaaagttcagagacataaacaaaagaaaaaaaacccacaaaacttcctcaagtcataggtccagtaataaggtaagctgggaatttaactcacattttctgacactaaaactattggtcattctcctgcactaagcttctaccataatttatacacaatggactttacctaanggtaatat

SEQ ID NO: 4247 - DNA, 663 bp, Homo sapiens
  misc_feature 462, 515, 531, 586, 600, 602, 605, 607, 631, 635, 637, 639,643: n = A,T,C or G
ccctttcgagcggccgcccgggcaggtaccctagtcatccatcatagagattttagcatgagaggatattaagaaaatacatgtaattctgaataaacatatatggaattaatgtgtctccatgagagtgtgtgcctgtgtgtgtgtataattccaatattaataaaaatgttatcttctttgaaaccatcagtgctgactctatccagcctctctccacacagtataaaatgtggaaaatgtaagtattatggtatggaattgactcttgctcatatgttgcacacctaggtgctatttctattatggagaactagaattatataatttaagtttaattgtgcccccttttccccaaagttcatgtgtatttatgccatctgtttggccttgtttattttggtatcacagataaaatagaagttaaaaatctgaattaaccgtgctgatatgtttcatggngataaaatataattgcttatatacatatgcaggtatttaagtctatagcctgngtgggtgtgtgtgggngaaaacctatgaccctgtgcacattggtctgggggtattttttggaatatggaantggagttgggacananatncngctcacagcttatgaattacttancccntncntgtnttggtcttaaaacattaaaa

SEQ ID NO: 4248 - DNA, 619 bp, Homo sapiens
  misc_feature 513, 523, 536, 564, 566, 568, 577, 586, 598, 604: n = A,T,C or G
ccctttcgagcggccgcccgggcaggtacgcgggggtttgtggctttcagctctgaaggctgtcagctccctgatcccactctgcactctatttctgtgtctgctttaattcttctagtgctgctgggttagggtcttcacgaccgaactggtctcggcagtggaagaacatggaaacactaggctgacttagtctcccagcctacatctttctcccatgctggacgctgcctgccctcaaacatcagactgcaagttcttcagcttttggactcttggacttacaccagtgatttgccaggagctctcaggccttcagcaacagactgaaggctgtgctgtcggcttccctacttttgaagttttgggactcagactggcttcctggctcttcagcttgcagatggcctattgtgggacttcaccttgtgatcatgtgaagtcaatactcctaaataaactccccttcatgtatacatctatcctattaagttctggccccctagaaaaacnccgactaatncaaaaaggattgnattaaagttttaccggtggtattttttncnanaaggtttanaaaatagcncccataatttgnctttanccgcaagttccaagt

SEQ ID NO: 4249 - DNA, 541 bp, Homo sapiens
  misc_feature 443, 520: n = A,T,C or G
ccctttcgagcggccgcccgggcaggtacatgtccactgaattggccagcctttataaatgattgtgaatcatctcaaggttcaacaggtgggaatggttaagaatagtatagatgcaagaaatgaacaattcagtaaacacaatccttatgataaaatttatttaataaaatgaaaaatgcttacaaaaaataaaagtaacatgctcagcatgctacctagaatttagtaagcattcagtaattattaacttacaaaatagaaatgtaaagtagataaaattctgtttggggtaatcagcacctaatcaaatgaaaatttcattaaagcagtaacaaggactgttttgttcataactgtatgttcaatacctagcccagtgcttgacggcaagtaggcatatattaaatattgttggaggaaggcaggcaggtaagaagaangaatgcaggaagaaagggaaagaagggagaaagggaatttctaacaaacagaaagtgaattgtcttgaagaaatatnctctttcataccaaggagaaa

SEQ ID NO: 4250 - DNA, 490 bp, Homo sapiens
  misc_feature 448: n = A,T,C or G
ccctttcgagcggccgcccgggcaggtaccaagtttttggtccaaattttgtaggataagttaaacttaaattttactctattaaccaatatgagtgtatttctgaaagcatagttacgttgaaataaagttttaaaaagagaaaatatgaaagaagaatcagtatgaaaaatatctatactttatgtatattttatatatgcatggccactctaggaatgttttaataaggcagaattttgtttaatcatgatatgtgttatgataaaatatttgctctcaaccaattctaaaacataaaaggaaatttctcactttctatattaaaagtcaaaatataaaataacaaaagaaagagttaaaattaagcaaaaaatatgatacatgaccaaaccgtgtaacaattatatatacccaactttagtaatatatttgttacatttattgngcactctctatgtgtgagaaattatatggaaaattatatgtt

SEQ ID NO: 4251 - DNA, 516 bp, Homo sapiens
  misc_feature 493: n = A,T,C or G
cccttagcgtggtcgcggcccgaggtactcagtttattgaattgatgaattgattttttttagtaatcacataaatttctgtaagatttgttatacattgtactgtcacagaatcatgttttatatcttcaagctcaaagcaagctttcaaacttgaatttaagttcttgcataaatatggatgattgtttctccattgctgaagcagtgtattatttccataatgatctgtaaagtaggtgggtttcatgacctaagtgttattgttgatctttatatatacaaggaaaacgcagagtcatcgttcatttgtagctgcatttatctctggttttcaagcatttctataaaataacaattaagcttagtgtgatggttaatactgagtgtcaacttgattggatggaaggaagcaaaatattaatcctgagtgtgtctgtgagggtgttgccaaaggagataaacatttgagtcagtgtgctgggaaaggcanacccccccttaatctgggtgggg

SEQ ID NO: 4252 - DNA, 305 bp, Homo sapiens
cccttagcgtggtcgcggccgaggtactttttttatttttcattttttttttattttttactttaaacgttgggatcatttgttggtttttactgttattccaaaatgaatttcatagcactgaaaggaactgtgtattttctccatcagattcaaccaattgaagtatgttgctgttatgaaaaatgctcacagctaagctttgaaaaagttagtaaaaaacccaccccaatacttactttgatcagtgctctgtaaatctctaagctgatctagttgatctttttaaaactacctttaaaaaa

SEQ ID NO: 4253 - DNA, 475 bp, Homo sapiens
cccttagcgtggtcgcggccgaggtacaatttgtagttgtttccaggtttggctaataatcattccttaacctagaattcagatgatcctggaattaaggcaggtcagaggactgtaatgatagaattaaattagtgtcactaaaaactgtcccaaagtgctgcttcctaataggaattcattaacctaaaacaagatgttactattatatcgatagactatgaatgctatttctagaaaaagtctagtgccaaatttgtcttattaaataaaaaccaatgtaggagcagcttttcttctagtttgatgtcatttaagaattactaacacagtggcagtgttagatgaagatgctgtctacaaggtagataatatactgtttgatactcaaaacatttttcattttgttaaagtagaagttacataattctatattttaaggtcttggggtaaaaaagtagttttacattttata

SEQ ID NO: 4254 - DNA, 566 bp, Homo sapiens
  misc_feature 487: n = A,T,C or G
ccctttcgagcggccgcccgggcaggtactagtatatattaaagttcaataattatgatccttattataattattaattcatcattattacatcaatttaaatagaaatttcccagtattagtcttaattgtaatattgagcccacatggaactgtccctaatatagaatctacattcctatattgcatattgcatgtggtttgaatctattgtaagtttcaatatggtcacaaaaaactcattaacaccctaataatgagaaatcaggcattgcaatggactgtttgtgtctctcacaaatttatatgttgaagccttaattctcaaggtgatagtattaggaagtggggtctttgggagctagttatatcatgaggatggagccctcacaattaggattagcacctttataagaagagaagtttgttcccctctctctgctctccatcatgtgaggatatgagaagcagaccatttgcaaaagangaagctgatcctcaccaccccattgagtttgccggcccttggtctcggatttaccagttttcagactaagagaaataaa

SEQ ID NO: 4255 - DNA, 503 bp, Homo sapiens
cccttagcgtggtcgcggccgaggtactttattaatatttttttcaagttttggtaaagtatgaaataactctggattaagaggagaagaactagaacttaataaccatgacatttgggcaaattgtttgaagcctcagtttcctcaacctaaaaataggaattataactttttgaattgttctgttgtatgagataatgacagtgaaatattttggagccaaaaagcaatgcatactattgggggttattattattttttgatctttcagcaagccagctatagtagcttttcctatataaacacagtatgaattcagtgccctcgctttactgaccctcacagcattcaagccctgtatggaccgctgagctctcccttgaagcaccccttagtccagtattctttactattttcccctttaacaatttaaaacttctttcaaaacaactggcagtaagttttttaaaaaagaaaacaggctactctttaaattaaaaaaa

SEQ ID NO: 4256 - DNA, 168 bp, Homo sapiens
cccttagcgtggtcgcggccgaggtactttctctgttcatttccctatttatttatatcagcacttccttcttcttgccaacttcggtgccacataagggaaaaacaacagaaatctaacaccctgggataccttcagagaaaacagaaaagacactgcagacttttt

SEQ ID NO: 4257 - DNA, 572 bp, Homo sapiens
  misc_feature 64, 131, 136, 141, 146, 150, 177, 187, 214, 245, 272, 273,282, 320, 354, 358, 376, 402, 417, 420, 430, 498, 504, 522,541, 567: n = A,T,C or G
cccttagcgtggtcgcggccgaggtactctttctgcccttgatattctaataaaaaactatagngacagcttgacagctgccatgattgatgcagttctagatgagctcccacctcttatcagccgaaaanggtgnatatngccanttgnttttccaacaaaaatgggcccaatccnagtttttttnttttaacccaacttttttgggccaaanaaaggttaattattccccctttcccttcccncttttttccaaaaaaggaattaaaagnntggggaatncccaatttttcctttcaaaattgggaaaaccttttaanttttggggaaccttttgggttgggaaggaaattncaancccccccttttaattttnggccaagggggggggggggggaaggncccttccttttaagnttngggccccaanttggcccttaagggaaaccttttttttttttccccaaaaggcctttccttgggggttttttggtttcnaacccnttgggggaaaacccaaanaatttaaaatttttttaanggggaaattaaccaatttgggggaanttttt

SEQ ID NO: 4258 - DNA, 296 bp, Homo sapiens
  misc_feature 133, 141, 146, 155, 204, 214, 219, 222, 234, 282: n = A,T,C or G
ccctttcgagcggccgcccgggcaggtacgcggggtcattggtggcggaggcaatggccggcaaccagctgtaagcggggcacggaagacatatgcttgtgagacaaaggtgtctctgaaactatggatgggnacacattnacatnggtatttgnaataaaagaattggaaaattgggataaagttttttcatggccaaatctnattgcacaanatacnacncattcttttagnagtataatggtcagtttatcatttcgttaacagctgtgtttagacagntggctcttgctttg

SEQ ID NO: 4259 - DNA, 723 bp, Homo sapiens
  misc_feature 70, 447, 511, 540, 568, 601, 651, 660, 675, 688, 690, 699,711, 720: n = A,T,C or G
gatatctgcagaattcgcccttagcgtggtcgcggccgaggtacttttttttttttttttttttttaagnaaagacggagtttcaccatgttggccagctggtcttgaactcctgaccttaagtgatctgcctgccttggcctcccaaagtgctgggattacaggcatgagccaccatacctagctgaccttttgtttaaaagcatttgtttctaagatcataattcaattgacaggaaaataccaggtaatgattgcctctaagaaaatcaagtccctaaacttgtcccatctctagctcactgagggcataatccccagtgtagacccaatatgagatcactgaccttcccttcattttactcttgaaaagaaagacagaagttatgaagaaatagtcattccctgagggacacgcagaggaataactagcccaaaactctttangggaattctatgtggaaagtgtttacttggattaataagcgcctttggtaaaaaggcaattatntgaaagtaatggaaatatattggggctgncagtcattcacactttaatatgaattanatcaaatcataatgttttcctctaaccaactanaatgagctcagtgtctcttcaggaaatgaagactatcgatggcaaaaaangggagccanagggcatttacgtancaaaaggtttcangnggggacaangccaggaagaangtttttggnaaa

SEQ ID NO: 4260 - DNA, 614 bp, Homo sapiens
  misc_feature 566: n = A,T,C or G
cccttagcgtggtcgcggccgaggtacatcaccctgctgagggacatccaggacaaggtcaccacactctacaaaggcagtcaactacatgacacattccgcttctgcctggtcaccaacttgacgatggactccgtgttggtcactgtcaaggcattgttctcctccaatttggaccccagcctggtggagcaagtctttctagataagaccctgaatgcctcattccattggctgggctccacctaccagttggtggacatccatgtgacagaaatggagtcatcagtttatcaaccaacaagcagctccagcacccagcacttctacctgaatttcaccatcaccaacctaccatattcccaggacaaagcccagccaggcaccaccaattaccagaggaacaaaaggaatattgaggatgcgctcaaccaactcttccgaaacagcagcatcaagagttatttttctgactgtcaagtttcaacattcaggtctgtccccaacaggcaccacaccggggtggactccctgtgtaacttctcgccactggcttcggaaagtanacagagttgccatctatgaggaatttctgcggatgacccggaatggta

SEQ ID NO: 4261 - DNA, 547 bp, Homo sapiens
  misc_feature 504, 526: n = A,T,C or G
cccttagcgtggtcgcggccgaggtacaggaatagtcaattatgtgttcttctcatgctcagtaaatcagaactttacataagttcaggtgaacatagagtagctacctggggagatatttcacctttttatctgtagtgctctgcttaagaacaaaggaaaaaacagcttcttgcatgattcagcttttagcttaatttttttcctttaggcatagtgaattggggtcccaggtttttatttttctttcacaaattaaaactgatatttagactatttctcggtccactaaatttctctcatcctaaactcctgctaaccacatgtagtctctctgttcatttccctatttatatcagcatttccttcttgttgccaacttcagtgccacataagggaaaaacaacagaaatctaacaccctgggataccttcagagaaaacagaaaagacactgcagacttctttttgggagaaactcctgtgtttatttttgtttgtttgnttggacggttgggtttttttgngggttttttttggggtttttt

SEQ ID NO: 4262 - DNA, 505 bp, Homo sapiens
  misc_feature 470: n = A,T,C or G
cccttagcgtggtcgcggcccgaggtacgcgggttgtgacaaagactgtatatcccacaaagcttaaaatatttacaatttggccttttagagaaaaagttttatgacccttgcaatataaacacagaaatctcagagatgctgtcttcttcctaaactttaatatttaattctgattgtggatgagattagattctccaactttccatgtttaagactcattcaaaaaattcataaatctcaaaatattagaaatgcaggatattgcctgatgacttgtcaattacatgataaattatcttaactatagaattaatatgctggattaagaaatgacccttgtttatgcctaagcttctagggcaagaaaaaaatgatcagaaggaggaaggtagttcccctccacctcaagagaaaccctattgtcatctacatgtctctggaaaacattttttgaacaaatatgccanctaaccaaaaggatgaacataagaaaagacccaga

SEQ ID NO: 4263 - DNA, 575 bp, Homo sapiens
  misc_feature 469, 477, 541, 548: n = A,T,C or G
cccttagcgtggtcgcggccgaggtactttttttttttttttttttttttgggtagagatgagttcttgctatgttgcccagaatggtcttcaactcctggcctcaagcgatcttcctacctcagcctcctgaagtgctgggattataggcatgagctaccaagcctagcctatatggtgtatttcatcaaacctaagacactgttgatcctaagatgcacccaggttttagagatgttaaaatgcacctccacctccacaaaaaagtatgctttttagaaatgaaaataaccactacctactcagaatctttagataaaaaatgttgtcaggccacaagcagaggggcttccctgcctctgaccttcttcacacgggggtttgttgaaggtgctggtgagacccgcttacagagccatccttttgggaggctacccacaccccagatttctagtcaagggggaaccanagaccatncccttgaggcaaaactaaaatgaaccgctggttaactctggcagtcacagcatttacagggctntgaaagnggcagaaaagctagtgatgggtggaaa

SEQ ID NO: 4264 - DNA, 425 bp, Homo sapiens
  misc_feature 424: n = A,T,C or G
cccttagcgtggtcgcggccgaggtacgcggggacctgctgtgctcttgcttgcacagtgtcctggagctgggcctggctctgggtttcaggaagcagtttgactaaaggcagcaagctgcttcctctgctgcctgagataccagaaccatacagaaagacatgcaaagcacaccaaattgtctacagcttaagatcaacaaaaatcctttttcattaattataaattcacagagaatataaacaatgatccttattatcccctttactggctcacacagggagagagaagccaaaagcccaactgattcccaatggtgaagattgagaaaaacgctcccacgatggaaaaaaaagccagaactggttaacatcatggaaagtagatggaagtccctaccttggatattatcaaaaagaatggng

SEQ ID NO: 4265 - DNA, 486 bp, Homo sapiens
  misc_feature 477: n = A,T,C or G
gatatctgcagaattcgcccttagcgtggtcgcggcccgaggtacttctgtggccttgagtattttttaaaaggctcaactgtaagcctcttagccagttggataaatatttggggtcacctaccattgaaagcagaaagcagtagtgacacagctttcccttcaaagagccattgagaaacatttctcaaacaggaaatccttcttttactaatgtggacatatagattattcgtattatagtttgtagaactacctagttcagaatcttgactgccagttttcttggtttcttaggcttgaattttcatagacaattgcaacagtttagatgccttttgaaaggaatgcaatgaagattcagcatctgactatatgtgtgtctatcctgaaataataatggagagtatactgtagattacatgtttacccatcaaatctgacttaaaagggtaaatggaaggttttataggtaangtaattgat

SEQ ID NO: 4266 - DNA, 674 bp, Homo sapiens
  misc_feature 640, 648: n = A,T,C or G
ccctttcgagcggcccgcccgggcaggtacgcgggacctgaagtaagtcagtattctttggaactggaggtgctgtatgatggatcacttgagtgatttcctcagtctttttcacataatcataaatattatctggtaaacttggttccttgagattttgtcagatgtagtgagttcacctggcacttatttggcaccataaaccacgctggactagagactgagatatccttacatagtggtccatggacatggccccttcctggcactgccaggcatttggaaactattactttccttgagtatatttgcctcctcagctggggtttctcgtctgaaatcacagaacatagaaaatgatttgagggactcttctggagggcacctgacttttctctatacatatttcttgaatgatactaggtaatttattacatacaagagatgcctaaggaattagggggttaattctttccatgaaaccttggtttagaaggcccagtgtccatactatgtccagccaaatagatgcacaaaattccaatcccagtaaaagaccttttagttatacagtttttttaaaaactatagtttaagttataggttttttaaaactatgtagaaaaatgattcatttatnggctggcnaattgccccagactttgtctttttca

SEQ ID NO: 4267 - DNA, 737 bp, Homo sapiens
  misc_feature 575, 648, 652, 653, 666, 673, 687, 704, 707, 710, 715: n = A,T,C or G
cccttagcgtggtcgcggccgaggtacgcgggcatgagtgtcaactgcaaaatctatgcattatgtagtgatttgaatcaattagtctttcttgatactccaaaattccctttttcgagtgtctttatcagaaatttgataaatcggaactttcctgtctattcataaacaagagtggtgacttagaaagacacgcactccagagtggggcttctgcgtctcccttgtcgtgcccctttgtgagtaatgctttccccagagaactgcagaaaatgatcctgctgagctacagggtttcccattcattgggttccattccagtccttgcaagttcaacagcatctcagaacattctagtaagcttgctaaacggcgtgtgaaaggttgatcttctcatctaaagcttttaaatttttaaaatcgaccatgtgcagtgggctcacacatgtaaatcccagcacttttgggaggctgaggtgggtggatcacctgaggtcaggagttcaagatcagcctggtcacatggtgaaaccctggctctactaaaaattcaaaaaaatttacctgggtgtggnggtgtgcacctataatcccaactgcttgggaggctgaggtagggagaatcttttgaacctaggtgggtggaangttnncaattgagccccnaaatggnaccacttttacctncagccctggattgacanagnggngattncctcttaaaaaaaataaataaa

SEQ ID NO: 4268 - DNA, 535 bp, Homo sapiens
ccctttcgagcggccgcccgggcaggtacaatgtgccccctcctggctgctgcttcctgacgcagctggtcaaatgtaatttcagaagttttgctaaaaccttctctgaaggtgtttttagctacaggtgaaaggatgaaacatcaggaactttggcagggttgtgcagagacaaaggaagggaaggattggccctagtgtgtgagctgtgagctgctattagcccagagttttgtttagtggatacttaacctgtgtgaggataaataatgcacagtttgacaggataaactgaagtcaacatggtagcttcttcttttagggttctcctttaaaaattttcttctattccccattttctttaaccactctgcgttcattttcccgtttttccccatctccctctttttcctctgttcctgtccttttgtgtttttggaccccaacccatgttgccctcttttttatttggtttatttcttctttctacattaattctcttttttcctttctttaatttaagtcctttctttct

SEQ ID NO: 4269 - DNA, 748 bp, Homo sapiens
  misc_feature 566, 630, 646, 659, 686, 687, 730, 745: n = A,T,C or G
cgccagtgtgatgggatatctgcagaattcgccctttcgagcggccgcccgggcaggtacttgcgctctgcacggtccaggagctgtgatgtggctgtggtctaggggaatcctgcctgccccatggagttgcgcagcacaaccccggctccaattgccagaaggctctttttaatgctgaaccaaaatgtgcctttttttttttgagatggagtttcactcttgttgcccaggctggagtgcaatggcgcgatctcagctcactgcagccactgcctcccaggttcaagtgattctcctgcctcagcctcccgagtagctgggattacaggcatgcgctaacacacccagctaattttgtatttttagtagagacgaggtttctccatgttcgacaggctggtctcgaactcccacctcagcctcccaaactgctgggattacaggtgtgagccacccgtgaccagccaatgtgccttcttatagtgtctactcattggtctttgttctgcccagtgataacaatgggataacgcctgctacacatcttcattgtgaaacccttnccctgtgctgagattaaatgaactctaagattattaaatagtatattttcctttgacagcctanccgttgatgaattttnaaagccttatgtnttaaataaaaccaaaggaaggtaagcnngtcatattgcttaaatttgctaactcctatttattggaatggngaaatttttaaaaanttt

SEQ ID NO: 4270 - DNA, 303 bp, Homo sapiens
  misc_feature 65, 134, 145, 147, 159, 205, 219, 239, 240, 279, 287: n = A,T,C or G
cccttagcgtggtcgcggccgaggtactttttttttattttttttttttttttttaacagaaggnaacagccacagttaggcactttggggtaacatgtgcaactgaacaaaatacttccaattttgaaaaatntggattctgtntnttgccagggcanaaaactttactgctcctgaactcccgtaacagtttgcatggacatnatggcactcatcanatcctactctggctttttgnnactggggcacataaagtctcctcctacccaaagtttaancacagaanccccgtgcatggaggc

SEQ ID NO: 4271 - DNA, 405 bp, Homo sapiens
  misc_feature 268: n = A,T,C or G
cccttagcgtggtcgcggcccgaggtactcagtttattgaattgatgaattgatttttttttagtaatcacataaatttctgtaagatttgttatcattgtttactgtcacagaatcatgttttatatcttcaagctcaaagcaagctttcaaacttgaatttagttcttgcataaatatggatgattgtttctccattgctgaagcagtgtattatttccataatgatctgtaaagtaggtgggtttcatgacctaagtgttattgntgatctttatatatacaaggaaaacgcagagtcatcgttcatttgtagctgcatttatctctggttttcaaagcatttctataaaataacaattaagcttaagtgtgatggttaatactgagtgtcaacttgattgg

SEQ ID NO: 4272 - DNA, 457 bp, Homo sapiens
  misc_feature 336, 366: n = A,T,C or G
cccttagcgtggtcgcggccgaggtacaagacctgacagggacggaggccaacgccgggatcggagggcaatgaggcttgccaggaacagtggcgtcggcttcaatccagagccgaagagttctgatttgatctgatgtgataggcaaatgggaaactgctttgtaaacagggccatgatgtgaggaaatggtattctcagaaagactgacctggccacagtggtgtgcaagacaggctgcaagggagagaaagaatagtctggaaggctggctggggaggccaacccaagctaggttgccaaggagtaatgagggtggcctggatgttaatgcanagggagggagaggagcggaaggtggcccangggatgagtctaagaaaacccccggctggcagtgctgagggaggcagaagcccgcgctggtcaggtggcaggtgtgggggccaatgtacct

SEQ ID NO: 4273 - DNA, 337 bp, Homo sapiens
  misc_feature 305: n = A,T,C or G
ccctttcgagcggccgccgggcaggtactcacaaaatttttttaagtaaaaattagggtagtgggaaaaaaaaaaaattcttcccgttggcttcatggggtaagatccttctcattattcaggtctcagcttaaatatcacttcctcaaaggaatcttcctggtcactttatctaatgtgcttatagcctcagatggcaataactttccactttcttcccctaattttctttatagcacttaccagttgtgaaatgctcttgcctatttagaatttaagctctacagtagcaaagatgtatgttngccaccatatttctggagactgaaatgggtta

SEQ ID NO: 4274 - DNA, 570 bp, Homo sapiens
  misc_feature 562: n = A,T,C or G
cccttagcgtggtcgcggccgaggtgctatcagaacaaatacataaaataacttcccatagagaacaggatatagcaataatagctccttagatactcagtggttctgactccaatcaaggtcttgttgatattatatagtaaaaataaaaccaaaaataaatattattcaagtggctcttctaagcatgtgaatcatgaagcactgaaatatgtattttaatgatgatcttatttattcccatttttgcccttagttaacatttactggtgctcacctaggattggctattctgagggattgcatagaaaccaagctccacttgctgtccttggggaggttataactgaatgcagctctttatttggactaaagtgtcaggatatgcattagattctctcctgaaccaaaaacacaacagtcattatctgtgaaccataatttaaaaatctttctagaataacaacagcagactccactcttgtttgtctaaaagagccctactgggtatggatcattctgatgacagatttatacaaaatgattcaaaccagtaacttantaaaattg

SEQ ID NO: 4275 - DNA, 227 bp, Homo sapiens
  misc_feature 122, 123, 133, 138, 147, 156, 162, 170, 178: n = A,T,C or G
cccttagcgtggtcgcggccgaggtactaggaccacaggcataagccagcacaaccggcctaaaattttctagaaaagtagatcttatgttacttcttaccacaaatagtaacagtgggggnnggaagaaaanctttnggggagggngaaaaaganatggtntatgggcncttgatgngtggtggatggtttcacaggtgtatacttaacaccaaatttcatcaaat

SEQ ID NO: 4276 - DNA, 759 bp, Homo sapiens
  misc_feature 514, 620, 642, 698, 702: n = A,T,C or G
ccctttcgagcggccgcccgggcaggtacatatctctctgttgctaaacagagaataatataattaataaatggtaaaaggaatttttttaattttacttttttctattatgaatttccacttctaatgatagtgcattgtcaagtcaggaggataagggtatctttgagtcacgaaactcaacatcaattaaaaagaatttatttcttaatcttctctgaagtcaggaggttctatttagtgaagttcatgtcctatcacatttcaaagaaataagtcttacatgtggaaaatattcaagcatatatgtatatattcagctttgaactcccaaagagctggctggaaattatattaatagtaactcccagctgggagtcactggtaagctggcttccaattatttaacacaatcggataaaatgcgcagtcctacctgccctagctttgcttgatgtgggtgcaaataaagtctagtttcaaactaacatatcaccataggaaattggcttgngggtctactgattgctcagaaaaaaaaaattctctgaaacttgcttgattaaaaattctgtctctggaaatggactcctgcattaactggattcactttagggatnggtggaaaggagaagtcttcanatatttattagaatcccttttgccaaaataccccgaatggttttggtttctagaanaatncagcctcaaaccttttaaacacccggggtcaggcaaaaaaaaaaaaaaaaaaaagtc

SEQ ID NO: 4277 - DNA, 611 bp, Homo sapiens
  misc_feature 537: n = A,T,C or G
cccttagcgtggtcgcggccgaggtactgtctccggctggggcactaccacgagcccagatgtgacctttccctctgacctcatgtgcgtggatgtcaagctcatctccccccaggactgcacgaaggtttacaaggacttactggaaaattccatgctgtgcgctggcatccccgactccaagaaaaacgcctgcgatggtgactcagggggaccgttggtgtgcagaggtacacttggaagagggccaagtgggcaacttgagaggttaaactgcatggtttgagttttgatttgaggttttacgtgttggcatgcattcaggggcttgtgtcccttctcccctgattcttccctccgggtaggagggaagaatccacctgagcagtggcctgccagcacttgagaggctccgcaagcacaagtgtgtttatgggaagttgtgcacatgctcagttgaggcattcttcccttaccagtcgagtgtttctagaggaaggtcatagactaatagtctaataagtctatgacctttantcatactagtgcacatgcctgagcccactccctgtgaacccccaaaatttgagacaggtcttaaattaatttaa

SEQ ID NO: 4278 - DNA, 642 bp, Homo sapiens
  misc_feature 485, 523, 571, 580, 618: n = A,T,C or G
ccctttggtcgcggccgaggtacaatgtttaataaaagtgatgagagtagatatctttaccttgttctcaattttaggaagacatagatttttgtgtagatggcctgcatcctatgaggactcttcattttatccctggttttgtgagggcttttaatcatgactcaatgttgggttttactaagtgctttttctattaagatgatcatatgcatttttctttttagtccactaatatggtaaagttcatttattgatttttgaatgttaaatcaactttatcttcctgcaataaagtacaactttaatgctatatgaattttgccattttgctaacactggtatgctccgggcatccaccatcccactggaattatttattccgttcatattaatttttgttacaaaatctaactgacggaggagcttctgggtatttaggtcccattctactttcaggctatatattctgttttcaataattngtccttgggtggcccaataatcgtgcctgtccaccttngaaggtgtcataatcttcaatcatctttcaaggccccagctaactggncctgattgnaatcttttcaaaatatcttgttgaaaataaatttcctncttttaaaaattaccaggaaaaaa

SEQ ID NO: 4279 - DNA, 623 bp, Homo sapiens
  misc_feature 81, 83, 89: n = A,T,C or G
ccctttcgagcggccgcccgggcaggtactgtgtcaacagtgaaccttattagattcagggtgtcatcgaacttatagcangnttaaantcaatcagtaggaatgtcattttaaaaagtaaaatagtgggacggttgtggtggctcatgcctgtaatcccagcactttgggagactgaggtgggtggatcatttgaggtcaggatttcgaaacccgcctggccaacatggtgaaacctcacctcaactaaaaatacaaaaatcagccaggcatgctggagggcaccttgtagtcccagctatttgggaggctgaggtaggagaatcgcttgatcccagggggcggaggttgcactgagctgagatcacaccactgcactccagcctgggcaacacagcaagacgctatctcaaacaaaaaaaggaagtcaaatagagctttaaacctgaatcatttacatctttactttataaaatgtaaaactacttttttacccaagacttaaaatatagaattatgtaacttctactttaaacaaaatgaaaaatgttttgagtttcaaaccagtatattatctaccttggtagacagcatttttatttaacactgccactgggttagta

SEQ ID NO: 4280 - DNA, 555 bp, Homo sapiens
  misc_feature 294, 465, 490, 497, 525: n = A,T,C or G
cccttagcgtggtcgcggccgaggtacgcgggtgttttttatgaaggggctttctcgtgtggatagctgttcaatttggcattcctgttggggggtggacagtgattgctggagggttttatttggtcgtcttgctccacctcatttcctgacatagaatttttggttggagatacttttcaactggaattttgaatgggctacttcattgattgtttatgttcattgcagctgttaagatatctgatgcctgtttatcttaatttgggtttcaccaaaagctatgcttagtanatgacgagctgagaaaaggacttgggtgcaagtaattcatttgggaattgacctcggaaattaggggcaggtaagacataaggatgagaaaagtcaataaggaaggatattattgaaaaagttactcctgtgggcaactgcactcagtcctgctgggaccctttcagaccnatgaaacacaccttaaaattgttcncatgcangatcaagggaaactgggatgtctgtctnccaattactgcccttttgttgcttgagggt

SEQ ID NO: 4281 - DNA, 387 bp, Homo sapiens
ccctttcgagcggccgcccgggcaggtacgcgggtagtctacacaggtagaatggccttacatcactgttcagacaccttggcctcattgtataggaaaatcttaactctgtttttttgttttcgtttttttaattcttgtcagtcaaagaaatagcttccctggtttaatactgcttttcttcatagactgaaacaaataatacagctttccttttagtccttgttcagccacacaacacaaaccagtatggcctttggcattttactgcaagctttccattcgattattaatgtttccggtgcccatgatcaagcatggagaagacctataattaattgacttttcctttcctttaggtgcagtcgctttcaatctgaaatcaaa

SEQ ID NO: 4282 - DNA, 535 bp, Homo sapiens
ccctttcgagcggccgcccgggcaggtaccaatattagcatgtggcaatgatgattgcagaattcacatatttgctcaacaaaatgatcagtttcagaaagtctttctctctgtggacatgaggattggattagaggaatggaatgggcagcctttggtagagatcttttcctagcaagctgttcacaagattgcctgataagaatatggaagctgtatataaagtcaacatctttagaaactcaggatgacgataacataagactgaaagaaaatacttttaccatagaaaatgaaagtgttaaaatagcatttgctgttactctggagacagtgctagccggtcatgaaaactgggtaaatgcagttcactggcaacctgtgttttacaaagatggtgtcctacagcagccagtgagattattatctgcttccatggataaaaccatgattctctgggctccagatgaagagtcaggagtttggctagaacaggttcgagtaggtgaaagtaggtgggaatactttgggattt

SEQ ID NO: 4283 - DNA, 296 bp, Homo sapiens
cccttagcgtggtcgcggccgaggtacgcgggtgttttttatgaaggggctttctcgtgtggatagctgttcaatttggcattcctgttggggggtggacagtgattgctggagggttttatttggtcgtcttgctccacctcatttcctgacatagaatttttggttggagatacttttcaactggaattttgaatgggctacttcattgattgtttatgttcattgcagctgttaagatatctgatgcctgtttatcttaatttgggtttcaccaaaagctatgcttagtagat

SEQ ID NO: 4284 - DNA, 614 bp, Homo sapiens
  misc_feature 518, 520, 544, 566: n = A,T,C or G
ccctttcgagcggccgcccgggcaggtacgcgggtgaataaggctgtcaaatgatttagtatagattaatgacatcttttttagaaatattaaagtgagtattcctcattatgtcatcatttctgataattagagtgctaatttgaatgttagataatgtttccacatctatacctatttctttctagggcacttctggccctggggcttggggatggcctttaggccacagtagtgtctgtgttaagttcactaaatgtgtatttaatgagaaacattcctatgtaaaaatgtgtgtatgtgaacgtatgcatacatttttattgtgcacctgtacactaggtaataaaactgattcatacagtctaatgatatcaccgctgttagggttttataaaactgcatttaaaaaaagatctatgaccagatattctcctgggtgctcctcaaaggaacactattaagggtcattgaaatgttttcaatcattgccttcccattgatccttctaacatgcngntggacatcacacctaatattcaanagggaatgggccaaggtatgangggaaggaaattaaaaaattaaattaattaaaattgaatggccccaat

SEQ ID NO: 4285 - DNA, 457 bp, Homo sapiens
  misc_feature 26, 27, 28, 30, 35, 43, 50, 51, 54, 59, 60, 66, 76, 84, 85,94, 101, 126, 130, 132, 155, 156, 158, 171, 184, 185, 208,211, 212, 216, 218, 219, 223, 231, 232, 235, 395: n = A,T,C or G
gatatctgcagaattcgcccttagcnnngncccgnccgacgtnctcaaannccngaatnnccaatngcctgctttngatgatgnntacaggaanatgctgnctgagctgaacacatttgcccaatntcangngtgcacagaaaaccgagaatatnnanaattccaaatttntttcttaggagcnngaatataatgcggacctaaaggnggnnagtngnngggnaaggggtnntgngctgtccatcaggattataaggtgttccttgacttactgctcggttggactggtctatcatgggctgcactattcttctccgggcattaataaaccaattgttcacttgaaggatggtgagtccccgtgtcttgtgccaactgctttttctgttcttcanaaagggtaagggtgtgttagatgctggaacagccacgccctcatgatattttggggctactt

SEQ ID NO: 4286 - DNA, 750 bp, Homo sapiens
  misc_feature 606, 650, 653, 685, 699: n = A,T,C or G
cccttcgagcggccgcccgggcaggtacagtggcgcagacagctcactggagcctcgacctcctgggctcaagtgatcctcccgcctcagccttcgagtagctgggaccacacacatgtgccaccatgccggctacgtttttgtagagatggggtcttgccttgttgcccagggtttcatcagctgttgagtgcgtcggggtgagaggcgcctgctgttctcgttgtaagagggaagtagttcctgacagagcccatcttaccctgacacaggcctccttttcttttccttgttttagccattgcacctttgtcatagaagcgttgaagtctttgccatcagatgtggaagagccgagaccgccaggcccgatgcatatggtttctggataccctcatcaaatttcgagctcatagggtaagttaagcggaaaagtaaagtctatgataaacattttattcttaattgtttccaagtatattatttgtctgtaattcttagatgaagttctgatgaaaagaagaaaatggatatgtcttgtccaaagtctttactgtcaactgggaagaattcattcttggtacaaaaatgatgtccgtttttganggaatttaaagtattttaaaattgcttctaggctaaaattattnaantttcttaaataaaataactggtttaaacattnatttggagtttaanaaaaaaaccttaaaggcaaaaaacaaccccgaaaaaaaaaaaaaaaaaaaa

SEQ ID NO: 4287 - DNA, 552 bp, Homo sapiens
  misc_feature 487: n = A,T,C or G
cccttagcgtggtcgcggcccgaggtacctattgtgttccaggaatccttcttggcactgggaatacagaggtgatgggcaggaaaattcccggattttatagagcttaaattcttgtaggagagacagacaataacagtaagtaaatgctagacctttataattaataataaatgttgtttgcagtgaagaaaactgagagagagggttaacatagatcaaatattagagaaaattttattgaggaggggacatttcagttaagacaggaattctaaaagggagcaactaaaaagatgttgggatacacttttatatggctgcatagttctaggcagatggaacagtaattgctaaggatctcacgcagcagatttattagtttttgccacattgttccagctactaggtacactgccatgttatagtaaattatcaataactaaaggtgtcaacattgtatttaagccatctttctatctctcanggcccccagtggagtctcttacatagtagtatgtgctcagactgtaatcaatttcaaatgaaatt

SEQ ID NO: 4288 - DNA, 460 bp, Homo sapiens
  misc_feature 309, 344, 379: n = A,T,C or G
gatatctgcagaattcgcccttagcgtggtcgcggccgaggtaccaaagcaattatgtaagagtgttcaaatagttaaatagtgaatcagattgcatttgaacattaagagtgtggtagctagctaaatagaggaatagctgggtcctttcttgtgaaaagtgagtttttgataatccgtgagtcctagtcgtaggtaatgcaaaatgaggtagcgaggagccttatttagatgagttataaaatccacaaattattttgaatataacacacttggtttcagtgcccaatatttcacttgttcaagaanggaaaaagtatctctatgaatctaagaagcagatngactgacaccaaactcttcaatgtgatccaaaatngacacttaaaatacagaatcttctcaggtcccaacgtagtatacctgcagtgcctgaatatggccctgtagtacctgcccg

SEQ ID NO: 4289 - DNA, 643 bp, Homo sapiens
  misc_feature 93, 400, 450, 465, 476, 496, 514, 535, 539, 542, 552, 576,609, 633: n = A,T,C or G
ccctttcgagcggccgcccgggcaggtacttttttttttttttttttttttggaacttagatccttctaaaagtaaaggaagttttattgcantgacggggtttgagttgggagaaataacattttaaacgtgtattcaaaggcaagatgtagaaggtaaaggaatgaaaacaaatttggaggcctgcctactaggccatcttaaataagaatcgattccagcctagcacccagctagtaacttacggacggtcttttgtccatattttggccagttattcacagcactgttgagggcaataataatcctttcaatccacaagtaattaaaaaacatgtatcttaagcctggtgcaagtggcttacacctgtaaaccctgcactttgggaggcttaggtnggcaaaacacctgaggtcaggagtttgagaccaacctggccaacattgangaaaccccatctttncttaaaatacnaaaaatttgctgggtgtggnggcacctgccctgtaatnccaacttccccggagtcttangganganaaattcttgnaccctgaagcaaaaggctttcatnaaccccaaaaaaccccacttggacttcaacctnggggacaaaagggggaactccctnttaaaaaaaa

SEQ ID NO: 4290 - DNA, 586 bp, Homo sapiens
  misc_feature 186, 338, 385, 434, 515, 549, 553: n = A,T,C or G
cgccagtgtgatgggatatctgcagaattcgccctttcgagcggccgcccgggcaggtaccatctgttaaactgacaatgccactgtaaattaattgtaacctattttcaaagaagatttcagagagcccttttaaaaatattaagacatagttgctaaacaaaagcacttattggattcaagtangctatttaatgacaccaatatttgatctttgtgtccagggtcccatgagcctacgtggcatattgcaaatataataaaaccctccttttctctccccagccattacaacacaagctagcatggagtttcgacggaaaggggcaccaaatgtncacagacaccatggtttccaatcctatgtttgatgcaagtgaatttnctgataactatgaagcaggaagagctgaggcttgtgggacactgtgtanggattttttgtagcaagaagactggagaagagattctgccagcttatttatccaggtcttggaatttttgtttgttttttncatttatatagctttgatagtgaaagccattggntggntgggccgactgaacccgatgagtgatgtttggt

SEQ ID NO: 4291 - DNA, 434 bp, Homo sapiens
  misc_feature 78, 115, 147, 299, 353, 362: n = A,T,C or G
gatatctgcagaattcgccctttcgagcggccgcccgggcaggtactttatttttttttttttttttttgtttccctnaggggttatatgtttctaacaatcaatggcattttanatttgatgaaatagggtataaatataatccanattaataatgcttgtctatggctggtgattgaagttgcctaacacactgagtataaaactttcaactggccatcatgggtccacacagtagaatcccaactacacttaacagtcttctctctcactcgctaccatttttctactcctgctgngagcaataaactattcacaatgccctgaacattgactccatctacttgccttanaagtttctnatggtctgtttctgctaggactcattatcctcacactgctctagattttgctctagagtctttatttatcct

SEQ ID NO: 4292 - DNA, 367 bp, Homo sapiens
  misc_feature 230, 294: n = A,T,C or G
ccctttcgagcggccgcccgggcaggtactgctgtcattatttagcatgtattaagcaccccacagcacatgcggtgcacaaggaaagcatagttccaaccccatgctacaacaaggcaggacacagaaactgggccccctgacattcagtaactacactggcagaaaaaaaaatgtgaaaatgaagaaaagggaaacaagatgagtggggtgggttgaggatacttcancattcagctcctctgagcttttgccaaagacgattaggacagacagctgtgccacctgggctgngccttccctttctcctccatagctgggaagtgatggggacaagtgacaagacttgaccccagaagccttgccc

SEQ ID NO: 4293 - DNA, 764 bp, Homo sapiens
  misc_feature 38, 115, 375, 422, 433, 453, 478, 480, 488, 497, 501, 507,533, 543, 548, 560, 621, 624, 640, 641, 656, 667, 668, 676,682, 688, 694, 706, 707, 709, 719, 737, 744, 747, 753: n = A,T,C or G
ccctttcgagcggccgcccgggcaggtacggagacatntttgtggttttatacacacacacatatatatatttaacataagctgtctaaaataagtcacaaaacttgcagattanaaaaggaagcacattttggctgttttggtgtcagcatcttaattaagtagaaaatattatggacctataaattgaacttgcgactgttcactcactagagagaacaatttccagggagttagaatagtttttcctgaaggagagtcaaataaatttgggaaataagggtgctcttgtaaaacagtaatagatttagcttttattttttaatgataagaacattaaatgtcttctaagtcagaatcagagtatatctttgntaactgagctcaccaagacaaaagtgataataacacataactgtggnttttggtagtntaatcaatttacaatgtttnattgtcatgttagttgattttctgncnttatttgnattttcacntatnctggtnataggagacttttaaaaatctatganttaaaataangtggngtttttcccccntaggggcttttgaagtaccagtggaacttttttgcttaccctcatccaccagaatgggatnaanaatagaatttgactgnngtgctttttccaggnggaggaatttnnaatattcnggaacnaggaanggccantaacttccaccnngnttgaaatccnctgggtttacaaaaaaanacccttngcnctgganaaaaaaaaaaa

SEQ ID NO: 4294 - DNA, 378 bp, Homo sapiens
  misc_feature 150, 155: n = A,T,C or G
cccttagcgtggtcgcggccgaggtacctgattagaagtccgtcttccgtctcatagggaagtgttagagatggataatgtttctgtgtagcagaagtagtcattatgtccccttaaattcggtcaccttttgacctggcaggtaataanctttntttagtggagcagtctgttgatggagtatactttcggagaagctcatggtgggggaaacctggaatttatctaaatatttcatttctttgataaattacattaaaaaattaataagagtatctatttggtgaaatcattttcctccaccgtgaccaaatgagaaatttagtgaaagatttaaaatcattttttctgacttttttccacattagtttggggaag

SEQ ID NO: 4295 - DNA, 521 bp, Homo sapiens
  misc_feature 36, 421, 456, 460, 471, 498, 513: n = A,T,C or G
agaattcgccctttcgagcggccgcccgggcaggtnctcttacattaatgtttgcgttctaattacaaagttagctattagatcctcatcagatggctcccaggatgattgagaaaggaattggtttctgggagttgttatatattcagaagaatgtttgaaaatcggggaaatccaaaaggtattcaatatactttattttaaagtggtaattcccagccttgaatgagtaatgtaaatattatgcaaataatatgcatcacacagaaaccagcactttatctatgcaccttatctcgctccaggcttgcttggattgcccgacactttacttgagtgttttgatgtgtgtagtaagaggaggaaagtagatgttcatttacccttgtgaattttgtgggtaggggtttaaaattctaangcatgtgattgcatgggtgtgggggttggaatatnaaantattaacccantcatggttttatttgggtttttaaccnggaaaaaaaccccanaaaaaaaa

SEQ ID NO: 4296 - DNA, 487 bp, Homo sapiens
  misc_feature 297, 322, 410: n = A,T,C or G
gatatctgcagaattcgcccttagcgtggtcgcggccgaggtacacgataattaaagagtaaagttgtgctcaacgctgtttacttctaattatttcctgattcacaaattaatttttgcaattccaacttcaagaatacttggactattggattcaatccatagtaatctgcaaaagaagagaagcagaattatacctagaagtctactaatgggacagttagtcacccacctacatttgagattcctgacattcagacaactgacttgtaactgacttataactgacttgtaatncactgctactatatcaaaccgacantgaattggaattgaaaaaccaaagagtgctacattaccaccactggtatcctaaaagccagccacctttttttgcaccagtctttaanaaaccaaattaccacaacatctcagagttctttcagctatcctggaagtaaccaagaagcatgcatgtatcccggta

SEQ ID NO: 4297 - DNA, 543 bp, Homo sapiens
  misc_feature 479: n = A,T,C or G
ccctttcgagcggccgcccgggcaggtaccagtcgaggaagagcaaggagaaggagcacatcacgaggaagaagaggatccacacgcggaagccagcgttgtttttaatggcctctcttatgtcttcgttgccttccttgatattttcagttgcccccacaactaactggtgaatgctgtcaatctcagcttcctgttgcaaaaccttttccgtgaatatctcttggggtctggaaatctcaaccactctcccttcgatttgcctcacttcatcaaacaagctgttcatttcaccaattagtcgctgattttcctgttcaaacatttgtatttcttctggggataactcatcttcgcctttgccatctccccacgttcccaattcaggttgtgtttcaaccaaaatttttttctggacgttcttcagtggcagggttttcttcagagtctttttgaaggactctgtgaaactttctcanaagaagggggattctcttggcctttggtatttgggttctggttccaagcttaaaataaatcttt

SEQ ID NO: 4298 - DNA, 455 bp, Homo sapiens
ccctttcgagcggccgccgggcaggtactttcacagcaaccagcttagtgctatcattgacttggtctgttccactttggggatgaagattgtaataagccaagctccttgagcaggatgaagacaatcttcacacaggaaatttttactgagcaggttgtcacagcatggtggctgggcccaggcaatttcctgcaaccagaggtccaagagaccagcacagatgttatcaggcatcttccgacctggggaaggggacctgagtgtttgcacctgttttgttatccatgggaagtatctatcagcacacccatcccagggctgttagaatgaaatgaggaaatgcttgtaaggcactcagcactttcttaacacattatacatccccagtcactgactatttgttatttattaatgaagcatgtggggaggctgtgaccttgtgcttggccttc

SEQ ID NO: 4299 - DNA, 706 bp, Homo sapiens
  misc_feature 319, 339, 381, 389, 393, 394, 439, 454, 460, 470, 477, 483,492, 496, 524, 538, 549, 551, 557, 559, 562, 564, 566, 567,568, 570, 585, 590, 594, 596, 602, 607, 611, 619, 621, 625,634, 644, 657, 667, 688: n = A,T,C or G
cccttagcgtggtcgcggccgaggtacttttttttttttttttttttagacaaagggtatctttagtttcttcagtataaaacagttactcttttttcataaatttttagtgtttggcaagcatatataaatacgtataaagcagacttgctttaaaatgttctgaatctgaaaattttagtatgtttgtattataaaactttgagtataaaatattgaaggatacacacctgagatttttctcataggtatatccttgtaaggtcaggtctatgagatctttttaatgaaagttaatagctaaataacacatgccctnaggcaaagaataattagccngttcttgaattatttctgctgtagttcaaagctttttttttngattactngttnnaataaatccactatttttgcaaattataacaatcttgggaaaaanccaaacaccagtgantaccanttggcctttnaattggngaaatnatattttcnttancttaagcaaaatagttcctttgttaaangggtaaatggggantaaatttattnanggcctnanaangntnnntngccggcctaaaattnaaaanaatntnttgggnttggnaagntccacttncntaanattatttcnttaaaaaaanaaaaaggaaattnttcttttggntcccccgaagatcccatgaanttttaaacctttttttta

SEQ ID NO: 4300 - DNA, 214 bp, Homo sapiens
  misc_feature 37, 69, 198: n = A,T,C or G
gatatctgcagaattcgcccttagcgtggtcgcggcncgaggtacacaagtcacgattatacagtttantgagtaaacactgatcacacccatataaaccactgcccaggccaataagtaaaatattacaagcaacccaaaaaaaactctaggcctctacctttagaatgcgtttgcagtatttaagactattgtagntccaaaattactaaaa

SEQ ID NO: 4301 - DNA, 675 bp, Homo sapiens
  misc_feature 211, 275, 284, 297, 350, 352, 375, 390, 429, 450, 451, 479,481, 509, 515, 528, 564, 580, 583, 622, 627, 630, 642, 653,661: n = A,T,C or G
cccttagcgtggtcgcggccgaggtactctcaggaagctgttcgtgaaggatctccagcaaactggaaaagaaaagagaagttgcctcaggttacgaggtcttggcacaattatatgtgtaatgtaagtaaccctcattctctttacaaaaatgttacaggctttttgcatgactattaaaaaagttatatataggctgtaaatccttgantaaaatatgggcactttatattttcaagctctttattttttttattactaaatacattttgaanattaaatanaacatgatctcanggtcacactctatattttttaatgatattttactaaccaaaaaaacttttctngngaaaagcatgcttttcatacttngcccaaacaaatctntacaaaattactacatactcactttggattactatggtnagacctggaaaaggaattttnnttttatactattcttaaaccattttttngncttaaaaaaaatggtttttaaggttttntaaaanccctactaatatntctcaattatttttctattccccaacatcaattcancaatattcaaaaaaanttntttttttttcaaaacaaaggaaccccttaaaaaattctnttttnctnaaaacccatctnttaaacatttngcttactnattggggaaaaaag

SEQ ID NO: 4302 - DNA, 368 bp, Homo sapiens
  misc_feature 158, 186, 207, 358: n = A,T,C or G
ccctttcgagcggccgcccgggcaggtaccaagcattaactgttcttcattttcctgccttttatgggcatcagttttgattgattccttggctttcggaaaaaaaaaggaaaaaaaaaaactttttaaagcttacataaaattaaattcatcttttnggtgtatagttctgagtttttacaaatncatataatcatgtaaccattnccaaaatatacaatttaattactcccaaaacctcccacatgaccctttaaagttcaactcccaagcagccacaaatctcttttctgttccccaaagttttgccttttcaagaatgtcacataaatggaatccaaaatacatagctgcttgnttgggctctt

SEQ ID NO: 4303 - DNA, 504 bp, Homo sapiens
  misc_feature 420, 459, 463, 480, 486, 495: n = A,T,C or G
cccttagcgtggtcgcggccgaggtacgtgaagagctcaagttcacataacgaggttttcctgccgggatcacgtggccctcggcgaaggaaatccaaacaacattttgtggaaaaaaacaagctcactttgggattacccaccccgaaaacggactcttatcttcaacttcacaataaaaaaagaggggaatctcatccagaactggtcattttgagagtaaattctctcccacgtgatggattcaaaaccttttggagccagtaaacttagttccatttcacaggtgcacataaagaccttcctgcccacctcctatggacatgtccagggatacaggacaagagtggggttagaatgggtagagtccaccactcttactggaaagagcttgagatttatcacctgctaatgtgaggncattttcaaatccaaaggagagggttttatgttaaatgntggntgcccttagacctattncaaatnccaactggnatttttttt

SEQ ID NO: 4304 - DNA, 309 bp, Homo sapiens
  misc_feature 276, 290: n = A,T,C or G
cgaggtacagttacctccagtctctgtgtatctggaaatgcacttacatgctattcaagttccttagagtgtaaggaaaacaaaagctgtagagttctgcatccatggggactgagacagagcaaagcacttcctagtatgttcaactggaacatggcccacactgatccatggtcacagtttggaatgtgctgagaagcttccatctacaatcaagtttctcagtaagaagtccccgcagagggagggagtccactgtgtacctgcccgggcggncgctcgaaagggcnaattccagcacactggcgg

SEQ ID NO: 4305 - DNA, 537 bp, Homo sapiens
cccttagcgtggtcgcggccgaggtactaatgacttaggaacttccttctccatcaatctgtcttccatgttcaagttttatgaatttccattcctgtattcttgaatggaaacatttctgtcttagaaattccactcttccggtgtttacaacaccattttgaatggtgtttctccatctttttcaaatatactccagtattactgagctctatttattatacgtataggatcatgaattataaatgagtatgtgttaaatgaatgagaaggaagtggcttaatggtctataggagaaccgtaagttttcttttgaggtaaccgggtaaatcatgcagttaaatgacaatgctgtgtgaatgcactgctagctaactggccttcatcaactcatgagggtatttctcttcctggcatctcttaaaagatgtcaactagcagcagagcagaggaagaatagagtggttaagagaatggcctccggtgctagactgaatttgacttccagctctagagtttactagtggtggcacttt

SEQ ID NO: 4306 - DNA, 446 bp, Homo sapiens
  misc_feature 324: n = A,T,C or G
cccttagcgtggtcgcggccgaggtacttatcttaatatcgttaagagatggcagccaagggtaaaactgagtcttcttgggctgactatgatgaaaatgccaagtgtaatctgagcacagccctgaacttgggctggtagcccttctgtccactttatctactgggaactcttgggacaccctgcagaaggagctcgggctggaagcagaaacaacccatctgagctaagagaaagaatttaacctttttaaaggcagcctgttatgcctgacagaataaacttacctttcctcactaaaactgtctatccttcacattccangaatcccttctaaaaaacatattccatgccctttttcaagagaatccagccaatcatttcagctcagacatctctcccatgtaaatgctggaagctatcctccaagcctttcctttttctat

SEQ ID NO: 4307 - DNA, 321 bp, Homo sapiens
ccctttcgagcggccgcccgggcaggtacgcgggtcctgtctttgaaagtatcttaactggttcttttccccttatgtcacacccaagcagaagaggtcagtagcactggctccctggtagatataatgggtttaaggtcagtctaggaatattcattcaaggaggataagataaagcggaaattagagaatgtaaacacaagatgctgtaaagaaacatattggccactaatatagctactacatttatcatgctttcaaattattagaaaaattgacttgctttcttgctaggctcattgagaaaatgttgaaatgata

SEQ ID NO: 4308 - DNA, 539 bp, Homo sapiens
  misc_feature 477: n = A,T,C or G
ccctttcgagcggccgcccgggcaggtacgcgggaactaagattccacgaacaactgaactagcaaagacaactcaggcgccacacagattttatactactgtgaggcccagaacatctgacaagccacacatcagacctgttctgaataggacaactacaagacctactaggcccaaacccagtgggatgcccagtgggaatggagtgggaacaggggtcaagcaagcacccaggccatcaggtgctgatagaaatgtatcaagtggactctacccaccccactaaaaagccagggactcgccgccacccttgccacccagacctacacacccacgaagaaaacctttaccaccaaataatgtcactggaaagccaggaagtgcaggaatcatttcatcaggcccaataactacaccacccctgaggtcaacacccaggcctactggaactcccttggagagaatagagacagatntaaaacaaccaacagttcctgcctctggagaagaactggaaaatataactgactttagctca

SEQ ID NO: 4309 - DNA, 575 bp, Homo sapiens
ccctttcgagcggccgcccgggcaggtacagatgaggaaactgaggcacagaaagagattatgtaacatgtccagagttacacagctagtgagtgcagcactaggatttgaacctgggtagtctagctccaaaacctatgcttttaaccactcttctgcattgccaaagcagaaagaatttaaaggaataagacatatttacattgtcctcagaatatcttttttgactgtcacagcattggaactgtaatatattctctccattcatttctgtgttcattattttgtaagaattatagtggctccatatgtaagttagagtgctaggccttgttcggcagacaaaaagaatcaacagtcaggagcccggccaaaagagtgcagagtctttaagagggaaagtgagagctattcagaaatgcaaagtagaagtcagtatgagttaacaaaagtaaactagatagaagttcactagtagaaaaagtattcatgagtcaagaaggcttactagaagtgtggaattataattggattttaaataatgttatatttaaatatgtgaatggtatatttaa

SEQ ID NO: 4310 - DNA, 273 bp, Homo sapiens
  misc_feature 125, 160, 170: n = A,T,C or G
ccctttcgagcggccgcccgggcaggtacttttttttttttttttttagaatataagatttgaccatatattagtcatgttaacttgtttttctttaatgaagcgcattacagtaagagtcaatntatgcttacacatagttacagctctgacaaattanatatctaatnggggtcatatctctgaaaagcattttaaaaccaggggcaaatagcctgtgtatcaacatggcaagcaccctttgtcccaagataggtaagtcagttggtaaat

SEQ ID NO: 4311 - DNA, 690 bp, Homo sapiens
  misc_feature 363, 504, 534, 550, 584, 585, 620, 653, 654, 660, 668, 677: n = A,T,C or G
cccttagcgtggtcgcggccgaggtacctatttaattgtcctccatctgagtggactgaaggagactcacatactaggctactggcaatttggccagcacaacaggtgcaccaggttcctcctaaggtggaaaaatttgggtcaaaattaatgataaatgaaaaaaaaagagataatacctgaatgcaaagtgtggaatatatggacactgttgaagggaatatccagcactatatcaagtgccttgagagttcctcagagcaagagaataatgttttctctcagcttaaattccagatgttcagagggggaccgtaatacttttgctaacgtttgcaccaattctgaaatcttactaagtanaaaggcaaccagcatccctaagtgccatctcttcaggggacacatttcttccatgttgggctaaagaaaaagggaacaattcctgatgaagtaagcaggactcttttttttttctttccaatgccaaacattttaataggnagtccaaatataccgttattaagaaatatngttaaatatcacgtantaaaaattgggtttaccacattagaatgattctnntgaaaataaaaaccccaaattcaccccattggccnataccccctgcaggtccaaaatacccccccccnnttcccnccaaattncaaaccccntttttaaaaaaaa

SEQ ID NO: 4312 - DNA, 516 bp, Homo sapiens
  misc_feature 437: n = A,T,C or G
ccctttcgagcggcgcccgggcaggtacgtgtatttttattctatgggattgaaagattttttagggccaggaattatgtcttacctgattccatatctcatttctatcattgattttcattttgctcaagtaaccaactcaaattggcttgaaaataactaaaacaactaaggattttgacattagtgggttctttgcaacctggtatgggacctgtaaatgtttgagaaatgaaagtaatgccttattttccaagaagtttgcattatgctcacaggttaattttatatcttctttcttaggaaaactacatctcagacccaactatcttatggagggcttatccccataacctgatgaccgtaagtcatttttagcagccctttctttgttaaggaccatggtcatgtcactattaatcagaattcattcttgntattctctttaggaccttaggcaaatgcataaaatagatgaaaatatgtctttgacagtcccactgccgtaaagaaaaa

SEQ ID NO: 4313 - DNA, 646 bp, Homo sapiens
  misc_feature 42, 43, 80, 98, 99, 510, 515, 599, 624: n = A,T,C or G
cccttagcgtggtcgcggccgaggtacttggtggaacctgtnnctatacaagagaaggttttgacctgtaagccaaacanttcttttttgttaatcgnnatggagtataattgtttcatttgaaactgtcagtttcttcaagtcacttctctgaaaaaaattgtgatagattgatagcctgccagaaaatagtaatttctaaggtgctgccatccacacttacttattgtgaaatatgaaaatccagagtggtttgtatgagagggggaatactggctctaagctttctacagaaaacaggaaattcatgctgttgttgacataattttaaaggaaacttttaacaagaaaattcatgagggatacaatcaaacatagttaatctcttgagtgctaatcatttgagtatagtccacatcaggaagttttatgaggttgaaaactttactttgaaatatttaattgggagactagaccatttctttttccaaagtcattctgatttattgncctantaaatgtatgtgtatgcatatatactgatggattgactgaatggtgtgtgtgtgtgtgtgccccgtgtaaatctgttttcatanggaacatacattggatggctcccantctattttatactaaaacctaa

SEQ ID NO: 4314 - DNA, 463 bp, Homo sapiens
  misc_feature 44, 60, 63, 64, 67, 80, 94, 115, 144, 150, 161, 171, 175,183, 245, 271, 301, 309, 314, 369, 407, 437: n = A,T,C or G
cggcccgccagtgtgatgggatatctgcagaattcgccctttcnagcggccgcccgggcnggnncanatgctggcatgtnctgcctggggccanctgagtgtaccctgtcacggncttgcttactcttcctctgaggttacagntcctantgagccatggngaagagggtntttnacactganccctcactgtttatggcaactgcctcgaacagtcattgatttcaagcttgcctacaggcacnaatgtatcccagaaagccaaggattntgttaatgtttacaggcctttgtagatccncacagganagctnaaatagtaatcctgaaaatgacagtaggggtgaccccttacccactctggggctnaaacctatggctcaggaggcttttggtggctgccacanaattaagaataaaatgggaaaggtcaagtntaaaagtcaagaatatatttcactga

SEQ ID NO: 4315 - DNA, 463 bp, Homo sapiens
ccctttcgagcggccgcccgggcaggtacctagacatgcgcagacaaataaagatgaaaaacaaacacatcttctttaccaaagagtcagaaaaaccatttttaagaaaagcaaaattctgagtaaggtagaaaaattcctcacatgggttaataaaccaatggatgaagaagcatcacaggaatcatcttctcatgacaatgtgcacgacgcttccacaagtagtgattcagaggaacaagacatgtctgttaaaaaaggtgatgacctactggagactaataatccagaacctgaaaagtgtcagagcgtatcttcagctggtgaacttgaaacagaaaactatgaaagagacagcttgctagcaactgttccagatgagcagggattgtgttactcaagaagtgccagactcccgccaggcagaaactgaagctgaagtgaaaaaaaaaaaaaaaaaaaa

SEQ ID NO: 4316 - DNA, 639 bp, Homo sapiens
  misc_feature 523: n = A,T,C or G
cgccagtgtgatgggatatctgcagaattcgcccttagcgtggtcgcggcccgaggtacttttttttttttttttttttggctatatacccagaagtgaaagtgttggatcatatgatatgttactttttcaaataagaacaagtataaaacagcaaagtagaaatgagaataaatattattaaaattacgttgtctcctgcttcttacacctaacttgcacacactagattttcagtggctggataaaaggtggtttagctgaagacagcaaaatctcattcccgccattactgaagagctcttcactatgtcttttacgtcatacacacttgaaccatggaaactatcaaaacaataaaattttaaaaacaaaatgaagtaatttttttcctttttactattttcctacttacttaaataggaataaggcaacaaaagcatataaagtataaagatcagaaaggaagaaataaaaccggagcatttacagataatttaactatttacatagaaatccccanagaatctaaaaataaagaagaataaatttagcagagtcacaagatgcaaggttcatatgcaaaaatcaactgtattcttatagactagccagggataatcaaaaataaaatttttt

SEQ ID NO: 4317 - DNA, 295 bp, Homo sapiens
ccctttcgagcggccgcccgggcaggtacattgaacaactctcagcagaataaggagaaggtgtatatcatagcacatgttccagtggggtatctgccatcttcacagaacatcacagcaatgagagaatactataatgagaaattgatagatatttttcaaaaatacagtgatgtcattgcaggacaattttatggacacactcacagagacagcattatggttctttcagataaaaaaggaagtccagtaaattctttgtttgtggctcctgctgttacaccagtgaagagtg

SEQ ID NO: 4318 - DNA, 395 bp, Homo sapiens
  misc_feature 53, 123, 175, 183, 194, 239, 290: n = A,T,C or G
cccttagcgtggtcgcggccgaggtactttttttttttttttttttttttttnccaggaaccatgtttaacatagggttcataagccagtaaattcacgcaggcctttgcacttgctatgcanacctagggtaaacgttcaggcctgcaattagctcaccatagtggaactgatntgtattanacctccttagnggggaaatcacaattgaaatttgtatatattgacacactgacaanagtctggcgcctgaggaaagagattcatggatggcatgtgctgattacaanaagaaaaataatgacctctgacttgctgttcgtctccaaatattctacataataaatgattagcagccttagaaataatctcagccttttctttaaaatgtctaa

SEQ ID NO: 4319 - DNA, 505 bp, Homo sapiens
  misc_feature 7, 17, 18, 28, 33, 38, 52, 84, 92, 98, 123, 131, 134, 142,149, 161, 173, 186, 192, 199, 207, 219, 232, 244, 259, 314,341, 370, 373, 379, 399, 493, 505: n = A,T,C or G
cccttancagcggccgnnccgacgggcncaganctccnatgggtgaaaccantgacatagagactgtccctgtccagtgagtangggcccanctcagngatgctgagggtcagctggctcaantccaaatncanctgctctntgtccancccacggcctgnggggtcatggcngcgggtgcagatngcactncactccngaggcttncccatctttatntggcctgagcaangtcaagcctgcnaccaggaatacaganggccaacactggtgctcttgaacaaaggcttgagcacaccctgcagaacactctncgtgatgttgaacttcctggagccagngtgacccatgttctcctcatactgtaagntantgatgntgaagtttattgtgaatggnatcacgagagggccggtggcttgtagtttcagggagggaaggtgggatcccagaggttcccaggttcaactatggaggtcccaggagtgctggnggttggtatggn

SEQ ID NO: 4320 - DNA, 298 bp, Homo sapiens
cccttagcgtggtcgcggccgaggtactgatactgtagaactccagtcaaacttcagtgcactgctttcttacaggaagacaactcagaacacacagccataatctgctttggtgtcagtcacatcacagtggttatacatttgtcctgaatggtgattcattcctttccatctaacttccttgtgacaaatagcatttactattgaaatagtcttaaaatagggaaaagagtgaaagttactcttatgcatgggagtgggcttaaagggttgacttccaccagctgagtacctgccc

SEQ ID NO: 4321 - DNA, 606 bp, Homo sapiens
cccttagcgtggtcgcggccgaggtactgaacatggttgtctcttaaagatgtgaagattttctttttgtcgattctgctttgcttttgttctcttcctttagagagtgctgaactttgttttggcaagtaggaacttgtgcatcaccttgacataaattaactgagtagctcacgggtgggtggatttttataggggacatatttgaaaacaaaggttgcagctgcttttcatagctacaaagaatttatcatctcattgaaaaaaattctacttctacactaatttatctattctgtaatttattcattaattcattcattacctactaaatacctttttttttgttcaaggaactatgctggacacacgatgatatatcttattttccttctcatcctaccaaacctggagatggaacgcttaaagcttctagctgacaacacaatccttttattaggaacttaactttgctccctaactctttgatacactgaaactggaaggagttcctttgtttattaccagggtttattattatgggagtctgggtatgactctggacttttaattaccacctgtcctgtgtctcaaaaaaaattaacc

SEQ ID NO: 4322 - DNA, 396 bp, Homo sapiens
  misc_feature 55, 134, 137, 195, 275, 300, 339, 359: n = A,T,C or G
cccttagcgtggtcgcggccgaggtactttttttttttttttttttttttttctngttagattctaccatattggtcttgaacattaagacccagtaacgaaggacacagaacatccagtctttccacaacctntanagagttaagggttaagcatgtgtgatgccctcgaagcagttttcctgaacctgctganagtgaaatgtgaggaggaagcaccctgtccctttggtattaaaactctgtaggggaagggagaaggtggaaactgctaanagaatttgggggactgcctaagcanaagtgattcttgtctcaaatcctaatgtccagctcaaanaaagggcacatttctagganaagcagggtcttgaagtgagggaggcgatggtgaatg

SEQ ID NO: 4323 - DNA, 511 bp, Homo sapiens
  misc_feature 471, 477, 491: n = A,T,C or G
cccttagcgtgtcgcggccgaggtactgcatgcctccttgcagagtgttgtgcacaaggaagaaagcctggggcccaagagacagaaagttggattcctgggatgatttgcacatcaactgctcaactgtggattgttttttacttttccttttaaaccggttcgtatatatttttcttcgctgttacgaatttacagcagcatttgtaccttctcagaaaagaatgtttgcaatgttggccctctgtccagccacagtagtagtgggtctaaggttgtaattcagcctgatgactcctgttgttaggagtttcacaagtgtgtggtttttcttatagtaggtatttagaaatttgctgtggtaaccaggccctgagccctcaaccaaagggtaactttgttttattaaccttagggcctatcttaactgtaaaagggcatctacttttggtgtcccaagatcacattttnctgccncaaagcatttgtangggggacttaaaaaaaaaaa

SEQ ID NO: 4324 - DNA, 569 bp, Homo sapiens
  misc_feature 474, 531, 550, 552, 556, 559: n = A,T,C or G
ccctttcgagcggcccgcccgggcaggtaccacttaatgggcaagtttatgaacttttaactgtcttcatggactggatttcggatcatcatcttagcaaagtgaaacatgaagaacctggaatggatggtaaaaaaccacaactcaaatttgcttcccagagaaatgatattcaggagaagtgtgtaaagcttttgcctctaatgacagagcagctacagtggatgccatttgtgaatatcaaacttcacgagccttttgtaaaatttatatattggtccctaaggcagctagatgctggagcacagcactcgactatgacatcaacattgaggagattgggtgaagacatttttaaaggagtggtaactaaaggaattcaggataattctccacagcattctgtggagaataaaccaaagacagctgctttctttaagagctccaatttgccattgagatttttatcaaccntaattgttctcaaacagtcactcaaagctgattacctggctcaagcatttgattctntttggttggacttgaaggncngaanaanggaaaaaccc

SEQ ID NO: 4325 - DNA, 482 bp, Homo sapiens
  misc_feature 115, 123, 130, 132, 139, 142, 145, 150, 151, 152, 158, 162,169, 173, 179, 188, 198, 201, 208, 212, 217, 238, 248, 254,265, 273, 276, 283, 284, 285, 286, 288, 290, 309, 311, 319,322, 327, 331, 343, 370, 379, 385, 387, 395, 405, 408: n = A,T,C or G
  misc_feature 436, 456, 460, 465: n = A,T,C or G
cccttagcgtggtcgcggccgaggtacgcggggagaagcttggaccgcatcctatctcgccgactcacacaaggcaggtgggtgaggaaatccaagagtttgccataggagaaanattccagntgtaaancnaattctntgnctncattnnnggggcncttntttattnaacnattttnttggacccnattagaatanccnaacaagntttnaatanactctttgggtaggcctcaanaaataaagtnggatcnaaccataatangtgtaacnttncttttcnnnnancnccccaaaaaaactattggncncctacccnaanataanctcnccctttctttantctaaagataagtggtttttttgtgtngtggattgntaaccncnaaaaaccntttctaattntcnttggtggtaaccctttctaaggaaaccnatttaaatttgtaaataagnaaanaaagngcccttcctttaaattt

SEQ ID NO: 4326 - DNA, 323 bp, Homo sapiens
  misc_feature 128, 129, 132, 137, 141, 143, 145, 174, 187, 191, 219, 253,291: n = A,T,C or G
cccttagcgtggtcgcggccgaggtaccattcatttaaaggcataaatgtccaatggggccatcttgtgatacatgcactgtcacaggaaaagtttccaggaaaagtcaagccagggcttcacagaannatnaaatnaaangnanaaccgagggaggaagcttaattgtattanttcaaggattctntaanggacatgaactaattagaatattatatncacacacaaacacacacacacacacatatatatncataaatttaaagggagtttattaaggagtattaactnacacaatcacaaggtcccacaacaggcccggg

SEQ ID NO: 4327 - DNA, 331 bp, Homo sapiens
  misc_feature 52, 61, 64, 101, 108, 143, 203, 236, 242, 266, 306, 313,318, 323: n = A,T,C or G
cccttagcgtggtcgcggccgaggtacttttttttttttttttttttttggngctaagtantanccattttaagccaaaataaagtccaaatttcttgtanactgatntgcatacctgatcattatatcattttttttcccanagttttcttaaaactcaaatattgaatacctaatctttctaagctaaaaggttggaattntggggaacccgtttataaaaatgaaaaggggtnttaatnacatcaacatgctggccataaggnaaaaaacattcacaattttccccctcataatttatgaacnttttatncacanggatngaaaacct

SEQ ID NO: 4328 - DNA, 415 bp, Homo sapiens
  misc_feature 69, 77, 78: n = A,T,C or G
ccctttcgagcggccgcccgggcaggtacatgcagcaggcccagaggccaccagagggcagagggcttntgtaacanntcaagcctctggctgacccagggactggctgcttcacacttgcccccatggctccgaagtggtaggagacaggttccctcacaccggaggcagattccagctccagctatgcccgcacacctgggtctgagccacagtctccacctctctcctccaacctctgcatcattaatactgctctggggtctgagaaaatacctgctttttcaggcagaggtcacacacagccacatgacacacacgccaaaccctgacagtgttgcccacgcaaccacttcaaatcccgtggcacatacaccacagttcacttgactctgatatgacagcataatacaca

SEQ ID NO: 4329 - DNA, 576 bp, Homo sapiens
  misc_feature 369, 390: n = A,T,C or G
ccctttcgagcggcccgcccgggcaggtacaatataaaataatacatatgaagccacaatattcaattacagttcaaactagaaattactaactacatgtagctgcttcatttttcgttttgcattttggcccctaattcattatttacaactgatacctgctgagaaaaagatccaaacttttaaactttgtatgttttgtggagggtgcacaatttcttctaatatatcttcaggtgttttaaaatttaatttgtttttaatcataagatatcatcatggccaagagactgggaaaataacaattttattctttctcctaaagattgtgattttattattccaagatcttatgcttgaattacttancaagaaggcatgattatgcanaatacagggaaatgaagaagaaaagagcgggaatatacgaaaatgaagcttccttaacagagttcatggtggagatggtagacactggtggagtttttatccaagacttaaaacttaggaaacgcctatgatgcccactttaactggaagtaatggagacatctggattccaaattcacattttaa

SEQ ID NO: 4330 - DNA, 493 bp, Homo sapiens
  misc_feature 389, 427, 481: n = A,T,C or G
ccctttcgagcggccgcccgggcaggtacaattttccttgtagttcttttccttcagagatgagtagggaaatggagatcagcacataccatttgtaattatacatgttataaaacattatttccaaagccatatgttacaataacttatgtcagatttcttacatttctattcacttttgatgagcccatctttatccaaatccttatattttctaaagagaataaataagtggttactgaaaattaatatcacaataagtctttaataacattttattaataagtgcttaattacatttcagagtattcttaggttattggcaagtatccctcttcttgcatatatgtcttcaaaataatttcaaaccattattcatatatatctgntttatgcttttgggggctttctccctaattttatctgngcctatttattgaactacttattatacagattgagcatccctaattagaaaatncaaaatgctcca

SEQ ID NO: 4331 - DNA, 353 bp, Homo sapiens
  misc_feature 345: n = A,T,C or G
gatatctgcagaattcgccctttcgagcggccgcccgggcaggtacttagtatacttaaaaaaatagtagtttcattacttcctttagacttttccaacctttcctctttctaaatgtgtccaatatagttacagtattttttttaagttttaatatgtaaaaatttcaaacacacagagagaaataatagcgcaatgaactaccatataccaactacctagattgaagttattattatctcatatttacttaattgctttcttttcttctgtgtccttattttttctctctctccctttctgtttctccccttttctcctttttctctctttatattttggtgntggtggtg

SEQ ID NO: 4332 - DNA, 658 bp, Homo sapiens
  misc_feature 476, 537, 549, 599, 632, 647: n = A,T,C or G
ccctttcgagcggccgcccgggcaggtactgtctgaacatcaacacatacccaatgaagaaaacttgtaatgttttcatcaacataaaatgggtgacatttgtatgtgaggctgcatcctattaagagttcagagactccagatccatagcaatgaagtcgcctctagggacaggttcttccattaagtggtaagaaaaaagtagcttttgttgcttttaaaaggttatttaacacttggatatttctagcaccgtcaattctgaggaactctacatatttcaaagcaagtggcttttgatcctatgaataggttcacttctaattcagcatccttcagaagagcccattactggctctagaaagctgtcaatgtccagagcaacacattattactctgtaaactcagtgatttaggtggagaaataatatccacattttaagtaacaaaaaccccgaggcagcttaaatgacttnttcaagcgacctggtgactctaggacatttatcttcactgctggtgcttaaaatccatcanaaaatagctctngacagtggaataaacatccccaccatggaatgagcccaggagacctgcanagcccccttttaattttaagaaccccatgtgtnccccacccccccccncttccttcccc

SEQ ID NO: 4333 - DNA, 591 bp, Homo sapiens
  misc_feature 130, 135, 158, 257, 272, 282, 286, 301, 331, 337, 347, 389,396, 401, 419, 422, 426, 447, 449, 458, 461, 463, 473, 498,516, 520, 541, 585: n = A,T,C or G
cccttcgagcggccgcccgggcaggtacaatcccctcggaatggtaggcagctgccatttagaactctgtgatgaataaagaaaaatctatatggaaacagaaatactatagaaatattatacctcttcnaggcnaaaaaaaaaaaaggtggggggtngaatttggatgggccaaaaatggccaccccgtattaaaatttttgggggggttccaagggggaaggaaaaccaccttttggtttcttggaaaattttanccaaccaagggaaanaaaattggtntttnttccaattaaaaccnccttttccaaaacctttttttttttaaaanttccanccaagggaanaaacccaattgggccaaccttaaatttaattgggccaaaaanaaaaccnaaaanggttggtttggaacccanggnaaanttccaatttgggggggaattnanaaaaaaagnttnantttttttaanccttttgggaaaaaaaagggggttnccttaaaaaaaaatttantttncaatttccaaaaaaagggttnccttaacccccaatttcctttaacctccccaaaattaaattttnttttaa

SEQ ID NO: 4334 - DNA, 744 bp, Homo sapiens
  misc_feature 294, 413, 425, 489, 517, 519, 529, 594, 613, 621, 622, 637,638, 662, 663, 675, 677, 680, 689, 714: n = A,T,C or G
ccctttcgacggccgcccgggcaggtacttagtgctaacagaagcagtgaaaaaccccggtgggcaagcaggaagagtgaagctgagcagcctaagaggatctttcatgggcaatgatgtgtcaaatttaggatcaaatacctataaacataagtaaaatgtttacttcttaagttttattaaaaattacaacttggctgggtgcggtagctcacgattttttttttttttttagctcatcagctattgttagtgttagtgtattttatgtgtggtccaagacaattcttcttncattggggaccagggaagccaaaagattggacacccctgtctagggcaaggattccaaaagtatgttctgtataaaacttgcatagagattccaggaacacttgttcaaatgcaaattnctggtccagatntcaaagatcaagctctgcacgtttgggacatttttaacaagcaaccctcatgatttttatgatncttaagtttgacaatttctagggccttngncttcaaaatngcacatgcataccctttgagaaccacaccaacattttcccatggggggtaagggatacatgcctnagctttattggaaacccanttaaaganngcccatttccttatnngttggcctaaaaaatgtgccttgnntgaggccccttnanaantacccattnctttttaccctcctttaaaaaacangcttactccttattcttccaaaaaaaaaaa

SEQ ID NO: 4335 - DNA, 312 bp, Homo sapiens
ccctttcgagcggccgccggcaggtacaaaaaaaacctaaaaattgtttcaggaatgtagagaaatatccaacttaaatagcgaaaaagtgcaccatacccgcgtacgcgggaatgaaacagatttatatacagagaagtgttatttataatcacaaaaagaaaatagaaaatatgccaagtgttatgggagtgtttaattataatttgtagagacaatgaaatatttgactaccaattaaaatgatatttaaggatttttatgatatgggaaatatttgtgacatatgctaagccaaatgcaggatacaaa

SEQ ID NO: 4336 - DNA, 537 bp, Homo sapiens
cccttagcgtggtcgcggcccgaggtacttttgcaaaaagtcgactgtgactgtgtagcattatgttctgtagaatttttttcaagtagcataatttatttattggtgtgaaaacagccaaaggttccgatatcctcacaaatcatttatgccaaacatctgagggcaaaatttagccggtgttatttactagattcttccctttgaactcacagactcaagagacagaccaagagttcttatatactcaccacagcggaccaatccaagtggcatttttaggaaaggttgcagcatttaatgccatgtggtaccgtctgttcgtcaagtgggtggcaagggaatatccaagctggcattttggatatgatgggccttttactttcctgagtgacatgccacatgtcaagaaatactgctcccccccccccactcccatcacatttacgtgaacaattttcatttagttatttcccgttccatatggtgttaaaacagtcgtattaaataaagattatttctagttttcaagtggta

SEQ ID NO: 4337 - DNA, 305 bp, Homo sapiens
  misc_feature 33, 47, 52, 165, 224, 240, 272, 278: n = A,T,C or G
cccttagcgtggtcgcggccgaggtactgggtntaaaattctaagtntctangattaaaagtccaaaaataatcattcaatttttaaaaagtaattttatgaccttcataagggagagacctctaacctcccgcagttgagcaaatacactctgagagacattanggactgtggcaaaaagcaggcaatccatgtgtgtcacttaagccttgagcacagttcantaggcaacaaaccagnaactgtcctggcagataaaacagactgtgcanggcatngtcatcgggatgggaagggcattatta

SEQ ID NO: 4338 - DNA, 734 bp, Homo sapiens
  misc_feature 545, 588, 599, 629, 650, 653, 662, 679, 683, 692, 702, 707,714, 720, 724, 730: n = A,T,C or G
cccttagcgtggtcgcggcccgaggtacttttttttttttttttttttttttggcagattccttgtcatgaaatagttttgtattttaattagattcatggcatttttattacttatgaaagtaagttgtggttcatgtgttcagcactattctgttttgtttttcagcgttccaacattccagagccttcctgaagagatcctcagcaagcttgctgatgtccttgaagaggtaattgtttttagcctttgaactttttgagatgggatccagcctgcttggctggcttctttcacagctgtgtgatgaggaatcacaaactgcagagatctttaaaaaatttctaagctctgggatgagctatatatttggcttcgtatagaaagcagcttatcatgtctgacatttatatgcagaaaggtgcaaatcaacctaattatagagggagacaaactttttgttgtgataaatccatgttactttgacttactagaataggaactggcatatttctcttatttaactagtgtaaaagtaaaattgnagttatcaccactctgaaacttcagattacaatttacaactanggattagtagntggggcacatatttttattccctataagtntgtttggaacacataattttntgnctgaaaagnggaaagcccccttttanttgnttttttttnaacccccaanctttngttttgngaaaanaggngaaacncccc

SEQ ID NO: 4339 - DNA, 609 bp, Homo sapiens
  misc_feature 428, 430, 460, 472, 484, 510, 551, 559, 569, 573, 588: n = A,T,C or G
ccctttcgagcggccgcccgggcaggtactaatgggaggaaataaggtaaaaaaaaaagatatgacatacagaaaagaaataaataataaaaaaagtaaagtaagtctttctatattagtaattactttcatgataaatgggttaaattccccaatcaaaagtcatacatttgcagaatgaattaaaaaatggattaaattatacgcagtttgctagaggataattttgatctaaaagatgagtgggttgaaaaaaataaataatgatataacatgcaaatagtaaacaaaagagagcaggggcggctatacttattttagacaaaataaactctaaatcaaaaactggtataagaaccaaagaaaaatattatactttgataaaagagtcaaatcccaaaaaggtattaaaattattaacatatatncnccaaaactcagagcttggaaatgtatgaanggaacattggcnttatgaaacatngaaattcacagctcccagtaagtcanaaacttcattatctcatttgccatagtggattaaaccaccngacttacntttattaggnaatngaggactccgccganataattgagtttttaaaccat

SEQ ID NO: 4340 - DNA, 738 bp, Homo sapiens
  misc_feature 133, 647, 698, 721: n = A,T,C or G
ccctttcgagcggccgcccgggcaggtacacaccaccacgtccagctaatttttgtatttttagtagagatggggtttcagcatgttggccaggctggtctcaactcctgatctcaggtgatccgcccacctnagcctcccaaagtgctgggattacaggcatgagccaccgtgcccagcctcagaatggtttcttttaactgcttttagtaaagtgcaagaagagagaaactatttacacagatggaatttataatttaaaaataagcagaatataaaggttagtgatttattaaaactacatgtcttatctgttgccagcatcatgtaggcacaactcaaaaatgggacatgaacaagagcataagcttcaagagagcgtttgaacaactacagatgatcactacacactcagtagattttaaaccgtgttcttctcattggtcatttattttggggattgaattgaagcatttcctttcttgaatactttcaagttccaatgggcagcaaaaatattacttggattttggggttcccaacctacaaaattctaacccatttttcaaggtgacagaaaaaaaccatttgtaccccggcattgggaaaaaatttccttgaggcctttaacaaccacatagaaaaangggctttgattctttttccaaaacttttagccctagggtcttttattgacnggggatagtaaatggaaattggnaaattttagatgaaaag

SEQ ID NO: 4341 - DNA, 329 bp, Homo sapiens
cccttagcgtggtcgcggccgaggtacttgtttctctgcagaaagcagaagactatatgaaaacaacatccaacttcagtgggaagggatatatcattcagaaaagagaaataaaaccatgcttggaagcagataaaccagttgaagacatactgacgtatgaggaatttcatcctttcttgttttctcaacattcacaatgtccatatatagaatttgaatcatttgacaaggcggtggatgaattttattccaagatagaaggccagaaaattgacttaaaagctttacaacaggaaaagcaagcattgaagaaattagataatgtt

SEQ ID NO: 4342 - DNA, 816 bp, Homo sapiens
  misc_feature 305, 419, 445, 463, 542, 544, 587, 597, 654, 676, 682, 706,717, 747, 749, 751, 757, 763, 787, 797: n = A,T,C or G
cccttagcgtggtcgcggccgaggtacgcggggcctcacaacaaagaattatctggccccaaaggacaataatgctcagattgagaaacccttggctatcaggtaaacacaggctctggaactagatttcctgggttgtaagctgcataatattggaagctctgtttggatggacacgtgggggtgatctgggacatagaaacctggaaaagctgatgaaagctgattttcccttgaagaagacatttggaatgaagcaatgtgacctttaatcaccctcagacctctttttgttcttgttccangacattctgggttttaagccagatgataccaaaatgaccccagaaccagaagatggcagagccacaaaagtgaaaaatcttgggtctctgaatcatagcttggaggagggcttnctggaaaaccatccaacagagacatncgcattaaactttgtgtnaacaaaaaataaatctttcttgtggtaggccactgagatttaaattgcttcagcagcttaccgatctgccaatcaacananaacttcttcagtgcttttaagtggtttacagaccccttaattnttaaatggtnggaacttttggacccaaaaaacctttcactggaatgatgccaaccaatcttggttgngggagtcaaacctgaaaagttnggaatncctaaaatggcctccaacctttanttctattacanagctttgattttaccggtcggtttaggaancntntttctntttganaaaacttgttgggggcctaatttnatgaaaaccnaaaggccttaaaaaaaaat

SEQ ID NO: 4343 - DNA, 491 bp, Homo sapiens
  misc_feature 405: n = A,T,C or G
tgaattcgccctttcgagcggccgcccgggcaggtaccttgcccatcacaaatgtaaaagcacaaacatacttgtttttgtttctgacctcatggttgcaggaagctggctgagaacaggagagaatggcttgggggaaaaaaaagctctttcaagttggccaccccaaatcacccagatgggtgtccaggcaaatcagggcctctagacacttgctcttcttttcctcttctacttggctggtattgttttgagaggtgaatttctaggagggcaagatttttgtgtgtgtgtgaaacaagagaaaggttatctgcttaacctagctccctgaggaacttaatcaagtcactcccattctggcatttgggtgggtccaggcagcacccaagagtccaggacctnaccaggtccagctcaatgacagactttgtatgggaagaactgggaaggagaaaaaaagtaagcatggattcctgtttattttgccc

SEQ ID NO: 4344 - DNA, 446 bp, Homo sapiens
  misc_feature 439: n = A,T,C or G
cgccagtgtgatgggatatctgcagaattcgccctttcgagcggccgcccgggcaggtacctccctattcctttgataagccattgcaaagcctgtctaaaacaaagctatttgcttcattagctaagactacgactatttttcaacatgtctgaggaacgagaccaggcttctctacttttcaaaactcctcaggtgattcttagcaaccagattagcatcagtccttagaacaacctcagacacccactaacacatgccctagagaggctaagtaacccgaaggtcacagaaccacagagttaattaacaacgacaacaaatcacccttggtgttcctgatttccgtcaaatagcccgccttgctgagtcagcacaacaaaagatttcataacaaggtaaagtcgtcttagtaatgccccctttctaagaagttacnaatattt

SEQ ID NO: 4345 - DNA, 519 bp, Homo sapiens
cccttagcgtggtcgcggccgaggtacatcaccctgctgagggacatccaggacaaggtcaccacactctacaaaggcagtcaactacatgacacattccgcttctgcctggtcaccaacttgacgatggactccgtgttggtcactgtcaaggcattgttctcctccaatttggaccccagcctggtggagcaagtctttctagataagaccctgaatgcctcattccattggctgggctccacctaccagttggtggacatccatgtgacagaagtggagtcatcaagtttatcaaccaacaagcagctccagcacccagcacttctacctgaatttcaccatcaccaacctaccatattcccaggacaaagcccagccaggcaccaccaattaccagaggaacaaaaggaatattgaggatgcgctcaaccaactcttccgaaacaagcagcatcaagagttatttttctgactgtcaagtttcaacattcaggtctgtcccaaccggcaccacac

SEQ ID NO: 4346 - DNA, 464 bp, Homo sapiens
  misc_feature 414: n = A,T,C or G
ccctttcgagcggcccgcccgggcaggtacgcgggtctttcccaggccgcaccatttctgtcactcacatggacccaagataaaagaatggccaaaccctcacaacccctgatgtttgaagagttccaagttgaagggaaacaaagaagtgtttgatggtgccagagaggggctgctctccagaaggctaaaatttaatttcttttttcctctgagttctgtacgcgggtatggtagttttacattacttactggacattgtgggtgatagattttaaagtttatctcccactaaagaatgttgaattttgtcaagattggcagatcatcttgatcctatggatgctaggttttaggacacgttagggtgggcctacttctgttctgcccttagtccgatgacacaaatcttantcatgggatagggctcttattcccaagatgtgacccttctaggggttcaa

SEQ ID NO: 4347 - DNA, 392 bp, Homo sapiens
  misc_feature 130, 146, 161, 168, 169, 176, 189, 207, 223, 363: n = A,T,C or G
cccttagcgtggtcgcggccgaggtacagagggatattccaatgcctttagttagctcaggagtagagcatggtaacctgagagagctggcacttgcaagaatgaaagacctcggaatacagttgtccangatgttaagaaaccanaataaagtttggaantcccaannaaatttnatcacaaaaagtnacccagggggttttaatngtataccactttaagnattttgggggggaaatggcaaaaaggggaaaggggttgacttgtttagaatttcctttggaaatgtctgtgcacattacaaccgtcccacggagccaaaatttccttccaaactgatgagcaagctctttgattcttgangtcatgatgttatttttccttcttaattt

SEQ ID NO: 4348 - DNA, 596 bp, Homo sapiens
  misc_feature 502, 589: n = A,T,C or G
ccctttcgagcggcccgcgggcaggtacctattgtgttccaggaatccttcttggcactgggaatacagaggtgatgggcaggaaaattccctgattttatagagcttaaattcttgtaggagagacagacaataacagtaagtaaatgctagacctttataattaataataaatgttgtttgcagtgaagaaaactgagagagagggttaacatagatcaaatattagagaaaattttattgaggaggggacatttcagttaagacaggaattctaaaagggagcaactaaaaagatgttgggatacacttttatatggctgcatagttctaggcagatggaacagtaattgctaaggatctcacgcagcagatttattagtttttgccacattggtccagctactaggcacactgccatgttatagtaaattatcaataactaaaggtgtcaacattgtatttaagccatctttctatctctcagggcccccagtggagnctcttacatagtagtatggtgctcagactgtaatcaatttcaaatgaaattatttttactgatgtagaaactcatcggattagctgnttatttt

SEQ ID NO: 4349 - DNA, 535 bp, Homo sapiens
  misc_feature 56, 57, 80, 102, 103, 104, 343, 436, 443, 453, 454, 509,515, 520, 523, 532: n = A,T,C or G
cccttagcgtggtcgcggcccgaggtacgaggttatctgtgttgtgcttaaaaggnntctctacatagaccggaaaaaangacttttgtgaaattgttatannntaacatttatcattcagagaaaatattctgtaaatgttgatttaatgtaatagtttcccttaaaatagaatttatagagaatttgaaaagaaaaccacaagttaattcactttttaaaaaacttcatgtcatctgaatacttaagctgctttgtttggaaagtgtctttttaaagaaaatagttaataaaattacaagtaagataattgtcacaaaataaaaatcttaggtggcccagntgtgtattacagagatttgggttttaacagttatacaagttatttaaggtgggaaaccattaatattaaattttaattaaagaaaaaattttngccaccnaaaaaatctnncctttcacttaagaatataaaaatggtattagctggacccccagccaggttggcnactggnggatnacnatggttttnccc

SEQ ID NO: 4350 - DNA, 324 bp, Homo sapiens
  misc_feature 235: n = A,T,C or G
ccctttcgagcggccgcccgggcaggtacttgttactcttacagatgtctcaattaattttaacctctatccctaatggtgtttaaattttggtaaagaaaaattcattttttctttattttccaagaaatggtaagctatctttgtccctatgggagatgtggacagagaaaactttctgtctctgatgtcttttgtgtgagacaagattttaggaaataaataagtggtgcanggaattgtgagattacatttcacctccttttctgtctcctctctcttttatataatctttatctctgcttctaacaatctccttatcag

SEQ ID NO: 4351 - DNA, 550 bp, Homo sapiens
  misc_feature 423, 519: n = A,T,C or G
ccctttcgagcggcccgcccgggcaggtacttttaaaaatgtaacttataaacacagggaaaaacaaaaggtagacctttccacagattgctagactactttatgcatgaaaaaagtctgtttcactgatatgaaatgttaatgcactatttaatttttttctctttgttgcttcaaaatgaggttggtttaagataataataggacatctgcagataagtcatcctctacatgaaggtgacagactgttggcagtttcaaaataatcaagaagagaaatatccttagcaaagagatgactttggggatcatttgaggaatactaactctgttgcattaatgcttcaaaaaatcatcaaatgattcatgggggcccgatttgcatttgaaaaatgtttgaaattagagtctcatttgtttcangaatgcagctacctgagttttttgtcttggcaaaagtcacaaagcccatatactccattgtgtgtctatatttgccaattaattctaaacttctangaaatatgccctctcttaaaggagaattttt

SEQ ID NO: 4352 - DNA, 535 bp, Homo sapiens
  misc_feature 126, 136, 138, 139, 144, 155, 157, 186, 191, 200, 206, 218,224, 233, 243, 245, 269, 273, 277, 284, 291, 293, 294, 296,304, 305, 307, 309, 314, 316, 324, 325, 331, 333, 357, 367,413, 429, 432, 442, 445, 453, 456, 471, 481, 483, 488: n = A,T,C or G
  misc_feature 493, 498, 505, 507, 509, 511, 518, 523, 526, 528, 535: n = A,T,C or G
cccttagcgtggtcgcggccgaggtacgaaggatccccaagcccttcaggcccgagatcagagccagatcagccttaagtcacctcccatccaagaacttggcctaaaaatactcccctatttttnaaaccccttnanngaacngggattcttgnanttatttaaaatggccttcccccttggggnaaggnaaaaggggnttggcntttttccccccnctcccncttaaggangggttggccncncaatttttcccaattaaccccccntggngtgnatgaaancttggtnanngnaagtaagnncnanttttngngtctttgnnaaaggncnactcaagattttcccccttttttncccccaattnccccaatttctcccccctaaaacccttcctccaaaaattaaaaatntcccctccccccaacnttnccactttcgngcnaaaggggnttncttttctaagggttnggtatctaantnggccnttggnttccnttttggngngngnccaaggnggggnttngnaaaaaan

SEQ ID NO: 4353 - DNA, 477 bp, Homo sapiens
  misc_feature 364: n = A,T,C or G
ccctttcgagcggccgcccgggcaggtacgcggggccactcagaagaccttcaccagatactgagccttgattttggacttctcagcctccagaactgtgagaaaataaatttcagtttttataaattgcacaggctgtgatattctgtttcaacaacacaaaatgggactaaaacagcctcttaaagctcaacgtccctggtgggtggtcagccttgtgctgtttggccctgcaaagccagttagttcactaatgccatgaatgggacagaaagtaaagatcaagatgcccttgggaatttgtaagctttggtgcttttttctgcctcttgagagaaacacctctctgagttaacaatataanctctctttttaacactttaaaataattattactgggcgggtgaagaattttagtttgattctaaaacatcgggatttgagactttcttaactggaaatccagaggtaagtttt

SEQ ID NO: 4354 - DNA, 501 bp, Homo sapiens
cccttagcgtggtcgcggccgaggtactttttatattaacgaactttataaaccagcaaaatatgcaataggaaaatgatttaaaagattatggtaaatatttttagtaggttaataaagaggttgagaatgaattctgagaacccctgactattagattatgagttgcctctagctcccttgatcaaagagaaacaggctttcatgtgcatacttggcataatccctggagagaagtatattaagaaaatgttttgaaatgcttctttttaattaaaaaaacacacccgcgtacttccactgctgttttaaatttcccaatgtatggaatctggagatcaattctcagaaacctctacaaatgttcagattatgagaaaatactgcacagccttgaaacaacaataaacatttgatctctcacacaatttttgtgcatcagaaatctacgagcagcttacctgggtgattctgccttaaggtctctcatatgttgcattt

SEQ ID NO: 4355 - DNA, 629 bp, Homo sapiens
  misc_feature 9, 17, 48, 49, 56, 60, 305, 452, 487, 495, 536, 555, 578,625: n = A,T,C or G
gctccagcngtccgccnggtgccgacggtgtatctggatatattcacnnttagccntggntcgcggccgaggtaccgcgggagagcagcacgtagcaggcccccgtggaggatccacacagtggctgaacactgggaaggaactggcgcttggagtctggacatctaaaagttggtaaagtgactgtgtcaggaattggtgggttcttggtctcactgacttcaagaatgaggccgcggcccctcgcgctccattgggttagagtctccccgagcgagctggtctcggcaagtggcgtccattcntggaggctcgaatccaggtcaaagggttgctggagcgacggttggaatggaaaactagctggaaagacacccaagcactcttaaagcaatccccgtgttctggaggctgggaatgcccaaggtcaagatgcttgacaaaatgatganagctttttgctgcatcctcacatggaagaaggtgnaagggcanggagagaataaactaatgctaggaaatgccttttttaaaangggacttagtccccattancaaagaagcatgtccttatggcntaaatcatctcataaaagcacccacctctttaatttctcaaaaaaanaaaa

SEQ ID NO: 4356 - DNA, 773 bp, Homo sapiens
  misc_feature 396, 440, 456, 518, 584, 607, 620, 633, 635, 642, 644, 647,666, 676, 701, 737, 746, 754, 762, 763, 769: n = A,T,C or G
agaattcgcccttagcgtggtcgcggccgaggtcttgcccaggatttgcactccactgagaatccaactataattgccaacattttccacttctgttgtttaattatttcaaaattcaagtaactataggcatcctgaaacagtatgcattcccttatattgcttcgaaatctcatatcacctttttgactacatttagaaggcacgaagtttggacctggaagcacaggtctactcctcttccatgggagaccaatagcaaatggaatccaatggagcagcttcgactatcacttggaagccctctgtgagccactaacccacccttcttctttgtggcttctttttgagctttagatttgtccagctaaaatcctgtgtatctttaaagcttanctcaaatgccattttccaatgtaaagctttttgcccactggtgnaaccagaaatgatgtnacttatgacataaccccacttttggacaaaagttgtattcaaaccccttgcctttttccttnttggttattgcctaatttattaattggccttccccgacacctaatgcaagtggctttggtaaaatntttgcttaaaggcaccccaaaanattgctttggagnccaaaaccttgtntnctttggnangtnttattaaaaaacaaccccnccctttttanggggaaaaaatttttttaaaccaantttttttaaaaaccggggctagggtccctttgggcnggatttttncttggccnggcttctnnaaaaantttt

SEQ ID NO: 4357 - DNA, 479 bp, Homo sapiens
cccttagcgtggtcgcggccgaggtacaaatccctcagtgagaatcaaggtgtgtgccttggtttggaaaggagggagttgacactgtggaaggcataggaatctgagaggcaactgtgagctgcaagactccctgcaactctctgggcttcagtgttctcacctgtaaaatgaggatgtgccaattagatgatgtctgttaactcaacaaaaaattacaagatataattttagaaaaggagaggcggagacaggactttatttctcctaaatggttgcagcctgccaagtggccagcccacaggctgggaagcatgcctctggccaaggcccagagacaggcactttgaaagaggaagaactttatactgaacaggctggctctctgcacttctcttcctagagaatctcctggctggctcagccgacttcagctctctgctcaaaagtcatttcctctgaaaagtcttccctgctga

SEQ ID NO: 4358 - DNA, 331 bp, Homo sapiens
ccctttcgagcggccgcccgggcaggtacactctaaagaaagccatgaggatgataatccactttgatacttccaatctgctggtcttgctgaactctttggatcatggatatcataagttcgacaaaatattttttttgtagaagcacaaatgtgaagtgtcactcgttctgagacttcctcctctgtgaaattccacaatctctttctatttatagacttttccacagcaaacattagtctacgcagggcattttgaaaatcatttgccagttctaaagtagtaataataaatactccaagaactaaaagtccccctggtagcattctg

SEQ ID NO: 4359 - DNA, 310 bp, Homo sapiens
  misc_feature 54, 70, 190, 207: n = A,T,C or G
ccctttcgagcggccgcccgggcaggtactttttttttttttttttttttttgncatgcatgcatccacnctggctttatcctgacttatgaatccagcaaggcccacagaggaacatctggttttgacattaatttcttctactctgcaggatggttgggtttttaactcattgggggcctttggctanaccttgaatttcctggngcaacttgacagaggtgagagggcttgagggagttaaataaaactatgtgctgcccttgaaaggacttgcaaatgctttatatattaaacaaagaaactccac

SEQ ID NO: 4360 - DNA, 680 bp, Homo sapiens
  misc_feature 484, 499, 524, 630, 636, 658, 670, 680: n = A,T,C or G
cccttagcgtggtcgcggccgaggtaccttcttgagagatatcaaagaaagtccaatatccgttcttccccatcactctacagtgtatctagtaataattatttgtcttaatcataaggacaaataatgaaaattatatttcaaatttctaagcttttgtggttaaaaaaagcttctagaaactattgtttctcctcccatgcagttataatatgcttaactttctttaagatgggtgtttggtagtatcatttacaatatatttatttttgttttttaagcatgtttttatatttgtttaaggtggataggcatgtagacctgctagaagttgcccaggaaactgatgggttttcaggaagtgacctaaaagagatgtgtcgagatgctgccctcctctgtgttagagaatatgttaattctacatcagaagaaaggtatgttattttgacttgatttttaacacttgtcaaaaatcttttanagcttttaaggtagnttcttttattttgcctttatattanaaacacccgcttatgaaaataaaaggtaaatttgggattatcacccccctgcaacctttatttattggccattttttccaaagcagaattctgaaaaatgaaggangggcanaattggtggggaagggtcttanaatggaaagganaaaaaaaggn

SEQ ID NO: 4361 - DNA, 385 bp, Homo sapiens
  misc_feature 285: n = A,T,C or G
ccctttcgagcggccgcccgggcaggtacccacacaatatagagcaaagaataaagaaacaaaaaaaaaggtaaaaaaagacaaagaaaatgtaaatcttgatagttgaaagacaaattcagctcaaattctcctctgtggtttttctcttccacttgtccatattcacggacaaagaggctactgggagaagttcatgctgccgctgagttaaaaggaagatggcggcattgattcaaggtagggaatcatgaatatcctgtaaaggaaccaccattgtagcangacgagctgcatacaaaacccctcagacaccgagttgtagaaggaagggctttattcagctgggggcatcagcaagctactgtcttaaaatctgagctcc

SEQ ID NO: 4362 - DNA, 598 bp, Homo sapiens
  misc_feature 539, 545: n = A,T,C or G
ccctttcgagcggccgcccgggcaggtacctagcttttattcattttattattcatctttattgctttcattgcacatgctgttaacttcttatgaactctttgttctaataaataagcatatccaggtttttcataaataaatgaggagtctataaattcttactagttttaatagaaacattgccactaaaatggtgtattctagctgtgtgagcttttggaaaatgttttcatttcctttatgtttgaatgttccttccaggtctttgaaaatatacattctgagttgaaaagctttataataggtaaaactcattaacccatatactttccatgctgggcacagcaggtgtggtaggtagaaatataagatgactcccaagatttttgcaccctggcatacacatatgcttttccagttgttgaaacactaatttaggtgctgctgtgaagggattttgtaagatgtgaataatgttccaaatcagttggccttaagaaagaaggatgatcctggatgggccagatcttatcagntgagtncttaaaggggaacaagcacccttcctgacaaaagagaatcaaaagcatggaag

SEQ ID NO: 4363 - DNA, 734 bp, Homo sapiens
  misc_feature 331, 473, 567, 593, 616, 645, 652, 653, 660, 665, 693, 696,707: n = A,T,C or G
ccctttcgagcggccgcccgggcaggtactattacataacatgtcttaacccatttataaatataagttaatttctttagaaaaccagaggcaacttctctgttaaggactagacatttcacaacttttacaaggtatggtgtaaatgctcacatttgttttcaaagatttcagatagcatctaaaatgaacaatattaagattccacttccactgaccagtttattaaggaaaggggaaagcatttaaatcctggtcagcatattaaattattaacttaaaatccagcagttttatcatatttcagtgattcgagtaaaatttatagttnccaaaaatgcaaatcaagtagcagtacaataatattaggggactttgataccccactttcaacaatggacagattatctagacagaaaacaataaggaaacattggacttgaacttctgtttagaccaagccggaccagacnggacatataaaggaagattctatcaaaacagcatcagcatacacatttttcttaaggtggcacgtggaacattctccatgatagaatcatatcnttagatgatgataccaggtgataacnaatttaagaagaaaggaagtcantttcaagtattttttccttccaggggggntaaaacnnggaaatnaatcncaggaggaattttgggaaataaattggnggnaatttaaaccnaccggggcaaaaaaaaaattggaaatt

SEQ ID NO: 4364 - DNA, 452 bp, Homo sapiens
cgccagtgtgatgggatatctgcagaattcgcccttagcgtggtcgcggcccgaggtacctagcttttattcattttattattcatctttattgctttcattgcacatgctgttaacttcttatgaactctttgttctaataaataagcatatccaggtttttcataaataaatgaggagtctataaattcttactagttttaatagaaacattgccactaaaatggtgtattctagctgtgtgagcttttggaaaatgttttcatttcctttatgtttgaatgttccttccaggtctttgaaaatatacattctgagttgaaaagctttataataggtaaaactcattaacccatatactttccatgctgggcacagcaggtgtggtaggtagaaatataaagatgactcccaagatttttgcaccctggcatacacatatgcttttccag

SEQ ID NO: 4365 - DNA, 330 bp, Homo sapiens
  misc_feature 270: n = A,T,C or G
ccctttcgagcggccgcccgggcaggtactttttgttttttttgtttttttgtttttgtcagacaaggacttcagggggctcatagagcagagatgtcactgtagaagaagcaggctgccatatcattctctcctcatccagctccaaatagtaacatagcctatggggactgactgactttagaacagagcatgaaggaattcatgcctaaagttattgttgaaaacagcagagattatagtagtgaacattagagaattacatattantagcagctagaaagaaaaaagaccagccagacatttcagagagagacctgtggaaagagt

SEQ ID NO: 4366 - DNA, 339 bp, Homo sapiens
  misc_feature 80, 223, 319, 337: n = A,T,C or G
ccctttcgagcggccgcccgggcaggtacttttttttttttttttttttttctggattatatctaaatttaatattgaanacagcacttagcatttctctggcctaatcttattttccatgataaatgtgtgcatttgcctcaattaccttaggaattactagagattgcttcaaagttttttcctgcactttaatgttctgccttcttttgctcattattgngatcacatacaattttgtagctctattgcttggagagatttcacaaaaaaaattttaataaatgtcatgtgcaatatatttggcatgaattgcctnatgaatttgaaattccanaa

SEQ ID NO: 4367 - DNA, 328 bp, Homo sapiens
ccctttcgagcggccgcccgggcaggtacctattgtgttccaggaatccttcttggcactgggaatacagaggtgatgggcaggaaaattccctgattttatagagcttaaattcttgtaggagagacagacaataacagtaagtaaatgctagacctttataattaataataaatgttgtttgcagtgaagaaaactgagagagagggttaacatagatcaaatattagagaaaattttattgaggaggggacatttcagttaagacaggaattctaaaagggagcaactaaaaagatgttgggatacacttttatatggctgcata

SEQ ID NO: 4368 - DNA, 704 bp, Homo sapiens
  misc_feature 531, 552, 628, 637, 644, 654, 683: n = A,T,C or G
ccctttcgagcggcccgcccggcaggtacgcgggtgaatgaagccttagcaagtctgtccagagctcccctggtgccgcctggcatgctgctgatagtttgaatgtcttcacaagaaatggtatcagaaacctcctgtcatatcagcatgggtctcttgcttcctgcaggaagggcgatatcctgggaggcacagaggtggagcccgagagacgcagtgttccagcgctgctcggctcaggactgggtcttttcttccgtatcctcaagcagcttctttgacttactacttctttttgtttgtttttttcttcattgggctttaagcgttgcttctctttagtgtatgtgtgactgaagccaaacacaacattgctttccctttgcctgcaaataatcttgttgcccaagcccatctctgccattttcaagtgacagctggctggccaatgagcctgagcactgggaatgcccagcagggcacatctagggggctgctttatattttggagctagcaggtctcttttctanggctttccaggaaagaattanaattaaaacattggatggattttgggtgttcatttcttttttccatcactgggcctttattttcttggggcttcanttaaaagcngaaaacngattatggtngaaacatttatagcatgctttccaagaanttaaagatttttattaatttt

SEQ ID NO: 4369 - DNA, 564 bp, Homo sapiens
  misc_feature 140, 180, 210, 213, 218, 223, 228, 232, 250, 255, 265, 274,278, 284, 313, 341, 389, 407, 431, 444, 448, 462, 474, 479,537: n = A,T,C or G
ccctttcgagcggccgcccgggcaggtacttggtggggacggaggagctagggactaactgttgctcttggtgggcttggcagggactaggctgaagatgtgtcttctccccgccacctacttgtattgaacacccacanttcttcccttaaccagcctgggggttttgttgaagggaantattgaaaaaaagaagcccctaattttcgnatnagccntaagnaaagngggnaaattaattggaaatagngttanggaaaagctngaacctttnccanaggggntccaaccggaaggggtttctcccccttcncccaaccacttccttgtttccaccaagnggccttttccttttggaccataaccggttaagtttttggggaaggccntaattttttccttttccnccccccccaagtcccaaaaaaggnccccatggaaagnaagnccttttttggttcncccccgggggcnccttncccttgggggaacccaaccaattaagggggcccccaatttttaattcccccttggttnaattttcccccttttttgggggccttt

SEQ ID NO: 4370 - DNA, 546 bp, Homo sapiens
  misc_feature 78, 292, 501: n = A,T,C or G
ccctttcgagcggccgcccgggcaggtacctgagatttctcagagctctcttatcaagagtaaggagtgagattgcanaaggggcagtaatgtcaataccaagttattggaaactacttaaccagccactgcattacatactggagcccgtctaggacacttgcccttggaaatggtggaaagactttgttttatttctatttcatcaacagaacttttgtagcattgaatctaagcaaaggataacatcatattataatggaaagttatttttaactacaactgttattgntaaatttagaagaaaatattgtctttgaagtttcagtccaaaactctaaggagaacaaggtttttactgccatcggtaatcctgtgagaaatttgacactccagatcttatttgagacagataagtctatgataaatttatgtatgagacttaaaatattcttggatattctcaggttggtctcacaaattctgcatagattaagttgnttttttttttttatgagaaccctttctttatcaaaaaggattgga

SEQ ID NO: 4371 - DNA, 323 bp, Homo sapiens
  misc_feature 310, 321, 322: n = A,T,C or G
ccctttcgagcggccgcccgggcaggtactgcttacaacagaatctacaaggacaacaactcaccgtgtttttcaattcagatttttaagttatgaattcaaatctactaaataaatatcagaaacaaacaaaaacagataaagctatagctcactgcattttagaacctgagtgatgtcatggttctctagagctttcattccacaggagagttcttgtctctagggcctcgcacactatgcacaggtgaagggacgaagtgtagccccacagggtagaattcatgatcagaggacagggaaatactgntttattcattnnt

SEQ ID NO: 4372 - DNA, 367 bp, Homo sapiens
  misc_feature 57, 248, 305, 345: n = A,T,C or G
ccctttcgagcggccgcccgggcaggtacttttttttttttttttttttgaatttanaagtttcttacaagcagtaaaaaggtccaaaatgctttataggtaggtttctacataaatttcatagtttacattatggcataagggcaaaaaacttctcataaaagatattaggtaagtaaggctaccatcagttaaatctgcttctacacacattaacttacttatcttctctcacctgaagcacattnttgcaactcacgcaacagggatttactttcttccttttaaattttctacctttaagnttttctttttttttttcttacctttcaaatttttaaggtnagcccctggatttttaccaatt

SEQ ID NO: 4373 - DNA, 497 bp, Homo sapiens
  misc_feature 461, 482: n = A,T,C or G
cccttagcgtggtcgcggccgaggtacaaaatcatgtggatagatgtgcatttgtgggtatctgtgaatacaaatacacaattttcagatagaagtagtataagaaaaagaaatcaaacaaagtcaaacattttaagtgtagctcttggtgcactttaaaaaaattattaaattgaagctgtagtttattctcatcattgtcatcctatattagtgattttctttagcttttgaaattaaattcataatattacaattctgaattcctatgtatgtatatgttaagaatcctttaatgggactgactttcatatgtgtgtggctgcattctgaaatagttgtctaggtgatacataaagcagtgagtgctatttgtaagatatatttatatttaaagtcttcatacagttattaactagctccaatattactgaaatgatttctccaaatatcctatattnaattatcatgctggcaaaatntattataactttggg

SEQ ID NO: 4374 - DNA, 466 bp, Homo sapiens
cccttagcgtggtcgcggccgaggtacctttcaaaatgctgaagtttcctgtgagggtctacaaccataccaccgtatgaataatctcaatcacagcattttagggctggaaagaccgttctccatccaacctctcatttcagatgagcggagactcaaatctctcacagggttccatagctagttggaaccagaaatccagcagaaatactgtaagcaagcttgtccaagatgtgggtccaggacagctttgaatgtggctcaacacaaattcacaaactttcttaaaacgctatgagattttttttgcaattttttttttttagctcatcagctatcgttagtgtccgtgtattttacgtgtggcccaagacagttcttcttgttccagtgtggcccaaggaaagccaaaagattggacactcctggaggtgccagcacagtatctaacactacctcaatactt

SEQ ID NO: 4375 - DNA, 165 bp, Homo sapiens
ccctttcgagcggccgcccgggcaggtacaggcagtcaaccctaaacagtggactcaacttcaaagacgttctcaaggagaaggcagacctgggggaggacgaggaagaaacgaacgtgatagttctcagctacccccagtacctcggccgcgccacgctaaggg

SEQ ID NO: 4376 - DNA, 466 bp, Homo sapiens
cccttagcgtggtcgcggccgaggtacttgccagccaacctgacctggaatgcggattttcaagggatctctttattcagtggtgtcaggaccctaaaaactcaatcattctaacctacagaactactcctgggactttagcacgtttcctaattgataatccttctgaaaaaattacagaaatagagttgaggaaacgtgtgaagcttgaagggaaagaacttgaagaatacttggaaaaagagaaactaaagaaagaagctgccaaaaagcttgagcagtcaaaagaggcagatatagattccagtgatgagagtgatattgaggaagatattgaccagccatcagctcataagacgaagcatgacttgatgatgaaaggtgaaggcagtccgtaaaggaagttttttcaaacaggcaaaaaagtcctatcctatgtttcctgccccaaaaagaaagaattaaa

SEQ ID NO: 4377 - DNA, 390 bp, Homo sapiens
  misc_feature 135, 136, 137, 138, 139, 140, 142, 144, 145, 146: n = A,T,C or G
ccctttcgagcggccgcccgggcaggtacgcgggaacctggaagattggagatctctctctaatccctaccccgcagctggttcggtgtgagtttatagaaaccttggggtctgagtttatgttaaaaaaaaaannnnnnanannnaggttgaataaatagatcagtgatatccagaccctgggatttcgtggctcaattaaaaactgtggggctaccatacatagtatctgactgcttattttgtcaagtaaagacatatacaggcataccttgttttttttgcatttcactttgttgtacatatcagtatgattaacggttcagtgttcattttcaggaatctgattggataactgtcgtttcatttgttgaaacatataattcaaaa

SEQ ID NO: 4378 - DNA, 638 bp, Homo sapiens
  misc_feature 57, 65, 72, 81, 95, 112, 116, 168, 173, 176, 182, 228, 233,235, 244, 259, 270, 275, 277, 284, 295, 303, 304, 305, 314,317, 334, 337, 338, 342, 358, 389, 393, 397, 405, 407, 412,414, 431, 479, 494, 498, 504, 514, 523, 531, 537, 542: n = A,T,C or G
  misc_feature 552, 565, 575, 585, 590, 609, 610: n = A,T,C or G
ccctttcgagcggccgcccgggcaggtactttttttttttttttttttttttttttncacagcantcaaaanaaccacaanggagcagtagtttntaagcttccatgtaggngaanacaaaaatttttataaatttcatgaatacttatatcccaactgttcaaaatntcaanatntttaanaaaacttgtaggactacagttaactattctttcctccaaatttttntttananccagagagnccaaaaataaaaaanttaaaaaattnccatngntcctatntaaatcataanaataaaannnggccaaganaantttttaaggaccccctnttnntccnaagccaagaaattttncccacattgggcattatcaataatgagaacnttcntganatcctatnancttgngnggccctgtctcataaanacagtaaagccacacaaataagggtttccactccctgggcctgagctntgaaacccagccaanacanaatccnaaacagccanagagcttcntttctganggcagntgaantgaacatacntttttttcccggngtacaaaaangtaaagcccntgaanttattttttccccccaaannttttgggtgttaaaacttttaaaaaaaa

SEQ ID NO: 4379 - DNA, 372 bp, Homo sapiens
cgccagtgtgatgggatatctgcagaattcgccctttcgagcggccgcccgggcaggtaccatattgtgtatatcatctgggatattttaaaggacaatttatctacctattaagtgtcactgggttctaaacaatgaaacttgttatctggatagcaaaaaacactaagttgtaaagccacaagcttcaattactttaaaaaaatgaaaaagccagtgtaaaaattcacactttgaaagaaaaaagttcacagtgatacctgggagcatcacttgctctgttttaggatttcccttaggaagtggcaagcgtctaaaacctcatttaaaaacaaaatgagctaagatgctgtctttctctgcagtttctgt

SEQ ID NO: 4380 - DNA, 325 bp, Homo sapiens
  misc_feature 135, 138, 219, 246, 248: n = A,T,C or G
cccttagcgtggtcgcggccgaggtacttttttttttttttttttttgttatctaaatgggagatttagtcctggtgcctgaatttgagggtctctcacactgctcatctcaacaatcaatttttactgctgtanaanataataatggtaataacactataaaaaaaaactaccatgacctataagttattagtcttttaaaaataactgtagtgtatncagcttcttcatttcctgaagtagaananaagctgatagttggagcctctgaagctgttcatatatctcctgaatgcatgcaagaggttgatttgctcacaaagga

SEQ ID NO: 4381 - DNA, 649 bp, Homo sapiens
  misc_feature 333, 340, 359, 375, 416, 422, 457, 495, 497, 506, 509, 522,523, 537, 542, 543, 557, 575, 577, 584, 585, 595, 605, 607,612, 615: n = A,T,C or G
cccttagcgtggtcgcggccgaggtacccagggggcagagaagaagagtgcagcatctattgcctgtttcttggcagccaatggtgctgacctgagcattcgaaataagaagggtcaatcgccacttgatctctgtcctgatccgaatctctgcaaagcactggcaaagtgtcataaggaaaaagtcagtggtcaagtgggttctcggagtccttctatgattagtaatgattctgaaaccttaaaagagtgtatggtgtgctcagatatgaagagagatactctttttggtccatgtggacatattgctacctgttctttatgttctccacntgtcaanaaatgcctcatctgtaaanaacaagttcaatccangacaaaaattgaaaaatgtgtggtatgctcttacaaaaaancaactnttcttttttcaacccttttgccacattttttcttntaaagactgtactaaccttattaaaaaattttttccantntccaaccantantttaaccaaaaanncctttcattatttnctttnnaaggaaaaattcanaaaattccccttattatntncaaattnnaattttccanttttccaaangnccagnttnttcccatttcattcaaatttccaaaatttcacac

SEQ ID NO: 4382 - DNA, 458 bp, Homo sapiens
cccttagcgtggtcgcggccgaggtactttttttttttttttttttttggtaaaaaatattcttcttggtaacttgttatttttgaaccagtttatttcccagaaaatgcctttttcttttgtgcttcttagaaggagaaattgctacacatcggtaggtatgcgtagatctgcatcaaactttattcagattatctcaggctaaacaactttcctttatcctacttctccttaattttccttcaattgtctttaattttgggctaaaatgtttaagtatagaaggatctagatacatttttgacaatgtgaactaaaatcaaacctaaaatttcaagcttgtagtgacacatcaagaccaaatataatttaacccactgaagaaagtgacctgacctcaaagattttggcctaatttcgagtgacctggcctgcaaaaaagcatgactttaaatact

SEQ ID NO: 4383 - DNA, 498 bp, Homo sapiens
  misc_feature 394, 395, 397, 405, 407, 408, 409, 410, 411, 412, 413, 414,415: n = A,T,C or G
cccttagcgtggtcgcggccgaggtacgcggggtatattattcaaataagaaatcaaaagagaaattggaaagttcattgagctgaaaatgaaaacacgattatcaagaatcagggagttgcagctaatgtatgcttggaggcaaatttaagcactaagatcctatattataacaaaaaagaaaggtctcaaatcagtgacctgagttttcaccttcagaaactggaaagagaagagcaaattaaacacaatgtaagcagataaagaaaataataaaaagaacagaaatcaatgaaagaaaaaagggaaaattataagaaaaatccaagaaagtaaatgctaatcattttaaacaatcaattaaattgttagacttctagtcagctgatcaaannanaaaaaaanannnnnnnnnggtcctccaaagattcaggtttactcacgtcatccagcagagaatggaaagtcaaatttcctgaattgctatgtgtctgggtt

SEQ ID NO: 4384 - DNA, 424 bp, Homo sapiens
  misc_feature 119, 202, 326, 330: n = A,T,C or G
gatatctgcagaattcgcccttagcgtggtcgcggccgaggtactgaaatatagacaagacttaacagtgcatactcttaactgggacacatgctgcctcttaactgtgagcaaagggncaattttccgacatctaaaataaggactgaagttttcaccaaaagtaagaattaatgagatggctagggtaagactgaaactncaagattattcactcaatatccatcctccctttatcttggcaatagaacctatatttttcaaaagttttccctacggatagaaggtggtcagaagaggatgtaagcaagaattcacttgggtangganttcctggaagaaggcccttttgaaactctttggctttcattctggcggggaagtcaaacttcatgggctggagcaaccacagccattttgtacc

SEQ ID NO: 4385 - DNA, 256 bp, Homo sapiens
cccttagcgtggtcgcggccgaggtacaataattttatccattttatatattagatatctgaggcttccagaaataagtgatttgctcaaaatcagcactcaaaccaagactccgtggccctaaagcccaggctcttgcaatataagtatcatggttattgaaagcacggagagtcatgtttaagttaggtttatgatttccagaaaatattggatttaaatgattccttcaatgagggggcaggcatgagataga

SEQ ID NO: 4386 - DNA, 342 bp, Homo sapiens
ccctttcgagcggccgcccgggcaggtacactaattccaagcagcaaaggaacagggcagcacccagtgtaactgataaggtaattcatgccacacaagacgcattaggtgaacctggtggtgccctctgcctgtaggggaacaagagaaaactatccccagaatcagccacctcagcccctagtattttttctatcaatgccttgtatcagcctcaaagcagcctgttcaagttaactccctgttgaactccagggcctatacctctcttggctgaatagatataagaacatccttgcctgatgggttcatattcctcttcaattctgctgtctaaaagaa

SEQ ID NO: 4387 - DNA, 416 bp, Homo sapiens
  misc_feature 1, 28, 128, 130, 139, 140, 145, 150, 161, 165, 174, 184,203, 235, 239, 244, 250, 254, 273, 291, 319, 361, 368, 381,397, 398, 401, 404, 406, 408, 413: n = A,T,C or G
nccttaccgtggccgcggccgaggtacnactaaaggcaactggcatggactcaaatattttggggaagaaaaagactaaaagttctaaggaagaaaattgcggacctttgatagttttgaaatagttntnaaaaaggannagttngttanaaaaaccttgntttnagggacagntttttgaatntaattgggaacctaatttnaggaattgaaattaccttctgggggtttcctngaantaaanttgggnttanttaaacgggggaggcaaangttaaaaaaggttaattntttttaagggggggatttccccaaaaanttaaattttaaccggtcccctttgaccaagatcctttttttnttttccnccaaaaaaattanagttcttccaatttgnnggnggngngnaaagnggg

SEQ ID NO: 4388 - DNA, 524 bp, Homo sapiens
  misc_feature 189, 335, 402, 425, 426, 449, 457, 467, 480, 486, 511: n = A,T,C or G
ccctttcgagcggccgcccgggcaggtacctgctttgtcacataacgtgactgaaaatgactcttgcagacctcactattttattttcaactcacaggtaactaaatatgcttattttctcaaaagaagagtttagggaagaaaagagggaagctattcactcccagggtaaagggaggaggataatangtgctttatagaaaacatgtgattagctaattattgaggactgtgaagaaagttttggtttacatctgaaaatagattgagaattgagataatcgtatggtgctaataattgacacattcagaagtgaggatattgatcatacttnatgaacagaattagaaggaatgggaagctaattcacaaaggaaacttaggctttgattctaagattngtttacataaaatatatgctgcnngaaatgtgacagcatgagttcgntacatcanaattaagtangattttttacgtnttcttncagactgtctatgcctgtgcccaantctgaatcctttt

SEQ ID NO: 4389 - DNA, 535 bp, Homo sapiens
  misc_feature 435, 442, 455, 497, 500, 510, 511: n = A,T,C or G
ccctttcgagcggccgcccgggcaggtacgtccaaagccacaggatgaaattatgcagaagtctatcttgaaaaggtcctgattactttcactaaaattctacctattagaaagatgacaatatcccaaaataataaaagctcagaactaaaactttaggaagtataggagaaaggaagaatgggtaggtagactggggtaaagacggaggagaggatagtttagtttattacctaacagaaaggctattaaaatggaccgagttgtagtcctatccctgacattttatgtccttggttaatgtgcttagccatcttgtgcttcaagaaatgtcctcctatctgttcaaacctgtaatttttgaaggtttaaaccatgatttttctgataatcttcaaactgctcacatctcctttgttagaactagtatcttanaaatgcnaaaaacgattagnttttgaaatcacattgctcctaaaaagaactaaaattttttnganttatcttcgnnttactattcccttttcgcttttat

SEQ ID NO: 4390 - DNA, 504 bp, Homo sapiens
  misc_feature 499: n = A,T,C or G
gatatctgcagaattcgccctttcgagcggcccgcccgggcaggtacattccttatgagggctttcttcctcagtgttctctttagagggctattgctactggactttctgcaatgtctttgggtgtgccctcagagcctgcaacaagtgtatttggatatactctatttgtaaagtttaggcctctaagaaggccacaatgaagcaactaaaaatctgatgattaagggagtcaatcaagctgatgccatttttagtttaaaaatgaagcagagctctaaactcatagatgggttttcttactgggaagaagattggctctctgaagacagcttccaatgaggaatgtattgaacaatggcagcactgtctggccacccacaaactgttacagatgacccagttacactgttgcataggaacccaagtggaaagaagacagagtccatgtctgtccatggcttcagctacagaaaggatagtatgggaacattacaanggggg

SEQ ID NO: 4391 - DNA, 443 bp, Homo sapiens
ccctttcgagcggccgcccgggcaggtacatattatatgcaaggttacaaaaaaaaatcaatggttaatgattttttagctcaaccaagctaaaagatgtgaacaagaaattgaactcaaaacaacttaagacacaaagctcttgttactgataatgtctaataatattcatcaatttaccatatcttgttcttatattaaaatgttctatcattttcctaattattttaaagtcgattacaaaaatatatatatatattcttgtagtgccagaaaattgaatacattaataaatggggtagaatagatgaatctcccatgaagaagaattccaaataatttatgaactctgccctcaaggatatggagcagaacttcctacttctctagtgtgagctgaatagtgacttccttccaaaaattacatatgggaaagggggaaa

SEQ ID NO: 4392 - DNA, 332 bp, Homo sapiens
  misc_feature 250: n = A,T,C or G
ccctttcgagcggccgcccgggcaggtacagattgtctcagttatacaagtggcaagaagaggacagtggaccagctcctgggaccttccaaaacattggctttgacatctgccaagatgatgattccatccacctggagtccatctatagtaatttccagccctccctgagacacatagaccctgaaacaaagatccgaattcagaggcctcaggtaatgacgacatcattttaaggcatggagctganaagtctgggagtgaggagatcccagtccggctaagcttggtggagcattttcccattgagagccttccatgggaaactcaat

SEQ ID NO: 4393 - DNA, 498 bp, Homo sapiens
cccttagcgtggtcgcggccgaggtacaaaagtcaggagttaacctgtgttcaatgcttcatcattgcttgtttacctaccagcattttaggaaggattagtttatcatcaaggccttgtttggagtgggagtaagggggtgatttgttctgatctcaggaaggaaaagtgagcaggatctggatagctccaaggagctcaaaagcctatgtgtgagcaccatggctggggacggctcaagggtaaaggccacttcggggcacaatccaatggacaccaaaaggataggtaaggaacacgagcttgcttccttcatagattagcctgggcccaagcccagcctactttgacagtcttttattctattcataaaggaggtcttatgcaggaaaactaagactcttatctagcagctttcttttcttaagctaagaaaaaggaatgtcataaaaaaggtgaaacattacttttggtgagctctgctatttttttttttta

SEQ ID NO: 4394 - DNA, 476 bp, Homo sapiens
  misc_feature 58, 421, 454, 461: n = A,T,C or G
cccttagcgtggtcgcggccgaggtacgcgggcctcttcctttctccgccatcgtggngtgttcttgactccgctgctcgccatgtcttctcacaagactttcaggattaagcgattcctggccaagaaacaaaagcaaaatcgtcccattccccagtggattcggatgaaaactggaaataaaatcaggtacaagaaccagttggcagtatgtaaattcagagctttgtggaacagagtttcaaagtaaggctgccgtccgaaggcacgaagtgtccatagtccttttaagcttgtaacaagatgagtgaaaattggactcctgccttcagattccagttgtttgagttgctgtgaggtttggaggaaatatgctctcaacataataaaagccactatcactggcactgttgcaacaaanatgtagggttgtaaaactgcgacaactgctatngctccantcacaattaataaca

SEQ ID NO: 4395 - DNA, 487 bp, Homo sapiens
cccttagcgtggtcgcggccgaggtactaggttttacagggtatacaacgtccaataatttcccttcatcaacatgccatgatttatcagccttgaaaagtatctcaaaggcttagaaaactttattcatttattcattcattcatttattctgtggatgatcattgaaagcctattgcatgccaagaaatatactagaaataaaggatcatcaaaatagtcatataatccctcttcccaggccagaaagcttacagttttacatccggatgagaatagaaggaatcaactcatttagcagatggagaagaggcccagaaaaattacataataatcgatgttactattgcattcttcatgacctaccacaccttgaatttttccttttctcctaacaacataattttccaccatataacctacagtattgggagatttctgggcatacaagacttcactaactcatatcttagctggtatagggaat

SEQ ID NO: 4396 - DNA, 681 bp, Homo sapiens
  misc_feature 590, 616: n = A,T,C or G
cccttagcgtggtcgcggccgaggtacttgtattttgaatggtttcccactttcaaatgggaaaaccgactgtctttcttcccttccccagttattatccagctttgtattgcaaacaatgactctcctgttgttctcattgaagcgtgggttaaagtggaaggcaacatcattccctctttggaaatctaaagcaattctgtttgcattgggcttcaccgtgcccagaattgttatcagcatgcgaggcaccactcccccaggcaaaggcaggttataaggcacaatcagtggccccccgcgtacccagcaccacctaggaagtatttttgccacaaaatcagacctccagatctaactaccattttataggaaagataagttcagagaaccatgtcaaatgacacctcgggatttcaaccagcaacgttcaaatgtgctaaactctgtagatggaaagagacttacagacatttcaaataaatgcaatatatgggccttgcttgaatctaatacaaacaattcaactaccaaaacagccaaacatttggtgggacaatggggagatgcttggaattccgattggttantttaagggtgtttagaaatatttatnggccaaatggatgtaatgctccggaaattgctttaaaatgaatccaggacttttttttttttttt

SEQ ID NO: 4397 - DNA, 341 bp, Homo sapiens
  misc_feature 195, 198, 199, 201, 204, 218, 221, 251, 324: n = A,T,C or G
ggggatatctgcagaattcgcccttagcgtggtcgcggccgaggtactggtcagctattttatagactatccctcaattgggatttgtctgatgtttttcttataactatactgggattataggtttgggaggggaaaactacagagataaagcacctctttcatatcaagggtacactctatgatggtcacgtnacnntnaantcacctggcagacntanttctcataatgtatctcctttgtcaagcancacatgactgtataatattttacctaagaaagaattcttcggtgaaaataccaatgctgtagaattactgtantcaatttttaggttcaa

SEQ ID NO: 4398 - DNA, 442 bp, Homo sapiens
gcattgctttttacattacaattccagatcaatataagcacctggagaagaaccctgacacatgtagcccaagctaaagaagtagtatttttcattaagatactatcataaaataaagtgattacagctactccacattttaaaagcaacatgtttttataagaaaattgttataaatgaaaaacgtgacttcttgaagacagttttgaatgtctaaaaatgttgttatcactactgagaggaaacttgcctatgaaaaatattataatgagtttgtggaaaaaagttaacaggttaaatattttaagccatttaactatagcataatattagtcatctgagcactttcagtatcactcttattttattaaatttatcccatttattaatagaaactagggccctgattggccaggttctgttatttactaatggggtcaag

SEQ ID NO: 4399 - DNA, 303 bp, Homo sapiens
ccctttcgagcggccgcccgggcaggtactccctagtaacatagtctgttgggtaatactgccgctggtggaactggaagcctgggaacggcttattaactgtgcaggtgtaggagaagtggagaggttgatagacgtttgggacatacttgactgctgtgtgacacttcctgtgggagatgtagatggtcttccactggacaaacttgcctgaacagcagcaaggctctgaagctgggagctgcttaaatgctgctgctgaagagctgcagtatgcagcatcaagtgctgttgttgggctgc

SEQ ID NO: 4400 - DNA, 491 bp, Homo sapiens
  misc_feature 413: n = A,T,C or G
cccttagcgtggtcgcggcccgaggtacaattttgcctagggccagcttgagatataactgtttgtataaggtttgtataaggttgcagtgagccgagatcatgcagagaaccctaaatgcagagtaattatcacttatagacattcatcattactatatcaactctgtgacgaggggaataatgtgctatttacattaaatgtgcagtttataaatcaaaaaatggatttcagtagagtaaagtcgggtagaatgagagatatatttaccaaaaaatcaaaaacaaaaaagagtcctattcagccctggagtctaggttccaatcatttctaggatacagatattcaatatacaatatagttcttgctgtgctaaaagaatagaattattggagacgaccagtatgtattgnttttcataatatgacctctgccagaaaaattgtgatcttgcaagttttagtacctgcccgggcggccgctcgaaaggg

SEQ ID NO: 4401 - DNA, 448 bp, Homo sapiens
  misc_feature 358, 390: n = A,T,C or G
cccttcgagcggccgcccgggcaggtacaatcatgcactggggtaaagaagattcatctgctcttagctacctaccatgccaacactcctgagaaagctcacagaggcccatgatgcccacctggatctgaggacctagaaagccacaacaggcaaccataatctgggtcttccctcagccaactcccctgcataaagtgaatgaatgaaaaacccatcttatattaatcagagttctctagagaaaaagaaccaatcagatgtgtatatatagaaagagagaattattttagggaattagctcacatcattatgcaggctggtcaatcaaaaatctgtggagtgggctagcaggctngagacccagggaaaggctaaattgcagtttanatcagaaggtcatctactggcagaattccctcatcttccaggaaggtggatctttttc

SEQ ID NO: 4402 - DNA, 491 bp, Homo sapiens
  misc_feature 53, 250, 346, 388, 399, 433, 472: n = A,T,C or G
cctttcgagcggcccgccgggcaggtcctgctttgcatttcatttgctctgtntttcagaactacactttacgacatgagaaaaactggtataagcagaatgttcctacatttagttaatatcaattctaatttaatacataaatgacttgttcaaatcttacttagactccatgtaaggggaggagaaaaggggagaaaattagagtgggggaagatgaatcaaatcacatttgtggaccacactacancaattggaagctacttatcatatttcctaagataaaggtttgttggatcctaatatgggaaggatttaaaagagatttaaaaaggtaggacagctnaatttaaaatcccaaaattctcaaccaagtttgatctcattnggcagatggtngatgatcttgaatgactgtgagcctagaaaggtngaaagtaatttctttattggagaaaataaagaccttggntcctaaggaaaaagggcta

SEQ ID NO: 4403 - DNA, 316 bp, Homo sapiens
ccctttcgagcggccgcccgggcaggtacgagatcagaaccttgaaagtcagtgaggactaggggaataggaagtagtatttgggctgacttgaagttgaggggaaggacatctacagttgagggaaatggtatgggcagagtcgtggtcagtggttaggaaatggtgtatggtgtatatggggtagtccgaagatccactgggataaaatagaaagcagcaaatgtgcatctgacaattttggagaacctttggatatctaactgtataatttattattcatttattattattttttgagatagggtcttgcttt

SEQ ID NO: 4404 - DNA, 393 bp, Homo sapiens
  misc_feature 385: n = A,T,C or G
ccctttcgagcggccgcccgggcaggtacatacttcggctttttgtctgaatttatttggaagtcactggaaggtaagatagggtgtgatctgatttacagtttttaacatttggaataatcccgaactttcagaatcattactaatattttaataaaagtaagttgccaaattgatgccccatcactcctgaatactttagtgtgtacaccacaatggctgagcacttcctgacgttgctggtagtgcctgccatcaagaaagattatggttcccaggaagacttcactcaagtgtggaacaccaccatgaaagggctcaagtgctgtggcttcaccaactatacggattttgaggactcaccctactttcaaagagaacagtncctttccc

SEQ ID NO: 4405 - DNA, 328 bp, Homo sapiens
  misc_feature 77, 78, 83, 91, 101, 103, 110, 112, 201, 235, 253: n = A,T,C or G
cccttagcgtggtcgcggccgaggtacactctgcattatacctctaggcgtcatcagaaatttgtgcttaatattgnncactnacattccntgaacaacgntncctactnanatccctagactaacaacatgaagtcttaggggtatagtctataatcattacaacacaggaagaaaatacctggtattccattaagcggnataaacattactttagcatagtgattgcagcttncaaatacacctgactcanattttgaatattatagtaagcaaattaagtacctgggaagagtattttgaaaccttcatcaatggaaaagtggtt

SEQ ID NO: 4406 - DNA, 444 bp, Homo sapiens
  misc_feature 380, 381, 388, 391, 392, 393, 394, 395, 396, 397, 398, 399,400, 401, 402, 403, 404, 405, 406, 416, 432: n = A,T,C or G
cccttagcgtggtcgcggccgaggtactaacctgcctcctatacctagctggtctcctctctgttgctcaatgttaccacagcaggctttctagaagcactctgacagtgttactccctaatatccttcagtgacttcaggaactttcaggagaaagccaaactcctctgtttggtgtactcaggattattgttttgtaggcaaggtgattgtcttcgtgtttattattcatttgtggtaagttcaccttggactttttattttgggtaaacatcacatacatcatcattaatcaggctttggggctccttttccccattattcaatgtctctctgctctttttttaaattattattatacttaaattttagggtacttnnttttttnttnnnnnnnnnnnnnnnnaatcaaagcncattttaatcatttanttttaaaagggg

SEQ ID NO: 4407 - DNA, 772 bp, Homo sapiens
  misc_feature 306, 307, 308, 309, 310, 311, 312, 313, 314, 315, 316, 317,318, 319, 320, 321, 322, 323, 324, 325, 326, 327, 328, 329,330, 331, 332, 333, 334, 335, 336, 337, 338, 339, 340, 341,342, 343, 344, 345, 346, 347, 348, 349, 350, 351, 352: n = A,T,C or G
  misc_feature 353, 354, 355, 356, 357, 358, 359, 360, 361, 362, 363, 364,365, 366, 367, 368, 369, 370, 371, 372, 373, 374, 375, 376,377, 378, 379, 380, 381, 382, 383, 384, 385, 386, 387, 388,389, 390, 391, 392, 393, 394, 395, 396, 397, 398, 399: n = A,T,C or G
  misc_feature 400, 401, 402, 403, 404, 405, 406, 407, 408, 409, 410, 411,412, 413, 414, 415, 416, 417, 418, 419, 420, 421, 422, 423,424, 425, 426, 427, 428, 429, 430, 431, 432, 433, 434, 451,452, 453, 454, 455, 456, 457, 458, 459, 460, 461, 462: n = A,T,C or G
  misc_feature 463, 464, 465, 466, 467, 468, 469, 470, 471, 472, 473, 474,475, 476, 477, 478, 481, 482, 483, 484, 485, 486, 487, 488,489, 490, 491, 492, 493, 494, 495, 496, 497, 498, 499, 500,501, 502, 503, 540, 544, 574, 601, 606, 607, 612, 622: n = A,T,C or G
  misc_feature 623, 624, 632, 635, 636, 638, 648, 650, 651, 653, 656, 658,659, 663, 664, 670, 673, 674, 676, 681, 686, 711, 732, 745,751, 755, 759, 760, 761: n = A,T,C or G
ccctttcgagcggccgcccgggcaggtacgcgggtggttctagcatggcatatttttcacatatctagtatgaaattatataagtattctaaatttatatcttgtagctttatcaaagggtgaaaattattttgttcatacatatttttgtagcactgacagatttccatcctagtcactaccttcatgcataggtttagcagtatagtggcgccactgttttgaatctcataatttatacaagtcatattaatatatttccattaaaaaatcaagttgtacctcggccgcgaccacgctaagggnnnnnnnnnnnnnnnnnnnnnnnnnnnnnnnnnnnnnnnnnnnnnnnnnnnnnnnnnnnnnnnnnnnnnnnnnnnnnnnnnnnnnnnnnnnnnnnnnnnnnnnnnnnnnnnnnnnnnnnnnnnnnnnnnagccggaagcataaagnnnnnnnnnnnnnnnnnnnnnnnnnnnngannnnnnnnnnnnnnnnnnnnnnnagcgctcactgccccgcttttccagtcgggaaacctntcgngcccgcctgcattaatggaatcggccaacncgccggggaacgccctttggctaggcngggcnnttgtncacttggttnnnagctgacntanngngcccttcgantnncncgncnngggnncaaacnggnntnttttnttttnttccctttttttctccccccccccntccttcccccccccccccctntctcccttttttncccccntttncctnnnccccccccccc

SEQ ID NO: 4408 - DNA, 309 bp, Homo sapiens
ccctttcgagcggccgcccgggcaggtacacagttttaaagaaatatgagatttgcaagaaatttccaggtttccttttgggtactggcaacgtggctcttttcaccctgaaaactgagaaaactgccagtgcattcacaacatacacagcctcttctaaccatggggggaaaaaggctgggagatgcggtagtaacagaaagttggtagtcctaggaagttatcattcaacaagggtttttgctgaaagataaatcagcccctctgaggagttttatgactcaaactgctctaaagcccccaaggccc

SEQ ID NO: 4409 - DNA, 448 bp, Homo sapiens
  misc_feature 282, 400, 417, 432: n = A,T,C or G
cccttagcgtggtcgcggccgaggtacgcgggtctccatatatatttgttaaatatccactaggttccaggagctatgccagacaccaggggagtgtgtgatgagcaaaagcagtcatgctccctacccttgttgagcttaccaaaaaaaaaaagaaaacagagacatgaaacaagcaatcacaatctgatgatgatagtaaagggaacaagcaaggtgtcacaggagtgcagcacaagggaattttacccaggccagggtctttgatgaattgcagagcangggataagtgccagagaagggcatgatgtaggtcaaagactggacccctaagaagaactgactggggtgttccctagccttgtttcagtgtttgccctctattcatcattcctccaantgctccaagcttcccgnccaagacagcttgtnggcaatgtaccctgcc

SEQ ID NO: 4410 - DNA, 361 bp, Homo sapiens
  misc_feature 335: n = A,T,C or G
cccttagcgtggtcgcggccgaggtacagctggcaagaatccagggcaacgtggttccctcgctcacggtcccggaaatgtccagggaagcaggtctgagcctgctgctgttagtgcattcagtcgcctgcctcagtctctctgtagagcctgcccgcgtacagactatttagttgtttgagaaaacaggggcgtttcctaatttggtctttatcctgcgacaacactttcagcagactagcctctccttatctcacagatcacaagcacccctagatagtgtgattctgtcagatagcatttatgcaaaaatctatgaagttaaaagatcgtangaagccaaatgaaatgttacctgccc

SEQ ID NO: 4411 - DNA, 436 bp, Homo sapiens
ccctttcgagcggccgcccgggcaggtacatattatatgcaaggttacaaaaaaaatcaatggttaatgattttttagctcaaccaagctaaaagatgtgaacaagaaattgaactcaaaacaacttaagatacaaagctcttgttactgataatgtctaataatattcatcaatttaccatatcttgttcttatattaaaatgttctatcattttcctaattattttaaagtcgattacaaaaatatatatatatattcttgtagtgccagaaaattgaatacattaataaatggggtagaatagatgaatctcccatgaagaagaattccaaataatttatgaactctgccctcaaggatatggagcagaacttcctacttctctagtgtgagctgaatagtgacttccttccaaaaattacatatggaaaggg

SEQ ID NO: 4412 - DNA, 542 bp, Homo sapiens
  misc_feature 524: n = A,T,C or G
ccctttcgagcggccgcccgggcaggtactttgaggaagtttctgatcgttactgttttatggatgagaagactaaacctcagagaagtttattccttatccatggtcacacagctaataatcagcagaatcaggatacggtctcaggtctgtctgactcctaaatctgtgctcttaaccagtcttatgtgctgactcaatgaaattagttgggaatagaatgaaattcactcagctaccctcagccttctggatggtgagccttccttcaaggaaaacagaacaacaaatcaagatagtaactgacatctctcgggagaattactttatattactacaaagtaatataaagtgataaatccttattcacatttactgttttctcttattggcttcaagtgttgcatttccccataaactagaggattaatttagaaacatgaagaaccttgtcagcctttggccaattccttttgtttgtgaaggaaacaaaaacaaaattggataggaaaaaaaaaaacccnaaaaaaaaaaaaagaaaa

SEQ ID NO: 4413 - DNA, 488 bp, Homo sapiens
  misc_feature 6, 8, 279, 317, 332, 428, 437, 480: n = A,T,C or G
cccttncnagcggccgcccgggcaggtacctgctttgcatttcatttgctctgtttttcagaactacactttacgacatgagaaaaactggtataagcagaatgttcctacatttagttaatatcaattctaatttaatacataaatgacttgttcaaatacttacttagactccatgtaagggaggagaaaaggggagaaaattagagtgggggaagatgaatcaaatcacatttgtagaccacactacaacaattgggaagctacttatcatatttnctaagataaagttttgtctggatcctaatatggggaanggatttaaaagaganttaaaaaggtggacagctaatttaaaatcccaaaattctcaaccaagttgatctcattggcagaatggtagatgatctgaatgactgtgagcctanaaaaggtgnaagttatttctttattgagaaaataaagacatggttccttaanggaaaagg

SEQ ID NO: 4414 - DNA, 280 bp, Homo sapiens
  misc_feature 266, 267: n = A,T,C or G
cccttagcgtggtcgcggcccgaggtacatgcttctgcatagcaaaagccccccacaattacaggtaaataaatgctacccttcccagcaagggccaggaagtgcaggaaaatatcaagttgcctgaggatctgaatgcaatagaaaaagttctgaaagtcaaaggtcttgcaatagaacattcaagaggtgaagccttatgattcatcaacttgggttcactcagtggtcaaaccaaaaaaaaaaaaaaaaaaaaaaagtacttnnttttttttttttt

SEQ ID NO: 4415 - DNA, 502 bp, Homo sapiens
  misc_feature 304: n = A,T,C or G
cccttagcgtggtcgcggccgaggtacattaaactacatgataattaaatatgagaaaggcaaattctatttcactcgttacgtttgaccaaaacacggtaaacagcattagcttgccttttgctctcccataccacctgtgaactcttcatcagcatcagaccaaagatccttatgtaaacttgaaaaccggaagaacattaccttcagaaacacagaaatctaaaagcaaaacagctgttgtgtatacaagcaattaaaatatgaaggctaaaccttctataaacctacagaatgccatttnttagatagaacttctaacagcccttacaaaataggaggtcaccataaagttaggcaacaagtgtcactgctatatgtaaggcggacaggaagatatcttgttttggaactgaatattcctaacctcatccctacaagtatttaaggacacctttgatacttggcactgcaggagaattcaatttggaaagtagaataa

SEQ ID NO: 4416 - DNA, 295 bp, Homo sapiens
  misc_feature 244, 247, 255, 258, 271: n = A,T,C or G
cccttagcgtggtcgcggcccgaggtactgtcataaatattgttatcttttcttgcactcgataagacattttacactactgatacggacagaggctgtatcccctcaaagtatttgaagaaactacaaaaggagaggacaaaaggatgtgaattgtaggaagaatggggagaaggggtcattggcagtcatcttggggactggctattgcctcacaaaaggatatgtgatttgatttttgccnaanaaaaaaanganaaaaaaaaaggtncctgcccgggcggccgctcgaaag

SEQ ID NO: 4417 - DNA, 315 bp, Homo sapiens
  misc_feature 171: n = A,T,C or G
cccttagcgtggtcgcggccgaggtacatgatttagagacacggaggattaaagactcaacgactgaaaatttggggactaacatgtaactatgttaagaaagtaattcttgaaaaattcacttacccgggacaaagaaatgatgttaataaaacatttgttttccacttntcacctccaaaggctatagaagaaaacaaaagttgtataaatacagattttctttaaagcaaaccaaatatccatattacaaatctgatatttgccaaactgtcagacagcaatgagtacctgcccgggcggccgctcaaaggg

SEQ ID NO: 4418 - DNA, 493 bp, Homo sapiens
  misc_feature 39: n = A,T,C or G
cccttagcgtggtcgcggccgaggtacttgaaacatggncatttttagcccttttccttaggaaccatgtctttattttctcaataaagaaattactttcaactttctaggctcacagtcattcagatcatctaccatctgccaatgagatcaacttggttgagaattttgggattttaaattagctgtcctacctttttaaatctcttttaaatccttcccatattaggatccaacaaaactttatcttaggaaatatgataagtagcttccaattgttgtagtgtggtctacaaatgtgatttgattcatcttcccccactctaattttctccccttttctcctcccttacatggagtctaagtaagtatttgaacaagtcatttatgtattaaattaagaactgatattaactaaatgtaggaacattctgcttataccagtttttctcatgtcgtaaagtgtagttctggaaaagcagagccaaatgaa

SEQ ID NO: 4419 - DNA, 798 bp, Homo sapiens
  misc_feature 36, 44, 56, 57, 60, 71, 73, 77, 78, 81, 87, 90, 91, 97, 115,121, 122, 124, 125, 127, 131, 140, 146, 150, 154, 158, 159,162, 165, 167, 170, 175, 176, 179, 190, 196, 197, 199, 209,210, 211, 214, 217, 233, 237, 242, 245, 246, 248: n = A,T,C or G
  misc_feature 249, 253, 272, 275, 283, 285, 294, 298, 300, 303, 312, 313,314, 326, 332, 333, 338, 342, 343, 350, 354, 361, 362, 363,380, 382, 384, 387, 391, 397, 401, 407, 409, 413, 421, 432,435, 438, 439, 443, 445, 448, 449, 452, 457, 458, 459: n = A,T,C or G
  misc_feature 474, 478, 480, 485, 493, 496, 499, 500, 506, 508, 510, 521,525, 526, 527, 531, 541, 542, 548, 554, 559, 564, 575, 579,583, 586, 588, 590, 595, 597, 604, 617, 619, 621, 622, 626,627, 641, 642, 657, 661, 666, 686, 692, 697, 732, 753: n = A,T,C or G
  misc_feature 769, 778: n = A,T,C or G
cccttagcgtggtcgcggccgaggtacgcgggcacnacaaatcntgtaccgtatannctncacattcttananatanngtntgtganctnnaaaaantgccagaggacacgtttntgctcnncnngnccantgattattngctggngatngtgnccannggntcntncantaacnnacnttcgactccanagggtnntncactcgatcnnnctnaanagggatatccagcagntgancggtnctnntnntctncaagtactcacacactgtngtntaagctcntncatttagtncgancngtncctcacacnnncttggggcgatntatggnntaatntttnnaatatanttgngtccgannngatttttctcttattcntntnganactntatggntaantacatntnattngagcgttnctagacacaantanagnnaatncntcnnagnctttnnnattgaatagataatntatngntaatnggatatgntantanntgattntngngtatttttttntacnnntcantattttggtnncatacnaatcantacanttttnctatatttatnatantttnatntnangttantngttcttnccccccccccccntngnncccnnattagtatttattnnttttttccccccccncccnttttntttccccccccccccccccnccccgnttgtntttttttttttttttcctccccccccctctatttnttttttttctctttttttttnccttttttttttttcnccccccccnccctcccttttttttttttt

SEQ ID NO: 4420 - DNA, 472 bp, Homo sapiens
  misc_feature 44, 135, 213, 262, 272, 287, 348, 358, 377, 411, 456, 460,464: n = A,T,C or G
cccttagcgtggtcgcggcccgaggtacccaccaccactgtatngatgctcatgagctctggcatgccatgaaagggagtagggcactgatgagaaattgcctcatttgaaaatactagcctcaaagaacaaatnggaggaaaatttttccaagatgccgagaaagcctactgctttggcaaattacaagcaaattaaacccttcccaaaganggaccattttattttcaagaagaacccttcggggggaccactttcaagnaggaattacntcttcaatggaaacnttgggttccaaggggggaacccaagaagaaggggaaaggggattattaaccgggacccccntggccgaatngggcctggccttcaagggnattggccaaaatggggttccccttaatggggggnaaaggccccttggttccaggccaaggaaaggaaccgggggggggnaggncaancaaaaaaa

SEQ ID NO: 4421 - DNA, 433 bp, Homo sapiens
cccttagcgtggtcgcggccgaggtacatttggcatgatctgggcctatgcggtcttacaatccctgtataaaactagacaatgaaaaacagaaaacaaaacaaacaaacaaaaaaacaagaacgaagcacctaccacatgccagctactgaggctatgaaggtattctcccgccttagaaagcccaggattaatgcaggattgcgacatttaaacagaacatttccatacagcatgagtataaatgactttcccaagtttacactgagagtaactgacacagcaaccccagcaaagtctgagctgagtcctgaataattgtataaaaaggggagagaaacagagtgaagaaagggtttcccagactctgtcccaggaaagaaaatgagctcgtggagaggaatagactttctctatgaaaacagaaggggaa

SEQ ID NO: 4422 - DNA, 315 bp, Homo sapiens
cccttagcgtggtcgcggccgaggtacaatcatgcactgaggtaaagaagattcatctgctcttagctacctaccatgccaacactcctgagaaagctcacagaggcccatgatgcccacctggatctgaggacctagaaagccacaacaggcaaccataatctgggtcttccctcagccaactcccctgcataaagtgaatgaatgaaaaacccatcttatattaatcagagttctctagagaaaaagaaccaatcagatgtgtatatatagaaagagagaattattttagggaattagctcacatcattatgc

SEQ ID NO: 4423 - DNA, 433 bp, Homo sapiens
  misc_feature 372: n = A,T,C or G
cccttagcgtggtcgcggccgaggtacatttggcatgatctgggcctatgcggtcttacaatccctgtataaaactagacaatgaaaaacagaaaacaaaacaaacaaacaaaaaaacaagaacgaagcacctaccacatgccagctactgaggctatgaaggtattctccggccttagaaagcccaggattaatgcaggattgcgatatttaaacagaacatttccatacagcatgagtataaatgactttcccaagtttacactgagagtaactgacacagcaaccccagcaaagtctgagctgagtcctgaataattgtataaaaaggggagagaaacagagtgaagaaagggtttcccagactctgtnccaggaaagaaaatgagctcgtggagaggaatagactttcttctatgaaaaacagagggaa

SEQ ID NO: 4424 - DNA, 303 bp, Homo sapiens
  misc_feature 278: n = A,T,C or G
cccttagcgtggtcgcggccgaggtacgcgggcttttagtccattctctaactgctgctagaatagtcttctactgtcttcttaatgattatagaataaaatccaaattctttagtgtgatatgtaaggacctcaatgatttcacacttccatgtcagatagcttatgctactttctctactggaaatgctccctcaccttggccttctaataagcatgtacttttttttttttttttttttcccttggaccataaatttttattggcaggtcaaganaagaaccgggggtaagggtcccttc

SEQ ID NO: 4425 - DNA, 206 bp, Homo sapiens
  misc_feature 63, 79, 99, 114, 155, 172, 203: n = A,T,C or G
ccctttcgagcggccgcccgggcaggtactttttttttttttttttttttttttttctgcttnaaatcatgtttattgnggggccagggggtagggganaatgttatttttttntactgaaatgcacctttaactttataatatctggtaatggngaaacaaaattcacttntagtaacaagacctaagccacaaaatttcanagt

SEQ ID NO: 4426 - DNA, 316 bp, Homo sapiens
ccctttcgagcggccgcccgggcaggtacctacccaccatacagccaagcttgctaaaggaaaacccagtttaagatttctccaggccaagaggaggaatgagagaaggattaatttcctcaagttaacactttccttaggtccaaggaatcaatgccttaaagcacactgaagtttagaacactgtggtgacaacagacattcctacctctcctgatttccactggattagcacctttgctaatcttctcgaagccttccttggctatagagcgtgccagtacctcggccgcgaccacgctaagggcgaattcca

SEQ ID NO: 4427 - DNA, 465 bp, Homo sapiens
ccctttcgagcggccgcccgggcaggtacctccctttacctgtttccctactggaaagtgggataatactttttacctcatggacttgtcaggaggattcattaaaacgactcgcataaagcctatgccacatggtagatgccaattcagggtctcaagaaagaacagcccacaggattgacactgaaccttaacaaagttaacaggaccaaggtgcagagagggtgctaggacagcgaagccaaagaggacccctcaaacccaacaagagctgtgcggctccctgattcctcgccagtgttgctaccgcccttggctcttcttgcatggctggctcttgagaccctggaagctgatggaggcaacgtgagaagcacatggacatccgaccttgagcttgagaggcagaggcctgagttctagttacagccccagcagtaccttcggccgcgaccacgctaaggg

SEQ ID NO: 4428 - DNA, 499 bp, Homo sapiens
  misc_feature 6, 11, 12, 13, 20, 22, 23, 25, 27, 36, 39, 40, 44, 61, 63,64, 66, 67, 77, 80, 81, 85, 93, 94, 96, 103, 106, 112, 114,117, 119, 120, 124, 131, 134, 137, 139, 145, 157, 160, 165,168, 169, 181, 185, 187, 191, 192, 199, 202, 205, 213: n = A,T,C or G
  misc_feature 214, 223, 230, 235, 238, 239, 243, 249, 251, 255, 259, 268,271, 274, 281, 285, 288, 289, 290, 292, 293, 295, 297, 298,299, 302, 303, 305, 307, 310, 315, 321, 330, 333, 334, 336,350, 369, 440, 449, 470: n = A,T,C or G
ggtacncttgnnntatcaangnnangntccagcacntcnnacangagctttttatacctancnntnntgggaataanaanngatnctatatgnncnaagcccntancttatncnctngnnttantatgacnacnttnanaatgancacagactctgnaantgctnctnncctttcagctgnggcnancgtnngcataantanagnagtgctgnncatggtggntttgatntaccnacnntggngtattntngatntttnatgaagaanggnaanttctagnacantgnnngnngntnnnaanngnancgngctcngatacnaaactagcnggnntngtgcgtcatagctngggctggccagggcttgantgggagttgcaaagggatttattataccatgatctctgcttgtgcatatgttttggagattttcataatcnaatgtgaanatttttgattttcataatcanaaatcaatcaaaatatgaatggtataacg

SEQ ID NO: 4429 - DNA, 320 bp, Homo sapiens
ccctttcgagcggccgcccgggcaggtacgcgggtatttggcaaaggaatgaaaaaagttagaaagttgtctgtctgtgggttaggctctgcctgcaagatcttacaatctaggtcagaggttcctaaatccttctcaatgccgtttgcactggccctgaggaaagtgtgaaaatgaagactattgtagagtcttacatgaagctaaatttgttcatttatatcacttctcttttattatgagattatgtcctctgcagttttttggtattaaaatgtcttttatgaaaggatagtaagagttagatagtagtctttttt

SEQ ID NO: 4430 - DNA, 651 bp, Homo sapiens
  misc_feature 363, 446, 447, 450, 458, 459, 500, 507, 514, 526, 527, 570,592, 599, 607, 608, 610, 618: n = A,T,C or G
cccttagcgtggtcgcggccgaggtacccaccacatccggctaatattttttcttattttttgtagagcaggtgtctctctcgttgcccaggctagtctcagactcatgacctcaaagagtcctcccacctctgcctctcaaagtgctggaattatagatgtgagccactgtgctggaccagtgaaagctattttaaaatgtttttataattttgtgcttctcttttagtggctgctatggtctgaatatttgtgtaccagctctgcttcattcctgtctgaagaagggcagatagtttggctgctcctgtgttgtcacctgcaattctcccttatcagggccattggcctctcccttctctntgtgagggatattttctctgacttgtcaaatccaacatcttcccaattcccttcaagatccaaattgaaacattccaaacctnncanttaaaaannaagaggttttctttgggggtcactttcctaaaataatattntgcttantttcttncataacctctgnnattcacctttgtatttggacccacccacattattgctaaatancctaatcttacctgcttggagntttgtcnagttatgnntnttcacctnggaaaaaccaaaagaaaaaaattggtttttaat

SEQ ID NO: 4431 - DNA, 607 bp, Homo sapiens
  misc_feature 7, 11, 14, 41, 90, 112, 129, 185, 239, 251, 299, 375, 390,401, 416, 442, 484, 492, 544, 596: n = A,T,C or G
ccctttngagnggngcgcccgggcaggtaccgcggggaggntgtgggagcggatggagctgctacagtcagcgcttggggctggcctcancttgtagacccgagccctgcanaacaaccccccgtggcngcatgagagcagaagaaagggggcctttatgcccttttgagggaagcacacattcntgcaaggcccgtggaaacaaagggagggaactgttttgttagccctcgtccagnaccgcccctaanacaaacaatggaggaagggaaagggcaaagttgaccttgtccaggagnccacttctgttcaaaaaaggggggaccttgaggtcccttcagggggcttgtttgaactccaaaagcctgacaaagncagggtgggcatttnttttctttcangagccaggggccaangtgttaaattcttgggacccaatggnggtggatttcttgaggaccaggacccaacccaaacttgaagngaagccanagtttacacccctgtttaaaccctgccttttcaaagggggaccgacttcttnttaagaattgcttttgcttacctttaatttcaaagttttgaccaccgaaatngcccccttttc

SEQ ID NO: 4432 - DNA, 256 bp, Homo sapiens
  misc_feature 35, 44, 93, 159, 228, 236, 246: n = A,T,C or G
ttctctttggtggcctcaagatgccaggatagaanttgaggtantgggatgccccaatagctattgacccagaccagttaacagaagccaccncatgaggaaaatgagctctactctctcctacttttggattttatcccatgcagtggccaccagatngaataggtgaggcacgtgtggattcacaaaagcattgagtttatatgtacctgcccgggcggccgctcnaagggctnaattccagcncactggcggc

SEQ ID NO: 4433 - DNA, 354 bp, Homo sapiens
cccttagcgtggtcgcggccgaggtacatttggcatgatctgggcctatgcggtcttacaatccctgtataaaactagacaatgaaaaacagaaaacaaaacaaacaaacaaaaaaacaagaacgaagcacctaccacatgccagctactgaggctatgaaggtattctccggccttagaaagcccaggattaatgcaggattgcgatatttaaacagaacatttccatacagcatgagtataaatgactttcccaagtttacactgagagtaactgacacagcaaccccagcaaagtctgagctgagtcctgaataattgtataaaaaggggagagaaacagagtgaagaaag

SEQ ID NO: 4434 - DNA, 350 bp, Homo sapiens
  misc_feature 342, 344: n = A,T,C or G
cccttagcgtggtcgcggccgaggtacagatcctggtctggcaagtccatgggtgggaacaagcactgtgctgagatgagctccaataacaactttttaacttggagcagcaacgaatgcaacaagcgccaacacttcctgtgcaagtactagcttcataaagtatggtgcctgcagtcttagatatatttatgtttatgtttaaatacagatatatttaaaaggctacaagcaacatctacccgctccttacagcctggtccagtgaggggtattccctcctctcaaagtccacctccaggcttcttgttctacttcaggtacctgcccgggccggcccgntngaaaaa

SEQ ID NO: 4435 - DNA, 400 bp, Homo sapiens
cccttagcgtggtcgcggccgaggtacagctctaatttcaaattttattgtttcgtatttcagtatttttaggggaggaaggagagtcgtgattgatgcatcccttttcttccttgttaaaagcaaaaagaacattactaccatgcaagtgactagggtgttatatggcgctgtggaataaaagttaagcctcctcccaccccagcaaaccagaatttctggcataaacataccttatagaacagatatatcaaatctactatgaaatatttagcattctggatatctttagaagtttattctagtcctgggctgtttatttcacacatatttaaataactaaaagagatatttataaattaaattatatttatggaacaattactttacacatattaat

SEQ ID NO: 4436 - DNA, 319 bp, Homo sapiens
ccctttcgagcggccgcccgggcaggtactttttttttttttttttttttttttcccctctatgccctacaagggagttcatcacttcagattattttaaagatgaatgtggaggcagagacattccaaagtgggagttagatagcaagtcagtggcaaggcccaggggtagagacctgggaagaccagctgcaatttgtgctgtttaatactagcagcctcgaagagagcagacccattacagctgcaggcttgttcaattattctaactttatctttaaatattgctagagcatctcataagctaaagtgctttaat

SEQ ID NO: 4437 - DNA, 453 bp, Homo sapiens
  misc_feature 383: n = A,T,C or G
ccctttcgagcggccgcccgggcaggtacatattatatgcaaggttacaaaaaaaaatcaatggttaatgattttttagctcaaccaagctaaaagatgtgaacaagaaattgaactcaaaacaacttaagatacaaagctcttgttactgataatgtctaataatattcatcaatttaccatatcttgttcttatattaaaatgttctatcattttcctaattattttaaagtcgattacaaaaatatatatatattcttgtagtgccagaaaattgaatacattaataaatggggtagaatagatgaatctcccatgaagaagaattccaaataatttatgaactctgccctcaaggatatggagcagaacttcctacttntctagtgtgagctgaatagtgacttccttccaaaaattaccatatgggaaagggggaaaataacttttgt

SEQ ID NO: 4438 - DNA, 213 bp, Homo sapiens
  misc_feature 12, 41, 65, 72, 104, 111, 123, 125, 162, 183, 188: n = A,T,C or G
agatatctgcanaattcgccctttgagcggccgcccgggcnggtacagtatatttatcagccganttttttnttatcgttccaaattacatttggggtttcggnatacgantttgaggctacnanccttttatgtttattgtagtagggccttagatttgcnccgaaaaggctagggtaatangtgtnttgtttaccttaccacttttatttt

SEQ ID NO: 4439 - DNA, 652 bp, Homo sapiens
  misc_feature 521, 617: n = A,T,C or G
ccctttcgagcggccgcccgggcaggtacctggaactacaggcacatatcactacagggggctatttattgtatttttagtaaacagtgttcatcatgttggccaggctggtcttgaactcctgacctcaaatgatctgcttgccttggcctcccaaagtgctgagaccacaggcgtgaaccactgcaccagaccagataggataatttagccctctataaaattgaaaattggagaccattttctcttagaacttcaaacattattttttgtcttctggcctctattgtgctattaaaaaatgtgttataattttaattgtaaacccattgtagatcattgttcccactttaactgattttaatatcttattctctttataagtatttaagtttcaatgatgtatctatattttaaacaacttataggatatttgcttatcctataagttttgataaaattcttaggtctatgacatctttgaataatcttgtcaaatcttatctattatctcattaganatttctgctttccattcttacttttggttggatacaactttcaataaaattatatattaacatttttccattctaactttcatttcacccatctcnttttcataataataattcaaattggccttcccttt

SEQ ID NO: 4440 - DNA, 582 bp, Homo sapiens
  misc_feature 274, 344, 487, 521, 538, 553, 567, 569: n = A,T,C or G
ccctttcgagcggccgcccgggcaggtactgtatttttaaattaaggagttttagttataatgaaattgatttgtagtctgttttgccgtaaacttgttttctttaaattgttcttacagtgatatcttactatttttaactgtctggggtttctgatatggggatttcagcccctggttaatcagtcttgtccctacaagtccctgatgcagtatgtttatttgtgatgtttaaagaacatttcttggctgggcgctgcggcttgcgcctgtnatctcagcactttgggaggctgaaggtgggtggatcacctgaggttgggaagttcgagaccagcctgacnaaacatagtgaaaccccgtctctactaaaaatacaaaaattagctgggccgtggtggtgggtgtctgtaatcccagctattcgggaggctgaggcaggaaaaatcgcttgaacccgggaggtggaggttgcaattgagctganatcctgccactgcactccagtctgggtggacagnagcaaggactccatctncaaaaaaataaaatnaatagaaagaaganangagagggaaaaaa

SEQ ID NO: 4441 - DNA, 354 bp, Homo sapiens
  misc_feature 31: n = A,T,C or G
ccctttcgagcggccgcccgggcaggtacantggatggaacccaaaaaggccacgttactcaaatgtttcagaacaaacttctcgattaaaaggaactctgatgaaattacagcttctttagaaatgaatgccagtgaaaatattattcatcaaagtccgcagggagcagccaggagcacacaggaaacacagccggaaatgcgcttacaaagacttggcgggcacgtgggctcacgcctggaatcctggcactttgggagactgaggcaggtggactgcttcagcccaggagttcagaccggcctaggcaacacaagcaagactccatccatctctacaaaaaattaaaaaag

SEQ ID NO: 4442 - DNA, 490 bp, Homo sapiens
ccctttcgagcggccgcccgggcaggtactgcttcttctcttcgttttcctccagcttccggatatggcgcaggacaggctgcagattcatatagaggcggtggctgttgctcagaagttgcaggaggtgtctggagcgcatggggcaccccgtgtagtatatgagcttccgggctgaaggcaagccatctggcaaaatctcaaatttcttacccacaaacaccaattttccaacatttgtccaggggaaatcataaagtaattgtttctcttcatctaaattctgaaaaatctgtattcccctcatggtcaatccaagagtcagcgatgcttcaatttcccttttatccttatacaatctgtagtaatgaacagcgacgtcatccagtcggacagcctctttgatatatttaagatgagcttcggaagctgttagtgcaaactgatctttgtgcatgtttggaatgtgcttcaagatgtaagtccttcc

SEQ ID NO: 4443 - DNA, 356 bp, Homo sapiens
  misc_feature 333: n = A,T,C or G
ccctttcgagcggccgcccgggcaggtactcgccccggattgataaattctggggtgcataaccattgatgaagaggctatccctgtccaggacatagaagcccagttgggtgacaccatgggtcaagcttgactcagctcccagtaaagctgctgtatgtccagcccggggcccacagggtcagggtggtaggtgcaggtggtgtccacaccagtggctgccccatccttctcaggcctgagggagatcagttggcaacccaagtagaaggggcccatgctgctcttctggaacaagggtctgagcaggtgctgaaggaccccctcggtggnagttgaatgtaacctgaagccct

SEQ ID NO: 4444 - DNA, 432 bp, Homo sapiens
cccttggccgcccgggcaggtactcgccccggattgataaattctggggtgcatagccattgatgaagaggccatccctgtccaggacatagaagcccagttgggtgacaccatgggtcagctgactcagctcccagtaaagctgctgtatgtccagcccggggcccacagggtcagggtggtaggtgcaggtggtgtccacaccagtggctgccccatccttctcaggcctgagggagatcagttggcaacccaagtagaaggggcccatgctgctcttctggaacaagggtcaggtgctgaaggaccccctcggtggagttgaatgtagctgagcccttgcccatatctggtgaatactggagattggagatggtgaagttgagtgtgagggtcttcaggtggtacctcggccgcgaccacgcttaaggg

SEQ ID NO: 4445 - DNA, 695 bp, Homo sapiens
  misc_feature 432, 518, 624, 653, 658: n = A,T,C or G
cttagggagtcgactcaagctctttctttctgttcaagaaaggtgatgcctatccctacatgcaccaaagattaaagttccaaggtccacaatgtaaggcagaattctccctgagtgctgtgaccccaaacattgggggtatctttacgtgctttggttctcaaagctcatctccttacctgttgtcacaccccagtgttcctgtggagatcaaagtttcaggactggcaaagtaccagaagtctttgatatgggtctccgtagtcttcttcctactgttctttgtcctcaccctcttctttttcctcagactctggcatcagaacaagcacaggaaaggagtacagacaaagattgacttgcaacatccagaaggagctgtagagccaaagagcattgttggacacctgcagaagagttccagaccagctnctgccatccaggaagaaatcttgtgtgagaaaagatggcctgggagggagataactgaggtctcagcatctgatgctactgtgaangtcacaaggtcttgcagacaatgtggagctaggcatactgagcccacatcagggatgacccctcatacacttgtatgcccaaggtgaaacctgctagactcagaanggcacagactacctcttctttcctgtttncaaanggaattacaggcacttcttaaccccagaccggaaaaa

SEQ ID NO: 4446 - DNA, 249 bp, Homo sapiens
  misc_feature 236: n = A,T,C or G
cccttagcgtggtcgcggccgaggtacagcacaggagcgaagacacaggtggcttgtctaatatcttgcattttcgtccttatagtcatctatgcaataggacctttgctttactggctgcccatgtgtgtccttgcaagcattattgttgtgggactgaagggaatgctaatacagttccgagatttaaaaaaatattggaatgtggataaaatcgattggggaatatgggtcantaagcagtggtaa

SEQ ID NO: 4447 - DNA, 220 bp, Homo sapiens
tcgccccgcgtccggaaattttgaagaatattagaaaatatctgaaactgaatgaaaataaaacacaacatatcaaaattagtgaaatagaaataaagtagtacttagtggtaagtttataattaatttacttacgttagaattaattacttttattcggaaagaataaaggtctcaagtcaacactttaagcttttgctttaagaaatctaaaaaaaaa

SEQ ID NO: 4448 - DNA, 641 bp, Homo sapiens
  misc_feature 15, 20, 28, 35, 36: n = A,T,C or G
tagggagtcgacccncgcgnctcggccngaccggnncgatggctcgctcggtgaccgtgatctttctggtgcttgtctctctggccgtcgtgcttgccattcagaaaactccccaaattcaagtgtactctcgccatccaccggagaatgggaagcccaacttcctcaactgctacgtgtctcagttccacccacctcagatagaaattgagctactgaagaatggaaagaagataccaaatatcgagatgtcagatctgtccttcagcaaggactggtctttctacatcctggctcacactgaattcacacccaccgagaccgatgtatatgcttgcagagttaaacaccgtcactctgaaggagcccaaaaccgtcacctgggaccgagacatgtaatcaagctctatggagctctgaatcatctggaccagtttaactccagatccggtttctaatatgctatacaatttatccacaaagtaaagaatagcaatgagcacaccatcttcttcatatcttaccttaaatattttatgcatgttttaaaaaaaattggagactaatatcctagatttcccggaataaataaaagcttcaatgagtgttttgatcaagaataattaaaaaaaaaaaaaaaa

SEQ ID NO: 4449 - DNA, 431 bp, Homo sapiens
ccctttcgagcggccgcccgggcaggtacgaatgcgatcactgtgggaaggccttcagcataggttccaacctgaatgtgcacgggcggatccacaccggggagaagccctacgaatgccttgtctgcgggaaagtcttcagcgaccactcatccctcaggagccacgtgaaaactcaccggagagagaagctctttgtgtcatccgtgtggaaaaggctccagtgagcgcgcctgctttagagacacaggatgattcagaccggaaacagacctcgtgggtgtaagaggaagcctctgtgagctcgcaccttactgggtgcaaaagaatccacggaacttgggagaagtccagttcctgtaaaaactgggaagacgaggcgttctcatcccataggaggtttgtgagaactcacgccgggggtgaaaatg

SEQ ID NO: 4450 - DNA, 309 bp, Homo sapiens
ccctttcgagcggccgcccgggcaggtactctgctgaaattccctatctatacaaaaatgtaattcaccttttctactggatccttaaacatatttataaaaaggattttacaatccttgtctgttagtttcaacatatggctcatctgtggatctgcttctattgactattttttccctcagtcttattttttctgcttcttcctgagtcttgtaactttttattttatgccagatgttgtgtgtaaaagtgtggcaataggtatatccagaaaaggacatgtcccttccgctgttaggctgctagga

SEQ ID NO: 4451 - DNA, 415 bp, Homo sapiens
ccctttcgagcggccgcccgggcaggtacgcgggcggaggttgcagtgagctgagatggagccattgcactccagcctggacaacagggcgagactccatctcaaaaagaaagaaaggaatgtccccacatctcctttgtgatgacagattatggaggaattgagggacatcctctgggaattaggggtgatgcttgctatctacactgagcattaccgaggccctgacaaggagcttttcactgcgggcatgagaaatgccatcttacagtaggcacactaccaatggtgtggcacactggcgtctatcttgagtcccttcataggaatcacttgaacctgggaggcggaggttgcagtgagccaagatcgtgccactgcactccagcctggaccacagagtgagactccgtct

SEQ ID NO: 4452 - DNA, 517 bp, Homo sapiens
  misc_feature 104, 108, 130, 149, 185, 199, 204, 220, 230, 232, 267, 269,275, 278, 282, 284, 304, 330, 343, 373, 401, 466, 472: n = A,T,C or G
ccctttcgagcggccgcccgggcaggtacctacacttggaataagacactgttctgaatttgtggcatagttttttttttcatattgacattaatagaggcttntatnggggttaggctaaaaatctttngtaaaaattttaaatgacnctgctgatttttatccgttaattatcagtttataanctaataaaaacttnggctngatattacattctagnggttaaattngncataaaaggaatatgtgctgagttacttatgtatngnaatctnganattncnattttttatttgaaaattanacaaagttggtttttaatttttattncattttaataatngagttcaaattaaatgggaaggctaaattngaattctgtttttctctcaaaatactgnttttctattatttaaaggcattccttggaggtctaaattgggcatttataggtgttgatgaaccncaccgnttaaagaatgatgactcccttctgtataaaactttaatagatttt

SEQ ID NO: 4453 - DNA, 302 bp, Homo sapiens
cccttagcgtggtcgcggccgaggtacgcgggaatcagaggattaaaaataataaaaaagcataaaggaagtccaagtgacttctgggacaccatcaaatgaaccaatttgtgtgtatggaagttccagaaggaggaaagtgagaggggcagaaagcatatttaaagacatactggctgaggccaggtgtagtggctcacacctgtaatcccagcactgtgggaggccaaagtggacggatcacatgaacacaggagttcgagaccagcctggccaacatggtaaaatcccgtctctactaa

SEQ ID NO: 4454 - DNA, 293 bp, Homo sapiens
  misc_feature 106, 108, 128, 135, 140, 142, 150, 151, 156, 164, 173, 176,181, 184, 190, 191, 218, 223, 249, 266, 270, 276, 280: n = A,T,C or G
ccctttcgagcggccgcccgggcaggtacttttttttttttttttttttttttttttctttttttttttttttttttttttttttttttttttttttttttttttntntatttttttttttttttttnaaaaaanttttntnaatttttnnttggnttttgggnaaaaaattnaanttttnaanaaaaannttttttttttaaaaaaaaaaaaaaaanggttnttgggggggatttttttttttttttnaaaaaccccaaaaaaanaaancccttntttnaaaaaaaaaaaaa

SEQ ID NO: 4455 - DNA, 274 bp, Homo sapiens
  misc_feature 265, 266: n = A,T,C or G
cccttagcgtggtcgcggccgaggtacagcacaggagcgaagacacaggtggcttgtctaatatcttgcattttcgtccttatagtcatctatgcaataggacctttgctttactggctgcccatgtgtgtccttgcaagcattattgttgtgggactgaagggaatgctaatacagttccgagatttaaaaaaatattggaatgtggataaaatcgattggggaatatgggtcagtaagcagtggtaacaacgcagagactttnntttttttt

SEQ ID NO: 4456 - DNA, 573 bp, Homo sapiens
  misc_feature 396: n = A,T,C or G
ccctttcgagcggccgcccgggcaggtaccacacagaactgtttcatcgtcctaactactactactttttgttattctttctcctcctcctcctgcttttctccgtctccccttctccttctccttctgctttcttcttcttttttttaggaaggtcttgttatattgcccaggctgctcttaaaatccctgactcaaacaactctctcacctcagcctcccaacatgctgagattataggtttgagctatcaagcctagcttgattataatcaatctctataactttctttttctacaatgccatataagtggatcatgtaatatgtaagccttttggatcttacttccttcactgaaggaaatgcatgtctgactcatgcatactgtggcgtanatcaataatttgttttttgttgttgttgacaactaggatgctattttatggatgcaccacagtttattcaactgctataaagcatctggtttatacccagctttttgcaattgaaaataaagttagcaatacacagccccaaaaaggtttgcatttcaaacattagttttcactttg

SEQ ID NO: 4457 - DNA, 453 bp, Homo sapiens
  misc_feature 410: n = A,T,C or G
ccctttcgagcggccgcccgggcaggtactacagttttgagactacctagtcaattttctttctgtagatatacaagatctatgaagatcagtgtttcctggctctcctcatccacctccctgtccaatatatttattctgttttcactggtgcctcctcctttgcataacctgtggacactagtcttttccaggtttctactctaaattatctttgcttttcttctatatcattctttttgagtaagttcatctactcctattcattcatttgcaaacttaacaaaactatttattgagtgtctacaatgtgctaacaccattctagatgctgggaatggggtggtaacaaaacaaagttctttccttcatggagcttatctgctaaaaggaagatagacaaataagtntataatataatttcagggggtaaaaaatggtatgaatggggct

SEQ ID NO: 4458 - DNA, 360 bp, Homo sapiens
ccctttcgagcggccgcccgggcaggtaccacctgaagaccctcacactcaacttcaccatctccaatctccagtattcaccagatatgggcaagggctcagctacattcaactccaccgagggggtccttcagcacctgctcagacccttgttccagaagagcagcatgggccccttctactcgggttgccaaccgatctccctcaggcctgagaaggatggggcagccactggtgtggacaccacctgcacctaccaccctgaccctgtgggccccgggctggacatacagcagctttactgggagctgagtcagctgacccatggtgtcacccaactgggcttctatgtcctggaca

SEQ ID NO: 4459 - DNA, 693 bp, Homo sapiens
  misc_feature 51, 78, 97, 103, 115, 120, 127, 135, 146, 168, 169, 179,207, 218, 224, 250, 285, 312, 319, 325, 348, 404, 405, 428,467, 478, 499, 520, 521, 528, 542, 550, 563, 570, 583, 588,607, 610, 611, 613, 614, 618, 632, 637, 647, 651, 653: n = A,T,C or G
  misc_feature 665, 668, 673, 681: n = A,T,C or G
cccttagcgtggtcgcggccgaggtactttttttttttttttttttttttngagacgaagtcttgctctgttgcccangctggactgcagtggcacnatttcngctcactgcaanctccncctcccngattcatnccattctcctncctcaacctcccaaataactannactacaagcncctaccaccacacccagctaattttttntatttttaatnaaaatngggtttcactgtattaaccaaaatantctcaatctcctaaccttataatccacccatcttnacctcccaaaaaccaaaaaataaaaanccttttnccaccncacccaatccctaaatatataantatttaactttcattttccttaataactaatatccttttatttttcccacataaanntttaaaaaaaaattttcccaacnttttcaaaaaaaacccttcttaaaaattttaaatttccnatttttttttnattcaaataaaaacaattttnaaaaaaaaatttacttttttnncccaatnttttaaattttttnataaaacntaaaaaactcaantgataancttttcactttanttaanattcattttttaacttttntcnncnnaaantttttttctttttncaaanccaccaaaantttncnttttttcccccnttnccttncccaaacnacccttttaaaa

SEQ ID NO: 4460 - DNA, 387 bp, Homo sapiens
  misc_feature 319: n = A,T,C or G
ccctttcgagcggccgcccgggcaggtactgtatttttaaattaaggagttttagttataatgaaattgatttgtagtctgttttgccgtaaacttgtttttctttaaattgttcttacagtgatatcttactatttttaactgtctggggtttctgatatggggatttcagcccctggttaatcaagtcttgtccctacaagtccctgatgcagtatgtttatttgtgatgtttaaagaacatttcttgggctgggcgctgcggcttgcgcctgtaatctcagcactttgggaggctgaggtgggtggatcacctgangttgggaagttcgaagaccagcctgacaaaacatagtgaaaccccgtctctactaaaaatacaaaaat

SEQ ID NO: 4461 - DNA, 334 bp, Homo sapiens
  misc_feature 306: n = A,T,C or G
cccttagcgtggtcgcggccgaggtaccctctctcactgtgggtcccctgtatttcttatctcccactcaagatcagtgtttctgaggctaaaatccaagcaagtgtggcctagaggtagggggctttcttcttctacccaccctccactcacagagtcatgctctacggtaggcatggcaggctgagaatacaggggtctctcctgctctcatttcagctcacagggcagaagttttgcaccagatgaggcaagccaagaccagaggctgctgtcactgtctagtccctagcttcagagcagtgngttagagatttttttcccaggggaagag

SEQ ID NO: 4462 - DNA, 640 bp, Homo sapiens
  misc_feature 539, 555, 582, 609, 623, 628: n = A,T,C or G
ccctttcgagcggccgcccgggcaggtacgcgggtcaaggaacagaaaattgtattttgagtttccttagagattccagaacattctgcagtaaataaacaagatcaagcttatgttttaaaaaattatcagagaattagaaaatgttactggaaagaaaaccattaaaaaagtgttagaaaataaaagaaaaaaagtctcaaaagatagagcaaaaaagtcaaaaaaaatgagaaaactctgagagaaacatcaaagagaaacatcgagatagagaggctagaattccatcatgtgactaatgccgaactttggaaagatcagaaaaaatagagacaagaaactagtcaaaaaactaattgacattatttcacaacatttaacaacaaatatcaaattgggagaacctgacaagttcctagaatgatggaaaaagtcctatttctaaacacattcatgaaatttcagacattaaagatacaaagatggtcttaaaggtgattggggaaaaaaatgccagtttatggataaagtgaacnggaatcagattggcantagaaaatgaagccgtgagacaaaganaaaattgtatattcttggccagccatnctaatctgggtaanggtanaccccaaagtaa

SEQ ID NO: 4463 - DNA, 288 bp, Homo sapiens
  misc_feature 141: n = A,T,C or G
cccttagcgtggtcgcggccgaggtactcctccttgggctgcagtaagcatgtcaggtgccacatggttctgcaggacaactgtgcgcagttgagcacgttgatctaataataacataagcccagaactactatcattaanagccttttctgtgtgcaagcttaagactttggtttgctgctggagtaagacagtgcctgcagcaggatagagtattgtgacaggataccaccaccatggggttcgacgcacttgcaaccagcgatatttataagtttctaaattact

SEQ ID NO: 4464 - DNA, 805 bp, Homo sapiens
  misc_feature 355, 492, 584, 622, 626, 642, 644, 711, 728, 734, 743, 754,767, 774, 780, 788: n = A,T,C or G
ccctttcgagcggccgcccgggcaggtacgcgggtcaaggtcaataactaatatttaacacatattcattcacagatatgaattgagaacaaaatagcaccagaaattttcaagaagtgaagaacaaatgtagagaagcataatgataacaaatagaaaaaaaaagatgccccaaaaaacagaactcaaggaacagaaaattgtattttgagtttccttagagattccagaacattctgcagtaaataaaacaagatcaagcttatgttttaaaaaattatcagagaattagaaaatgttactggaaagaaaaccattaaaaaagtgttagaaaataaaagaaaaaaagtctcanaagatagagcaaaaaagtcaaaaaaaatgagaaaactctgagagaaacatcaaagagaaacatcgagatagagaggctagaattccatcatgtgactaatgcgaactttggaaaggatcagaaaaaattgagaccangaaactagtccaaaaactaattgacattatttcacaacatttacaacaaatatcaaattgggagaacctggccaggttcctagaatgatggnaaaaggtctatttcttaaacccattcatgaaatttcanaacntttaagatccaagatngncttaaaggggattggggaaaaaaatgcccgtttttggataagtggaacgggaataagatggcatttnaaaatgaggccgggganaaaaanaaattgttnttttgcccagncatcctaatctgngtaaggnttactnccaagtanaaaaaaaaaaaaaaaaa

SEQ ID NO: 4465 - DNA, 704 bp, Homo sapiens
  misc_feature 44, 45, 46, 49, 66, 70, 72, 75, 79, 80, 81, 468, 508, 532,584, 599, 609, 618, 633, 664, 683, 690, 697: n = A,T,C or G
cccttagcgtggtcgcggccgaggtacgtttttctccacagagnnncanagacacctatacaaagncatntnttntctnnntctataactaatatttaacacatattcattcacagatatgaattgagaacaaaatagcaccagaaattttcaagaagtgaagaacaaatgtagagaagcataatgataacaaatagaaaaaaaaagatgccccaaaaaacagaactcaaggaacagaaaattgtattttgagtttccttagagattccagaacattctgcagtaaataaaaccaggatcaagcttatgttttaaaaaattatcagagaattagaaaatgttactggaaagaaaaccattaaaaaagtgttagaaaataaaagaaaaaaagtctcaaaagatagagcaaaaaagtcaaaaaaaatgagaaaactctgagagaaacatcaaagaagaaacatcgagatnggagaggctagaattccatctgtgacttatggcgaccttnggaaggatcagaaaaaattggggncagaaacttgtccaaaactaattgcattatttcacaccttttaccaccaatnttcaattgggggaanccggccagtncttgaatgnttggaagaagtcctntttcttaacaccttcatgaaatttcagaacntttaagattccaaagtggncttaaanggggttnggggaaa

SEQ ID NO: 4466 - DNA, 336 bp, Homo sapiens
  misc_feature 97: n = A,T,C or G
cccttagcgtggtcgcggccgaggtacaacatggatgcatgaaattttagacatgattctaaatgatggtgatgtggagaaatgcaaaagagcccanactctagatagacacgctttccttgaactgaaatttccccataaagaaaaaccagatttggagttcgttcttgaaatgtcctcaccacaactgataaaaacacatctcccttcacatctgattccaccatctatctggaaagaaaactgcaagattgtctatgtggccagaaatcccaagggattgcctggtgtcctactaccactttccaggatggcttcctttatgcctggatcctc

SEQ ID NO: 4467 - DNA, 427 bp, Homo sapiens
  misc_feature 333: n = A,T,C or G
cccttagcgtggtcgcggccgaggtacgtttttctccacagagcaacaaagacacctatacaaagtcataggagatcaaggtcaataactaatatttaacacatattcattcacagatatgaattgagaacaaaatagcaccagaaattttcaagaagtgaagaacaaatgtagagaagcataatgataacaaatagaaaaaaaaagatgccccaaaaaacagaactcaaggaacagaaaattgtattttgagtttccttagagattccagaacattctgcagtaaataaaacaagatcaaggcttatgttttaaaaaaatttcagagaattngaaaatgtttctggaaagaaaaccattaaaaaagtgttagaaaataaaagaaaaaaagtctcaaaagatagagcaaaaaagtcaaaaaaaatga

SEQ ID NO: 4468 - DNA, 323 bp, Homo sapiens
  misc_feature 11, 12, 260: n = A,T,C or G
cccttagcgtnntcgcggccgaggtaccgcagtatggttggccatgggattatccttcattacatcaaatgaggtatggtggacaatcttgtttataacatcacctgaccaagttttctccaagaattccaacaccttgtggatctcatgttttggattttttttaatatcctcgtagaagaggtagaggatccggtgcatgtcttttgcagcccaccatcctttcacatggtcaaaccaggacccgccaacaacttttncgggacatgaatttctcataaaattcctctaagttctgaggatcaggcataaaggaagccatc

SEQ ID NO: 4469 - DNA, 303 bp, Homo sapiens
ccctttcgagcggcccgcccgggcaggtacgaaatatcgtatcaggaattgttaaattttatcagctgcttttccagcatcagatggtatatttgactttttgatcaatatcaataagcatattaattttattatattaatagatttcccagtattgaatcaccctgcattcttgggttaaatactatttgcctgtggtaggttgttgaatgaatatgatcttatagtatttgtttatacaatcatatatatgagacaatgaatatttatgctcatgtacctcggccgcgaccacgctaaggg

SEQ ID NO: 4470 - DNA, 177 bp, Homo sapiens
  misc_feature 142, 147, 156: n = A,T,C or G
cccttagcgtggtcgcggccgaggtacttgaaatgtgggtatgggcagctgaggaacttaactcaatgttttaattttattaatttgaatttagccacatatggctagccagtggttaccatattggacagaacagatgtanactantagagtgtnagtttcagtcatttgaaccat

SEQ ID NO: 4471 - DNA, 382 bp, Homo sapiens
  misc_feature 370: n = A,T,C or G
ccctttcgagcggccgcccgggcaggtactttttgttcggctgtttattgttggaagtttgagttgggatcttctgtagcatcctgcctgagatatatgagaggaaatacggaaaaacagggaactcattgccatgccattcttcaaatctaaaggtccctaggaagcccaccttctttttctacttttctgagacttcctatacttgtttgtttcgttatatatggtttttgttatttctggttttgttatacctcttcaggtaaaagagggaggacacgggaggaaggggatactccatcttggcacaactagaagtctctaagttgcttttttgtaaatataaaactctcaaataagagaaataatnaatggtggaaat

SEQ ID NO: 4472 - DNA, 486 bp, Homo sapiens
  misc_feature 31, 98, 159, 166, 289, 348, 361, 364, 385, 393, 398, 400,403, 410, 414, 419, 432, 457, 467: n = A,T,C or G
cccttagcgtggtcgcggccgaggtacttanaacagtgcctggcctgaagtaagcattcagtaaaaattaccaattgtttattattattttaaggcanaaacatgggcagataattttataatcttggggcagagaaggcctttctaagcataactctnaacctantgaccacaaaagaaaagattaattatttgatttcataaaaactaaaagcttttacatggcaaaatctccatgataagaatcaatgaacaaatacccaagtgggggagaataattgcaatatgnttgacagaaggaggattgatatcattaatatttagggatcactgaataagtcaaccagnaaaagagatgagnatnaaattcagtttgaacagaatntttttcanaaaanantanaaaacanaaangttcnattgaggagccangttttcaaccttttttttggggcanaagaaaatgntattgattaaacccttttt

SEQ ID NO: 4473 - DNA, 410 bp, Homo sapiens
cccttagcgtggtcgcggccgaggtactaatttttttttttttttttttgtagagacagggtttcctcatgttggccaggatgttctccagctcctggcctcaaattacctgcccgtctcagtctcccaaagtgctgggattacaggtgtgaaccactgtgcccggtccagtccaggagcaagttctaaccaggatcaggggtcaaggtctgggtttgtccattatcataggctaagtcagggtcagggttcagccagggatcagggctcagttcaggattggggctcagccagggtcagggctcatcttggagtcagagctgagcctggggtcaggcatcagtctaggttggaggttgggattgggacctgggggtcttggtccaggattggaggctgtgtctgggatt

SEQ ID NO: 4474 - DNA, 372 bp, Homo sapiens
cccttagcgtggtcgcggccgaggtactttgtagagattgacttcctaagctacttaagacaacctgcaccactaagaaaaaaatgtagaaccatttggaaaaatgaaatttagtagttccaagtttcaaagaaaatgtcaacattttattccattcaataaagaacaaaaccaatagtgtttttattactttcatctgaaacattccatgttttaatctgagccttgcagactttcatttggagtttgaacccgttttggttgcatttcatttttggagaacttaattaacgtgagattgggcaattgaaatgccaggtgcagttttctgttaatgtcatgctgttgtttaggtaataagaaaatattaag

SEQ ID NO: 4475 - DNA, 296 bp, Homo sapiens
  misc_feature 122, 191, 198, 205, 234, 284: n = A,T,C or G
cccttagcgtggtcgcggccgaggtacttttttttttttttttttttttttcctgtagtttattcaaagttgaaaaaaaaacattcattattctttaatattacatgaaaatcttgttcaanagtgaaaagcccaaatttttatccttgcattattgccatttactactggttttcttctgacccagtcanatgtaanaggcctntaactggatccaagccacttaattaccanatctaatttgattctggacccagttcagtttttggcatgacttccaaacncagttttggatt

SEQ ID NO: 4476 - DNA, 219 bp, Homo sapiens
  misc_feature 160, 171, 205: n = A,T,C or G
ccctttcgagcggccgcccgggcaggtactttttttttttttttttttttattaagagaaagcttgtttctaagatccttttgggagcaaaggcaagtaagtattcattaaatgtttaccttcttgactttaattcacttcagcagatgataactcaggngggattatgtnatgacagtgatctgacaaggtccttgttcagggnagttactgactttt

SEQ ID NO: 4477 - DNA, 147 bp, Homo sapiens
  misc_feature 83, 94, 135, 136: n = A,T,C or G
cccttagcggccgcccgggcaggtacttttttttttttttttttttttgctagtttagtgtttgcatttattttaaaaatacncaaaatagaantttttacatcaaagtgtgataacctcacttacacattgttnncatacttacct

SEQ ID NO: 4478 - DNA, 499 bp, Homo sapiens
cccttagcgtggtcgcggccgaggtaccagcctgatctctcttttccccacatttacaaacgccacagtgaagaactttgttgcaaacacatgcaggctgtgaaaagaactctgtgcctaaagtcctttcatttctttgctggagtttttttgaggcagattctagaattgctgagtcaaagggcaaatgccatgtagttttgttagacgctgccaaatcctcttccatgaggctgcaatattctgcattccatagtgacgtatgagagtccttgtatcccacagcttcataaacaaagcatgacggcacatctgcacgtttaccaatcacacaggtgagaaatcttatcctagcttcacctttgtttttggtttgcatttttgtgaccagcttttttatggtataatgcacagaaggtaatgaacacattctacccacaagcttcttcctgtgcctttggaatctgctcctaccagtctgcaggcaaccacggatctg

SEQ ID NO: 4479 - DNA, 725 bp, Homo sapiens
  misc_feature 398, 497, 512, 547, 554, 556, 566, 589, 617, 660, 661, 677,684, 691, 698, 701, 713, 721: n = A,T,C or G
cccttcgagcggccgcccgggcaggtaccttgttggatgatggatatttttgtatccctataaatatccttgatctttgttctgggacacaggtatttggaaacaggtttgatccttcccaggcttgcttttcagctttgttaggctgggaccacggaaacatttagtcaaatgccagttttgctccactattgagacaaactcctgaatactttatccgatgccccatgaataatattttccactttggttgaaggaaacaggaaatattcccagccctgtgtaaaccataggaattgttccttgtaatcactttgagtggtcctttctctggtcttcagtaatttcctcacagccatgcacttattagctgaagactgaagagggccactccgcangtctttcggcgagctttctctcttgcagctctctgctcaccagccctgaccctggtaaactccagctaccttggtgtctcagaattccatttccatctnctcaacttacaagangctgcccgggctgtgtttgggttcccccctccctntgcttgnancctggaaaanattttccaggaaaccgactgggnaaatgcccagggctcattaacatttatnttttcaaaagagcccttggccttaattaccctggaccccccanngtttttgggaaactgnttggttncatatanttttaancangggggggttaanttggtttngggg

SEQ ID NO: 4480 - DNA, 499 bp, Homo sapiens
gatatctgcagaattcgcccttggccgcccgggcaggtacacagaaaggcagaagttgaaattagtttgaagactacattgtatattacacaatatacattgcttaagcatcagcaacgtgaagcaacatcaatgccgtttctggatggttacagcagttatgtcaaaattagatttttaaaagtaaaaaggcaaagaaatttgccacatatttaataattactcttgggaatgactgcaaattagagatgttaggtattattgattcatttattctttagcaaatgtgtattgaacacatactatgtatcaggcaaatggatatcacctcccctactatggaagaataacagtaatcagataattaaaaattatatactccagggtggcagaatgacaatcagtaatcaaaattattacaaattatatactacaaggaaaacaaagaaataaagggaattaatggaggatttaccctaggggtggttagaaaagggtt

SEQ ID NO: 4481 - DNA, 709 bp, Homo sapiens
  misc_feature 465, 483, 512, 556, 569, 601, 646, 651, 653, 658, 674, 678,685: n = A,T,C or G
cccttagcgtggtcgcggccgaggtacagtgacacaatcacaattcactgcagccttgacctgctggactcaagtcatcctcccacctcagcctcccaagttgctagggacaggcatgtgccaccacgcacagctaatttttaaaatttttctgtagagattaggtctcactatgttgcccaggctgctctcaaaactcctgagctcaagggatcttcccaccttggcctctcaaaatgctaagattacaggatgagccactgtgcctggcatgcttttggtttttttcttgcaatttaacaaagtggtgtcccatatatttaagtatcaaatgtataactgaattttcttgcttttcagggatctcaagggtatttccctttgcccacctcaccttttcatatttggtaaactggtatgcatttgccttcagcccaagattataaatatgaactggattatganctgcatgttctctctttnggttcaagcaattttccttacagaaaaancacccggtgggaagtcatggggtaaaatatggtggttggaattnggtaacttccctnttgggagaaatttctttgtgaaattaccacancaaataaggggaacctcaatttaaactgggaaaacataaatcttnatttngnaaagnggggggcccatttttntaanatttttntttttggataacccttcccctttt

SEQ ID NO: 4482 - DNA, 377 bp, Homo sapiens
ccctttcgagcggccgcccgggcaggtacctcagccagcagaacatcgctgggacgtgcctggcctaaggcatcctaccaacagcaccatcaaggcacgttggagctttcttgccagaactgatctcttttggtgtgggaggacatggggtacccattatcttagaaaatctagtttaaactgttttctttcaccgcaaaagaattaaatgggaaaatcatttgtttatctctaagttatactaattagtagaaccaaacaaattatcttcttttaaaaaataaatcttataggaaaatagacagtccaaagtcatgtctttgaacagtggattggaatctgtgccagtaatgacaaaattatttttttgacttgct

SEQ ID NO: 4483 - DNA, 382 bp, Homo sapiens
  misc_feature 44, 173, 224, 230, 271, 275, 285, 292, 301, 302, 307, 319,348: n = A,T,C or G
cccttagcgtggtcgcggccgaggtacttttttttttttttttnttttttttgaaagagataggggtctcattatgttgccccagctggagtgcagtggctacacacagggacaatcatggcccgatcattgcttcaggctcctgggctcaagcaatgctcctgcctcagtgncctgagtagctgggactacaggtgcatgccaccacgcctggcttatttttnattttncttttcgtgtggctgggaatattacaacagagacgttgggnagtncagcaaacanatggttnttaaactgnncaatnaaaatgcaacanaaaagggcttcctttcaatcaaaggaatnaagggatgctttgcttttaaagggggccattcaa

SEQ ID NO: 4484 - DNA, 368 bp, Homo sapiens
  misc_feature 54, 126, 153, 252, 280, 307, 345, 346, 358: n = A,T,C or G
ccctttcgagcggccgcccgggcaggtacttttttttttttttttttttttttnactagcacaaatggcattttattaaagaaaatctaatttacaaagctttgtaaattttaagaaaaacatttnttgatcataaaccaaaaaattttcaantttgcaatattcaaatttacaaggaaaaataagccccaaacttttaaacagtgcaggttattgctgcactcctttaattccttatccaaagcccaaaanaatgtaggacaaacccctaaaaatgttnccagaagcatttcccccacacttggtntccaaaatctagttttgtgcaaaaaatgtttccacctnnatttatagagtnccccggggga

SEQ ID NO: 4485 - DNA, 336 bp, Homo sapiens
  misc_feature 193, 231, 283, 295, 315: n = A,T,C or G
cccttagcgtggtcgcggccgaggtacttttttttctttttttttttttttttggtatttttagtagagacggggtttcactgtgttagccacgatggtctcgatctcctgacctcgtgatctgccgcctcagcctcccaaagtgctgggattacaggcgtgagccaccgcgcccggcccgacttctctttantcaggtgggtatatatgccactaattttgtttgattgngtttttcccttgatttcattttgttttggccaagtaatatcctattgattgnatgattatcacncaatttgatatccatttttntgaatgggagacaggttttac

SEQ ID NO: 4486 - DNA, 779 bp, Homo sapiens
  misc_feature 13, 15, 39, 75, 86, 92, 116, 124, 140, 201, 217, 253, 339,393, 443, 490, 492, 493, 512, 549, 562, 566, 597, 602, 642,654, 656, 658, 666, 670, 693, 701, 703, 715, 723, 727, 728,733, 739, 753, 760, 764, 766, 770: n = A,T,C or G
cccttagcgtggncncggccgacgtacatatcagaaacnggatctaactcacaatattattataaagcatactgnttacataattnactaantaggtaaattatctaattcattanacttgctnggaatctttttctagntacactcctatgtattccaaaagctacctaatactctattaccctccccctacaaactacngaaaaactcaagtcancaactgagggtgtaacgtgcctccccggttcaagcnattcttgtgtctcagcctcctgaatagccaagactacaggcacacgccatcacacctggcttatttttaccttttttttgtagagncagggttttgccatgttggccaggctcgtcttaaactcctgacctcaaatgatncacccgccttggcctctcaaagtgctgggattacaggcgtgagccaccgngcctggccaaataaagtatttttaacatacaagttaagcattctagntnnattccaaagtaaatacagngtgctcaacaaacatattcttgggttccaggacagantcaaccaacctanattnaaaaatttaaatcaaaaatttaaaaccggtnaaaanacagtggaccaaggttttgaatggctcacaccctgtaatnccaaacactttngngnaggccaanggcnaggacaaatttggaccttggganggtaaaangngcaaggagcctnaaaccatncttnncgcanttccanccttggggaaaaanaaaaatntggncncaanaaaaaaaaa

SEQ ID NO: 4487 - DNA, 537 bp, Homo sapiens
  misc_feature 66, 67, 92, 149, 248, 257, 258, 298, 303, 370, 378, 391,410, 435, 447, 451, 465, 477, 490, 501, 528: n = A,T,C or G
cccttagcgtggtcgcggccgaggtactttttttttttttttttttttttttttgagatggagttnngctcttgtcacctgggctatggagngcaatgccacgatcttggctcactgcaagctccacctccccggttcaagtgattctnctgcctcagccccccaaatagctggaattagaggtgcccgccaccacgtttggctaatttttgtatttttagtagagacaaggttcgtcatgttggcangctggtttnnaactcctgaccttagggtgatccacctgccttggcctctnaaagngctgggattacaggcatgagccactgtgcccgggcgaagtttaaagttttaattcacagggatgctnaaaagcangcttgggtaaggngttttcttttctttaaaanaaaattcatttttcaatcccttttnttttgggaaatntaanggggttgcttttcnatttacagattngaccaaaaaaacntataggtgtcnttctggtttttttgattgggaagaacnttttttttt

SEQ ID NO: 4488 - DNA, 307 bp, Homo sapiens
ccctttcgagcggccgcccgggcaggtaccaagaaaaataaagaagaggctgcagaatatgctaaacttttggccaagagaatgaaggaggctaaggagaagcgccaggaacaaattgcgaagagacgcagactttcctctctgcgagcttctacttctaagtctgaatccagtcagaaataagattttttgagtaacaaataaataagatcagactctaaaaaaaaaaaaaaaaaaaaaaaaaaaaaaggtccgcgggatcgccagagtccctgaactctcgctttctttttaatcccctgcatcg

SEQ ID NO: 4489 - DNA, 121 bp, Homo sapiens
cccttagcgtggtcgcggccgaggtaccatttaactggtatataaccatcgggggcattccactggtaaaagaaagaatgcctcaaatgagcatgcatacaactccagtaaacacactgct

SEQ ID NO: 4490 - DNA, 130 bp, Homo sapiens
  misc_feature 81: n = A,T,C or G
cccttagcgtggtcgcggccgaggtacattgcatgttctgacaaggtttcatttatttcatttagatgatttctgctgttntcacaggtaacctcctttctcactgccagtgtcccagttatatctatct

SEQ ID NO: 4491 - DNA, 446 bp, Homo sapiens
cccttagcgtggtcgcggccgaggtactttgggagcccaaggcaggagatcacttgagctcaggggttcaagaccagcctagtaacatagtgagacctcgtctctactaaaaatttaaaaaatcaggtgtggtggtggacgcctgtagtccctacttgggaggctgaagtaggaggactgcttgaacccaggagatggaggctacagtgagttatgatggcgccattgcactccagcttgagactgtttcaaaaaaaaaagctaggtaagagtaataggttaaagtgatcccactggccctcccccatccttatttttaactttgaaagttattagaaatacctcaggaaagctttcttgaaaggttatgtgtgaagtctttccctctagactagtggttctcaatacctatgccggtatcagaattacctggggaagcttaaaaa

SEQ ID NO: 4492 - DNA, 314 bp, Homo sapiens
  misc_feature 258, 266, 275, 277, 281: n = A,T,C or G
ccctttcgagcggccgcccgggcaggtactggcacaggactccccagaataatggaatagaataggtagtctagaactagactcagttacatgtagaaatttgtatatggtaaagtagtatcttaaataggtagggaaaagatgggccattcagtataagtttgggggacatataataggtatttggaaaaaaatttagatacataccttacaccttacagcaggatacgttgcaaatggattaaaattttaagtganaaaaaaanaaaaaaaananggtncctcggccgcgaccacgctaagggcgaattcca

SEQ ID NO: 4493 - DNA, 390 bp, Homo sapiens
  misc_feature 337, 338, 341, 343: n = A,T,C or G
cccttggccgcccgggcaggtacacattagcctcccagaaatggttcttaaccagagtgagctgactgtggacatagaattcagaagttggatgacaaggaagctcagtgagaatgaggagaaagttgaaacataatccaaggaatccaataaaacaattcagtagctgaaagataaaatatccattttaagaaagaaccaaattaaatttttggaactgaaaaatttacttccagatctccacaatagaatctgaagcatcagcagcagaaaaattaagatgaagaaagaatctctgagctggaagaccagcttatacaatcaactcagtcagacnnaananaaaaaaaaaaaaaaaaaaaggtacctcggccgcgaccacgctaaggg

SEQ ID NO: 4494 - DNA, 419 bp, Homo sapiens
  misc_feature 397: n = A,T,C or G
cccttgagcggccgcccgggcaggtacctgcctctcagaggtattttaattgatatgtagttaatgaaggacgtggtgatgttcttagaaattgctgtgaaatgtgaattaaagaatgatcaacgggactagtgggcacagcttgtcaggcatgtttttaattagcatttatgtaactttcctatttctgggcatccttgggaagacacatttaatttaagaaattaaaaaggaagatttatttttccaaaacgcttcctgaccttcacagaataaaaaccaatgaacccgagcttcggagacgacagactgtcgggaattgtaaagatgatttgggcagcgcattgtttggcgggaggagctcagccttccactaacagaaaagtctacgtcagtntttacttagaaaatttatttta

SEQ ID NO: 4495 - DNA, 391 bp, Homo sapiens
  misc_feature 281: n = A,T,C or G
ccctttcgagcggccgcccgggcaggtactaattttcttttgatgttgtatcaaattaccacacacttcatgatttaaaatagtgtggatgtattatcttacaattttgtatgttagaaacccaacacaggtctctcagtagggtaaaatcaagatgtcagcaaggctgtgcttctttctggaagctttaggggagaattcattcccttggcttttccattttatataaactgcccacattcctcggctcatgggcccagtgggaaatgctgggaagagtncttctcatgctgtcgttccctgtttttctcttccaagtttctcttttttacttttaaggactcttgtaattacaacaggtccactggaaatactccaggataatctcatt

SEQ ID NO: 4496 - DNA, 270 bp, Homo sapiens
  misc_feature 23, 34, 52, 125, 198, 200, 232: n = A,T,C or G
cccttagcgtggtcgcggccgangtacattcggnctgagggccaggacagtnctttctcctggacggacctgctgctgaagaataattctgagctgcttaacaacctgggcaacttcatcaacangagctgggatgtttgtgtctaaagttcttttgggggctatgtgcctgagatggtgctcacccctgatgatcancngcctgctggcccatgtcaccctgggagctccngcactatcaccagctacttgagaaggttcggatcccgg

SEQ ID NO: 4497 - DNA, 356 bp, Homo sapiens
ccctttcgagcggccgcccgggcaggtacaactatacataacaacaaacttggaagaaatcagaagaataaaaaaaagactgacagtttggaccacacatacatgcacaaaatgaaaaataataacttctattagtaaaaaaaaaaaacctcactgttataaaaagggaaatggcaaattgaaaaaggatactggtgagattataaaagattaatatcagttctcacttcttataagccaataaaataaaaattaaacaaaagagagggaccaaggataaaaataaaggtaaataacaaaaggagatacaaatggttaatgagtatggaaaatgtctaaatcccatagaaataaaa

SEQ ID NO: 4498 - DNA, 269 bp, Homo sapiens
  misc_feature 57, 255: n = A,T,C or G
cccttcgagcggccgcccgggcaggtacaaaccctgcctggaaccgcagccctgctntcagaatcaaattcctgaaagtgggcaagcggaagcggaaataagccctctcccaacgccagctgactcgatttcgtctcggtcttccccagagctggacacgaggcaccatgatcagagagacacattccctgcggacggcgctcccatcggatactggagggacgcgacactagaggcaggcagtacctcggccgngaccacgctaaggg

SEQ ID NO: 4499 - DNA, 400 bp, Homo sapiens
cccttagcggccgcccggcaggtacagaaagatctggaagaaggcctggcagtgaatccaaggactctgggcccccaacaatagatggtagccgtaagtctggagcagcggtgtttcaccaccaaatgcctttccaggctgcccttccaacactcaggagagcatccagatccctgggcagaggctctacattcttggctttagaggtggtgggcagcggcagcaggtcagagccacttctggcggtttccctcccctttttagtgcccataagtttttttggatcctccctttgagttttaccagcacaagccattctttgcccctgttcacataacttgagctcaagctcttgccaaacccaacaagcaagatggttgcaacctggcaacattgaatc

SEQ ID NO: 4500 - DNA, 582 bp, Homo sapiens
  misc_feature 533, 559: n = A,T,C or G
cccttagcgtggtcgcggccgaggtactacacattatcaatcccaaactgattttatgactcttgtcatagaaacccccaaaacatcagggagggtaagatattccaaatggaccaatcacaaaaaggattcctgtgattcaactatccaatacttatggctatcaatttagtctggcttggggctgttttttacagggaggtggcctcccatggcgcacaatgtgtttttctaagctatccagaatggccacagcaatctgttggacatggggatcagtatgttcatgatctttgatgttgtataaatgctgcaatcctccttcttcaatcagcatgctgcaataccttgaagctgaaaaagaaaaaaaaacacacacaaaacaggagaaatagcttttcttaaaacacttgaaaattattcccaaaaaaatgacttctaggagccatttttttttagctggtttgttattgatcactaacatgcttcagcttggtaaaataacctctattcttgatgttacgtctaccagngcaagggccttacacatttcaattcnataaaattagcttagcttggatt

SEQ ID NO: 4501 - DNA, 228 bp, Homo sapiens
  misc_feature 7, 8, 17, 30, 48, 72, 86, 95, 125, 150, 153, 163, 170: n = A,T,C or G
cccttannagcggccgnccgggcaggttcnaggatattgttcaccccntcaacggaaagtgaaaaaacagcnacccctggaacctnatttcattntgagggacactggtcaccgcccagtggcangtaaagagagcagccaccagccaancgnaaaaggaatncaatgcnggaggcgggaattttcttaagagagaagaagggccttccctttgctgtaggtggagtc

SEQ ID NO: 4502 - DNA, 660 bp, Homo sapiens
  misc_feature 547, 621, 626, 650: n = A,T,C or G
cccttagcgtggtcgcggccgaggtacattctattcacaaagttggggcaaggtgtggtggctcctgcctataatcccagcactttgggaggctgaggtgggagaatcacttgaggccaggagttcgagaacagcttgggcaacatcatgagaccttatctcatttttttaaaagtgggcaatgataaataaaatgatactgaaatttttgaacacttcatatttcatatacgtttacaaacctgttataattggctaccaaaatcttcacatttttatccccttccagtctctacttactccttgtattttagagcatctgggttttttggttttggttttgggatttttttttttttttttttttttggtcattaccctatcatgctcttgtccttgaattttttctcaatttccttattatctccaaaaatatctgcagcacattgataaagggaatggtatagatagacaataggggaaaacatcccacaaaatattctagcaatactaaattcttatctgcaagttttctctggctgaaaanttaggtggaaaaagaaagggggtgaaaaaaaaagccaaaattcccctttcttcatgccttgaaaaaccctgggnggggncccttatttaaggagaccccgtcnaggaaaaaat

SEQ ID NO: 4503 - DNA, 521 bp, Homo sapiens
ccctttcgagcggccgcccgggcaggtacgcgggactgacactataggtcacatataggaaaaagtatttccctacaaaggctgcttcctaaaattgaaagaagcaactgtttcaccggaggcacagattttaatgttgtgacacaagaaacatgaaaaagcaaggaaacaacaccccaaaagaacacaataattcctcagtagtagaccctaaagaaaataattatgaaatgcttaaaagaaattcaaaataataatcttaagaaaactcagcaagatataagagagtatagatagataattcactgaaatcaggaacacaattcattatctgaatgagattcaacagagatagatataaaaggaaacaaacagaaatcttggagctgaataattcaatgaatgaaattttaaaatataatagtgatcttcaacaatagtctaagatcaagaagaaaaatttctgaccttgaaggcaagtattctaaaatactccagtagtcaaaaaaaaaaaaaaaaaa

SEQ ID NO: 4504 - DNA, 272 bp, Homo sapiens
  misc_feature 9, 35, 114, 119, 123, 129, 272: n = A,T,C or G
cccttagcntggtcgcggccgaggtacgcggggtnttaattcttacatgcaggaacactcagcagacacacgtatgcgaagggccagagaaaccagacccaaaaaaaaaaaaanaaatngaangaggtncgcggggggccttatatatcaagagcaccataggcaagccccagcgcctatattaaggcacatttgaataaattctattaccagttcaaaaaaaaaaaaaaaaaaaaaaagtacctgcccgggcggccgctcgaaagggcaan

SEQ ID NO: 4505 - DNA, 274 bp, Homo sapiens
  misc_feature 103, 107, 111, 114, 128, 129, 136, 147, 154, 156, 160, 165,168, 169, 170, 180, 181, 183, 185, 187, 193, 208, 209, 214,218, 220, 223, 224, 239, 245, 250, 251, 253, 256, 257, 259: n = A,T,C or G
ccctttcgagcggccgcccgggcaggtactttttttttttttttttttttttttttttattttttttttttttttttttttttttttttttttttccttcatntttnactnggncaaaatttttcctnntaaattnccccaaaaagnttttttncnaaanaaaanttnnnttattcaacnntngngngggtcncccctttaagggggnnccccncccnanggnnaaaataaagcccatncttttnggccnncncannanccagggaaagcccgg

SEQ ID NO: 4506 - DNA, 438 bp, Homo sapiens
cccttagcgtggtcgcggccgaggtactttcccacaccagcctagagacttctgcttattttctgccgcatcctcagttcccagctctgtaggtgttcacaagcatgaattcaacactgtgcgaaagaactgaagctcacgtagtccacaacttcccccagtgtggggtgtgtgccaccagtgctacacaaagtgttaggtggtgtgcaaacattttgtattttaatagttatacacttgttttaatgtgaattagaaaaaatataagaaagacaacaaaggtgttatagatactaataattaggacaagttgaaaggtttaaaaaaataccgttactaagtaaatgatggtatagagatcatttaagcatggcaaatgtaataaaaatgacacacacacaacagtttaagtaaaactgactcaatggcaaagaaaaa

SEQ ID NO: 4507 - DNA, 406 bp, Homo sapiens
  misc_feature 216, 308, 309, 360: n = A,T,C or G
ccctttcgagcggccgcccgggcaggtacgcggggacgcactgcggccgcgtagcgccgcgggtttgatgaacgcggttcccggggagactgtatgatttttcaaatttttatcaagtctaaagtataaagagaagaactctaacctccccaggtgatttggatatctactctggagataaagttggttcatcgttaaaatattctgatgaaagcnaagcattgtagaacaccattgggcagcttattcaagcacgtaaatgtgaattgatgatgaactggattctttccattgattttgaagaaacnnggaaacagaagaaagaagttaattgaaaatgattatagaagttagtacctnctgtgtggaaaggtccctggatttttcctaacacccaccctcttcc

SEQ ID NO: 4508 - DNA, 329 bp, Homo sapiens
  misc_feature 277, 280, 288: n = A,T,C or G
cccttagcgtggtcgcggccgaggtactgccgtagccgctcctcccgcagctgtgccgcctccttgtcctcctcctcattgtcactgcaaacaggtcaatgtcatcatcctcgtcatcctctgctggtgtggctggcttcttggctggggcccgtgggctacggtatccggaagctacagattcagtgtgtggtggagggcgacaaggtggggacagacttgctggaggaggagatcaccaagtttgaggagcacgtgcagagtgtcgatatcgcanctntcaacaangatctgaagcctgagtgtgtgtacctgcccgggcggccgtt

SEQ ID NO: 4509 - DNA, 533 bp, Homo sapiens
  misc_feature 447, 485, 522: n = A,T,C or G
ccctttgagcggcccgcccgggcaggtacattgttttttagtttttattatttttcagcaatttgggttaaaacctgaattgtatcctggctcaacaaatctctaaaaaaggaccagctttttaattttattcatgatgtttttagttgactgccccaagggaatttttttttttacttctgaaatacaaatttgctttttaccaaaattcttatgtatagaatacttctactatgcatctgttttacttctgagaaaagtaaattcatgctactacaacatgtagagatgacagcagctatagatcaaccactttgacaggacgatcgaggatcgagccttcccagtgatgagggataccttgacactcagattttgttcatcaatgcgtttcaagaagaaaagatttttgatcaaaaggggggaaatgagaaaagaacttttatntaaagtaatgcgagtccttcttaaattaccaggttcangagagatgttaaaacgagagaaccattcttgtcctgntttccctcttt

SEQ ID NO: 4510 - DNA, 478 bp, Homo sapiens
  misc_feature 15: n = A,T,C or G
cccttagcgtggtcnttgccgaggtacctaaggtgatggggaactccattcagataataaaattctctttcagctagagaagttaacaggaataaatatatgaacaaaaaagctgcaaggataaatgtggagaaaatgatgagaattagctaacatttttaagtttttttaaactttcttcccctcagttgtacagttaaaaaggaaaaaaaaagaaaaccagcttggcatttcagaattgtcttattcctttttagtgtattggaccgagttccagatgggccagtatttattgctatgtgttttctagtgggagtaatggatgcagttagctttgctgcagcaatgactgcatcttcttctatcctggcaaaggcttttccaaataacgtggctacggtattgggaagtcttgagactttttctggactggggctaatactaggtcctcctgtaggtggctttttgtatcaatcct

SEQ ID NO: 4511 - DNA, 541 bp, Homo sapiens
  misc_feature 503: n = A,T,C or G
ccctttcgagcggccgcccgggcaggtacttttttttttttttttttttgagatagagtcttgctctgtcgcccagcctggaatgcagaggcgtgatctcagctcactgcgacctccgcctcctgggttcaagtgattctcatgcttcagcctctcaggcagctgggattacaggcacccgccaccacacctggctagtttttgtatttttagtagagatgaggtttcaccatgttggccaggctggtcttgaactcctgacctcaagtgatcctcccgacttggcctcccagagtgctaggatttacaggcatgagccaccacacctggtccaaagcagaattcttaacacttccattttatagatgaggaagtagaggctactacagagcctcctacataatggggactcaacaaatgtgtttattgagtttgaatctttcccttacttatactttcattacatttataatctcttgccctatgtttaacttttctctaanaatattgaatgtgtcaattttatcttcaaattactttt

SEQ ID NO: 4512 - DNA, 328 bp, Homo sapiens
  misc_feature 32, 39, 43, 47, 60, 80, 104, 106, 108, 140, 141, 142, 146,147, 151, 158, 161, 166, 168, 175, 176, 178, 193, 211, 237,253, 255, 267, 273, 277, 285, 288, 290, 291, 294, 295, 300,301, 311, 315, 320: n = A,T,C or G
cccttagcgtggtcgcggccgaggtacaaatngggtttnaccntgtnggccaggctggtnttgaagtcctaacctcatgncggtccacccacctagtgcctccnanantgctaggattacaggcatgagtcaccataccnnnccgnntatntgcagtnatnaattntnatattanntncatgaatatttttancctacaaaattcactatnatcttatgaggaaatgaaggtgtganagacaccgtgtaaccngnacaaaaatcagnttaagntacncaccttancgntnngtnnttatnnaaacaggcanattnttagnaaataaga

SEQ ID NO: 4513 - DNA, 322 bp, Homo sapiens
cccttagcgtggtcgcggccgaggtacgtggctgagcctagaacttgaagcttccaaactcagtgctcgctttaacgcagctccctgaaacgttttggaatcggatggtctcaggttgaactttgcagttttcctcaactgtaaaatggggatgacagtgcatgagggtgttgcgaggatcaaatgaaataaagcatggtaaacatccaaaaaaaaaaaaaaaaaaaaaaagtcccaggaacaacaggtggcctaaatacatgaaaagcagtgtaagctagtgacactaaagccagtcttgtattactgtatttttgacaga

SEQ ID NO: 4514 - DNA, 565 bp, Homo sapiens
  misc_feature 444, 491, 500, 501, 503, 518, 526, 544: n = A,T,C or G
ccctttcgagcggccgcccgggcaggtacgcgggtgcaagggatgcagttattaaatgctgttcttctctcctaagttgaaaatcagaaacttgtggaaaagagcacttgaatgttggtacatgaggaattcttatcaaagatcatgcacaatccatgccacttaaatgggttttagctgaggttttgctcatgttactctgaatttctaaggacagatcagtgaccctcttagcctgagcagaaagcatattcttcccactgcagtttcctacacaatttagtcctgattagatgaggcattatagcagcacctgaagtagagcctccagaatccactgcccttttcatcaaaggctatttggttcccccctcaggattggcatactcacgagacattttcacaatcctaatgcatactttaggttacttaattaaccaagcnatatgctctgtcaaagaacttatttcaagtcaaagcaaaaaaagggncttaatgcnngnacaaaaaccaaacanaaaaagcncttttcccaattaaaaanaatttcccaaaaaaaaaaaaa

SEQ ID NO: 4515 - DNA, 475 bp, Homo sapiens
cgccagtgtgatgggatatctgcagaattcgccctttcgagcggccgcccgggcaggtactgttgctatttttccttgtgggtgattgattgatggatgagtgctgacacttcaatgaagctatttcgactgccatctcaatccgatgatgtgaggggtatattttctgtccatgcctcattacttcagaatgacattcctggaacttcatttactttttccctccttccccgaagcgccatattttttcccatctaggttatgcatgccataaaaaaagcaatttgctattatatgtggcataagggcaacactttccctaggaggtaaataagaagtttttttttttttttaatcccaatgttgaatttagggatcatgtcaaaatttccaaaacaattccaacaggcagcctccttgagaaatggtgaggaagagatatttggtttcattttgtcagtggtgagaataaaaa

SEQ ID NO: 4516 - DNA, 789 bp, Homo sapiens
  misc_feature 308, 377, 402, 414, 432, 451, 463, 466, 477, 500, 503, 517,522, 535, 557, 558, 568, 571, 595, 599, 607, 610, 620, 635,636, 647, 668, 677, 695, 702, 708, 709, 710, 721, 728, 735,739, 744, 758, 762, 771, 774: n = A,T,C or G
ccctttcgagcggccgcccgggcaggtacaaaaggccaaaaaaaaaaaaaagtcccaaaacaccaagagacaaaaggtaggaggaaagacaagaaaggaagatacaaaaggagcaggaagaaacttacttagggacaagattagcatcatacatacctaagagtggggggtgagggggaagaacaagatgagagagcatttaaaagcatttacccacacagccctggtgataattggattggaatcaaaacaaacacagcatgagattattaagaggttttaaaaggcaaacagtggtgtgggactgnttattgccagtgttaagagagaaataaacttgggtttttaggcaccagaagattggagcaccacccatncctttccagaaggatgacagacttnggaaaggggaancaggcccctgggacaagntgccacttggtgtgtgtanatggtcttcctnaangtcaatctcangtgtatcttccccgaagtctttntgnccctaaacttctangttanggcctttgggganttccctggggagaaaggggatnntcaaaaaatntgnaagaccttcccctttttcacaaangttnaaaaaccnttnccggggaaantggagcccttggttnnaacagaacccntattcccttggggaaaagggncatggtttntttcttgaaggccaagantttgggnaaaccnnnctccccacccngggtttnaaaaaantctnccttntttgcggccctttnttantccctttgnttngggtttttttttttt

SEQ ID NO: 4517 - DNA, 331 bp, Homo sapiens
  misc_feature 49, 76, 118, 120, 134, 197, 223: n = A,T,C or G
cccttgagcggccgcccgggcaggtacaaaacacttattgagctttcanggccactgtaaggggcttgcagaatancctctttgcaacccagagaattaatctgattcccctttcctnancccacgcctacctncaacttcaattttacaggagtagtttcccaagagtccccaccccctccatttgcagaattaangaagtggaaggactggagagttcagngtggaaaaacgtgtggagtaatctgcttgagacaactgtgttttaaaaaaattcaagctgaagtgtgggtctcatgtctatgtggctctccatgaacttttttttttg

SEQ ID NO: 4518 - DNA, 289 bp, Homo sapiens
ccctttcgagcggccgcccgggcaggtaccgagcaaatgccaggtctagcaaacataatgctagtcctagattacttattgatttaaaaacaaaaaaacacaaaaaatagtaaaatataaaaacaaattaatgttttatagaccctgggaaaaagaattttcagcaaagtacacgggtctatttggcagtgaccttgctctggagacgatgatattccttcagcctgagggaattgatgttgatgaacccggtggcatcagttggctcataatcacccctgcacgttca

SEQ ID NO: 4519 - DNA, 372 bp, Homo sapiens
ccctttcgagcggccgcccgggcaggtacgtgagccagtcatccatacgctaaggcctagttgagaaaaacctttgattcaggatggctgggttactaaccttgaaatgtaagagatctggttttgaatgtaaaagttgcaacacacaaacggaagtcttaaaaactttttgctctggtcagttacaggtggatccccaataatctgtttttggttttctgatggaaataatagaattaggggaaatcaaatctggttggttaggtgtctacagtattagaagagggtataagggcactgtttaacacctaagttctaatacttccagaaactgtgcattccagatctaccatactaaatgctcttatcatt

SEQ ID NO: 4520 - DNA, 433 bp, Homo sapiens
  misc_feature 391: n = A,T,C or G
cccttagcgtggtcgcggccgaggtactggaaacaaaaataaagttttctacattattttcagccttgggttatggtatagtttctttgtgtttgtcgtaatatgcacattgtccttctaggacctgtcaccccaccatgggaagaaaaagagtctttttggttctttttaacataagtgattaagtttaagagtatgctgaggagccactgggcttaaagaaggatgtaaataagacccaaatacatagggaccaggcgctgctttctcatgttcacaaaagcagtcctccaccactgaactcccccgcgtacctcatttattatttgtgaaataattacaacttctgagtgccattatgagttaagaagaagaaggggtctagcttttnggactttaggtctccccatctaccacctgcctgctacccatc

SEQ ID NO: 4521 - DNA, 472 bp, Homo sapiens
ccctttcgagcggcccgcccgggcaggtacggtaacctgggaggtggaggatggagagttgatatcaccagagttgggaagaaggcaggaaaaacaagtagaagaaataaaaaactataattatgaatgtttttagttcagtgttctagggcctatttgataccataaattacttttaataatgaattggaataattagacaaagattaaataacgttctgagcttcctgccaaggaaagtaggtaaatgtgtaattgattctggagaaatttttgttcaagatatcataactatcttaaataactgatgccctgaaggttttgaattttagaagtttttgatgtatttttaaagcgatgcacaaataattgaaaggttgaaatagtaaataatactgttttccaaagtttaattaaaatactttataaagcttaaaagaatctcaagttacttaaatttgaaaaaaatgaa

SEQ ID NO: 4522 - DNA, 470 bp, Homo sapiens
  misc_feature 420, 423, 430, 438: n = A,T,C or G
ccctttcgagcggccgcccgggcaggtacttacctcatcaggtggtggtgatgaactgtttatttatttaaaaaaaatttttttgagacagggtgtagctctgtcacccaagctggagggcattggcatgatcacagctcactgcaaccttgacctcttggactcaagcaatccttccgtctcagcctcctaagtagctaggaccataggcatgcaccaccacacccagctaattttttattctttgtagagaaggagtcttgctatgttacccaggttaagtatcaaactcttggactcaagcaatcctcctgccttgacctctcaaagtgttggcattacaggtgtgagccgccatggccagcctatgaactgtttaagtggatgaccagcctaggcaagaaagatgccatctccggnaanagaaaanaaaaaaanggtacctcggccgcgaccacgctaagggcgaa

SEQ ID NO: 4523 - DNA, 545 bp, Homo sapiens
  misc_feature 518, 535: n = A,T,C or G
cccttgagcggccgcccgggcaggtacgcggggttttataaaactgcatttaaaaaaagatctatgaccagatattctcctgggtgctcctcaaaggaacactattaaggttcattgaaatgttttcaatcattgccttcccattgatccttctaacatgctgttgacatcacacctaatattcagagggaatgggcaaggtatgagggaaggaaataaaaaataaaataaataaaatagaatgacacaaatttgagttttgtgaacccctgaacagatggtcttaaggacgttatctggaactggagaaaagcagagttgagagacaattctatagattaaatcctggtaaggacaaacattgccattagaagaaaagcttcaaaatagacctgtggcagatgtcacatgagtagaatttctgcccagccttactgcattcagagggatatatcaatgaactaaacttggaactaaaaattttttaaccaaaagttattaaattgaagacacatggntggtgaatcaaatgaangattttcttt

SEQ ID NO: 4524 - DNA, 523 bp, Homo sapiens
  misc_feature 468: n = A,T,C or G
cgccagtgtgatgggatatctgcagaattcgcccttagcgtggtcgcggccgaggtaccgccatctctagctatctgtagcaccaaccctctgctactactgctgccttctcccgtgggatgaatgtggtgaattgtgcattcatatttcaggaatgattaacattcaaggttggagatattccagaatcacaatttgattttataagatgctttgcagaaatatcttagataatctaaggattcctaatggcttatacaaaagaactaaagtgagtgtgactatccagcttcttctatttctccctactctttcgcttcttttgttcccttcatgattctgctgcatgccaggaatggactcacatgacttctcaaactcctagccaatgtaaacatagtgaaacataataaagtggtaaaaagctatctggacctagatttgagtctaagccctgtcttttcttgngaacatttgaacaaattccctcacctctctgagttacaatgtccttatgtatgaa

SEQ ID NO: 4525 - DNA, 227 bp, Homo sapiens
  misc_feature 1, 2, 4, 5, 11, 12, 18, 22, 26, 35, 43, 51, 55, 57, 71, 72,124: n = A,T,C or G
nntnntcaagnngacggntatntgangaatatcgnccttaatnagcggctngccngngcagcgtactggcnngttcttttttttttttttttgggaatgaaaataaatgttttttattaggcanaatccagatgctcaaggcccttcataatatcccccagtttagtagttggacttagggaacaaaggaacctttaatagaaattggacagcaagaaagcgagctt

SEQ ID NO: 4526 - DNA, 555 bp, Homo sapiens
cgccagtgtgatgggatatctgcagaattcgcccttagcgtggtcgcggccgaggtactttttagaaacttctgctttgcaggtggcatacaaggcacagtatgtctacccttggctttctctggggaagatgcattcttttcagcagtatcttgatgagcactgccttcttcctctggcttctttttgttgttagaaactttcattttcttagagggtagaatttcatcgatgattacaggagtggcacatctcttggctttcatttttacatgatgcttttctttctgttccaaatccttctgagcagaaagcctaagagatcttctctgaggctgggctggagtttttcttgatatggctgcctcaacttccagggaagaacaagcatttgacggaatggattgttccacaagattttctttttctgcctctttgtagtaagtgttgcaactggtttcaaaggtgtgacaatagcttgctgaagattaacctttctcaaaggagttttgccctgaaaaagccctccagttccattctttccccagtaactta

SEQ ID NO: 4527 - DNA, 192 bp, Homo sapiens
  misc_feature 129: n = A,T,C or G
ccctttcgagcggccgcccgggcaggtacttttttttttttttttttttttttttacaacattgccctttgatgtccccatgagggccaggcccaggcagaacccatcccattttatccttaaactcanaaggaaatttgtctaaatattaaaggattaatatgggaataaaaaatgaaccttaaaccccgc

SEQ ID NO: 4528 - DNA, 318 bp, Homo sapiens
  misc_feature 199: n = A,T,C or G
ccctttgagcggccgtccgggcaggtaccatggagggcaagagaaggacttgagaaaatggtagctgaggacaatgagcgctaccgattagtgagcgacaccatcactcagaaggtggaggagatcgatgcagccattctgcgatcacagcagtttgaccaagcagctgatgctgagttatcctggattactgaaacanaaaaaaaattgatgtctctgggtgacatcaggcttgagcaagaccagacttctgctcagcttcaagttcaaaagacattcaccatggagattttgagacacaaggatattattgatgac

SEQ ID NO: 4529 - DNA, 401 bp, Homo sapiens
  misc_feature 56, 150, 323, 329, 361: n = A,T,C or G
cccttagcgtggtcgcggccgaggtacttttttttttttttttttttttttttggncaaggcactaaataggttgcttgatcaaacttaggttattttattttattttattttattttacattactttaagttctgggataaatgtgcanaacatgcaggtttgttacataggtatacatgtgccatggtggtttgctgaacctatcaacctatcatctaggttaaacttagttttgaagggctacttatgtcatgtccatattacaagtaaagatcaattactaagttggaaagaacaatttgatggaaaaaaacatgaatnattatnaaatgataggtcatgcttttacagcccattgnaggtgatccaaatgactggggtagggcaggaccttgaaaa

SEQ ID NO: 4530 - DNA, 227 bp, Homo sapiens
  misc_feature 200: n = A,T,C or G
ccctttcgagcggccgcccgggcaggtacaatttgctctcatgttttaaaaaaaaaaaggtaaatgtaacttaatagttttgtaaatgggagagggggaatctataaactataaatacagttattttattttttgcacatttttaaggagaaaaaataaatattcataacataagacaaaaaaaaaaaaaaaaaaaaaangtacctcggccgcgaccacgctaaggg

SEQ ID NO: 4531 - DNA, 315 bp, Homo sapiens
  misc_feature 31, 252, 275: n = A,T,C or G
cccttagcgtggtcgcggccgaggtactttntttttttttttttttttttttttaaccttatctctttaatttgtctaatttttggttaagagaatgggaaccttgatcccgctgcctggatgaactccacggttactgactgatacttcccaaagtcacagtttcctcaactgtaaaatgtggataataatagcacttccccttagggttttagtaaggattaaatgagataatatatagagagaatttangaaagtgcctgacacatttaggngctcattaaatgttggctaatgtgttactaatattaatct

SEQ ID NO: 4532 - DNA, 577 bp, Homo sapiens
  misc_feature 510, 524, 563, 571: n = A,T,C or G
cccttagcgtggtcgcggccgaggtactagtaagaaattggcactcaaaggaaaaatgcaaaagtattttcaacatgaaaacacaagacagtggaattggaactttcggataaaacactgtaacccagttagctctgtgggggtgtggggggagagatgggccctcaacatttctgcagataacttttttcccctaaattcatctaaattacctatcattatcccaaacaggcacttcaaactattaaactaaaacacagatcttaatctagttatgactattcttcaagaactcatgtgagtatctttctttagaaagaaagtttcattttatgacagctattcaggttctcaatgtagaattcatgctatccagtattaacacagaagttactaaatataaattcagctttaaggtaactgctgggttctaaaaaacattactacacaattatcaaagaaccattactttttgacaaatggaaaatcgtcaagaatagtttttgctgntctaaaaaaaaatnccctaaaaaaagttatatactggttggaagaaaaaattnttaaaaanaaaaaa

SEQ ID NO: 4533 - DNA, 263 bp, Homo sapiens
  misc_feature 27, 198: n = A,T,C or G
cccttcgagcggccgcccgggcaggtncaattcgtgtcaatttggccaaaccaatgagaattaaggaaggctcttccaggccagtttggtcagatatgactggttgaagaagttttctgggaagacgcttgaagagaataaagaggaagaagggtcagaagcctcccaaagcagaagacccaggaggtgtacctcggnccgcgaccacgctaagggcgaattccacacacttggcggccgttactagttggatccgagctcgg

SEQ ID NO: 4534 - DNA, 318 bp, Homo sapiens
  misc_feature 195: n = A,T,C or G
cccttagcgtggtcgcggccgaggtacttgccttcatgttctggtttggttttccctttttctgctgctcttggcagcagcctggtcatcatctgcttgtgggagtgggaaatgggtattttagacccaacacaggttctaaatttaaaacaaataataattggaacaaataaaggttcttgtacgtgttagttnttttgttttttgttttttttttattgcgaagtgctctctctttccttgaaactttgtgagaatattttgagggttgagttgaggttgatttcgtccacagaggttttgtctttgctttttgcc

SEQ ID NO: 4535 - DNA, 387 bp, Homo sapiens
cccttagcgtggtcgcggccgaggtacgcggggatgatgctgaagctatccttgctgcagacttcgaaattggtcactttttacgtgagcgtataatcccaagatcagtgttatattttactggaagaagctattgaagatgatgatgatgattatgatgaagaaggtgaagaagcggatgaggaaggggaagaagaaggagatgaggaaaatgatccagactatgacccaaagaaggatcaaaacccagcagagtgcaagcagcagtgaagcaggatgtatgtggccttgaggataacctgcactgtaatagcctaaacacaactcttatttacttacagccttatgtttttgtattttcttggtagactagggtaattttttttt

SEQ ID NO: 4536 - DNA, 445 bp, Homo sapiens
ccctttcgagcggccgcccgggcaggtacttttttttttttttttttttacagtagagatggggtttcaccatgttggccaggctggtctcgaactcttgacctgaggtgatccgcctgccttggcctccccaaagtgctgggattacaggcatgagccaccgcgcccggccccgccaaagcaactcttattcactgttggtgggaatgaaaaacgatgcagccactttggaagacagtttggcaatttcttataaaactaaacatcccgcgtaccagacactccaagtgcttagaaaattaaattaactcatttaattttactaaaaacctgtgagataagggactattgttatgcccatttttcagatgaggaaagtgggacagagtttactgagtggtagagatgagatttgaacccaggcaagcaggctctaggtctggac

SEQ ID NO: 4537 - DNA, 465 bp, Homo sapiens
  misc_feature 21, 32, 38, 39, 63, 66, 69, 99, 119, 125, 195, 218, 222,231, 236, 239, 244, 255, 261, 271, 276, 282, 287, 291, 305,309, 318, 323, 325, 342, 346, 369, 371, 386, 393, 404, 413,417, 421, 423, 427, 442, 447, 457: n = A,T,C or G
tggtcgcggccgaggtacttnttttttttttngggggnngttttgagacggactctcactgtnacnctngctgttggagtgcaatggcgtggtctcggntcactgcaaacctccgcctnccgtgntcaagcgattctccaacctccacctccctgggactacaggcacgtgcaccacacctggctaatttttgtntttttagtaaagcaaggtttcantatnttggccccntggtnttnatatnctgaccttgtnaaccgnccactcaggnctacnaaagtncttanggantaacaggcgtgagnccantggcaccgnggccnangaaattttttttatttntaantttttaatttttgatgaagtatntncggtgctatatattnacgtganattttcttttnaaatatgtnaaanggtntnaatntcagtgacatttcanatggnaggtgcaggngaaaaaga

SEQ ID NO: 4538 - DNA, 414 bp, Homo sapiens
cccttagcgtggtcgcggccgaggtacaaatggctgtaaaatgcagtggtttaagataataactttggggtctatcagactgaaatcaaactcagctctgtaagtgtatgcacttgagcctctataaatctaattttcttcattggaaaatggatataataatagcttatacttcaaaagattaagaggataaaaggaaataatgtaagtaatgtgtttaacagagttcctgacacattgggcatactcaataaacacaacttggtttttttaaaaaaaggtatcaatttttaaattagaaagcatggtatcagataagttactcagcctctctgctccccctttacctcatatgtaatgacagtaataactaccactagcatcatggtacctgcccgggcggccgctcaaggg

SEQ ID NO: 4539 - DNA, 477 bp, Homo sapiens
cccttagcgtggtcgcggccgaggtacattgaaacaacacctcttacgataaaaggaaaaagtgtgaaaatatgtgttccaggaaagaaaaaagcacagaacaaagaggtgaagaaaaagactttagagtcaaagaaagtatctgcatctgccttaaaaagagatgcagatgcttcaaaagctgttgaaattgttacttcaacttctgctgccaaaactggacaagccaaggcatctgtagccaaagtaaacaaatctacggggaaatcagcaagttctgtaaaatctgtggtaacggtagctgttaaaggtaataaagcttcaatcaaaacaggtaagactattggggaggagagattttattggttattctttatttatgttttaaattcgtataataatttttagcatctaatacttgaagagtttagtagatatttccttgatatttaaaacctgacccattttggttggaat

SEQ ID NO: 4540 - DNA, 495 bp, Homo sapiens
  misc_feature 31, 164, 166, 265, 363: n = A,T,C or G
cccttagcgtggtcgcggccgaggtactttnttttttttttttttttttttggaaaaataagcataattaaaaactgttagatttggaactttctatttcataattaacacatatttaacaaatatttataaagcctataaatctacaaaaaaagataaatagngngctgtgtaatgtttggttatatgtctgtttggattttatagccttactaatatatactataaaacattaaaaaattcagaatacaaagctgtcttccanagaaagctttgtttagatacactaaaaaaaaaaatcaagtaacttataaataataatgtgctttacaaataacttcaatgtaatagatgacaattgtntattttagccaaatccattattctgcttatacaattcatcttctaatttttaccagtggaaagaaactttggagacaggtgaaaatgaatttagcagacatattcctaaaaactggagagttttatttttta

SEQ ID NO: 4541 - DNA, 396 bp, Homo sapiens
  misc_feature 271: n = A,T,C or G
cccttcgagcggccgcccgggcaggtaccaggccaacgggctcggtttctatggttttctggggagacggctgagggaaggtcggcttccggcgtcgcgctgcaaacgtctcgctgaggtcatcctttacggcaggcgtccgcgtcgctagctagtcgttctgaagcggcggccagaggagagtcaagggcacgagcatcgggtagccatgcctttcttggacatccagaaaaggttcggccttaacatagatcgatggttgacaatccanagtggtgaacagccctacaagatggctggtcgatgccatgcttttgaaaaagaatggatagaatgtgcacatggaatcggttatactcgggcagagaaagagtgcaagatagaaatatgatgatt

SEQ ID NO: 4542 - DNA, 468 bp, Homo sapiens
cccttagcgtggtcgcggcccgaggtacggacttcctttaggatctcaggcttctgcagttctcatgactcctacttttcatcctagtctagcattctgcaacatttatatagactgttgaaaggagaatttgaaaaatgcataataactacttccatccctgcttatttttaatttgggaaaataaatacattcgaaggaacctgtgttatcacagtaacccagagctgtatttggctagcaatctgcctgtatctctcactattatctaaaagaaaccttccaatgcttctgttgatctcagtattgtcaggggaacagagaagttgggaaaagattactgaaatataccttttgcatttctttctagagtagctcccatatatggagatgggtgattctcttgatgccaccttcagatccttttattctccagaataattcttaacagtggttcaaatttccttt

SEQ ID NO: 4543 - DNA, 217 bp, Homo sapiens
  misc_feature 26, 29, 36, 38, 41, 45, 50, 62, 68, 99, 103, 115, 130, 135,142, 146, 154, 156, 164, 171, 185, 208: n = A,T,C or G
cccttagcgtggtcgcggccgacgtnccnccagctntntgntctncacanggctccccgccncacccngcctgttaaagcgcgccgactgggctacaangccnaacaaggttacnttatatacaaggatncatgntcgccgnggtnggcgaaancnccacagcntcctaantggtgcaacttacngcaatgcctgtccatcatggcgntaaccagct

SEQ ID NO: 4544 - DNA, 318 bp, Homo sapiens
  misc_feature 50, 75, 149, 159, 166, 169, 171, 173, 212, 219, 222, 226,231, 243, 272, 283, 288, 294, 303, 308: n = A,T,C or G
ccctttcgagcggccgcccgggcaggtacttttttttttttttttttttnttttttgggattacttgatactttnggtttttggtttttggcctggcattggatttccctgaatactcttgatttttgggtttgattcttggttttggnggaaaactgnaaaaagnggngngngggccccttttttacttgggtctttgtttttgtgggggngccaatnggntgtnaaatnttggtgtttttntctccgagggaaaaattgggatcagggcncaaaacttaanccccncccccncttgggaanttttntttaaaaaaa

SEQ ID NO: 4545 - DNA, 641 bp, Homo sapiens
  misc_feature 572, 634: n = A,T,C or G
cgccagtgtgatgggatatctgcagaattcgccctttcgagcggcccgcccgggcaggtactacaaccaattccaagttttaatttttaacaccatggcgccttttgcacataacatgctttagattatatattccgcactcaaggagtaaccaggtcgtccaagcaaaaacaaatgggaaaatgtcttaaaaaatcctgggtggacttttgaaaagcttttttttttttttttttgagacggagtcttgctctgttgcccaggctggagtgcagtagcacgatctcggctcactgcaccctccgtctctcgggttcaagcaattgtctgcctcaacctcccgagtagctgggattacaggtgcgcactaccacgccaagctaatttttgtattttttagtagagatggggtttcaccatcttggccaggctggtcttgaattcctgacctcaggtgatccacccaccttggcctcccaaagtgctagtattatggggcgtgaaccaccatgcccagccgaaaagctttttgaggggctgacttcaatccatgtaggaaagtaaaatggaangaaattgggtgcatttctagggacttttctaacatatgtctataataaaagggttaaggtcnttttttt

SEQ ID NO: 4546 - DNA, 405 bp, Homo sapiens
  misc_feature 114: n = A,T,C or G
ccctttcgagcggccgcccgggcaggtacatggcagttgggacttagcgaaaatttgggctggcctggatcatgaaaagaagctgctatcttcttacctccagagagtcatcancattcaccatccaacagtcagtccaggtggccacaatcaaaaacccagcagagaaaaaggcaaagaagcaagcgatgtattgaagaagatccctcattgtggcaagcagcccatcaggatggcaacatgggcagacaccagccctggccccacttaagtggcgggtgtcagtcttctgtgtttctggtacttgctaagggcatgatcctcttatgaatccaccagaattcagccatcaacaaaaatcccgtgagtggaaaattgtatggatctctaacatgacataaaaac

SEQ ID NO: 4547 - DNA, 565 bp, Homo sapiens
  misc_feature 55, 102, 106, 114, 117, 118, 119, 120, 122, 132, 143, 144,147, 156, 158, 165, 167, 168, 171, 174, 180, 185, 188, 189,199, 201, 203, 212, 216, 221, 222, 228, 232, 234, 235, 237,239, 240, 249, 252, 253, 266, 279, 281, 293, 296, 299: n = A,T,C or G
  misc_feature 300, 305, 308, 310, 311, 323, 324, 326, 327, 347, 351, 368,369, 376, 377, 383, 385, 386, 387, 405, 416, 439, 440, 441,447, 457, 461, 470, 488, 495, 518, 523, 527, 533, 540, 541,547, 552, 563, 564: n = A,T,C or G
cccttagcgtggtcgcggcccgaggtactttattttttttttttttttttaattnatttttttttttttttttttttttttttttttttttttttttttttngggnaaaaaaanttnnnnantttttttttnaactaaccccnnccnttttttttnanggaaagnanncanttncaaatnggatnttnnttttaaaaangngntttaaaaangtanctttnnttttancacncnncntnnaacaaaaanaannttttccccccccntggaaaaaaaaangngtggggaatttntcnttnntgggnaananntttttttttagnncnnaagtttttttcccaaaaaanaaanccacaaaaaggcggaannggggaanngtcccncnnnttaaaaaaaatttttccnaaaaaaaaaantgttttttcaaaaaaaatccttnnnggggcnccctttttcncccnttttttttntttcaaattaaaaaaaancaaaaantgggttaaaccacccccctttgnttgtnaaangttttncaccccnngggggnttccnttttttttttnna

SEQ ID NO: 4548 - DNA, 494 bp, Homo sapiens
ccctttcgagcggccgcccgggcaggtactctgatgttaggtgtgcatatgtagttaaatttattataacatttctttgaattgatcctatattattatatagtgaccgtctttgtctccttttacagtctttgacttgtttattttatctggtataagtatgtgtaaccttgttctttttagtttctaattacattaaatatgttatttttcttccttcacttttggtctatgtgtgtctttataggtgacatgggtttcttataggcagtatgtaattaagtcttgctatttaaaaatttattgaaccaaagtatattttttaattggagaatttaagttcatttacatacattttattattgatagataaggacttactactgccattttgttacttgttttgtggttgtcttgtagttcctgtcttcttttctttctcactgtctttattcatgcttaagtgagtttctccagcagtatgttttaatttg

SEQ ID NO: 4549 - DNA, 532 bp, Homo sapiens
  misc_feature 150, 176, 202, 210, 211, 224, 227, 250, 257, 264, 273, 290,295, 298, 321, 325, 328, 344, 346, 348, 356, 363, 376, 388,396, 410, 418, 419, 424, 428, 435, 449, 463, 468, 472, 474,477, 482, 484, 498, 504, 507, 512, 521: n = A,T,C or G
cccttagcgtggtcgcggccgaggtacaaaatggctgttaaacagatttttgaattaaacttaaaacctcttgcaatttttaaaagcgtgtatcaatactttaagaaaactttgttgtttacacagactctggtcctgtatcatgtgatnccctgacagcaacatttaatttttanaatatcgtgataaacaattttctttntcaatacnnaggtgggacccantcntcacaatgaaaaccttttttttnattgagnaccaggngggttttangaaaaatccctgctttncttanttntgggtttaagtttcctttttcanctcnacntttttttcaaaccccncncnaccccccnctcaaangtgccttttaatntgttccttgtgnaaatatantttgcttttttttnaaaaaaannaaaantttnattgggnaaaccaaaccaaanttttttaaaaaaanttatngggntnaanaaatntntttaacccaaccanttaccnaanttttntttttaccncccaaaaaaat

SEQ ID NO: 4550 - DNA, 756 bp, Homo sapiens
  misc_feature 659, 664, 704, 734: n = A,T,C or G
ccctttcgagcggccgcccgggcaggtaccccttagatggctcttgaaaattatcccctgtgccttctgtgttacacctgcatcttagttaaataaagtgtagattcttaacctttttttgtgcgatggatcccttagctgtctggtgaagcctatggatcccttctcagaataacatttttaaacctataaataaaatgcacagaactaagtgcacttacatttgagaatgattatcaagctattaaaaaccaaatttgtgatacagtaatacatagttctttagtaggtcattaaatatcaaaagctactggtggtggtttcattgctgtaatttcaaagtagtgatgagtgttacaaatgatattttgcaatacctgtaacagctagatgtaacatggtataaaattatctgtgatctcttttggtaacaaagtcacagatacatctactgctgttgttattatctaaagttagttgaaaaaagtaattttgtgttcacatctcatttaatggacccactgaatctttgggttaaagtaattgaactagaaatgtaaatagttatactttcttactttaataaaaatataacttattaaaagcttaaggctgaatacaggggctcttggcctataatctgagcactttgggaagtnccgangtaggaaggatcactttgagcccaggagtttgagaccagncctgggcaacaatggtggagaccctgtctntacaaaaaatttaaaaattacc

SEQ ID NO: 4551 - DNA, 387 bp, Homo sapiens
  misc_feature 58, 59, 60, 84, 86, 87: n = A,T,C or G
cccttagcgtggtcgcggccgaggtacgcgggtattccctttgttactgcagacaatnnntaatagaaatgtttaaaggtgccntnntttatcaaataaggtcagatgttctcaccctgtttgaaatggaaactaggagtggattccattaactctcttgttcacacaacacacacacatgcacacacgcacacacacacacatctcagtggttggccagagcattcaacaaataagatttgctccaatccctgtttttagctatgaaaatatgagcagagagttcatgtgatatgtagacaattaccgggccaatctgaatacaaccacccaactcatcaaccaactaactaactagccacaatctttgagcactcaagtaatttt

SEQ ID NO: 4552 - DNA, 490 bp, Homo sapiens
  misc_feature 139, 167, 170, 174, 175, 178, 200, 210, 215, 217, 218, 224,228, 231, 232, 235, 236, 246, 247, 250, 252, 257, 258, 260,265, 270, 274, 277, 279, 289, 294, 295, 296, 297, 302, 307,309, 310, 313, 319, 322, 337, 339, 346, 354, 358, 359: n = A,T,C or G
  misc_feature 362, 363, 364, 374, 379, 383, 385, 391, 400, 409, 411, 420,421, 422, 428, 435, 439, 454, 461, 477, 490: n = A,T,C or G
cccttagcgtggtcgcggccgaggtacgcgggatacaaactttgacttttgtgaaaaaaaaaaaaaaaaaaaaaaaaaaaaaaaaaaaaaaaaaaaaaaaaaaataaaaaaaaaaaaaaaaaaaaaaaaaaaaaaaaantatttttaaaaaaaaaaaaaaaatttanggngggnnggnttttttttttttttttttttgngaaaaaaaanaaatnanntttttnaaantcnntgnnaaaaaaattnntancncaaanntngggtnctaanatantantnaccccccttnttttnnnnaaatnaaaanannccncacacnctntttttttttttttantngaggaanaaaaaaantttnnagnnngtgggggggntttanaagnantaactnagacacatngggggggtntntttttaatnnnagaccngttttgnaacnaatgagttgtgaatnaaatttnaaaaattgttttccantaaaaaaaaaatn

SEQ ID NO: 4553 - DNA, 323 bp, Homo sapiens
  misc_feature 85, 313: n = A,T,C or G
cccttagcgtggtcgcggccgaggtacgcgggggtgtccgcacagaggtctgcgaggagagagagtgtcttcattctttccgccntcttgattctttctcactgaccaagactcagccgtgggaaatatgagttgagctttgtaagagcaagatcccaatcctcagaaagaggaaatgaccaagagtcttcccagccggttggatctgtgattgtccaggagcccactgaggaaaaacgtcaagaagaggaaccaccaactgataatcagggtattgcacctagtggggagattgaaaatcaagcagtgcctnctttttaagg

SEQ ID NO: 4554 - DNA, 650 bp, Homo sapiens
  misc_feature 443, 621: n = A,T,C or G
ccctttcgagcgccgcccgggcaggtacgaaatgaccaccatgaaaacctgaacttgcatcaccagctccaccatagccatgtcctcccatacctggaaacacaatttgccaagattataaactattacagatacaagtagggaagtatacatacatactatacaaggtataaagctctatataggaatgcactgaaatttgtctgaattaactttatacaagtttcctatattaccactaagagcttgcaaagcaaatactaaaatttacctatgaataaaaatgtctttaatatttattttacctcttccatctctcattctgtcatcaaagccatcattcccatagccgtaattattatagccaccatagtcatcaaaacctccataacctgtgtaatttaaggagaaacacatgactacacactttccagagataaatnttataatttagtttacaaaaacattttgtggtaacagtctgtgtaacttgattgcaagtttgcaattcccaacttaaaacctatgaaaaaagcagtcaaccgtgatggaaatttaaaatctcagaaagttaattaagttcagacatgtaaattaaatttcatccctaggcaaaaaaangtcaaaatatgccaacatcttatttttaa

SEQ ID NO: 4555 - DNA, 194 bp, Homo sapiens
  misc_feature 34, 40, 42, 47, 58, 65, 78, 79, 82, 86, 89, 90, 100, 111,115, 116, 147: n = A,T,C or G
ccctttcgagcggcccgcccgggcaggtactttnttcttntnttttnttggcctaagncaaaccncagaactttattnnggnaaanganngcattttttngttggcaaacnatannctcctatgaaatactcttagagatgtttatnctgagctagttttttttgcggggaggtgctgtttacatgctatgtta

SEQ ID NO: 4556 - DNA, 275 bp, Homo sapiens
  misc_feature 98, 237: n = A,T,C or G
cccttagcgtggtcgcggccgaggtacatgccaaaaatgcctgaataagctttgaaatgtaaaacaaaaatgttttaaagaagtttaattgcagttgncaatatatacttaatatggcttgcattttttttttttttttgaaataacattgtgacttaaaggatttctaggtcctaaaatctggaaaagggatctggaaaaatttggactccatgagtagtttggattcaatctctntgtgcttttttttttctttataacatgaatgggatggg

SEQ ID NO: 4557 - DNA, 342 bp, Homo sapiens
cccttagcgtggtcgcggcccgaggtacagccacaaattcatgtcttcccagaatctatgaatgtggccttatttggaaacagaatctttgagatgtcatcaagttaagaagaggttacactggattcaggcaggccctaaatccattatgacctgtgtatttgtaagaaaaattcagacacagagattcagacacacagaaacattgttatgtggtggcagaggcagatattgtagtgatgcatttccatgccgggaaatgctaaggatggctgttaataaccagaagctgggagacaggcatggggcagattcccactctggatgcccaagaaagaatca

SEQ ID NO: 4558 - DNA, 337 bp, Homo sapiens
cccttagcgtggtcgcggccgaggtacacatttaatgatggtccagtattctcaaaaaaaaaaaagcctactttaaagactaatcaataaattaaacaaaacaaaacccacacaatgttcccccaccccccaaagctagcagtttgtgagttgtatttatattgaaacctaatgttttaaaaatagttctggttctccaaccaccccatcccaccccgggtatgcagcaatagtaatcaattattttattctaccctcccaaaagattattaatccagtgttctttagctttttaaaatataaattgggaaagtgttattaaataagctttttttaa

SEQ ID NO: 4559 - DNA, 274 bp, Homo sapiens
ccctttcgagcggccgcccgggcaggtactttggtagtgagagagtttcactatgttgcccaggatggtctcaaactcctgagctcaagtgatctgcccatctcagcctcccaaagtgctgggattacaagtgtgagctactgcatccagcctgcaattggttttgactgcacaagaaaaaacataaaaaaggttccatgaacctttttataacctcttataattgttaccggttttaatttctttcctcaatttttctatgtccattcagttt

SEQ ID NO: 4560 - DNA, 527 bp, Homo sapiens
  misc_feature 335: n = A,T,C or G
cgccagtgtgatgggatatctgcagaattcgcccttagcgtggtcgcggccgaggacagatgaacagactcaggttgtgattgatgcaggagcactcgccgtctttcccagcctgctcaccaaccccaaaactaacattcagaaggaagctacgtggacaatgtcaaacatcacagccggccgccaggaccagatacagcaagttgtgaatcatggattaagtcccattccttgtcagtgttctctctaaggcagattttaagacacaaaaggaagctgtgtgggccgtgaccaactataccagtggtggaacagttgaacagattgtgtacgcnggtccaagcaataccataaaagcttgaagcaaaaacagcttttaaatcaaaaagcaaaatttttaaaattaaaacttttagagaaaaaataaattaggcatgagaatagtaattatctctgtaagtttcaagtaagataagacttaggtgattattgtaaagataaaaatggaaataatggacataatcatt

SEQ ID NO: 4561 - DNA, 438 bp, Homo sapiens
  misc_feature 214, 282, 284, 319, 379: n = A,T,C or G
cccttagcgtggtcgcggccgaggtacgcgggcatttggctttctctctcttttctcccctccttcttcccaggcctggctggctggtgcctgacaccatttggggctctgagagggttgtggctgccagcccccagtcgccaatgcctggtcaggcactcgtatcccctgtcctgttcaccatttctcctttctcattgttctcataatttgncctgcttaaaactcctagggtctaaagggaccccctgcattgcttgcctttcctttgctagacaccananaagaggctaaaaaagtgaaatgtggcctggtgcantggcttatgcctgtaattccaacactttgggaaggcaaagcaggcaaaaaacttgaaggnaagagttcaagggcagcttggaacaaaacaacggaatcctgtcttttacttaaaaaatc

SEQ ID NO: 4562 - DNA, 427 bp, Homo sapiens
  misc_feature 199, 276, 324, 350, 371, 390, 422: n = A,T,C or G
cccttagcgtggtcgcggccgaggtacaccaccaaagaccaataataaaaaagaaggttccagggagggcatgacctctgaaattccccatgatctttgggtgtttaaatcccattttcccttctgagtcattggtcatccttggtctcagtagatcaggcacgttagaactgtggcagaagagataagaatgaagcanccaaaattgagcctttgcttcttaggtaatgctgaaaagtttccaacttggtctgtttactcaacactttatttttnccactttgccagctttaaaatcaagacagcggctgggcttttgttgtngctgtttctgttcttttgatcccagngccccatgaaaatttaaaccngtgtgttggatgggatctngccacgtctccattgggtggggggaggaattnttaaa

SEQ ID NO: 4563 - DNA, 624 bp, Homo sapiens
  misc_feature 106, 107, 575, 588, 612: n = A,T,C or G
gatatctgcagaattcgccctttcgagcggccgcccgggcaggtacatttgtggctgatccaggcgtttgcccatgtagctggaatctttatctccgaggcagggnnctggatgacagggtatagtgccccaggccgagcttcctcttaaaccactattcctgacagtcccggtgactgatgaggcttcagagactccaccactcgctagttccaacacagcaagaatttttttaaaaaacaaaacaaaacaaaaaacacacaccaaaggaaaaaaaaaaaagggcgaggagtgagatctgtagaaaaaaacacccacacacagccttcccagatcttgcctggcttcccccagctgccggggtccacttgggatgaggcagtttgttctctaaccaaggctgtctgtagtgatgtcaattgccagcgttcgtaaagggggaaaaaaaatcaaagtccttttagcacaactccgaatccttgcagatcaacttcctgtcttcttgggtgtctctttccccaccttaaagaaaaagaaaaaagagagagagaaagagaaaggaaagaaaggaaaangaaagaaaggaangaaaaaagaaaggggggaaaaagnaaaaaaaaagaa

SEQ ID NO: 4564 - DNA, 578 bp, Homo sapiens
  misc_feature 71, 146, 164, 174, 178, 179, 242, 246, 249, 255, 261, 264,278, 281, 282, 288, 290, 293, 295, 319, 334, 338, 344, 345,347, 356, 357, 358, 360, 365, 368, 370, 376, 379, 381, 392,398, 402, 406, 436, 439, 450, 464, 465, 466, 467, 478: n = A,T,C or G
  misc_feature 486, 487, 495, 498, 502, 510, 511, 516, 526, 528, 553, 555,570: n = A,T,C or G
gatatctgcagaattcgcccttagcgtggtcgcggcccgaggtactttttttttttttttttttttttttnttctttttgaaaaaggtatcaaaggcctttattgatttaattttcctttcaacttatcaatgctatcacaaattntaaggaaacaggacttgnccaaataacnattnncccaccatgaacatggggcttgggaagacataatctacaagctacatcatatattgaggcttntaanaanaatcgnctcttnatntttcaaaagcatanctnnaaattngnccntnatcttgattattttgaaaaatgtnaagcacatactcgcncttngataanngnatgttctannncnctttntgnanaagtantcnancctaatttggngttganaaanagcncttaatagattcctttttttgttaaatganctnatgttgccccnttaaaaactttggnnnntgtctcaaaanaataattnnataccaanagntctntgaaacanntgccnatttgctttntnaagcagataaaaacagaaatcatgnangttaagtcaattganaaaaaaaa

SEQ ID NO: 4565 - DNA, 636 bp, Homo sapiens
  misc_feature 33, 81, 258, 362, 374, 455, 460, 493, 503, 519, 531, 545,628, 636: n = A,T,C or G
ccctttcgagcggccgcccgggcaggtactttntttttttttttttttttttttttttaaaaagtaagctaaagtccttgnggtaggcagcctctaacaaatagaatatagcagaaataatgagataccacttccaagattaggttataaaaattcttaggcgtcaccttctctcactcatttgctcagagggaggcagatgccaaactgtggtgccctttggagaggcccatatggcaaagaactgagaaaagcctntggccaacagccagcaacaattgatttcttcagtccaagagccccaggaaactgaaccctgcaagagccacattgaatgagttcagaaacagatcttccaccantagagcttccanatgtgactgcaaccccaactgacagctttgactaccaccttttttatgagccacaggcacccaagttaagcttgcacccanatttntaacccacaaaaactggaaaaaaaatgtttggnggcttaaagnccttaaaattctgggngcaatgggcttntgccaacaataaanaaaaaatatccctggcccacttttataattcaataattcccatggggcctttagggtattaaattaaaaatttgggaaaggcnaaaaaaan

SEQ ID NO: 4566 - DNA, 670 bp, Homo sapiens
  misc_feature 76, 505, 519, 558, 570, 572, 575, 596, 639, 643: n = A,T,C or G
ccctttcgagcggccgcccgggcaggtacaaaacacttccagcaaaaaatctttatttttaagaaaaaagtatttnttctcattttctatttttgtcataaatttttattctttccagtggaaccaaaacttgaacttccttttggttgatacatgcccagcaagactgatcaaagaaaagatggcacagataaacagtgttagaaatgaaaatggaaacataaccatagataactacagattaaaaagataaaacattatacaaataaattgaaaattgcatgtaatagataaatttgtggaaaaatttaacttgccaaaattgatgcaagaataaataacttgaataagattcaagtaaattggatttgtaggttaaaattttctcaaaatgaaaacaccaggatcagatggagttattccagacacctagtaacaaattatctcttggactaatccacaatatgttaaaaaaaaaaaaaaaaaaaaaaaggaggcaatactncctactcattttangaggctagcataaccttgatagctattaaggccaaattngaaaggcagttntnggnccgtcttactgatagcatagngtaaaagcttttcctttaaggttagaaatctgccagaatgccncctntcagcctttctttcttccttttccttt

SEQ ID NO: 4567 - DNA, 223 bp, Homo sapiens
  misc_feature 32, 34, 43, 47, 74, 89, 105, 107, 109, 112, 118, 125, 134,135, 141, 142, 143, 147, 155, 157, 159, 167, 174, 176, 177,179, 190, 196: n = A,T,C or G
cccttagcgtggtcgcggccgaggtacaaatngngttttaccntgtnggccaggctggagctagaagtcctaancttatgacggtccanccacctaggatcttcnanantgntaggantacaggnatgagtcannataccnnnccgnatatatgnantnatgaattntaatatnanntncatgaatattnttaacntacagaattcactatgatctttatgac

SEQ ID NO: 4568 - DNA, 388 bp, Homo sapiens
  misc_feature 55, 57, 58, 65, 75, 79, 144, 226, 243, 276, 299, 355, 371,382: n = A,T,C or G
ccctttcgagcggccgcccgggcaggtacttttagtagagacggggtttcaccgngnnagccaanatggtctcantccnctgaccttgtgatccacccacctaggccttccaaagtgctgggattacagacgtgagtcaccgcncgcagcccgcttttgtggtttcaaaagttctcacttgctaatgtcatgttagagatacaaatttaaagtatgctaatatcantggagagaacagatgtnttaatctataagacacttatacatgcactaaanaaaagttgactactatactgaantcccttataaaaagggagttgttaaggataatggaatgtggattgggctctttcanagactccatacaggtntatttaattancaaagg

SEQ ID NO: 4569 - DNA, 499 bp, Homo sapiens
ccctttcgagcggccgcccgggcaggtacgcgggtgctgtgttttaatataatatccaggatttttatatgcatttagcagaaggatgtctactctgcctttgtagaagtgtctcactgatttttacatatttttccagcacacaaacatacacaatttaactcaaagcatcttagcagagcttaattaaatggatagatgtctgttccctttgctggacgccaagaatacaaaaaagaacaagtgacaattttctccgtcttagggagaagagacagcagaagtgtaaatgatccctaaagagtgatagatgttatcatgaagccacaggaggggtgccaggctgcacaaaagagacactggatgcttcttggtagtagaggcagtggcttccagccttggggctaaggcttgtagggtgaattggaacttttcagatgagcaaggcaaagaagggaccttctaacattccttggatggaacatttttgacattttcc

SEQ ID NO: 4570 - DNA, 177 bp, Homo sapiens
  misc_feature 65, 67, 68, 69, 75, 78, 79, 80, 81, 83, 85, 90, 128: n = A,T,C or G
ccctttcgagcggccgcccgggcaggtacactttataataaaattgtagtaaaatactgacattngnnngtgatnaannnngnangagtncatgtaaaaatcatgttatagcatgtaaaatttaattngaaaaattcatagctcacaaaagtacctcggccgcgaccacgctaaggg

SEQ ID NO: 4571 - DNA, 528 bp, Homo sapiens
  misc_feature 352, 377, 385, 444, 491: n = A,T,C or G
cccttagcgtggtcgcggccgaggtacaaaacacaacaaaggttcaaacatcgagatgttcccttagcaaggctgaaaatttcagtctctggtatttggaatttaggctgcagtccttgtttttggatggatcactgggtgtgtggcacagtccatgcttttaaccagatttgaacagaagaatggccacttggcccaggtagaagtagatgaagtgtttggtttcatgtgtcacataactaccgaagttcctccccacgatgcaatgccaggtgggattgtacatcattaataggtccggtatgtcttctcatttactggcaacttctccaaactcatctagagtttccanaccatctattacctttccaaatacngtgtattncatgtccaaatgtggctgtttgccataggtgatgaagaactgagatccattggtgttcnggccattattagccatagattcaacacctttaacatttgtgcttaanaatatttcactgtattcattccctcaaactttctttg

SEQ ID NO: 4572 - DNA, 723 bp, Homo sapiens
  misc_feature 549, 564, 597, 608, 647, 685, 688, 692, 708, 719: n = A,T,C or G
cccttgagcggccgcccgggcaggtaccgccgttcttgtcaccaccaactggttttgtaacagttgcgagaaccttctccttctttttcttttcaaccttggatttagcggctgagtacaagccagaattactatttctttgacttattattagcttggcagttgcttttgatttgattgttttatgacatggtatactactatatttactcagtttgaaactattcatttctacacactatttttaaaaattgcctactaggtgaaacattacaataaaactacctgtgctgaaatttgggggaagtttaggtcctttaaaaaaacatattaatcattgactacatctatgataaaagtgcttattttggtttactaagataatgcagttggtggaaatgataaacgttttaagtgttaacatcctttgaatgcgttggatttcagagaataaacattttgtaaaaatcacttggtaaggattataaacttaattactgcacttaaaatgaaacattactttttttaaacaatgtgtcacaaatgtangtctgtattacttgnatgcttgggtgacttactggtagtccagctctnaaaatttaaanggtgtaattgaaatcaagaaaagaaccttcttttaaaanaaagcaagtatatttttgcttttaccttcaaatggtanttnaagnagaaaatttaatttgnagatataaccnttaa

SEQ ID NO: 4573 - DNA, 222 bp, Homo sapiens
  misc_feature 6, 104, 132, 139, 158, 175, 180, 211: n = A,T,C or G
cccttncgagcggccgcccgggcaggtactgaagtctaagaaatctacatcaaactgagccttttgttttcttttcaaaaacagatgaaaaaaccatctacctnctcttcaatgagactgagaattttacantaacaanatcttaaacctggttagcntaataacttgcagcttnctcancccctggtttacagatcctgaatcaagttcngtgggaggttt

SEQ ID NO: 4574 - DNA, 181 bp, Homo sapiens
cccttagcgtggtcgcggccgaggtacgcgggacttgaaattataatatagcctgtccgtttgctgtttccaggctgtgatatattttcctagtggtttgattttaaaaataaataaggtttaattttctccccaaaaaaaaaaaaaaaaaagtacctgcccgggcggccgctcgaaaggg

SEQ ID NO: 4575 - DNA, 449 bp, Homo sapiens
cccttagcgtggtcgcggccgaggtacactctagcctgggtgacagaacaagatcttgtgttaagaagaaaaaacaaaaaacaaaaaaaacttgccaatctgatgtgtgtgaaatggtagttcatcagttaaatctgcattttccttgatttttaagtatcttattttatatttgttctattggtcatttaagttttctttttggcaaatttcctatgcatattcttattttttctgttggattgtctttttcttattcatttaagtttgttgtggtgcctttcattgagcaaaaactttaaattttaatgtagcaaaagatatatttttctttataatttgtatgttttatgacttgtttaagaaattcttccttaatgtctcaacatattcaatttaataatgtatcagaaactgtcctgcccgggcggccgctcgaaagggcgaat

SEQ ID NO: 4576 - DNA, 411 bp, Homo sapiens
  misc_feature 190, 204, 343, 359, 385, 410: n = A,T,C or G
cccttagcggccgcccgggcaggtaccctaatcgttcaacagcaatcatctttggggaatgggcattttggtaggtaaagtgtggtggacgtccttattattatttttgagacagtgtcttgctctgtcccccaggctggaggtcagtggcacaaatctcagctcactctaacctgcacctcccgggttnaggtgattctcatntcagcctcccaagtaagtgtgaactgaggggccgttgtgccaccaccgcctggctagtttttttgtattttttaagtagagacaggggtttcaccatgtttgggccagggctgggtctctgaactcctggcctcaggtngatccacccaccttanccgcccaaggtgtttgggatttgcangcattgagccaccatgcccggcccnt

SEQ ID NO: 4577 - DNA, 347 bp, Homo sapiens
  misc_feature 59, 239: n = A,T,C or G
cacaaggtaaattgtctcacctgtggaagtttcagaggattctgttgaatttgaatcantgccagttttgctttcaaggtctgtttggcaagagtctcatctctattttcttgtgcttggctttcttcttcttcctcttcaccatctggaaactcccactgagactcgcccgactgttcgtttacatagaaataccgtctatgatcccaagtttcagatgtccggactccaagtgccantttcttcccggtgttcagccactgtgttaatcctccacagggaactgctacacgctgctctggtgaggcattccaccggggcaatttcctacccgggagtgctctttg

SEQ ID NO: 4578 - DNA, 390 bp, Homo sapiens
  misc_feature 302, 303, 304, 305, 306, 307, 308, 309, 310, 311, 312, 313,314, 315, 316, 317, 318, 319, 320, 321, 322, 323, 324, 325,326, 327, 333: n = A,T,C or G
cccttgagcggcccgcccgggcaggtaccagggcaagtcagacatcatgtcagcacccttttctcttgtctttcttgcacatattcatagacaaatagtttggaaatgggcactttagaagctaaacctggaattctgccacctgtaatacaggccaagcaatgaaatctgataggtggagtcaaaggggtccacttttggaggttcctgtgtcacttctccccctcccagatgtctcctcatcctgagtgtcatcaccaaagttcttgggcctgtacctcggccgcgaccacgctaagggnnnnnnnnnnnnnnnnnnnnnnnnnnctagtnggatcccgagctcggtaccaagctttggcgtaatcatggtcataagctgtttcctgt

SEQ ID NO: 4579 - DNA, 447 bp, Homo sapiens
  misc_feature 14, 123, 274, 338, 366: n = A,T,C or G
cccttgcccgggcnggtacccaagtgttttgtcagatactttgcatggaaatacctgcagtttgggagactggtgtgtattgaatgcttcttttagcatatttcaggttggactgcgatgcanttcttcagctcttcattgaaacgctgctccacaacacaaatgccggccaaggccagggagatgcaagcatggactctgcaaagcggcggcatcccaaactcctggccaaagcccttgagatggttcctttactgacgagcacaaaagattnggtcatcagtcttagtggaatactacataagttggatccttatgactatgaaatgattgaaagntgtcttgaaagttattagaacgaagctnatgaaaagataaccaatattaatattaatcaggcattgagtattctgaaacatttgaaaggtcatacccaagaatttcttc

SEQ ID NO: 4580 - DNA, 162 bp, Homo sapiens
  misc_feature 5, 10, 44, 52, 65, 83: n = A,T,C or G
ggggncccgnaaaatatttggggggggccccctttcttaagatnaggccatnggctttccggaangccgggcccggccccaanttggttggaatggggaattattctttggccaggaaaattttccgcccccctttttacccgaggcccgggccccgccccc

SEQ ID NO: 4581 - DNA, 661 bp, Homo sapiens
  misc_feature 490, 584, 596, 615, 628, 639: n = A,T,C or G
ccctttcgagcggccgcccgggcaggtacagattactatgtgaacccatgttttcatttctctaaaatatataaacccaggagtgtgaatgctgcgtcatgtagcatgctcaactttataagaaactgccaagctgttttcccaagttaattttaggaagtcaaatcaattgattttttcacgaagatgaagaaagttttatgcaactttcttcattattttgctgtcatataaaagttaataaatattcacttttattttcttctacttttagggaataaaaaacatttaattttaacacatctagaacttattttggtgtatgatgtaaagcaaaaatgtaaggtgaattttttttttctcaacagccaagcaatggtcttaatcccttttgttgaataaatccttcccatactaattaatttgtaatagcttctttttaatacaatttaattcttaaatgaaaacctgagttattctattcctctgngctgaggagtcaaaagttccacaggtcagatttaacattccaagccaaagggaccacctataatcccagcactttgggaggctgaggtgggcanaatgcttggggntagggagtcaagaaccagnctggccaacccgnggaaaaccccncctttcttaaaaataaaaaaat

SEQ ID NO: 4582 - DNA, 444 bp, Homo sapiens
cccttagcgtggtcgcggccgaggtacatgacttagatctcaatatagttgtttaaaacaaaaaaatccatgtgtatggagatggggagtggctggaaaaagcttaacctcccaattaggcaaaagacaaacaggatagggagggggactaggggcttgtgagtggcaatagctgcagcagcagccctggcaggacagcctgtgggttacagaccgccctcctgtcaatgaagtcaagtcctctgcttcctgaaaaccgcctcttttttctaacaatgttctttcccccaaactaggaagacaggctgatggtaaacacaaagttctctgaaccaaagccttatatgtatgtttctgagggggctctttataacctagttgcaagcaatctgaacacagcccggcgaatttccagcttttgaaactcagatttccttttgcgac

SEQ ID NO: 4583 - DNA, 418 bp, Homo sapiens
  misc_feature 170, 297, 389, 394, 408: n = A,T,C or G
ccctttcgagcggccgcccgggcaggtacttttttggttttttttttttttaactccactgggtcagtggatcacacctgtgatccttgcactttgggaggctgaggtgagaggattggctgagaccaggaagtctcctgggaatcttctcgtctcctgtaacccagttnacgacagacccttggactttactatattggaaaaatctacataaaacaatgtcagtgtgtcaaagcattatgtctgtcacaagcttgtgaaaggaaaataaaaattactaagccaaagagaaaagtnaaggctgggaactgcagcagacaaacctgccttccattttattcttaaacaagatagctttgaaggaccaaataaaaaaaaaaaaaagcttncatanaggccgggccgggnggcttatgcc

SEQ ID NO: 4584 - DNA, 385 bp, Homo sapiens
cccttagcgtggtcgcggccgaggtactattacctgaatgcttctattccttttttgatcttcgaaaagaattcaagaaatgttgccctggttcacctgatattgacaaactggacgttgccacaatgacagagtatttaaattttgagaagagtagttcagtctctcgatatggagcctctcaagttgaagatatggggaatataattttagcaatgatttcagagccttataatcacaggttttcagatccagagggagtgaattacaagtttgaaagtggaacttgcagcaagatggaacttattgatgataacaccgtagtcagggcacgaggtttaccatggcagtcttcagatcaagatattgcaaggattcttcaaag

SEQ ID NO: 4585 - DNA, 426 bp, Homo sapiens
cccttagcgtggtcgcggcccgaggtaccatgatctgcaggctccggataaccagcagactaaagacatctggaagaaagtggcagaaaaggaggaactggagcaaggatcgaggccagcaccaaccctggaagaagagaaaatccgatcactctccagttcttcaagaaatattcaacaaatgttgacagattcaatcaatcgtatgaaggcatatgcatttcaccagaagaaagaatctatgaagaaaaaacaagatgaagaaataaatcaaatagaagaagagagaacgaagcagatttgtaagagctggaaagaagactcggaatggcaggcatctctgcgaaaatccaaagcagctgatgagaagagacgctccttggctaaacaagcacgagaagactacaagaggttatccctcggggc

SEQ ID NO: 4586 - DNA, 325 bp, Homo sapiens
cccttagcgtggtcgcggccgaggtacatggatgggagcagcttcaccaacccctgcaaagtgactctgaagaagacgacaagccctgctccagtcacacccggaagctgactggtccacgcacagctgaagcatgaggaaactcatcgcgggactaattttccttaaaatttagacttgcacagtaaggacttcaactgaccttcctcagactgagaactgtttccagtatatacatcaagtcactgagagaacatcaccaccctgaagccagagactaacacttgcaggactcagcaggactatttaagaaacaactgaggca

SEQ ID NO: 4587 - DNA, 604 bp, Homo sapiens
  misc_feature 490, 505, 518, 547: n = A,T,C or G
cccttagcgtggtcgcggccgaggtacccaagttttaaacttagatgtgcttcatcttagtgaaatttaattcacaaggaatcataaattgtgtttttgaggctgggcgcagtgactcacacctgtatcccagcaatttgggaggccgaggtgggcagatcacttgaggtcaggagttcaagactagcctggtcaacatggtgaaaccctgtctctactaaaaatacaaaaattagtcggcatggtggtgggtggctgtaatcccagctactcaggaggctgaggcagaagaatctgagccaagataacaccattgtactccagcctgggcgacagagtgagactatctcaaaaataaataaataaataaataaatagtatttttgagccttcaagatacaagttcctgaatattctaatttaaattggtataattggattacctaatattcttttcaagactcctgatgtattaacttcatgttattgncacttttcaaaaaangaatttttttcangagttaaataaagtcaagtcttttatatncaagggtttcaaaccccccagattaaacccaccccagatcaaaaaaaaaaaaaaaaa

SEQ ID NO: 4588 - DNA, 684 bp, Homo sapiens
  misc_feature 56, 104, 106, 110, 117, 120, 178, 196, 234, 244, 305, 331,352, 359, 361, 362, 366, 375, 391, 397, 399, 401, 405, 410,414, 417, 423, 429, 435, 438, 450, 469, 476, 479, 490, 491,495, 496, 497, 498, 515, 516, 518, 522, 527, 528, 531: n = A,T,C or G
  misc_feature 532, 536, 546, 550, 551, 578, 579, 584, 591, 612, 620, 621,632, 635, 639, 641, 645, 647, 651, 659, 660, 661, 662, 666,674: n = A,T,C or G
cccttagcgtggtcgcggccgaggtacttttttttttttttttttttgagacggantctcgctctgcactccagactgggtgacagagtgagaacctgtatcananaaanaggaaantgnggatatgagagagagggagaaacctatgaaatttaacaaccatttctgctaaaatctntcagtaaacacagaatanataggaacttccctaacttgataaagtgtatctaccanaaacctatancaacctgcatatgaaagagggatttaaaaaatttccattaaaagtctcaaaacaagcaaanaaggactattctacattcccttggangtgctagcccaaggcaatggngatatcnannaccnccccgagcncaattaaaaatggggnaaaatnancnattntttgnggcnatntttttnacttanaacccnggnattgggccaacntttttttgtttaaggggcnaaaaaanaanttttttagggnnttgnnnngcccaaaaaaaattttnngnaaanaaccnnaanntttnccctaaatancctnnacccaacctaaaaaccctttttttttnnggggnaaaaatntaaaaaatgcctcaaaacaanagtttttnnaaaaaatttcntanaggnanaatnangggnaaaccctnnnntttnttgttttnggggaaaaaa

SEQ ID NO: 4589 - DNA, 363 bp, Homo sapiens
  misc_feature 104, 120, 125, 152, 153, 158, 171, 172, 183, 184, 186, 187,188, 189, 190, 200, 204, 209, 218, 221, 222, 224, 233, 236,239, 248, 250, 258, 259, 264, 271, 272, 274, 280, 293, 294,295, 296, 297, 309, 324, 328, 330, 331, 333, 334, 335: n = A,T,C or G
  misc_feature 336, 337, 338, 339, 345, 347, 352: n = A,T,C or G
ccctttcgagcggccgcccgggcaggtacttttttttttttttttttttttttttttttttttttttttttttttttttttttttttttttttttttttttttntttttttttttttttnatatnttttttttttttttttttttttttttnnttttnaaaaaaaaaaaannttttttttttnngnnnnntttaaaaaanttantaaanaaaaaaatntgnngnggggggaanttnttntaaaaaatntntatttttnnctatnttttccnngngttttnttaataaaaaaannnnntttctaaaaaanatttttttttttatnttananntnnnnnnnggggtntnatttnagatttttttt

SEQ ID NO: 4590 - DNA, 153 bp, Homo sapiens
  misc_feature 103, 118, 123, 125: n = A,T,C or G
ccctttcgagcggccgtccgggcaggtacatgtggaggctggaatctgctctggttgatgttgtagtgcgtgaatgcctgggtggggtttgagctgtactttnatttttttttttttnttttngngaaatttttttttttttttttttttttt

SEQ ID NO: 4591 - DNA, 316 bp, Homo sapiens
  misc_feature 272: n = A,T,C or G
cccttagcgtggtcgcggccgaggtactgctaaatgataacttagatgcaggggccatcatgaaaatattcatcccatatcttacattaagcaaactactagcaactgtttgttaaaaagtataaatgaataaatcaaaataggacagataggcagtgtgggaagctaaaatatggaagtgttattgctttgctttatgtggtataatgatctgattttatctttcccagctctcccaggaagtatgcagaataatatttatctcatattgnggggtgtggcaatcaagacagaggggctagatgctttacctaaa

SEQ ID NO: 4592 - DNA, 319 bp, Homo sapiens
ccctttcgagcggccgcccgggcaggtacacccagtggctcatatttaacttcccccagcttcccaattcaaactggggggaaaaaaactaaatcattgggagttacttgccaacttggaagttgatatttctttactttttccccgcgtactctccttctagtgaaggattgtcacagagtttcactggatgaaactatgacccagtattcttactgtattttacatatgcctgtaaattatttgcaaaaaagaagaagaagaggaagaaagaaaagaaagaaaagaaagaaagaaagaaagaaagaaagaaagaaag

SEQ ID NO: 4593 - DNA, 451 bp, Homo sapiens
  misc_feature 344: n = A,T,C or G
ccctttcgagcggccgcccgggcaggtaccagttcttttgtggattttcaggaacatccatgactgattactgggttttgatcttcttcaacctcctcttcacgtctgcccctcttgtcatttatggtgttttggagaaagatgtgtctgcagagaccctcatgcaactgcctgaactttacagaagtggtcagaaatcagaggcatacttaccccataccttctggatcaccttattggatgctttttatcaaagcctggtctgcttctttgtgccttattttacctaccagggctcagatactgacatctttgcatttggaaaccccctgaacacagccggntctgttcatcgttctcctccatctggtcattgaaagcaagagtttgacttggattcacttgctggtcatcattgggtagcatcttggtcttattttttatttgccat

SEQ ID NO: 4594 - DNA, 324 bp, Homo sapiens
  misc_feature 24, 68, 148, 161, 162, 163, 164, 165, 166, 167, 168, 169,170, 171, 172, 173, 174, 175, 176, 177, 178, 179, 180, 181,182, 183, 184, 185, 186, 187, 188, 189, 190, 191, 192, 193,194, 195, 196, 197, 198, 199, 200, 201, 202, 203, 204: n = A,T,C or G
  misc_feature 205, 206, 207, 208, 209, 210, 211, 212, 213, 214, 215, 216,217, 218, 219, 220, 221, 222, 223, 224, 225, 226, 227, 228,229, 230, 231, 232, 233, 234, 235, 236, 237, 238, 239, 240,241, 242, 248, 249, 251, 259, 262, 265, 284, 292, 315: n = A,T,C or G
cccttagcgtggtccgcggccgangtaccatggaaggggctggggctggggagtgggcctgccaacangcaggggtcatgagaggttttctggaactagcctcagcttctcaaatgggccttaggacccgtgtacctgcccgggcggncgctcgaaagggnnnnnnnnnnnnnnnnnnnnnnnnnnnnnnnnnnnnnnnnnnnnnnnnnnnnnnnnnnnnnnnnnnnnnnnnnnnnnnnnnntctgtnntnaaattggntantcngtttacaattccacacaanaatacgancccggaagcataaagttgtaaangcctggggg

SEQ ID NO: 4595 - DNA, 555 bp, Homo sapiens
  misc_feature 12, 36, 41, 43, 50, 51, 63, 116, 191, 203, 217, 228, 232,261, 344, 346, 354, 374, 380, 444, 459, 496, 541, 543: n = A,T,C or G
cccttagcgtgntcgcggccgacgtacttgtttctntgcananagcagannactatatgaaancaacatccaacttcagtgggaagggatatatcattcagaaaagagaaataaanccatgcttggaagcagataaaccagttgaagacatactgacgtatgaggaatttcatcctttcttgttttctcancattcacaatgnccatatatagaatntgaatcatttnacanggcggtggatgaattttattccaagatanaaggccagaaaattgacttaaaagctttacaacaggaaaagcaagcattgaagaaattagataatgttcgaaaggatcacganancagattgnaagctcttcagcaggctcangaaatngacaaactgaaaggagagctcatagaaatgaacctacaaatagttgacagaaccattcaggtanttcgaagtgctttanctaaccagatagattggacagaaattgggttaattgngaaagaagcccaggctcaaggagaccctgttgcaagtgccaatcnanagaattaaaact

SEQ ID NO: 4596 - DNA, 620 bp, Homo sapiens
  misc_feature 331, 471, 474, 497, 514, 520, 536, 604: n = A,T,C or G
cccttagcgtggtgcggccgaggtacacatccaggcactttttgggtcatatggtgctttccaacatgggcccacccagtcttcacaataagcctgtaaggcagatgggccagaaatggagaaaaagggaaacagaagggtctttgattcaaggaaggagcaagcgagagtcaagcctctctcttttggctattaatccactttctttctataaaaccatctaggccaatggattttctggaggccttggggcttatgcctctttaggaaacactttgttttattatgtcaaggtgtatgggtactggcccgaggtttctaagttttttangcatttatgaaaatccagcttgctgaagtcacagcacgtgtgtaattgtattgggtaagttaatggctatttatgtttggaggtgtttggaaaacaagaaggaggcaagaattttgaaaatgtgttttgaccaaggtgtnggngggctcacacctttaatcccaancacttttgggaaggccnaggcangaaggatttgtttganctcaaggagttttgaaaccaaccttgggtgaccacaggaaagaccctttattttttcttaaaaaactngaaaaaaaaaaaaaaa

SEQ ID NO: 4597 - DNA, 558 bp, Homo sapiens
  misc_feature 55, 57, 114, 266, 306, 375, 379, 401, 404, 413, 428, 435,465, 468, 497, 504, 530, 542, 544: n = A,T,C or G
cccttagcgtggtcgcggccgaggtactttttttttttttttttttttttttggnanagatgcggtctccaagtgtttcccaggctggtcttgaactcttgagcttaaggaatnttcccaccttagcctccccaaatgctgggattacagatgtgaaccaccatgcctagctagaggctcgagttttttaaagatagttttgtgggctagggaaggggtggtgctgattggttggggatatcataggggtgtgaaaaatggtcctnctgtgctgagtccacttctgggtggggcccacaggacctntgagtcatgagtcttgggtctgggtggagccatccgatcattaagaaatacaaaaagcctgaaaagacntttnaaaaggttaatcttcgcttctnttnataatggangttatttacaaaaantaaattnggggaaaattgcaaattttgggacctccanaantaatgactggtaatcatttaactatgccntacattntaaccaaaatttaggccccttgtcanttctccccaatntnggcggggtttttta

SEQ ID NO: 4598 - DNA, 183 bp, Homo sapiens
  misc_feature 30, 31, 34, 42, 49, 50, 77, 86, 87, 91, 94, 95, 96, 97, 98,103, 106, 119, 129, 132, 145, 146, 155, 167, 168: n = A,T,C or G
cccttagcgtggtcgcggccgaggtacttnnttntttttttnttctttnntttttattataaaactaacagctcgtnacaatctanntttnttnnnnnccttnttncttttcccaactncaaaatactntgnggagatgcattannatttaaaanatataatattgnncaaacaaccaaaagg

SEQ ID NO: 4599 - DNA, 420 bp, Homo sapiens
cccttcgagcggccgcccgggcaggtacgcgggcttgtggccggacacgatggctcacgcctgtggtcttagccctttggtaggccaaggcgggcggatcactttagcccaggagttctagactatcttgggcaacatggtgaaaccctgtctctacaaaaaacaaaacaaaacaaagaaattagctaggtatggtggtgctacctgggaggctgaggttttcacaggttgaaccccaaaattagggttcagtccaggaggccatttgggttcttggcttcatgaaggaaggaattcaagaataagctgacagtaaagtagaagcaagtatattaagaaaagtaaaggaatagcgccgggccgtggtggctcacgcctgtaatcccagcactttgagagggtgagggcgggtggattgct

SEQ ID NO: 4600 - DNA, 387 bp, Homo sapiens
  misc_feature 189, 297, 308: n = A,T,C or G
cccttagcgtggtcgcggccgaggacatggaatgcttgtattctttttaattatcaaggcatcagtgtggttcttaaagccatgtgcctgtgtatgcttgcctaagtgtgaatgacatacacagacataaccttacattgctttcccaaaaggggaatgccaccaacaaatcaactaattggtactttncttttttttttttttttttttttagggggactataacccattttctattaatgagcacatggaatctttattgcatttttctatcataaacacttctacaataattgngcctgcataanatttattctatatttatactgctgtatttctgaaatagaattccaaaattcataattttgtcaggtacctgcccgggcg

SEQ ID NO: 4601 - DNA, 207 bp, Homo sapiens
  misc_feature 17, 99, 130, 144, 176, 177, 181, 195, 197: n = A,T,C or G
ccctttcgagcggccgnccgggcaggtacttgtcctcagcttgggcttcttcctcctccatcacctgaaacactggacctgggggtagccccgccccanccctcagttcacccccacttcccacttggcngtcttgtttgcctngaaacttttctaatcctattaccgtttcttgnnggangttaaaattaattngngaattttggg

SEQ ID NO: 4602 - DNA, 385 bp, Homo sapiens
  misc_feature 54: n = A,T,C or G
cccttagcgtggtcgcggccgaggtacttggtagacaagttctagatctctganagatgagcatatgctcatggctgactgaaaaaacttatcatcatccgggtcctttggagaaaatctctttcccattaattcattcattatatcataaatgatgaaggatgatctctttaaagggtctccaggttgatcaaacaggcgaataatatggtgatatgttgcaagcgagggttctcaaattaccaggtagacagaaaaaataaacaatgaggtaaaaacacagcaatccaaaacatagtttactggagaccgcactgaattaaaaacatattgttaatatttaagccaaaatattgcatttctattcctttgaacaaagttattt

SEQ ID NO: 4603 - DNA, 238 bp, Homo sapiens
  misc_feature 31, 36, 37, 42, 45, 52, 61, 67, 71, 72, 78, 79, 81, 87, 88,91, 93, 99, 101, 104, 106, 116, 123, 126, 130, 139, 140,142, 145, 150, 153, 154, 164, 171, 172, 175, 177, 181, 186,187, 191, 192, 193, 194, 195, 198, 199, 200, 207, 218: n = A,T,C or G
  misc_feature 221, 225, 227, 228: n = A,T,C or G
ggtactttttttttttttttttttttttttngggannaggtnatnaaatttnttttaaaanaaaagntttnntgggcnngnttaaannccngnaaaaangnatncntaagggcctnaataaantanccangggcctaannanganggatnccnnaaaaaaaccnttaaaannttntnaacntaacnnaaannnnnccnnnccataanaatttttcaangcntctnannaaaaaaaaaa

SEQ ID NO: 4604 - DNA, 674 bp, Homo sapiens
  misc_feature 172, 247, 249, 339, 350, 441, 493, 523, 536, 552, 612, 613,636: n = A,T,C or G
ccctttcgagcggccgcccgggcaggtacttttttttttttttttttttttttttaaggagagagaaggtttcaccatgttggccaggctggtctcgaactcctgacctcaggtgatctgcctgccttggccttccaaagtgctaggattacagatgttttgattccatagnttaattaattctgtgggcaatttatttcggcattccaatttgaacacacaagcccactatgaggcccattctttntnttttacacacacacacacacacacacacacacacacacacacactctgtccctgctctctcgctctcatttgcttgctcatcaaaacatntgctctgtatntcactgaaatatctgtcttctgtttcattcctccaagtaaaatgggtaacaacgcgttagaaagagttgcataggccagacatggtggttnacgcctataatcccagcagtttgggaggctgaaattacaggcgtgaagccantgcgtctggcctttacctttacaattaaanaataaaaatcttnttgggagttcatgatncctagaattattattggatttaaaaattttccattttttcaaatacttttttttagaaannaaaagttaaaggtcattaaaaanatgttaatttctggttacctaatacatttttaaaatat

SEQ ID NO: 4605 - DNA, 386 bp, Homo sapiens
  misc_feature 213, 226, 227, 315, 355: n = A,T,C or G
cccttagcgtggtcgcggccgaggtacgcgggttacagctgcttttatacccccttgccccgccaacgtagttaagagaacagcagcataagcggtggcagaggcaaggaaagaccagtagagagaaaaaaaggccatctataccaattctaagttaatttaagactaaacaaggtcttaatagcaaaggataattgaaatcccaaacttcanggttttcaacaanngtgaagtttgcttaaagttaacagtgtaacatgtattatggtacttctaattctttgtggcccttagacagtctagtccaaaggcatnaaaagaaaggttttgctttaaaaaaaaaaaaaaaagggantggttatttttcaaaaaaaaaaaaaaaagtg

SEQ ID NO: 4606 - DNA, 512 bp, Homo sapiens
  misc_feature 63, 64: n = A,T,C or G
cgccagtgtgatgggatatctgcagaattcgcccttcgagcggcccgcccgggcaggtacttnntttttttttttttttttttttttgagacggagtcttgctctgttgcccaggctggagtgcagtagcacgatctcggctcactgcaccctccgtctctcgggttcaagcaattgtctgcctcaacctcccgagtagctgggattacaggtgcgcactaccacgccaagctaatttttgtattttttagtaaagatggggtttcaccatcttggccaggctggtcttgaattcctgacctcaggtgatccacccaccttggcctcccaaagtgctagtattatgggcgtgaaccaccatgcccagcccgaaaagcttttgaggggctgacttcaatccatgtaggaaagtaaaatggaaggaaattgggtgcatttctaggacttttctaacatatgtctataatataggggttaaggttctttttttttcaggaatacatttggaaatt

SEQ ID NO: 4607 - DNA, 430 bp, Homo sapiens
  misc_feature 324: n = A,T,C or G
cccttagcgtggtcgcggccgaggtacattagttccgtccggaaaggcggagacagctcaaagcaagaccccctattgggggcttcgaagtaacaggtaggtgagagacagatggttgcattcttttgagtttcttgataagtctttccaaaggaggcaatcagaatatgcatctggtctctgtgagcaaatggatgacttgaatagaatagaaggcagatttgccctgagcagttcccatcttgaagggacccaagaatatttttctttcacattttccccttttcttttttaacatctttggagaaagcatttttacaacanaatgagtctccagtctcaggaaaggtcatctgacctttcctggctagggacggttttattcctagattggtaggtcttgggaaaggttcatttttttagcagggtt

SEQ ID NO: 4608 - DNA, 330 bp, Homo sapiens
ccctttcgagcggccgcccgggcaggtacaagttgaaatgtagttattggaaaagtctgtaacctgtggatcatatatattcaaagtgagacaaaggcaaataaaaagcagctattttcatgaatagacaaagttgatttcaggaagtataaattatattctgcaccgaacaaggaacagaaattattgcatctgtggaacatatatctggagttactatactttactgaagagcaaggcataaatttagactaaaatccatccagattacactcattctttaggctactcctggatacttcatttaaatttgatttttcgaggtagtga

SEQ ID NO: 4609 - DNA, 373 bp, Homo sapiens
ccctttgagcggccgcccgggcaggtacggccagggctattggttgaatgagtaggctgatggtttcgataataactagcatggggataaggggtgtaggtgtgccttgtggtaagaagtgggctagggcatttttaatcttagagcgaaagcctataattaccccgcgtacgagctcatgaaagtgttgtgaagggcgaagacttttcgctcccagcttatatggatcggcgtgaccaccccttgccggaggtggcccatgtcaagcacctgtctgccagccagtaaggcactgaaggagaaggagaaggcctcctggagcagcctctccatgggatgagaaagtcgagttgtatccgcattaagttcaagg

SEQ ID NO: 4610 - DNA, 724 bp, Homo sapiens
  misc_feature 544, 657, 671, 678: n = A,T,C or G
ccctttcgagcggcccgcccgggcaggtacaggaagcatggctgggaggcctcaggaaacttacaatcatggtggaaggataaaggggaattaagcacgtcttcacatggcagcaggagagagagagagcaaagggggaagtgcaacatacttttaaacaaccggatctcatgagaattcactgtcacaagaacagcaagagggaaatctgcccccatgttccaatcacctcccaccaggtccctcccccaacactggggatttccagtcaacatgagatttgggtggagacacagagccaagaccatatcagtatcctcacataacagaagagaaactgagtcataagtaaatgaagtaatgtgcccacttcccacagtcaagaagtggtagagctgagattcagcagatgaagccttactcagagcctgtgctctgaacaccagtgtgatcctgcctcctggctaaaacctttggtgggtaggggagggaacagccttattctctctattcttttatcttcaagtgcccaacccgcagagtnatcctcatcaaacattgaaattaagttcattattaggtggcttctaggtcacatcttatactggtcactttgcaatataatttaagcagaaaaccctacttgttactgtcaanaacttattacctangctctgnattttgattcataagttcgaaaaatcacatgccttttttttttttt

SEQ ID NO: 4611 - DNA, 484 bp, Homo sapiens
cccttagcgtggtcgcggccgaggtacctagaagtggattgctgctgaccaagtaagttttaaacctagtgcttttatattacgccctgagctaaagatagaactgtgaataaaaactgaattctggttagttgatttttaaaaagagtggtatgagttatcaattctgagagtagcttatattttaatctaggattgagcacgtgctatttttgcaagtgatgaaagatagctacagacaagggaatttggaaaggcaagaaataacccagcagtgctgcagtggaattaaaagtgttggcttgtggtcatgtttttaatatagaaatagagttattaatgtgtggatacgtatatataattttgtatgtctttgccatatcctccatagagaagacctaaaagccagggcactattacctaggaacaccttcctacacagagactgcagcttctaaatagtattctccattaaaataaatta

SEQ ID NO: 4612 - DNA, 470 bp, Homo sapiens
  misc_feature 431: n = A,T,C or G
cccttagcgtggtcgcggccgaggtactgattgtcttttcttgattgtcagctttcttgtgggcatcatccagttgctgttgaagcaacctattttcactttgtagttgagcacatctgtcctctatagattcctgcttcttcagcgtatttatttactttgctttgttcatttttatacattcgttcaatttctttcttttgacactgtgtttggccaaggtctctttggaaacattctaaaactgacgtcttttctctgagtgtttctcttgcatgatgaaacttaatttttaggctgttaattttactgtcagcattagagagttttttcagaaacaatctgttatcttttaggttagacatatcagaattcattttctcctgtaaatgaacccattcatgtcctgttctctggaaagcaagttctangttttcttatgctgtctgactttgatcacaatcatgtac

SEQ ID NO: 4613 - DNA, 678 bp, Homo sapiens
  misc_feature 237, 375, 378, 382, 430, 445, 446, 462, 490, 492, 497, 525,532, 534, 561, 585, 590, 594, 596, 600, 612, 618, 621, 631,639, 640, 643, 653, 656, 657, 662, 664, 667, 675: n = A,T,C or G
ccctttcgagcggccgcccgggcaggtacgcgggcaaaaatgttttccttttgttttaccaggaatgagttcgggctatactctttgaaactgctttgtgagcaaagtgctttggcaaggcaagggtctccctcagcagggctaggtgcactacagcctctttccccgtgtcccgttggatctgagctgtgtagcacttgttgcattacaaagaaaaagacttctgcaggaaatagnggtagagaacaggctgtctaatcagatgcaacttgatctgtggcaaaaccaagtgtggtctttcaacttcaagtgtgttaacatcccaacacctgggatggggtttgtgggccaagttgattttgcccacacttgtanggnccangtggtcccattgccaccgtgaagccaaattctagcccaagtctggtanaacaagtcgggcaanntaagttttcgggggangatgatgtggtgggacaaaggaccttantngcctnttacggaccctttttccaaaactaaatnatacccnanaactttggggggatggttaagttaaanttaaaatattttttaaaattcttnatttnggantntaanggttaagggggnaatttnggnaaaccgtttnaaaggggnngtntgaaaccctnaannatttngnggnaaaaaaanaaa

SEQ ID NO: 4614 - DNA, 426 bp, Homo sapiens
cccttagcgtggtcgcggccgaggtacctctgactggcacttctggcttgctgttgtccttggagaagtctgggcctgggacagaggagggatgtaatctgaacactcctttgtcacaggtcaccagggtgtgcttgagggggacgggtagacataaacggaattcagaggcagggaagactgcagagtagaaaggtgatgtgccacaagctcccgacaatggatcaactgggagctatccatctgggccaggaaaaaaaaaaaagccacacacagttgatcattaattaacataggctgctctgttatctctggtggccatttttcctccctgtgctttccgtccccgctgagtcttttctctccccacatctacctccaactcatttatttatccagctacccatccatcaacatcatcttaga

SEQ ID NO: 4615 - DNA, 506 bp, Homo sapiens
  misc_feature 467, 487, 489: n = A,T,C or G
ccctttgagcggccgcccgggcaggtacatgtgggcaggtaaaggtgcagtggttcacgcctgtaatccttgcactttgggaggccgaagcaggaggatcacttgagcccaggaacttgagaccagcctgggcaacaaagcaagatcctgtctctatttggaaaaaaaaaaaaagaaaacaggcacggtggctcacgcctgtaatcccagcactttgggaggccgaggcaggtggatcacttgaggtcaggagtttaagacaagcctggccaacatagtgaaacctagtctctactacaaatacaaaaattagccaggtgtagtggcatgtgcctgtagtcccagctacttgggaggctgagactggacaaaaattaacaaggtgtggtggtaccacagttttaactgaaggaaccagttgtaaccagtcttaattttaacttaaaactttgaagaaacttaaaacnacaatgcaaaaccttttcancnattgtttggcccaaact

SEQ ID NO: 4616 - DNA, 199 bp, Homo sapiens
ccctttcgagcggccgcccgggcaggtacctgaaaagaatatcaacctgaaaagaatatcaactcacccagaaattagttctttgaaaaaaaagaaattaagttgtgaatttctaaagaccttgaaataagtgtttcaaatttaaagaacaaagaatgatgtgaaaatgagattatgattcctactacatgaattaacg

SEQ ID NO: 4617 - DNA, 510 bp, Homo sapiens
  misc_feature 63, 82, 410, 424, 437, 446, 452, 458, 461, 472, 501: n = A,T,C or G
cccttcgagcggccgcccgggcaggtactttttttttttttttttttttggggaaatgtttanagacctgcaatttatccanccactgatgaagctggttagagctggcaggaactccaaattattcttgcatacactgtcccccctgcctggacatgagcacagtcaggcaaggtctgcgagtatgccctccaaattaagttttcactttctctctttatgctctaagaagtttaagtgacttgtacataaactgtgtttcacttccagatcagtctgacactctccaacaaaaccaaatacatttcgtatgaggcaacacaattttttttttttttttgagatgggagtctcgctctgttgtccaggttggagtgcaagtggtgtgatcttggcttactgcaacctcncaccttctgggttnaagcaaatttttnctgccttanccttcncaagtngcntaggactactnggtggtgccaccaccacgccctggctaanttttttttt

SEQ ID NO: 4618 - DNA, 310 bp, Homo sapiens
  misc_feature 106, 109, 116, 147, 152, 165, 168, 170, 171, 173, 175, 176,177, 181, 191, 192, 194, 195, 201, 205, 210, 215, 217, 218,223, 232, 235, 239, 241, 248, 251, 252, 253, 254, 259, 266,272, 285, 290, 291, 293, 294, 295, 299: n = A,T,C or G
cccttagcgtggtcgcggccgaggtacgcggggtggaagaagagaaaaaaaaagaaaaaaaaaaaaaaaaaaaaaaaaaaaaaaaaaaaaaaaaaaaaaaaaaaanaangaaaaanaaaaaaaaaaaaaaaaaaaaaaaaaaaaaangtttntaaacatttttantancnngngnnntttnaaaaaaaaanncnntaaagntttnaatanaattntnntcccntaaaaaaantangggngngttaatnatnnnnggggnttttttnaaaatnaaaaaaaaaaatnttttnntnnngggntagaaaaaaaa

SEQ ID NO: 4619 - DNA, 399 bp, Homo sapiens
  misc_feature 226, 252, 266, 312, 313, 334, 346, 358, 380, 383: n = A,T,C or G
cccttagcgtggtcgcggccgaggacatagaaaagaaagataaatgcttgattcctgattaaaagaatcttaagagactgattaaccagctataacacatggaaattttctggatcccaattcaaaagtatcagctgttaaaaaaaagtaagataaatgagatcacttataagacagtcaagaaatattgcgcactgattaaatatttgatgatattaaagaaaancgatgtttttctttttaagggaggtngatattgatatttntttctaaaccagttattatttaccattatttaaattaggtatttannttattaaataccttttttagnataaataattantaaactttattnccttttaaattaccccccccanaancccaaaaattaaattt

SEQ ID NO: 4620 - DNA, 330 bp, Homo sapiens
  misc_feature 57, 103, 115, 160, 246, 291: n = A,T,C or G
cccttagcgtggtcgcggccgaggtacttttttttttttttttttttttttttttanaaactgatgtttattttccatcaaccatttttccatgctgcttaanagcctatgcaanaacagcttaaagaccaagtcagtgggttgctcctacccattcagnggcctgagcagtgggagctgcaaaccagtcttccgtggcaggctgagcgctccagtcttcagtagggaattgctgaataggcacanagggcacctgtacactgtatgcatcatcagtccaaagtttttcanagttctatgtgactggttgaggaaacactgcttgaattt

SEQ ID NO: 4621 - DNA, 628 bp, Homo sapiens
  misc_feature 589: n = A,T,C or G
cccttagcgtggtcgcggccgaggtactagaagaggctattgagactatgagctcacagacagggcttcgcacaaactcaaatcataattgacatgttttatggattactggaatcttgatagcataatgaagttgttctaattaacagagagcatttaaatatacactaagtgcacaaattgtggagtaaagtcatcaagctctgtttttgaggtctaagtcacaaagcatttgttttaacctgtaatggcaccatgtttaatggtggtttttttttttgaactacatctttcctttaaaaattattggtttctttttatttgtttttaccttagaaatcaattatatacagtcaaaaatatttgatatgctcatacgttgtatctgcagcaatttcagataagtagctaaaatggccaaagccccaaactaagcctccttttctggccctcaatatgactttaaatttgacttttcagtgcctcagtttgcacatctgtaatacagcaatgctaagtagtcaaggcctttgataattggcactatggaaatcctgcaagatcccactacatatgtgtggagcagaanggtaactcggctacagtaacagcttaattttggtaaatt

SEQ ID NO: 4622 - DNA, 650 bp, Homo sapiens
  misc_feature 392, 393, 394, 395, 396, 397, 398, 399, 400, 401, 402, 403,404, 405, 406, 407, 408, 409, 410, 411, 412, 413, 414, 415,416, 417, 418, 419, 420, 421, 422, 423, 424, 425, 426, 427,428, 429, 430, 431, 432, 433, 434, 435, 436, 437, 438: n = A,T,C or G
  misc_feature 439, 440, 441, 442, 443, 444, 445, 446, 447, 448, 449, 450,451, 452, 453, 454, 455, 456, 457, 458, 459, 460, 461, 462,463, 464, 465, 466, 467, 468, 469, 470, 471, 472, 473, 474,475, 476, 477, 478, 479, 480, 481, 482, 483, 484, 485: n = A,T,C or G
  misc_feature 486, 487, 488, 489, 490, 526, 527, 528, 529, 530, 531, 532,533, 534, 535, 536, 537, 538, 539, 540, 541, 542, 543, 544,545, 546, 547, 548, 549, 550, 551, 552, 553, 554, 555, 556,557, 558, 559, 560, 561, 562, 563, 564, 565, 566, 567: n = A,T,C or G
  misc_feature 568, 569, 570, 571, 572, 573, 574, 575, 576, 577, 578, 585,638: n = A,T,C or G
cccttagcggcccgcccgggcaggtacactgatctacaaaaattttaaaatgagccgggcgcggtgactcacgcctgtaatcccagcactttgggaggcaaagcaggcggatcatgaggtcaggagatcaagaccatcctggctaacacggtgaaaccccgtctctactaaaaatacaaaaaattagccgggtgtggtggcgggcacctgtagtcccagctactcgggaggctgaggcaggagaatggcgtgaagccgggaggtggagcttgcagtgagccgagatcacaccactgcactccagcctgggcaacaaagcaagactctcaaaaaagaaaaaaatttttttttaaatgagctgggtgtacctcggccgcgaccacgctaagggnnnnnnnnnnnnnnnnnnnnnnnnnnnnnnnnnnnnnnnnnnnnnnnnnnnnnnnnnnnnnnnnnnnnnnnnnnnnnnnnnnnnnnnnnnnnnnnnnnntccgctcacaattcccacaacattacgagccggaannnnnnnnnnnnnnnnnnnnnnnnnnnnnnnnnnnnnnnnnnnnnnnnnnnnngcgttgngcttactggccctttccatcgggaaaactgtctgccacttgattaatgaatcngccaacccccgg

SEQ ID NO: 4623 - DNA, 416 bp, Homo sapiens
  misc_feature 34, 36, 41, 43, 46, 47, 48, 49, 55, 59, 71, 93, 98, 99, 100,103, 122, 128, 134, 137, 143, 150, 151, 161, 165, 169, 173,178, 205, 211, 213, 223, 233, 238, 242, 255, 288, 294, 306,309, 322, 334, 368, 374, 382, 386, 396, 409: n = A,T,C or G
cccttagcgtggtcgcggccgaggtacatatgcngntgatntnatnnnnccagcnaacnacctgccatgcnatgcattgacagcatcaatagntgcannnatngatgggcactacacatacncattgncctganctnaatttnttgtcannataaaatatnaatnactnctgnatgcntattacattcttcaatcacatcatccntaatcncngtttcccatncaacttcttnttctntgtnagaaagtgttaangactcttaaatactattgaacctaacaagactntatatntacaaatgtttnagnaaaagtttaaatntttttatgaatntaaaaaaatacttttggaaaaaaaagcacattgncagaangtattttncccnaaagaaacantgcaagtctggtnttgaaaa

SEQ ID NO: 4624 - DNA, 184 bp, Homo sapiens
  misc_feature 145, 146: n = A,T,C or G
cccttagcgtggtcgcggccgaggtacactgcctcatcgatctaatctaatccctatgacgacctacagagatagatactattatctttgttttatagatgaggaagctgaggcctaatgttaagtaatccccctgaggactcanncctgggaaattaaagagagcaggattagactcaggtct

SEQ ID NO: 4625 - DNA, 432 bp, Homo sapiens
  misc_feature 372, 375, 383, 392, 410, 413, 428: n = A,T,C or G
ccctttcgagcggccgcccgggcaggtacgcgggatggaaaaactgcaggaaatagacaagagaaaacctgaaaacactgctgagcttgagatcttccaagaaggcataaaggtcttagaaacactggttactgttgctgaagaacaccatcgcgctcagctggtggcctgtcttttgcccatcctcatttccttccttttggatgaaaattctctgggatcagcaacttccataatgagaaatttacatgactttgctctacaaaatctcatgcaaattggacctcagtattcatctgtttttaaaagttttagtgggctttttctccagccctaaaagcccgtcttgaggctgctataaagggcaatcanganagtgtctnaagtcaagnataccaacatctaaaatnttnctaagagtcctgggnaaaa

SEQ ID NO: 4626 - DNA, 330 bp, Homo sapiens
cccttagcgtggtcgcggccgaggtaccattccgggtcatccgcagaaattcctcatagatggcaactctgtctactctccgagccagtggcgagaagttacacagggagtccaccccggtgtggtgcctggttggggacagacctgaatgttgaaacttgacagtcagaaaaataactcttgatgctgctgtttcggaagagttggttgagcgcatcctcaatatttcttttgttcctctggtaattggtggtgcctggctgggctttgtcctgggaatatggtaggtttggtgatggtgaaattcaaggtagaaagtgcttgggtgct

SEQ ID NO: 4627 - DNA, 309 bp, Homo sapiens
ccctttcgagcggccgcccgggcaggtacaggggacagcaatctatggctctcaggccaaatccagccactgcctgcttttgtgtggcctgcaggctgaaaatggtttgtccatttttaaatagttaaaaagaatcaacagaaaaacagtattttatgatatatactgtattacatattattttatataaaattcaaatttcagtgtccataaataaaatttttggaacaaattgtgtatgtattgcctatagctgttttcactctaccatagcatagtcaaatagttgcaacagagatgtgtatggcc

SEQ ID NO: 4628 - DNA, 554 bp, Homo sapiens
  misc_feature 260, 401, 420, 445, 453, 461, 526: n = A,T,C or G
cccttagcgtggtcgcggccgaggtacttttttttttttttttttaagacggagtcttgttcagctgcccaggctggagtgcagtggctcgatcttcgctcactgcaaccaccgtctcctgggttcaagcgattctcctgtctcagcttcccaagtagctgggattacaggccaccaccatcatgcccggctaatttttgtatattggtagagacggagtttcactatgttgggcaggctggtcttgaactcctcacctnaggtgatcccgcccgtcttggcctcccaaagtgctaggattacaggcgtaagccaccatgcctggccagatgatgtatttaaatatcataccaaactctgtgtatttatataaagagagactgttaaaagacttcataatntaaaaaaaaaccaaaaacnaaaaaaaactttacgcttaccattnctgcatantgtgcagnattaaaacacacacttatttgggatcaatgagaaatacggcaagaaatggtctgcgtaaaactgnaacttttgacaggcatttaaaaaaataa

SEQ ID NO: 4629 - DNA, 362 bp, Homo sapiens
  misc_feature 78, 218, 233, 241, 267, 274: n = A,T,C or G
ccctttcgagcggccgcccgggcaggtacatcatattgaattaatatgaaaaatacagagaatgtaaacatctctganttaaaatattcccaaaagttttaaagcatggataatatatctttaaaattggataaaatgtgcttggatgctttaaacatatactcaaaatagtaaataaatgtttgtggccaggcatggtggctcatgcctgtaatctnagcactttgggaggntgagacangcagatcacttgaagtcaggagtttnaaaccancctggacaacatggtgaaaccccgtctctactaaaaacaaataataataataataataataataatgcagaaaaatctgggcatggtg

SEQ ID NO: 4630 - DNA, 543 bp, Homo sapiens
  misc_feature 287, 316, 361, 405, 459, 480, 490, 512, 519: n = A,T,C or G
cccttcgagcggccgcccgggcaggtacatgtgtgtatgtgtatctttgggaaaagaagaagacatcttgtttactatttttttggagagaggctgggacatggacaatcacataatttgctattattacttcaatctgacttgaagaaccgtttaaaaataaaatttagcatgtcatatattccttatagtaggcttatttcaccttttttctgtccagagagagtatcagtgaagaaagattttaccgggtgaaaacatgaattggtgggacttaagtaaagagntgaaaaactactacaatgtgggctacggntattataaaatgatagagatggaaactagagtaagtttattttgnctgttaaacctggaagtgagctaggcatgggtcactcacgcctngtaatcccaacactttttgggagccccaagaacaggagggatcccttgaagtcncaggaagtttcaaggacccangtctggggcnaacacaaggggaccacccccantctctgncccaaaaaaaaaaaaaaggaaagg

SEQ ID NO: 4631 - DNA, 152 bp, Homo sapiens
  misc_feature 17, 102, 112: n = A,T,C or G
cccttagcgtggtcgcngccgaggtgtcgctgagactcggggagccattgaccatcgtctctgaggatggagactggtggacggtgctgtctgaagtctcangcagagagtntaacatccccagcgtccacgtggccaaagtctcccatggg

SEQ ID NO: 4632 - DNA, 525 bp, Homo sapiens
  misc_feature 354, 522: n = A,T,C or G
cccttagcggcccgcccgggcaggtaccttttatgtaaattttgcacagaaatttttggcataagtttattttctttcagtttagttcagtgcatgcactaataaaactggttgtttaatttaaaaggaatatataagactttacccatgttattttcttggtttttatttcagatgtagattttgtttttgaggtaaattcgttcttcagggattgaacactattgttagcaagtgcctaaaaaagatgtgaaacagtttacatatgtcaactgtaacagtaggtcccaaaggcaactttaaagttctggaaccaagacggagggcgaatatgggggcaaataaaaacaatangatacctcctaaaactctttttcataagtgttatttaaagccatcaaactgtccaggtgcagtggcttatatctgtaatcccagcacttttggagtctgaggtgggaggattgcttgaggccagaactttgagaccagcctgggcaacatagacccctgtcccttccnaaa

SEQ ID NO: 4633 - DNA, 385 bp, Homo sapiens
  misc_feature 322: n = A,T,C or G
cccttagcgtggtcgcggccgaggtaccaatatctgtattagtcgtggttcttgaaaaggacagaactcatagcatagatgagtttattaaggagtattgactcacacgatcacaaggtgaagtcccacaataggccatctgcaagctgaggagcaaggaagccagttcgagtcccaaaacctcaaaagtggggaagctgacagtgcagccttcagtctgtggctgaaggtcagacagcccctggtaaaccattggtgtaagtccaagggtccaaacattgaagaacttggagtccaatgttccagagcaggaagcatccanccaggaaaaagatgaaggccagaggactcagcaagtctgttctttccactttcttctgctgct

SEQ ID NO: 4634 - DNA, 631 bp, Homo sapiens
  misc_feature 52, 54, 150, 151, 157, 158, 159, 160, 162, 163, 164, 165,172, 175, 181, 184, 186, 187, 188, 189, 191, 193, 198, 203,204, 209, 210, 211, 213, 214, 215, 217, 218, 219, 220, 221,222, 223, 224, 225, 226, 236, 240, 241, 242, 243, 244: n = A,T,C or G
  misc_feature 249, 259, 271, 273, 274, 282, 289, 358, 362, 364, 370, 372,379, 381, 391, 394, 395, 400, 408, 409, 411, 416, 434, 442,453, 455, 456, 457, 458, 461, 479, 490, 491, 495, 500, 516,528, 532, 534, 544, 551, 557, 561, 563, 568, 569, 573: n = A,T,C or G
  misc_feature 574, 575, 576, 580, 581, 582, 589, 606, 607, 608, 609, 615,616, 617, 618, 619: n = A,T,C or G
ccctttcgagcggccgcccgggcaggtacttttttttttttttttttttttngnttttttttttttttttttttttttttttttttttttttttttttttttttttttttttttttttttttttttttttttttttttttttttttttgnngggggnnnntnnnnaaaaaanggntaaaanaantnnnnangnaaaanaaatnnttttnnncnnncnnnnnnnnnnaaaaaaaaantttnnnnnttttnaagggggggnaaaaaaaagggnanngggggggnaaaaaantttttttttaaaaaaaaaaaaaataaaatttttttttggggaaaaaaaaaaaaaatttttttttttttntttnanaaaaananggggttntncccccccctnggnnaaaanggaaaaanncngcccnttttttttaaaaaaaaangggggggnttttttaattngnnnnggnttttttaaaaaaaaaagntttttttttgnnaaanttttnaaaaaaaaaaattttntgtaaaaaaaanttcncnaaatttgaanaaatttngggggntccntntcaannaaannnngggnnnccttccncggggaaattttttaannnngggggnnnnnaaaaaaaaaaaa

SEQ ID NO: 4635 - DNA, 492 bp, Homo sapiens
  misc_feature 55, 146, 160, 170, 318, 336, 337, 346, 350, 353, 366, 393,397, 399, 401, 407, 413, 428, 439, 462, 472, 476: n = A,T,C or G
cccttcgagcggccgcccgggcaggtacttttttttttttttttttttttttttncccctgcatttctttggagtaatcagttatttttttactattccattttctcctctattagcttttcgttatatattcttttttcatttanaggttgctctaaanattacaaatncacttttgactgattaccacccgcctccagccttttgttctacaagttgtcgtatttttgtttccacatattttaaatcccacaagccacaactattattttaaacaagtcaaaatttgtatttactcacatttatccttaccattgntcatttttttctgcaagnncttggtttnatcnggnattttcttgcaanaaaaaaaaaacttgctttaaatattcnttangngncagcanattcancaaatatatttttcnggagctttaantttggccttcattttaactttanctaatggaanggantttttttaaaatttaa

SEQ ID NO: 4636 - DNA, 263 bp, Homo sapiens
  misc_feature 67, 70, 104, 112, 126, 134, 153, 194, 199, 209, 212, 219,222, 234, 240: n = A,T,C or G
cccttagcgtggtcgcggccgaggtactttttttttttttttttttttttttttattaaaaatttantantgtttattatacacagtcttttaataaataaaanaggacacntaataaagattcanttttcaantaatttttaattttcaagnactaaacagccttaatctttgattgagtttctaaaattctncacantatctttcanaanaatcttnaanttttaaaaaatntacatngaattctctttccatttttgatg

SEQ ID NO: 4637 - DNA, 347 bp, Homo sapiens
cccttagcgtggtcgcggccgaggtacagatttgctttctcttacaaaaagaaaaaaaaaaatcctgttgtattaacttttaaaaacagaattgtgttatgtgatcagttttgggggttaacctttgcttaaattcctcaggctttgcgatttaaggagggagctgccttaaaaaaaaataaaggccttattttgcaattatgggagtaaacaatagtctagagaagcatttggtaagctttatcatatatatattttttaaagaagagaaaaacaccttgagccttaaaaccggtgctgctgggaaacatttggcactctttttagtgcatttcctcctgcctttt

SEQ ID NO: 4638 - DNA, 322 bp, Homo sapiens
  misc_feature 52: n = A,T,C or G
ccctttcgagcggccgcccgggcaggtacttttttttttttttttttaaatngggtttttggtctttttttctcaattagaaaggtcttcggaaattagatatattggcctttcatctatgaagtatattacacatatctctcccaatttgtttatcttttgactttgattacagtgttttattttcttttcagtcatataaaatttttatacttatagagacaaatttaagaatcatttcttttattgcttctggactttggttcgtagttagagagcatttcttaacacccgcgtacctcggccgcgaccacgctaaggg

SEQ ID NO: 4639 - DNA, 324 bp, Homo sapiens
cccttagcgtggtcgcggccgaggtacgcgggggacaagatcctgtctcaaaaaaaaaaaaaaaatccttaaaaaaaagatgaaagatactataataacaacaaccaaaataaaaaacacttcagggtgtttattagctaaaaagtattatccgtaatacgttttatattagccaaaatataatatttatcttatgctaacagtacgaggcaaaatcgtgattaacaagctttggaagtttaataccagtgagctgcgtaagattgctttaaaaaaaaaaagcagtcctggcgcatggctcacccggctttgggaggccatggc

SEQ ID NO: 4640 - DNA, 318 bp, Homo sapiens
  misc_feature 157, 158, 159, 160, 161, 162, 163, 164, 165, 166, 167, 168,169, 170, 171, 172, 173, 174, 175, 176, 177, 178, 179, 180,181, 182, 183, 184, 185, 186, 187, 188, 189, 190, 191, 192,193, 194, 195, 196, 197, 198, 199, 200, 201, 202, 203: n = A,T,C or G
  misc_feature 204, 205, 206, 207, 208, 209, 210, 211, 212, 213, 214, 215,216, 217, 218, 219, 220, 221, 222, 223, 224, 225, 226, 227,228, 229, 230, 231, 232, 233, 234, 235, 236, 237, 238, 239,240, 241, 242, 243, 244, 245, 246, 247, 248, 249, 250: n = A,T,C or G
  misc_feature 251, 252, 253, 254, 255, 256, 257, 258, 259, 260, 261, 262,263, 264, 265, 266, 267, 268, 269, 270, 271, 272, 273, 274,275, 276, 277, 288: n = A,T,C or G
ccctttcgagcggccgcccgggcaggtacatttactgtggattctgtttaatttattgtgtatgtgtggggaaaagattggattctaaaataaaagtttaccctgtggcaaaaaaaaaaaaaaaaaaaagtacctcggccgcgaccacgctaagggnnnnnnnnnnnnnnnnnnnnnnnnnnnnnnnnnnnnnnnnnnnnnnnnnnnnnnnnnnnnnnnnnnnnnnnnnnnnnnnnnnnnnnnnnnnnnnnnnnnnnnnnnnnnnnnnnnnnnnnnnccaacataccnagcccggaaagcataaaagtggtaaaagcc

SEQ ID NO: 4641 - DNA, 231 bp, Homo sapiens
  misc_feature 165, 214, 216: n = A,T,C or G
tgcagaattcgcccttagcgtggtcgcggccgaggtactccatcctgggtaatgggagtgaaaccctgtctcaaaagtaataataataataataagggaacgttccaaaacctcatctggacttgtatttatctgaatcttttacaatatgactaaagtagtggntaccaaattctggctgcattattattatataggtgtgttattaaaaatngngaatttgcagcccgg

SEQ ID NO: 4642 - DNA, 641 bp, Homo sapiens
  misc_feature 48, 50, 53, 64, 76, 80, 83, 88, 117, 236, 238, 264, 346,367, 374, 400, 455, 498, 508, 534, 587, 588, 589, 598, 615,619, 630: n = A,T,C or G
cccttagcggccgcccgggcaggtactttttttttttttttttttttntnttnttagggtctgncttcaatgaaantaanggntttancctaagacttatgtttagtataatggctntgaatgagtccccctggccaggtgacatcatttcaagatgagactcatttttagctccactagaacttgcttgacgaccttgaataagctacttaacctctcattgacttatttttatntnctggaaattggatataataggttcancctccctcatgatgatactgaaagatagttaacataatattttaaaaatgctttaggaccccaaggaaccatgctgtaaganagccgttgtattggaagtcanaccctanaccaccctttgcaacacttaaattgnatcatttatgcacatctagattgacctcagtccattttaactttaaaagtatctnttaaagattcttgggccaatttgaaattacctttccggaaaanaatcagtgtntgatgaagaatttgccaaccctgganaaaattacaggattttttttaaaaatatcaagtccagagacctttttaaaaannntttaaggcntttggatttaaaaaatnggangaagccaaatnggtaaaatttt

SEQ ID NO: 4643 - DNA, 636 bp, Homo sapiens
  misc_feature 4, 91, 116, 173, 186, 365, 460, 462, 465, 503, 519, 593,594, 596, 607: n = A,T,C or G
tgangggatatctgcagaattcgcccttagcgtggtcgcggccgaggtacttttttttttttttttttttttgaggcagggtgttgctcantcacccaggctagagagcagtggcnccatctcggctcactgcagtctcaaacccctgggctcaggcgatcctcccacctcanccccccaagtaanctgggattacaggcatgcaccaccatgtccagctaatttttgtagagatgggggtttcaccgtgttacccaggctggtctcgaactcctgagctcaagtgatcctctcaccttggcctcccaaagtgctgggattacagatgtgtgccaccttgcccagccagattttatgactgctgnatacttttgtgagtcagttttccacaagcaagacatgatgattaccccaatatgagtttcattatttaattagaacttgttaatagatgtaggananaanagtctttgttcccaaaagggtagaataaactgactatnttcatatcccaactangttaaaggaagaagctggttctgcatactggaagcttttgggcaagttggttccaactcgaagtattagggaannangaagagagatnagccgtttctacctaaaagtcatttttta

SEQ ID NO: 4644 - DNA, 284 bp, Homo sapiens
  misc_feature 47, 164, 185, 228, 248: n = A,T,C or G
tatctgcagaattcgccctttcgagcggtcgcccgggcaggtacccnaaaagaaaggaagcttaagtaatgaaaggattgctgccaaaatcctgtttccccttgcagatcttacagaaaacagccacagaatcccaaggcatcagcaccaaagagagcctgtanaaactatctggtctaaagctncttgaagcccagagataagaatgacttaacccaagctgcacangcctcttaacagtccactgntaaccccagaaacagatgcatttgaatctgaaagga

SEQ ID NO: 4645 - DNA, 400 bp, Homo sapiens
  misc_feature 67, 154, 181, 283, 302, 315, 317, 319, 364, 365, 372, 379: n = A,T,C or G
cccttcgagcggccgccgggcaggtacttttttttttttttttttttttttaaactctgatcgttgnggtggtctgaaaatatacccacacattttttgatatttctcccctcaggggtggagcctaattcctccctccctgagtatgggctanatttagtgacttgtttctaacttgcanaagtgacagagtgcacctatagagactaagtcagaaaagacattggggcttcttttcgctctctttttttgggatactcgggaaaagcccagctaccatttnatgggaacactcaagtatnttctatggaaaantncntgtggcaagggagccaaggccatgagttgagggagctaaggcctnntgccaanagccacntgagtgggcacaaaaatgggt

SEQ ID NO: 4646 - DNA, 434 bp, Homo sapiens
cccttagcgtggtcgcggccgaggtaccttcaaactagagaccaaaactgggcacttacaatgaaaaggcaattttcttatccagctataatcctaaataaggcaggatatatccaccaaattacccacaaaattcagcaaagtaaaatagctcatgggaaaacataagctggaaaaatactaataaaaaaactgaattacttcgaagtagtcatctgaatattcacagacttgttttcatttacaaatgtaagtcaaaaaagtctcctcatctttctaaccactacgaggattaaggatttaagttattcactaagttaatcatgaaaaaaatagaaaacattttaattctaaatttgtatacacaacagctaaaagacacaaggctggggaaatttattaccagggagaaaaatcaattgaaagaaaaaaaa

SEQ ID NO: 4647 - DNA, 388 bp, Homo sapiens
  misc_feature 54, 83, 338, 343, 359, 370: n = A,T,C or G
cccttagcgtggtcgcggccgaggtactccaccatttaatagggtaaagaaganaaaccacgtgattatagcagttgatgcanaaaaaccatttgacagaattcaacacccatacatatttaaaaactctcagaaaaataggaattgaggaggacttcctcaacttgttaaagagcacgtgaacacacaccaaaaaaaaccccacaactaatgttatacttaagggcaaaaggtcgaaggccttgttccttagattaggaacaaagcagtaatgtctcttctcaacattaatcaacatattgatgggaagttctagccagtgcagtaaagcctaaaanaaaanaaaaaaggaaaaggcntacaactaagnaaaggaaggaaataaaaa

SEQ ID NO: 4648 - DNA, 302 bp, Homo sapiens
  misc_feature 70, 236, 254, 297: n = A,T,C or G
cccttgagcggccgcccgggcaggtacgcgggaccacactgaatctcccctcctcacagttgccatgtanaccccttgaagagggggggggcctagggagccgcaccttgtcatgtacttgcacaaaaaaaacaagcagttattactatttaaaattctattccttcacccagttttctcactcaagtagaaactcatgaatatctgtgattttggctataggaccaggccacaangaaagggctgaaaatatntctaaaagttagggaaaaagtgttttctttgagactttgaaangcagt

SEQ ID NO: 4649 - DNA, 446 bp, Homo sapiens
ccctttcgagcggccgcccgggcaggtacacacatgtcctggctgcacagctgcttcattcctctagtgcctcccaagatcagggcaggccgtgttgccctctggacttccaagggggaagtgagttactggcccaagtcactcactcatcaagaacactgaagccaggtctgctgactccagggagagccttgtagattgtgaggaccgaatgcatataaagtccttagtcaacaccagcacatggtaggtgctaacacatgttggctactattgtttctaagagagggttttcttgaatggaaagaaaggagaaaagacagagaggaagtcaggaatgtcacagagacactttctggggcacacaggtgagcaagcacagagagcagagctgcccaggccagctgctgacttcattccgtgtgtcctccaagggcacttttagg

SEQ ID NO: 4650 - DNA, 476 bp, Homo sapiens
cccttagcgtggtcgcggccgaggtactttttttttttttttttttttttttggagatggaggtttgctcttgttgctcaggccggagtgcagtggcgtgatctcggttcactgcaacctccgcctcctgggctcaagtgattcttctgcctcagcctcctgaggagctgggattacaggcgcatgccaccacgcctggctaattttcatatttttagtagggacagggtttcaccatgctggccaggctggcctcgaactcctgacctcaggtgatccaccggcctgggcctcccaaagtgctgggattacaggtgtgagccacgtgcctggccacttttcttttttttatttttaaaaatttagttgtataataccaaattcttcacttgtcttttaactgaaacctttcccaatttgtgcttttaaaggcatttgaagataaaaagggtatgtagtcaaaatggaaatttgag

SEQ ID NO: 4651 - DNA, 417 bp, Homo sapiens
  misc_feature 144, 175, 409: n = A,T,C or G
cccttagcgtggtcgcggccgaggtactgggattacgcgtgagctactgcacccggctgagtgatttttttttttttttttaagatagagaaagtccctcatactgaggagccttgcagttgagagagaacaaaattccaattngagggatcaaggaattttgagggaggcagcntgcttgcagtgttcctaggatttttacaggaactacaatagaaagttagggatgaaattatattgaaaggggaaagctggactgctcaggtttggaggtcatggggaattccaggattcagtatgtggttgctctcttatttttaacttctgcttagcagtaaaaccacatccttccttcttcctgaaagtaaatgtttaacttcctctccctgcagcattacactctattgtnatgggaag

SEQ ID NO: 4652 - DNA, 423 bp, Homo sapiens
  misc_feature 409: n = A,T,C or G
cccttgagcggccgcccgggcaggtaccaagcctcaaaatacttgaactagaagccatctcttaaagttaaaagtaagaagctccaggaaaaataaagattgcatagtaaaaagggatagatggcaggattaattcaactcaacaaatatttatcaaatgtctactctggtcaggtgctgtgttagcagccagcttccctaaagggaggaaaggctagacacgaggacattgaggattgtttatttaaagtcactcataggcatgccataatggatttattaaggggaaattggggtttctgtgaatctttacaggaccatagccatggagacaatcactatgtttaagtaagtttgctgttttcccaattgggcttcagttttcctgagacaaaaaaagtgagggaantttgggattaaatt

SEQ ID NO: 4653 - DNA, 314 bp, Homo sapiens
ccctttcgagcggccgcccgggcaggtaccacttacatgttttactttccaagttccaacctaactacttataaacttgcaagtagttatgaattgtgggttacctatagtcaaatagtagggtttttttttttcagtcaattggaaatgaaagggcaggtattggcaaggcttcgggactaatttaatgccattaggaaagcacaagataatgtaaggggctaaaagcctcaaaaaaaaaaaaaaggtgaaatgaggagttgttgctgattggtgcaggaaccctgaaagatggcacctgaaaactcaaatta

SEQ ID NO: 4654 - DNA, 378 bp, Homo sapiens
  misc_feature 124, 125, 217: n = A,T,C or G
cccttagcgtggtcgcggccgaggtacacttggaagagggccaagtgggcaacttgagaggttaaactgcatggtttgagttttgatttgaggttttacgtgttggcatgcattcaggggcttnntgtcccctttctcccctgattcttccctccgggtaggagggaagaatccacctgagcagtggcctgccagcacttgagaggctccgcaagcncaagtgtgtttatgggaagttgtgcacatgctcagttgaggcattcttcccttaccagtcgagtgtttctagaggaaggtcatagactaataagtctaatagttctatggcctttagtcatactagtgcacatgcctgagccccactcacctgtgaacccc

SEQ ID NO: 4655 - DNA, 310 bp, Homo sapiens
ccctttcgagcggccgcccgggcaggtacaaggcatgatgagtccttttgcttttaggcttttgacttctggttttagactttctttagcttctgttgttagacaacattgtgcaagcttggtttttataagtttgcatggattaaactgaacttaatgaaattgtccctccccccaaattctcagcacaatttttaggcccgcaaggagtcaagcacctcaaggagatcttcagtttgaacttggtgtagacacagggatactgatgaatcaatattcaaattagctgttacctacttaagaaagagag

SEQ ID NO: 4656 - DNA, 392 bp, Homo sapiens
  misc_feature 168, 225, 288, 311, 339: n = A,T,C or G
ccctttcgagcggccgcccgggcaggtacaatggtgtgatctcagctcactgcaacctccgcctcccaggttcaagcgattctcctgcctcagcctcccgagtagttgggattacaggcatgtgccaccacccctggctaattttgtatttttagtggagccggggtntcttcatgttggtcaggctggtcttaaactcccgacctcaagtgatctgcccgcctnggcctcccaaagtgctgggattacaggcgtgagccattgcacctgtcccttgccagtgtgttnttaaaataggtttagggggttgngaaaagatgcagtgagccattaattctnctttagcaaggtagtctcttaaaaattgatgttggattttaaaaaatatacca

SEQ ID NO: 4657 - DNA, 485 bp, Homo sapiens
cccttagcgtggtcgcggccgaggtacaaaataacatcataaataacataaatgagaagttttcaagtatttcaatgtgccttgaaaagtttcaaacagtaattctcacaattggttagacaatcattttttttcttttcttttcctctcatttagtctcagagcctaaaaagaaatgcctccagtctctgttagccccgatgtttggaatgaaattaacaagattctaccttaaaagagaaaacttatgtgggcttttcaaattgtgaaaatttgttccctcttataaaatataatctttcccctgctgctggtttataaatatgggcatatagcccagagccattataaagaaaaaacaaccaaccacaataaactaaggagcctcatctgatggctaaggttctcaggaaaaaatgagaagagcaccttgatcaggaaaggaaaaaaggatagaggataaaaacagtaacctttaacttcta

SEQ ID NO: 4658 - DNA, 614 bp, Homo sapiens
  misc_feature 432, 457, 487, 524, 526, 565: n = A,T,C or G
ccctttcgagcggcccgcccgggcaggtacgcgggcaacattcatatttattaaagaaatattttagagtggagctgagaagactttctgtaagaaatctttaaagcagcaaaataagtgattttgccagtaactttcacctgtagaagtcagaataaccaagcacagatcttttttcaaactttctatgatattttgactttgcttccatcctttctattgcttagtctagagattaaggtattacttctaataatagtcatttacattatttatgttgctaatctcttgatgacaagacctctacatgtgtcttggaaataaaatcaaatggctctgtgcttcatatagagactaatttctaagacataaataaaagggaatggacaaaggttgtcaaacaatagccaggtagttctttgctgaggaaanggaaccattgctgaatgcttttganaatgctcttggaatattaaggaaaattttnatttatcaccaaaatctttaattaagtttaaggatcncnaaaattggatttaaggtttttaaaaaattttttggaagnggacaaaaattccccatattccttgccataaattttttttttttaaatc

SEQ ID NO: 4659 - DNA, 316 bp, Homo sapiens
cccttagcgtggtcgcggccgaggtaccctcagaatatccttaagaagcaggaaggaaacaagttttcctcttcccacttccaagactgagaaagagtccagatgagctggtttgcccaagcaattcttatcaccagatactccgttattaaacgtgtctcctgccttctttgaaagcaacaggagaaatgaagcataggaaagtctgcaagctaacagtgtatcacctaggaggcttgtatataaatatgaagctctgcaaaatgtagttataatgaaaggcacttcctattaccagctccctaactctttttaa

SEQ ID NO: 4660 - DNA, 397 bp, Homo sapiens
  misc_feature 150, 185, 216, 226, 260, 278, 314, 320, 346, 347, 360, 369,379, 381, 396: n = A,T,C or G
cgcccgggcaggtaccttttttttttttttttttgtgttggttggttggttggttgtttttaagagatggggtttctgcgggtgcggtagcttacaactgtaatcccagcagtttgggaggctgtggccgggtggatcacctaagttcangaggtcgagaccacctggccagcacggagaaaccntatcttttgctaaaaataaaaaaattagccngtcatgggtngccgcataccctgtaatcccagctacttcaggangctgagcagggaaaaatnactttgaactttggggaagggggaagggttgcagtnagcccnaaaattgccgccatttgcacttccanncctgtgcaacaanaagcccttngcacaaagancnaatacttccatcttna

SEQ ID NO: 4661 - DNA, 390 bp, Homo sapiens
cccttagcgtggtcgcggccgaggtactaatctgtaaatagtagatataaaaagggaagagtgatttagagcaaggattgaagaaaggagtccttgtaagtggaattggtttcatatggcattctaatgacacaggaaaatgtgttctcgccccattgacttgcataccagtaagagtcttgcctttgattaactgaagctaatctgggtgcagggaggtggtggacagtgaataaagtcatctcttctcttcctccaagacacaccagtgtcaacatgggaacagcaatgccataatcttcttcccaactcacaactttcaaatagtagttaagcttgactaattcaaactcaaaaaaaaaaaaaaaaaaaaaagtacctgcccgggcg

SEQ ID NO: 4662 - DNA, 324 bp, Homo sapiens
cccttagcgtggtcgcggccgaggtacttggagggttagacctacttctgtgtcaggtagcacccaaatcctaacatctattttggagacctgtctgtgcctcttcatgctcacaccattgttctgatagatgatgccagtggaacttccaaagaagcattccacctgatcttcaccaccctctttgatcctctttttaaatctgtgtgtggaaggcaactgcaatatagaggatttggaaggttgtctgtttctgttgtctggggaaatgataaaaaaaaaaaaaaaaagagagagatgtgaaaaaggaaaaagatggaccag

SEQ ID NO: 4663 - DNA, 630 bp, Homo sapiens
  misc_feature 520, 541: n = A,T,C or G
cccttagcgtggtcgcggccgaggtactttgggtcttcattttgaaggcttccatagttatataaaacgatgattaaataaacgtgctatgcttctcgcttgttaacctgccttattatagccgtgtcagctgtgacccttttgataggaaggaaagagatcacactatttctgcccttatagttctgatgatgaagatgggatgtctgaagcacctgactcacctattgatgaggtcctgggacaactgataaagagctggcaaataaaggtaagaatttttaccaaggtgagttctgaatctctgcctgtagtttctggtcaagaactaaaggtaaaaatttatctttatatcttactttccaaatgcaggtcagcaggagatcatttgtttgaactgttctcttatgtaaatttggatttcagggactcatttgttattgatcctttcccttcaacgaacagctgtcattttcctgttttgtgtcctgagaacccaacttggcttgctgcctgtcangacacactttggtgtgtgaanggggctaaacaaatgttggaggctcccattaaaagcttacatattgcctattgccagctcttcaaggcatctaaatctttctttctttt

SEQ ID NO: 4664 - DNA, 297 bp, Homo sapiens
ccctttcgagcggccgcccgggcaggtaccatggctgaaaaaaagagtcacaagtggctgagacactgctccatacaggactcatgtgtggtcattgcccacccaatcttatgactccatcatcttgggacctggaacaaacatgactttttttgatcgatattttgtcctcggtgtttttcaaggtctgatgttggagccctgtggcccaccctcccttctccaccagcatgttggtttgaaaaggatagggaatttagaaacagttctgtacctcggccgcgaccacgctaaggg

SEQ ID NO: 4665 - DNA, 426 bp, Homo sapiens
cccttagcgtggtcgcggccgaggtacaaagacggccacagcccctgcccgggtttaacttacatatatacagagtgggcggggcaggcatggccacagaggtggtattacaaaatatacaaagtggtttctttctttacatttcatagaagaagcctgcctcatttccaaatgagagcactagaagcacaaatcatgcagaccatttactatataacttatgaaaaatgctgtactgggacagcgcccgccaagatccaggccatggaggctaacgtgcagctgagctttgacaagcactgtgatccaaagcagcctaattactggccggtcatccccccgaagttctgagctcggggcacagggcacccagcctctttcctcttcctttttggataccgcgcctcttcatctctcctttctgta

SEQ ID NO: 4666 - DNA, 360 bp, Homo sapiens
  misc_feature 131, 132, 133, 136, 140, 141, 143, 144, 146, 227, 307, 339: n = A,T,C or G
cccttagcgtggtcgcggccgaggtactactcgattgtcaacgtcaaggagtcgcaggtcgcctggttctaggaataatgggggaagtatgtaggagttgaagattagtccgccgtagtcggtgtactttnnnttntttnntnntntttttgaaaaagtagttagcatttaatgaaactccctccatgtggcttcaagccaccaggacacaggcccccccaacactnttaatcttctcctcagctcttctgctgaaaaatttggccttcacgatgacaggctgctttgggagctttccctttcccanaactttataagtagccccgatcgcaccacatnaatggatggggaagccagccc

SEQ ID NO: 4667 - DNA, 166 bp, Homo sapiens
  misc_feature 28, 31, 33, 40, 41, 42, 44, 46, 56, 81, 124, 129, 136: n = A,T,C or G
cccttagcgtggtcgcggccgaggtacngancnatacaannnantnttctcctgtnatcctaacaaaaaccctatatttgntttatccccatttcaaaatgggaactaagtacatatagagtgnaactngccccanatacacacttctaatcatgaaacctatata

SEQ ID NO: 4668 - DNA, 341 bp, Homo sapiens
  misc_feature 151, 188, 189, 231, 243, 248, 279, 314: n = A,T,C or G
cccttcgagcggccgcccgggcaggtacaacgcagagtcccgggaagcagtggtaacaacgcagagtcccgggaagcagtggtaacaacgcagagtcccgggaagcagtggtaacaacgcagagtcccgggaagcagtggtaacaacgcanagtcccgggaagcagtggtaacaacgcagagtccttnntttttttttttttttttttttttttttcaaaaataaacactntcactaaccatntggtntcctatgattcctgaaaataaaatctatttntaggaacaatttaaaccgtaaaaaaacttcactgngtcatgaattaaactttcctatttttt

SEQ ID NO: 4669 - DNA, 142 bp, Homo sapiens
cccttagcgtggtcgcggccgaggtactttttaatggaaacaacttgaccaaaaatttgtcacagaattttgagacccattaaaaaagttaaatgagaaaaaaaaaaaaaaaaaaagtacctgcccgggcggccgctaaggg

SEQ ID NO: 4670 - DNA, 618 bp, Homo sapiens
  misc_feature 371, 395, 434, 441, 444, 463, 464, 498, 532, 558, 600: n = A,T,C or G
cccttagcgtggtcgcggccgaggtacaatggtgaatagtggtataagtagaaattctcgtcctgttttcaaacttgcagataaagcccctagtcattcaccattaagtatattagcttttggtgtggagtttttcatcttggctcactgcagcctcaacctcttaagctcaagtgatcctcccaccttaactgcctgagtagttgggacaataggcatgcaccaccatgcccagataattttttttttaatattttgtaaagatggggattccctatattgtccagaatggtcttgaactcctggctttatgcagtctttccacctcagcctcccaaagttctgggttacaggtgtgagccactgcgccnggccaattttggtttttcatggangacttttaacaggtctcaaaaagttttcttctaataagntttcttnggnggtctaatcattcataggnngttggaatttaccaaactttttctatttcaagtnttacattttttacctttggtcaagtaatattgtntcatattaaaaggaacattggattgngaaaaaaccctgcttaatcattgggatggaaatatccttatncctttttggaattctttt

SEQ ID NO: 4671 - DNA, 350 bp, Homo sapiens
cccttagcgtggtcgcggccgaggtacataagccactttcatacctgcctactattatggactgcagagtaatgtggcctatatcaattttttcaggattgttcttttgtttgttgtttttttcatcccttcctcccccatattttctcttcacaggacatgagacttcacaacctgctaaaaatgaactttccagacctaccaatctaggaataaaccgtcctagccaggaaaggtcagatgacctttcctgagaccggagactcattctgttgtaaaaatgctttctccaaagatgttaaaaaagaaaaggggaaaatgtgaaagaaaaatatcttgggtcccttcaa

SEQ ID NO: 4672 - DNA, 317 bp, Homo sapiens
cccttagcgtggtcgcggccgaggtactgaatttcagtcctggctctgccacttagccgaatatctgaccttgagcaaggcacttaactttgctggaccttgggtttctcatctttaaaatggagataatttcatcttcttatgatggatctcttcagagaagtaagaataatgaagattttaaatcatcccaatatagtgaagttattcgaagtcattgaaactgaaaaaacactctacctaatcatggaatatgcaagtggaggtgaagtatttgactatttggttgcacatggcaggatgaaggaaaaagaagc

SEQ ID NO: 4673 - DNA, 526 bp, Homo sapiens
ccctttcgagcggcccccgggcaggtacacacattttttaatttataaaataaatactgccaggtggctacttaaaaaaaaagaaaagaaaagaaaaggccaggcgcagtggttcacgcctgtaatcccagcactttgggaggccaaggcaggcagatcacctgaggtcgggagttcgagaccagcctgaccaacatggagaaaccccatctccttactaaaaatacaaaattagctgggcatggtggcgcatgtctgtaatcccagctactggggaggctgaggcaggagaatcgcttgaacccgggaggcagaggttgcagtgagccgagatcccaccattgcactccagcctgggcaacaagagtgaaactccgtctcaaaaaaaaaaaaaaaaggtaaattaggttaaaagaaaaaaagtgttatggtggaagtggagtagggtgccattttagttagggtagtctgggaaggcctctctgaggaggagctatttgaatagagacccgaatgaaggctggga

SEQ ID NO: 4674 - DNA, 492 bp, Homo sapiens
  misc_feature 33, 40, 42, 51, 52, 94, 107, 115, 134, 146, 170, 179, 188,206, 217, 219, 245, 247, 249, 269, 292, 306, 309, 330, 333,343, 353, 361, 364, 375, 385, 399, 477, 492: n = A,T,C or G
cccttcgagcggccgcccgggcaggtacttttnttttttntnttttttttnngtgcagaaaaaaatttattggaaatcccttgaatacattttngaagttgtagctnggtatttncaaacaaagtaggttgganaggttggaggangaggagggactctgacacctgganacaaacagntggtcccancctgtcccgggggtgctncaggagtcagntntagggctcattccttttcatggcatngncntgaggggcaaggggctggcncttaaacagttgctttaactttntcccaaagctcaanctnaaaagtcatggctgaagactnttnacagatggangcccctggtnaaaggctnctnccacctgtaanatgccaaaanaattgctgcctcanacaatggctaggccttttcatgccaaggccttggaaaagaaaacaatctctgaaaatattggggggcatttaataacntttaccaggggggcn

SEQ ID NO: 4675 - DNA, 577 bp, Homo sapiens
  misc_feature 397, 445, 496, 497, 555: n = A,T,C or G
ccctttgcggccgcccgggcaggtggatcacttgaggtcaggagttcaagaccaacctggccaatatggtgaaaccccatctccactaaaaatctaaaaattagctgggcatggtggtgcacacctgtaatcccagctacctgggaggctgagacagagaatagcttgaacctgagaggcggaggttgcagtgagttggattggcatcactgcactccagccgggcaatagagcaagattcgtctcaagaaagaaaagaaaagtgaaatttctaaatgaaaaatgcttgactatatttgtcttgtgggaattatcgtcaataataagaagctttttgagtgcttattatgttccaggcttatacataattactcatttagtgcacacaaccactatnttaagctgtctatttttatcatcatttttaccggatttgagaaaatangggctgggcacggtggcttatgcctgtaattcccagtgctttaggaggctnncttgagctcaggaagtttccagacccacccttgggcaaccatagccaaataccccttnttctaccaaaaaattaccaaaa

SEQ ID NO: 4676 - DNA, 556 bp, Homo sapiens
  misc_feature 115, 116, 117, 138, 140, 141, 154, 155, 156, 158, 159, 164,167, 170, 171, 187, 192, 204, 207, 213, 222, 227, 229, 243,245, 247, 256, 260, 263, 265, 269, 280, 285, 288, 290, 291,295, 304, 309, 311, 314, 341, 342, 344, 347, 353, 355: n = A,T,C or G
  misc_feature 356, 358, 384, 385, 387, 388, 389, 390, 391, 392, 393, 396,397, 398, 401, 403, 405, 408, 410, 411, 414, 415, 420, 422,429, 453, 454, 455, 459, 460, 461, 463, 464, 466, 470, 471,472, 473, 474, 475, 476, 477, 478, 479, 480, 481, 482: n = A,T,C or G
  misc_feature 483, 484, 488, 489, 490, 492, 493, 494, 495, 496, 497, 498,499, 500, 501, 503, 505, 506, 507, 508, 509, 510, 511, 525,526, 527, 528, 529, 531, 532, 541, 543: n = A,T,C or G
ccctttcgagcggccgcccgggcaggtactttttttttttttttttttttttttttttttttttttttttttttttttttttttttttttttttttttttttttttttttttttnnnttttttttttttttttttttntnnttttttttttttnnntnnaaaanaanggnnaaaaaaaaaaaaaaantttantttattcttgtnttntttttnctaatcctnctggnanaaacaaaaattgantntnatcacaatntggnaangnaatnaaaaacaaccnttatnatntnngatnaaccctttnttaantnagnaagggaaaacaataatacaaattattnntnttnctttantnnancccttaatttaaaaaaaaaaaaaaanncnnnnnnnttnnnatngntnggngnnggnnagggngnggcaaanaaaaaaaaaaaaaaaaaaaaaaannntttnnnanntntttnnnnnnnnnnnnnnnaaannnannnnnnnnnngngnnnnnnnaaaaaaaaaaaaannnnncnnctttttttnanaaaaaaaaaaaaa

SEQ ID NO: 4677 - DNA, 216 bp, Homo sapiens
  misc_feature 59, 65, 80, 102, 104, 111, 119, 130, 134, 143, 148, 149,160, 163, 167, 173, 186, 192, 203, 204, 207, 211, 212: n = A,T,C or G
ccctttcgagcggccgcccgggcaggtacttttttttttttttttttttttttgttttntttttnttttttttttttttnttttttttcatgttgggggggnancaaaaangatgtttntttcacctggntgcnggggggctnatttnnaaaaaaaagtnagngaanagaaanaaggggggggctnttttanaggatttgggnnggnaaannaaaa

SEQ ID NO: 4678 - DNA, 410 bp, Homo sapiens
  misc_feature 52, 144, 145, 157, 160, 163, 185, 186, 187, 188, 189, 191,196, 199, 209, 212, 213, 214, 215, 231, 246, 250, 251, 252,254, 279, 283, 284, 285, 288, 294, 295, 296, 298, 300, 301,303, 304, 305, 308, 312, 315, 316, 318, 323, 342, 348: n = A,T,C or G
  misc_feature 349, 351, 353, 358, 376, 385, 386, 396, 399, 402: n = A,T,C or G
cccttagcgtggtcgcggccgaggtacttttttttttttttttttttttttnaatttttttttttttttttttttttttttttttttttttttttttttttttttttttttttttttttttttttaaaaaaaaaaaaatttttnnttaaaaaaaacnaancanaaaaaaattttttttttttttnnnnngnaaatnaanaaaaaaaaanacnnnnttttttttttttttancaaaaaaaaaaaaantatnnnanccaacaattttttttgtcttagctntttnnnttntaaaannncngnngnnnttnaaanttnncnactcnatcaaaaaaacaaagctgntttttnngngnaattnttaataaaaaaaaaaaantttttgtannaaaaaccccnccnccntttttaaa

SEQ ID NO: 4679 - DNA, 782 bp, Homo sapiens
  misc_feature 461, 465, 480, 532, 552, 601, 605, 609, 617, 629, 646, 651,653, 660, 662, 684, 704, 705, 711, 731, 753, 760, 768: n = A,T,C or G
cccttagcgtggtcgcggccgaggtacaagtatgatagattattttctatttgctgtgggaatttaaatgtaaaataaatacaaaatacatgtgtggtttaatgaacactcaatgaagcacccgcgtacctaaatgaaccaaactatgaggctctgattagtattcagattggaataatggaacaaaccattgctgttttagataagatgcacaaaaagaatgtggaaaactgcaagaaactactcaaaaaacttggaaagttcagcaatcaaaaagatatagcaaattatgccctaagctgcaatctacgagaagagttggtagctgtctcagagagaaaagacatctgtaatgcaatggggtctaaactgacttgtgaaaagattggtcaaagaacggtattgaaaacatggatgcaaccagcagaagttaacaaatatttcaaaaccaccaagctggnccangatttcaatactacnagactggagtttggaaggatttagaatggaaaccttttcccctctttggttncaaatgtaaaaacccctggngggaaaaccccaagggcccaattccaatcattttaaaaaatcattttcntttngggnaaaaatgnatttccttttcnttcttactgggaaaatngaaanancattgtncnttggggtggctgttttaaaatnaaaaaattgtttaattttannccttantttggttcccaatttttggncctggcctgaaataaaaggtgngaaaatncccaaaanaaaaaaaaaaaaaa

SEQ ID NO: 4680 - DNA, 377 bp, Homo sapiens
  misc_feature 24, 30, 57, 182, 183, 184, 198, 199, 200, 201, 208, 209,210, 211, 212, 213, 214, 215, 216, 217, 218, 221, 223, 232,233, 234, 244, 262, 264, 286, 287, 301, 302, 318, 319, 329,339, 358, 360, 361, 368: n = A,T,C or G
gcgaattgggccctcttattgctngctcgncggccgccagtgtgaggatatctgcanaatcgcccttgacggccgcccgggcaggtactttttttttttttttttttttttttttttttttttttttttttttttttttttttttttttttttttttttttttttttttttttttttttttnnncccccccccccccnnnnttttttnnnnnnnnnnnaananccccccccnnnaaaaaaaaantttttttttttttttttngnaaaaaaaaaaaaaaaaaaaagnntttttttttttttnnaaaaaagggggggggnntttttttttnaaaaaaaaanttttttttttttttttttnannccccccnaaaaaaaaa

SEQ ID NO: 4681 - DNA, 596 bp, Homo sapiens
gatatctgcagaattcgcccttagcgtggtcgcggcccgaggtacccagaagagtttgcacttcgagatcaagagaagtatctgtatcgatatcctggtggggagtcataccaggacctggtgcagcggctggagcctgtcatcatggagctggaacgtcagggcaatgtcctcgtcatctcccaccaggctgtcatgcgctgcctcctggcctacttcttggataagggcgcagatgagctaccatacttgagatgccctctccataccatcttcaaacttactcctgtggcctatgggtgcaaagtggaaacaattaaacttaacgtggaggctgtgaacacgcaccgtgacaagccaactgcagcagagaccacactggctgtgcgcagacgcccctccgcagcgtccctcatgttgccttgctaatgatgtggatgttcaggcctcacctctcaaacgactgggatctactgaaaagcttgggatgtcagcttcacagaggctagaacaggaaagttaagtgggaactggactttgggggccaccaaaacgaggcctggagaaacgtcaccatatttcctcccccctgccta

SEQ ID NO: 4682 - DNA, 342 bp, Homo sapiens
  misc_feature 89, 181, 203, 204, 225, 232, 257, 287, 315, 319, 322, 335: n = A,T,C or G
ccctttcgagcggccgcccgggcaggtactccagcctgggtgacagagtgagaccttgattaagacaaaacaaaacaaaaacaaaacanaaaaaacaaacacaaggtgacttttaagttgaagagcaagcacttgccatttgagccttagccagaactataaactggtaatggtgggtganggtcattcctttttccatattnncttcttcttcacagaggttgnttttttnagaaaacttagagaaaaccacccangtgttgacttttagtaaccttctatgatcngtaactagctagtagaattaattggccntttnatnttttttaaagggnttttttt

SEQ ID NO: 4683 - DNA, 303 bp, Homo sapiens
ccctttcgagcggccgcccgggcaggtactagaaagtcatttttctaaagagcattaacatttcaaataagcaaattttatttagagatgtaaacatgtaaacattaaaaactcaactaaattttatctttattatgatggtcgctgatttaaactattaatgaaaatatgtcatgtcagagatataaagaagaatatatcacccagatagtaacatgcaattaatttccatttgattaatataattggtgatttaacacacatacatatacccgcgtacctcggccgcgaccacgctaaggg

SEQ ID NO: 4684 - DNA, 714 bp, Homo sapiens
  misc_feature 55, 105, 115, 116, 133, 162, 172, 173, 174, 175, 192, 201,207, 215, 216, 221, 224, 226, 231, 232, 250, 261, 265, 268,270, 271, 276, 297, 304, 305, 319, 325, 326, 337, 342, 343,348, 355, 365, 374, 377, 383, 392, 399, 400, 412, 415: n = A,T,C or G
  misc_feature 423, 425, 427, 428, 429, 431, 433, 434, 436, 440, 442, 454,458, 466, 467, 479, 481, 485, 499, 529, 530, 533, 535, 544,545, 556, 560, 563, 565, 575, 581, 583, 586, 588, 592, 596,600, 602, 606, 611, 620, 633, 635, 637, 640, 642, 649: n = A,T,C or G
  misc_feature 651, 655, 675, 676, 685, 687, 690, 691, 702: n = A,T,C or G
ccctttcgagcggccgcccgggcaggtacttttttggtttttttttttttttttnattttttttttttttttttttttttttttttttttttatttttttttttntttttttttnnttttttttttttttttntttttaaaaaaaaaaaaattttttttttnaaaaattttnnnnccaaaaatttttttttnaaaaaaaanattaanaattttcnnttttnaancnggccnntttttaaaaaaaaaaaanttttttttttntccnctncnncaaanactttttaaaaatttttttcncgggggnnaaaaaaaaaaaaancccccnnggggtaaaccnaaaannttttntaaaacnggaaaatttntttcttttnggnggaaanccctttttngggaaanntaaaaaacaaanggnggggtttntntnnngntnncnattntngtcaaaaaaggngggnaaaaaaannaaaaaaattttncnggtngaaaaaaatttttnccccctaaatatcccaaaaaaataaaaagnnggnanaaataaaannaaaacccgggngggnctntntttgggggcncaaccncnctntntttnggtngggnanaacnccccnttttttaangagaaaaaacttntntntcncnttttaananaaantacccaaccccgggggaaanngggtttttnanttnnggccttttttntttcttaaaaaa

SEQ ID NO: 4685 - DNA, 526 bp, Homo sapiens
ccctttcgagcggccgcccgggcaggtaccatcatctcatttgactcttgaaataaccctctgaggtatgctagaagggcatccttatccctgttttgcagatgagcaaactgaagtgcagaaagtcacacaatgagttgggcgagaaattgagtgttaaaactcctgaatgcttctagtccaatactctccccatgatactaggtatataacaagtgtgggacaatcatggttaaccaagagtatcatctgattatattacagatgcattgtgagaggtttctatgtatcctgagaataattggaaccacactctttggagtctctctcctccttggaatcacggctgcttatattgttggctaccagtttatccaaacggataattactatttctcttttggactgtatggtgcctttttggcatcacacctcatcatccaaagcctgtttgcctttttggagcaccgaaaaatgaaaaaatccctagaaacccccataaagttgaacaaaacagttgcccttt

SEQ ID NO: 4686 - DNA, 155 bp, Homo sapiens
cccttagcgtggtcgcggccgaggtacaatcagtgggagccctgagcctgttttcctgtggtcactgagaggaggcgagtcatgtgtgaggctccaggcaggggtggggcagtgactactcagtcaattgctccatgtctcagtggtttcatcta

SEQ ID NO: 4687 - DNA, 468 bp, Homo sapiens
cccttcgagcggccgcccgggcaggtacttcttagataaaacagaatacttgaagttaccagttacagaaaacaagaatctataaactaataccataaagcaaaggaaaatttgttttttgtctccatgtgttgaaggagtgctgggagagtctccagagcacattcctttgtgtcctagcttcttagatagtgtttaccaagccttttcctgggtctgggctgtgcctgttgctgcctctgggaccagtcagcctaatacaggaaagcttatttctttctctttttaattttatttttccttatttctttaatttcccacctcaaaacatttcctactctatttcatcaactaagatttatatgattcatccattaaatatttatttgaatttctaattttggtattatggtaatcataattaagtaaacatttcctactgtacctcggccgcgaccacgctaaggg

SEQ ID NO: 4688 - DNA, 345 bp, Homo sapiens
  misc_feature 97, 103, 104, 105, 106, 116, 117, 118, 119, 122, 123, 136,137, 138, 139, 144, 146, 148, 149, 150, 152, 153, 157, 168,178, 180, 182, 186, 197, 200, 225, 232, 259, 275, 283: n = A,T,C or G
ccctttcgagcggccgcccgggcaggtacttttttttttttttttttggtttttttttttttttttttttttttttttttttttttttttttttttnaaaaannnnaaaaaataannnnaannaaaaaaaaaaaannnncccanantnnnanngggngagaggggtcncccccccctngnanggangaaattattgnttnccctccttgcttactgggtcctacnccaacanatatgggaggggatccacccacttaantttcccttggactgcnaatggaanaaatgattttcaacttggcaagacacacattttattttttaatggacttaaaaaaaatgtga

SEQ ID NO: 4689 - DNA, 542 bp, Homo sapiens
  misc_feature 303, 309, 316, 325, 333, 355, 364, 366, 372, 386, 393, 396,397, 403, 404, 412, 423, 428, 429, 438, 442, 445, 456, 463,483, 514, 520: n = A,T,C or G
ccctttcgagcggccgcccgggcaggtactttaccaagtaggcacttgggaaatgctgtgtccacatacttaggaaatggcttcagttaacactgggcttgggaagggctctcttatccaaggagcagtcttctctggagccatgaaaccagcctggcagcactggtaataaactagtctgtgaaatctggcaaagcctctgtcctgtttggatatacgcaaaactgccttttaccatttccattgctttttattacttaatctcccaactttgtgcctggtgtctttttttttttttaaaanaaaaantttttgngggaattangttttcanaaaaaagttttggggggatatnctttttccncnaaaccnttgtttaaaaaggncccattnccnnattggnnaatttttngaaaaagggtnttttnncccccaggntggnaanaccttgggccnggaaccnccctaagggggaaattccancccccctggggggccgtaactatgggaatcnaagctngggtaccaaatttggggggaaa

SEQ ID NO: 4690 - DNA, 610 bp, Homo sapiens
  misc_feature 158, 581, 584: n = A,T,C or G
ccctttcgagcggccgcccgggcaggtacataggactgtgaccatgtccactattcctgggtcagcatcccaggggaagtagaaaccactgacatacacactcacattcaagcacacacactcactcaggcgcacacacccacacacacataccccanagccaccgaggaagggaaacaccaagggtcgctgcacataaaaatatcacctcaactcatccctgacacacgcatgtcctcccaaggccacgctcacacaacacacactataagcactttgcctgattcactcactgggtctgtcttttgtgggaaggagaggaagaattcatcaaaggtctcctccccacccgcgtaccagcccggagcctgatagacctgctgggtggttagatccagaagaacaataacaatcactacaagctcaactctcaggaaagccacatccctaggaaaaggggaaagtgctatgtcaagggaacaccccatgggcaaaagaatttgaacaacagccttgagcccttagactttccttttgacatagtctacccaaatgagaaggaactagaaaaacaatttctngtnataatgacaaaacaaaagttctttaa

SEQ ID NO: 4691 - DNA, 334 bp, Homo sapiens
cccttagcgtggtcgcggccgaggtactttcagacaatcgatgtcagactgtcatatcttattctttggggtatgaagcaaggtattttacaatgcccaaaaataactttcaaaatagtatttagcaaactgtctggagcctctttccccccaaattagagtatccaacacagatgatacacaagatataactggaagattactgattttttaaatgcctccccagaatttacatattaaatcgattattttctccttcataatagttaccttttgacacttacacattcaccccaagtacctgcccgggcggccgctcgaaagggcgaattcc

SEQ ID NO: 4692 - DNA, 498 bp, Homo sapiens
cccttagcgtggtcgcggccgaggtacaaatgtgcatcctcactaaattattgctaagactgaccttttaataaaaaggaaaatcacaaaggaggggaaccgaacaaagatactgctttctcaaaatttggaagaccacatatacatttatatagataaagctccatgaatccatatctatacacacatatctctttagatttttttttaaaacttccgttttcctgttcttagttttattgttttagcacaaaaacaaaagcatgtgtcgaagcatcctgtgtaagccgtgctaactcctccttccattcatcttgcagtgcacagctctgagtcaaggcatcagtccttgctccacactaacaagcagcaccgcatctcctagcaccgatagcccctgctcaaccttgaatagctgtgtcagcaagacggcagcccaacaaaaggtccctggtgagaccattagcagccctagttccaccctggaaagcaagggac

SEQ ID NO: 4693 - DNA, 589 bp, Homo sapiens
  misc_feature 235, 423, 446, 457, 482, 500, 524, 525, 539, 551, 565, 584: n = A,T,C or G
gtcgaccccgcccgcgtccgtggtttcctccctcagcgccattttgtggctgcgagacccgcaaataaaggctatctccggggctgcggcgggaggagtgcgggggggggccggcggcggcgcggcctcggcctgtgtgactggcggcgcccgcgcagcctcgggctgggaagggtacaagatgaccaacgaagaacctcttcctaaaaaggtccgactgagtgaaacagacttnaaagttatggcacgggatgagttaattctgagatggaaacaatatgaagcatatgttcaagctttggagggaaagtacacagaccttaattcaaacgatgtgactggcttaagggaattcttgaagaaaaactaaagcagcaacagcaggaatctgcacgcagggagaacatcctttgtcattccggntagcaaccaaaggaaacaggaanatgcaagagtncaccacttcaaatttcagtaccttnaaggcaaagtttcagcancccgagtgtaagccccaacttggnnatcaacaattgttnggaccccaagcngattcaaactttgntttttttccttaaaaaatnaaaag

SEQ ID NO: 4694 - DNA, 426 bp, Homo sapiens
  misc_feature 54, 89, 98, 105, 106, 114, 124, 128, 129, 135, 140, 144,147, 152, 153, 155, 156, 163, 167, 168, 169, 179, 180, 181,182, 188, 193, 194, 200, 203, 204, 205, 206, 207, 212, 213,214, 220, 221, 222, 223, 232, 234, 246, 251, 253, 254: n = A,T,C or G
  misc_feature 255, 262, 267, 270, 271, 272, 276, 279, 280, 281, 282, 287,290, 291, 297, 306, 308, 309, 310, 322, 324, 325, 328, 333,337, 338, 345, 346, 347, 348, 351, 352, 353, 358, 359, 360,361, 362, 368, 369, 385, 387, 390, 391, 392, 393, 402: n = A,T,C or G
  misc_feature 411, 417, 424: n = A,T,C or G
ccctttcgagcggccgcccgggcaggtacttttttttttttttttttttttttnttttttttttttttttttttttttttttttttttnaaaaaaaanttttttnnaaaagggnaaaaaaaaancccnnaaaaanaaaantttnttnaaaanngnnaaaaaangggnnnaaaaattttnnnntttttnttttnntttttnccnnnnnaaaannntttttnnnntttttcccncnaaaaaaaaaaanttttncnnnaaaaaanccccnaannnaaanccnnnnccccnatnngggggnttttttttntnnnaaaaaaaattcncnnccnccccnaaannttttttnnnnccnnnggggnnnnnaaaaanntttttttaaaaaattngnaannnnaaaaaaaantttttaaanaccctnggggggntt

SEQ ID NO: 4695 - DNA, 594 bp, Homo sapiens
  misc_feature 59, 69, 73, 74, 75, 77, 80, 84, 87, 95, 96, 98, 104, 108,116, 119, 121, 122, 125, 126, 127, 130, 131, 132, 134, 140,143, 148, 149, 160, 167, 172, 173, 174, 178, 179, 183, 184,188, 191, 192, 195, 196, 199, 202, 208, 210, 216, 217: n = A,T,C or G
  misc_feature 218, 219, 225, 231, 237, 238, 241, 249, 250, 257, 264, 267,269, 281, 285, 288, 289, 295, 296, 299, 300, 301, 302, 303,305, 315, 316, 322, 323, 324, 327, 328, 329, 332, 337, 345,357, 366, 367, 368, 369, 370, 372, 374, 378, 379, 394: n = A,T,C or G
  misc_feature 398, 405, 407, 417, 418, 432, 434, 435, 452, 453, 455, 460,477, 478, 479, 487, 488, 491, 493, 500, 501, 508, 527, 559,564: n = A,T,C or G
ccctttcgagcggccgcccgggcaggtactttttttttttttttttttttaaaaaaaantttttttttngggnnnanttnaaanttnaaaaaaanntncaaaangggnttaaaaanccntnnttnnnaannncnattttnccnaaccnnggggtttttanaaaaaangggcnnntttnnttannaaanaannggnnttntantttttncnaaaaannnntttttnaatttnaaaaannaanggggggtnnatttttnaaaaaanttncnccaagtaaaaancccnaannaggggnnttnnnnntnaaaaaaaaannaatttnnnggnnnttnaaaantttaaaantttttttttttnggggggttnnnnntnantttnntttaaaaagaacccntccnggttttngnaaaaaaaaanntttttaagggggcncnnttaaaaagggccccccnntnggggnaaaccccaaaaaggggnnnccccgttnnccncntcaaaannttaaaanccttttttggggaaaaaanaacccctgggggttttttttttccccgggggntaagngggggaaaaaaaacccttttttttcccccg

SEQ ID NO: 4696 - DNA, 281 bp, Homo sapiens
  misc_feature 85, 168, 250, 253: n = A,T,C or G
cccttcgagcggccgcccgggcaggtacctgagaataatcgaggggagagacctggtggttaacatgcatttaggtaaaatgtcnggaacaactttctcttattaatactataaatccatctcaagcatattttaaaataatgagagatggaggaaacaatctagaanataaaagaaaaagatgtgcataacttgttttcagtttccctgtttatgacagtttgtcatttggccgggttgggggatggancanggaataagacattgaaaaagctcatccc

SEQ ID NO: 4697 - DNA, 449 bp, Homo sapiens
cccttagcgtggtcgcggccgaggtactcttacagttttggaggctagaaatctgaaatcaaggtgttggcaggaccatgccccctctgaagcctctaagtggggatccttccatgcttcttccagcttctggtagccttaggtgttccttggcttgtggtagcctctctccaatctatcctctgtcttcccctggccacccttctgctgtgtctgtgtcttctaataaggacatattattttagattagagtctacctaatccagtaagacatcattttaatttgactacatctgcaaagtccctatttctgaataaggtcacattcataaatattgaggattgcgacctcaacatattttttggtgggacaggattcaacccacgccagactgtttagaggactgctatctggttaattcagtacctgcccgggcggccgctaaggg

SEQ ID NO: 4698 - DNA, 333 bp, Homo sapiens
  misc_feature 50, 51, 111, 120, 127, 130, 131, 132, 138, 140, 141, 142,143, 149, 157, 160, 162, 171, 172, 173, 182, 185, 186, 188,190, 192, 202, 206, 208, 209, 210, 212, 214, 219, 220, 227,228, 229, 230, 240, 242, 259, 261, 262, 264, 270, 274: n = A,T,C or G
  misc_feature 275, 278, 279, 282, 283, 284, 285, 289, 292, 293, 302, 303,304, 306, 308, 312, 321: n = A,T,C or G
cccttagcgtggtcgcggccgaggtacttttttttttttttttttttttnntttttttttttttttttttttttttttttttttttttttttttttttttttttttttttnttttttttntttttanaannncccccncnnnntttttntttttttncancnccccccccnnnaaaaaaaanttnnananangggggggggntttntnnntntnggccnnccccccnnnnaaaaaaaaantnttttttttaaaaaaaantnngngggggngggnnggnngtnnnnaaanaannaaaggaggnnngnantaanaaaaaaaancccccccccccc

SEQ ID NO: 4699 - DNA, 645 bp, Homo sapiens
  misc_feature 52, 102, 104, 105, 106, 116, 117, 118, 119, 126, 127, 134,150, 156, 159, 178, 189, 191, 192, 198, 199, 200, 201, 207,214, 217, 232, 233, 235, 243, 244, 253, 254, 255, 258, 264,265, 266, 273, 286, 294, 297, 303, 309, 310, 311, 312: n = A,T,C or G
  misc_feature 315, 316, 317, 322, 325, 332, 346, 347, 350, 351, 353, 354,355, 360, 362, 363, 365, 367, 372, 381, 382, 383, 399, 400,405, 415, 416, 420, 435, 441, 453, 462, 463, 464, 467, 481,497, 516, 518, 531, 537, 539, 565, 596, 599, 607, 609: n = A,T,C or G
  misc_feature 642: n = A,T,C or G
cccttagcgtggtcgcggccgaggtacttttttttttttttttttttttttntttttctttttttttttttttttttttttttttttttttttttttttttnannngggggggggnnnnttttttnnggggggncccccccccccccccnaaaaanttnccccccccccccccccccnaaaaaaaaaangnnaaaaannnngggggnggggggnttncccccccccgggggnncnaggggggnnaaaaaaacnnnaancttttnnnggggggnccccccccccccnaaaaaaanccncccccngggggnnnnggnnnccccnaanggggggnaaaaaaaaaaaaannaanntnnnagggngnncncnccccnttctccccnnnaaaaaagggggggggnnaaaancccccccctnnatancccccccccccctanaaaaangggggggggggntgttttccnnnttngggggggggggggnggaaaaaaaggggggnccccccccttttttttttntnaaaaaaaaaaacncccccncnccgggggggggggggggggttataanaaaaaaaaaaaaaaaaaattttttttttttnggngggggggngngaaaaaaaaaaaaaaaaaaaaattttttttttnggg

SEQ ID NO: 4700 - DNA, 476 bp, Homo sapiens
  misc_feature 133, 137, 138, 141, 145, 157, 160, 161, 167, 170, 175, 177,178, 196, 197, 198, 204, 206, 207, 220, 226, 227, 228, 231,232, 233, 236, 237, 260, 263, 276, 280, 283, 284, 291, 310,313, 315, 318, 320, 321, 322, 324, 327, 328, 343, 344: n = A,T,C or G
  misc_feature 345, 346, 348, 357, 360, 365, 366, 367, 368, 370, 371, 372,376, 378, 382, 387, 388, 390, 391, 392, 394, 395, 396, 397,398, 401, 413, 414, 424, 425, 427, 428, 432, 433, 436, 437,438, 443, 450, 452, 454, 455, 456, 457, 458, 459, 461: n = A,T,C or G
  misc_feature 469: n = A,T,C or G
cccttagcggccgcccgggcaggtacttttttttttttttttttttttttttttttttttttttttttttttttttttttttttttttttttttttttttttttttttttttttttttttttttttttttttntttnnaantttnaaaaaaaaaaanttnnaattanaanaaaantnnattaaaaaaaaaaaaaannntttaangnnaaaaaaaaaaaangggggnnncannncannaattttttataaaaataattaantgnataaaaaaaaaanaatnaanngtggttntttaataaaaaaagaaaanaananaangnnngnatnngaagattgaaaatannnntnttttttatnttnttaannnnannnaaananatgnaatgnngnnntnnnnntangtatttaaattnnataaaaaaanngnngtgnnggnnnaaaantataaangngnnnnnntngtgttatnttaatta

SEQ ID NO: 4701 - DNA, 702 bp, Homo sapiens
  misc_feature 557, 602, 615, 645, 662, 672, 676, 679: n = A,T,C or G
gccgcccgggcaggtacaggacaataaagactactcctatctgcggaacaactagctttctatttagttctagatgttgaaactgacgatggctgacataaaagtcacatttacaaaaagtgtctccaaatgcttgactagggaaaaacccctttcaatagaggagcatgtgcaacaattccacaaataatcgctatccagggcaaggcacattgatatggaatttttgttttcgtgcaaattaaggaaaaaaaacaaaacaaaacaacattgtttcggggagaaagatgaggagcaaagtgtcttcccaagaatttcagttacttgattgtataggacagtagtagaacccttctgaagggctgaaaaacatagtttaaaggcaagtgcctagagtagggattacaatattgtgtcttaatgcactctactttatcctacattaactatataaaaattagttactaacactagaacatgcagagactttctctgatcagcagggcttgccaaccagaacgtatatatatgtatagtataggaacccttttgaatcncatgggaaccaaagggggcttcctttctggtaaaaaatccttgcncttttttggtttnggtctggggttttggggttttttttggttnggttttgggtttttttnaaaaaaacangacnttngggggggcaactttttttttttc

SEQ ID NO: 4702 - DNA, 417 bp, Homo sapiens
ccctttcgagcggccgcccgggcaggtacacttcaccacagcaatagcttgcctattagtctgctgagcagtcatgaattttattgtatttcttgggtaaggacaggccagaatgagtgtcaccagtgggtaattgaatcaacttctcacacatactgaaggctttatatgtctcatgcatacttagtgtatcatgaatatttggtatctttgtggcttttcatatttttagtgcttcatgaatatttggtatctcttgctcctttctatctgtggtcacacatacacgctctattaactttgcctaataagtctcctaggttactaacttacttacctaaatgtaacacaatgaattccagccttctcatttgttctataccagaatgggaaatttccccaaatcagaaaatcaca

SEQ ID NO: 4703 - DNA, 218 bp, Homo sapiens
  misc_feature 17, 27, 109, 112, 142, 147, 155, 156, 157, 172, 173, 174,182, 183, 186, 187, 198, 200, 201: n = A,T,C or G
gcgaatgggccctctantgcagctcgncggccgccagtgtgaggatatctgcagaattcgcccttacgtggtcgcggccgaggtctttttttttttttttttttttttnggntttttttttttttttttttttttttttttnggggnaaaaaaannnttttttttttttttnnncccccccnnttnnaaaaaaaaaancnnggggggggggggggggg

SEQ ID NO: 4704 - DNA, 296 bp, Homo sapiens
  misc_feature 1, 27, 69, 96, 169, 197, 209, 220, 224, 226, 231: n = A,T,C or G
ncccttagcggtggtcgcggccgaggnaccttttctctaatagaaggtattatccttaaaacaaacctntgcttatcttctatacattggtttacnacagatgtatagtattctctcatttttgtaaataattaaaaatctgtataaaaggataatttataatatgttnatatgaggccaggtgcagcggctcacanctgtaatcccancactttggtangccnangcggntggatcacgaggtcaggagatcgaaaccatcttggctaacgcaagtgaaaccctgtctctactaa

SEQ ID NO: 4705 - DNA, 464 bp, Homo sapiens
  misc_feature 420, 450: n = A,T,C or G
ccctttcgagcggccgcccgggcaggtactgcaagcaacagttactgcgacgtgaggtgcattaactgtcaaaagccactgtgtcctgaagaaaagcaaagacatctggacaaaaagcaaagattccataatataaggggtcggtggaccggtcgatgtatgtcttgttgcagatcatcaagaacacgtagagaaacccagctgtaatcatgcatggagatacacctacattgcatgaatatatgttagacttgcaaccagagacaactgatctctactgttatgagcaattaaatgacagctcagaggaggaggatgaaatagatggtccagctggacaagcagaaccggacagagcccattacaatattgtaaccttttgttgcaagtgtgactctacgcttcggttgtgcgtacctnggccgcgaccacgctaagggcgaattccancacactggcggccg

SEQ ID NO: 4706 - DNA, 429 bp, Homo sapiens
cccttagcgtggtcgcggccgaggtaccactcactacattacaaaatagtctctaacataaaattgccttaataactatactattatagaatctgataaaccttacattattaaattgattataaaatcttcttggaaaaactttggtatgtatcttcagaaggttttttaaaaataatattttaagggcctgtaagcattccattctattaaagcacagcagaataagtaatggatattcaactgcatacagaatatagactcaaaaaaacaatttattatgtatttgtagaaaatcattaccagagtaagcaaaaaaaccaactatttaaaagtatcaaacttttaaacagttctttttccattctgataaaaaatgttataaaatcaccatactccattcatgtacctgcccgggcggccgctcga

SEQ ID NO: 4707 - DNA, 525 bp, Homo sapiens
  misc_feature 61, 146, 156, 312, 328, 329, 352, 358, 370, 420, 489, 498,517: n = A,T,C or G
ccctttcgagcggccgcccgggcaggtactttttttttttttttttttttttttgaaaganatgggggtcttactatgttggctaagctggtctcaaactccttgcctcaggtaatccttctgcctcagcctcccaaagtgctganattacaggcntgagccaccatgcccgacttccctttgtgtaaaatgagataatatgtatgtcacagaattgttttaaggatgataaaggactaagtgagataatgtaggtgaagtttagtttgatgcctggctcatagttaagtgctgaattatgaatagtaaatntatttttctaactccnnaaccttctttctttacagatttntaagcnttctgtcttttntagggggttaagaagtcataaaccaaaattacacttttcctctgctaggnttcctccctttcctcttcttgacagtctgatggggaaacaaaggcacacattaagagcctagttccaanttgtccaanatcctggagaaggaagggnatatggga

SEQ ID NO: 4708 - DNA, 311 bp, Homo sapiens
  misc_feature 70, 77, 131, 144, 155, 189, 197, 209, 229: n = A,T,C or G
ccctttcgagcggccgcccgggcaggtactttttttttttttttttttttttttttttaagcctatttanacttctntgattgagggttctaatttaaattatagatatatactgggcacagtggctcacncctataatcccancactttggganactgaggcatgaaaatcgcttgaacctgggaggnggaggctntagtgagccaanatcgtgccacttacagcctnaaacttccggactcaggcaatcctcccataaactgtgattaattcctttctggttattttttcctttttttttttttaatta

SEQ ID NO: 4709 - DNA, 465 bp, Homo sapiens
  misc_feature 399: n = A,T,C or G
ccctttcgagcggccgcccgggcaggtacatgaaagaattcacactggagagaagccgtatgaatgtgaggactgtgggaaagccttcagtcatcccacgacctttcatagacataaaattacccacaccgcagagaaaccttatgaatgtcaggaatgtggggaagccttccgttatcctgttgcttttcgtagacataaaattacccacactgcagagaaactttgagtgtaaggaatgtgggaaagccttctgttatcacagttcccttcaaagacatgaaaggactcataacggagaaaagttgtgtggatataaaaaatgtaaagccggctgggtgcggtagctgacgcctgtaatcccagcactttgggaggccaaggcgggcggatcatgangtcaagagattgagaccatcatggccaacatggtaaaaccccatctctactaaaaatacaaaaatt

SEQ ID NO: 4710 - DNA, 380 bp, Homo sapiens
  misc_feature 112, 133: n = A,T,C or G
cccttagcggccgcccgggcaggtaccagctagtggacaagatagtgcactgcatgagaccgttgatacagccagaaaacagggagatcttgaggcatggcagtatccggtnatgttacaaccgataccggcncgggaaagggccaggaaagggagtcaagcaggagcgtctgtccgaacggaggctaggtaagaatatttcaccatgaaaatgttaaaagacataaaggaaggagttaaacaatatggacccaactctccttatatgagaacgttattagattccattgctcatggaaatagactcattccttatgattgggaaattttacctaaatcttccctttcaccctctcagtatctacagtttaaaacctggt

SEQ ID NO: 4711 - DNA, 368 bp, Homo sapiens
  misc_feature 204: n = A,T,C or G
cccttagcgtggtcgcggccgaggtacttatgactgagatgatatcaatttaaggcaggatcatgtattgtgtctgttatgattggctattagaaaaaggaaaaaatctggcagacacaatctgtatttgttttttattgctgcctaacaaattattacatacatagcagcttaaaacaacaccattgattatttgtagatcanaagtcctggtgtaggttagatggcttctctgattaggatgtcttcaggttgaatcaaggtgtcacctgagactgtgatctctgaggctttgggatcctcttccaagatcactggttcttggcagaattcagttccttgtggctacagggctgaagtccccattt

SEQ ID NO: 4712 - DNA, 301 bp, Homo sapiens
cccttagcgtggtcgcggccgaggtacaggtatgggcacagatagctaaagtaaacatttcacagaacaagtgatacctgcccttctcagtgtgatggagtgtgatgtatttattgagtagcagcatagggtagtggctaagaacctaaactctaaatttagatgtcctgagttcaaatcccagctgtatgctcaccagccttgtatgtggggccagttaattaacctctttgtgttttacttttttcagttgtgaagtgtggataataatggtacctgcccgggcggccgctcgaaaggg

SEQ ID NO: 4713 - DNA, 236 bp, Homo sapiens
  misc_feature 204, 210, 234: n = A,T,C or G
cccttcgagcggccgcccgggcaggtacttttttttttttttttttttttttttttttaggaattcctttcatttttatttgataagccaaaaatgcaaatctgatttaaattcaagacaaagttttaaaaatcattctcaacactacagaaaaaaagccagtaactatacaaatactcactataaagcgatgaagtccatagnactttntttttttttttttttttttttttngg

SEQ ID NO: 4714 - DNA, 282 bp, Homo sapiens
  misc_feature 96, 130, 154, 261: n = A,T,C or G
cccttagcgtggtcgcggccgaggtactttattctcctgctgtctagctaagcagcccacacaggacagaaatgggtagcactgaggaatgatcanattatttttctatccccaatatttctgccccctncctaagccctgacccaaccctatnttaataatcaccgaatggttagtactgcattgctttttataaagtacaaaataaagatttatttttaaacaagtgactttggtttattttatacattacactttttnttgcagaaaaaaataaaattg

SEQ ID NO: 4715 - DNA, 543 bp, Homo sapiens
  misc_feature 507, 524, 525, 529, 543: n = A,T,C or G
ccctttcgagcggccgcccgggcaggtacatacccaacagaaatgaaatgaccacctcataaaaatactgcactcccatgtttaatgcagaattagtcacaataaccaagatatggaaacaatctaggtgtccatcaatggacaaatgaataaggaagctgtggtatatatacaatggaatattttattcagccttaaaaaagaggaactcctgccatttgtccctgcatggatggacctggagggcattacactaagtgaattaagtcagacacaaaacatattgcatagtcttacttacatgtggaatcttttttaaaaggtcaaatatatagagaataaaacagtggttaccaagaccagagttatggggcaggggaatgggaagaagtaggtcaaaggacactgagtatccctaattgatttgcagattcaatctaattcctaacaaaattccaaccgcctttttttttgcgcaaaaatataaaagctaattctaaaattcangctaggcatggggggtnnaatnctgaatccccacan

SEQ ID NO: 4716 - DNA, 333 bp, Homo sapiens
  misc_feature 312: n = A,T,C or G
ccctttcgagcggccgcccgggcaggtacgtgaggatccggagcagacgcctcgggatttatcagcgatgctggttagtattcaagaaagcttcaagcaaaggtccaaaaagactggagaaattttctgatgaacgtgctgcatatttcaggtgttatcataaggttacagaactcaataatgtgaagaacgtagctcgattgccaaaaagcaccaagaaacatgccatagggatttatttcaatgaccatacctccaagacttttgcttgcgaatcaaatcttgaggctgatgagtggtgcaaagtacctnggcccgcgaccacgctaaggg

SEQ ID NO: 4717 - DNA, 258 bp, Homo sapiens
  misc_feature 31, 56, 58, 105, 106, 108, 109, 112, 113, 114, 116, 117,119, 125, 132, 143, 149, 150, 153, 154, 155, 156, 157, 158,160, 166, 170, 182, 194, 196, 206, 223, 227, 228, 229, 232,233, 235, 236, 238, 239, 244: n = A,T,C or G
cccttagcgtggtcgcggccgaggtactttnttttttttttttttttttttttttnanttttttttttttttttttttttttttttttttttttttttttttttnnannagnnngnncncggagngcttttnaaaaaaaaaancccttnngannnnnnanaaaaangagnggaaaaaaaaanaaaaaaaaaaancngggggggggnaccccccccccccccgngggnnnttnntnnannaaccncccccccaaaaaaa

SEQ ID NO: 4718 - DNA, 362 bp, Homo sapiens
  misc_feature 142, 182, 222, 227, 250, 260, 261, 262, 273, 299, 328, 336,360: n = A,T,C or G
cgagcggcccgccagtgtgatggatatcttgcagaattcgccctttcgagcggccgcccgggcaggtacaacttatagaaaaggtaaaggaaaccccaacatgcatgcactgccttggtgaccagggaagtcaccccacggntatggggaaattaacccgaggcttagctttcattatcacngtctcccagggtgtgcttgtcaaaaagatattccgccagngccangattcgggcgctcccatcttgcngcaaggttgnnncacggtggtgnaccccaatttcttttgatggcctttnaccttgctcaattcagggtaaatgggtcntccaatgnaaaatcacaacaaaatgggggggnca

SEQ ID NO: 4719 - DNA, 403 bp, Homo sapiens
  misc_feature 28, 31: n = A,T,C or G
ccctttcgagcggccgcccgggcaggtnctncatttgcctaatttttgccattctcataatgtggcaattgttcaattttgcatttcttccattttatttttttgcatctctgcttttcttttggttagctttgccagttctgcctattatattaatctcccagaatcagcttttagttttgttaaatctctgacatgtttcgttgattcctgctttcatcttaaacatttcttcgttgttaatttgtgtttgctataaaataagcaacatcttaaatgcttgatttgctttcgatgtttattctgtaataagatatttaaagatataattttttccctaaatgctttattagacttttctcataagttttgactggtacctcggccgcgaccacgctaaggg

SEQ ID NO: 4720 - DNA, 315 bp, Homo sapiens
  misc_feature 293: n = A,T,C or G
cccttagcgtggtcgcggccgaggtactaggagctgagaacacgatgatgagcacaacacagttcttccctttggaaacatagataagtggagggaatgtcatcacaaatgtaaaacttcactatgagatgagttcccgtgataggattttcttagggaaaccctgagaaagagttgagactaaaggtatgtgtcatattttttcacaagggcaaaacctggggggaatgaccgtatacagagggcttgggcctagaaaaaaagatacccgttagttccactttactttttgnagacaggttttggcttggtttt

SEQ ID NO: 4721 - DNA, 567 bp, Homo sapiens
  misc_feature 446, 452, 469, 481, 483, 512, 518, 525, 547, 554: n = A,T,C or G
ccctttcgagcggccgcccgggcaggtacgcgggcatctcacaagttagtccactcattgtagtcttggctatactttatcatccaaaaattcatcaacattctggtgaatggacggcatcttttgagggttgattgtattctatgtcatttaaagggattcaggaagaatgctttcatgggattcatatgccatcctgaattagaagtttaagttttattcctaaagattctcctcactctgacattctcttagccaataattctttaaaatttttcaatcctggtcaggcacggtggctcacgcctgtaatcccagcactttgggaggccgaggcaggcagatcacgaggtcaggagattcagaccatcctggctaacacggtgaaaccccgtctttactaaaaatacaaaaaattaaccgggcatgggggggggcgcctgtantcccanctacctgggaggctgangcaggaaatggngngaattcaggaggcaaacttgcatgaaccnaaacgncccctgncctccacctgggcacagggcanactcctntccaaaaaaaaaa

SEQ ID NO: 4722 - DNA, 439 bp, Homo sapiens
  misc_feature 24, 286, 341, 366, 373, 391, 393, 394, 437: n = A,T,C or G
cccttagcgtggtcgcggcccgangtactcttttttttttaacactgtctttggttttggtgtcagggtaatacaggcttcataaaagtgttaaaaaaatgttccctttctattttctagaagggactatgtagcattggtattaattctttaaatgttaggtagaattatccagtgaagccatctgacctgtaaatttattttttggggaagtttaaaattatgaattgaattttcttaatagttaaaaggctattcaaattatgcattcctattaagttgaggnaattctactttcaaggattggtcccttcatctaagttgtccaaggatgtgttaanagctgtccataatggccccttattntcttttngatatctgcaggatctgnanngatgttctgggttccccttctgacgtgggggattttggctttngg

SEQ ID NO: 4723 - DNA, 500 bp, Homo sapiens
  misc_feature 337, 360, 376, 418, 426, 459, 472, 483: n = A,T,C or G
cccttgagcggccgcccgggcaggtacctttttcagtaatcaatagaccagttagaacacctcagccaaaaatagcagaatataaattatttttgagctctcacagaactttgctgagatacattataacctgggccataaaacaaacctcaaccaattaatacagttgaaaccagagtgtgctctctgaccacagtagaatcaaactattaattagtaatataataatgaaaatctccacactcttaaaaataaacaacatgcttttaaattatccatgattagggaagaagtctcaagagggaaagaaacatagaactgagtgtaaaggaaaatncgacatcaaaatatgtggaatgnggctaaagcagtcctnagacggaaatctgttgcactaaaaactgaaagaaaggatggnttcaagtnatacctaaagggctaaactcaagaaactagatngggaaaaaaggcngaataaatgcnaagttagaagaagggaa

SEQ ID NO: 4724 - DNA, 511 bp, Homo sapiens
  misc_feature 32, 33, 38, 82, 86, 96, 102, 112, 113, 115, 127, 139, 143,152, 156, 164, 291, 307, 315, 324, 342, 343, 347, 348, 352,357, 375, 377, 391, 394, 407, 410, 414, 415, 417, 419, 469: n = A,T,C or G
cccttagcgtggtcgcggccgaggtaccctcnntgaantagaaaaaggcctttatttgtatcattttatgttaaatactggntagntactggtatngataanatctgggcannanacaactaaccanatatgcattttnacantatattcanattncccataanacttggcaatgtgtattaccagtgaaaatctaaagtttctacttgggaaggaatacccaatgatgggtaatccttcattctgagaacacagtcagaatatcttggagctaccaacattgtgcttggntcttaatgccaagttntcaagggntggggatgngctaaaaacacttttaannaatnnatcngcganccattcttacacgtttgntnttctttattcttcnttngttctttcctttnttntttnntntngctctttaaaaacccctctttggaactaagggtaacaaatgattcctggncataattttacctattcttgtcaataccagattttaaaaatt

SEQ ID NO: 4725 - DNA, 415 bp, Homo sapiens
  misc_feature 5, 101: n = A,T,C or G
cagcntgctcgacggccgccagtgtgatggattatctgcagaattcgccccttagcgtggtcgcggccgaggtcgaattaaagaccgcaataaactttctnccagaggaacgccggaagttgtttgagcaagaggtggctcaacgggaggctcagaacaacagcaacagatgcagacctgggaatgacatcaccactgccctatgactctcttggttataatgccccgcatcatccctttgctggttacccaccaggttatcccatgcaggcctatgtggatcccagcaaccctaatgctggaaaggtgctcctgcccacacccagcatggacccagtgtgttctcctgctccttatgatcatgctcagcccttggtgggacattctacagacccctttctgcccctccaccagt

SEQ ID NO: 4726 - DNA, 723 bp, Homo sapiens
  misc_feature 56, 57, 59, 137, 147, 148, 156, 162, 167, 169, 173, 189,200, 202, 214, 223, 225, 227, 231, 239, 240, 248, 257, 259,260, 266, 270, 273, 274, 275, 277, 278, 280, 283, 287, 295,306, 311, 313, 317, 340, 344, 351, 353, 361, 367, 370: n = A,T,C or G
  misc_feature 371, 378, 379, 381, 400, 403, 406, 407, 416, 421, 428, 431,434, 475, 476, 479, 480, 482, 483, 491, 515, 518, 520, 522,528, 529, 533, 535, 536, 558, 561, 578, 581, 586, 588, 589,593, 597, 603, 615, 618, 627, 639, 643, 645, 653, 658: n = A,T,C or G
  misc_feature 686, 688, 689, 690, 692, 694, 695, 696, 697, 698, 699, 700,701, 703, 704, 706, 711, 713, 714: n = A,T,C or G
cccttagcgtggtcgcggccgaggtacttttttttttttttttttttttttttttnnanttttttttttttttttttttttttttttttttttttttttttttttttttttttttttttttttaaaaaaaaaaaaanattttttttnnaaaaattnttaaanaaaangngggnaaaaaaaaaaaaaaanttttttttttngnaaaaaaaaaaanttttttttntntnaaanaaccattnnaaattttnccttaaaananntttttntganaannnanncnttntttnttttaaanaaaaaaaaaanggatntntttnttaaaaaaaaaaaaaaatttttnttanaaaaaananattttttnaaaaanaannggggggnnancctttttttttcttttttnagnaannagtgggtanaaggnaaaaaanggntcntggggcattgggattgtttttttttttagaaaaaaaaaaanntanncnncccccccnaaaaaaaaaaaaaagggcccggtnttntngntgaaanntttnanngaaaagggggggggcccccccnttnttttttttttccaccanaanaaacntnnaaanaatntttttntaaaaaaggggnganggggccccnaaaaaaaaaaanaacncncccacttnttttnaaaaaaaaaaaaaaaaaaaaaaaaaccntnnngncnnnnnnnncnntnggggngnnatttttttt

SEQ ID NO: 4727 - DNA, 447 bp, Homo sapiens
  misc_feature 47, 53, 57, 58, 67, 74, 82, 84, 85, 87, 111, 114, 136, 137,139, 145, 155, 157, 160, 172, 179, 224, 229, 236, 242, 245,247, 248, 250, 253, 255, 257, 259, 281, 302, 303, 384, 399,418, 420, 421, 423, 433, 435, 441: n = A,T,C or G
cccttagcgtggtcgcggccgaggtacccgggatcctgtgactttgnaaccanactnnttcctttcnaacacanaggaggantnntngcttcatctgactttattcaaaantanttatgtattggcctaaattatnngngcaaantttgaaatgntnttnatttaaatattngaaatancgcaaagtcatggagtttttaaaaattgttataattaagtaaaantaaanctgaatngtgtcnaantnnanaangngnanacaatccctgaggatgtgtgtnggagctcctaatagcttgggnnaaggctattaaccgtattagctttaaatgggtggtccctgcaacctcttgtttcaaagaattttctccaaaacttgaaagntcatcagggttccanctgggcctgcattttcaangnngncacttttaancngaaacngttggg

SEQ ID NO: 4728 - DNA, 361 bp, Homo sapiens
  misc_feature 32, 33, 36, 41, 68, 75, 76, 78, 79, 82, 84, 85, 86, 88, 89,93, 96, 97, 99, 101, 102, 147, 211, 247, 264: n = A,T,C or G
ccctttcgagcggccgcccgggcaggtacttnnttnttttnttttttttttttttatttttttttttnttttttnntnnttntnnntnntacnttnnantnnttttgctaattttttaacttacaaccaacaaaagtgaatcaatangtttacaaatggtccatggcactacaattaaaataaaaaatatcaaaaggtcacaggatcttangtaaagtttactgacaatttcataaatattcaaaanaaaatttcaaaatttgnaaacttaaatttgcctcattttaacatttttgaaaaattttttaaaaatttacaatggttaatttttctcccctcttgggtatagtaaaccaatatt

SEQ ID NO: 4729 - DNA, 344 bp, Homo sapiens
  misc_feature 5, 10, 23, 33, 47, 87, 96, 203, 225, 247, 248, 256, 257,262, 268, 290, 292, 301, 302, 320, 332, 334: n = A,T,C or G
ccctnagcgnggtcgcggccgangtacttcctntttcttttcacttnatctttacgggcatattaatgagtggagtaaagcactcanaagaacagnaggaaaagaggattcatgtatgtcagaggagctgaaggctctcaataggttcagagaatgcaggtcttccagctgctgagggtgtatgcttccactatgcctcatangcatcccctgaacaaagtgggngtctctaaagttctattaacannactcaatnnctaancacctngtaaccaggaaaaatattcccntntgggtcctnnttcctttacattccatgnagtcggagaaangngaagggaatt

SEQ ID NO: 4730 - DNA, 369 bp, Homo sapiens
  misc_feature 29, 30, 32, 34, 35, 36, 50, 51, 57, 58, 60, 61, 62, 65, 69,70, 75, 76, 82, 86, 89, 90, 94, 96, 98, 99, 100, 101, 104,107, 108, 112, 116, 117, 121, 122, 123, 126, 129, 131, 134,142, 145, 147, 153, 155, 157, 162, 172, 199, 201, 205: n = A,T,C or G
  misc_feature 213, 220, 234, 238, 248, 256, 258, 260, 265, 341: n = A,T,C or G
cccttagcgtggtcgcggccgaggtactnntntnnncctaaccccttggnnagcctnngnnngangatnnctcgnnatcacnagtnagnnaccngncnnnncancanncggngccnnatgnnnacnaangntcntaaaaatntcncngggtgngngngggcncacggagatntactaggacttttaccaggctccagangnatgnaggccatnttaccanagggtcagaggatnccanatggaggatntacaactntnantttcnctcagaatgtatgaggaaaccctgcccctccttgagtgtcaatggaacctggacttgtacctgcccgggcggccgntcgaaagggcgaattccagcacactggc

SEQ ID NO: 4731 - DNA, 422 bp, Homo sapiens
ccctttcgagcggccgcccgggcaggtcttgaatgaaggactgtggctggattggccttttagtttgccccctacattaggccccaaattttcttaccctgaggtgctgatatctgtatggatgagttatttgtcactaaagttatgagttgtgcctaaaagttaaaactgttgactgtattatgtaatgatcagtatttcagttgggaagatattttagagtctagataattatgtttgtatattgaaaaaatggtggccagtttttaagttccttaatagaagagaattatgtctcagcacatataacagtaatgctaatttattgaaactactgctgttagagcacttcttattcattgtcttttagtgaaattatggcgtaacactttgtcagagaggaggctatataatttggagcg

SEQ ID NO: 4732 - DNA, 658 bp, Homo sapiens
  misc_feature 6, 86, 137, 146, 167, 173, 174, 178, 184, 190, 191, 193,197, 212, 220, 224, 226, 231, 238, 239, 240, 244, 245, 247,248, 250, 252, 255, 259, 263, 268, 272, 273, 279, 280, 283,285, 290, 291, 293, 296, 304, 305, 307, 308, 311, 312: n = A,T,C or G
  misc_feature 319, 321, 322, 326, 327, 330, 332, 337, 341, 347, 349, 353,358, 360, 365, 368, 369, 385, 387, 392, 396, 493, 495, 551,556, 563, 645, 655: n = A,T,C or G
ggccgnccgggcaggtacctcattggctaaagctagttacgtggacaagcaaaattcagtgtagaaagagatttttacaagggtgngaataccaggatgcatggcttattgtaggccaccaaagaaacagcataccncagctattnaatatgtatttcaccagtatnccacanntatntaatgngtattnnancagnataccacatctattnaatgtgtntttnancagantaccacnnntatnnanngngnatntcancacnatacnacanntatggnntgngnatttnnanagnataccacnncnnttnnatgagtntnncatnnctntnccgcnggtntttaangngggntaaancnatctnccnnacctatttaatgtgtntntcagnactntgccccaactatttaatgtgtattgtcatagctatgcccagctatttaatgtgtatttcagcagtatgccacagctatttaatgtgtatttcaacantntgccacagctatttaatatgtatttcaaaaatgcaggcagccttgctttgcatggnaatgnggagccntaaaaatgaccattgctgctgaaactctgccaaagcaatggtaatcatcagtgaagggaaatttattattctgggacctttncattttttgngaa

SEQ ID NO: 4733 - DNA, 358 bp, Homo sapiens
  misc_feature 78, 85, 103, 119, 146, 150, 151, 153, 155, 160, 162, 164,166, 171, 175, 177, 179, 181, 183, 188, 201, 219, 225, 230,244, 246, 255, 256, 264, 272, 277, 279, 284, 289, 291, 303,311, 326, 347: n = A,T,C or G
cccttagcgtggtcgcggccgaggtacttttttttttttttttttttttttctttttttttttttttttttttttttnttttttntgtttttttttcactttnttttttttttttttcnttttttttttttttatttttctttcancccnncncncccgngntntnttttnaaanancntncnacatntttggtttttttngatatttttattttaggngggggntattnataaaaaaaaagtntnttttaaaanngggccctntttttttntcccncncggtntctantngtttcaatattnaaaaaagngtttttttttttaanacactgggggcttttacaccncccaaaaaaaa

SEQ ID NO: 4734 - DNA, 634 bp, Homo sapiens
  misc_feature 15, 16, 17, 21, 532, 535, 539, 549, 550, 551, 552, 553, 554,555, 556, 557, 558, 559, 560, 561, 562, 563, 564, 565, 566,567, 568, 569, 570, 571, 572, 573, 574, 575, 576, 577, 578,579, 580, 581: n = A,T,C or G
cgcgtccggcctgannncgtnggcgcagcgggcctagcctagtcaacatgccggtcgccagaagctgggtttgtcgcaaaacctatgtgaccccacggagacccttcgagaaatcgcgtctcgaccaggagctaaagttgattggagagtatgggctccggaacaaacgtgaggtgtggagggtcaaatttaccctggcgaagattcgtaaggctgcccgggagctgttgacgctggacgagaaggatcctcggcgtctgtttgaaggcaacgctctgctgagacgacttgttcgaattggggtgctggatgagggcaagatgaagctggattacattctgggcctgaagattgaggatttcttggagagaaggctgcagacccaggtctttaagctgggcctggccaaatctattcaccatgcccgtgtgctcatccgccaacgtcacatcagggtccgcaagcaggtggtgaacattccatcttttcattgttcgcctggactctcagaagcacattgacttcttccttncgntctncttatggtgnnnnnnnnnnnnnnnnnnnnnnnnnnnnnnnnncacaccttccctgaacctgaaaacataaaatgaatgccaattggtggtggtaa

SEQ ID NO: 4735 - DNA, 324 bp, Homo sapiens
cgggcaggtacctcacaagttcaaattattgttttttggggaaatgtaaaggaatatagtaatattgaagactgtttccagcaacttgactttgtgaaaaatgatttcttctttgaacagatttataaaaccttaaacatccatgtgacgttggttggcattgaaatatggacacatgaagataaaatagaactatattcaaatatagaaactaccttattgcgtttttcattttggcaagaaaagatccttaaaacacggaaggattttgatcatgttgtattactcaggttggtgattgctctattttcttgcatacctttg

SEQ ID NO: 4736 - DNA, 490 bp, Homo sapiens
  misc_feature 23, 29, 33, 83, 117, 127, 132, 136, 158, 163, 172, 192, 220,221, 268, 272, 283, 288, 290, 299, 303, 312, 343, 344, 354,414, 417, 418: n = A,T,C or G
cccttagcgtggtcgcggccgangtacanccanttccctaatagatacccccattcgtcaaaaatgggcacattttaaaaatngcttttcccttttcttttttttttaaaaaataanaagtaattgngaatntatntaaaaccatttgtaaatatgtngtttnttactattnaatagtatgaaagtaaacanaaaaaagaatttttagacttacatcatnngctccatctacttttggtaaatttacatcctcatcaccacccatgtngttnatcatctattngaagngnaaaaattantttnaaaaatgangctaagttaggccctaattattaatgctgtnngcttcaaaanaaaccttaagtctgccacagatttaaaaaaatgcaaaatgcaaatataaacatttttccnttnnggaaaaggaaaattataggtaattatacaaaatcctaaaaacccatatggaaattaaaactaaattttccct

SEQ ID NO: 4737 - DNA, 390 bp, Homo sapiens
ccctttcgagcggccgcccgggcaggtacatagtctcctcagaagaacttttcagttatttatatttactaagaatggctctactttccacccccaactccattttaatccattctgaatttaaaccattgttaaactttatttttaaattatgaatggtaaaggagcatttcaaaatcatctcaataaacgatctttaaaaacatgagcttaacttcaattgcttgacatgccctttggctccttttctttgggtcaagatcccgaagatcttgtttcacaccaacactctccattcatacctgcaagtgaaaagtgcctcaacttgacaccttatacaggtacctcggccgcgaccacgctaagggcgaattccaagcacactggccg

SEQ ID NO: 4738 - DNA, 644 bp, Homo sapiens
  misc_feature 14, 65, 66, 118, 119, 121, 123, 158, 219, 227, 232, 311,325, 328, 339, 343, 358, 371, 390, 393, 423, 433, 448, 452,456, 476, 483, 515, 521, 535, 552, 558, 559, 578, 580, 584,585, 587, 595, 597, 602, 614, 619, 620, 622: n = A,T,C or G
atggatatctgcanaattcgcccttagcgtggtcgcggccgaggtacgcgggcaataaaagaatnngagaagagtggtcaaaaatagtctatctatcttgaaacctttaagcgctttnntntncaggatatggcacaaatttaataattataacattnaaaaaataaacaacaacgctgacatcactacatattaaaagctgtggtgtgtgggaaaagnggcatccnatgcnaaatttcaggcatgaaagtatttatcagaaacttataaaaactgaaagtaagtgacctaagtcttcagcttaaagatanaaatgattaaaacngancatcaaaagtntatntgaacaatttaagcnaatttttatactncaaaaatgatcagatatanacnagcttgattaagataagatggatgaccctngttaaattancattaaaaaatgaantatnaacnacccagttagaccttttaanaaatgcncaaaacctattgtgcaaaggtttataccactntgtttntggatgagatattncatgggttttttgtggnaattcnngataatttaaacccgattncnaagnnanttaaaaantnttccnacttatttcccnggganntngatccccctaaaaagaaagttc

SEQ ID NO: 4739 - DNA, 664 bp, Homo sapiens
  misc_feature 53, 54, 159, 161, 174, 177, 178, 180, 182, 185, 212, 215,216, 219, 220, 226, 237, 247, 248, 265, 269, 278, 281, 283,289, 294, 298, 299, 300, 301, 302, 304, 305, 307, 308, 316,327, 333, 334, 335, 336, 339, 343, 344, 345, 348, 368: n = A,T,C or G
  misc_feature 377, 383, 386, 388, 390, 409, 429, 431, 433, 439, 447, 450,452, 460, 462, 473, 474, 475, 477, 484, 486, 508, 509, 510,511, 513, 514, 515, 518, 519, 520, 522, 525, 528, 530, 532,533, 541, 542, 543, 544, 547, 550, 552, 561, 564, 570: n = A,T,C or G
  misc_feature 573, 575, 578, 584, 600, 601, 603, 606, 607, 616, 623, 625,626, 642: n = A,T,C or G
ccctttcgagcggccgcccgggcaggtactttttttttttttttttttttttnntttttttttttttttttttttttttttttttttttttttttttttttttttttttttttttttttttttttttttttttttttttttttttttgggggggggggnanaaaaaaaaaaaanaannantnatnttttttttttttaaaaaaaaaaaaaanaannatnnaagaanaaaacaaaaanattttttttnnaaaaaaataagaaaaanaganatttttttnccncncccccnaaaanggannnnnanntnnttcccccnataaaaaaaangaaaannnnatntaannnatnaaaaaaaaaaaaaaaaaaantttttcganaaaaanacnangngatagggagggaaaaaaanaaaaaaaaaaaaaaaaaaantncncccttntttttttntgntnttctgtcncncccccccccannnanggaggangnagaaaaaaaaaaaaaaaaaaannnntnnnatnnntnatnggnanannaaaggggnnnnggnatncnccccccccnggnaggatnggngnaantaattntattaaattttttganngnaannaaaaaaaanaagtaananntttttttttttttttnttataaaaaaaaaaaaaaaaaa

SEQ ID NO: 4740 - DNA, 466 bp, Homo sapiens
  misc_feature 15, 128, 233, 241, 302, 308, 318, 331, 336, 340, 341, 343,349, 354, 357, 358, 361, 395, 402, 408, 417, 421, 423, 429,441, 444, 450: n = A,T,C or G
ccctcgagcggccgnccgggcaggtacccagacatgctcaaaatgtgctttcccttatctttcaaaacccaccaccaggaaaccaaaacggaccccactctgagagttccatgatgaaggtgtttaanaatcacattaaccccaagttaaaggcagtagatgaaatttatccatttcttttttctttttttttttttttaagtgagactacatttgggcaaatggggaaaatnactacccntcattttggattacaaaaaaatggttttaattaatccttcctcttggaaattattgttccnggcccnagcgtggatncctttatgcctgncattnccanncncttttnggganggnnaanggcagaaaagaatctgtttgaacccccaaggaanttttaanacctangccttgggncaancntagtanagaaccccccanttnttttgntttttttttaaaaaaa

SEQ ID NO: 4741 - DNA, 549 bp, Homo sapiens
  misc_feature 527, 529: n = A,T,C or G
cccttagcgtggtcgcggcccgaggtacagaagaaacagaattggcaaatgttcagttgacaattatgaaagctggataaacaaatacctgcagggtttatttttactacttttctactattgaatatatctgatatttatataataaaaagtttaagttaccaaaatctcttcactgtcttttttttttttttgagatttctcctactcacctcaaaccctctaagactgccaaaagctacgccacaatcaaattctgcaggttctttcaaatatcatttcacttagctcttctacaataaagcctcactactcaaagtatggtccttagaatagcgtcatcataattgtttggaatgctattagaaaaataaaatgtttttcttctgataattgaaaatgttcctcttcaaagcattttaccaaagaagacagtcaaataaccaataaacatatagaaaagtgttcaagttaattcttggcagggaaatgcaaattataacccccaaagagggtcttctgccatncncccagaatgggttaaaatga

SEQ ID NO: 4742 - DNA, 336 bp, Homo sapiens
  misc_feature 25, 117, 118, 119, 134, 151, 154, 155, 156, 157, 158, 159,160, 171, 174, 190, 204, 209, 211, 215, 220, 253, 254, 267,268, 269, 280, 281, 282, 291, 293, 294, 295, 296, 298, 299,310, 311, 315, 317, 326, 327, 328, 329: n = A,T,C or G
acttttttttttttttttttttttnggggggggttttttttttttttttttttttttttttttttttttttttttttttttttttttttttttttttttaaaaaaaaaaaaaaaaannnttttttttttttttnaaaaaaaaaaaaaaaanggnnnnnnnttttttttttnganaaaaaaaaaaaaaaantttttttttttttnccaancncccnaaaantttttttttttaaaaaaaggggggggggggggnnaaaaaaaaaaaannnggggggggggnnncccccgggnannnnannaaaaaaaaagnntgtntnaaggaaagnnnnttttttt

SEQ ID NO: 4743 - DNA, 370 bp, Homo sapiens
  misc_feature 139, 141, 167, 168, 182, 183, 188, 190, 191, 197, 198, 199,200, 201, 204, 205, 213, 222, 227, 228, 232, 238, 240, 241,242, 243, 244, 248, 249, 255, 256, 258, 272, 273, 275, 276,277, 278, 279, 291, 301, 302, 306, 307, 321, 324, 325: n = A,T,C or G
  misc_feature 326, 330, 331, 344, 347, 351: n = A,T,C or G
tgctcgacggccgccagtgtgatggtatatctgcagaattcgcccttggccgcccgggcaggtactttttttttttttttttttgggtttttttttttttttttttttttttttttttttttttttttttttttttttngnaaaaaaaaaaaaattttttttttttnngggggggggggggnnaaaantnnaaaaannnnnaanntttttttnggggggggnccccnntttnaaaaangnnnnntttnnaaaaanncngggggggggggggnncnnnnntttttttttttnaaaaaaaaanngggnntttttttttttttnaannngggnnttttttttttttnccngggnttttttttttttttttttt

SEQ ID NO: 4744 - DNA, 252 bp, Homo sapiens
  misc_feature 252: n = A,T,C or G
cccttagcgtggtcgcggccgaggtacaaaaaggatcaataccctatgtgagttgcaatatacacagaaagcatagcaaggaaaaatttcctggagtaattggtgtcagtgtccagagcaggattcgttcagcctcctgagttgtcctcttcagcatcccccaggtccggggcttgtgtcatctgtggaagctgctttgttcagggctgcgggtacctgcccgggcggccgctcgaaagggcgaattccaan

SEQ ID NO: 4745 - DNA, 686 bp, Homo sapiens
  misc_feature 7, 51, 52, 59, 60, 61, 62, 64, 65, 95, 97, 100, 112, 113,121, 127, 128, 131, 132, 133, 139, 143, 148, 152, 160, 161,162, 165, 171, 173, 185, 189, 192, 194, 195, 198, 204, 215,219, 230, 231, 234, 235, 239, 241, 253, 257, 261, 262: n = A,T,C or G
  misc_feature 263, 264, 280, 283, 295, 296, 300, 305, 313, 316, 325, 344,350, 352, 353, 356, 365, 377, 385, 402, 422, 423, 430, 431,439, 449, 462, 465, 482, 485, 496, 500, 507, 512, 514, 519,521, 523, 524, 534, 535, 559, 569, 570, 577, 583, 585: n = A,T,C or G
  misc_feature 586, 592, 599, 621, 626, 627, 628, 633, 635, 641, 665, 672,674, 677: n = A,T,C or G
cccttancgtggtcgcggccgaagtacttttttttttttttttttttttgnnggggggnnnnannaaaaaaaaaaaatttttttttttttttccnancanggtttttttttnnccccccantttttnnccnnngttccngggntaccncagncaaatccnnnccnttaaancnttaaaaaaaccncttntgnannccntttggncccccccaaanaaanaaaaaaaaaannaanntggncncctttaaaaggntttngccnnnntttttttaaaaagggnccnccccccgggggnnaaanttaanttttcccnttngaaaaaccnaaaattttttttttccccngggggncnnttnaaaaaaaanattggttccccnaaaaaatntttttttttaaaaaaanccaaaacctttttaattgtnnaacaggnntttccccnaaaacctggnaaagggccccttncantttaggcccggaacccnccngggaaattccncccncccaatnttccncntgggnanannaatttttttnnccccccaaaaaaaaaaaaaaaaanggggtttaannaaaaaanaggttntnnaaaaanaaaatancttttgtttggggccccaaaangggcnnnggggngncccccntttttcttaaaaaaaaaaaaaggnttggggntnttngcccccccc

SEQ ID NO: 4746 - DNA, 266 bp, Homo sapiens
  misc_feature 76, 83, 84, 85, 86, 87, 88, 89, 90, 92, 107, 112, 114, 120,121, 124, 131, 145, 150, 155, 156, 164, 165, 172, 180, 183,188, 214, 217, 220, 221, 222, 226, 227, 232, 235, 242, 248,254, 255: n = A,T,C or G
ccttagcgtggtcgcggccgaggtctttttttttttttttttttttttggggtttttttttttttttttttttttnggggggnnnnnnnntnaaaaaaaaaaaaaanccccntntttttnnccnggggggnaaaaaaaaaaaaanccccnaaaanncccccccnnccccccntttggggnaanttttnggggggggggggggggccaaaaaaanccnaannngggnnaaaanggnttttttngggggnaaaaannccccccccccc

SEQ ID NO: 4747 - DNA, 625 bp, Homo sapiens
  misc_feature 294, 536, 538, 616: n = A,T,C or G
cccttagcgtggtcgcggccgaggtacttgcacatccttaaagttatctttttttatataagtaaagaacacacaaataaattcacttgaatttgataatttggaacattggcaatgaatacagtgcctgttgaggcctgaaagagaggggaaatcaagaacagtgtgggagaagaaaggcaatccttcgttgaaaagcttttctcttaacaatccttagtgcctgaaaaataagccattttgataacaagagtataaaaagccatatgatctgcaaagtaaatcgtatctggnttaaatttcatcccaagtctcaggttatggctgaggagctatactaagtatctttgtaacacatttctttgaatttttataactaagacaagaaaatttttttatcagatctaggcagaaatactgatcttcatttacaagtatagtaattacttgcactcaggactatatagacatggggctctgaaaaccaaacagaaggaaacgcccaaccataaccccaaggcaaaattaaaagtacncngagaagccgcgggtgatagtttatgaatttcaatattaaaaaagaagccttaccctttcagaatgtcccccttaaagncccgaaaaa

SEQ ID NO: 4748 - DNA, 282 bp, Homo sapiens
ccctttcgagcggccgcccgggcaggtactttagcttacatcattttggataaaaaaaaattcagttttcccagcttttagaaggtaagtctgagtgaggcctttagggactccctagtctccagtttgtttaaaacaccgatgaatgaatttttaaaaacagacaagtgagagatgaatggaaaacttttatgaataaagacacaagaaattagcctttcaaagtaaagttattcataatgtataaacccatttgtacctcggccgcgaccacgctaaggg

SEQ ID NO: 4749 - DNA, 450 bp, Homo sapiens
  misc_feature 165, 369, 430: n = A,T,C or G
cccttaccgtggtcgcggccgaggtacagcttggtcaaatttccatgatatgaagtatttgagttttaaaatatactgttattaaaaggaaaaagacatggccattattccatgtgcttaaatgataatttccttattcagtttcagaagaaaaagaatgaaatngggtaactgtcattgcgttagctttatgttgaattgggaaattgtggcataaagcttaaattcgtgtttatcaaatgtggaccatagtagtataatgctgctttgtatataatgtaagtgctacaaatagtctcagcactgaaaatgtattgatacctcttaaatgaatgcaacttttgatgtaggtgttttgctatgcctcanaaactatctgtctgagaatttgttaatctgtttgataatgaagatcttcctgttttcttgnttcatattttcatgttcaaa

SEQ ID NO: 4750 - DNA, 272 bp, Homo sapiens
  misc_feature 109, 112, 113, 114, 127, 128, 130, 148, 149, 151, 153, 155,160, 172, 180, 181, 186, 187, 188, 194, 198, 229, 234, 243,250, 251, 263: n = A,T,C or G
ccctttcgagcggccgcccgggcaggtactttttttttttttttttttttttttttttttttttttttttttttttttttttttttttttttttttttttttttttttnttnnncaaaaaaaaaaannantttttttttttttttttnnanancnatttnatttttaaaaancctttttnnaaaannnttttantttntttaaaaaaaaaaaaaagggaaaattttttngttanaaaaacccnccccccnnaaaaaatttttnaaaaaaaaa

SEQ ID NO: 4751 - DNA, 771 bp, Homo sapiens
  misc_feature 581, 664, 669, 689, 707, 724, 739, 746, 759: n = A,T,C or G
ccctttcgagcggccgcccgggcaggtacagactccaagtccaaagcaaatacccatggcatgaacaaataggatgcctaagattctaacatttgcttcggcatggctttcctcctcacttccctacctcacaacaagaaaaaatttcctagatgggacaatggcaagatattgtgctaatacatttcataggatttctagatgctgggctataacatccaggttacaatttggtgacggatttttttatttctattgcaaatggactacactccaaacacaaaaagattcttgccatagcatccaaacatccctatgtagacccacacttcctctcaatacagaaagagaatcactcagaaaggacaaagctggcagaccaagaaaggaggcaagggtaaactctgtcactgaccaattatctaaaacaaaaatagcagcctctgttatcaaagttgtcagttaaaactgtcagctgtcaggccagtgacacacacctgtaatcccaacactttgggagcccaaggtggggtggatcgcttgagcccaggagttttgagacaagactgggcaacacaganaaaccccatctttacaaaaaatcaaacttaaccaggttgtggtggtgtgtgcctgtaatcccagctgcttaggaggataaggngagangaacacttgaaccccagaanggaggggttgaaatgaancatgatcatgcccctgnacttcgggccggggngacaaangggagactctggnccaaaaaaaaaa

SEQ ID NO: 4752 - DNA, 325 bp, Homo sapiens
  misc_feature 132: n = A,T,C or G
cgtggtcgcggccgaggtactggaacccaggaccaggaaaaaactaaagggtggctgaggacacatcaccccatagatttttccaaaccaaaaccttgacccaaaaacattctgataaatctctgtgcctanagaaggtaaaaggaaaagagacacagagattttctacaatacagtgtcagaggattagtctttgtttccttttcgtgggaaatatttacaagcggataacacatcttcttaaaagcgccatttaatgctttgtcaaaaacaattaattaaaatatggtataaacaagtacctgcccgggcggccgctcgaaag

SEQ ID NO: 4753 - DNA, 253 bp, Homo sapiens
  misc_feature 179, 183, 192, 199, 235, 236: n = A,T,C or G
cccttagcgtggtcgcggccgaggtactgaggagagctggggaggccagtgtgcctgcagtgaaggaaggaaggggagggtgattgaaatgatgtcagaggggcagacggttgacctgtccagggcttgtggcgaggggaatcaaatcatttattctccacaccagcatacttcagaangtgnacagggganccattgntcattgtaagtattgtacctgcccgggcggccgctnnaaagggcgaattccagc

SEQ ID NO: 4754 - DNA, 434 bp, Homo sapiens
  misc_feature 38, 46, 100, 115, 119, 125, 128, 137, 147, 148, 151, 159,173, 179, 181, 183, 198, 206, 219, 226, 235, 240, 246, 256,260, 263, 279, 288, 293, 297, 303, 318, 322, 324, 328, 344,348, 354, 361, 368, 384, 387, 389, 390, 395, 396, 401: n = A,T,C or G
  misc_feature 402, 408, 416, 420, 421: n = A,T,C or G
attcgcccttagcgtggtcgcggccgacgtactggacncttctttncccacccctttcctgattgttttatgtgattgattttaaattctcacactgccncttctttaaaaaatnaaancctttnttngcttaacanaaaaaaaaanngantaaacttnagaaataaacgaangtttgngnangctatactaacccgngggttggncaatttcgtgccngctaccntgttacacnatttncccaanaaaatataancccngcntaaaaaaatgttttanattaccccntcccnaatnaaattnaaacttcacctgganttgnanaaanctccggttgacacaanttanactacnaaaaganggctttnacattatgtgaacacncantnnctagnnacccnnactggnattagatncccnncttatgcttaacc

SEQ ID NO: 4755 - DNA, 574 bp, Homo sapiens
  misc_feature 33, 57, 91, 97, 108, 113, 118, 123, 128, 129, 132, 135, 139,140, 149, 150, 161, 162, 169, 182, 191, 203, 205, 224, 243,246, 249, 256, 260, 269, 306, 325, 329, 339, 340, 344, 358,366, 387, 404, 409, 412, 421, 433, 436, 443, 457: n = A,T,C or G
  misc_feature 473, 476, 480, 482, 485, 505, 506, 510, 519, 521, 524, 531,534, 537, 538, 553, 555, 559, 562: n = A,T,C or G
ccctttcgagcggccgcccgggcagggactttntttttttttttttttttttttttncttttttttttttttttttttttttttttttttnaaaatntatttcctttntttanatggngtaanatttnnaanaanaaanntttttaatnntgaaaaatggnnttaaaanaaaaatattgtcntgattgagncaatgggaaaananaaaaaatgctgtatttaanaatttttccgaaaaaaaangtntantttgttnaaangcaacaaancctgtttaaattcactttataaaccatacaccccttnttgttttttttttaaacanattntggaaggccnntgtnaaaaacggattacnaggtcccnccattaaaaatcccccgggtnccttggccgagaccccntaagnggnaaattccancacactgggggncgntactaantggatcccaaaccntgggaccaaacttggngtnaatnanggnaaaacctggttccttggggnnaaantggtattcngntcnaatttcncanaanntttgagcccgaagcntnaaantgnaaagcccggggg

SEQ ID NO: 4756 - DNA, 732 bp, Homo sapiens
  misc_feature 463, 473, 498, 549, 557, 599, 629, 631, 655, 675, 681, 717: n = A,T,C or G
ccctttcgagcggccgcccgggcaggtactcttctttttttttttttttgagacggagtttcgctcttgtcaccccagctggagtgcagtagcacgatcttggctaactgcaacctccagctcctgggttcaggtgattctcctgcctcagcctcccaagtagctggcactacagacacgcgccaccatgcccggctaatttttgtatttttagtagagacggagtttcaccatgttggccaggctggcctcaaactcctgacctcaggtgatccacctgcctcggccttccaaaagtgctgggattacaggcgtgagccactgtgcctggcttccatcctcttctatcatttttttaaatctcttctcctatcataaaattaatttctcattttttggtcaggtagaattgggaaagtcccacactgtcctcctattaccttaacattccaagcttcctttncttttttggnctttatgaatatatttatatgggcngaatttagattaacaaaattgattggcccattctttactttcccattttgnttttctanaacccacaaaagttaaaacttgggaattccctggccccccanaacacttgtattttgttggttgaaggttcngncccaaaaacaaacacagttttaantgcacatacaaatgttggcngggatnttccctggaaatttatttaaccggtttttggtgggnggggggttttttggg

SEQ ID NO: 4757 - DNA, 410 bp, Homo sapiens
acccttttaacaaaggaaagtgggtttgggcttcgagggacaataaattgtggggaagtgactaggaaagacatggggagctaatgcgagataagagctactgtagtgaggtcagtttaggcaaattcgtcttcaaggataagaatcactcttctctccttggtgcaaggcgtggggggcacctttctctaagtgaaattatatttatttttatggtcaccctctgtttatgacaagcgatacttgttttccctatgccagagggatatgaatttccttcttaaataaacccttaaataaataaatttaggccaggcgtggtggctcacgcctgtaatcccagcactttgggaagccaaggcaggtggatcacctgaggtcagaagttcgagaccagcctggccaacatg

SEQ ID NO: 4758 - DNA, 701 bp, Homo sapiens
  misc_feature 487, 515, 607, 621, 623, 633, 643, 660, 675, 681, 685, 689,690: n = A,T,C or G
ggtacatagcgccttggtctaggccaataataggtcgatcttcctcgccaactcatatttcacacagatgaatctcagtagaggaaaaagagtccggacggcaggaaccacacagcactgcctcacagctccctggcgttcttccccgcgtacacagagtggtcttttcaacactcctccccctactccaccggacctcaaccaggacttcagtggatttcagcttctagtggatgttgcactcaaacgggctgcagagatggagcttcaggcaaaacttacagcttaacccattttcaagcaaaacagttctcagaaatgtcatgattgccggggtgaaggcaagagatgaattgcattattttatatattttttattaatatttgcacatgggattgctaaaacagcttcctgttactgagatgtcttcaatgggaatacagtcattccaagaactataaacttaaagctactgtagaaacaaangggttttcttttttaaatgtttcttggnaggattattcataatggtggagatgggtccccaatatcatgtgattttttttcctcccctttccctttttttggttattttttttagactgngccaataactttanangaaccctttngcattttttntcatttcccatgtgggnaaaagggatgccccncatacnggcntaannaaaaaaaattt

SEQ ID NO: 4759 - DNA, 294 bp, Homo sapiens
  misc_feature 276: n = A,T,C or G
cccttagcgtggtcgcggccgaggtacagcagaggccttaggtgaatggcttgtctgctatggcagagattagaggtgctgccagactgccataagtattaggcagtaacagcagcagctgcttatatgcgtgcgaacagctggggaattaatttggtatgcattctcaggagccactcatctgctggcagaggtagcagaagaatgcccttagtgtaaatcctctacaaccatacaccaaaatgtgctcccttgcatttcaaatttccattgtanaaagtctctgataatctc

SEQ ID NO: 4760 - DNA, 573 bp, Homo sapiens
  misc_feature 535, 559: n = A,T,C or G
ccctttcgagcggccgcccgggcaggtacgtgaccaggcccagctaatttttgtatttttagtagagacagggtttcaccatgttggccaggctggtcttgaactcctgacctcagatgatccgcccaccttggcctcccaaagtgctgggattacaggtgtgagccaccaacgcctagcctcagagacttctagtaacatcatatagttagtaaaggggacagctggttttcaagtaaaggtctgtttgattttttctattatagaaatcctttcccctttcttaatgtctctttggtattcttgaaaaaaacaaaagagagccaacaaataaaagtaattcctcagaatttatgctaattttgtagcaatataacttgcgcatttgattgctgcttgatttttaaaatcaaatattttcctacattgctttttaagggcaaggtgtgtcctgtgagtgtttctcactgttagactagggcagaagctcaacaataacaaaaaaggctggtgactaggaatcctaatttccttncaaccagggcgtgtgataacaaanacacttttcctata

SEQ ID NO: 4761 - DNA, 300 bp, Homo sapiens
ccctttcgagcggccgcccgggcaggtacctgatgtccaaaaaagcacaacaatttaagactttgggcactttatgtagcagatatataaaaagcaaagcaggaattaagagcaaatgaatttaataatactgatataaggcagcttttaatctattcacaggaaaaggaaaaatttatattatctcctaaatattatagcatgtaatatgaagagttaataatctcgtccattctgaatgaaaaaaactaactttaaataagttaattctatgctccttgaacgccttaaaaaaaagaa

SEQ ID NO: 4762 - DNA, 469 bp, Homo sapiens
  misc_feature 26, 34, 116, 164, 183, 215, 233, 238, 242, 246, 276, 280,284, 295, 319, 320, 325, 327, 328, 350, 356, 363, 369, 382,383, 386, 395, 408, 411, 412, 425, 429, 439, 445, 448, 451: n = A,T,C or G
cccttagcgtggtcgcggccgaggtncaaaaganaaattttaaagctgggcagtccgggggagacatcacacgttggtaggatccatgatgccccacaagccaccgaaaccagcangttttttagggattttcaaaaggagaattgcttgaacctgggaggccnaggttgcggtgaagctganatcaccacattgcactccagcctgggcaacangagcaaaatgccatccanaaaanaacncaanaaaaagttcctgcccggggcgggccgcttnaaanggcngaattccagcncactggccggccgttactaaatgnnatccnannttcggaaccaagcttgggcgtnaatcanggtcatngcctgntttcccttgttgnnaanatttgttantccggttaacaanttnncacaacaaaccanaacntaaggccggnaaagcntanaangtgttaaaagccttgggg

SEQ ID NO: 4763 - DNA, 584 bp, Homo sapiens
  misc_feature 545, 551, 552: n = A,T,C or G
cccttgagcggccgcccgggcaggtacttgtgcaggtatttctggcagtatagaaacagtaagtggacttgctggtcaaatggtagctacatttaaaaaacagtgatggctactgcttaattgtatatcaaaagagatttataccagtaactttcatacatttctgtttccttattctctcacttaaattcaacaacatcattcctcttaacatttttgccaatggtgaaaagtatttcgtatacaaatttacatattcttactcatgtggttaagtttcttacatgtatttgttgaacttcctgtgaattgcttattcatatctttttctcactttttcctaatgagttttggtatttttctttaatgaattttaagaatgctttatgtattggtgctattaatcttcaattttacgtatatttgcataagtaattgcctacttttaactcttcgtggcatacagacatttttacattttatttacttaaatttatcaatctttttctttaaaagttctctggattttggggtttattgaggangggtanncccatcccaagaatatatatatgttttataga

SEQ ID NO: 4764 - DNA, 235 bp, Homo sapiens
cccttagcgtggtcgcggccgaggtacttttttttgtttttattttattttatttttgtttgttttctccgtgtgtgtgttttcctaatttatttacctctgtttcccctttttcctttttttttttaattaaagagcaaagctttttattactttgtaatttaaaaaactgaaaaaaaaaaactgaagaactttggggggaattttgtacctgcccgggcggccgctcgaaggg

SEQ ID NO: 4765 - DNA, 179 bp, Homo sapiens
  misc_feature 76: n = A,T,C or G
cccttagcgtggtcgcggccgaggtactttttttttttttttaaagcaaaccattgtatgtgtaagtgtttaagtnacctttttgtctattggtctctattgccagccctcccctttcccaatgaaagccatgtcaaattaatcacttggattgactgcttcatctttttatttttaat

SEQ ID NO: 4766 - DNA, 547 bp, Homo sapiens
  misc_feature 104, 169, 170, 172, 174, 175, 182, 183, 185, 186, 209, 210,211, 213, 214, 216, 217, 219, 229, 234, 235, 236, 240, 252,260, 262, 267, 274, 279, 283, 287, 288, 291, 294, 296, 316,320, 322, 323, 325, 326, 330, 335, 337, 342, 344, 345: n = A,T,C or G
  misc_feature 349, 352, 353, 354, 366, 372, 382, 385, 397, 407, 412, 414,422, 424, 426, 436, 437, 442, 455, 456, 457, 458, 461, 477,478, 479, 483, 485, 491, 504, 514, 531: n = A,T,C or G
ccctttcgagcggccgcccgggcaggtacgacattactttgttttttcaggtgaagcttaaacaaatgtgaggcagaaaaatgtattaatgcggcactaatganaagacggaatcaaactccctgcaaatacacacacacacacacacacacacacacacacacacacnngngnnaaacttnngnntttttttttgtaaaaaaaaaacnnngnngnncncgctaacaanatatnnntaangtgggaaaaacngggcccgngngaggngtctcangcctnaaancccnnctnttngngaggccagggggggtgtttntttngnngnngggngttananaccancnnggcnaannnggagaaaccccntctctnctaaaaacanaanacttccccgggnggggagacangcacntnatctcccntntnctcaagactnnggggnaaaaaattttttnnnnccngggaggtagatcttgnnntaancnaaaatnctgccttgctctncaacctgggnaacagagagaacactcnttctaaaaaaaaaaaa

SEQ ID NO: 4767 - DNA, 434 bp, Homo sapiens
  misc_feature 36, 137, 402: n = A,T,C or G
ccctttcgagcggccgcccgggcaggtacctttganagagggtccagtaaatctttgttttgaatgaactgatggttttgaagcaggtgacctggaggactgcatgtagaacacagtgatgtcaaggagtaaagganagaacagaagtgagattagcactaatcacctctaatgccttatttccagtaaagtttagagaagaggaaaagctacttggcttgctcctttgaaggttttgtttccctcttaacacagaaattaaaaggtagaggagagatgctgaatgatgctttttttcttcttaatcttggggggtcattatgattaagttattgaatccatatcaccgtatgacagcacatgatgaaagaaaatcagatgtttgtttcaatcaaagtgaancaaaatgagaataactatttgggcaaaacact

SEQ ID NO: 4768 - DNA, 259 bp, Homo sapiens
  misc_feature 59, 200, 219: n = A,T,C or G
ccctttcgagcggccgcccgggcaggtactggaattacaggcatgagtcacccctcccnggcccccccctttttttttaatcctaaaaagcttcctaagggttggtcagggcagttaactccagtgaatacctcttctaaagactcagcaaaagggtcatttgtgcctctttaactgttcttaccaaactgtcctgtctnttttctgctgccaactaancagcttcctagggacaaaaaaatatacaatattttttttt

SEQ ID NO: 4769 - DNA, 553 bp, Homo sapiens
  misc_feature 419, 467, 470, 487, 490, 495, 497, 498, 530, 531, 534: n = A,T,C or G
ccctttcgagcggccgcccgggcaggtacgcgggaacccagtggaaggatctactgataggcaggttaccatcactggatctgctgccagcattagcctggctcaatatctaatcaatgtcaggctttcctcggagacgggtggcatggggagcagctagaacaatgcagattcatccataatccctttctgctgttcaccaccacccatgatccatctgtgtagtttctgaacagtcagcgattccaggttttaaatagtttgtaaattttcaagtttctacacactttatcatccacttgtgattttttaattaaagcgttttaattcctttctctgttcagctgttgatgctgagatccatatttagttttataggcttctccctggtttttttttttcggttttttttggctcangaatttttttggtttggcatggaaaatgtaaaaaaggggaaatttaantancatttcaagtttaattntgnaaatngnnagggaaattttttcaaaaaaaaatttaaaaannatngggccccaaaaaaaaaaaa

SEQ ID NO: 4770 - DNA, 237 bp, Homo sapiens
  misc_feature 228: n = A,T,C or G
cccttagcgtggtcgcggccgaggtactaatgtcatgataaatggaacaattgtcttagatatgagccatttcatttagacatttaattatgtcctatttctctggctaaatacattgaaagttataagctgttcatgtagaaggcatgtaataaatgtataggataacaatatgggcaatagtcaccctccagactcttaaaaattcccacctgcccgggcggccgntcgaaaggg

SEQ ID NO: 4771 - DNA, 521 bp, Homo sapiens
  misc_feature 87, 97, 103, 104, 105, 111, 118, 119, 121, 122, 123, 130,134, 135, 139, 140, 141, 142, 147, 148, 149, 151, 152, 161,163, 167, 180, 181, 183, 184, 189, 190, 192, 194, 197, 202,203, 205, 206, 207, 226, 230, 232, 240, 241, 243, 246: n = A,T,C or G
  misc_feature 247, 250, 252, 262, 267, 268, 273, 274, 276, 279, 281, 282,284, 285, 290, 291, 292, 298, 306, 312, 313, 316, 324, 334,336, 359, 367, 375, 384, 389, 396, 406, 409, 411, 415, 416,417, 418, 419, 420, 446, 447, 448, 451, 452, 457, 468: n = A,T,C or G
  misc_feature 479, 480, 493, 496, 500, 501, 508: n = A,T,C or G
cccttagcgtggtcgcggccgaggtactttttttttttttttttttttttttttttttttttttttttttttttttttttttttttntccaaaaaantttttnnngggggnaaaaaanntnnnaaaaaantttnngggnnnnttttnnnannaaaaaaaangngggnaaaaaaaaaaaanntnntaaanncntnttnccccnnannnaaaaaaggggggggggggntttnanaaaaaaanntnttnnccncntaataatttnggggnnaaaanngngananntnnccccnnnaaaaancccttttncccccnntgntaaaaaancccccccccngntttttttttttttttttaaaaanaatttaancccccccnggggggggnttttnaaaaaantttccaaaanaantngggnnnnnnaaaaaaaaaaaaaaaaaagggggggnnnccnnaaaanaaaaaaaaccnttttttttttnnggggggggggttnttnagannggggggnttttccccccccc

SEQ ID NO: 4772 - DNA, 326 bp, Homo sapiens
cccttagcgtggtcgcggccgaggtactttgacagaggttccagtaaacgaaaacttgattgtttccttgtatattttcagcgttatgtttggtggaagaaaagtttggaggtttggacaaaagaccatccatttcctattgatatagattacatgatcagtgatacactagaactgctaagaccaaagatcaaactctgtaattctctggaagaatccatcaggcaggtacaatttttttttctttttttagtaatagagttctactaatgggaataatgggattttttggcgggggacgggaggtaacattttgctcaatttgg

SEQ ID NO: 4773 - DNA, 566 bp, Homo sapiens
  misc_feature 140, 406, 408, 472, 505, 509, 514, 552, 557: n = A,T,C or G
ccctttcgagcggccgcccgggcaggtacttttttttttttttttttttttgtgacggagtcttgttcagctgcccaggctggagtgcagtggtcgatcttcgctcactgcaaccaccgtctcctgggttcaagcgattntcctgtctcagcttcccaagtagctgggattacaggccaccaccatcatgcccggctaatttttgtatattggtagagacggagtttcactatgttgggcaggctggtcttgaactcctcacctcaggtgatccgcccgtcttggcctcccaaagtgctaggattacaggcgtaagccaccatgcctggccagatgatgtatttaaatatcataccaaactctgtgtatttatataaagaagagactggtaaaagacttcataatntnaaaaaaaaaccaaaaacccaaaaaaaaactttacccttacccattgctggcatattggtgcagnataaaacaccacccttattttgggatcaatganaaanaccgnaaagaaatgtcctgcgtaaactggaacttttgacagcnttttnaaaaaataa

SEQ ID NO: 4774 - DNA, 319 bp, Homo sapiens
ccctttcgagcggccgcccgggcaggtacatgtaatccactgtagtgaaggcactaaaacctgttgtattttccacatttcgatagatctctcacaggatttaacacttttggaatgctcagtaaattattattgactgcttgataatacctctttgttcctgcctttccccaagtccttcaacagaagtttcttctagcactttgcaggtcagttgagtggactatttgagtccctcacagtaatgagcttgtgtgtttttgtcattcttttttctttttttgaaaaaacaatagagtcatttaaggaagcaaaaagg

SEQ ID NO: 4775 - DNA, 444 bp, Homo sapiens
ccctttcgagcggccgcccgggcaggtactttcccctggaaattctagctgctgtggcctccccaactgccagtcctgtctcttcaattcagcgagatttattgtttcccttccctgaactgcaacctaggaactgccgtgcgggggcaggctgagaaaccatggtgctcacctcactctgtctgcagtctcctgaggatcacaaacctgtgcttgtcctatgtctaaaaaccattacctattatacgtattgtatagcttccagttgtttaaggcaggagaggaaatctgacccttgttattccatcacagcagtaaggagaactcttcacatctaagtaaacacacctcacacttacaattcactgctttttgtaataattgatgtataaagaacaccacttccttacagaactatttcaatagcatcatgcttgtcaaatt

SEQ ID NO: 4776 - DNA, 668 bp, Homo sapiens
  misc_feature 60, 61, 62, 63, 145, 162, 163, 168, 170, 171, 173, 174, 176,177, 178, 179, 182, 183, 184, 187, 188, 189, 196, 205, 209,213, 214, 215, 216, 219, 232, 234, 235, 237, 238, 245, 247,248, 249, 252, 253, 257, 258, 262, 265, 279, 298: n = A,T,C or G
  misc_feature 300, 311, 312, 320, 323, 325, 329, 331, 344, 345, 346, 349,351, 352, 355, 357, 358, 365, 366, 374, 387, 389, 390, 391,394, 416, 419, 425, 434, 437, 442, 443, 447, 449, 451, 453,457, 463, 467, 473, 478, 479, 484, 485, 486, 489, 490: n = A,T,C or G
  misc_feature 491, 494, 495, 496, 497, 498, 499, 500, 501, 503, 504, 505,506, 512, 515, 526, 528, 529, 533, 535, 539, 543, 546, 548,549, 554, 562, 567, 568, 577, 582, 589, 591, 598, 602, 604,614, 623, 624, 625, 633, 642, 643, 652, 654, 655, 657: n = A,T,C or G
ccctttcgagcggccgcccgggcaggtacttttttttttttttttttttttttttttttnnnntttttttttttttttttttttttttttttttttttttttttttttttttttttttttttttttttttttttttttttttttnttttttttttttttttnnttttnannanngnnnnggnnnttnnnaattaanaccaaaaanaaangccnnnntcncccctttcatatncnngnncaacccnannnaannaaanncccnacngaaaaaatttaaanttaacagggacaaataatnantttacaaaatnncttaccanaananactncnctggatttttttnnnttncnngcngnnaaaaagnnttttgggnagtttataaaaantnnntancttggggttttgggtttatttnttnaaagcnaaccccttnaancaatnnaatngntngngggnaaaaantttntaaaanttttnncttgnnnatnnnaannnnnnnnannnnaaaaanaanaaaaaacaaancnncttngnaaanccanggntnnaattnaacccccnttttnnaaacaagancaaancaaattntnccctttnaaangnaagggctttnaaaaatttnnnccaccttngccttccanngcaattccntnntngggggaaaagg

SEQ ID NO: 4777 - DNA, 113 bp, Homo sapiens
  misc_feature 1, 22, 25, 26, 32, 34, 39, 45, 53, 90, 92: n = A,T,C or G
ngggcgaggagggcggccgagnaannaaaatntnttttntttttntctgaccntgaagccatcaataaaagagtaaaagacactatggcncnatcagaagatttggacaattc

SEQ ID NO: 4778 - DNA, 148 bp, Homo sapiens
  misc_feature 31, 83, 87, 124: n = A,T,C or G
cccttagcgtggtcgcgggccgaggtactcngggtgaataatcttaagttaaaacttgaaatggatgctcaacatataaaggntganttttttcatgaacggggaagacttatagtttaaaatnaatggaatcattactagctaaaga

SEQ ID NO: 4779 - DNA, 591 bp, Homo sapiens
  misc_feature 523, 554, 569: n = A,T,C or G
cccttagcgtggtcgcggccgaggtactctaaagaaaatcctgaaagtcaccaccttggtcttttataatcgggaccatgaggaagcccaagaaaaagggagaaaaggaacgagaaaaaggcagaggcactaatagctgccatacaggcatataaacctctcgatcccagggagcttctcattctatgaccgactgttatcaagtgtgggagcactaaaagagagtctgcccccgaaatcagaagcagcccccacggccctgtccaatctgtaagggagactactggaagacaaactgcctccagaaacatacgtcccaaggttcagagccggcttctcaaatggtccaacaggactgatgggtcccagggctctcctccccagcttctgacagcccaagctgcattaccatccaagaagtcccgggtgagtctggaggtcaagggactcagaggacagacttctactcaacacccagagcaagccattcctgttcttctcttccattctgggccctcccttncttcctttagcacaacttgtgaaggggcgtnttaaggaaagccctntgctccaatattttttcttaaa

SEQ ID NO: 4780 - DNA, 299 bp, Homo sapiens
  misc_feature 28, 30, 40, 44, 49, 62, 63, 64, 65, 66, 74, 79, 80, 84, 86,90, 96, 100, 101, 110, 116, 123, 126, 129, 133, 135, 139,146, 147, 149, 156, 164, 166, 169, 175, 176, 184, 186, 187,190, 192, 204, 205, 218, 224, 226, 227, 236, 244, 250: n = A,T,C or G
  misc_feature 254, 256, 257, 267, 268, 279, 281, 289: n = A,T,C or G
actttttttttttttttttttttttttnantttaaaaaangggnaaaangggtttttttttnnnnnttaaaaanttttnncccngnaaantttaancccnnccccccaanaaaaanttttttnggnaantttncntttnaaaaaannanaaaaacntttttttncnggncccccnnaaaaaaangnnttngnttttaaaacccnnattttaaaaaaantttccnannaaaaaaaancccctttnaaaaanttgngnntttttccctnnttttaaaattngnaaggcccntttttaaaaa

SEQ ID NO: 4781 - DNA, 423 bp, Homo sapiens
  misc_feature 401: n = A,T,C or G
cccttagcggccgcccgggcaggtactttataatttatattttttcctatagaggcttttctatttatgtgtattccacttccccatatcactaaactgtctttttccacaggattcaattcttgaactagtaggagtgaagggcagtctgttgaaacctgtaatctcttaggcttgtattttctttgaacatagtttccacagaattcttccctgtaggggaaggcctgggcacttcttgatgtcagaacatgttgtctttagtttggaatctgccaaaacaaaagtaaatcaaaaatgttaattcctgtcaccccagcacttcgggaggcccaaagcaaggaggattgcttgagcccaggagtccgagactggcctgggtaacatagcgagacctcgtntctacattaaaaattttaaaaa

SEQ ID NO: 4782 - DNA, 128 bp, Homo sapiens
  misc_feature 88, 108, 110, 111, 119: n = A,T,C or G
cccttagcgtggtcgcggccgaggtacgcgggttgataataataaaatcacttacttggttgactaaaaaaaaaaaaaaaagaaaaangttcctgcccgggcggccgntnnaaagggcnaattccagc

SEQ ID NO: 4783 - DNA, 494 bp, Homo sapiens
  misc_feature 100, 101, 113, 114, 115, 116, 118, 119, 120, 122, 123, 125,126, 127, 132, 145, 148, 154, 157, 158, 167, 168, 172, 186,187, 190, 192, 197, 215, 220, 243, 245, 273, 287, 292, 293,309, 315, 324, 349, 353, 358, 363, 370, 373, 374, 375: n = A,T,C or G
  misc_feature 376, 377, 378, 379, 393, 397, 401, 403, 413, 420, 421, 426,427, 428, 439, 446, 448, 456, 457, 458, 460, 463, 467, 468,472, 473, 474, 477, 482, 483, 488: n = A,T,C or G
cccttgagcggccgcccgggcaggtacttttttttttttttttttttttttttttttttttttttttttttttttttttttttttttttttttttttttnntttttttttttnnnnannnanntnnnttttnttttttttttttnttntttaanaannttttttttnntttnttgacaccctattnntantnatttnaaaaaaaaaaaaaataantacanaagaacttaaaaaataaaaaatntncttaccttggattcttggcttaaagtanaagttttttttaanttatnnaggaaaacattttttntaaaanttaaaattnaacccactttaaatgcttcaaaaanaaanccatnccttncattgtnatnnnnnnnaaaaaaaaaaattnacanaaancntttttcactnaatactnntttannntttaaaaatantttcaananaaaatttnnncnaantagnngggnnnaanttttnntttantattta

SEQ ID NO: 4784 - DNA, 168 bp, Homo sapiens
cccttcgagcggccgcccgggcaggtacccagagacacagactgaaaaccaggaagttggatgggacttagagcccttgatcaacccagaacgccatgaccgcaggctgaatcacttcagggtctgcagtgacatcactctgtacctcggccgcgaccacgctaaggg

SEQ ID NO: 4785 - DNA, 400 bp, Homo sapiens
  misc_feature 374: n = A,T,C or G
ccctttcgagcggccgcccgggcaggtacgttattaggttatgaaaaaaaaaaccattaaatcatgatatactaaccattaaataatgatacactgaaatagattcctgaggattctattatattcttacaactcactgtaaaaaaacatcactagaacatattctctatgtatcacataaattcttctgatagagaaacagctcagataccttcatatctgaacatgagaaaatactggaggctgcaggtgttaagggctgaatagaactgtgcagatttaaaacatttctaaatagcaaaatacttcataattgaaaattcagaaatgagcagctacaaattattgagaatttaaatgcaggctgggcgcantggctcacgcctgtaatcccagcact

SEQ ID NO: 4786 - DNA, 417 bp, Homo sapiens
accctaacctgacaggaattaactactgtttttttgtggggcagaaagcaaaacctggtgttgtgacttttatcctaatggttcttaggcaaggttagtgagaagaaacacaaacccagatgcatgcattgtgcattattttgtagacaagctactttttcttctgtccctttaacaaatttgcagcaattaccctccctttggggtctagagtgaaagctaatttgtgggtagatgagattgcagaagaatggatgtccatggctgtgaacactgcacactgcacatccatctccagtgctcacactgtgcagctaccactccctggctgcgtgccatgctgtcgggttgcagatttgcacacataaattcctcaggaagagtttgcatgagcatcacctcgcaatattctgtacc

SEQ ID NO: 4787 - DNA, 293 bp, Homo sapiens
cccttagcgtggtcgcggccgaggtactttcaagtttgtgtgactaaaccttgctttgggaaaattagtctaaaaatcaaggagccgggtgtgggagaaattagcttactaattgaaccatcaagccagttggcagttctaaggcttctttatcagcatattacagagtttgtattcctgttcttttcctccttgttgtgggaaacaagctatgcaaccatttgacattctgtattttagatgtaacagtacctgcccgggcggccgctcgaagggcgaattccagcacactg

SEQ ID NO: 4788 - DNA, 535 bp, Homo sapiens
  misc_feature 494, 506: n = A,T,C or G
ccctttcgagcggccgcccgggcaggtactcaactagtgcaaacctgcccgtcatgggccatgagaagttccccagcgacttggacctggacatgttcaatgggagcttggaatgtgacatggagtccattatccgtagtgaactcatggatgctgatgggttggattttaactttgattccctcatctccacacagaatgttgttggtttgaacgtggggaacttcactggtgctaagcaggcctcatctcagagctgggtgccaggctgaaggatcactgaggaaggggaagtgggcaaagcaggtcagtgcccgaatgctatggcataaaaataacaatatggggatgaggggggatctctgggggagcctgtcttctctttactttgaactttattccacactgaaaaccatggagcagtggtgcacataatatggctcccagccagttccatctcagggttttacctgcaaaccaaatagggctgtcangtgccccccttnccccgcacagtttgcttgatagttcaaaa

SEQ ID NO: 4789 - DNA, 562 bp, Homo sapiens
  misc_feature 38, 95, 162, 175, 177, 199, 210, 298, 309, 323, 331, 336,341, 344, 407, 431, 441, 468, 483, 489, 492, 495, 540: n = A,T,C or G
cgccagtgtgatgggatatctgcagaattcgcccttancgtggtcgcggccgaggtaccatttgggattatggtttttaaaagcttgagaatatnacttatttacttttgcagctttccatgcagctgtttttttttctctctgtttttgactttggagatnaagttactgattntnatctttacttttctctttattntgtgccttggncttgaaaaagtaataaatatttcttactgaggccccctcctgctttgttctgccatctaaggtgattaccatgctcaagtctctttgntggatgccttngactaatgcttttnaggagccnccggncttcnacntcctggttcccagtatggcacaatgaccaggcagatttctcgtcccaactttactacttcttnaacatcttttggtggatacagacnaactccctcngtgactggtgaattttttggtcacctnatgttaaaggaggcncacttnatnctnaaacttcaagtaacttgtgccttgcctgctgccccaacggggganctccttttgaaggaaattattt

SEQ ID NO: 4790 - DNA, 343 bp, Homo sapiens
tggataggactaaaaatcaaaggactaattatatcaggacatcccatattcccttcactgattaagacaaaacaatggggccccttattttactttgtggagccaaattaacaaagctgaaatagaagttctccttataagaaaggctacaaacactggaaggattagtcacagtgagcaaaaatcgccgatgaacccaaagtatgcatatgagcagggattccattgggtatctataaggctggcaagagctttagaatttggttctcaaggaaatgaggtgggtaaggaatcccctcaaatgtcaatgtatcttcttaccatctcaacaatcctgggtacc

SEQ ID NO: 4791 - DNA, 845 bp, Homo sapiens
  misc_feature 140, 368, 416, 485, 504, 511, 514, 521, 528, 537, 570, 571,591, 610, 611, 612, 613, 614, 615, 616, 617, 619, 620, 621,622, 623, 627, 632, 638, 640, 644, 652, 658, 661, 677, 678,679, 681, 683, 685, 686, 687, 690, 693, 699, 701, 704: n = A,T,C or G
  misc_feature 705, 708, 715, 718, 719, 720, 721, 723, 724, 729, 735, 742,745, 752, 753, 755, 756, 758, 759, 760, 761, 762, 763, 764,765, 766, 767, 768, 769, 770, 771, 772, 773, 774, 779, 786,788, 789, 790, 793, 795, 797, 812, 821, 830, 836: n = A,T,C or G
gtccgtgcaccccaaatgggatctgtgggacatgagatgccggctgcatgtgagcatcttggtaaccaaataataggaaagaatgtaggagcaggcaatcctggggcaaaagctgacgccaacgtacctattcatcttanaattgagactctgatctgtctttcccaaggccagatctacagagaaactttctgtcttgggcagaatagctggctgagacatcagagagagagactgaggaaatatcccaggagcctgttgacacagaggccctgataactaaagagaagtcccagctgggcgtggtggctcatgcctgtaatcccagcactttgggaggctgaggcgggcggatcacttgaggtcangagttcgagaccagcctggccaacatggcgaaaccctgtctctactanaaaatacaaaaattaactgggggtggtggcatgtgcctgtaatcccaactgctcaggaggctgaggcangaaaatggcttgaacccangaggcanaangttgcanttgagcnggagatcgngccactgcactccagcctgggccgacagaaccnnactctttcagaaaaaaaccnaaccacagggaaaaaaccnnnnnnnnannnnncggnggggnggctananttantttaaganaaaaanccntccccccgcatccccnnnancncnnnaanatnaaaaangnaannccnttttttnttnnnnanntccgntttttnggggttntanggggggnnannannnnnnnnnnnnnnnnnccccncccttgngnnnagnancnccccccccccctttnttttttttnttttttttncccccnccccccccc

SEQ ID NO: 4792 - DNA, 346 bp, Homo sapiens
cccttagcgtggtcgcggcccgaggtactcagaattctgacaagaaacatcacaagtttatataaatacccatttgcatagcagcttacaaattcaatagttgtcagaggcttgacgcggtgggtcatgcctgtaatctcagcactttgggaggccgaggcgggcagatcacttgaggtcaggagtttgagatcagcttggccaacatggcaaaactccgtctctactaaaaatacaaaaattacctgggtgtggtgacgggcgcctgtaatcccagctaccccgcgtacctgcccgggccggccgctctaagggcgaattccagcacactggccggccgttacta

SEQ ID NO: 4793 - DNA, 324 bp, Homo sapiens
ccctttcgagcggccgcccgggcaggtaccaggcaaacactacaaccacaactccacacactgaaatgagataatatttatgtttttgccatagtgatagctcaactgccacttcatctcttttcctgttcttcttccgacgacccttcagtctgttttcaaaagcttctagttcagcctgttgtcttcgtttttcttcttcaagagcagctttggcttctgcttcttttatctcagatgctttccgcttcatttccttgcacgttgtgtcacattctattgaaacctgattttcacgtacctcggccgcgaccacgctaaggg

SEQ ID NO: 4794 - DNA, 377 bp, Homo sapiens
cccttagcgtggtcgcggccgaggtacaaatttcaaaccaagctgcagttactcctttgagacaccaaaaaaagttgcttccatatggttacattgttaattccataatcgcatttacaatatcattactgttgttcttcagggctcggactgcctttgctctcgacacatttgcttgtgacatgaccaattcaatgtccttaacttctacacctgtttcatcgacctcttcctcttcactctcctcttgtacagtttaaaaacaaatcttacacagccttacatttcaatttttttctttaaaaggagtgagttgtgtacctgcccgggcggccgctcgaaagggcgaattccaacacactgggcggccgttacta

SEQ ID NO: 4795 - DNA, 258 bp, Homo sapiens
cccttagcgtggtcgcggccgaggtacctggaaactgaattctagaaagattattttggaaagcctgtagttacgtgtattaccactagatgaccttccctcattattgtctctaaagtggagctgctagttatatggactttctagaggactgtaggaaatttatgaataatccctctaaagcaacaacgacaacaacaacaaaaaagtctactttatatggtgttgagtgtacctgcccgggcggccgctaaaggg

SEQ ID NO: 4796 - DNA, 576 bp, Homo sapiens
attagggagtcgaccccgcgtccggtcaagatggcagctgccgacggcgacgattcgctctaccccattgcggtgctcatagatgaactgcgcaatgaggacgttcagcttcgtctcaatagtatcaagaagctctccaccattgccttggcccttggggttgaacggaccagaagtgagctcctgccctttcttacagataccatctatgatgaagatgaggtcctcttggctttggctgaacagctgggaaccttcaccactttggtgggaggacccgagtatgtgcactgtctgctgccacctcttgagtcactggccacagtggaagagacagtagtgcgagacaaggcggtagaatccttgcgggccatctctcatgagcactcaccttccgatctagaggctcactttgtgcctctggtgaagcggctggcgggtggagactggttcacctcccgtacctcagcctgtggtctcttctcagtttgctacccccgagtatccagtgccgtgaaggcagaacttcgacagtacttccgggaacctgtgctcagatgatacccccatggtgcg

SEQ ID NO: 4797 - DNA, 489 bp, Homo sapiens
ccctttcgagcggccgcccgggcaggtacaagtgacgaggaagattctgttttgggtatagccagagaaaacaaggatggagaaaaatctaggacagtgtcttctgagaaaccaccaggcttgaagtgtcttctcggaaaaaaccatccttggaggccacaagtgatgagaaggattctttttcgaatataaccagagaaaaaaaggatggagaaatatctaggaaagtgtcttctcagaaaccaccagcctcaaagactgcaagtgacaagacagattctgctttgaatacagctacagaaataaaggatggactacaatgtgggacagtgtcttctcagaaacaacaagccttgaaggctacaactgacgaggaaggttctgtttctaatatagccacagaaataaaggatggagaaaaatctgggacagtgtcttctcagaaaaaaccagccttgaaggccacaagtgatgagaaagattcttttt

SEQ ID NO: 4798 - DNA, 433 bp, Homo sapiens
  misc_feature 1, 54, 140, 143, 144, 145, 148, 149, 150, 151, 152, 158,161, 163, 164, 165, 167, 173, 181, 183, 184, 186, 187, 190,206, 209, 214, 223, 225, 261, 286, 287, 289, 295, 299, 308,309, 310, 311, 312, 314, 317, 318, 320, 325, 330, 331: n = A,T,C or G
  misc_feature 333, 337, 344, 349, 358, 366, 369, 376, 377, 379, 385, 398,416, 419, 432: n = A,T,C or G
nccctttcgagcggccgcccgggcaggtactttttttttttttttttttttttnttttttttttttttttttttttttttttttttttttttttttttttttttttttttttttttttttttttttttttttaaaaaaanaannnctnnnnntttggnacncnnnanaagaanaaaaaaananntnnaanaaaaaaaaaaaaaaanatntaaanaaaaaaaantncttatttttattttttttaaaaaaaaaaaaacgggnggggggggggggggaaaaaaccccnntnttcatntttnccaagaaannnnngnacnncnggggnctttnncnaatncaaccanttttnccccccccnccgcaaanaanaaaaacnncntctttnaaaaaaaaaaaanaaaatggggggggggggnggnccccccccttttnc

SEQ ID NO: 4799 - DNA, 335 bp, Homo sapiens
cccttagcgtggtcgcggccgaggtacttgacgttaatgccgatgataattcatctgatctacagaatattcactttaatagagagatgagagtctgaaatgaccagaggaaaatagatactgaagccaatatagtcttgataccaaaataaaattaaaatgagaaactaacatgataggttcaaggccttttgggaacctgttttctttgccagatttcacattcttacagcttcatggtctttttcttctaacaaattaatcagctgagagaagctgtctttcagtgcatccatgtcatccagtgagcagggctgtagaatccagcgttttcc

SEQ ID NO: 4800 - DNA, 417 bp, Homo sapiens
  misc_feature 107, 117, 123, 132, 134, 136, 138, 139, 141, 144, 145, 146,147, 148, 159, 160, 162, 163, 164, 168, 174, 184, 230, 272,287, 315, 332, 374, 386, 399: n = A,T,C or G
ccctttcgagcggccgcccgggcaggtacttttttttttttttttttttttttttttttttttttttttttttttttttttttttttttttttttttttttttttantttttttttntttttnttttttttnantntnntnttnnnnntttttttgaannannnaccntaaatnccactattgnggaaataagaaaattgtaattgtgaaaaaataattttaaggaaatnttacaagtattacattaaaaagatactatgactggcacctgncatttaccttctaanaaccctgccatgtggtttgcagaaaganatggatatagttacctnagaagaaatattttatgtgggttttttgtttttcgttactanatttcaaggatnaaggggatatggnttgaccttttacttttta

SEQ ID NO: 4801 - DNA, 627 bp, Homo sapiens
  misc_feature 95, 96, 97, 98, 112, 116, 117, 118, 119, 124, 130, 145, 146,148, 149, 150, 151, 152, 161, 162, 163, 173, 180, 185, 188,189, 190, 195, 196, 197, 211, 213, 215, 235, 241, 242, 244,245, 246, 247, 258, 259, 268, 272, 275, 281, 283: n = A,T,C or G
  misc_feature 286, 300, 302, 303, 306, 307, 326, 334, 335, 336, 348, 350,354, 355, 357, 373, 374, 376, 377, 378, 402, 404, 406, 408,409, 412, 413, 414, 415, 417, 418, 419, 420, 421, 436, 437,439, 442, 445, 450, 453, 455, 457, 462, 466, 469, 476: n = A,T,C or G
  misc_feature 480, 491, 503, 504, 517, 519, 552, 556, 558, 559, 560, 561,570, 571, 573, 574, 575, 576, 577, 594, 597, 599, 600, 601,610, 612, 619, 620: n = A,T,C or G
cccttagcgtggtcgcggccgaggtactttttttttttttttttttttttttttttttttttttttttttttttttttttttttttttttttttnnnncccccccccccccngggnnnnaattntttttnaaaaaaaaaaaaaanncnnnnngaaaaaaannntttttttttnccccccnccccncannnaaagnnncaaaaaaaaaaaangncnttttttttaaaaaaaaaaancccccnntnnnnaaaaaaaaaanntaattatangggnttntttttnanccnaaaaaaaaaaaaantnnttnnccccccaaaattttttttncccccccnnnaaaaaaattttncncccnngnaaaattttttttttcnncnnncaaaaaaaaatttttttttttttngncnannatnnnntnnnnnaaaaaaaaaccgggnngnttnccnttttnttnananggggngctnttnttttttngggnggggggaaacntttttttttttnnaaaaaaaaaactntntttttttttttttttaaaaaaaaaaaaaaaccntttngnnnnccccccccnnannnnnggggggggggggggggnttntnnnccccccccntnttttatnnggggggg

SEQ ID NO: 4802 - DNA, 198 bp, Homo sapiens
ggatatctgcagaattcgcccttgcggccgcccgggcaggtacgcggggttattgcagtgtagattatgcaaaaaaagaatcattaggatagggcaatcagcttccattaaataagcctaaaagcagcagcttgggggataaaaaaaaaaaaaaaagaaaaaaaaaaaaaagtacctcggccgcgaccacgctaaggg

SEQ ID NO: 4803 - DNA, 328 bp, Homo sapiens
ccctttcgagcggccgcccgggcaggtacatgttcattgtagagaatttggaaactgtaggagagaatcaagaagaaaaataaaaatcagctgttgtaatcacctaaaaaaaaaaaaaaaaaaaaaaaaaaaaaggtcctgttctagacattggagataaagtagtaaccaggaaagaccctgctttcatggaacttgcattccaatgagagaaagatagtaattaaacaaataaatgaatatatatgttagttcattcttgcattgctataaagaaacattcgaggctgggtaatttatttaaaaaaaaaaaaaaaaaagaagtttc

SEQ ID NO: 4804 - DNA, 381 bp, Homo sapiens
cccttcgagcggccgcccgggcaggtacttggaccaagaaaaagaagatggaaaatatcacaagcaaattaaaatagaagagaatgcaacaggtttcagttatgagtcactttttcgcgaataccttaatgagacagttacagaagtttggatagaagatccttatattagacatactcatcagctgtataactttcttcgattttgtgagatgcttattaagagaccatgtaaagtaaaaactattcaccttctcacctctctggatgaaggcattgagcaagtgcagcaaagtagaggcctgcaagaaatagaagagtcactcaggagtcacggagtgctgttggaagttcagtacctcggccgcgaccacgctaaggg

SEQ ID NO: 4805 - DNA, 658 bp, Homo sapiens
  misc_feature 151, 162, 199, 215, 271, 293, 301, 406, 421, 434, 436, 439,446, 466, 479, 483, 531, 573, 583, 608, 614, 627: n = A,T,C or G
cccttagcgtggtcgcggccgaggtacttttttttttttttttttttttttttccaaaaccaaatctttattctctagtttgaaaaggaggggtaaatggttgttctgtttagttccagagaacagaacaaggcccaataggtagaaattntaggaaagcanaattcattcattataaggaaggatttctaacaattanaatttctaacaattanaatcatccagggcctcaggaggtgcggaagttcctgtcacctaagtgctcaagcanaggccaggtgtccatatgctanaaatgganaaaaggaaactcaccagcaacttcccctcagctggccctccatcaccaatgcggcagtccttgccgtgacatgctgagctttggaagggagccaaggaggggctncggtgttcaaacaanaacctggacacantnctnctgacanccaaggggaggcttttaacnctgggagggggcnacanataaaagccaggaccaaacccagggggtaaaatgccctggggatctgnttttttgggaaaggaaaaaagattggaaattttttacaagcngaaccgggtnttttccaaatttttgggtgccctancccaangggggcaaggttnggaaggggaaaggggaaaaggtaaaaaatgg

SEQ ID NO: 4806 - DNA, 666 bp, Homo sapiens
  misc_feature 116, 117, 118, 132, 140, 144, 146, 147, 148, 157, 158, 159,161, 166, 172, 174, 175, 179, 182, 192, 195, 196, 212, 214,234, 261, 262, 264, 267, 271, 279, 280, 284, 291, 293, 299,300, 302, 303, 304, 305, 308, 309, 320, 334, 346, 348: n = A,T,C or G
  misc_feature 350, 355, 356, 360, 363, 364, 372, 374, 375, 391, 408, 410,412, 413, 420, 422, 432, 435, 436, 437, 438, 451, 452, 456,466, 467, 475, 476, 480, 481, 484, 486, 491, 492, 497, 499,508, 509, 511, 516, 531, 535, 538, 540, 541, 552, 555: n = A,T,C or G
  misc_feature 556, 565, 567, 570, 592, 598, 601, 603, 605, 608, 609, 618,621, 624, 635, 648, 660, 661: n = A,T,C or G
ccctttcgagcggccgcccgggcaggaacttttttttttttttttttttttttttttctttttttttttttttttttttttttttttttttttttttttttttttttttttttaannntttttttttttaantatgaagntttnannnagtattgtnnnanggacnaaaaancnntttntgnaaaaaaaaanacnncggggggggggggggngngttcttttaaaaaaaaaagngtttttttttaaaaaaaaggggggggnngnatngggngacccccnntttncccgggngnggattnnannnnaanntttttttttanaaaaaaaaaaaaancccccaaaaaanantntaaannattngtnncaaaatananntttaaaaaaaccctantttatattaaaaaaaanantnntttgggngntggattgttnttnnnnaaaaaccaaaaannaatntaaaaaattnnaaaatggnntttnnggngnaaaannacccntntttttttcnnancaaanaaaaaaaaaaaaacntttntcnanntgaaaaatatnatnntttttttcncnccncccccaaaaaaaaaaaattttnttttcnggngntntgnngggggcctnttnccncccctgtgatnaaaaaaaaaaaancccccccccccnnttttt

SEQ ID NO: 4807 - DNA, 240 bp, Homo sapiens
  misc_feature 23, 92, 114, 135, 173, 203, 224: n = A,T,C or G
gagccggcccgccagtgtgatgngatatctgcagaattcgcccttagcgtggtccgcggcccgaggtacttttatttctttacaagtgattnctggactgggctgggaacagantgatcctggggcagtagtgangaacaggccacggtcctacttgtggatgaggtgagganagcttgcaaaccccgtaaggaatccctcancctgcctgtgagtaacaactntgaagggctttctgag

SEQ ID NO: 4808 - DNA, 577 bp, Homo sapiens
  misc_feature 495, 499, 518, 532, 536, 543, 547, 551, 554, 556, 558, 569,577: n = A,T,C or G
ccctttcgagcggccgcccgggcaggtacaaagcatcagattcagcagaagcaattgaggcttttcaactaactcctcaacagcaacatctcatcagagaagattgtcaaaaccagaagctgtgggatgaagtgctttcacatcttgtggaaggaccaaattttctgaaaaaattggaacaatcttttatgtgcgtttgctgtcaggagctagtttaccagcctgtgacaactgagtgcttccacaatgtctgtaaagattgcctacagcgctcctttaaggcacaggttttctcctgccctgcttgccggcatgatcttggccagaattacatcatgattcccaatgagattctgcagactctacttgaccttttcttccctggctacagcaaaggacgatgatctgcctgctttcactgtgttgttcatggtggctttttggacaataaagaatctaaaatgggtggggagggtggaagaaatggtggactgntctntcacgttctgaagcagctnatcctcttcccacntagncaccatnttgngtgngtngnanaagcccatttntcaactgn

SEQ ID NO: 4809 - DNA, 453 bp, Homo sapiens
  misc_feature 58, 59, 116, 117, 118, 120, 122, 133, 135, 141, 142, 143,152, 153, 154, 155, 157, 161, 164, 166, 169, 170, 171, 172,173, 184, 192, 194, 195, 196, 207, 208, 210, 211, 214, 219,221, 222, 224, 241, 244, 245, 250, 251, 253, 255, 256: n = A,T,C or G
  misc_feature 257, 258, 259, 267, 268, 285, 286, 288, 289, 290, 292, 293,296, 297, 298, 301, 304, 317, 323, 324, 339, 342, 343, 347,348, 349, 365, 367, 368, 369, 373, 378, 384, 407, 408, 409,410, 413, 416, 418, 420, 435, 439, 440: n = A,T,C or G
ccctttcgagcggccgcccgggcaggtacttttttttttttttttttttttttttttnnttttttttttttttttttttttttttttttttttttttttttttttttttttttttnnntntnaaaaaaaaaantntgcccnnnaaaaaaaannnncntttnttnanttnnnnnaaaaaattttntttttttngnnnaaaaaaaaaannannttnttttntnncnaaaaaaaaaaaaaaaanccnnggggnnanannnnnaaaaaaanncccccccattttttcanntnnngnnacnnnaanccntttttttttggtnttattnnaaaaaaaaaaaaatntcnntttnnnttttaaaaaaaaaaancnnncccnaaagngggggnaaaaaaaaaaaaacccccccccnnnnaanaangngnaaaaaaaaccccccngggnnttttttttttaaa

SEQ ID NO: 4810 - DNA, 234 bp, Homo sapiens
  misc_feature 6, 87, 180, 203, 204, 207, 208, 209, 212, 213, 219, 225: n = A,T,C or G
gctcgncggccgccatgtgaggatatctgcagaatcgcccttgacggccgcccgggcaggtactttttttttttttttttttttttngggttttttttttttttttttttttttttttttttttttttttttttttttttttttttaaaaaaaaaaaaaaaaaaattttttttttttttnaaaaaaaaatttaaaaaaaaaannttnnnccnngggggnaaaaanttttttttt

SEQ ID NO: 4811 - DNA, 225 bp, Homo sapiens
cccttagcgtggtcgcggccgaggtaccattccgggtcatccgcagaaattcctcatagatggcaactctgtctactctccgagccagtggcgagaagttcacagggagtccaccccggtgtggtgcctgttggggacagacctgaatgttgaaacttgacagtcagaaaaataactcttgatgctgctgtttcggcccgcgtacctgcccgggcggccgaaggg

SEQ ID NO: 4812 - DNA, 335 bp, Homo sapiens
  misc_feature 17, 20, 30, 329: n = A,T,C or G
ctgaattgggccctctnatngcttgctcgncggccgccagtgtgatggtatatctgcagaattcgccctttcgagcggccgcccgggcaggtactggattcaggccctaaggcgggggacagcacagtgttcccttctcctccagagttcagggaagacgtccagggcctcctggtccgatatgtccatcaggtccatctgctccagcatgtccacgttcacttccatggatgacatgctgcctatgggctctcgccgctctgcaatctgcaggtagccagtggacaggtacctcggccgcgaccacgctaagggcgaattccagcacntgggcg

SEQ ID NO: 4813 - DNA, 752 bp, Homo sapiens
  misc_feature 526, 591, 599, 604, 606, 611, 619, 626, 658, 684, 707, 719,730, 731, 733, 734, 741, 743, 744: n = A,T,C or G
gatatctgcagaattcgccctttagcggccgcccgggcaggtacatgttagacatctactgtttagaggggatagggaaattctcaatgtccttcttacattgttctaattctttctcaagtttggataggaatctaagagagcattgggtttacctccttcggccgggcgtggtggctcacgcctgtaatcccagctctcagggaggcaagaggctggaggatagcttgagcccaagagttcgagacctgcctgggcaatatagcgagaccccattctccagaaaaaggaaaacaaacaaacaaacaaacaaaaaagacagaaaaaaaaattagtgtaactccccttcttcatgacccccagattcctcttcctctcatcttcctgttgtgccctgatctccatgtcttctactttgtgagaatgtatggggggtggggtcaagcattttaagggggatcccaagggctttttcatttgaatgacagcttctttacctatgctcttttttttttcttcctcttcntttaaagggggaacatggggaagttaaatttacccaatccaacaaagactgtaacccatcttctntttggganggatngnttttnatcatttnacaaganagaatttaaagtttggcacacttcaatccttnttttgacccaacttaagggccaaaanaaccgaaaaactgttgaatggancctttttggccncctaaaacagnntnnctttaanannttttggtt

SEQ ID NO: 4814 - DNA, 453 bp, Homo sapiens
  misc_feature 117, 139, 201, 252, 354, 368: n = A,T,C or G
ccctatcgagcggccgcccgggcaggtacttttttttttttttttttttttttcacaagttacagtttattacacaatagcaagaggcaaagtatttgtaaacaataactgctgtanagctatattctgtaattagttngtcatttgaagaatattccttaacaaatgtaacatttaacattacaaaaaagaaaacagacntagttacaaagagcaaaggcagtaatattgtttctctagctataaataatncaaaaatataaaaatatataaaaataagttttttgtagtaatataagcttcttaatacactacataaatacatcaataactatctaccaagctacttactgngtagctacaactgngaaataactaaaattcagtatcagagtcttggatttacaatactgtattttttcacagatctcttcatccgcttaattttcttcc

SEQ ID NO: 4815 - DNA, 395 bp, Homo sapiens
  misc_feature 332, 351: n = A,T,C or G
cccttagcgtggtcgcggccgaggtactttttttttttttaacagatgtaatttcacttaaccctttgcgctttcccttagttgtcatttaacatacaatactggctttacttatctctagaaagaagaaggcatgctacaaataggaaggaattgtaataatgatatttggcctctactttgtcttagctgttaaactgtttttagtatttttgttaaatatttgcaaagggaagcattttctacagaggataattaatttcaagaaaaatatcttgagttttaagaaataaacatctccagaaaaggagaaagtcgattttataaaatgntggcaactctccaacattnggggtaggtgactcctttttgttaggacatttgaaactagccaa

SEQ ID NO: 4816 - DNA, 319 bp, Homo sapiens
cccttagcgtggtcgcggccgaggtacatgaacctattaataaaccattcatgcttcccagtttggcagatgtgagcaaactatgtataggaattccaaaggtaactttttcctttcattactttacagaaatactgtcaagtccaatagagagcacagacttgggaggcggattgggtgggtttgaatctctgctctgccacttttattaatcatgtgagttgagtatgtgacttaatctcttttagctcaatttccccatctgtaaaataggaataataaaaatactgacttcagagaggtttgtgaggatcaatta

SEQ ID NO: 4817 - DNA, 137 bp, Homo sapiens
  misc_feature 3, 39, 47, 72, 96, 137: n = A,T,C or G
gcnggcgcccgggctagtcacttgttcagttctttcttncctgtttntggccaggtgtgccaccctaaacanaggtaaatttctttagaggctagncacaaacagacttcaagattcctacgcagggaatttgcctn

SEQ ID NO: 4818 - DNA, 523 bp, Homo sapiens
  misc_feature 489, 506, 521: n = A,T,C or G
cccttagcgtggtcgcggccgaggtacagtagagtatgagttgctaagttagatgacaaagcactgggtttattatgtattagtgctgtagttatactaaaggaatataatatatgttgacattaccagactaagcattgatcacaatattctcaagtagggaaaattagaatattaaagtggaatataagctgattttctttacgaaagtaataaatgaaaataaggctgtgaccaaaaagtaagtttctaagtggttctcttgttagccaagcaaataaatccatttaagatatggttagctaattaaatcatatttgattgcaggaactgaaaaaatgtatctagagaaaataaacattaagccttttggtgggaacagtttctcaaagagttgagggtattgggagcagcatttctagtcagttacaaaacacaacaagtgatttttgagtggttttccttgactcttggtgaattgacaaatgntatcaatacttttctgntggtttttattttanga

SEQ ID NO: 4819 - DNA, 247 bp, Homo sapiens
  misc_feature 26, 60, 61, 62, 74, 80, 83, 85, 86, 90, 93, 94, 104, 114,128, 129, 133, 137, 145, 146, 147, 149, 150, 151, 153, 154,176, 179, 186, 187, 190, 206, 207, 209, 212, 218, 219, 224,228, 229, 231: n = A,T,C or G
actttttttttttttttttttttttngttttttttttttttttttttttttttttttttnnntttttttttttngttttnttntnnaaanttnntttttttatntttaataaanttaaccttctcccnnaaantaanaaaaaccnnnannnannaaaaaaaaaaaaaaaaaactantanttttttnnatnaaaaaaaaaaaaaatnntnttntttttnntatanaaannanaattaaaaaaaaaaaa

SEQ ID NO: 4820 - DNA, 377 bp, Homo sapiens
  misc_feature 33, 34, 85, 86, 97, 154, 157, 177, 201, 249, 306, 316, 376: n = A,T,C or G
tcgacggcgcagtgtgatggatatctgagaatnncctttgacggcgccggcaggtccgggtgggggagacttttgacgtggagtnnattttctctgnaaatcttaggagccagagagttagcccatccaccgagaagcttttgaatcttggatnacnctcctatcagcctgctgtgnaaaccgaccaaaggaggaggctgnaatgccagagattacccaactgtgaagttgtgtttatggggatggaanattattctattcggaggagttttcagtctctgcggttgctgtcactcagatccagancgggaattgntatcagcctcttggaacacaaaatgcttaagctctggcctgcctgtttctcttcccttgna

SEQ ID NO: 4821 - DNA, 175 bp, Homo sapiens
  misc_feature 10, 13, 14, 15, 29, 31, 39, 40, 41, 81, 114, 137: n = A,T,C or G
cccttagcgnggnnngcggccgaggtacncngatatatnnntatttggctaaatgctttctgaggtcctttggagtcctgnagctccatggttatgtagctcctttccttgaanactgggggttttgtaatgttganatactttgcctctatgcttctcagctcatgaccagtcc

SEQ ID NO: 4822 - DNA, 450 bp, Homo sapiens
  misc_feature 187, 247, 297, 308, 311, 341, 361, 363, 395, 405: n = A,T,C or G
cccttagcgtggtcgcggccgaggtacttttttttttttttttaaacaaaacaacaaatcaacaacagcaacaacaacaacaaaaattaaaaacttttttctaaaaaaaaagtgaaaataaaaaaaattatatgcgcttcatgggactgagtcaccaccttcccttacatacttcagttcagattgnagccatacttaaaaaaaaaaaaaaagccaaaagatgatgacacatttttatcagtattgngaataaacttgaaccccaatacccgaagttcatgtcatgtctttagttgnagaaagttttnctntttaagggaagcgaccaacttggacttttntggcacacgattcgcagttntntaaggaatcaagggtcccgccctggatatatnattatggggnaattaatgggaatggaaatatggggagttggttttaagccttttt

SEQ ID NO: 4823 - DNA, 236 bp, Homo sapiens
  misc_feature 96, 114, 155, 194, 209: n = A,T,C or G
cccttagcgtgggtcgcggccgaggtacttttttttttttttttttttttttttatttttttttttttttttttttcttttttacatttttataanagtatataaaaaatgatntaaatggacatttaccggtaagtggggggaaggcatatatntacgttaaaaggcaggacatttttaaaagctctattttntaaatgaaaactacnaaagcggggtgggttgtggcgggggca

SEQ ID NO: 4824 - DNA, 683 bp, Homo sapiens
  misc_feature 64, 110, 148, 176, 189, 208, 227, 272, 295, 316, 319, 328,356, 357, 434, 461, 473, 499, 515, 541, 546, 578, 579, 581,596, 600, 603, 612, 621, 636, 638, 648, 653, 672: n = A,T,C or G
cccttagcgtggtcgcggccgaggtacttttttttttttttttttttttttttttttaaaaatngaatcacttattttttttaaagccctgcatagaaattcccaaggtntcaaaaacaaatgagagaagccttattcattacattanccaaaaatgggtgtggacgtgaacattntggaagggtgacnctgatgacttgagaatgtntaaggcacactttgtgttntttgcaacatcccatgagcaagtacattttatccacttaggtaanaaaagtataattgtaactcaatntttgattcaataaaaaatatnttnagcaaaagnggataaccttacatgaaagtgagaaatnntgttttacaactttaaatcaaacaacttttggtatattcttaaaattatataaaaatagttttagtgataaaatgcntttggtcccctggatttcataaagcanatctggtaggcnttaaaaattggcccaaaaacaaccgnctaaaaaaaaaaaccnaaaataaacccccccacaaaaaaagntcctncccgggcggccgttttaaagggcgaattttannanaattggggggggggncccnagnggaatcccngccttggtnccaaaattttggccncncccaaggggnataanttttttttttgggggaaanccccccccccc

SEQ ID NO: 4825 - DNA, 221 bp, Homo sapiens
cccttagcgtggtcgcggccgaggtactaaaaataaaaaaaaaattagccaggtgtggtggtgcacgccctgtagtccctagctgctgaggtggctgagccccagaaagaatactttgagccccgagaggtagaggctgtagtgacctatgattcatgccacttgcactccagcctgagagacagagtggggacccttttctctaaagaattgttgttggc

SEQ ID NO: 4826 - DNA, 435 bp, Homo sapiens
cccttagcgtggtcgcggccgaggtacccaaaagaaaaatttaaaatcaagatgagtaaaaggagaatggtctcaatatcctcaaaaatgcagtaagagaagtaattccccactgaaaatgtctctctttctttctatgttataccctggagtcctggttgaggggtgggggaatcagaaaagtaggtttacatttaacatttttcttaactacattcacttcttaaaaaggaacaagaagtgtaaataagtatgtatagagtgagggattaagcatatttgcattggggactcgtgtattatgcttttaagtcaaaattaatattctcaaattcgaatttgatagctattatttctaaatctttttaatcctcaattttcctggtaaccttctttcaagagtctccttcttctaaaagttgccaaaccctttat

SEQ ID NO: 4827 - DNA, 206 bp, Homo sapiens
  misc_feature 205: n = A,T,C or G
ccctttcgagcggccgcccgggcaggtacgcgggtagcccttttctgttggtgcagctgctggcattccccccatgcaagttttcagcttgcttatctatgtttgtagctcaagttttcaggtcgctctttgttaggaaagaaattattttggggctgctttttgttaaaagggaaattctgcctaaataattttttctaacttnt

SEQ ID NO: 4828 - DNA, 436 bp, Homo sapiens
  misc_feature 91, 142, 218, 250, 269, 311, 323, 347, 384: n = A,T,C or G
cccttagcgtggtcgcggccgaggtacttttttttttttttttttttttttggagacggagtcttgctctgtcacccaggctggagtgcantggtgccgtcttggcttactgcaacctccacctcccaggttcaagcaattntcctgcctcagcctcccgagtagctggggctacaggtgcccgccaccacccccggctaatttttgtattttagtanagactgggtttcaccatattggccaggctggnctcgaactactgaccttgngatctgcccgcctcaggttcccaaagtgctgggattacaggngtgagccaccgngcctggccctatattttcaaagtntaaggcatgtaggatgtaaatgagttctggcaactanacaagtgcagagctccattttaagtctattcccaatttaaaaaatgtacctg

SEQ ID NO: 4829 - DNA, 491 bp, Homo sapiens
  misc_feature 113, 119, 128, 135, 136, 163, 165, 167, 183, 184, 185, 186,188, 189, 191, 192, 193, 194, 195, 196, 197, 198, 199, 200,201, 202, 203, 204, 205, 215, 216, 217, 223, 238, 247, 248,249, 250, 251, 258, 264, 265, 274, 285, 286, 288, 289: n = A,T,C or G
  misc_feature 290, 291, 292, 326, 327, 367, 374, 376, 377, 387, 392, 398,414, 415, 416, 421, 442, 443, 445, 446, 448, 449, 452, 453,454, 455, 461, 462, 463, 465, 468, 469, 487: n = A,T,C or G
cccttagcgtggtcgcggccgaggtactttttttttttttttttttttttttttttttttttttttttttttttttttttttttttttttttttttttttttttttttttttngggggnaaaaaaaanttttttnnaaaaaaaaaaaaaaaaaaaaaaaaaananantgtttttttttttttnnnncnnannnnnnnnnnnnnnnaaaaaaaaannncccctnttttttttttttttnaaaaaaaannnnnggggggnaaaaannccccccccnaaaaaaaaaanntnnnnnggggggggggggggcccccccccttttttttttnnggggggggggggggaaaaaaaaaaaatttttttttttttnggggggngnnaaaaaaaaanccccntttttncccccccccccaaaannnttttnaaaaaaaaaaaaaaaaaaaannanntnnttnnnntccccnnncncannggggggggggggggggtncccc

SEQ ID NO: 4830 - DNA, 430 bp, Homo sapiens
  misc_feature 416: n = A,T,C or G
cccttagcgtggtcgcggccgaggtacctttggttttcttaaagtgaaagtcagctatatctatcaacctttgtatttgaatagtcccgctttacactctaagaagggtcataaacagtaatttaatataattatgaccatgctaatgtgaattcttaggctttactatatttacaacagcacaattttgattcaaaatcagctcttccaactgtaataactatcttcaaaaactggtttccaggccaggcacagtggctcacgccagtaatcccagcactttaggaggccaaggcaggaggatcacttgaggccacaaattcaaaaccagcctgggcaacagagcaagattccatctccacaaaaacaagttttgaaattagtcaggtatgatggcatgtacctgcccgggcggncgctcgaaagggcg

SEQ ID NO: 4831 - DNA, 324 bp, Homo sapiens
cccttggcccgcccgggcaggtactaattatcctcttctagtctctttgttaatgtgcaatgtcctgaaagagtaaaattttaaaaaatgaattaatttacatacaaaagcagtggcattgaaattaaaaagaataatgtcaaaagaacaagaatacaaataaacaataaatttcaaagtagcaacagacaaacctgaacaagaacttccatgagggaatcatcaaccacagaatgaagccacctgtccttcttcactctcgctgggcgtctgtggctaccaattttcaagccccgcgtacctcggccgcgaccacgctaaggg

SEQ ID NO: 4832 - DNA, 321 bp, Homo sapiens
cccttagcgtggtcgcggccgaggtactggtctgtggcctgctaggatccagggtgcacagcaggaggtgaatgtaggatgagcaaacattactgcctgagctcaactttctgtcagatcagcagtggcattagattctcataggagcatgaactttattgtgaactgcacatgcaagggatctaggtttgcacactccttatgagaatctaaatgcctgatgatctgaactgggaacagttttaatcccccaacttccagtccgtgggaaaaattgtcttccacgaaactgggtccctggtgcccaaaaagttaggggac

SEQ ID NO: 4833 - DNA, 777 bp, Homo sapiens
  misc_feature 54, 89, 104, 105, 106, 112, 115, 117, 121, 122, 123, 140,141, 142, 143, 147, 150, 153, 154, 155, 163, 166, 167, 168,169, 172, 175, 179, 180, 181, 182, 184, 190, 213, 216, 217,219, 230, 233, 240, 242, 247, 248, 250, 252, 253, 267: n = A,T,C or G
  misc_feature 274, 277, 284, 287, 301, 305, 306, 311, 313, 319, 328, 342,351, 353, 358, 367, 378, 381, 386, 387, 391, 404, 409, 413,414, 418, 424, 431, 432, 444, 453, 454, 458, 461, 462, 464,466, 467, 468, 469, 470, 472, 492, 495, 501, 507, 512: n = A,T,C or G
  misc_feature 519, 520, 522, 527, 529, 533, 534, 536, 537, 538, 544, 545,547, 548, 551, 557, 558, 560, 561, 562, 564, 565, 569, 575,585, 586, 588, 589, 599, 602, 603, 604, 605, 608, 609, 610,612, 615, 619, 620, 621, 628, 629, 630, 641, 650, 651: n = A,T,C or G
  misc_feature 652, 653, 656, 658, 661, 665, 666, 668, 669, 670, 671, 672,673, 674, 675, 676, 677, 678, 679, 681, 682, 683, 689, 692,694, 695, 698, 699, 704, 705, 706, 707, 708, 709, 710, 711,712, 713, 714, 715, 716, 718, 721, 726, 727, 729, 730: n = A,T,C or G
  misc_feature 731, 732, 733, 734, 735, 736, 737, 738, 739, 740, 741, 742,743, 744, 745, 746, 747, 748, 756, 758, 759, 760, 761, 763,764, 765: n = A,T,C or G
cccttagcgtggtcgcggccgaggtacttttttttttttttttttttttttaanttttttttttttttttttttttttttttttttttnttttttttttttttnnngggggnagngnaatnnnaaaaaaaaaaaaaaacnnnnaaanagnatnnnaaaaaaanggnnnntantancaannnnanaaaacnaaaaaaaaaaaaaaccggggggnggnngngaaaaaaaaanaanggggggngngaaanntntnngggggggaacctanatttttnttnccccgcnccncagacaatacacanaagnngagtngnccccanaacccaaantggggagaaggccnaaaaaaaanancattngggggggcnctaaaaatttnttntgacnngggnaaaaaaaaaaaanacagncgtnnagangggggnttttttnnggggggggggcnaaaaaaaanngaanccnncncnnnnncnggggggggaaaaaaaaaaanccntaaaantttttnggggnaaaaaanngnggggncntttnngnnnaaaaanncnnttngggggnnannntnnaacnaaaaangggggggggnngnnaaaaaggggnaannnnaannngnccncaannnttggggnnnaaaaaaaaaanaaaaaaaannnntcntnttnctgnnannnnnnnnnnnngnnngggggnggnannaannaaaannnnnnnnnnnnntnttnttatnnannnnnnnnnnnnnnnnnnnncccccccncnnnnannnaaaaaaaaaaaa

SEQ ID NO: 4834 - DNA, 259 bp, Homo sapiens
ccctttcgagcggccgcccgggcaggtacacggcaggcaatcggagacacttttgctgttgcctaggaatggatacaccctggttagagtaaagcgtatctcttctccacgccttccattgtctactttctctttgaaacatcttagggataattattaggaataaatactgagaaaaatagcaccggcaataaaagtagctgcaataataatagtaaaagctaatattgatgtacctcggccgcgaccacgctaaggg

SEQ ID NO: 4835 - DNA, 843 bp, Homo sapiens
  misc_feature 283, 346, 352, 370, 389, 396, 460, 471, 484, 494, 523, 526,541, 578, 583, 598, 627, 635, 669, 682, 693, 714, 725, 735,737, 738, 751, 758, 761, 766, 768, 772, 803, 814, 835: n = A,T,C or G
tactaagggaataagcttgcggccgcaccaattttttttttttttttttttttttttcaatgcttttaagacctttaataatgcccacgtgccctaaggttggccctcttaactccctcagctctttctggctttaagccatcaccccaggtgtgcagtttatgtcagaggggccatcaggtagggaaacttatcagctgctctaagagaaaaggccgccctgctattatcagtgggcacaggctggagctcacccagcaggggctacagtcgggttacctgnagacatgatcccctggtcctctgagggcctaggcaggacatgggggaggacacggcccccggnacagantcctctggccaggagcancctttcaggttgctcttgngtgctanaaaaaaatattttctctatgtgccatgtcatgaaaaagacaaaagcactgagttaatgggatgnggaaactttanccacaggcttttntgctgtgaanaaagcatttttgcatgtgaacagctggancangaggcttaatggcantgctttttcaaaaaccacaacattcccccaatccctnggcanctacattcacctatncatttatccttcccttaccctggcaaaantttattgnatgcctactttgcccaaggcccatctttatcccnaaacaaagtgaanaccccttaaangggcaaatcctgggggatttnggaaacaaagncccaggggtntnnggttcccacaggnccccccnttnaaagngnaatntccaacccttgaatgcaagactttttgtttnttggggggggnattttccaaaatttttccccncctttttt

SEQ ID NO: 4836 - DNA, 316 bp, Homo sapiens
cccttagcgtggtcgcggccgaggtaccaggttgcagttaagaatttttctcttttctttggagagaagttaaagtccctggcagtgtttttcctcagatcatctgcatcacctaagctggggttggccagatctttgaacctacaacacttcattccggttttcattttctttgtgttcatggactctagagagcacggaagtaattgggtttcattgggtagcagagtaaggtagagtgcactttctcaagacatgttcattggtctgagcaaagttctgtctcttggaaggagacagtagcttggtggtgcta

SEQ ID NO: 4837 - DNA, 268 bp, Homo sapiens
  misc_feature 28, 30, 51, 66, 74, 79, 81, 82, 83, 88, 89, 91, 93, 94, 101,102, 103, 123, 127, 135, 136, 137, 138, 141, 142, 143, 144,148, 150, 155, 162, 163, 169, 171, 173, 176, 177, 178, 179,180, 181, 182, 183, 191, 192, 198, 199, 202, 203: n = A,T,C or G
  misc_feature 205, 209, 218, 219, 223, 224, 232, 233, 234, 236, 238, 239,243, 250, 263: n = A,T,C or G
actttttttttttttttttttttttttnanttttttttttttttttttttnaaaaaaaaaaaaaantttttttnaaaantnnnaaaanncngnnttttttnnnaaaaaaaaaaaaaaaaaaantttnaaaaaaannnnttnnnnaaantnttttnaaaaaannaaaaangntnccnnnnnnnnaaaaaaanncttttnnggnntncccnaaaaaaaannaaanncccccccnnncngnntttnaaaaaancaaaaaaaaaaanggggg

SEQ ID NO: 4838 - DNA, 553 bp, Homo sapiens
  misc_feature 385, 513, 532: n = A,T,C or G
ccctttcgagcggccgcccgggcaggtacaacaaaatccttttacaaaatataaatttattatgaaaacctggaaggataatccaaggaaggtaaagaaagagaaaaggaggccggcagaagaaggcaggaaggagaggaaaagagaaaaagacaaagaggagatgagagaagaaaatacagttcagcacaacagaagtgcagaagctcacctacccaaatggcattaaagcctcgctgtgtaatcgtgtcagaaaacaaagcatactgacacatagtgctctacttcccatccacttgagttctaagaggtaaaattaaaaagctccctgggaaggggacatgaggttgctcaaaaacccaccaaagaaaattttaaaaaaaanggagagagagaaaccccccccccacagtcttcatttccggatgttcattggttaaaaaagggaataaatccatttgaaaattagaaaagaggaattgggaaaagggaaaaaaacttattgggttttanaagaccagccttgcttccnttggagggggaaaaaggagga

SEQ ID NO: 4839 - DNA, 727 bp, Homo sapiens
  misc_feature 95, 431, 648, 677, 681, 682, 683, 684, 685, 686, 687, 688,689, 690, 691, 692, 693, 694, 695, 696, 697, 698, 699, 700: n = A,T,C or G
cccttgagcggccgcccgggcaggtactcggggagtgactccacacccacagaaggagagggggatgaagaaatctgccaggagggtgcctcccncagttctgatgaagagtgactcagccctggcctcatggaccctccacaggctctccctccctcaagggtgcagaatgatgaggattccaacctccagcacgacaaaagcaaaacacactcgctctgagaaaccgaggaacgagccagacgactggagttgccaagagcaagtcaaaaaacattctggtgagaatggtgagcgaagctgggacaggtttctgcttcaacaccaagagaaaccgactgcgggaaaaactgactcttttgcattatgatccagttgtgaaacaaagagtcctcttcgtggaaaagaaaaaaataccctccctttaaacngtggattgaaaatgactttgatttataaagagaagactggagggccgggatactgattcaaaaatcctgtaccgtgtaataaaagaagaagaaatggcatggaatcactgcctcctgtgattttgaaagccattgtgaaggaaaacaatgcagtgaaaagaaagtctttctttttaggacagatattattgcatcacatttatttatctttctgggnatttttatagcccttaataaaaaattttnaatnnnnnnnnnnnnnnnnnnnntaaaactaaaaaaaaaaaaaaaaaaaa

SEQ ID NO: 4840 - DNA, 811 bp, Homo sapiens
  misc_feature 19, 29, 33, 35, 40, 42, 52, 61, 76, 79, 81, 92, 97, 111,113, 136, 148, 154, 160, 161, 162, 171, 231, 252, 272, 276,285, 288, 306, 308, 309, 311, 318, 322, 325, 330, 352, 354,358, 359, 400, 446, 475, 477, 481, 490, 498, 507, 512: n = A,T,C or G
  misc_feature 519, 529, 538, 543, 545, 549, 563, 571, 581, 590, 592, 597,598, 629, 630, 642, 650, 652, 670, 671, 674, 679, 684, 695,696, 703, 704, 705, 706, 712, 714, 715, 732, 734, 735, 742,743, 750, 752, 753, 754, 759, 772, 784: n = A,T,C or G
cccttagcgtggtcgcggncgaggtactntgtntncattntnttttttaaanaatcatcangactccttatgaatnaantncatttgctgtnttgtnccaaaaccatatancncagaaaaatcaaaaccatgacangacattttaccntttaantacttnnnataactaantactctttaaatatttttatttcaatactgtggatggaaatgagaagcattctaaatttnagttaatatatttttatgaanatatttgagaaaagaaaaanatanctaggtatncangacccatggacatgctcntnntnatggacntatntangttanctaatttggccttttaaaaaangngtanngttgtttattatagctactttcaagggaaagtttgaatatnattctagtctctaaagttcttcacgtttttctgacattccctgganggtgactggggaaaaaatggctccagggntntaantcaaccaangcccaaanactttaccnttctnatcttanagaacaaaanggatacctnaattnanggancttttttttccccntttttggnaaacaaggtnaaaaaaagncnttttnncttattttaattataaatttttaaaaaccannatttttttattnttaaacangnttattcccatattttctnnagnattgngcctnaagaaaattcnnttttttnnnntgcccnannaattataaaaatttttntnnttttttnntgaatangnnnaaaanaaaaacaaacttntttttttttttnttttaaaaaaaaaaaaaaaaaaaaaaa

SEQ ID NO: 4841 - DNA, 642 bp, Homo sapiens
  misc_feature 502: n = A,T,C or G
tagggagtcgacccacgcgtccgggcggcgtccgcagtctgccgagcggcctgctctgggacgcaagcgctacttcgcacctgccgctcgccggccctgctgaggctacctgccttgcggggtaccgcaaccttcgtccaggccctccagagcgtgccggagacacaggtcagcgtattggacaacgggctgcgtgtggcctcggagcagtcctcgcatcctacctgcacggtgggagtgtggattgacgttggcagtcgctatgagactgagaagaacaatggagcaggctactttttggaacatctggctttcaagggaacaaagaaccgtcctggcaatgccttagagaaggaggtagagagtattggcgcccatcttaatgcctacagcactcgggagcacactgcttacctcatcaaggcactgtccaaggacctgccaaaagttgtggagctcctggcagatattgtgcagaacattagtcttggaagactcgcanattgagaaggagcgagatgtgatcctgcgggagatgcaggaaaaacgatgcctctatgcaaaatgtaagtcttcgattaccttgcattgcaacaagcattttcaggggcacaaccttttagcccaagcttggtgggaagg

SEQ ID NO: 4842 - DNA, 804 bp, Homo sapiens
  misc_feature 7, 33, 35, 277, 293, 301, 303, 305, 315, 320, 328, 333, 335,345, 347, 355, 371, 375, 378, 385, 411, 414, 419, 442, 451,455, 460, 467, 480, 501, 532, 568, 591, 594, 611, 623, 624,627, 642, 654, 664, 684, 685, 692, 694, 696, 710: n = A,T,C or G
  misc_feature 713, 717, 728, 736, 737, 741, 742, 755, 758, 761, 770, 775,776, 784, 788, 789, 790, 792, 795: n = A,T,C or G
ccctttntagcggccgcccgggcaggtactttnanaggctgaggcaggtggattacttaagctcagtagttccagaccagcctgggcaagatggcaaaactctgtctctacaaaaattctaaaaatgtaggcaggcatggtggtgtgtgcctgtagtcctggctacccagggggctgaggtgggaggattgcttgagcctatgagttcaaggctgcagtgagctgtgattgtgccactgcactcctgcctgtgtgacagagtgaccccttaaaaganaaaaaaaggctttttntggtgcanancnattttagggnaaatnttcttccnatggngnggagtttttnanggggcctnctgggactaacccatntttncgntgaaatngaattccttaagttcttgaaaaaatnctnttttnaataaacttgctcttgggtttcntgggacaanaatnaactncaattcnttttttgttaaanaaaaaaaaaaatttttgttcntggcttttggcaataattcaaaaaaaccttnttgggataaccccttgatcaaacaacccgggtttcnaaatttttttcctggaatcgggnggnccattttgaacattaantccttgaccttnnccnaaaaaattccaaaanccaaggcccttnaaaaaaaatnaaattccaaaccccttcccnnccaaaantncncttttgggccgggnaancccnctttaagggcnaattttcnncccnncttgggggggggnttnttncaggggaancccanncttggggncccnnncnttnggggaaaag

SEQ ID NO: 4843 - DNA, 514 bp, Homo sapiens
  misc_feature 383, 486, 503: n = A,T,C or G
cccttagcgtggtcgcggccgaggtactcctgcctggatgacagaatgagactctgtctcaaaaaaaacaaaagcaaacaaacaaaaaaaaacagattttctcacagttgtggagactggaagtgcaagatcaaagtgttggcaggtgcctgtaatcccagctattccagaggctgaggcaggagaatcacttgaacctgggaggcagaggtttcagtgagtccagatcatgccactgcactccagcctgggtgacagagcgagattctatctcaaaaaaaaaaaaaaaacaacataagcaaatgagagtgcctgggagtggtcattgtggggcatttctgttcgtgtgacccaggtcatgtccctccctaagccctggtctntcttgcctcctgcagggctggtgaaattaccatatctccgtcaagtgcagtaaccagttcaagttggaaagtgtgtcttttgaaatcatacaacaaagtttgnggacaaccaggcctggngacccaagggc

SEQ ID NO: 4844 - DNA, 299 bp, Homo sapiens
  misc_feature 146, 163, 175, 190, 191, 192, 195, 198, 199, 201, 202, 203,206, 213, 214, 217, 222, 224, 225, 226, 229, 232, 233, 239,246, 247, 249, 254, 255, 256, 264, 268, 274, 284, 286: n = A,T,C or G
ccctttcgagcggccgcccgggcaggtacttttttttttttttttttttttttctttttttttttttttttttttttttttttttttttttttttttttttttttttttttttttttttttttttttttttttttttttttttttnaaaaaaaaaaaaaaaancccttttttttnaaaaaaaaaaaaaannnttnatnncnnnttnaaaaaannaanaaaanannnaancgnntttttnaaaatcnntnaaaannnaaaaaaangggnaaaaantttttttttntnaaaaaaaaaaaaa

SEQ ID NO: 4845 - DNA, 412 bp, Homo sapiens
  misc_feature 136, 222, 238, 310, 313, 347: n = A,T,C or G
cccttagcgtggtcgcggcccgaggtaccctgccatcatctataacatcctgctctttgggctgaccagtgccctgggtcagagcttcatctttatgacggttgtgtattttggtcccctgacctgctccatcatnactacaactcaaaagttcttcacaatttggcctctgtgatcctcttcgccaatcccatcagcccaatgcagtggggtgggcactgngcttgtgtcctggggncttggtcttgatgccaagtttggaaaaggactaagaagacatccactaggaagagagagactacctcccatnaanaatatttaagtttttttttaaacagtgacatctnttgggaaaaatggacttaatagggaatattgggactgagttccagtcttttttaataaaataaaa

SEQ ID NO: 4846 - DNA, 404 bp, Homo sapiens
  misc_feature 47, 48, 112, 114, 116, 117, 118, 121, 122, 123, 124, 126,127, 128, 129, 130, 138, 139, 140, 141, 142, 143, 144, 145,146, 147, 148, 151, 152, 155, 156, 159, 165, 171, 172, 177,178, 187, 189, 191, 229, 238, 256, 272, 280, 283, 293: n = A,T,C or G
  misc_feature 295, 297, 298, 304, 306, 307, 308, 309, 311, 312, 314, 318,319, 320, 325, 329, 330, 335, 337, 342, 343, 344, 345, 346,347, 351, 354, 356, 370, 377, 384, 386, 393, 395: n = A,T,C or G
ccctttcgagcggccgcccgggcaggtactttttttttttttttttnntttttttttttttttttttttttttttttttttttttttttttttttttttttttttttttttntntnnnttnnnnannnnntttttttnnnnnnnnnnnaannaannggnaaactnaatgtnnaaagnncccctttancnanaacaaaacaccattcaggataaaaacttaaattccaantttaggganttaaggaagaaaaaaaanaaaaagcccggggtcntctaaaanctngctttaaaanancnntttcanannnngnnanaagnnngaaancaannaaatnanaaaannnnnnaatnttntncccttttcccccanttttagnaacaaantnaattttnanaaaaaaaaa

SEQ ID NO: 4847 - DNA, 244 bp, Homo sapiens
  misc_feature 95, 96, 97, 99, 100, 101, 102, 107, 120, 122, 123, 134, 135,136, 137, 138, 139, 140, 141, 143, 144, 149, 154, 155, 165,166, 169, 170, 171, 172, 173, 174, 175, 182, 193, 197, 200,202, 204, 206, 207, 211, 216, 223, 231: n = A,T,C or G
ccctttcgagcggccgcccgggcaggtactttttttttttttttttttttttttttttttttttttttttttttttttttttttttttttttttnnntnnnnttttnccttttttttttnanntttgggggggnnnnnnnnannttttnaaaannaaaagggggnnggnnnnnnnaaaaaanttttaaaaaancttnaantngntnntttnggggnccccccnaaaaaaantgggggaaaaaat

SEQ ID NO: 4848 - DNA, 467 bp, Homo sapiens
  misc_feature 134, 135, 136, 138, 141, 143, 144, 150, 151, 152, 157, 172,174, 185, 198, 214, 217, 222, 225, 226, 229, 230, 231, 246,263, 266, 281, 284, 285, 287, 288, 309, 311, 313, 315, 316,317, 322, 324, 327, 328, 338, 339, 340, 345, 346, 354: n = A,T,C or G
  misc_feature 355, 356, 358, 359, 360, 361, 362, 363, 364, 365, 366, 367,368, 369, 370, 371, 372, 373, 379, 387, 390, 391, 392, 393,394, 395, 396, 397, 398, 399, 400, 401, 402, 403, 404, 405,406, 408, 416, 426, 435, 448, 449: n = A,T,C or G
cccttagcgtggtcgcggccgaggtacttttttttttttttttttttttttttttttttttttttttttttttttttttttttttttttttttttgtttttttttttttttttttttttttttttttttttttnnnanggngnnggggcnnnccccnttttttttttttttntnaaaaaaaaatntcttaaaaaaatnttttttttaaaaaaanganaaaanaannccnnnaaaaaaggggggggnatttttttttttttttnccncaaaaaaattttttntgnngnnttttttaaaaaaaaaaaaaantnancnnnaattnanccnngggggggggnnnaaaanntttttaannnannnnnnnnnnnnnnnntttttnaaaaaaanaannnnnnnnnnnnnnnnntntttattanaaaaaaaaanccccccccnttttttttttttnntaaaaaaaaaaaaaaaaa

SEQ ID NO: 4849 - DNA, 463 bp, Homo sapiens
  misc_feature 57, 58, 59, 60, 100, 102, 128, 129, 130, 131, 132, 133, 137,138, 140, 141, 142, 143, 150, 174, 176, 177, 184, 185, 190,198, 199, 208, 209, 210, 211, 212, 213, 219, 222, 232, 234,249, 252, 253, 254, 263, 264, 265, 268, 269, 276: n = A,T,C or G
  misc_feature 284, 286, 294, 295, 296, 297, 298, 299, 300, 301, 302, 311,313, 314, 325, 326, 335, 340, 344, 345, 346, 349, 350, 351,359, 367, 379, 382, 386, 387, 389, 394, 395, 403, 406, 408,409, 413, 414, 424, 426, 428, 429, 432, 433, 437, 438: n = A,T,C or G
  misc_feature 439, 440, 441, 442, 444, 447, 451: n = A,T,C or G
ccctttgagcggccgcccgggcaggtacttttttttttttttttttttttttttttnnnnttttttttttttttttttttttttttaaaaaaaaaaaaancntttttttttttttttaaaaaaaaaannnnnnaaanngnnnnttttttnggggaaaaaaaaaaaaaaaaaaancnnttttttnnccccncccccccnnatttttttnnnnnnaaaaanaangggggggggncnaaaaaaaaaaaaaanttnnnggggggaannnccnnggggggncccccccnangggggggnnnnnnnnnaaaaaaggngnntttttttttannggggggggnggggntttnnnttnnnaaaaaaangggggggntttttttttttnttngggnncnccccnngggggggnaantnncccnnaggggggggntnannaannaaannnnnngnggnaaanaaggggggaaaa

SEQ ID NO: 4850 - DNA, 347 bp, Homo sapiens
ccctttcgagcggccgcccgggcaggtacattttttttttaagaaaaatggaatcacactaaatatttcagaaaaatatttctgaaatgttaattaccaaaggatacaaaactgtattgaaaccatgattcagttgtgtaaaagaaaatctgtaaggagatatgtgaaaagattggttgcaagggaataatgaaattacaagtattagaaggaatggctgggcatggtggctcacgcctgtaatcccagcactttcggaggctgaggcaggtggaccacctgaggtcagaagttcgagagcagcctggctaacatggttgaaaccccgtttctattaaatatacaaa

SEQ ID NO: 4851 - DNA, 374 bp, Homo sapiens
cccttagcgtggtcgcggccgaggtacaggtaagccctggctgcctccacccactcccagggagaccaaaagccttcatacatctcaagttgggggacaaaaaagggggaagggggggcacgaaggctcatcattcaaaataaaacaaaataaaaaagtattaaggcgaagattaaaaaaattttgcattacataatttacacgaaagcaatgctatcacctcccctgtgtggacccgcgtacttgaagctttcaatttaagtggaccttcaggctgggaagaccatttctctgttttatcctccatgctggcaaggtcatgtcctggcttggaaagaggagtctcatctatttctcctggaagaacctgggtt

SEQ ID NO: 4852 - DNA, 619 bp, Homo sapiens
  misc_feature 49, 51, 72, 73, 88, 91, 101, 102, 103, 104, 105, 118, 123,124, 127, 128, 133, 137, 138, 139, 144, 145, 149, 150, 158,160, 161, 179, 182, 183, 184, 192, 200, 204, 208, 209, 212,213, 214, 228, 230, 235, 240, 242, 243, 244, 245, 249: n = A,T,C or G
  misc_feature 254, 257, 264, 270, 274, 278, 287, 293, 295, 299, 307, 318,321, 323, 330, 331, 332, 334, 342, 343, 344, 354, 355, 356,358, 367, 371, 372, 374, 379, 401, 402, 403, 418, 431, 432,440, 441, 442, 455, 459, 462, 469, 475, 482, 483, 489: n = A,T,C or G
  misc_feature 493, 495, 500, 501, 502, 505, 512, 516, 532, 535, 546, 550,551, 566, 574, 600, 605: n = A,T,C or G
cccttgagcggccgcccgggcaggtactttttttttttttttttttttnanttttttttttttttttttttnnggggaaaaaaaaaanaantttttttttnnnnnttggggggggggnccccnnaannggggntttnnnccccnngggnngggggggncnngaaaaaaaaaaaaaaaanggnnnaaaaaaangggggggntttnaaannccnnncccagggggccccnanccccnttttngnnnngggnccccnttnaaaaaanattttnggancccntttttgggncccccntnaaanaaaaaaantttgaaaaaanttngngcccccnnntngggggggnnnattttttttnnnanggggaaaanaaannanggggnttttttttttttttaaaaaagnnnttttttttttttttnaaaaattaaaaanntttttttnnnaaaaaggtttttntaanacnttttttnaaaaantttttgnnaaaaanaaananggggnnnttnccccccntttntttttttggggggggnganaattttccccntttnnaaaaaaaaaaaaaanccccgaangtttttttttttaaaaaacccttttnaaaanttttttcccccccc

SEQ ID NO: 4853 - DNA, 281 bp, Homo sapiens
  misc_feature 6, 26, 132, 133, 134, 135, 139, 145, 146, 148, 151, 158,160, 173, 178, 184, 187, 189, 201, 213, 221, 223, 226, 234,240, 246, 248, 249, 255, 261, 264, 273: n = A,T,C or G
cccttngagcggccgcccgggcaggnacttttttttttttttttttttttttcttttttttttttttttttttttttttttttttttttttttttttttttttttttttttttttttttccaaaaaaaaaannnncttntttatnnanggnaaaaaangntttttgggggganaaatnaaaaanggntnaaaaattttttnttttttaaaaangccccttncnggnaggggggnaaaaanaaattnannaaaacnaaaaanttncccttttanaaaaaaaa

SEQ ID NO: 4854 - DNA, 390 bp, Homo sapiens
  misc_feature 333, 351, 376: n = A,T,C or G
ccctttcgagcggccgcccgggcaggtactccttcttccgccgccgactgtcctgagctgactgcttgttacggattttcctcctgaccttcttgaggaccctctcctctgccttggtgaggggcaggtgagagggcagggaaaccccttcctgccccagcagacgcttctcctcatcggccaggaacagggtttgacagggcagctgggggtaggggcaggagaagatgcaataggagtgaggagggggtcatcccatttgcagcacccaggctactccccccacatgccttctggagagtgtttcctcactgggagacaactttaatctanaggtgaggtgaggggcanagactttaattcagacaggctctanatcaagccaaaggg

SEQ ID NO: 4855 - DNA, 594 bp, Homo sapiens
  misc_feature 410, 575: n = A,T,C or G
cggccgcccgggcaggtacgcgggagtcctgataggactcctaaaaagcatttcagtgccatcacaaaacaagtagagctgggtagagctgggcgcggtggctcacgcccgtaatcccagcactttgggaggccaaggcgggtggatcacgaggtcaggagttcaaaaccagtctggccaagatggtgaaaccctgtctctactaaaaatgcaaaaaaatcagccggacatggtggcgggtgcctgtaatcccaggactttgggcaaggcgagaggatcacctgaggtcaggagttcaagaccagcctggccaacatggcaaaaccccatctctactaaaaatacaaaaattagctgggtttggtggtggacacctgtagtcccagctacttgggaggctgcggcagganaatcacttgaaccccggaagtggaggttgcagtgagccaagatcgtgccattgtacccagaccaattttatgtatatatattctgaaatgctccctttttaatgtggtcatttgttgccttctaagttgagaagacaaaactgaataagtgaatgttaattgtcnaaaaaaaaaaaaaaaaaaa

SEQ ID NO: 4856 - DNA, 318 bp, Homo sapiens
  misc_feature 1, 14, 28, 45, 271: n = A,T,C or G
nccttacgtggtcnggccgaggtcagtncctaaaatgtccttctncaaacagtaaaatatttcactctgtaaatcatcactaagtagttattctgcctgttgattatgagcctccaaaaatgtttaatgcttgaaggatggtttgggaggcagggaatccttttcttaaaacacctttaatgaggcatatgttacatatcataaacacccatttcaagtgtccctgcccgggcggccgctcgaaagggcgaattccagccactggccggcngttctagtggatccgacctcggtccaaccttggcgtatcatggtcat

SEQ ID NO: 4857 - DNA, 229 bp, Homo sapiens
  misc_feature 184: n = A,T,C or G
ccctttcgagcggcccgcccgggcaggtactggggattaagtttccaacacatgctttttgtgaaacatgttcaaaccatagcattttcaaattccaaaataagatatcccttacaataagtatcttaccaaacacagtggctcatgcctgtaatcccagcacttagggaggcagaggcaggangattgcttgagcccaagagtttgagaccaacctgggcaacatagt

SEQ ID NO: 4858 - DNA, 275 bp, Homo sapiens
  misc_feature 51, 54, 87, 88, 94, 100, 103, 112, 114, 116, 117, 118, 119,120, 124, 125, 126, 127, 128, 132, 133, 142, 143, 144, 145,146, 147, 148, 149, 157, 158, 159, 163, 164, 167, 168, 169,177, 185, 195, 196, 199, 200, 201, 202, 203, 204, 205: n = A,T,C or G
  misc_feature 213, 219, 226, 234, 240, 243, 248, 253, 259, 261, 262, 271: n = A,T,C or G
ccctttcgagcggccgcccgggcaggtactttttttttttttttttttttnggnttttttttttttttttttttttttttttttttnngggggnaaaaanatnttttttttntnannnnnaaannnnnaaannggggggggnnnnnnnnaaaaaaannngggnnaannntttttttngggggggntttttttttnnggnnnnnnngggggggnaaaaangggggcntttttttnaaaaanaanaaaanggggntccccncnnaaaaaaaantttt

SEQ ID NO: 4859 - DNA, 505 bp, Homo sapiens
tcgacccacgcgtccgacagggtctgatctagggagaggccaactctgatacccctatgtgcgctgctaggagctaaggacattcagagagacatggcctggaaacagacaccactcctgcttttggtctacatgatcacaacatgcagtgcccgggacagaacagacctgctcaacgtttgcatggatgccaagcaccataagacaaagccaggcccggaggacaagctgcatgaccagtgtagtccatggaagagaaatgcctgctgctcagtcaacaccagccaggagctacacaaggacaactcccgtctgtacaatttcaattgggatcactgtggcgagatgacgcccgcctgtaagcgtcacttcatccaagacgcctgcctgtatgagtgttcccccaatcttgggccttggattcagcaggcaggccagagctggcgcaaagagcgcttcctggatgtgcccttatgcaaagaggactgtcaggagtggtgggaag

SEQ ID NO: 4860 - DNA, 410 bp, Homo sapiens
ccctttcgagcggccgcccgggcaggtactctctaaaattaaaatcattagaaaatatcttaaataaaatgttttacataaataagtgttaaatttcagattcaaactatattttcttctgtatctcaatttgggaaaaatctcacaattattaactcttctcagttacatttatttttgagcatttaaatctactatacaccagtttgtaaaattcaccttggttacctctccccatgcctatgtgctgtctttcctcaggtaagtccattatatgcatctaagtgctggggaggtttaaatagcacttaaagaatattcatgagagttctgaaatgaaggtttcgtctttagctattgactgtaggatttgtaattcaaatcatcacagcatcctaaagaaatactgt

SEQ ID NO: 4861 - DNA, 330 bp, Homo sapiens
  misc_feature 65, 92, 117, 121, 135, 169, 192, 271, 303: n = A,T,C or G
actgttttgaagaacaaagggctcaaccctgataactctaaaatttgggatcttgtcaaattaantttcaacattctttaaattttaccctnatccttgttttcttcgcttggactnacgncctttctgactctnttccgcttttgggttggtcttctaacagtaaggnatgcttgtaggtgtggctggttntgatccacacagtggaaggagaagctcctcatcccagcttctgggtgcctgtatccccacctgatatgttgcctgcttncgccgatgaagtctaataaccttccccctgcnattcccctaaagagggaaaataaactt

SEQ ID NO: 4862 - DNA, 496 bp, Homo sapiens
  misc_feature 156, 157, 160, 161, 162, 163, 164, 165, 167, 168, 169, 170,171, 172, 173, 174, 175, 196, 197, 198, 200, 203, 205, 206,219, 220, 228, 232, 240, 241, 244, 245, 246, 247, 249, 250,252, 253, 256, 258, 260, 263, 264, 265, 267, 268, 269: n = A,T,C or G
  misc_feature 270, 271, 274, 275, 280, 287, 288, 289, 290, 303, 306, 317,318, 322, 331, 347, 348, 355, 361, 362, 364, 367, 368, 369,381, 383, 388, 393, 398, 404, 408, 409, 410, 411, 412, 413,414, 415, 416, 417, 418, 419, 420, 421, 423, 424, 435: n = A,T,C or G
  misc_feature 436, 438, 441, 450, 451, 452, 453, 454, 455, 456, 457, 458,470, 471, 472, 475, 477, 478, 481, 482, 484: n = A,T,C or G
ttccgccctttcgagcggtcgcccgggcagggactttattttttttttttttttttaaatttttttttttttttttttttttttttttttttttttttttttttttttttttttttttttttttttttttttttttttttttttttttttttttgnngcnnnnnngnnnnnnnnnaaaaaaaaaaaaaaaaaaaannnanatntnnctttttttttttnnaaaaaaanaaantttttttnnccnnnngnnannaanantnaannnannnnnttnnttttnttttttnnnnttggggaaaaaanatnttttttaattnnaaangaaaggggnggaaaaaaaaaaaaanntttattntttttnntnttnnnaaataaaaaaancncccgngggtngggtntttttnttannnnnnnnnnnnnncnncaaaaaaaaannanaanttttttttnnnnnnnnncccccccccccnnnggngnntgnnanaaaaaaaaaaaa

SEQ ID NO: 4863 - DNA, 497 bp, Homo sapiens
cgccagtgtgatgggatatctgcagaattcgccctttcgagcggccgcccgggcaggtacgcgggtagcataaaaataaaggtataaagaaagatataccatgttaatactagtcaaaagaaaactggagtagcagtattgatatcagataaggcaaacttcagagggagaaaaatgatcagggataaagaggggcattatataataagagggtcaatactccaagaagacattgttaaatccttaatgtgtatgcacctaacaacagcatcaacgtatgtgaagcaaaaactaatagaactgcaagagaaatagacaagtccactattatagttggagacttcaacactcttctatcagtaattgacacatttagcaggcaaaaaaatcagtaaggatatagctgaactggacaatactgtcaagccactgaatctaattgacatttacagtatacttcattcaacagagtacctcggccgcgaccacgctaaggg

SEQ ID NO: 4864 - DNA, 476 bp, Homo sapiens
  misc_feature 450, 466: n = A,T,C or G
ccctttcgagcggccgcccgggcaggtactggggataacttaatatcctatgttgtgtcaagactctttgaagactttcttgaattgctttcgtaaaggtctgaacactgttaaggagaaagctgagtatcaacttgcctttctgatagaaatgtttcttgtgccagttttattgttgagatatactatttttttccttttttaattcagttttttaaaaaaacaaatgtattgtggcttccagttaccaggttgtctaggtaatgacagtaaactgactgtagaatgataattgtggtatagtgaccaatagatgccaaacagcttgtggcctcactaaaggtggggtccgcttagtccccgggagtaaaatgagtgacctcagaaacaagaattcctggaaaggcacatgccgaagaggaatatggtataattttaaattttaatgcnaaaattttaatttggnctttattttt

SEQ ID NO: 4865 - DNA, 317 bp, Homo sapiens
ccctttcgagcggccgcccgggcaggtacgcgggtaatcaaaccactacatctggatcagagacaaatgacctcccagattgactagttttgtaaggaacttcagttgaaattgaagcagtcatcagctgcttctcaaaccagctacactacataaggaggagcccaagggaaactgcaggacaacaggtccactgggaaacttcagggggccaagctgtcaaagacaagcacagaaaaattcctgcaatgtgcgttagaccttgaggcagcttttaatggcaaaagtcagtacctcggccgcgaccacgctaaggg

SEQ ID NO: 4866 - DNA, 460 bp, Homo sapiens
  misc_feature 20, 68, 205, 208, 215, 222, 345, 365, 420, 432: n = A,T,C or G
ccctttcgagcggccgcccnggcaggtacaaaaagtagccgggcgtggtggctggcatgtgcctgtantcccagctactcaggaggctgaggcaggagaatcacttgaacctgagaggcggaggttgcagttagccaagatcacgccattgcactccagcctgggccgacaagagtgagactccatctcagaaaagaaaaaaaanaanaaaaaanaaaatangtacctcggccgcgaccacgctaagggcgaaattccagcacacttggcggccgttctaagtgggatccgagctcgggtaccaagcttgggccgtaatcaatgggacatagcttgtttcctgtngtgaaaattgtttatccggntcacaaatttcccacacaacataccgagcccggaagccataaaaagtgtaaaaangcctggggggtngccctaaatgaagtgaagcctaactcac

SEQ ID NO: 4867 - DNA, 578 bp, Homo sapiens
  misc_feature 50, 51, 115, 116, 117, 118, 119, 129, 130, 139, 140, 141,144, 146, 152, 153, 156, 157, 160, 162, 163, 175, 177, 178,179, 180, 181, 183, 189, 190, 203, 204, 205, 209, 210, 221,235, 242, 246, 247, 250, 251, 252, 257, 258, 259, 260: n = A,T,C or G
  misc_feature 262, 263, 264, 267, 270, 272, 275, 277, 285, 288, 289, 291,292, 293, 295, 297, 302, 305, 318, 344, 348, 352, 357, 358,361, 364, 365, 366, 368, 375, 381, 382, 398, 399, 412, 424,425, 430, 431, 433, 461, 466, 467, 472, 473, 485, 490: n = A,T,C or G
  misc_feature 493, 494, 495, 497, 498, 504, 516, 532, 533, 534, 535, 537,539, 540, 541, 547, 555, 559, 566, 569: n = A,T,C or G
cccttagcgtggtcgcggccgaggtacttttttttttttttttttttttnntttttttttttttttttttttttttttttttttttttttttttttttttttttttttttttgannnnnaaaaaaaaannttttttttnnnggngnggcccnnaannatntnnaaaaaaaaaaanannnnntntttttnnaaaaaaaaaaaannncaannatttttttttnaaaaaaaaaaaacncaaaaangggnnccnnnttttnnnnannnaanaananggngntttttttnatnntnnngngnggggnggnggttttttttttnaaaaaaaaaatttttttttttttttntccncccnaaaannatnatnnntnttttttngggtgnngggccccccccccccnnaaaaaaaaaaaanttcttttttttnncaaanngngggggggtttttttttttttttttaaanaaacnnggggnnaaaaaaaaaaanaaatntannngnncccgcntttttttttttnccccccccctcccccnnnngngnnnaaaaantttttttnaaanccccccnctnttttttttt

SEQ ID NO: 4868 - DNA, 280 bp, Homo sapiens
cccttagcgtggtcgcggccgaggtacgcggggatacttgacaatttgttttattatgtaattgataaaatggtgatgtgtattaatgttagttcaaccatatatttatactgtctggggatgtgtggttatagttctgtgggagaaataattttgtcagtgttcaccagcttgtaaaaacttagtgcgagagctgaaacatctaaataaataatgacatgcatttatcatcaaaaaaaaaaaaaaaaaaaaaaaagtacctgcccgggcggccgaaggg

SEQ ID NO: 4869 - DNA, 582 bp, Homo sapiens
  misc_feature 340, 346, 347, 349, 352, 359, 365, 366, 372, 374, 375, 376,377, 383, 384, 385, 389, 392, 399, 403, 404, 410, 412, 422,423, 424, 426, 429, 430, 431, 435, 437, 443, 445, 448, 449,457, 458, 459, 463, 467, 468, 470, 476, 480, 483, 486: n = A,T,C or G
  misc_feature 492, 496, 502, 510, 523, 528, 532, 537, 541, 548, 556: n = A,T,C or G
cccttagcgtggtcgcggccgaggtacatctaggtccggcgtggtggctcactttgggaggccgaggcgagcagcactttgggaggccaaggcgagcagaacacttgaggtcaggagtttgagaccagcctgaccaacatggagaaaccccgtctctattaaaaacacaaaatttacccgggcatggtggggcatgcctgtaatcccagccacttgggagtctgaggcaggagaattgcttgaacccgggagacggaggttacattgagccgagatggcgccattgcactccagcttgggcaacaagagcgaaactctgtctcaaaaaaaaaaaaaaatnccaaanngnctncggggtnaacctnngggggntnnnncccaannngggnaanccccttntttnntaaaantncaaaatttannngnacnnnctangncccccntntanncccacctnnngggnaccnngnggcagnaaantgnttngaaccnaggngggggnggttgcantgacccaaaatcnccccntacnctccncccnggggganaaaaaaanactccgtttaaaaaaaaaaaaaaaaa

SEQ ID NO: 4870 - DNA, 327 bp, Homo sapiens
ccctttcgagcggccgcccgggcaggtactgtttgatcccctcgctcttttaaataatttcgcatagcttccctagtaagtcgtttaggtggaggccgctcgccaaatttccttttaatccacgccatggtacgcgggtcggaaaccacgcgtcctactacaaagatgctctgcggtttttgggctgtgttgacatcaaggatctaccagtgtctgagcagcaggagagagccttcacgctggggctagcaggacttctcggcgagggagtttttaactttggagaactcctcatgcaccctgtgctggagtccctgaggaatactg

SEQ ID NO: 4871 - DNA, 603 bp, Homo sapiens
cccttcgagcggcccgcccgggcaggtacaaaatattgaaatgaccaacgttacatgatttcaagggttgtcctttctgtgcttttatctgtcacgacaggaaggtgtggaaagtttatatcgtttatatccttaatttgactactcttggatattaaaatctttctattaattaaaaagacttttagacaacctcttaaatggaattacactatggaaaacagggctcccccaaaaacacctaggcagaactgagagttctttgaaaaccattcccaataaaaactaaatgaaaaataaatataaaacaaagcttaaaaaaatatgcattacctgacaccaaccttttctggctgacaatatttattcatgaaaacatatcagctgtctaccttttatatgcaaaccaagtcctgaggttaactaggggctgaagcaaactagcatttaggatgcaaacattcttggatttgtgatgtaaacttgccttgccagggaaagtttgctggtctatacagaatgagaaattcaaagccctattttaacccctgccctctttagctttcacaaaacattggtccacaaattaaattttcaaaaagt

SEQ ID NO: 4872 - DNA, 597 bp, Homo sapiens
  misc_feature 1, 98, 119, 145, 154, 170, 172, 193, 207, 212, 213, 214,216, 219, 225, 236, 241, 242, 244, 258, 267, 275, 278, 293,298, 307, 310, 311, 312, 313, 316, 323, 340, 343, 350, 351,369, 384, 385, 386, 396, 404, 405, 409, 417, 419, 420: n = A,T,C or G
  misc_feature 421, 423, 440, 445, 446, 449, 453, 458, 459, 461, 477, 480,482, 508, 512, 516, 521, 571, 572, 573, 574, 575, 576, 577,578, 579, 580, 588, 589: n = A,T,C or G
ncccttcgagcggccgcccgggcaggtactttttttttttttttttttggtttttttttttttttttttttttttttttttttttttttttttttttnttaaaaaaatttttttttttnaaaaaaaaaaaaaaaaaaaaaaaaanaaaaaaagnaaaggaattttttttntntaaaaaaaaaatttttttttntaaaaaaaaaaaanatttnnngnagngaaaanaaaaaaacccnttggnngntggagcaaaccccnaaaggtgtntatttccnccnaaaaaaaaaaaaaanccccngaaaaaatnagnnnntgnggggganaaaaaaaaaaaaaaaanccntttaaannaaaaaaaaaagcggggcncaaaaaaaaaaaaannngggggggggntgaatatnnaatnagaaaaangnnngntttaaaaaaaaaaaaanaacanntantttntggtnnanaaaaaaaaaaattttnttnanaaaaaaaaaaaaaaaaattttttccngtgnaagnaaaanatatttttattagaaaaaaaaatttttttttttataaaaaaaaaaaaaannnnnnnnnnctttaatnnaaaaaaaa

SEQ ID NO: 4873 - DNA, 421 bp, Homo sapiens
  misc_feature 344, 371, 392, 415: n = A,T,C or G
cccttagcgtggtcgcggccgaggtacttttttttttttttttttttttgggacggagcctcgctctgtcacccaggctggagtgcagtggtgtgatctcggctcactgcaacctctgcctcccgggttcaagctattctcctgcctcagcctcttgagtagctgggattacaggcgtgtcccacccggctaatttttgtattttttgtagagacggggtttcaccatgttggctaggctggtctcgaactcctgacctcgtgaccgccttggcctctcaaagtctgggattacaggcgtgagccaccgagcccagcccctccttaaaacaagtttctaattanaacccttattttacccaaatggggttnagggaacaaaaaccaaccctnatcaccctatttggggaaaaatnaatttt

SEQ ID NO: 4874 - DNA, 439 bp, Homo sapiens
  misc_feature 266: n = A,T,C or G
ccctttcgagcggccgcccgggcaggtgttaagtttgtgaaaagtgatgcaatttgttatacattcaaatgcaaattagaactagctgccttacgatgagatttcactgtcatttttttagcaccctaatttttgtcggttctgtaggtttcaagtagcagaaacttacatctatttccttcagaaaattaaggagcagatattttaatatgctttatgtaaataggattctgataattttagctttagttaatgcaacacacttncctgggcacaaccatgacctctctgagaactggaaaatactgcataattttaaaaatcagagtgtaatgacattccctgacaacttcaaataagttatgtgaggaggatgaactatgggtagtctagaccaccagtcatatttgtctagccgtagaaacagtgacaacttaaa

SEQ ID NO: 4875 - DNA, 388 bp, Homo sapiens
  misc_feature 39: n = A,T,C or G
cccttagcgtggtcgcggccgaggtacttgctcgctcanatcctgccaggtcaatgagtgacatcttggcaatacggacattttgattgatacttgctgttttgtcttgttgtcgcaagtaaatttggaaaacagcatgagaacgagaagatgtggcattcatatcagtgggatgttgtgtcctgtttttgtttccattatccaataaatgcaaaatttcttctgaggatttgggctggtgtaaagtaagtccatgaacgaccacccctttttgggtatcttcccggacagcaagtggccctgaatttactaagagatcacaaatctgttcattatatacctccagatatgaaactgcagtacctgcccgggcggccgctcgaaaggg

SEQ ID NO: 4876 - DNA, 322 bp, Homo sapiens
cccttagcgtggtcgcggccgaggtacgcgggtaaatcaggaatggccatattagtgtcagataaagaagactttagagcaaagaaaattaccagagacagagagggctgttacattgtaataaaagtgtcaaacaaccgagaagacaacaatcctaaatgtgtatgcagaaaataacacagctgccaaaatacatgaaggaaaaactgtcataactaaaaggaaaaagacaaatctacaattacagttgcagacttcagcacgcctccctctcttactgataggtagaacaactagacagaaatagcaaagaggtagaact

SEQ ID NO: 4877 - DNA, 409 bp, Homo sapiens
  misc_feature 132, 353: n = A,T,C or G
cccttagcgtggtcgcggccgaggtacagatttagataaccagcttcaagaacaatcagaaactgaggaagattccaatcctaatgttagctggggtaaaaaggtccagcctatagactccatattagcagnctggaatgaagattagaagcatttgaaatgatggagaaggatgagctatgacttgctaaacaatctgttggtaggtatttaaaaagaaaaggtaaactgtgtgtggttaatagacatcctaatactaagcaggctttctaatgggaggctttaagtatggtgatgaacaaccacgttctgactggcgtagttatcgtaggaatctggacatgctgtgttanaattgaccttgtttaaaactgtcccatcaaaaatggaaatccacagttcccccttc

SEQ ID NO: 4878 - DNA, 767 bp, Homo sapiens
  misc_feature 20, 21, 501, 502, 503, 505, 525, 527, 530, 533, 538, 573,574, 581, 588, 595, 599, 602, 608, 616, 620, 621, 623, 633,645, 648, 650, 654, 662, 679, 697, 708, 720, 727, 729, 731,736: n = A,T,C or G
cctttgggagtcgaccccgnntcctctgattttgatatcattattctaaggagttatctcaaaggcacaaaatatgaattctgcaagaaggctattttttattgtagtttgaatgggttaggaaaagcctcaatttttcactcttaagtccttcagtacatttttctttcatcttattacttatgcaagttaaggttctttggtaacagaattcttgcaactgtaaaataaaactacatagatgtaagaagtcatgtaaacggttaacaagcttaccaaggttagcaaaactttcattgtaaatcagtctgtactgagcaaataaaaatcattattagttgtataaacacaaattccattttgactttcaggatgtcatactacttctgtacctagcattttcagtccttatatttgcaatgttacacaaactgtactattttcttttatgtgcagtttgcatgagtaaaccatcagagaataaattctatctttaaattnnnanaaaaaaaaaaaaaaaagggngnccnttnaattnttttaaaaaaaaaaccccccccccccccccggacnnggaaaantaaaagnaaggccnttgnggnggaaanctggtttntggnncnctttaaaggnttcaaaaaaaanccnancccnccccaaanttccaaaaaaaaaacantttttcccccggcttccnaaggggggggnggccccaccccnaaggggntntnaaaangggggggaacccccggggccccccccccaaa

SEQ ID NO: 4879 - DNA, 343 bp, Homo sapiens
cccttagcgtggtcgcggcccgaggtacttttcacatagcttgttgccccgtaaaagggttaacagcacaattttttaaaaataaattaagaggtatttataggattaaagtgacttcatttgtatacatttggaatctaaaccagcttaaaaacagtttcctcaatgacttagatacacagtataactgatgctcttctggaataccacatgagacatggtcagaaacagtgcttggaaggacattacacaagaaattcagagtaatgctttgaagatttccccccttttgttttattcctgaaggaacatcagtacctgcccgggcggccgctcgaaaggg

SEQ ID NO: 4880 - DNA, 540 bp, Homo sapiens
  misc_feature 65, 69, 134, 219, 221, 226, 239, 264, 333, 352, 363, 369,370, 388, 397, 420, 447, 464, 483, 508, 513, 516, 521, 531: n = A,T,C or G
cccttagcgtggtcgcggccgaggtactatattacttcaagatatgtgtaggcaaatatgctaancttntacagtttagagggttttacaaaactgaaaagtgaaattgagggtcacatgaacctgccatgaantaaatgtcacatttctgtcactgctcactagacttgtgcactactagagtatttgtaaactaaaatgttatatagaaaataaccncntattnggtcatttactcnaacatttatcaagtgcctattttgngccaaacatagcaaataggggctgtgaataaagaggatgaaaacgtgcccttatccttaaagaactctnataagaatcttattaaacnaacccgaagcngagttnnccttcccccctttatgtnaactaaccnttatttcccgggaatacctttcnaaattcctgaactttttacccaaaccnatttgacagaagtcccncgtttataaaccttctttnggaaaatatttggtaaaagggcccntctanacnaaatntgccaggggnaaaaaaatt

SEQ ID NO: 4881 - DNA, 335 bp, Homo sapiens
  misc_feature 90, 92, 95, 99, 106, 133, 137, 142, 147, 162, 167, 168, 170,173, 186, 193, 199, 207, 215, 216, 219, 220, 256, 302, 304,308, 318, 321, 332: n = A,T,C or G
ccctttcgagcggccgcccgggcaggtacttttttttttttttttttttttttttttttttttttttttttttttttttttttttttttntnttntttnttttttnaaaaaaaaaaattcttttttttttttnttanaaaantggtntaaacacattttttnttttnngnttntaatctgggtgtntacttanagacancatttatntaaactannatnnaactttgataaaaactatattttctttctttaaaanaatttaaatgttttttcacaaagcttagccatacaaccattgaatntntttntcttaaaaanggnttaaaacccanaat

SEQ ID NO: 4882 - DNA, 310 bp, Homo sapiens
  misc_feature 111, 113, 114, 115, 116, 117, 118, 127, 131, 132, 133, 134,135, 136, 137, 138, 139, 140, 141, 143, 146, 149, 152, 161,162, 163, 164, 166, 167, 168, 169, 170, 171, 178, 182, 183,186, 187, 188, 189, 190, 191, 192, 194, 195, 197, 198: n = A,T,C or G
  misc_feature 202, 214, 218, 220, 221, 222, 223, 224, 234, 242, 243, 246,247, 249, 251, 253, 255, 264, 267, 269, 270, 271, 272, 274,297, 298: n = A,T,C or G
ccctttcgagcggccgcccgggcaggtactttttttttttttttttttttttttttttttttttttttttttttttttttttttttttttttttttttttttttttttttncnnnnnnaaaaaaaanttannnnnnnnnnntnaanaanaanggggggggnnnncnnnnnntgttttnaatnnaannnnnnncnnannttgngttttttttttnaaanannnnnaaaaaaaatnggccccannggnntntnananaaccccccnttnannnntntttgttaaaaaaaaaaaaaacanncaaaaaaaaaaa

SEQ ID NO: 4883 - DNA, 327 bp, Homo sapiens
cccttagcgtggtcgcggccgaggtacacctataggtaaccagtgtaggtcattagaacacaggcttcacactgcatgctgatctgcaaagtgaggacataccagtgacaactttggaatctgcatccagccacaggtaacagatgtattgcaccagactcagatctagattttgtgatgactatataatgaactagaagttcaaattagagaaagaaacaattcaaaatcagaagaaaggtaaaagcaagtggccacatgatcgcattaaaaaagaaaaaggcaaatatctcagtaagtacctgcccgggcggccgctcgaaaggg

SEQ ID NO: 4884 - DNA, 710 bp, Homo sapiens
  misc_feature 98, 100, 101, 103, 104, 105, 106, 107, 108, 109, 110, 111,112, 114, 124, 126, 127, 128, 129, 131, 134, 141, 142, 143,144, 145, 157, 159, 164, 165, 166, 167, 170, 171, 173, 174,176, 177, 178, 179, 180, 192, 203, 204, 209, 210, 212: n = A,T,C or G
  misc_feature 214, 222, 223, 224, 227, 231, 236, 246, 248, 249, 254, 255,257, 261, 265, 269, 270, 279, 284, 285, 287, 288, 289, 291,292, 293, 295, 302, 305, 315, 320, 330, 337, 338, 344, 366,369, 373, 397, 401, 402, 403, 404, 408, 410, 417, 431: n = A,T,C or G
  misc_feature 432, 433, 434, 435, 438, 443, 448, 449, 454, 456, 464, 465,466, 469, 472, 473, 481, 491, 492, 497, 502, 503, 504, 507,508, 510, 532, 533, 538, 542, 543, 544, 545, 546, 548, 549,550, 551, 561, 562, 564, 578, 579, 581, 582, 597, 599: n = A,T,C or G
  misc_feature 600, 602, 606, 622, 625, 627, 628, 630, 633, 636, 637, 639,640, 641, 647, 657, 662, 663, 664, 666, 685, 697, 698, 699,700, 710: n = A,T,C or G
cccttagcgtggtcgcggccgaggtacttttttttttttttttttttttttttttttttttttttttttttttttttttttttttttttttttttttncnncnnnnnnnnnncntttttttttntnnnnanttnggggggnnnnnaaaaaaaaaaantnggggnnnnaannanncnnnnnccaaaaaaaaanccccccccccnnaaaannantntaaaaaannnttntttntaaanggggaaaacncnnttttnngnccanaggngggnnaaaaaaaanaccanncnnngnnncntttttgnaangggggggggnaaaanttttttcccnggggggnnaaaaancccggggggaaaaaaaaaaaanccncccnaaaaaaaaaaaaaattccgggggngggnnnnatananccccccnccgggggggggggnnnnnttnccccnggggnnggggngnaaaaaaannnggnggnnttcccccncccccccccnnggggnggggnnnaannangtttttttttaaaaaaaaaaannccccnaaannnnngnnnngggggggggnngncccccccccccccnntnnttttttaaaaaaaananncncccntttttttttttttttnttntnngnggnaannannncccttnaaaaaaaaanagggnnngnggttttttttccccccccngggggggggggnnnngttttttttn

SEQ ID NO: 4885 - DNA, 253 bp, Homo sapiens
  misc_feature 73, 90, 92, 94, 96, 106, 109, 113, 116, 137, 138, 140, 141,142, 143, 146, 147, 148, 151, 152, 153, 155, 159, 160, 161,172, 173, 174, 176, 178, 183, 184, 187, 199, 201, 205, 208,210, 211, 213, 214, 229, 230, 233, 234, 235, 239, 243: n = A,T,C or G
cccttagcgtggtcgcggccgaggtactttttttttttttttttttttttttttgtttttttttttttttttnttttttttttaaaggtnanananaaattttttnaanggtnttnaaaaaaaaaattaaaaaaaanntnnnnaannnaannnanaaannntttaaaaaaannntncnaaaannttnattgaaggcttnanaaanatntnntnnaaggtttagggttannaannnaaancttntaaaatgaaa

SEQ ID NO: 4886 - DNA, 259 bp, Homo sapiens
  misc_feature 3, 53, 87, 89, 120, 133, 135, 137, 156, 171, 223, 228: n = A,T,C or G
ganaaagggttttactatggagccaggctggccttgaactcacagcagtcctntagctccagcctcttgaatgctgggattacaggngngagccaccatgctgggctgtgtctggaatgnctccttgaacaanangngcaaggatgtgtctgaaanaaagacagtctgagngggctctgctgtacatcaagcaaaacaccaaccccttgcttaacgccatganacctnggctcaccctgtccaggtcccagggacccaa

SEQ ID NO: 4887 - DNA, 220 bp, Homo sapiens
ccctttcgagcggccgcccgggcaggtacaacagaaaaacaacagcaaagcaagcagaaagaaggcagaagaaggaaggaaaccataaagataaggagagcaattaatgagctagaaaacaaagtaataatgcagaaatcaacccaactaaaagccggttccttgaaaagagtgataaagccatctctggcaaagaatgacccaagggacgaggaggaag

SEQ ID NO: 4888 - DNA, 480 bp, Homo sapiens
cccttcgagcggccgcccgggcaggtacactggcgcaatcttggctcacagcagcctacacctcccgggctcaggccatctttccacttcagcctctgagtagctgggaccacagttgtgcaccaccatgtctggctactttttgtattttttgtagagagagagtttcactatgttgccccggcaggcccggaactcctgagttcaagcaatccacctgcctcaggcctcccaaagtgctgggattacagtcgtaagccaccacgcttgtccaataaatggattttaatggaggagttagaaaagttctttggtgtggtttcagattacacttcacaaccaaccttaaagaaactactactggatagtattaaagaagaatatccacaattatctgtaagggctagcccttttccatctatatatttgtaaaagactggatttctttcatatgcttcagccaaatcaacattttaaaac

SEQ ID NO: 4889 - DNA, 235 bp, Homo sapiens
  misc_feature 29, 37, 51, 61, 65, 67, 71, 91, 106, 128, 162, 211, 221: n = A,T,C or G
cccttagcgtggtcgcggccgaggtactncttctgtngacatgggggtctnattatgttgnccangntggncttgaactactgggctcaancaatttacccgccgncatggtctcccaaagtgctcanattataggcatgaccactgtgcctggccaacatnaaaccatgtgttatatacacaagaagcctgagagaggaaagaagggtangcgccctgcncatgccgatgaagc

SEQ ID NO: 4890 - DNA, 390 bp, Homo sapiens
  misc_feature 30, 44, 138, 244, 326, 334, 367: n = A,T,C or G
cccttagcgtggtcgcggccgaggtacttnatttttttttttgntttttttttttagcaaagattcactttatttattcattctcctccaacattagcataattaaagccaaggaggaggaggggggtgaggtgaaanatcacgccactgcactccagcctggacaacaagagtgaaactccgtctcaaaaaaaaaaaagattccattttaaccaacagagagctgcaccaacatgtttgattntggggttgaagagactgggggaagtcagggattaggtgcacattctcacatatatttttgtaggagtataaattggccctgnatctgtanagagtaatttggcaatattgaccaagatttaanaatgcacaagcccgcgttcctgc

SEQ ID NO: 4891 - DNA, 518 bp, Homo sapiens
ccctttcgagcggccgcccgggcaggtacactgctaagctatatattgagcacatccagttatatttaaggtggttctgttagtccaatttcatactgatataaagaactgcctgagactgggtaatttcaaaaagaaagaggtttaattgactcacagtgcagcatgactggggaggcctcaggaaacttacaatcatggtgcaaggcaaaggggaagcaaggcaccttcttcaaaaggtggcagaaaggagaagagctgagcaaagggggaagagcaccttataaaaccatgagatctcaatcattgtgcaaaaatcacaagcattcttatacaccaataacagacaaacatagagccaagagtgaactcccattcacaattgcttcaaagagaataaaatacctaggaatccaacttacaagggacatgaaggacctcttcaaggagaaccacaaaccactgctcaatgaaataaaagaggatcaaacaaatggaagaacattccatgctcatgg

SEQ ID NO: 4892 - DNA, 378 bp, Homo sapiens
cccttagcgtggtcgcggccgaggtaccacaactgggtttagcaattcgggtaggcacagcaggtccggcttggccctgcctgctttgactgccttttcgggagttttaaacctcctacactcggaatgtagccctgattgtggtttctctgcatagcaagttcggacttaagcggaataagtatcggcttatttcgcctgcgataaagatgcttaattctgcgttcgaaatattctgagcgagtcctgggttagggatttcttagagtaacaagtgcatgcttcgattttaagtgcccctgtgaatgtgatttcttagctcttgcaagtccatatttggtcgcaaccagtacctgcccgggcggccgctcgaaaggg

SEQ ID NO: 4893 - DNA, 501 bp, Homo sapiens
  misc_feature 7, 10, 13, 15, 26, 29, 43, 307, 369, 371, 389, 401, 442,448, 467, 490: n = A,T,C or G
cccttancgnggncncggccgacgtncanttaatatgattcantataatctgcagtctcatgtatggcttatcaataatgccatcatcactgtatgtcaaacaacctcactgcttactagaaatgctaaacactggaaaaaatggaattttatacatttgttttcttaaattttgacagatattcttcagaaagttaaaactgccttccacaaaattttgtgtgtatatggcacaaggtgacagccaaaaagtgtgattccatcgaaaaggcgctgttaacaatactcaagaataatctgacaagtntacatcaatgtctgagtaaagaataggtaaatagacaaacccctataaaagatagtattatngnttaaatatactattgctntataaaaagaangtaacacacaggaaatgaccctttttatgacaagcctatanaccccnttgaaatcacattattagntcttgtaaccacaaaaaaatganaaaaaaatatt

SEQ ID NO: 4894 - DNA, 541 bp, Homo sapiens
  misc_feature 29, 31, 491, 496, 509, 524, 530: n = A,T,C or G
cccttagcgtggtcgcggccgaggtacantngtctttattatcatatatggtatgtatgtatgatttctttccattcctcatatttagactgtatatttatgtaggtgtgagtgattgcctggtgcttgcttgtgccaaggtgctaggcaccctccaaccctgccaacttttgtggcctcccaaagcattcctgttaccaaagaggcttcaaacctgaccctcacttctcagtggacccgagtttcccttccatgccattattttcagtggggaagttttagaggtgagctgttggccacaatatcaattttaagtgttcatagcagctatgtctcctgcattcttggctcctggatttaccaccaagagtccccaaaatattaatgctcttccctttttctaccctcaaacttatagttgtatcttattttttaaaatgaattttcatggccgggcacgggggctacccgcctgtagttctcagcctccnaaganctgggacttacangcgccggccaccacncccggntaatttttttg

SEQ ID NO: 4895 - DNA, 326 bp, Homo sapiens
  misc_feature 48, 50, 98, 99, 100, 103, 107, 108, 111, 113, 114, 128, 129,130, 131, 132, 133, 149, 158, 159, 160, 165, 167, 178, 179,180, 181, 182, 183, 184, 185, 192, 193, 194, 195, 197, 198,199, 201, 202, 208, 215, 233, 234, 235, 236, 237: n = A,T,C or G
  misc_feature 254, 255, 256, 257, 259, 261, 269, 271, 273, 278, 287, 293,305, 306, 307, 308, 309, 310, 311, 312, 323: n = A,T,C or G
cccttagcggccgcccgggcaggtactttttttttttttttttttttnantttttttttttttttttttttttttttttttttttttttttttttttnnnggncccnnaanannaaaaaaaaaaaaannnnnnaaaaaaaaaaaaaaanccccccccnnnggggntnaaaaaaaaaannnnnnnnggggggnnnnannnanngggggnaaaaaancccccaaaaaaaaaaaannnnnttttttttttggggggnnnntntntaaaaaanantnccccnggggggggnaaaaanaaaaaaaaaaannnnnnnnttttttttttnccc

SEQ ID NO: 4896 - DNA, 799 bp, Homo sapiens
  misc_feature 214, 342, 368, 400, 412, 470, 491, 495, 506, 530, 546, 571,577, 580, 605, 624, 638, 640, 652, 653, 662, 663, 684, 710,716, 721, 754, 757, 758, 763, 767, 773, 787: n = A,T,C or G
ccctttcgagcggccgcccgggcaggtacactgcaggcaaatgtggtttggtgcctgtcctggcagagaactacaaatcccaacaaagcagtgaccctgatcctaactgtgtggatagacctgtggaaggatatcttgctgtggcggtggttaggagatcagacactagccttacctggaactctgtgaaaggcaagaagtcctgccacaccgncgtggacaggactgcaggctggaatatccccatgggcctgctcttcaaccagacgggctcctgcaaatttgatgaatatttcaagtcaaagctgtgcccctgggtctgacccgagatctaatctctgnctcttgtgtattggccgacgaagcanggtgagaataagtgcgttcccaacagcaaccnagagatactacngctacactgggggcttttccggtgcctggcttaaaaatctggagacgtttgtattttntgaaagatttcacttgtcttncaanaacacttgatngaaaataacaatgaaggcattggnctaaaggatttgaaancttggcagacttttgcgctgctttnccctcnatngcaaaacggaaaccctttgactgangcttagaaacctggcattnttgccattggcccncnaattaatgcccnnggtgtcttnnggatgggataaaggtggaacncccttaaaaaaggtgcttgtttcaancaacanggctnaatttgggaaaaaatggatcttacttccccganaannttttnttantttcantttttaaaccaaanaaaaaaaaaaaa

SEQ ID NO: 4897 - DNA, 626 bp, Homo sapiens
  misc_feature 23, 25, 420, 455, 456, 485, 486, 497, 505, 506, 512, 514,534, 536, 543, 545, 548, 553, 558, 565, 568, 582, 589, 600,603, 604, 605, 606, 607, 609, 610, 614, 615, 616: n = A,T,C or G
cccttagcgtggtcgcggcccgntntaccagaatcggcagaagaatcagccccataaattttaaagacttcctcaatcgggatactgttcattaagattccagcataagatgataaaatcatagcttctcgttctctacgatttggatatatgggtctgccatggagtggtattttcagttcctcccactccagccaagttaagtcttctgagggatccagccattgcaaagcaacactgatggccaaatcataagtgtgccatatcatctagaaaggtgagttgccgtcttccttttgggtcaaatttcaattttccccgaagctgatgccaatataatctcccaagagctttttcatttccttctttatgagccttctttccatgttaaagggcttagccagcttgagcaaggtattntgcagtttacactaacacttagacccagctttttnntccccgcggtacctgccccgggcgggccnnttcgaaaaggncaaaattnnaccccncnttgggggcaggttcttaggngnaatccangnttnggtancaaantttgggnaanaaaggggccaatgntgggttnccggggggaanatnnnnnannattnnnaaaaaatttc

SEQ ID NO: 4898 - DNA, 145 bp, Homo sapiens
  misc_feature 7, 11, 13, 15, 28, 30, 84, 85, 87, 89, 91, 96, 100, 130: n = A,T,C or G
cccttancgtngncncggccgacgtacncnaaatacttcatactaaactttctagagaattaaactttaatgatgggctcaaannanananaaccngccnactaatttgttcctgcccgggcggccgctnaaaagggcgaattcc

SEQ ID NO: 4899 - DNA, 351 bp, Homo sapiens
  misc_feature 65, 141, 142, 143, 145, 146, 147, 158, 177, 178, 181, 182,184, 185, 213, 215, 216, 217, 218, 221, 222, 233, 234, 235,237, 239, 250, 251, 252, 257, 258, 259, 273, 274, 282, 283,284, 290, 291, 292, 297, 298, 299, 300, 304, 305, 306: n = A,T,C or G
  misc_feature 307, 318, 319, 320, 321, 326, 332, 333, 334, 335, 336, 338: n = A,T,C or G
cccttacgtggcgcggccgaggtcttttttttttttttttttttttttttttttttttttttttnttttttttttttttttttttttttttttttttttttttttttttttttttttttttttttaaaaaaaaaaaaaaannncnnnttttttttttnttccccccccccccccccnnttnntnnaaaaaaaaaaaaaaaaaaaaaacccccncnnnnccnnggggggggggnnntntnttttggggggnnnaaaannncccccccccccccnnaaaaaaannngggggnnnccccnnnnggannnnaaaaaaaaaannnnggggntttttnnnnnanccccccccccccc

SEQ ID NO: 4900 - DNA, 406 bp, Homo sapiens
  misc_feature 183, 185, 190, 191, 194, 196, 217, 224, 226, 227, 228, 233,234, 235, 240, 242, 243, 254, 256, 258, 266, 268, 269, 279,284, 289, 293, 294, 295, 296, 297, 299, 301, 304, 305, 311,317, 324, 325, 327, 328, 339, 343, 344, 358, 361, 362: n = A,T,C or G
  misc_feature 363, 364, 366, 369, 377, 379, 380, 381, 382, 383, 384, 386,387, 388, 389, 390, 391, 392, 394, 395, 396, 397: n = A,T,C or G
ccctttcgagcggccgcccgggcaggtactttttttttttttttttttttttttttttttttttttttttttttttttttttttttttttttttttttttttttttttttttttttttttttttttttttttttttttttttttttttttttttttttttttttttttttttttttttttttnanaaatnnatntnataaaaaattcctaccatttnacttaanannnataannnaaaanannaaaagaaaaanananaggggggngnnaaaaaaaaanaaatnaatantttnnnnnananaannaaaatnacctanataaaanngnntaaaatgcaantggnnaaataccaaaaacnctnnnngnaanaaaagtanannnnnntnnnnnnngnnnnaaaaaaaaa

SEQ ID NO: 4901 - DNA, 183 bp, Homo sapiens
  misc_feature 4: n = A,T,C or G
tcgncggccgccagtgtgaggctatctgcagaattcgcccttacgtggtcgcggccgaggtacctcaaatacttctgttatgtatctgtgattttatttcttctttgggtatagggttgaggggaaataagttttgagtgagaaataaacgttttagctaaaaaaaaaaaaaaaaaaaaaaaa

SEQ ID NO: 4902 - DNA, 484 bp, Homo sapiens
  misc_feature 204, 247, 326, 355, 360, 417, 462, 472: n = A,T,C or G
ccctttcgagcggccgcccgggcaggtgcctgtctgtgactgttgctatgatcaggacgtttggcactagaagagcagttttggttttctttattagggttaccgagaaagctggaatagagatctttgtgtcttttccaaagactttggaatgaaaacaaatccagttttctgatacaaagagctttccttggtatagtattnctttctgtagagcacaggtaaagctttgcttcagtggttcctncgttgggacactaaggaaacaacttgtgaaagtgcatattggccttgtacctcggccgcgaccacgctaagggcgaatnccagcacactggccgggccgttactagtnggatnccgtagctcggtaccaaagcttgggcgtaatcattggtcataagcttgtttcctgtngggaaatttgttatcccgctcacaattcccacacaacaataccgnagcccggaangcattaaaagtg

SEQ ID NO: 4903 - DNA, 401 bp, Homo sapiens
ccctttcgagcggcccgcccgggcaggtacagtggtgcgatcttgactgactgcaacctgcaacctctgcctccggactcaagcgattctcttgccttagcctcctgagtagctgggattacaggtgccgtgctaccacgcctggctaatttttgtatttttagtgagaccaggtttcaccatgttggccaggctggtctcgaactcctgacctcaagtgatccacctgcctcggcctcccaaagtgctgggattacaggcgcgagccactgcacacaggcaaaagccccttgcttctcatgggtctgctgtcgtttccttcagccactttggttttcagggagggttcaggaaaccatcctccactgtgcttctttctggcctttgctacccctgtttcc

SEQ ID NO: 4904 - DNA, 349 bp, Homo sapiens
  misc_feature 101, 103, 112, 115, 134, 142, 153, 156, 170, 174, 182, 186,197, 203, 206, 207, 208, 211, 213, 215, 218, 227, 233, 249,250, 253, 256, 257, 266, 275, 293, 300, 311, 318, 322, 323,332, 333, 337, 341: n = A,T,C or G
cccttcggccgcccgggcaggtactttttttttttttttttgttttttttgtttttttttttttttttttttttttttttttttttttttttttttttaancnaaataaatnaanaattttatttaattataanggaccacnttaaatattanttnaaaaaattcaggcntatntttaaaanaggnggcctgataanttccangannntantngnaanacccttttnccaaantacaataagtccattnncgnatnntaaaaaaantacccccantccacttgggattttttnaaaagtnttaagttttcnaaaaaancatnnaaaagggtnnaaanttantttttttt

SEQ ID NO: 4905 - DNA, 375 bp, Homo sapiens
cccttagcgtggtcgcggccgaggtactactcaagtgaaaacatcaataataagaaagcaaaaaagcttcttcctgatatgaagaaagtttgggtggtctggatagaaaataaaaccagccacacattctcttaagccaaagtccaaagcagaacaaggacctctcttcaattctctgaaggctgagagaagtgaagaaactgcagaagaaaagttggaaaccagtagaggctggttcataagcattaagatagaagccttcttcatatgaaaaactacaagatgaagcagcaagagctaatgtagaagctgcggcaagttatgcagaagatcaggttaagatcatttaaagaaggaggctacactaaacaagag

SEQ ID NO: 4906 - DNA, 163 bp, Homo sapiens
cccttagcgtggtcgcggccgaggtacgcgggttacaaggacttactggaaaattccatgctgtgcgctggcatccccgactccaagaaaaacgcctgcaatggtgactcaggggggaccgttggtgtgcagaggtacctgcccgggcggccgctcgaaaggg

SEQ ID NO: 4907 - DNA, 611 bp, Homo sapiens
cttagggagtcgactcaagctgccgcggtttcctgcttcaacagtgcttgaacggaacccggtgctcgacccctccgacccccgccggccgctttgagcctgagccctttgcaacttcgtcgctccgccgctccagcgtcgcctccgcgcctcgcccagccgccatcatgaccaccgcgtctccctcgcaagtgcgccagaactaccaccaggactcggaggctgccatcaaccgccagatcaacctggagttgtatgcctcctacgtctatctgtccatgtcttgttattttgaccgggatgatgtggccctgaagaactttgccaaatactttctccatcaatctcatgaagagagggaacatgctgagaaactgatgaagctgcagaaccagcgaggtggacgaatcttcctgcaggatataaagaaacctgaccgtgatgactgggagagcgggctgaatgcaatggagtgtgcactgcacttggaaaagagtgtgaatcagtcactactggaacttcacaaactggctactgacaaagaatgatccccacttatgtgacttcattgagacgcattactgaatgagcaggtgaaatccattaaagaa

SEQ ID NO: 4908 - DNA, 471 bp, Homo sapiens
cccttagcgtggtcgcggccgaggtaccctaacctgacaggaattaactactgtttttttgtggggcagaaagcaaaacctggtgttgtgacttttatcctaatggttcttaggcaaggttagtgagaagaaacacaaacccagatgcatacattgtgcattattttgtagacaagctactttttcttctgtccctttaacaaatttgcagcaattaccctccctttggggtctagagtgaaagctaatttgtgggtagatgagattgcagaagaatggatgtccatggctgtgaacactgcacactgcacatctatctccagtgctcacactgtgcagctaccactccctggctgcgtgccatgctgtcgggttgcagatttgcacacataaattcctcaggaagagtttgcatgagcatcacctcgcaatattctgtacctgcccgggcggccgctcgaaagggcgaat

SEQ ID NO: 4909 - DNA, 316 bp, Homo sapiens
  misc_feature 120, 126, 130, 132, 133, 134, 135, 137, 145, 147, 148, 149,150, 151, 152, 154, 155, 156, 163, 166, 168, 180, 184, 190,193, 201, 211, 212, 214, 217, 218, 223, 228, 230, 235, 237,239, 246, 247, 268, 283, 300: n = A,T,C or G
cccttagcgtggtcgcggccgaggaacttttttttttttttttttttttttttctttttttttttttttttttttttttttttttttttttttttttttttttttttttttttttttttntttttnattntnnnntntaaaaagntnnnnnnannnaaaaagnggntnaaaaaaacaccngggncccttnacnacatgtgncccccaaaannanggnnaattnagaantncgtcnantngaattgnnaaaaataaataccaatggctnttttatcattgtccnttctttcccttttaaantttcactttgaaaatt

SEQ ID NO: 4910 - DNA, 296 bp, Homo sapiens
cccttagcggccgcccgggcaggtacagattctaggtggccttatttacataatagattggtggtgtttacatttcctaatgagtttccatttgacgaaaacggaaatccagtgtatgagcttaatgataagaactggaaatcctttttctcaaggacgtggtccagattaagtttgcacgaggacgaggacaaggaaaacgatggagactctttgccaacgtttaaatgtgtgtcaggacaaaatactaacacattatgaaaatgatagtacctcggccgcgaccacgctaaggg

SEQ ID NO: 4911 - DNA, 275 bp, Homo sapiens
  misc_feature 199: n = A,T,C or G
ccctttcgagcggccgcccgggcaggtacctaagagactatggaagaatttcagggtagctgggatgtcttttacataatacagcatctagaaaggaggaaaaagagaaatgagctgcttctgtatgttgaagtctttattgcttgggctagatactcctagaaagtttgattttctagttgagtgaattttacccaanaaaacacttaagaaatttaaagattaaagacgttgcatgaagacatagaacaataatgtgagaaaatatttgggga

SEQ ID NO: 4912 - DNA, 901 bp, Homo sapiens
  misc_feature 584, 630, 633, 734, 740, 758, 762, 795, 816, 822, 825, 832,839, 849, 853, 855, 858, 860, 871, 881, 899: n = A,T,C or G
ggagtcgaccccgcgtccggcggctgagcagggatttaacccgccaccatgtcgagcaaaagagcgaagaccaagaccaccaagaagcgccctcagcgcgcaacgtccaacgtgttcgccatgtttgaccagtcccagatccaggagttcaaagaggccttcaacatgatcgaccagaaccgggacggcttcatcgacaaggaggacctgcacgatatgctggcttcaatgggaaaaaatccaactgatgaatacctggacgccatgatgaatgaggccccgggccccatcaatttcaccatgttcctcaccatgtttggagaaaagctgaacggcaccgaccctgaggacgtcatcagaaatgccttcgcttgcttcgatgaggaagcaatcggcaccatccaggaggattacctgagggagctgctcaccaccatgggtgaccgcttcacagatgaggaagtggatgagctgtacagggaggcccccattcgacaaaaaggggaatttcaacttacatcgagtttcacgcgcatccttaagcacggggcgaaagacaaagatgactgaagagctgtggcttncaagccaaatgtccctgttgccattggggtattttctgagattttnctnctggagccggtcgcattgcccttgctttttctggcttttgctttccttggtttggatttattctcaagcccccttttggggccccgttgtacctttttatnattcanacttgggaaacggggacntttnttgttcatttggttcgatgagaacgttaagggnaattttactttacagacaggntttgtnccnttgtaanaacctgnagcccccagnagtnanttntnttttttttagnaaaaaagttntccccttcaatttttttntt

SEQ ID NO: 4913 - DNA, 532 bp, Homo sapiens
  misc_feature 363, 448, 466, 480, 502, 508, 514: n = A,T,C or G
cccttagcgtggtcgcggccgaggtactctctgctgaggctgtaagttttgttttgtgagaaataggtaaagacattagcatttaatctactggaataagctggttgctgtggcttatacctgtagtcccagatacttgggaggctgaggcaggagaatcgcttgagaccagcctgggcaatatagtgagacctcacctctaaaaaagttttttataaatttacttgtctaaagtggggaaagggaaattattctgttttcttattcttgcttcaagactatgacagatttgaaagagaattctaaagcagatttagaagaacctgcttctcttcttatctcctaatccctaaattgtaattnagctcttatctgtattggtggtttggtttgggtaaaagggatgatttttacattgagtttttaaaggtagaataaagaaaaagcntctaaaaacttgcattgngcctagggatctgncctatatctttgccctgggggntccgtnggtggnggtaattggttggtcccc

SEQ ID NO: 4914 - DNA, 536 bp, Homo sapiens
  misc_feature 111, 158, 264, 321, 351, 363, 383, 386, 400, 459, 462, 467,472, 475, 483, 492, 511, 525: n = A,T,C or G
cccttagcgtggtcgcggccgaggtacaaggtgtcctgagaaagttaagccaatttaacaactatttccaacatctctctacctgcttttctttaagtatagggtcatgtntttcgtgaagcctatgtgttttataaacatgtattagtatttgcctngtatagggcttactatgggctagaaactttctagaaagctttagagatgtgaactcatctaatatatgattattaaccccccattttacagataagaaaatgggangcaaagacagattggataacttgctgaacttggtggaggagaaaggcttgaacttancagcccaacttgagtctttctatgtgctgngctgtgctgtcnttccgaagcgggtgcactanctntttaaccccaaaangaggtgtgcaaacttaaactgggggtgtgggctcatgccttttattctaactgcccaanaanctgangcaangangagggcangagtttgangaccaacctgggcgaaatnagtgagaagaccgnttttttttttt

SEQ ID NO: 4915 - DNA, 296 bp, Homo sapiens
  misc_feature 287: n = A,T,C or G
ccctttcgagcggcccccgggcaggtactgccaaccagagatgctcacccaagatttggtgtccagggtttttactggggtctctcgtctaggtatgcagctcccacatgagtgacactagctactctccctttaccatcccagaagccaaaccaatactgcgtggcccaagacctcagcataaaaaaacactcttatcaggtggcatattccaagggcttagaggttctctctcaggagctggtcaagggcctgtctttggcatgtgcagggtttgagcaactcangcctgctgt

SEQ ID NO: 4916 - DNA, 153 bp, Homo sapiens
  misc_feature 26, 41, 63, 116, 130: n = A,T,C or G
tcaacaggaagtaattgcctgagctntttaaagcaactganttgaatgtcaggaaactggagncctaatccaggcccttttttgactgactgagttgggataagactttttacctntaggatcatcaggngcaaaatgaaaaggttgaaaaaa

SEQ ID NO: 4917 - DNA, 491 bp, Homo sapiens
  misc_feature 33, 65, 154, 297, 350, 357, 380, 386, 428, 436, 445, 459,468, 472, 478: n = A,T,C or G
ccctttcgagcggccgcccgggcaggtactttnttttttttttttttttttttcttattattatnattttttgccagtccctatggctacatcgcacctgctaccccccaaatacatgctaatggcagtatcttaaagggacaggaatcaccanaaaagaaatgcacatagttggatttcttatgcaactcattgattgcatatgcctgtagtaatcttttacaacaagaacttgtcaggttaaaattataaatgacttcaaagctgctgctatccatttcatttggctattagggngggcagggatgtctaactcaggaaagataaaatgacaaaatgtcccaggaatnaataggnctttattttgccttggattttanctgaanaaaaatccccctttaactttgactgcttggggccaaaaaccncttctggnttattctantctttaaggaccantttttagangagnaaattnaaaccccaaaaaa

SEQ ID NO: 4918 - DNA, 304 bp, Homo sapiens
  misc_feature 119, 192: n = A,T,C or G
ccctttggccgcccgggcaggtacaggccaacatgatcaaaggcatgctggaaacaagcgtattaaagatcagcttggatcaagctttcatttgcatctgcctgaaccgcacatatttnagtctgaagggaaaattggtaatcaagttgagaagtctatcaacaatgcttcctcagtttcaacatcccaaanaatttgttgtaggcccaaaacccatatttctaataagtatggaaataattccctccattcttcattactcacacaaaaatgggaagtacctcggccgcgaccacgctaaggg

SEQ ID NO: 4919 - DNA, 579 bp, Homo sapiens
  misc_feature 3: n = A,T,C or G
atncttagggagtcgacccacgcgtccgggttgatgaactggactctgttgctgaaaggagctggcacaatgaagtttctcctcgtgctggtgctgcttgtgtccttacaggtatctgcctgtggggctgctcccatgaacgagagcgaatttgctgaatggtacttgtcaagattttttgactatcaaggggacagaattccaatgacaaaaacaaaaaccaatagaaacctcctagaagaaaaactccaggaaatgcagcagttctttgggctagaagtaactgggcaactggacacctcaactctgaaaataatgcacacgtctcgatgtggagtgcctgatgtacagcatcttagagcagtgccccagaggtcaagatggatgaagcggtatctcacttacaggatctataattacactccagacatgaagcgtgcggatgtagactacatatttcagaaagcttttcaagtctggagcgatgtcactcctctaagattcagaaagattcataaagatcatggagacttctacgatttttgatggcaaaggtggtaccttagcccatgcttttta

SEQ ID NO: 4920 - DNA, 285 bp, Homo sapiens
  misc_feature 179, 205: n = A,T,C or G
cccttagcgtggtcgcggccgaggtaccaaagacacttattattctaacatgcatcaagtaaagtaaaacaaggagagaggctgcggtgtgtgggtaggggatgcaggagaagctgtgtaaggtagtggacagctgtgtggctctggggatgagacagactagaccaggcaagtgcttnaggcaggtgccccgtcgggaggcctntggagttactcatcttgcagcctcgggctactcaccatcagggagccccgcgtacctgcccgggcggccgctcgaaaggg

SEQ ID NO: 4921 - DNA, 600 bp, Homo sapiens
cccttagcgtggtcgcggccgaggtaccaaatgaaaggggcaccatttcaagagcactaggactacattaaacttaaatatattcccacattcttaaaaatgtaactcaaaaccaaatctagtcttaaagaagctccaataactaaaactacattaacaggcacgatgaacagtgtaaacactgttaatgggcaccaagtttaacagggcagacaatatttgcttctgcattcacacttattcaattacattttttaaaaaaatgatgctgcttaaactattaatgttttaccaaaaaaataataattttaataaatacagcaaatgctagaaatctggctaggttatcatgcaaggtataaccaagacaaactcaaatttataataaaggcaacttgcattcaaaatgaactctacccttatattttattaaaagggcaaacatcatgaattaacccagccgcttacttgaattacaaaagtaacatgattcaatatgaaaataagaaactgtctacaaatctctgacagtaataaattgcaatatacaatgcatacaggagtcatacagagcaacaaactctcgtacctgcccgggcg

SEQ ID NO: 4922 - DNA, 305 bp, Homo sapiens
  misc_feature 8, 43, 121, 133, 134, 135, 141, 147, 148, 159, 167, 169,187, 188, 195, 196, 197, 198, 199, 200, 203, 204, 209, 216,219, 227, 232, 247, 248, 249, 251, 253, 257, 258, 263, 264,277, 282, 284, 285, 293, 304: n = A,T,C or G
ccctttcnagcggccgcccgggcaggtactttgggaggcatangctggcggatcgcttgagttcataagttggggaacagcgtgggcaacatggcggaaatcccgtctctacaaaaaaaanaaaaaaaaaaannnaaattncccccnngggggcccccncttttttngncccaattttttggggcanngagggannnnnnttnnctaancccgggngtngctggggnagtanacataaaaactcccnnnancncccnngttgnntaaaaataggaanatttngnnctatattnaaaatacatana

SEQ ID NO: 4923 - DNA, 125 bp, Homo sapiens
  misc_feature 103, 125: n = A,T,C or G
cccttagcgtggtcgcggccgaggtacgcgggtgatgggaagggtcttgtgttttaatgccaataaatgtgccagctgggcaaaaaaaaaaaaaaaaaaagtncctgcccgggcggccaagggcn

SEQ ID NO: 4924 - DNA, 401 bp, Homo sapiens
cccttagcgtggtcgcggccgaggtactatgggtgtagtgttactattacagttaatccgtcctttgtgtgagttgttaaatgcagtgaggattggagcactgtccactgagtctctgtgcaacaacttagtggtgtggcaggggtttccggtgtctggctctgatcttggtcgctggatagtcgtctgtgtttcttcggtgcccaaggcgacggctttggtatgggtcgcggcggagtggttggccaagtgctgcctaataatttcaggagaggatacttcgttgctgctgcaggatcagccatggtagattatggtttctgagaacagatggggcacacaattcctagtgtgcccattaacaggtcttccaaagtacctgcccgggcggccgctaaggg

SEQ ID NO: 4925 - DNA, 764 bp, Homo sapiens
  misc_feature 96, 98, 101, 118, 124, 129, 130, 137, 138, 146, 151, 152,154, 169, 172, 173, 177, 181, 182, 184, 191, 193, 198, 199,201, 209, 215, 219, 229, 231, 243, 254, 256, 258, 261, 264,267, 269, 272, 273, 277, 288, 295, 306, 312, 322, 323: n = A,T,C or G
  misc_feature 325, 326, 328, 354, 356, 357, 359, 366, 369, 379, 402, 403,427, 428, 432, 435, 441, 443, 452, 453, 455, 456, 460, 465,466, 467, 472, 474, 486, 487, 488, 495, 496, 500, 501, 503,506, 512, 513, 521, 524, 536, 550, 559, 560, 561, 565: n = A,T,C or G
  misc_feature 566, 568, 595, 596, 598, 599, 602, 603, 604, 606, 621, 627,631, 634, 635, 638, 641, 642, 643, 647, 648, 662, 665, 667,668, 684, 688, 691, 694, 695, 700, 702, 716, 717, 718, 734,735, 736, 746: n = A,T,C or G
cccttcgagcggccgcccgggcaggtacttttttttttttttttttttttttttttttaatttttttttttttttttttttttttttttttttttntnttngtttttttttttttttnttttanttttnntttatanntttttatntttgnnanaaaaaaatttttttntgnnaaangggnngnttagaantntttcnncncatttttnatttanggangagaaagggngnttttttaaaaanaattagagttntntnaanggnagnantgnntttncccttgtaaanccctaanaattttttggngggggnggggacgttnntnncnataaaaaaaaagctgtatatttggangnngnttaaaanaancccccccaanacaataaaaaaaattggaccgcnncattaaaaataaaaatacctcccnncccnccnaaaatncntttaaaagnngnngggngtatnnntaaancncccccccttttnnnggttatnnacannanctnttttcnnaaaaaaanatnttttccccctanataacaaatttggngaaaacaannntgannantttttttttttttttaaaaaagaattnngnntgnnngngcccaaaaaaaaaanaagttngggntgnnctnccnnnttanntaaaattttttggnggngnnctttttccaaaaaaantctnggnaannaaccncnaaaaaaaaaatctnnnccattccccccagatnnntttgggaaancccctttgggcaaaaaaa

SEQ ID NO: 4926 - DNA, 209 bp, Homo sapiens
  misc_feature 8, 101, 117, 119, 140, 145, 166, 188, 197, 200: n = A,T,C or G
cgcggccnaggtaccgtaaaagaagaaggaatgcctaaagaaacagacatagaaatcatcccagaaatccctggaaactctagagccactgtcccttccanatgtgctgaggatctngncagttctggaggacaccacanaccanctctctattctgaactacatnatgcccgttcagtacctgcccnggcggccgntcnaaagggcga

SEQ ID NO: 4927 - DNA, 411 bp, Homo sapiens
ccctttcgagcggccgcccgggcaggtacgcgggggttatattcttaagcctctctttattgagaacccctagaattgcaggataaacttgatcgaagtaaaatccaaatcttacactaagttctgtgagatttaagagcaataatcaacagttctaagcctaataaagagagctcttaatcagctcagtggtggttaaaaccagctatcttttaaagaagagaaaaaacaaaacacagcaatgccctgtctcttcagaaaattgttttaaaaagttagccaggcatagttagtggcccacgcctgtagtccgagctgtttgggaggttgaggtgggaagattggttgagcccaagattttgaggctgcagtaagccataattggtaccttggccgcgaccacgctaaggg

SEQ ID NO: 4928 - DNA, 348 bp, Homo sapiens
  misc_feature 92, 93, 100, 101, 106, 112, 113, 114, 115, 123, 124, 125,126, 127, 128, 129, 132, 140, 146, 147, 151, 152, 169, 176,177, 178, 186, 187, 190, 195, 203, 204, 205, 206, 209, 210,211, 212, 215, 216, 217, 220, 221, 222, 223, 225, 228: n = A,T,C or G
  misc_feature 231, 246, 248, 249, 261, 262, 269, 287, 289, 291, 300, 301,309, 310, 311, 312, 313, 314, 316, 317, 318, 325, 331, 332,333, 335: n = A,T,C or G
cccttagcgtggtcgcggccgaggtacttttttttttttttttttttttgggtttttttttttttttttttttttttttttttttttttttnnaaaaaannccccntttttnnnnaaaaaaannnnnnnccnaaaaaaanaaaaanntttnnccaaaaaaaaaaaaaanggggggnnnaaaaaaannatnggggnaaaaaaannnnttnnnnttnnnggnnnngntcnggnaaaaaaaaaaaaaantnncccccccccggnnaaaattngaaaaaaaaccccccccnananggggggggnnaaaaaaannnnnnannnccccccngggggnnngnaaaaaaaaaaaaa

SEQ ID NO: 4929 - DNA, 463 bp, Homo sapiens
  misc_feature 238, 305, 362: n = A,T,C or G
cccttagcgtggtcgcggccgaggtaccagaaatggctgtgttgacatggagcacttcaaagtaattaagacccatcagatcgaggatgaaagggaaagacgggagaagaaattggacttttttttttttttttttttttgggaggacaatggtatatttatttacaatccgaccaaaaaaaggcatacaggcatttttttaattaaaaataataatgataatgatttaaaaagtcanaaaaattgatgatctttgaaccctttatgaggtgtccgtttcccattccccctaaaaagagaatctnttagggaaaaaaaaaaatccaagatttgaatgaacaaaagactccaatatcgctctntactgcttgggttcccttttctccaacttgatgcttggtggatgccgcttggcgctgcagtcactgtgaggcaagattgagaaattcctggtttgatgggt

SEQ ID NO: 4930 - DNA, 484 bp, Homo sapiens
  misc_feature 380, 414: n = A,T,C or G
ccctttcgagcggccgcccgggcaggtactttttttttttttttgagacagtcttgctctgttgcccaggctggagtgcaatggcatgatcttggctcactgcaacctccgcctcctgggttcaagcgattctcctgcctcagcctcccgagtagcggggattacaggtgctgccaccacgcccggctaatttttgtatttttagtagagacgggttttcaccgtgttggccaggctgatctcaaactcctgaccttgtgatctgcccacctcagcctcctgaagtgctgggattacaggcatgagcctggttgagacatggttatttcatcgcaatatcttggggaacccatgaatgctctgaaatgcctttggtttanaaatggatgaaggagaggccatggaaatatttanaccttttggagagatcgaaaggacaggtgatttatctccaagttcacctcgaggcatgacttgggctgtc

SEQ ID NO: 4931 - DNA, 289 bp, Homo sapiens
  misc_feature 241, 243, 245, 247, 248, 252, 254, 255, 257, 259, 260, 261,265, 275: n = A,T,C or G
ccctttcgagcggccgcccgggcaggtacaatttatttcagaaaaaactacagacatgatactgcttttcctacactaaaaatacttcagtgtatatttcccaaaaataggagtaatcccttatgtaaccacagtgtaattatcaaaattcacaaatagtgttacaaaactattatctgatctatggaccttattcagattttaccacttgtcccaacaatgcccttctcagtaaataaanananannatanannanannnggtncctcggccgngaccacgctaaggg

SEQ ID NO: 4932 - DNA, 135 bp, Homo sapiens
ccctttcgagcggccgcccgggcaggtacttgcagttactgcagatgctcccaggaaagccaccatcattagtcttcgccggatctggatgggctgtggtcctccatagtacctcggccgcgaccacgctaaggg

SEQ ID NO: 4933 - DNA, 507 bp, Homo sapiens
  misc_feature 223, 404, 460: n = A,T,C or G
ccttacgtggtccggccgaggtcagtggacagtctcagctcactgcaacttccgtcttccaggctcaagtgatcctccctcctcagcctcctgagtagctggacctacaggtgcttgtcattacacccagcaaattttttgtatttttaatagagatgaagtttcacctatgttgccgaggctggtcttgaacccctgagctcaagcgatccgccagccttgncctcctaaagtgctgggattacaagtgtgaactcccgtgcctggcctgatgatagtttctgctgacttgtagcattaatcattacagcaggtttctgctttgcatactggatatatttgctaattaaactcagcaaaatacatgttgagagggatctcattttccacgtgtaatatagcanatcattacacattccttttaacactgtgttcacttgccttttggaataacactcantctttggtcttatcctacttcactggctgctccttttccgtcttttt

SEQ ID NO: 4934 - DNA, 496 bp, Homo sapiens
  misc_feature 31, 83, 392, 450, 464, 467: n = A,T,C or G
cccttgagcggccgcccgggcaggtactttntttttttttttttttttttttttttaactactgatttctaatatacttctgntgtggtcaaagaaccatgttatatgtcagggcctgcggaaggtttatcacgtgcttctcaggaaaagatcaggctgaaaaatcccgccgctgagaaaaaacaatataaataaaatgataagtctacaggccagctaaaagataattaggaaataacaacaaaaattaatcttaatactaaaatatttatgaataaattgatgtcttggatttccttcaaaataatccaagattatagggagtagataagggaagagatcaaacaagactgggccagggaatgaattgaagctagatgacagtcatgggnggttcattaccactattttacttttttaaacatttaaaatttttccataataaatggnttttaaaaaatgcnttnttacacttcacttcgtgaaaccctgaaaa

SEQ ID NO: 4935 - DNA, 550 bp, Homo sapiens
  misc_feature 52, 60, 84, 127, 171, 173, 175, 179, 229, 268, 307, 315,319, 333, 353, 365, 389, 408, 416, 421, 423, 426, 432, 436,456, 487, 489, 516, 525: n = A,T,C or G
cccttagcgtggtcgcggccgaggtacattgcaaaggctgttcatatacctnttcacctnagggtcactgttcatttatgcttntcattcctacccaaacttgcccccctcccccctgaagaaagtnaacaaacaaaaaactagttcaaagctttgtttcacagtgggcantntnttancgccaacaaaacaacctcaatttattgcttctatttaaaaatgttttaantttatttatttttaaaaaaaaataatattgttccatganacattcaaagttgccacttggcctttggggttcactggncctttttnttcnctgcaaaccttttncctgccaattggccctgaanaaaaaacttcanggtttttaaaaccaacaatggccncggtactggtgttttaacnttttaatnttttncnaantctgtnggtnaaaaaacctttttgggcccnccaattttcaatttcttcttttttaaaaatnancctttggggaaaattttaaaaaaaaanaaaaatttnccttaagaaaatgggtaattttaaa

SEQ ID NO: 4936 - DNA, 216 bp, Homo sapiens
cccttagcgtggtcgcggccgaggtacgcggggctttctagacaaggcagttgaggaggagggagcgcttgagggggactggcctggcgtgcactccgcacctcggggacattattgcgcgtggaacggctgcttttggaagactattgcccagaagaaaagatgtttggttttcacaagccaaagatgtacctgcccgggcggccgctcgaaggg

SEQ ID NO: 4937 - DNA, 512 bp, Homo sapiens
  misc_feature 185, 187, 189, 191, 194, 205, 206, 212, 217, 219, 221, 227,230, 232, 234, 238, 240, 243, 246, 248, 251, 260, 264, 265,267, 274, 276, 280, 286, 289, 292, 295, 297, 298, 320, 322,323, 347, 348, 351, 358, 360, 362, 363, 372, 381, 383: n = A,T,C or G
  misc_feature 388, 397, 403, 405, 410, 411, 413, 416, 422, 430, 435, 460,464, 490, 497, 498, 509: n = A,T,C or G
ggtactttcatcctcaaagtgtctaactttagtttcatcagattaagagctttagtgcctgggaggctgaggcagaagaatcgcctgaacctgggaggcagagattgaagcgagtcgagatcgcgcctctgcactctagcctgggcgacagagcgagactccgtctcaaaaaaaaaaaaaaggananananagnggggatttttnntttttnccccngncnaaattnaantncngggncnaanggnanccnccaagtacngggnncncaaaaantntttnggcccnggnttnatntnntaggccttaaaaaaaaaaaaantnnccccgggggggggggggatccctnnaancccactncntnngggggttgnggcaaaaantnttttnaccccgggnggcaangnttgcnntnganctaaantaaccccnttgcnctccacccgggggcaaaaaaaaacncccnccccaaaaaaaaaaaaaaaaaaaaanttttttnnccggggggggnttt

SEQ ID NO: 4938 - DNA, 461 bp, Homo sapiens
cccttagcgtggtcgcggccgaggtactaagtctatcgccatgctgtgtcacgtgggcaggtcttcttggcattcatcttgaacatgacccaaatcctggctccatcttccctcttacttttcctttgccccatttttcttccttattttttatgtatgtttaccttgccctgtaggcgcatttgtaagctggctcaaatccttttgggaacaaggtgggttataaatgcacacgttcctacacaggatgttgttagtcatttcataaggtctcttgtggaggagattagccaatagcttcttttgtaaccttaggcacaccctccttccataagggtcaagtgagagtatgggtctatagggtctgtgaggggcccagcaactttgacaggctgagtattcttctatttccaacccggttagagtcacacagtacctgcccgggcggccgctcgaaaggg

SEQ ID NO: 4939 - DNA, 673 bp, Homo sapiens
  misc_feature 51, 87, 88, 99, 100, 101, 102, 105, 113, 114, 115, 116, 117,118, 119, 120, 121, 125, 127, 128, 135, 136, 137, 152, 157,158, 159, 162, 163, 165, 166, 177, 184, 185, 205, 219, 221,222, 223, 228, 251, 252, 254, 265, 266, 280, 282: n = A,T,C or G
  misc_feature 283, 292, 294, 295, 297, 306, 307, 339, 340, 341, 344, 358,359, 361, 368, 369, 380, 388, 394, 400, 407, 408, 415, 416,417, 418, 419, 431, 439, 440, 450, 451, 452, 459, 460, 467,478, 480, 481, 498, 500, 501, 531, 532, 537, 543, 544: n = A,T,C or G
  misc_feature 547, 548, 552, 556, 558, 560, 573, 589, 604, 605, 606, 614,615, 616, 626, 628, 634, 641, 643, 645, 652, 653, 654, 659,661: n = A,T,C or G
cccttagcgtggtcgcggccgaggtactttttttttttttttttttttttnggttttttttttttttttttttttttttttttgggnnaaaaaaaaaannnnaantttttttnnnnnnnnnaaanannccccccnnnaaaaaaaaaaaaaanttttnnnaanngnnttttttttttnaaacccnntttttaaaaaaaaaaaaaancccccctttttaanannnaaaantttttaaaaaaaaaaaaaaaaanncnaaatttccccnntttttaaaaaaaantnntttttttanannanaaaaaaaannttttttttaaaaaaaaaattttttttttttcnnnganaaaaaaaaaaaaanncncccgggnnttttttaaaanaaaaaaantttttncccccnaaaaaannggggggnnnnntttttttttttnaaaaaaannattttttttnnnaaaaaannccccccnaaaaaaccccntnnaaaaaaaaatttttttnannggaaaaaaattttaaaaaaaaaaaaaaacnnttttntttttnncanngggngagnananaaaaaaaaatttngaaaaaaatttttttnttttttaaaaaaaannnaaaaaaannngggttttttntncctttnaaaaaanananaaaaaannnggggncncctttttttttt

SEQ ID NO: 4940 - DNA, 496 bp, Homo sapiens
ccctttgccgcccgggcaggtaccacaaggtgatagatggtaaacatctaaccgaaagctttagatagacttctttctagtaaaatataacataatgaatattatttcattcttactttgtttttgatctttcatacaagtaaaaaatgtaaaatactacacagatttataagtgtgcttagtaatcacttttatgaaagacacttgtgaggataaatataatacagtgcacagactatggctgtattaagtctgtctgatgctgctaacaaagatatacccgagactgggtaacttataaaggaaagaggtttaattgactcacagtttggcatggctagggaggcctcaggaaacttagaataatggcaaaaggcacctcatcacagggtggtgggagagagaatgagtgcccagtgaagggggaatccccatataaaaccattagatcttgtgagaactaactcactatcatgaaaacagtattgggggaact

SEQ ID NO: 4941 - DNA, 385 bp, Homo sapiens
ccctttcgagcggccgcccgggcaggtacttggagctaaattagtccccaaaccaaattcattattttcttcttaaaaatgtcttttacttccttgaatctgcttctgtatttcccatgtaaatttacaatgtattttgtccagttactgagataaatacctctacttttgcacctagacatttaggagccattgtttactaaattcatttgatgctgtcttctaaaagaactaaaatctagcatctcctcttcatacctcctgccactgtctttcattttccatacctggagttatgatagtagatttttaacgagcttttcccgtctctgtcttctacctagatccagtatacttctgcaggctggtatgtttttccccctaa

SEQ ID NO: 4942 - DNA, 497 bp, Homo sapiens
cccttagcgtggtcgcggccgaggtacagtggcacaatcttggctcactgcaacctctgcctcctgggttcaagcaattctcatgcctcagcctcccaagtagctcagattacaggcatgtgccaccacgtcttgctaatttttatatttttagtagagatggggttttgccatgttggccaggatggttttgaactcctggcctcaatgatccacccacctcagcctcccaaagttttgggattacaggcgtgagccaccgcacctggccacaaatcagaatttctattatcaaaggaagttttatattagttgagaaatgactgtttctgacatagtcaacctctctggtcaccatgaaaatgcatggtggcaaccatgaaaatgctccatttacatattgttcgtttgaggaaattgacaaccccagctaccattgttctggatctactgggttcatgccaaatgcccaacccgcgtaccttgccccgggcggg

SEQ ID NO: 4943 - DNA, 409 bp, Homo sapiens
  misc_feature 62, 79, 80, 81, 90, 95, 136, 146, 334, 367: n = A,T,C or G
cgccagtgtgatgggatatctgcagaattcgcccttagcgtggtcgcggcccgaggactttnttttttttttttttttnnnttttttttnaactnaaatttttgtaaattattttgtttcttccatggggatttanagggactatnttcaaaccagccataaataatatctggctattttgtaaccaattgagtaatttgttgcacaataagccacctcacatttttcagcaagaaatacattaaatttgaatagtaaagacgttacacagtgaattaggacacgattaaaatttgctttaaatatttctttgggggaagggacaccacacttntactcaatgaagaggaacatttttacatttcanaggtcttttattatttttcacacctattatgccatgaattca

SEQ ID NO: 4944 - DNA, 481 bp, Homo sapiens
ccctttcgagcggccgcccgggcaggtaccattccgggtcatccgcagaaattcctcatagatggcaactctgtctactctccgagccagtggcgagaagttacacagggagtccaccccggtgtggtgcctgttggggacagacctgaatgttgaaacttgacagtcagaaaaataactcttgatgctgctgtttcggaagagttggttgagcgcatcctcaatattccttttgttcctctggtaattggtggtgcctggctgggctttgtcctgggaatatggtaggttggtgatggtgaaattcaggtagaagtgctgggtgctggagctgcttgttggttgataaactgatgactccatttctgtcacatggatgtccaccaactggtaggtggagcccaaccaatggaatgaggcattcagggtcttatctagaaagacttgctccaccaggctggggtccaaattggaggaaaac

SEQ ID NO: 4945 - DNA, 315 bp, Homo sapiens
cccttagcgtggtcgcggccgaggtactctaaagaaaatcctgaaagtcaccaccttggtcttttataatcgggaccatgaggaagcccaagaaaaagggagaaaaggaacgagaaaaaggcagaggcactaatagctgccatacaggcatataaacctctcgatcccagggagcttctcattctatgaccgactgttatcagtgtgggagcactaaaagagagtctgcccccgaaatcagaagcagcccccacggccctgtccaatctgtaagggagactactggaagacaaactgcctccagaaacataccgt

SEQ ID NO: 4946 - DNA, 543 bp, Homo sapiens
  misc_feature 245, 296, 306, 330, 337, 376, 382, 447, 519, 523: n = A,T,C or G
cccttagcgtggtcgcggccgaggtacgcggggtgaatggccctttcctagaatcagtgtctttaactgcaaaccaggggtgtccaatcttttggcttccctggaccacattgaaagaagaagaattgtcttgggccacatataaaatacactaacactaacaatagctgatgagtttttgtttgtttgttgtttgtttgtttgatgtttgtttgcttgcttgtttttgagacggagttttgctnttgttgcccaggctatagtgcaatggtgcaatctcggctcaacgcaacctncgcctcccangttcaagcaattctccttgccttnagccttncgagtagtttgggattacaggcatgcgccaccatgcctnattttncatttttatttgagatggggtttctccatgttgatcaggctggtctcgaactcctgaccttcagngatccacctgcctttagcctccaaagtgctggggattgcaagcctgagccaccgtgccccggccttttttgnttgntttggtttaaacaaaaaaaa

SEQ ID NO: 4947 - DNA, 382 bp, Homo sapiens
  misc_feature 222: n = A,T,C or G
cccttcgagcggccgcccgggcaggtacttttaaaaacctattttcctcccagttagataaaaattccttgagtccaggaactatttgattgaatatgtatcatcataatcttgcttgatttttgacactcacttaaaacaatttgaatcgaacagaaaaaaagctctagtttcttttttaaaaattttaattctagtttctttttgaatctcacgtattgnctctcttctttcagctctggatgagggggatattgccttgttgaaaacttatggtcagagcacttactctaggcagatcaagcaagttgaagatgacattcagcaacttctcaagaaaattaatgagctcactggtattaaagaatctgacactggcctg

SEQ ID NO: 4948 - DNA, 331 bp, Homo sapiens
atggatatctgcagaattcgcccttagccgtggtcgccggccgaggtacaagtctacctacattatcgaagaggctagagaagtcccttttgcccaaccctcatatgtgagaaatcaagaaaagcaatgttcatgggatcctgacaaatctactatataaagtgagagcccttatttaaatttgagcaatttaagtttttccccagaatgtctcctttgttggttccacaaaatgtattttgtttttagtgtttaaagtcaacaaactggcattgcattttccttaacttacataaactcatcagaattacatgaatattcctactgctta

SEQ ID NO: 4949 - DNA, 452 bp, Homo sapiens
  misc_feature 28, 238, 312: n = A,T,C or G
cccttagcgtggtcgcggccgaggtacncggggctcttttaccaaggacccgccaacatgggccgcgttcgcaccaaaaccgtgaagaaggcggccgggtcatcgtagaaaagtacatcccggtgaatcaaagacggtggcagcaggagaattaaggtgacgcatccaaatgagcaagggagatgggggtggacaaaaaaaaccaatgaaatgttccttgaccccaaggtctcaacanaagtttgaagtccttcctgcgttaagagtctgcaatgtgtgtctacacacaccaagacatccagagtgtcacancctgtcttcactgggcaaaaagtccaagtcactaatttagtgcaaaggcaagttctggtttcttgtttcttaaaaacaaacaaacaaaaaattttcattccactggcctgttccttttctccaaaagaggaagaagaaac

SEQ ID NO: 4950 - DNA, 344 bp, Homo sapiens
ccctttcgagcggccgcccgggcaggtacgcgggcactcctcttctcagaactcgatcaagatgttattcacaggtaacagtgacctggtttgggttttctctttcctccctggctctacatgtctcatggtcaaaagaacttggaagcaaagacttagccatctaccatggccaagcaaaggaacctgcataacccccaataggcctgggcacagtggctcacgcctgtaatcgcagcactttgggagaccgaggcgggcagatcacgaggtcaggagatcaagaccatcctggctaacacagtgaaaccccatctgtacctcggccgcgaccacgctaaggg

SEQ ID NO: 4951 - DNA, 534 bp, Homo sapiens
cccttagcgtggtcgcggccgaggtactttatctgtaggtattaataaatacataggaaattgaattgaatttgtaactcaaagcagaggggtggagagaagtgcttcctagccaggaatacaggatttaggccatatctatttaaaagaagactaacaaacagactagaaacgataacactggtaaaaagatctctttacctgagctacaaaagtcatacattaggtagaggcttcaatagtgtagaaaatatactaatgtgttatctccttagagacagatttagaaccatgtcagttatgttgcagatgacagagaacagaaacctagtgaaatcaactcaagacaatgagggctaccataaggaggcccaaggagtagttggatggacctgaggaaggacaggagccagaggccccctgaggagctctgcgccgccccgcgtacagcccgttgtcaatggagagttcaaagacctaagccttgatgactttaaggggaaatatttggtgcttttcttctatcctttggat

SEQ ID NO: 4952 - DNA, 422 bp, Homo sapiens
  misc_feature 413: n = A,T,C or G
cccttagcgtggtcgcggccgaggtacgcgggttagcaaatacttttgcagaaaagcgccctgtaaaccttcactagagagtccctctgcaccacaacaacacttctgttccttcctctcatcaaacatgggtaattttgcaagagttttcatgggaaattattaggcatcaacattacagtcctgatttggtttcttctgacattttttccctaatcttaaaataactgtaaagggcacccatttttctttagttaataatagaagactgcattgacacggttaaattcccattaccctcagttctttagcaatggaatgaatgactgggatcatcgcttaatggagtgtctggacctcagtagagcttaaattgaaaaataaagtttatatttatatttttaaaaaaaccnaaaaaaaaa

SEQ ID NO: 4953 - DNA, 570 bp, Homo sapiens
  misc_feature 362, 383, 403, 406, 422, 450, 451, 459, 469, 471, 495, 503,515, 523, 524, 525, 532, 540, 551: n = A,T,C or G
cccttagcgtggtcgcggccgaggtacgatattgcatttagcattttaaaaaatatggttgtttttccttgagttgtgagagtttcattatatgttatggatacaagttactttattaaacgccactttttcacttggcacagttctccaaattaattgtattagtagcagagtcattattcgtattagatttgggtgtgaaagaaagaggacttaaggatgacttgaaagtttctggatggctggggatgttaattattggagaaaaggacttcaggaagaccaggtttgattaagagggtgaacagtgggtgttgctggtggtggtagtgattaggagtttagcttctacccccaagganagttttgggatgcttatttgnaataccaaagagggaagatntcnagggaaagtaccctgncccgggcggccgctcgaaagggcaaaanntccaaacncacctggccngnccggtttacctagtggaatcccgngctccggntcccccaagctnggccgttnnnaatggtncatagctntttccctgtgnccaaaatttggaaattcgg

SEQ ID NO: 4954 - DNA, 271 bp, Homo sapiens
  misc_feature 178, 196, 211, 214, 216, 248, 261: n = A,T,C or G
cccttagcgtggtcgcggccgaggtacttttttttttttttaacagatgtgatttcacttaaccctttgcgctttcccttagttgtcatttaacatacaatactggcttgtacttatcgctagaaagaagaaggcatgcttcaaataggaaggaattgtaataatgatctttggcctntactttgtcttagctgtnaaaccgaatttagtnttnangttaaatatttgcaaagggaaagcattttctncagaggataattnatttcaagaa

SEQ ID NO: 4955 - DNA, 317 bp, Homo sapiens
cccttagcgtggtcgcggccgaggtacagtgcatattggcggcgcacgcctcattacgattcgcctgcttgcttctcctgttcaatcgtttctttggaaggcagtggatttttctcttgcgtctctgtcttcttcagtttcgacttatcgaatttctcgatctcagccatatcgggtttgtcagacatggttgcggaggaaaagcgaagcgaggcgcacgagtacatcctagaatctgtttccttttaaaaatgtctaaatttgcttttgccatggcgctaatgctaatggtaaattattgattgcgtggcccatgt

SEQ ID NO: 4956 - DNA, 355 bp, Homo sapiens
  misc_feature 245, 253, 268, 273, 278, 300, 322: n = A,T,C or G
cttagggagtcgacccacgcgtccgcgctgttgttcttttgttttaaaattgttcttcgtttcttttcattaaaggtttaatcagctagattagagagcatcatttgtatttaacagctgaaacttcggtacgttgccgtttaatgaatgaacttgcattgtgtagccagggcctacaaaggctcttgtcaggaataccagccctggctggggctggtgctcaaaagaattttcaggtgccaccnggaatagnttccttgggtggatncccancttangtggagaaagggggatgcctgntccacttctaggtatgagggtntgcgactttggatcttaaaattatgctagacta

SEQ ID NO: 4957 - DNA, 583 bp, Homo sapiens
  misc_feature 170, 216, 217, 218, 219, 220, 221, 222, 223, 224, 225, 226,227, 228, 229, 230, 231, 232, 233, 234, 235, 236, 237, 238,239, 240, 241, 242, 243, 244, 245, 246, 247, 248, 249, 250,251, 252, 253, 254, 255, 256, 257, 258, 259, 260, 261: n = A,T,C or G
  misc_feature 262, 263, 264, 265, 266, 267, 268, 269, 270, 271, 272, 273,274, 275, 276, 277, 278, 279, 280, 281, 282, 283, 284, 285,286, 287, 288, 289, 290, 291, 292, 293, 294, 295, 296, 297,298, 299, 300, 302, 317, 334, 344, 353, 356, 386, 391: n = A,T,C or G
  misc_feature 394, 406, 407, 408, 409, 410, 411, 413, 415, 416, 417, 418,419, 424, 425, 433, 435, 436, 439, 442, 443, 445, 448, 453,455, 457, 466, 468, 472, 475, 478, 479, 480, 485, 490, 494,496, 498, 499, 500, 503, 509, 511, 514, 517, 518, 524: n = A,T,C or G
  misc_feature 530, 533, 543, 544, 546, 550, 551, 571, 577: n = A,T,C or G
ccctttcgagcggccgcccgggcaggtactgaccctggccaaaactgggataagacggatagtcctgctgtgaactattaaatccagaggaatttgtgagtgaattatttcctgtatatattcctgatgatgttgtaaaactgctaccttgcatctggtagctgtatggngcctgtccaggttgaggggtacctcggccgcgaccacgctaagggnnnnnnnnnnnnnnnnnnnnnnnnnnnnnnnnnnnnnnnnnnnnnnnnnnnnnnnnnnnnnnnnnnnnnnnnnnnnnnnnnnnnnangggatagtgttgttnactttgaaaaatatctnttcttgttgnaagattcancanggtctttatctttttaaaagtatcacattntttgnttnctttattttgcnnnnnncntnnnnnaagcnngatcattntnnatnttnntnctntttancntnacctttttntnccanttnttnnngaaanaaaangganantnnnaangaaagnanaanaannaatttnaactcnccntgaaatgaannantctnnggctttgcaggaattaaccnaccccnaggaac

SEQ ID NO: 4958 - DNA, 669 bp, Homo sapiens
  misc_feature 6, 8, 20, 24, 27, 88, 323, 539, 590, 592, 599, 608: n = A,T,C or G
cccttncnagcggccgcccnggcnggnaccttttatttatttttgtttagttttattccttagtttcactcagccacttcaaaattanaatttctctgttgtaggaatgctagccttatagatctgtgaaatgatctagttgctttatctatagttgctggagaattgagtgttttgatcaaaggtagcctatttagctgtaaaactgtctagaattatttcattcctaggataaaggaaaatttgtgtccaaaatatctctaaaggtattacactgtattcctttaatcttaatgatacacttttttttcttataaatgtancacattatacactagcggtcttcagtatgataaacagatcaactaccaatttcattgccattactctttgaaatagtcctcattgagagttcttgaaacctgtgtctaataacaaagtaaaatataatcaaaaatttccacaagtagaagaaaaaacattgacaaatctcttggggagaccacatacttatttttaacaagaatgaatgaaatatnttcaacctgtaaaaatagtttgcaaatggtcatgggctatattacattggngnggagttnttattacanatgccatttcctacaacattaaatctgcagtaaaatttaattaatccccttaaatttggga

SEQ ID NO: 4959 - DNA, 320 bp, Homo sapiens
cccttagcgtggtcgcggccgaggtactgctggcagacagccctcagctgtcagccctctttgggaattacctagcaaaaaggagtcacttcggcccaagatcatactccttcctggggcagcttgcatctaatgattggggatataaacgtccagctcctctcaccccaacttgagacaactctgagggaccatcccagcttcagagctctccgtgtgggttactgaaactgtatcacagtccaacttctcccatggaaatctggctttcttcctttacatggcattggtcccaagaggcctccctagtaaatttgctg

SEQ ID NO: 4960 - DNA, 411 bp, Homo sapiens
cccttagcgtggtcgcggccgaggtactggggggatgcacttgagtgccatttctgatactgtcattgtatgactgctgatgctcgtttatgttgttctttggaagctatagtgagcctgatgttttcacattttaaaaaatgcttcctgagacttctttaggctcctctaacttcttcagtgcatttgggatcaaacttagctcttagatcagcaaacctgacttgctcctacttttgcaatttttcaggccttaccatatttcttatctctgtcttcccacctgataggaaaatcttgcagatttgaaacagtggtttctggcctgctgctgcagcaaattccctatgtttatttaagaagtcgggcctatgcttttaacctacaaatgatgagtaatttacttgcaat

SEQ ID NO: 4961 - DNA, 507 bp, Homo sapiens
  misc_feature 59, 116, 118, 119, 120, 123, 133, 138, 152, 153, 154, 155,156, 159, 160, 161, 163, 165, 176, 177, 178, 179, 180, 187,200, 201, 202, 203, 204, 206, 207, 208, 209, 211, 212, 213,214, 218, 232, 235, 237, 255, 257, 258, 259, 260, 269: n = A,T,C or G
  misc_feature 283, 284, 287, 290, 292, 300, 301, 306, 318, 331, 333, 342,343, 346, 347, 349, 350, 353, 358, 359, 361, 362, 365, 366,369, 370, 373, 375, 376, 378, 379, 380, 388, 389, 391, 393,395, 411, 413, 414, 423, 438, 443, 444, 447, 452, 465: n = A,T,C or G
  misc_feature 475, 484, 488, 490, 491, 495: n = A,T,C or G
ccctttcgagcggccgcccgggcaggtacttttttttttttaattttttttttttgggnttttttttttttttttttttttttttttttttttttttttttttttttttttttttngnnnaangccccccccnttttnaaaaaaaaaaaaannnnnttnnntntnaaaaaaaaaannnnnggggggnaaaaaaaaaaaannnnntnnnncnnnngggnaaaaaaaaaaaaanttntncccccccccttttttttntnnnnggggggggnaaaaaaaaaacccnnaanggntncccccccnnggggntttttttttttnaaaaaaaaaaaantntttttcaannttnncnnccnaaaannannaannggnncananncnnntttctggnngnantnaataaaaaaaaaaaantnnttttttttnaaaaaaaaaaaaagnggggnnttnttaanaaaaagagggggngggggggggngcgacattntatnannaganaaaaaaaaaaaa

SEQ ID NO: 4962 - DNA, 339 bp, Homo sapiens
caagtgagcaggccacctgttgcagcaagtaaagtggctgtgtgaggcctaggtgggggcatcactggctgaaggtccgtggcttacaaagtgactgagaaaaatcatgtgtcataaggtgctttgggctactttatgatatactctgaagtccctgtttcatgaaaaatgcagtttacgagttttccaatttttgttgtttttgttctatggctttgtttgttctatgtttgttcaatgttactgtgtatgttactctttgggtactgttctatggcttccaacaagaaatgggggaggggagaattatacattatacgtccatgttcatatcagaaa

SEQ ID NO: 4963 - DNA, 293 bp, Homo sapiens
  misc_feature 75, 113, 118, 122, 126, 152, 159, 164, 171, 182, 189, 192,198, 205, 222, 230, 238, 245, 256, 265, 270, 281: n = A,T,C or G
cccttagcggccgcccgggcaggtacatattaacttaagtttctctgtaaatgaatgaaataattggtgcattangtttcacctaaaacaggtagggttgaggatattctganacttntgtnaagntgaccattctggattcattctaccanccatgangagangactttntaaatctcacntcattancantatgcnaccaatncttttgggtggaaaacntcataaangctttttncataagntttgttggagngggccaggnctcancaattatttcnacttaatttgga

SEQ ID NO: 4964 - DNA, 397 bp, Homo sapiens
  misc_feature 359: n = A,T,C or G
ccctttcgagcggcccgcccgggcaggtactttatgtaagatatgacagtttttgacttaagatgtagcttttgtaatactattttgacctcttctgctctcatttggttaatatttgcatgcaatgtctaaatctatcttgccaccttcagtatgtttttaatcattagatgtcagctgacccttgtagaaaggcaaattggatcttggtttttaataattttaaataaatttctttattgaaagtatgtctcttgattggaaagttttctgaaacaaagagacttactaattttttttgttgttctatttgattcttgcatctttgtcccacattttctctctttgtttctctctgnggctgttttatttttactttgatatgcttttacttctt

SEQ ID NO: 4965 - DNA, 472 bp, Homo sapiens
cccttagcgtggtcgcggccgaggtactgctaagaattcaaacttcagcagtcatgggtgagtaaggaagtcttataaatgtattttagccacctaacaagaaactagaaatttagcaagttctttcacattcaggacagttgtgttcactagatcagaggcactgagacatgaagaacagacccctaaaaagggaaagtgttcctttcagttttaggacaccactggaatattagggaagtggaaacacagctgcccactctacagtatgggttgcctttgtgtccggaatgtgcctaacgtcctgacctccatgcccttttcagggagccttgggaggagcccgaatcactgatggaatcggacagtgcatggagatggttcaacaggacgagggtaaagtgcaggggcaagtccaggtcatactgagagacaacgagtggcgctggacagagacagacaaagataaaat

SEQ ID NO: 4966 - DNA, 509 bp, Homo sapiens
cccttgccgcccgggcaggtacttcaatcacatagcttaaaatatggagaaaagacaggtaaaaaaattatcttaacctgtagtagtcttttttctttttaaaatttttataaaatacactaatttcccaaaataaagaatattatgacacattggtgtcaacttacacagatgaaagctgatgccagctttttcctaactaaagttcatttcaccaaacctttatatattacatgaatatccaagtaaagtatttttttttttaaattcaacacacaggaacataatatacattgtttttttttaaaaaaaaggttaatttaggaatgattcatcttcaaccacataaagtatctttttaagaccatgaaacctcttgtcattgcaagacttttcagttcatgtttctatttcccagttttaattcttaaaggaaaaaaaaaaagatgaaagggtttattatgtatttcccatgagaaaactgtggtaaggatcttattcattaccag

SEQ ID NO: 4967 - DNA, 718 bp, Homo sapiens
  misc_feature 62, 78, 85, 96, 99, 100, 107, 111, 113, 114, 117, 118, 119,121, 122, 124, 130, 131, 132, 133, 135, 136, 137, 138, 149,150, 156, 157, 160, 161, 162, 163, 164, 166, 171, 172, 176,184, 185, 186, 196, 197, 204, 205, 206, 215, 216, 220: n = A,T,C or G
  misc_feature 223, 236, 249, 250, 256, 271, 272, 275, 279, 293, 294, 295,296, 298, 299, 301, 302, 311, 314, 316, 326, 330, 336, 343,344, 345, 348, 355, 363, 365, 389, 393, 394, 395, 404, 405,422, 423, 425, 426, 427, 434, 442, 444, 455, 456, 458: n = A,T,C or G
  misc_feature 459, 463, 469, 479, 487, 502, 510, 511, 517, 523, 527, 534,539, 540, 551, 563, 578, 579, 580, 581, 582, 583, 584, 585,587, 588, 589, 601, 602, 603, 604, 610, 612, 623, 654, 660,676, 677, 681, 682, 691, 697, 700: n = A,T,C or G
acttttttttttttttttttttttgggttttttttttttttttttttttttttttttttttnaaaaaaaaaaaaaaanttttttnaaaaaaaaaanaannaaaaaantttncnnaannncnnanaaaaannnncnnnnttttttttttnngggggnnaannnnncnccccnnaaantttttttnnngggggggggnnttttttnnnaaacccccnntttnggnaaaaaaaaaaaantttttttttatanngggatnaaaaaaaaaaaaatnnggnaaanaattttttaaaaannnngnntnnttttttttnccnancctttttttncccnaaaaanggggggnnnggnccccctnaaaaaaancncccccccccccaaaaaaaaaaaanttcnnnaaaaaaaannccccccccccccccccnngnnnaaaaaanaaaaaaancntttttttaaanngnntttntttttnaaaaaaaagngggggggnaaaaaaaaaaaaaangggggggnncccccntttttnaaanccccccnaaaannaaaaaaaaaantttttccccccnttttttttttttttnnnnnnnnannncaaaaaaaaaannnntttttngnggggggggggnaaaaaaaaaaaaaaaaaaaaaaaaaaaaaanggggcntttttttttttttggnngggnnttaaaaaanaggggnccntaaaaaaaaaaaaaaaaa

SEQ ID NO: 4968 - DNA, 310 bp, Homo sapiens
  misc_feature 256: n = A,T,C or G
cccttagcgtggtcgcggccgaggtacattcataagaaagattgatctaaaattttattgtattgtccttttccagtgtttcaggataatatcatacctcataaaattaaatggggtagcttcctgcacctcttaccttttttctttttcttttcttttcagagacatgatctcactctgcactcatgctggagtgcagtgctgtgatcatagctcactgcacctggaacttctgggctcaactatcctctgcctnacctccaagtagcagggactacaggtgccaccaccagaacctgctaattttaaa

SEQ ID NO: 4969 - DNA, 647 bp, Homo sapiens
  misc_feature 119, 120, 122, 125, 128, 129, 131, 132, 133, 134, 144, 145,147, 148, 150, 173, 174, 175, 176, 177, 178, 179, 180, 181,183, 184, 186, 187, 192, 194, 196, 197, 198, 199, 200, 201,202, 212, 213, 214, 215, 216, 217, 219, 220, 221, 223: n = A,T,C or G
  misc_feature 224, 230, 248, 250, 252, 260, 261, 263, 264, 274, 278, 280,282, 285, 287, 297, 306, 308, 316, 321, 329, 331, 333, 339,342, 344, 350, 354, 359, 361, 362, 367, 368, 375, 401, 402,403, 404, 405, 410, 413, 414, 416, 421, 422, 428, 429: n = A,T,C or G
  misc_feature 430, 432, 433, 436, 438, 439, 442, 443, 444, 457, 458, 460,462, 469, 476, 479, 481, 483, 486, 488, 492, 499, 501, 503,505, 507, 513, 515, 521, 523, 524, 525, 528, 531, 533, 534,536, 537, 538, 539, 542, 544, 555, 559, 568, 569, 570: n = A,T,C or G
  misc_feature 571, 572, 575, 587, 590, 594, 595, 596, 601, 614, 618, 623,624: n = A,T,C or G
cccttagcgtggtcgcggccgaggtactttttttttttttttttttttttttttttttttttttttttttttttttttttttttttttttttttttttttttttttttttttttttttnnanaanaannannnnactttttttnnannanaaaaaaaaaaaaaaaaaaaaaannnnnnnnncnncnngatantntnnnnnnntttttttaannnnnngnnntnntataantttaaagagcagataacncnanccactttnngnnggggggggcngttncngntgngnagaaaaaaanttttctcancnccccatgnggggnggggacancnangttcanggntnaattanaggntgccngnntttgnnaaaaaantaaacaatgcttattgaaaaattatnnnnnaaaancannangaggnngagaannntnngangnnccnnnaaaggaattgggnngngnttggttntaaaaanacntnanaanangggngggggcngngnananaatggntnaaatanannnttnaantnnannnnatncncccaattaaangggntaaaaaggnnnnnatntttttttttctnctncccnnngcccnattttttttttanaaanaatanntatttttttaaaaaaaaaaaaaa

SEQ ID NO: 4970 - DNA, 434 bp, Homo sapiens
cccttagcgtggtcgcggccgaggtaccaagtgctctgtaattgattacaaaggttaattcattaagaatatttttccagtcattttacaaaaaatattctcaataaaatcaccaattataccaaataaacataaaacactcaaatccttctaacaatactttatatattttaaataccattttgaagatgagtcagaaaattacctgtttctgaacctccacctgctcatacacaaggggtataggtgtacgcggggaaagaattcaagagtctatatgattagttacagagaatattttcatcccctctccctgaatagaaaagcaggggtcaccatttgtatccttacccttgaggtgtttttgaagatgctgtaactcttgaagttgagctgaggcagaaaggttggaaaaatgcagccctctgggtatt

SEQ ID NO: 4971 - DNA, 797 bp, Homo sapiens
  misc_feature 128, 131, 139, 140, 141, 142, 153, 155, 159, 160, 161, 162,165, 173, 174, 175, 176, 177, 178, 180, 183, 186, 187, 188,191, 192, 193, 194, 196, 209, 210, 211, 214, 216, 217, 218,220, 221, 222, 223, 226, 227, 229, 230, 234, 236, 238: n = A,T,C or G
  misc_feature 239, 241, 242, 243, 244, 250, 253, 262, 263, 270, 273, 274,277, 281, 295, 305, 307, 311, 321, 323, 332, 334, 341, 350,351, 355, 357, 358, 380, 389, 399, 413, 415, 418, 422, 424,427, 429, 431, 434, 435, 439, 442, 443, 444, 453, 458: n = A,T,C or G
  misc_feature 462, 480, 481, 509, 510, 511, 512, 514, 519, 520, 535, 541,567, 575, 578, 586, 587, 592, 597, 601, 609, 614, 618, 624,626, 640, 642, 647, 657, 658, 659, 673, 674, 685, 688, 694,696, 703, 709, 712, 715, 726, 729, 730, 733, 741, 744: n = A,T,C or G
  misc_feature 753, 755, 756, 769, 780: n = A,T,C or G
cccttagcgtggtcgcggccgaggtactttttttttttttttttttttaaaattttttttttttttttttttttttttttttttttttttttttttttttttttttttttttttttttttttttttanttnaaaaaaannnnttttttttttntnatgnnnnaanaaaaaaannnnnngnganaannnttnnnntntttttttttttgnnnggngnnngnnnntanntnntttntncnngnnnngaaaanccnttttgtttnnaaaaaantannacncccnaaaaaacccccaanattttttttntnagangggggggggncncaaaaaagncnccgaaanttaaaaaanncagncnnggtttttttcccaaaaaaaaanttttttttngggggggggnaaaaaaaaaaaagnanggngggngnttntngnaanngatnggnnnggttttttntcccnaaanaaaaaaaaatttttttannaaaaaaaaaaaaaccttttttttttagnnnnanaaaannggggggggggggggngggggnaaaaaaaaaaagggggtttctttttnttttttcnggnccggttcnnaaaanggccnaaantttcagtncccanttgngggggncnaaaaaaaatagtgngntttcnaaacccccgnnncccaaaagttttgnngtaaaaaaaanagnacaatnancgggggngggggnggncgnaaaaaaaaaanatnnttntttttttntcncccccctgngnnaaaaaaaaaaacnccctctttttntggaaaaaaaaaaaaaa

SEQ ID NO: 4972 - DNA, 347 bp, Homo sapiens
ccctttcgagcggccgcccgggcaggtacattttgctggggggttcagacaagcaagtatctcttttcaccaaggatggagtgcggcttgggactgttggggagcagaactcctgggtgtggacgtgtcaagcgaaaccggattccaactatgtggtggtcggctgccaggacggcaccatttccttctaccagcttattttcagcacagtccatgggctttacaaggaccgctatgcctacagggatagcatgactgacgtcattgtgcagcacctgatcactgagcagaaagttcggattaaatgcaaagagcttgtcaagaagattgccatctacagaaatcga

SEQ ID NO: 4973 - DNA, 493 bp, Homo sapiens
gatatctgcagaattcgcccttagcgtggtcgcggcccgaggtacttaaaaaatttttaatgtaaaatacccctttaaggatagaatttagggccttgaaattctactcagttgctatgaactgtggggaatttgagacaaatagcttttgtaattggaatgcacactgtgttgtaataatgtggaaagagaaacaaaaactttccttaatgtaatgagtttccattatctgcctaatctaaggtttgtaagtctacattgtcaggatttatattgaggagatagggggtgtcattttctgtacaagatagttttaagtatgttctaaatatttgtctgctgtagtctatttgctgtatatgctgaaatttttgtatgccatttagtatttttatagtttaggaaaatattttctaagaccagttttagatgactcttattcctgtagtaatattcaatttgctgtacctgcccgggcggcccgctcgaaagg

SEQ ID NO: 4974 - DNA, 354 bp, Homo sapiens
  misc_feature 299: n = A,T,C or G
cccttgagcggccgcccgggcaggtacttttttttttttttttttttttaaaaatatataagaaatttattaaaatacgtattcaagactcacaaatgtatgcattttattcatacttctaaataatataatcatagaaattaccctgtagtcaatgtctatttatttattcattttgagacaaagtctcgctctgccacccatgaagatggttctatttgaaagtaatatttaggccgggcgtaatctcagcactttgggaggccaaggtggtcagattgcatgaactcaggagttcngagaccagcctctgcaacatggcaaaaccctgtctctacaaaaaatcaaaattag

SEQ ID NO: 4975 - DNA, 404 bp, Homo sapiens
  misc_feature 356, 388: n = A,T,C or G
ccctttcgagcggccgcccgggcaggtacaaaaattagcaaggtgtgttggcgggcgtctgtaatcccagctactcaggaggctgaggcacgagaattgcttgaacctgggagatagaggttgcagtgagccgagatcatgccattgcactccagctggggcaacagtgcaagactttgtctcaaaaacaaaacaaaacaatacaaacaaaaaacctttgactcttgaaaaaattatatccacttccaactgatgaggggttaaatgattgaaattatcccaaagaatatgatgcaggtcatcaaaatctgagttccaaatatgttttgaacaatagaaaacattgagaaaaactncataaccttccaaaaccattactttgaattgngacatttatttgaaaa

SEQ ID NO: 4976 - DNA, 457 bp, Homo sapiens
  misc_feature 206, 299, 300, 301, 302, 303, 304, 305, 306, 307, 308, 309,310, 311, 312, 313, 314, 315, 316, 317, 318, 319, 320, 321,322, 323, 324, 325, 326, 327, 328, 329, 330, 331, 332, 333,334, 335, 336, 337, 338, 339, 340, 341, 342, 343, 344: n = A,T,C or G
  misc_feature 345, 346, 347, 348, 349, 350, 351, 352, 353, 354, 355, 356,357, 358, 359, 360, 361, 362, 363, 364, 365, 366, 367, 368,369, 370, 371, 372, 373, 374, 375, 376, 377, 378, 379, 380,381, 382, 383, 384, 385, 386, 387, 388, 389, 390, 391: n = A,T,C or G
  misc_feature 392, 398, 412, 446: n = A,T,C or G
cccttagcgtggtcgcggccgaggtaccgtccttcatgacagcaggaagacccccggcacagaagaacaaccgggatgtcagcaccgcggggatggctgccggaaatgctcactcacttccccccgcgtacgttagtctggggatagtaagtctgggttaatctattattaaattattagcctgggtctccttggaagcagacagngagacaaggacttgacttcaaatggtttatttgagatataatcccagaatataatgattaaaaagtacctgcccgggcggccgctcgaagggnnnnnnnnnnnnnnnnnnnnnnnnnnnnnnnnnnnnnnnnnnnnnnnnnnnnnnnnnnnnnnnnnnnnnnnnnnnnnnnnnnnnnnnnnnnnnnattgtnatcccgctcacaanttccacacaacataacgagcccggaagcataaangtggtaaagcc

SEQ ID NO: 4977 - DNA, 399 bp, Homo sapiens
  misc_feature 25, 399: n = A,T,C or G
cccttagcggcccgcccgggcaggncctcatatatgtatgtatcttccctgaacctgtaaatttggacttctttacaacttaagctcatttgctatttttgatgcaatgttcttaaaggcaatagatgtcccagatattcgcttgaagcgaaccccattaagtgacagtcgtggcaacttgcagacttccatctcccactgcacgaggctatcctgtctagcgtctccatggacacagaaaagcaaaaatctctctttttgctcataatcacagttatttgcatctaacacttttcggatttctctcatcatgtcattaggggtccattgaactagtggtcttcatactccatgtgaaccgcaaagaacgcggcttaaaatctttaccctcttccttgn

SEQ ID NO: 4978 - DNA, 430 bp, Homo sapiens
ccctttcgagcggccgcccgggcaggtaccagcacagcaattgctgtatgtttgtttttaattatcggttttcacttggaggggccagttctctatattccaatctattttctatatcagaaatgagcaggcattttaaaaaatggttttcattgatggagaggtaaaagtgaaatggctttgttgtatttatattataaaaggccatttcccaaatctagaatttattactaaaaatcaagtttgcattgaggggaggagtatgatttgctcaagcttactttttttataggtggggtttttatattttcaatgtgattactcacccatacaatttcagctctttcaaagcattcttgttggctattttcagagtccaaaaaaaaaaaaaaaaaaaaaaaaagtacctcggccgcgaccacgctaaggg

SEQ ID NO: 4979 - DNA, 505 bp, Homo sapiens
ccctttcgagcggccgcccgggcaggtacctattaagagccaagtgtagctctttacatgtagtaactcatttatctttacaagggctctctgtggtagataccataatccccattttgtaactaatgaaactgaggatcagagaggttaagtaacttggcaaggttacatagtaaattctgggcccagatttacacccaggcagtctgacttcacagcccttgctcttggcagatattaaaatgccatgcagtaaatacaaggaataatgtgaatatgaagaaagaaactcctgaatgggggtgggatggggatactgttgttagagaagggagagaaaagtggagtagagaaggttctccttagagctgactgtttgatctaagctgggaaggaagagtaggaatcattcacatggataaaggagagaagggcatcctaggtagaacatatgctgaagcacaaaagaacctagaatacttacataacagatcaggatgtctag

SEQ ID NO: 4980 - DNA, 264 bp, Homo sapiens
  misc_feature 1, 3, 27, 51, 99, 202: n = A,T,C or G
ncnccctttcgagcggccgcccgggcnggtaccccagtcccattccttctnactgactggggcctccagccacccctgccagtgttctccagctgacanatacttgaattctccctgggagagagctcccagagggaggggcaggctgccatcattgctgtttgggcgacttagctgttccaggccttcaggctttggggancttaagcaaggggttggaaggggaaccccagcacagtaacaagcttgccccgacaaaaaaaa

SEQ ID NO: 4981 - DNA, 354 bp, Homo sapiens
  misc_feature 20, 109, 111, 353, 354: n = A,T,C or G
gggcgaattgggccctctanagcatgctcgacggccgccagtgtgatggattatctgccagaattcgcccttacgtggtcgcggccgaggtctgccctgcaatcaagangnctcttcaaagagagaatcagctcaaactggtcagctctagattagaatggaagttcttggtgccggccttttcttgattttggaagcttcagtcactcactgctatcaattgatgaggttcaatccatgatattttgatctttaggtgaattctaaaacatgtttaaagttaaaaaggccgggcgtacccgcgtacctgcccgggcggccgctcgaaagggcgaattccagccactggccgnn

SEQ ID NO: 4982 - DNA, 558 bp, Homo sapiens
  misc_feature 7, 13, 25, 35, 40, 49, 50, 51, 54, 58, 75, 77, 79, 85, 88,90, 97, 108, 123, 128, 129, 133, 135, 136, 138, 141, 144,152, 163, 165, 167, 172, 177, 180, 236, 260, 264, 269, 270,271, 361, 371, 387, 401, 441, 447, 453, 456, 470, 478: n = A,T,C or G
  misc_feature 496, 502, 508, 530: n = A,T,C or G
cccttancgtggncgcggccgaggnactttatttnttttntttttttannnacncatnttattttttttttatanangntttttnttntncattttntatttttttgnttttaactttttttnttttnncctngnncnccnggnctcaaganaaaaaaaaaanananatttnaattnaantgggaccacaggcatgtgccaccatgaccggctaattttttttacttttcaaaganaggagggggaatctcactttgttnccangctgnnntaaaactcctgggctcaagcaatccacctgcctcggtggccaaagtgctgggattacaggtgtgagttgttttttttttaaaaaaacagncttacctcantttgtcacccaaaaangggaatgactttcnaaaaattgcaaaaagcaaaaacatattccttgctggtaanaaaaanaaaagncgnatcaaaggggaaanaatatttntccttaaataaaaatacnaaatangaaaangtatgtttaactctaactcaanaaaaggtattgtaaaaaacaaaaaggtt

SEQ ID NO: 4983 - DNA, 313 bp, Homo sapiens
  misc_feature 47, 56, 91, 92, 93, 94, 95, 97, 106, 107, 114, 115, 126,127, 128, 139, 140, 141, 142, 143, 144, 145, 149, 150, 151,170, 178, 179, 189, 191, 192, 196, 212, 213, 216, 218, 220,226, 229, 236, 241, 246, 249, 251, 252, 253, 261, 263: n = A,T,C or G
  misc_feature 272, 273, 286, 287, 299: n = A,T,C or G
ccctttcgagcggccgcccgggcaggtactttttttttttttttttnggttttttnggttttttttttttttttttttttttttttttttnnnnngnaaaaaaaannttttttnnaaaaaaaaaannncaaaaaaaaannnnnnntttnnnaaaaaaaaaaaaaaaaaantttttccnnggggtttttntnnttgnaggaaagggttttttnnggngngntttttnaanggggggnttttnttgangangnnntttttttntnaaaaaaaannttttttttttttnnaaaaaaaaaaanggggattttttttt

SEQ ID NO: 4984 - DNA, 266 bp, Homo sapiens
cccttagcgtggtcgcggccgaggtaccacttgtcttgtctacattattctaacaaacaaaattattcaaacaaacagatctctcagtcttgagcacaacttttcaatccagccacatcagccaaaatgatcatactaaagcaaatcctgttatacctgtgtttaagatactttctttgctcccatgtccttgagttagctgacaaggtccccagctcacttcaggctgccctctctgtacctgcccgggcggccgctcgaaaggg

SEQ ID NO: 4985 - DNA, 286 bp, Homo sapiens
  misc_feature 46, 121, 123, 217: n = A,T,C or G
cccttagcggcccgcccgggcaggtacaaccatagaaaacattcgngattactattaagtcttccagagaaaatccgaagaagtccttgtcaccttgaagggctcccctttcaaaatccgncnatccaaagaaaaaagaaagaaatttcccgcactccctttcttttctggaaaaggaacaaaaaaaaaggaggaaagttgaggcctaaattaaagnctttttataatttattattattaacaatgtgacaattgcacatctaaataccacattttaagttggatc

SEQ ID NO: 4986 - DNA, 414 bp, Homo sapiens
  misc_feature 54, 112, 121, 153, 154, 155, 156, 161, 163, 173, 174, 178,180, 183, 185, 186, 188, 189, 191, 193, 204, 206, 207, 219,221, 222, 229, 230, 232, 235, 239, 248, 251, 253, 259, 264,267, 269, 275, 276, 290, 294, 296, 298, 318, 319, 322: n = A,T,C or G
  misc_feature 341, 346, 351, 363, 391, 400, 401: n = A,T,C or G
ccctttcgagcggccgcccgggcaggtacttttttttttttttttttttttttngggttttttttttttttttttttttttttttttttttttttttttttttttttttttnttttttttntttttttttttttttttttttttttttttttnnnnaaagnanaaaaaaaaanntttnanttntnnannantnaataaaacagnannacaaacaaattnanntaaatanngnaanttangacataaanctncngttgcncaccnttnanaaaaanngaaaaaaaattatntgtnancnaaggaaaaaaaaaaaatgannttntttttttttattaaaaaanacccnttttnattttaaaaaanccagggggtggggggaaaaaaaaaaaanttttttttnnagaaaaaaaaaaa

SEQ ID NO: 4987 - DNA, 463 bp, Homo sapiens
ccctttcgagcggccgcccgggcaggtacatcctcggccgggagtccccactgtctctctacaatgaggagctggtgagcatgaacgtgcagggtgattatgagccatctgatgccaccgggttcatcaacatcaattccctcaggctgaaggaatatcatcgtctccagagcaaggtcactgccaaatagacccgtgtactatttgatttttgccttagtgattaaaggaggaacatatgtggaaacaatcatcagatctgaatgctacctcgtctgcttcctatttttgtcatctaggatgggtcacaatattcttgagcctatttcttcatcttaaatctcaatatagaagttcccaaggttgttacgagattgagaggccacgtaagcattgctttgtgcatgctacagctctttttgcacaaaagtcgttataattgttgcaacccacaaataaaagg

SEQ ID NO: 4988 - DNA, 486 bp, Homo sapiens
  misc_feature 80, 256, 274, 386, 389, 405, 451, 459: n = A,T,C or G
cccttagcgtggtcgcggccgaggtacctacattattaaagatagtcaagaactctaacccaagcatatgggcattaaanaaacttattaagccttttctttgcaggagccaaaggagacaggggagccccaggttttcctggcctcccgggcagaaaaggggccatgggagatgctggacctcgaggacccacaggcatagaaggattcccagggccaccaggtctgcccggtgcaattatccccggccagacangaaatcgtggtccaccangctcaagaggaagcccaggtaaagggtttacttttaaacagcataaaataacaaaaatcatgtttgacctcaaaagtttttcaaccttctcctcatgttaccttgttgcttnttntttccctgtggtcatnttcattcccccactacctgtggtttccatacccagcagttgtcaangtaaaggnagcctgtttgagggatgcatagttaat

SEQ ID NO: 4989 - DNA, 599 bp, Homo sapiens
  misc_feature 11, 13, 26, 28, 31, 39, 40, 41, 42, 44, 46, 49, 50, 51, 54,57, 71, 81, 104, 106, 112, 113, 115, 119, 120, 121, 130,131, 137, 138, 140, 149, 161, 163, 178, 182, 183, 184, 185,186, 259, 262, 305, 308, 309, 337, 340, 354, 355, 364: n = A,T,C or G
  misc_feature 365, 366, 367, 368, 370, 373, 375, 377, 378, 382, 437, 440,489, 565, 571, 574, 584: n = A,T,C or G
cccttagcgcngnccgggccggtgcncnggngacatggnnnnantnaannnggnccnggatgaggaataanaccaaggccnaccatgccccatgctcagcaagnanctgatnnangttnnngaccctganntcttgnngnactcactgnatagatgttatnanaactccttccagttnactnnnnngcctgactcctgccagccctatggaactcctttttgcattggaggaaaagcatgtacggcttttctcttgacngcnggagaaatacaaaagaaggggaaggggaagaaaagaaggggangannatcttttattactatacaatgacaccgntcntgtgagctcaccanntgctgggtnnnnnanccntntnnctgnggatttttgaagactaaagaagtttttaccctagatctcttccagaacaaaatanaantttcagcaaatacttactgacctttaaagccttgttgtggatttctganatttaaagatactttaaaattctcaagaacaaaactttcaaacctctggttgaaagaaatatacccagttcaatcnctgcantanaattccttgnagataacaactggat

SEQ ID NO: 4990 - DNA, 430 bp, Homo sapiens
cccttcgagcggccgcccgggcaggtaccagacctggaaaatgcttcagactttacacagagaaagcttataaaacagaaatgcaggataacacctatcctgagattttgcgttctaatttaggatcagttgtgttacaattgaagaaacttggtattgatgacttggtacatctgaaactcaagactctcactgattggagagcttgtggaaaacaaaacacaccatgccaataaatgagatgaaaacttgagtttgcctttttaactatttatgttctaagttaaagctttgataacattcaaatgtcaaattctctcattcttataaaaagttgaattaattgcctgtatttattttagcaattattcaatgtatttccagtataggatgtatagtataattaaatttttttgtaaataaaatattt

SEQ ID NO: 4991 - DNA, 434 bp, Homo sapiens
  misc_feature 97, 102, 103, 105, 106, 109, 121, 123, 130, 133, 136, 137,138, 143, 144, 147, 150, 151, 153, 157, 162, 168, 170, 183,185, 191, 193, 200, 204, 214, 215, 218, 220, 226, 228, 230,231, 232, 233, 234, 235, 239, 240, 244, 256, 257, 259: n = A,T,C or G
  misc_feature 261, 264, 282, 286, 289, 290, 295, 297, 302, 305, 311, 313,317, 318, 324, 331, 336, 341, 343, 346, 347, 370, 376, 387,404, 405, 414: n = A,T,C or G
cccttagcgtggtcgcggccgaggtacttttttttttttttttttttttttttcctttttttttttttttttttttttttttttttttttttttttnaaaannannggntttttttttttntnaaaaaanttnttnnnaaaanncanttnncnaaanggttnaaaaananccaaaatttttcnanccttantncttttgnaaanaaaaggaaanntgngnttttgntnannnnnngggnncccnttttaaaaaaanntncnttnccttggaagggtaaaaantttnggnnccccncnaaaanggnccccancntggnnggaaanccctttnggggnacccntnggnnaaaactttttttggggggccacnaggttnaatttaaaaanttaaattttccccccannaaattaaantaaggggttaaaaaaaaaag

SEQ ID NO: 4992 - DNA, 466 bp, Homo sapiens
  misc_feature 1, 69, 91, 96, 116, 294, 399, 430, 442: n = A,T,C or G
nggtacaatatgacaggctgggcatggtgctgtaggaatacagaacacacattctatatttgttctggnggggcctaaagttgcacatttnaatcntgaggaaagacagggaattngctgaaaaagctaatatcaagtgtaaagaccctgggtcaaaacagagttacttaggaagtcataggttcttaagtgctgctggatcacggagtgcacttaaagagtgcattaaagatctattactgtgtaaatagtgatttaaattctcaactaattatttgctaattaggaactttnaaaaaaaatccctggctttgtctaccgactcaattcacctttaacatatgttgaatttttctatatactatggggtctttggggctattcctttggtgcttttgngatttttttaaaaaatctgtttttgaactanattcaaatgggntttccttaatgtagctttataatg

SEQ ID NO: 4993 - DNA, 521 bp, Homo sapiens
  misc_feature 443, 491: n = A,T,C or G
cccttagcgtggtcgcggccgaggtacttagacccaacatacaggaggtgttgattctcatcccttgactcaggacatgtgtgtaattgttaatgtcatcacaagacctttctacaaatgtcttgtgacatacaccttggcccagcatctgagttatttgtctctttttcctgggcccagttcacagtgctgtatcactggacccagacccttggtaatgtgattgtattctgccttgatacagcccataagggtcattgtgacatatcacagggtgttgcacccaggtggtttgagtctcctcttctgccttggtgctacccacaggtgtattgtgacatattgctgggtctgtgttatgagaatcttttgcttttgccctaaacatataggccattgtaacattgctgagtccaacacccaaggtgatgtaacgcttcatnctggacctgtctacagaggggattgtacctgcccgggcggcccgctcnaaagggcgaattccagcacactggcgcccg

SEQ ID NO: 4994 - DNA, 576 bp, Homo sapiens
  misc_feature 4, 7, 12, 25, 28, 29, 31, 32, 34, 191, 297, 350, 468, 475,559: n = A,T,C or G
cccnggngcggncgcccgggcaggnacnntnngngtgactccacacccacagaaggagagggggatgaagaaatctgccaggagggtgcctcccgccagtatctgatgaagagtgactcagccctggcctcatggaccctccacaggctctccctccctcaagggtgcagaatgatgaggattccaacctncagcaccgacaaaagcaaaaacacactcgctctgagaaaccgaggaacgagccaggaccgacctggagtttgccaagagcaagtcaaaaaaacattctggttgagnaatggtgagccgaagcctggggacagggtttctgcttcaaccacccaaggagnaaacccgactgcggggaaaaaacttgactcttttgccattatgaatccaagttgtggaaaacaaaagagtcctcttcggtgggaaaagaaaaaaaatacgctcccttttaaaccggtngggattngaaaaatgacctttgatttataaaaggagaaagaactggaggggccgggggatactgattcaagaaattcctgttagccgtgtnaataaaaaagaaaggaa

SEQ ID NO: 4995 - DNA, 541 bp, Homo sapiens
  misc_feature 22, 26, 30, 74, 204, 258, 266, 275, 401, 431, 439, 444, 465,487, 499, 500, 503, 507, 509, 511, 517, 520, 524, 526: n = A,T,C or G
cccttagcgtggtcgcggccgnggtncagngtctctagtcttttgtaatctgatagaatagtcttccttatctncttttccccccctttaaatgacattacctttttgaagagaccatgccagttgttttatagactatcacacattctttatttgtctcatttgtttccttatgttatttaactcattccactaatccttgtntttctggtaagaggaagttaggtgtaaaggttgatgagactcgtttttggtaancagacctnacagtgatncacagcgttgtatttcatattgcatcatcaggaggctcacaatatcaggttgctgctcttgtggtgctgagttggattgcgtaaaggtggggaccttcagatcttccacgggaaaggtcctgcccnggcggccgctccaaagggcgaattccaacncactggcngcggntaaaaggtggattcaacctcnggaccaacttggcataatcatnggcataggctgnnccngggnananaaccanaanaccntnttaaaaaaaaaaaaa

SEQ ID NO: 4996 - DNA, 797 bp, Homo sapiens
  misc_feature 582, 584, 640, 656, 677, 737, 756, 765, 767, 768, 779, 790: n = A,T,C or G
cgactcaagctctacacgggacgggacgaccggcactttgtgcccacaggtgtctacattgtcaggactgtgactgagccgtggaccatggcattcagcaagggctggaagaagaagttcttctacaacaagaaaaccggcgagtccttctttacactccccccagagtccattgccccattccatacctgctactacacccggctcttctgggagtggggagatggcttccatatgcgcgattcccagaagccccaggatccagacaagctgtccaaggaggacgtcctttccttcatccagagtcacaatcctctaggcccttagatttccacctgatgaatgtcctgtcattcttaaggcagggcccagtgactgggttccttctgcctcttagaaaggcactgggactgttctccctggtcacagggagatgggctcctctccattcccaaggagctcaattgggaccttagaggacgtatccttgtggaactctgctgcctgagagcttgacaccagcagcaggcagcctccaaagcagctgcttcggggcaggtcagtgctttaagcacttgccanantggcaggcttttgggcccaaccattcccattgtaaatatgtgggactcagcagtgnttctgagtttcatttnctggtccccaagaacagtcancttcttgtttttgcccaacttttttactaaggctagccaaattgtgggagcccctccatnaccgggctgggccaagganccccctgtngnnccaatcaaaanttgttttttgngggcttt

SEQ ID NO: 4997 - DNA, 328 bp, Homo sapiens
cccttagcgtggtcgcggccgaggtacgcgggctttcattttttgatgatgtgagggccaagagccttggccttggttcactgaaaaactgagacagctgagtataaaggggtccccagagaacctccgaccagcctgcgcatggggagaacgggatggagcctcagaaagtttgtgccattgttttgcagtggggaggagcctggcctctcctgttctggggtggagtctcgctttgctgagagtccttgtttcccttttgttcccttttcctccctcagccccttctcacccctttgctgtcctatgtagtgatttggtgagaaat

SEQ ID NO: 4998 - DNA, 128 bp, Homo sapiens
  misc_feature 7, 14, 58: n = A,T,C or G
ccctttngagcggncgcccgggcaggtacctagctgttgcttatacctattatgccanataattatctctatcctttttttctagtattgtgccacacacacacacacacacacacacacacacacac

SEQ ID NO: 4999 - DNA, 656 bp, Homo sapiens
  misc_feature 220, 222, 241, 265, 292, 311, 321, 348, 355, 368, 382, 401,407, 409, 432, 433, 446, 449, 451, 474, 482, 494, 500, 518,522, 523, 525, 526, 531, 532, 538, 553, 554, 555, 556, 559,573, 590, 592, 599, 604, 614, 615, 638, 639: n = A,T,C or G
ccctttcgagcggccgcccgggcaggtacagatttgctttctcttacaaaaagaaaaaaaaaatcctgttgtattaacatttaaaaacagaattgtgttatgtgatcagttttgggggttaactttgcttaattcctcaggctttgcgatttaaggaggagctgccttaaaaaaaaataaaggccttattttgcaattatgggagtaaacaatagtctananaagcatttggtaagctttntcgtatatatattttttaaagaanaaaaaaacccttgagccttaaaacggngctgctgggaacatttgtnctcttttagngcatttcccccggccttggcttggtcnctgcagncttaaaaaaaganggtaaaagggcagnccaaggggaaaggaaattntgtttntngggaattgtttccacccccccannaaagggccccganacncncctggccccccgggttgccctgncctggggncccccttggggnaaaggncaaaaaccccgttccccntttnngnnccctnngccccntttaaaaaaaccccnnnnggnttaccccttttaanaaaatttccccctttgntnaaaaatnttttnttttttgggnngggggggggggtttttttttttnnccccaaaaaaaaaaaaa

SEQ ID NO: 5000 - DNA, 216 bp, Homo sapiens
  misc_feature 106, 110, 112, 122, 128, 130, 132, 137, 154, 155, 158, 159,163, 168, 170, 177, 178, 189, 191, 192, 193, 195, 197: n = A,T,C or G
ccctttcgagcggccgcccgggcaggtacttttttttttttttttttttttttcttttttttttttttttttttttttttttttttttttttttttttttttttanaaananaaaaaaaaantttttnantngaatnaaaaaaaaaaaaacttnnatnnaaanaaatnanggaaggnntttttattttngnnngntnttttttagaaaaaaaaaaa

SEQ ID NO: 5001 - DNA, 197 bp, Homo sapiens
cagaattcgccctttcgagcggccgcccgggcaggtacaagtgttgaatagagaccacattctggttgaagacactaagccatcttatttcagcctgaatctagtaatcagaagctcactaactcttgatgcctcctgcttgctagttagataactccaaagattagagagtacctcggccgcgaccacgctaaggg

SEQ ID NO: 5002 - DNA, 469 bp, Homo sapiens
  misc_feature 254, 264, 308, 325, 342, 402: n = A,T,C or G
ccctttcgagcggccgcccgggcaggtactttttttttttttttttttgcagaattgttagtgactggggaaaaaatgaaaacaactgaaatgacctcagtagaggaatggccaaataaattatgatatactcataatatataatatcaagtatctgttaaaataatgcagtagtttattctatacatcatgcccgcgtagtctgcgttgttaccactgcttactttttttttttttttttttttgggccccanaaatactatntaaaaccgggtgatcaaaacaaaacttatgtcatgaattttaanagtttttagcaaaaaanatatttttgaactggcncagcaaaagcaaagttgaacatcatgatacacaagactaatcatgcaaacaactgtaagngggatgtgttacttaaacactaagctcatgactgacattctcaatatatccactgatttttttaaac

SEQ ID NO: 5003 - DNA, 508 bp, Homo sapiens
  misc_feature 155, 177, 199, 214, 291, 377, 416, 428, 430, 438, 451, 458,466, 485, 486, 489, 491, 494, 495: n = A,T,C or G
cccttagcgtggtcgcggccgaggtacttcccatgtgccagaggaacttaagcagccgttacacagaaagtccaaatcgcaggcatatgctatgatgctgtcactgtctgacaaggagtccctccattctacatcccacagttcttccaacgtgnggcacagtatggccagggctgnggcggaatccagtgctatccantccataagccacgtntgacgttatcaaggttgaccaagagtgggaccaagtccaacagtaagcatggctctttcatataggactatttacangactgctgagcagaatgccttataaacctgcagggtcactcatctaaagtctagcgaccttaaactgaatgatttaaaaaagaaangaaaggaaaaaagaaacctatttattctccgatattttngttttgcacaancnaaaggcanatggctggacttntgggaangaatcaanccaatggccaactttaaanngantncanntgaaaaaccaaaa

SEQ ID NO: 5004 - DNA, 312 bp, Homo sapiens
  misc_feature 184, 208, 227, 250, 262, 283, 284, 297, 298: n = A,T,C or G
cccttagcgtggtcgcggccgaggtacattctgttcaggtgataactgagcctcaatcaagcagaaactttttgcttgaaattaaaaaaaaaatttctattagtgaaatttcttttttttttttttgggaagcaccctgttatctaaagaatctttgtaagatttttgtaaaatttttgttttnacaagatttattttgaaaattggntttttgcaagattggtatnatttctggattgaatggattttntaattgggaatnaccataaaagaattccttatnnccaaaaaaaaaannaaaaaaaaaaaaaa

SEQ ID NO: 5005 - DNA, 376 bp, Homo sapiens
acgcggggggagccagagagacgcagctaggcctccacggctgtggagagatcctgccacgggccttgttcaccatgtcggtgctggatgcgctttgggaggatcgggatgtccgtttcgacctgtccgcgcagcaaatgaaaacaagacctggagaagtccttattgattgtttagattccattgaagacaccaaaggaaataatggagatagaggtagactcttggtaacaaatttaagaattctctggcactctttggcattatcaagagtcaatgtttctgtcggttacaattgcatattgaatattacaacaaggactgctaactctaaattacgaggccaaactgaagctctctatatactaacaaaatg

SEQ ID NO: 5006 - DNA, 757 bp, Homo sapiens
  misc_feature 546, 583, 597, 609, 612, 616, 630, 644, 661, 664, 705, 707,712, 722, 735: n = A,T,C or G
cccttagcgtggtcgcggccgaggtacaggacgtctccccattacaactacccaatccgaagtgtcaactgtgtcaggactaagaaaccctggttttgagtagaaaagggcctggaaagaggggagccaacaaatctgtctgcttcctcacattagtcattggcaaataagcattctgtctctttggctgctgcctcagcacagagagccagaactctatcgggcaccaggataacatctctcagtgaacagagttgacaaggcctatgggaaatgcctgatgggattatcttcagcttgttgagcttctaagtttctttcccttcattctaccctgcaagccaagttctgtaaaagaaatgcctgagttctagctcaggttttcttctctgaatttagatctccagacccttcctggccacaattcaaattaaggcaacaaacattataccttccatgaagcacacacagacttttgaaagcaagggacaatgactgcttgaaatttgagggcctttgaggaatgaaagcctttgaagggaaaanaaatacttttgtttccagcccccctttcccacacttntttatgtgttaaancactgggctttnctngaanccttgggaagcccncgggtggactggtntttacattgttgttttntanaaaaaacctgattttaaaaagtttctggatcggttccaagnanaatgnatttaaaatnttccattttccgnaaaaaaaaaaaaaaaaaaaaaa

SEQ ID NO: 5007 - DNA, 138 bp, Homo sapiens
  misc_feature 5, 12, 18, 39, 40, 111, 125: n = A,T,C or G
ggaantggaaanatggtntaaattggatcccttggtganncaacccaggaggcctatctgcaacatgtagggtgtggggcgacagtattgtggggcttccattcatcttantacctcggcccgcnaccacgctaaggg

SEQ ID NO: 5008 - DNA, 460 bp, Homo sapiens
cccttagcgtggtcgcggccgaggtactccagaggctaaaacaggagaatcgcctgaacctaggaggcggagattgcagtgagccgagattgcaccactgcattccagcctgggcaacagagggagacgccctcttaaaacaaacaaacaaacaagcaaaagcccagatcactgggccccatcctcagagtttgtaattcagtagatttggagggtagtccaaaatttctgtttctaaaaattctcagatgatgctgatgctgcttgttcagggaccacactttgagaatcactggtgtaggatactgttaagtgagatgagtgaatgtaaaaatatatttaatctggtccaatttttgtaaaataaacaactccccaaatgctatacatatgtgtattcatatgaaaaaatatgacaaatgctacacagtaggacattaacatgagcccgagtacctgc

SEQ ID NO: 5009 - DNA, 526 bp, Homo sapiens
  misc_feature 508, 509, 511, 515, 516, 517, 518, 519, 520, 521, 522, 523,524, 525: n = A,T,C or G
atagggagtcgaccccgcgtccgattctattccccaaattaactgaaaacatgaacgctagatgggaatgatgggagaaataatatatttatttcggtgaaattttgcatgtgtgaaagttttgttaactaggaccttcgagatcctagactgcttttgtcttactgtgggaaacagagtctcttgtagacactagcattttaaggtgacaaaagtcaaaggttgtttcctttggtttaagcggcagccaagcattcttcaattgggggcttagggtgtggctgttgacaacacattttattatggggtctttaatgataaaatattaatctaaaaataagccaaaaattacaggtttatttttcactaaacagacaattgaaatacatggtacaaaaataagtggtaagattattgtaaaatgaaaaatggacagaataaatattcaatttaattttccatctatgagaatttcacaataaaatcataagtttactttgtattatannanaaannnnnnnnnnna

SEQ ID NO: 5010 - DNA, 771 bp, Homo sapiens
  misc_feature 32, 33, 64, 74, 101, 242, 299, 313, 403, 430, 490, 498, 503,506, 515, 516, 530, 535, 553, 569, 571, 578, 581, 584, 627,634, 640, 661, 671, 683, 690, 694, 697, 707, 712, 718, 732,740, 751, 754, 755: n = A,T,C or G
ccctttcgagcggccgcccgggcaggtacttnntttttttttttttttttttttttttccgganatagagcctnactctgtctcccaggctggagtgcagngatgtgatcttggcttacagcaatctctcccttctaggctcaagcgattctcccacctcagcatcccaagtagctgggactacaagtgtgccaacttagaattatattagccacacccagctaatttttgtatttttttgnagaggcagggtctccccatgttgcccaaggttgggtcttgaactcctgggcttcagngatccacccatttngcctccagcaaagggccaagattacagccatggaccccatgcccagcataactatttttaatgaaagtagactttaaaaaagaaaaagtntttattagaggtaagaagaccccctcnccagaaaagaaaaattttacttaggggcccaggccccaatgggctcgggcctgtaaattnccagcacntttgnganggccaaggnngggggaacacctgngggtnggggggttcaagaccaancctggaccaacatggnanaagcccnggnctnttcttaaaaattccaaaaatttgcccaagccttgggggggcanattgccnggtttnccaacttcttaaggaggcttngggggagganaatttctttggnccccagnaagnganggttgcgggngaacntaaaantgggccaattgganttccaccngggggaaaaanaannaaaattttttttaaaa

SEQ ID NO: 5011 - DNA, 275 bp, Homo sapiens
  misc_feature 265: n = A,T,C or G
cccttagcgtggtcgcggccgaggtacaattaggttctgacttaaagattagagattgaaacaaacagaaaaaaatgcaaccgcttgcatttcttgctaaaagtaaaccaaaagcagtttaatttgaaggatgtgctatggtagccgtgattaggttttaggtcaaataaccaatgggcccaactcaatgtgagacagggggagcctcattaagaagagtggctgagaaggaggcagcatgaccagtacctgcccgggcggccgnttcgaaaggg

SEQ ID NO: 5012 - DNA, 252 bp, Homo sapiens
  misc_feature 96, 104, 105, 106, 108, 115, 119, 120, 122, 125, 128, 129,147, 157, 159, 168, 169, 171, 172, 173, 184, 190, 192, 196,200, 202, 213, 215, 216, 218, 221, 230, 232, 233, 235, 237: n = A,T,C or G
ccctttcgagcggccgcccgggcaggtactttttttttttttttttttttttttaatttttttttttttttttttttttttttttttttttttttntggcaaannnanttttttntttnnanttnggnnattggtaaaatcctagtnacacaattgnanatttttttnncnnnagaattttttntttaangnaaanaacntntgaaaaaatantnnanttntggaaatancnnananattttgttttttaaa

SEQ ID NO: 5013 - DNA, 394 bp, Homo sapiens
  misc_feature 19, 81, 120, 132, 133, 135, 137, 138, 150, 151, 153, 154,156, 157, 163, 165, 172, 173, 174, 175, 177, 178, 182, 183,193, 194, 195, 196, 199, 202, 203, 205, 206, 207, 208, 210,213, 215, 218, 231, 236, 238, 239, 240, 242, 246, 247: n = A,T,C or G
  misc_feature 257, 260, 261, 262, 263, 273, 276, 277, 278, 281, 282, 284,285, 287, 290, 291, 292, 293, 295, 298, 300, 302, 307, 308,318, 319, 329, 333, 348, 349, 353, 354, 357, 358, 359, 363,373, 381: n = A,T,C or G
cgcccgggcaggtactttntttttttttttttttttttttttttttttttttttttttttttttttttttttttttttttnttttttttttttttttttttttttttttttttttttttntttttttttttnntnannaaaaaaaaaaanntnntnnataaananaagcctnnnncnnacannactaggaagnnnntanatnnannnngnggntntgnaaaaaaaaaaaantttantnnnancatnnaaagtggaanggnnnntatcctgaanatnnnganngnnantgnnnnantgnanantctgnnaagaaatatnntttacccttncttnatggggaggcttaannatgnncannncttncatgcccttntatcccanattacctaaatgc

SEQ ID NO: 5014 - DNA, 452 bp, Homo sapiens
ccctttcgagcggcccgcccgggcaggtactcaggtctgaaggcaaccacactgattatggaggctccactttttcactacccaactcaaaactgtcattgtcagtctttttttgaattctttttaaagacaaaactaaacccagaagatcgaactggaaataaaagcagacaaagagaccaccaaatatactgtttaaaaaaacaacaacaacactgctcatggtttacagtatgtggacagttcctttgttcatgatagagtaaacaaaagtcccttttgtgtgcttgagcaaatgaaaaccaagaggagaaaaacacacaccacctcccatcccctaaaaacataattaacaaaataaaaaataaaataaaaaatcctttgccccagtcaacgtttttgcagcatccattgtggtcggccttgtacctcggccgcgaccacgctaaggg

SEQ ID NO: 5015 - DNA, 156 bp, Homo sapiens
ccctttcgagcggccgcccgggcaggtacgcgggtgagtttgctattcctgttttataacctgttctgcagaaacctatttttattaaagatttttataagaaagggaaaaaaaaaaaaaaaaaaaaaagtacctcggccgcgaccacgctaaggg

SEQ ID NO: 5016 - DNA, 548 bp, Homo sapiens
  misc_feature 475, 535: n = A,T,C or G
cccttagcgtggtcgcggccgaggtacatcgtatagcagaccgcgggcactgccgccgctaggtagagtctgagggcttgtagttctttaaactgtcgtgtatactcgagtctgaggccgttgctgacttagaatccctgtgttaatttaagttttgacaagctggcttacactggcaatggtagtttctgtggttgcctgggaaatcgagtgccgcatctcacagctatgcaaaaagctagtcaacagtacgcgggccttttttttcacaagatggcgccgaaagcgaagaaggaagctcctgcccctcctaaagctgaagccaaagcgaaggctttaaaggccaagaaggcaagtgttgaaaggtgtccacagccacaaaaagaagaagatccgcacgtcacccaccttccggcggccgaagacactgcgactccggagacagcccaaatatcctcggaagagcgctcccagnaagaaacaagcttgaccactatgctatcatcaagtttccgctgaccacttgagtctgccntgaaagaaagaat

SEQ ID NO: 5017 - DNA, 513 bp, Homo sapiens
cccttagcgtggtcgcggccgaggtacactggcagcctctactggccattgcaaagagcagcattgtcctctgttctttccattccaggttgcatatgcttttacttgggtttagctctttcttctttggtcctcaccctctttgttgtcctcttttgaagactagttattctgttggatgtcttgatttataattaataaagagctactagtccagtattttcattaataaattaatatcataagtgaatggaattcttcaggaccttagaagaagttatgaatataacctttccttgagaagtaattttcatgtaagagggaagatagatttatctttatgtaggttttaaaatactttctcagttgcaagccttaatgtatgatatagagattagtcttttacttatgactgacaaaaaaccctgatgccttgaaagaaagccttggctcagtgatagacttaattacacacacacacacgtacctgcccgggcggccgctcgaaagggc

SEQ ID NO: 5018 - DNA, 474 bp, Homo sapiens
  misc_feature 154, 204, 212, 254, 278, 302, 313, 318, 346, 381, 384, 441: n = A,T,C or G
ccctttcgagcggccgcccgggcaggtactttattgtattccaatttaaaaaaacaaaattaagtctatattttaaaaactctgacaatagcaagatatttaatgaactctacttcatatctagttcattttttttttctggtttgaaaaaaanatcagctttccctgaataaacaaaaatgaatgtaaataaacatgaaaatncaaaaccntaatttccaaaaacgaaatgaatgggccaacagtaaaatgcncaatgagccacaactgccctggtntttaaaaaaataaaggtcaactgngggtcataaanaagtntcaacttttaaaaatatatgtatgtatngctactcatagcatactctgacctaaaaaaggcanatnctgattttatagccagggacaaaaaatttgaacggaattgcaaaaccccctgcttgngatcactatatgaaatggaagaataattgaaat

SEQ ID NO: 5019 - DNA, 406 bp, Homo sapiens
cccttagcgtggtcgcggccgaggtactttttttttttttttttgagacggaatttcgctcctgttgcccaggctggagtgcaatggtgcaacctccgtctcctgggttcaagcgattgtcctgcctcagcttcccaagtagctgagaccacaggcatgcaccaccacacctgactaattttgtatttttagtagagacgggatttctccatgttggtcaggccggtctcgaactcctgacctcagatgatcctcccgccttggcatcccaaagtgctgggactacaggtgtgagccaagatcacaaaagagagaaaagaaaaaagtctatcgggctaatgggaagctgccagggaagacagggtcttaccacccgcgtacctgcccgggcggccgctcgaaaggg

SEQ ID NO: 5020 - DNA, 414 bp, Homo sapiens
cccttagcgtggtcgcggccgaggtactagctgggtgacctggggtaagctacttaatctctctgaatttcattttgtcatcagcaaaatgggcataataatacctactttataggtttgttttatagattaaatatggtaagccatgttaaatattcactttagtgaatggctcattgttaagtcctcaaaagtagttgttaacaataataaatgtatacataagttatacatttccttaagcaatacaaaataggtcacactgaatggaaacacctcaaaccatctgtggtttacccctagagaaaattctgattgccagacataatatataggggcaggtccttaacgtgtggtctcccactctctctaggtggtagtctcctctagggggtgtgcaaagttacctggggc

SEQ ID NO: 5021 - DNA, 442 bp, Homo sapiens
  misc_feature 77, 90, 169, 185, 239, 255, 256, 260, 263, 268, 269, 270,271, 272, 285, 298, 300, 303, 304, 306, 314, 315, 353, 364,374, 379: n = A,T,C or G
ggtaccactctttggatgtgattgggttcctgctggtctgtgtggcaactgtgatatttatcgccacaaaatgttgnctgtttttgtctntggaactttgctagaaaaccaaagaagggaaaaaatgattagttatatctgagatttgaagctggaaaacctgataggngagactacttcagttnattccagcaagaaagattgtgatgcaagatttctttcttcctgaaaaaaaaaanacaaaaatggaaatannttcntgnccggnnnnnattaccatggggnaagttcccccccntnggnngnaataatgnntggttctttcatgcttttttctgtgcgcttacctaagngtgaatatgtnaagggtttgntttgnatacaaatgggattatactaaaataagtaatgcctatttttaaggataggttaaatttgtgaa

SEQ ID NO: 5022 - DNA, 705 bp, Homo sapiens
  misc_feature 50, 52, 122, 123, 124, 125, 126, 139, 140, 141, 150, 152,154, 155, 156, 158, 160, 161, 168, 169, 182, 183, 189, 194,195, 196, 197, 198, 202, 206, 210, 223, 242, 243, 245, 246,247, 248, 249, 255, 256, 261, 264, 265, 287, 291, 293: n = A,T,C or G
  misc_feature 294, 296, 298, 301, 318, 320, 321, 333, 334, 337, 348, 351,355, 356, 368, 373, 374, 376, 380, 381, 388, 407, 408, 423,424, 432, 437, 446, 448, 470, 474, 475, 479, 481, 482, 484,503, 504, 505, 506, 508, 531, 532, 542, 552, 556, 558: n = A,T,C or G
  misc_feature 559, 575, 578, 594, 595, 604, 608, 610, 611, 622, 631, 637,641, 648, 651, 664, 681, 682, 686, 687, 689, 690, 692, 695: n = A,T,C or G
cccttagcgtggtcgcggccgaggtacttttttttttttttttttttttnanttttttttttttttttttttttttttttttttttttttttttttttttttttttttttttttttaaaaannnnnggggttttttttnnnaaaaaaaanantnnnanannttttttnnaaaaaaaaaaaannattttnttttnnnnnaaanacantaantttttttttttcnccccccccccctccaaaannannnnnggaaannggggnggnnttttgtaaaaaaaaaaaaactncccncnnananccnaaaaaaaaaatactggnannataaaaaaacannccncccttaagggnttnaaannccccccccctanggggnntntttnnaactaanttttttttttttttttttnnttgaaaaaaaaaaanngggggccnccccnaaaaaaaangnggggcttttttttttttttaangaanncccntnncnaaaaaaaaaaaaaaaaatnnnntnggccttcaaaaaaaaaaaaaaanntttttttttncccccccccncccngnnaaaaaaaaaaaaaaanccncttttttttttttttnnaaaaaaaanaaantnnttttttttttnataaaaaanaaaagngganggggggnaancccccccccaccntttttttttttttttgnngggnnanngnaantttttttttt

SEQ ID NO: 5023 - DNA, 459 bp, Homo sapiens
  misc_feature 440, 443: n = A,T,C or G
cccttagcgtggtcgcggcccgaggtacagaccaaccatggagaagatgaagcaggtggtgacacagactcggtggatgaggccagatgcaaagagagccaacaggaggcacaggagaactagggaggcaagaagaacaaggagggcaacggtcagaatggaaatactaggcatctgcacatggagtccaggagaaatccggggctctctgaatcctggggaacctgcttagaagggtaagcgtgactacagcaggaggattctgattaccttaatgatacccagaacatggaggtaggaggttgagtgtggtggcttgcaccttggaatcccaacacttcgggaggctgaggtgggcagatcacttgagcccaggaagtttgagaccagcctgaacacaaagttgagaccctctttttaaaaaaaaaaaaaaaattganttnaaaaaaagtaccctgc

SEQ ID NO: 5024 - DNA, 321 bp, Homo sapiens
ccctttcgagcggccgcccgggcaggtacgcggggatcttggggctgctgggactcgcgtcggttggcgactcccggacgtaggtagtttgttgggccgggttctgaggccttgcttctctttacttttccactctaggccacgatgccgcagtacctattagaaaaatgctacaaactttccattaaaaatatatattttctccttcatttgtcataataaacagaatataattttctttctaaaattaagtcataccgtttctttataggatgataatatgtacctcggccgcgaccacgctaagggcgaattccagca

SEQ ID NO: 5025 - DNA, 508 bp, Homo sapiens
  misc_feature 97, 101, 103, 111, 133, 136, 142, 157, 161, 162, 164, 165,167, 168, 169, 170, 171, 177, 178, 180, 191, 201, 203, 206,212, 224, 234, 235, 237, 238, 241, 244, 253, 256, 258, 260,262, 308, 309, 310, 328, 332, 334, 336, 340, 358, 361: n = A,T,C or G
  misc_feature 375, 379, 380, 381, 382, 385, 390, 391, 392, 396, 402, 403,404, 406, 407, 413, 414, 416, 418, 419, 420, 425, 426, 431,435, 438, 448, 450, 459, 460, 466, 467, 470, 476, 477, 478,485, 489, 493: n = A,T,C or G
cccttagcggccgcccgggcaggtactttttttttttttttttttttttttttttctttcttttttttttttttttttttttttttttttttttaanatgncntttttttnttttttcttttttttttttttnatnattttnttctttttttttttntttnnanncnnnnngagggnngnggaaaaacccnaaaaaaaaananaanaaaaantctttttttttnataaaccccnnannaanaanatgtttttnaanantntnttttttttttttaaaaaaaaaaccaaaaattctttttttttttatnnnaaccccccccccttgcanttanantntatnaaaaaatttttttaaaanttnttttttttttaatnttcnnnnggncccannncttntatgannnanntttccnncntnnnggggnnggatntttntanaaaaaatatncnaaaaaaaanngtgtgnnaanaatatnnnaaattgntttntctnttgggaaaaaaaatt

SEQ ID NO: 5026 - DNA, 288 bp, Homo sapiens
  misc_feature 1, 2, 13: n = A,T,C or G
nnagcctgctcgncggccgccaggtgtgatggattatctgcagaattcgccctttcgaggcggccgcccgggcaggtctctcttcgtgtgcaagagataactatgaaagccaaattcaaatactggccaacatttcctaaaggggctcaatatctatcattcgtcttcttttccaaactacacatcactgtatgactcaaccagtagcagttatattgccccttggtttttattcagtttaactactgtttccaagataaatgagctaaaaaaaaaaaaaaaaaaaaa

SEQ ID NO: 5027 - DNA, 449 bp, Homo sapiens
cccttagcgtggtcgcggccgaggtacatccctactcaaaattatatcacaaattcagctgggagcttcttttaccctgtgacccctccctgagctcattggctaactttcttgagggctcctgtgagatatagtcaggaatggctttccttggttcatactagagactcagaatacctgcaaggcacttcctgcgactgcttctacttttattttcacgaggctccctaaatttgttccagctcttggtagcattaaggccttctcctgtggcctggattttcagattccttagtggggatatgtgctcaaaggtagaatctccccgtctcatactctgggaacttttattttttttcctatctcatggagtaggctgcagcctatcacttccttcaaaaggtctgtggatttttccagttttcccagtgggagaggcatgctaacac

SEQ ID NO: 5028 - DNA, 699 bp, Homo sapiens
  misc_feature 184, 185, 576, 612, 635: n = A,T,C or G
cccttagcgtggtcgcggccgaggtactatactcagtatttaaatatgtcccagtatagaagcataacttcaattaatttgctgacactaacttcttaaaaacttacaaatattcaaaacaaagggaaaaaattttagatagccaagatttaaaaagccatcgccttgaacatggagcctcctnncaaaagaggagatatacttgtatactcattatattttatttagtagccatgtaaggaaacacacactcacttatcccaaatatttttctacttttaatggacatccacttgaaaacaaatcttaattttaatgtcaatttagtttcaaatacttttccagctgcctagtatattccaattaaatgctattattatatctgttttaaaactgggaattaaaggttagaaatactttgcagagtggtatccaaatcatttgagaggccaacattaaaatttgactttaatgtcttattaatatatcaacaggcaattgttccgacttttgaggaacactaacactgcttccaaaagcacccctgcttttctttcttcatcccactaatattgncttagatgttgtcaaccaagaaacatttatggtaangagagcttgctgcataaaactgnattggataatatattcttatgtcagaaaatactcaatttcttctacttcacttatttaaaaccc

SEQ ID NO: 5029 - DNA, 188 bp, Homo sapiens
ccctttcgagcggccgcccgggcaggtacttaagagagaggttccactgctcttaagaaattgaatcttttcagcagactcctcttctatttccataacaggctgagaagtcttctttgttttcaaatagctcacatttgttccaagaagtccatccccgcgtacctcggccgcgaccacgctaaggg

SEQ ID NO: 5030 - DNA, 444 bp, Homo sapiens
  misc_feature 118, 157, 167, 169, 173, 226, 276, 281, 305, 327, 333, 346,349: n = A,T,C or G
cccttagcgtggtcgcggccgaggtacagtggcatgatctcagctcactgcaacctctgcctcccgggttcaattctcctgcctcagcctcctgagtagctgggattacaggcatgcnccaccatgcccagctaatttttttgtattttcagtaaanatggggtttntntatnttggccaggctggtctcaaactcctgaccttgtgatcctcctgcctcggcctntcaaagtgctgggattacaggcatgagccaccactcccggcctaaaaaanaaaanattttcaacccattcgtaatatancaggattttttttaattccagngtatanaagtctaattaanaanagcaaatttattaatatttctagttaaatttatatattttagtctaagagaaaatattaaagcgttgaataaataaatgtttaaaaacaaaaaaa

SEQ ID NO: 5031 - DNA, 367 bp, Homo sapiens
  misc_feature 27, 64, 78, 82, 142, 148, 187, 189, 191, 195, 209, 218, 226,245, 255, 279, 280, 291, 301, 323, 343: n = A,T,C or G
ccctttcgagcggccgcccgggcaggnacttttttttttttttttttttttccacttaactatnttttcttacttatntgcnttaaactaccaaaaacaaatcaaaaaaggattctggatctaattcttcctaatggctctngttagncggaaaagttgtattattactgtttctgaaaggtaaaancntnaccntaaaacaaaattanatggattanaagagtanatgtgaggctgggcgtggnggctcacatntgtaatgtgcttcaaaaacagtannttgagaatcanaagcagagtnggatgtgttcactgcttccagngactatggacagcacaccgntgataaaaaactaacctccacgag

SEQ ID NO: 5032 - DNA, 295 bp, Homo sapiens
  misc_feature 44, 45, 138, 170, 171, 176, 178, 204, 208, 211, 236, 237,253, 255, 257, 258, 284, 286: n = A,T,C or G
aacccttcgagcggccgcccgggcaggtacttatttaaaagaanngtaaagattggcctgttagaaaaagcataatgtgagctttggattactggatttttttttttttttaaacacacctggagaggacatttgttnacactgtttttaccctcgaaccctgatgcggnnccatnangtaaatatttcaaatattaaaaatgnatanatncaaaaaaaaaaaaaaaaaaaaaagnncattggatactgcagngncnnctacatgggatgggacaggacataangnaaaacataa

SEQ ID NO: 5033 - DNA, 513 bp, Homo sapiens
  misc_feature 308: n = A,T,C or G
ccctttcgagcggccgcccgggcaggtacacacacgtgcacatcaacactaggcttcctacgtctgtttgctgaaaagatctagaaataataaccaacctagtggaattgatcttccctggtttccagattgtcatcttgatacaacattttccacaaaagaagccagggtttttggagaaagactgattgtatgtccaatgcaaggattttaaaagatgagcctggtggtgcatcctggaaacctaaccagatagtaagaaaactgacactactttatgtcggaagtattgaggaaccaatatgaanaggcttccagtggccaaagatgtgacagttagagcatcagtgtggataataacaggaatggattgaaatgcatcgaatatgcttgtctctctgagtccataatactaaaaaattaattggtcacctttgaaggataaatagaagcccatatcattgttttgaaaaattgtaaatagaagatatgagcatttatcctgccttttcc

SEQ ID NO: 5034 - DNA, 175 bp, Homo sapiens
  misc_feature 147, 166: n = A,T,C or G
ccctttcgagcggccgcccgggcaggtaccactgtctgttttcaggggttaaatttggagaatatctttagagcctcaatctggctattttggaagattatttttgaaaataatttcaaggaaaatactagatgtcttttagataangcttttcaatttgaactcngtatacatg

SEQ ID NO: 5035 - DNA, 469 bp, Homo sapiens
  misc_feature 51, 79, 103, 104, 118, 120, 121, 124, 125, 126, 127, 139,162, 166, 168, 169, 172, 173, 181, 184, 185, 188, 193, 194,202, 203, 204, 205, 207, 208, 209, 212, 214, 217, 218, 220,222, 223, 224, 233, 238, 239, 249, 256, 258, 263, 264: n = A,T,C or G
  misc_feature 284, 297, 298, 299, 307, 322, 323, 324, 333, 334, 350, 357,366, 378, 383, 392, 405, 408, 409, 411, 413, 414, 418, 420,424, 425, 428, 436, 439, 445, 447, 450, 454, 455, 456, 458,466: n = A,T,C or G
cccttagcgtggtcgcggccgaggtactttttttttttttttttttttttnggtttttttttttttttttttttttttnaaaaaagaaaaaaatttttttttnnaaaaaaaaaaaaangnncannnnaaaaaaaaaaantttttaaaaaaaaaaaaaaaaangggncnnttnnaaaaaaanttnnaanccccnnaaaaaacnnnngnnnccnanttnnantnnnaaaaaattnggggnncccccccccnttttttncnccccnnttttttttttaaaaaaaaangaatttttttttnnncccccccnaaaaaaaaaaaaaannnaaaaaaggnncccccccccccttttnaaaaaanttttttttnaaaaaagggggnccccnttttttttngggggggggttanaanngngnnaaantncccnnctngggggggntanaaaaananaancccnnngnaaaaaaanggg

SEQ ID NO: 5036 - DNA, 516 bp, Homo sapiens
  misc_feature 444, 463, 486: n = A,T,C or G
acgcggggaagagttcaaagagatgtgagaattagaaatgctgctgttggagggaagattactgctgtcaaagggaacagtcaagtcagtgcaaaggccctaaggtaggagtgtgcctatcatgtttgaggagcagcaaggagaccaaagtgcctgtagcaaggtgagcaaggagcccgcacataaagggtcactctgcctgctgtgttaaaaataaacagcagggatggccgggtgcagtggctcacacctgtaatcctggcactttgggaggccaaggtgggtagattgcttgaggccaagagttcaagaccatcctgggcaacatggtgaaaccccatctctacaaaaaacacaaaaattagccgggcgtggtggcgtgcacccatagtcccaactacctgggaagcttaagccggaaggatggcttgagcctgggaagtngaggttgcaatgagctganattgtgcaacctgggtgacaganccagacaccgtcttaaaaaaaaaaaaaaaa

SEQ ID NO: 5037 - DNA, 350 bp, Homo sapiens
cccttagcggccgcccgggcaggtacttcattattattttttcaatttttttcttatttttttaaaggtagacttcagaatcatttaatcaaattccaaaaacaaggcagtttcatgggaactatataaagacagagagaaagagaaagaaatatatatatacacatatatatattctttccataatgaacatgaaatttatcaaaggctcacgtatgattcatgaaaaaaaaaaaagaaaaagaaatttccatttcctcagactttaaaaatatttctcagtaacagtttactccatatacccaactaaggttattcccccggtacctcggccgcgaccacgctaaggg

SEQ ID NO: 5038 - DNA, 512 bp, Homo sapiens
  misc_feature 459: n = A,T,C or G
ccctttcgagcggccgcccgggcaggtacatattgtccttttacttccaggtgcagggctcccatttcttgtaggaccagtctttatgtatgaatgataagttttctgggtatagtatccctggctggcaatatttttctttcagtgctttgaatatatcatcccatgttctcttggcttttaaggttactggtgagaaaccctctgttagtcgaatgggggttccgttataggtgactagacattttttcttgctgcttttagaattctctctgtctttgactttttagaatttaactataatgtcttatggagaatactttttggaattgtgcctgtttgggtatctctgaacttcctgtaactggatttctaaatctcttgctagacttaagaagttttcagctattattttgttaaatagcatttctatcccttttttaaccttgtgggatccanaaaatcaaacatttatttgctttatgatgtcccatatgtcaaaattagctttt

SEQ ID NO: 5039 - DNA, 775 bp, Homo sapiens
  misc_feature 34, 39, 40, 47, 49, 68, 69, 81, 166, 246, 272, 353, 368,412, 442, 444, 452, 467, 489, 573, 589, 603, 618, 639, 663,664, 666, 667, 679, 704, 706, 727, 737, 750: n = A,T,C or G
ccctttcgagcggcccgcccgggcaggtactttnttttnnttttttntntttttttgccgggaaagtnnatcttctccgtntctctggcattggctttatttcaagaatttctagtctggcccagtcattgtctttaaaaggagcaagtgaccaaaagaacaaatngctcaatgactaaattttcctgctaaaatcttaaccgtatatcactaccaagaaccaaaaccgagttgctgataaaaatngttaaataagggtagccaccatcttntccctggccatttcaaatcacaaggccagcgttagtgaacaattctgtctttgccaatttgaaattcaagttttttctttnaaacattcctctttnaacttgttttgttacttaactgttttaagggccatcaggaatanaaaagaccggggttttaattctcacataananaagctttntaaatcccaattttnctcaatttcatttgaggttgangtatctacccaattagcttcctttatcaaagtgtttttaggcttaaatggggttaaaaaaaaaaaccctataccttattggggnaaatcataaaggcttnctttggtagcttantgtttattaaatttnatcaacattatttggggcaanatgatttaaggaattgaaagcccnncnnaaaattttttanccctttccttaaccaacaacttctngntaaagcacagcattggtttanttgaggccanggaccttgggctngaaataacaattttcttaaaggggg

SEQ ID NO: 5040 - DNA, 702 bp, Homo sapiens
  misc_feature 504: n = A,T,C or G
cccttagcgtggtcgcggccgaggtacatagtgtcgcgaactcaaatcggcatttagatagatccagtggtttaaacggcacgtttttgcttataaaaaaagtgcaaaaaagatgtggtttacaagttaaagctacagaatccctttttgctgtaattgcaccagttttaaagcctctggacagagcagtatttcgtttaaaactttgtttttcttaaaagcttacagtgtttggctaattctcctcccctttttacaagacgggggccggagggtggacactggtggcaggttaagggatactgtcactttaagaagcctgcagattgaagtgtaaacatggggaaattaggggctgattttttaaactgtgtgagatattaaccagccgccctgttataaaatcaggaaatccaaacagcgatttacaccgattaacaccccctttatatattttttacaaaaatcactgagaaaataatcaaacgttttcatctctcttgnctttttttggtttttaaaaagtgtcaaaagtctacatttaaatataaaaaattaaaaagttaaaactctagcccttcagtgaagggaacgtaaaatggcgtgggtaacaccacttcccaaaaaaaaagaaaaaaaaggaaaaaagggaaagggagggattaaggaaataagggagtaaaagaaaggaagaaaaaaggg

SEQ ID NO: 5041 - DNA, 612 bp, Homo sapiens
  misc_feature 547, 586, 593, 612: n = A,T,C or G
cccttagcgtggtcgcggccgaggtacattttaatgaaagagttttaaaataggtaagtcttctaaaaacaataattactaagtccattttacaaatgttggtgggataaatgggtgggtcagattttcttaaaatcagaaacagactgctaaataacctactgaatacatctaggaaaactttttttttttttttttttgggacggagtctcgctctttcgcccaggcaaaaacattttaaactttatggaagatatacttatcttcagaagtataaaaaacacattgataaaaattgttaggctgacataaaaatattcattaaaaagcttgtatgcaaaatttaatcatataataacttgaaacttttaaaatgggatcacttgttatctccacatgttctcttctcaccaatttctcacaaaatctaaaacacagatgttagaactgtaaacattattaacctagagactaatttcctaaaataattacattttgcagaatatagagtgaataggtggttctttctcacaaaaactggattgngtaatcctaatatgaaatccccaaatctcatgaaaagtnactttgnaaacctaaccttaaatttn

SEQ ID NO: 5042 - DNA, 439 bp, Homo sapiens
cccttagcggccgcccgggcaggtacaaattagccattcatgcaacaggcagtgttcaaagaggcttcaagttcaagggagctcagagttccattttccaccgaaaagctttaaacagactgaatattagtggacatttttgaataattttaaaacataattttacacccgatcttagccagaaggttgagaagtgataacaaaagtgtcagtattctggagagatattcctcagttgttatcacttaccacagtaactaacatcgatgttggacatgctgtttttataacaacattctttttttatattattctttaattttataagacttcataggacacaggcaatacaaatctgctatgttattcctttttgtctctccttgtaatttacaacctgaaaatgttgactgtacctcggccgcgaccacgctaaggg

SEQ ID NO: 5043 - DNA, 491 bp, Homo sapiens
cccttcgagcggccgcccgggcaggtaccgggatgagatttaagaaggagtgaagagaaagtggcagaaagactatttgaagatatgatggccagaattttcttaaatgttatgaaaaacattgatctgcctaagaaacttgaagtccatgtggtataatttaaagagatgcatatttcaacacatagtagttgaactgttgaaagacaaagaaaaaaaatgtgaagacagcaagagaagagccactcatcacacaaaagtctcctcaaaaagatggctgacttcttatcaaaagcagggaggccagaagaaagtgggatgatatattcagtacatactatacagtaacactgctgttggccctggagataaaacagtcacaggtcagcccttgctcccatagggcttacactccagtggggacacccacaaagcatgaaaataaaagcagtaaaaataaaacagggcattatgttacagaggggtggggg

SEQ ID NO: 5044 - DNA, 672 bp, Homo sapiens
  misc_feature 3, 87, 96, 366, 411, 420, 422, 437, 438, 443, 449, 450, 458,467, 468, 469, 470, 483, 485, 489, 490, 492, 495, 497, 505,514, 519, 520, 521, 522, 524, 525, 527, 528, 535, 536, 537,538, 539, 543, 546, 547, 548, 555, 557, 559, 579: n = A,T,C or G
  misc_feature 580, 583, 596, 598, 602, 603, 607, 608, 614, 615, 616, 617,619, 626, 627, 636, 639, 641, 643, 646, 647, 648, 649, 654,656, 657, 658, 660, 665: n = A,T,C or G
acnatagctatccctacagaagataatgtgtaactttttataggaaaagtgtggttttactatttttgccttatcattccaaataanaactagtcngttaatgatcatattgtatgtagagaaaaattttcattgactcccattgtggaattccctagcaatttatttagacttaattttttaaattcaagcttactgtattagtcatttttagcccataattaaaacatgatcacttttacacaggtgtagtatggtgcatttcattccttatttataaattaactgaaattacagtttgctataatataaaatgacaatagtctcttgagtggtaagttggttatttttttagaggtgatccangaatctttagtttgaaggcagttaccttttttttttttttttttnaaaaaaaangnggggggggttttttnnccaangaactnngaaaattngcccaaatnnnngggggtttttccncnaccnnanttntngggttttnggggggggntcttnnnnannanntgggggnnnnngggnttnnnggggggnananaaaaaattttttttttggannggnaaaaatttttttntntttnncccnnaaaaannnncnggggggnnccccttttntgngngnggnnnnaaaanannnanaaacncccgggg

SEQ ID NO: 5045 - DNA, 412 bp, Homo sapiens
  misc_feature 82, 89, 90, 91, 92, 94, 96, 97, 99, 100, 103, 106, 110, 113,117, 120, 121, 122, 125, 131, 132, 145, 149, 153, 162, 165,168, 178, 179, 182, 183, 187, 287, 323, 332, 335, 395, 399: n = A,T,C or G
ccctttcgagcggccgcccgggcaggtacgcggggaataaatatttatcttttgtattgctaaaaaaaaaaaaaaaaaaaanttccttnnnncngnncnnccntangggnaanttcnaannnttngggggnnggttattaaggancccnctanggaatcaantcnggntcaaataaanncannttcnacccttactacacaatcaaagacgccctcggcttacttctcttccttctctccttaatgacattaacactattctcaccaagacctcctaggcgacccanacaattataccctagccaaccccttaaacacccctncccacattnaancccgaatgatatttcctattcgcctacacaattctccgatcccgttcctaaacaaactanggangcggttcctttgc

SEQ ID NO: 5046 - DNA, 416 bp, Homo sapiens
  misc_feature 393: n = A,T,C or G
ccctttcgagcggccgcccgggcaggtacacaataaaacacaaatccagccccaggatcataaatttatgactcctaatctaagatcacagcttacttctttttatttaattaggaaaaggaatggattatattaggatgaaggtcaccatatacccagctctcctataaattacttagcatggtatatatgctaaacattagcaacctttacttattatcttgtttataaaactacattttgaccatgagattttttttatggcctaaaaagttttttttaatatgctaaacattagcaacctttacttatgatcttgtttataaaactgcattttgaccatgagaatttttttttaatagcatgacaagtttttttttttttttttttggnagtggatatgtgtcaataaattt

SEQ ID NO: 5047 - DNA, 380 bp, Homo sapiens
  misc_feature 83, 240: n = A,T,C or G
cccttagcgtggtcgcggccgaggtacctaccaagtagaaggcactatgccagcactgcatagctttccttgaagaagagcanttactgcccttcaggagtgtataatctagtaggagaaataaaatatttacatgagttttacatgtaggaaactgaatgaaaagaaaacatttaaagttgatgatatgttatcaaaagtagagaaaatgaaaggagagcaagaatctcatagcttgtnagctcatttgcagcttacatttttggtttcttccacaaaaatgataagccatcaccaaactcagaaaatgaacaaaattctgttaccctggaagtcctgcttgtgaaagtttgccaaaaaaaaaaaaaaaaaaaagtacc

SEQ ID NO: 5048 - DNA, 436 bp, Homo sapiens
  misc_feature 3, 175, 176, 177, 178, 179, 180, 181, 182, 185, 187, 191,208, 209, 221, 222, 223, 224, 225, 226, 227, 228, 229, 230,238, 239, 240, 242, 244, 246, 253, 254, 255, 256, 257, 258,260, 268, 270, 271, 272, 275, 276, 277, 278, 279, 283: n = A,T,C or G
  misc_feature 289, 290, 291, 297, 298, 299, 300, 301, 310, 311, 312, 313,314, 315, 316, 317, 318, 324, 337, 339, 340, 341, 342, 343,344, 345, 346, 348, 350, 352, 353, 354, 355, 356, 357, 358,359, 360, 361, 362, 363, 364, 365, 366, 367, 368, 369: n = A,T,C or G
  misc_feature 370, 371, 372, 373, 374, 375, 376, 377, 378, 379, 380, 381,382, 383, 384, 385, 386, 387, 403, 404, 405, 406, 412, 413,414, 415, 416, 422, 423, 424, 425, 429: n = A,T,C or G
cgncggccgccatgtgatggatatctgcagattcgcccttacgtggtcgcggccgagtacttttttttttttttttttttttttttttttttttttttttttttttttttttttttttttttttttttttttttttttttttttttttttttttttttttttttttttttttttnnnnnnnnggngnattntaaaaaaaaaaaaaaanntttttttttttnnnnnnnnnnaaaaaaannnananancaatttnnnnnnanattttttntnnnaannnnntttnaaaaannncccccnnnnnttttttttnnnnnnnnntttttnaaaaaaaaaaaanannnnnnnntntntnnnnnnnnnnnnnnnnnnnnnnnnnnnnnnnnnnnntttttttttttttttnnnntttttnnnnngggggnnnnaaanttttttt

SEQ ID NO: 5049 - DNA, 484 bp, Homo sapiens
ccctttcgagcggccgcccgggcaggtacaaatttaattacatcatcttactgaacactactgactttactgaatctattccttgatttgatgttcctttcatacaaatcacagtagaaaaacgtatgaatttttttcaatacagccaagatgctggcttctcacctgtgaatatagttttcacgattggtaggtagatcataatttataaccaaagacacttgttgcacatcaatcccgcgagccaacaagtcagtagtgatcagaacacgacttgaccctgaccggaattccctcatgataacatctctctccttctggtccatgtcaccatgctgcaaattaataaaccttaattcaagaatcaccaagtcaggtcggtatttaattttaatcaacatgtatgagaccaagcgtccctggctgctacaggagaatagcagacaggtatagttaagaaacaactttattttaagcaggggga

SEQ ID NO: 5050 - DNA, 362 bp, Homo sapiens
  misc_feature 74, 77, 121, 203, 216, 230, 236, 292, 329, 336: n = A,T,C or G
cccttagcgtggtcgcggccgaggtactttttttttttttttttttttttcctaatttgttgcctcttggtganaanaagctgtttctcctattatcttgacctttctaaagtcaaacctntttctaaacttatcaaatcatcctttgctggcattacattttccaggtatagatccttcaccttccttttgctttgtcacanaatgacttttttntcaaatcatagtanagtctntaagtatgcctttcctatagcaatactacacctacataaaagctgaacttacaatntgagattaaaagatattgcacaaaatgtgcaaggttnttgtacntgcccgggcggccgctcgaaagggca

SEQ ID NO: 5051 - DNA, 359 bp, Homo sapiens
ccctttcgagcggccgcccgggcaggtacatttcatatgtatatatggggtgggagcataattgccattcccatgtgtctcaaggaagcttaatgaggaaactaatgagttaatattaactcttctgaagaaagctgacattttaggagtattaagtcatctgtccgttaatgagcagcaagaatatattatgattgtatcacatgttccagaagagcattaccccttacatagaaagctccttggagatttcatgatgttggatgaacatcagtttatccttatacatccctattgagctataattatcctcatttgatacttgagggaaactgaagtgacttgctccaaagtgacta

SEQ ID NO: 5052 - DNA, 128 bp, Homo sapiens
  misc_feature 121: n = A,T,C or G
cccttagcgtggtcgcggccgaggtactttttttttgttttgattttttttaaactaaagctatataaagcttgtggattaaacagaataaatttctaaattaaaaaaaaaaacgtacctncccgggc

SEQ ID NO: 5053 - DNA, 506 bp, Homo sapiens
ccctttcgagcggccgcccgggcaggactggcataaaaacagacacatagaccaatggaacagaatagagagtctagaaataaacccacacatatgcaataaactaatctttgataaggacaccaagaatacacaaaggggaaaagaatggtctcttcaataaatagtattgggaaagttggatatccacatgcaaaagaacgcatttggactctcatcttatgccatatataataatgaactcaaaatggattaaagacctgaaaccataaagctcctagaagaaaacatagggaaaaacctccttgtcattggtcaatgattttttggatatgaaaccaaaaacctatgcaactaaagcaaaaataagtttaaaaataagcaaaaaataagtttaaaataagcttaaaataagcaaaaataagtttaaaataagcaaaaaataagcaaaaataagtttaataaactaaaaaccttctgtacctcggccgcgaccacgctaaggg

SEQ ID NO: 5054 - DNA, 423 bp, Homo sapiens
cccttagcggccgcctgggcaggtactatttcagaaagtccctagattctcagatgcactggcaagcaccatacactgaagaattcacggaagattttagtcacttgctcactcatccacttgaagtaagaaaaatcagtcactgcatgtttattgttctataataaagcaaatgttagaaataaaagttagaaatgtcaaacacactaaattgttacataataaactaatcaagacacaacttttattcaggacatggatatttctgaaatgaaaacaaaagaagagaattgacttaaaatgtttataaataccaatattatgacagaaccaaagctatttatgagcattatttttaaaagcttgtttaagtattatgcacttggctgtgtgacattttgtaaagcggagaaaaattaagga

SEQ ID NO: 5055 - DNA, 634 bp, Homo sapiens
  misc_feature 560, 561, 562, 563, 564, 565, 566, 567, 568, 569, 570, 571,572, 573, 574, 575, 576, 577, 578, 579, 580, 581, 582: n = A,T,C or G
cctatagggagtcgaccccgcgtccgcaaagatttcagcaacaaccatggcaaccttcgtggagctcagtaccaaagccaagatgcccattgtgggtctgggcacctggaagtctacgccaaaccaagtcaaggaagctgtgaaggcagccattgatgctgggtatcgccatattgactgtgcgtatgcatattgcaacgagaatgaggtgggggaagccatccaagagaagatcaaagagaaggctgtgaggcgggaggacctcttcattgtcagcaagttgtggcccacctgctttgagaaaaaactgctaaaggaagcctttcagaagaccctcacggatctcaagctggactacttggacctctatcttatccactggcctcagggatttcaggcagggaaggagttattccccaaagatgaacaaggcaacgtcctccccagtaaaacaacattcctggaagcctgggagggcatggaggaactggtggaccaggggctggtgaaagctctgggcgtctccaacttcaaccacttccagatcgaaaggcttcctnnnnnnnnnnnnnnnnnnnnnnnacccttccacaaccttccccctgaacccttgaaacattaaaaatggaatgcc

SEQ ID NO: 5056 - DNA, 800 bp, Homo sapiens
  misc_feature 294, 404, 442, 443, 485, 491, 496, 498, 506, 507, 511, 513,527, 544, 549, 559, 563, 568, 570, 571, 589, 596, 602, 610,611, 624, 630, 644, 645, 648, 649, 650, 651, 652, 653, 654,655, 656, 657, 658, 659, 660, 661, 662, 663, 664, 665: n = A,T,C or G
  misc_feature 666, 667, 668, 669, 670, 671, 672, 673, 674, 675, 676, 677,678, 679, 680, 681, 682, 683, 684, 685, 687, 688, 696, 697,704, 706, 707, 710, 715, 716, 718, 720, 727, 731, 732, 736,743, 746, 748, 749, 751, 775, 783: n = A,T,C or G
ccctttcgagcggccgcccgggcaggtactaaatttttgcctacaatttaccttgttaaatattgtagataaattgctaatactaatagccaaatagataacactaatgctttgtttaaaaaaacgaaaaaaacaaaacaaaacaaaaaaacatgagcagtggtgttctaatgaagttatgacatctgtcctaattagtttcttaaatacatttactacttaatggttttgaagcaactgtttaatttttaaaatttttgaaaacttgctaataaccttttgttcagaatttantagattggttaatgcaggacatcaactacataatgaaagatgcttgaaatgcttttgtatttcagggccaatcaaatttaattcaaactttcaacttccagaaaaaaccntaagcctttttgggtttggccaaacaatgttattttanngaatgctttgggaacctgggagtgaactggattggatttttnttaatntttananaaccttcnncccncnttggggggttgttnggctttttgaaaaaaanggttnattaagtttnaaanccttncnngggttttccccttttggnttttggnaaaccngggttggnnaaaaaataaaaanaaaaanttgcccctttttcnnttnnnnnnnnnnnnnnnnnnnnnnnnnnnnnnnnnnnnnngnntttttttnnggggggngnnccnccccnntngnggggggngaanntttnccccccnccngnngngggggggggggttttttttttttnggggggcnccccccccccccccccc

SEQ ID NO: 5057 - DNA, 131 bp, Homo sapiens
  misc_feature 37: n = A,T,C or G
cccttagcgtggtcgcggccgaggtacgcgggttcantattcactaatgaaattaattgaggcctagaattaccatttcctatttcattcaaccatcctattcataagtaaaataatgtttaaaaatgaac

SEQ ID NO: 5058 - DNA, 248 bp, Homo sapiens
  misc_feature 67, 95, 102, 127, 160, 192: n = A,T,C or G
cccttagcgtggtcgcggccgaggtactttttttttttttttttttttttttttttccacaaaaaanactactatctaactcttactatcctttnataaaanacattttaataccaaaaaactgcanaggacataatctcataataaaggaaaagtgatntaaatgaacaaatttagcttcatgtaaaactntacaatagtcttcattttcacactttcctcagggccagtgcaaacggcattgaaaa

SEQ ID NO: 5059 - DNA, 337 bp, Homo sapiens
  misc_feature 240, 260, 319: n = A,T,C or G
cgccagtgtgatgggatatctgcagaattcgccctttcgagcggccgcccgggcaggtactggccagtgtcattttattttttccctcctgacaaatattttagaagctaatgtaggactgtataggtagatccagatccagactgtaagatgttgttttaggggctaaaggggagaaactgaaagtgttttactctttttctaaagtgttggtctttctaatgtagctatttttcttgntgcatcttttctacttcagnacttggcctggcccgattttcacctttcctttttacacctcaagaacagcagataggtntgcataaccacagcagaa

SEQ ID NO: 5060 - DNA, 392 bp, Homo sapiens
cccttagcgtggtcgcggccgaggtacagcctgcagaactgtggaccaatcaaacctcttttcttataaattacctggtcttggggatttctttatttaatgtgagaacgcatgcccttttggatctactgtttctacttttataaatttatcctgcagaaatacacaaatacacaaagatacatgtaaaaaaagtagtttactgcagtacatagtaggtgtatataacaatgggatacatgaaatgttacaagatagtatttgtattttcccttttaaactttgtgtctgttacttgttaaatttttacaaaagtaaaactaacagaataatgctggcccaacactttgagatgataacaagtccatataagacagacaaaattgaactta

SEQ ID NO: 5061 - DNA, 424 bp, Homo sapiens
ccctttcgagcggccgcccgggcaggtacagatctttaattgttgatcattttattttgctgtggcacagaaatctaagattttggatttaaaaaaaaactttataagggggaaaaggaaaaagttgctctggaataataattagcttttagaagcatttaagatctttaggagacattataacaactaaataggagctctggttcaaattttataggattcttatataaaacttatattgagttttctgttgtaaaaacagccctgtgtttctctgccattatttgggcttacaaccataattaaaggccaaggctatgccccagattccatgttagccatcttttattttaaaaataccccaaatggggcaaattcatactgggactgagacaatgtacctcggccgcgaccacgctaaggg

SEQ ID NO: 5062 - DNA, 496 bp, Homo sapiens
  misc_feature 1: n = A,T,C or G
nctcaagctggcgacgaagggacctcgcgtcgccgcgccgggtctcgagcagctgccagagccgccggacagaccgccgcccccgccgcgtcatggccgagagtgactgggacaccgtgacggtgctgcgcaagaagggccccacggccgcacaggccaagtctaagcaggccatcttagcagctcagcgacgaggagaagatgtggagacatccaaaaaatgggctgctggccagaacaagcagcattccatcactaaaaacacagccaagctagaccgggagacagaggagctgcaccacgacagggtgaccctggaggtgggcaaagtgatccagcggggccggcagagcaaaggcctgacgcagaaggacctggccacgaaaatcaatgaaaagcccgcaagtcatcgcagactatgaaagtggacgggccattccgaataaccaggttttgggcaaaattgagagagccatcggcctcaagctccggggga

SEQ ID NO: 5063 - DNA, 223 bp, Homo sapiens
  misc_feature 37, 100, 133, 162, 193: n = A,T,C or G
ggtcgcggccgaggtacattgtatactgcagtgccgnctacatggcattggacaggacataatgtaaaacataaaagtgcaattgttacacttacatatnatagtgaatggcaacgtgaccaatttttgtctnaagttaaaataccaaaaactattacagtngtctactggatttatgtctatatgacaaatnttgatactgcatccacaacattattggcgt

SEQ ID NO: 5064 - DNA, 553 bp, Homo sapiens
  misc_feature 538: n = A,T,C or G
ccctttcgagcggccgcccgggcaggtacagccttttaaatacccaggaatatgccagagctttccaaagttccctatagttggctagttctccagactttccttttaaattcctggccagattcttcctttgcctcaactgaaatcacagccttaggcaattgacattttgccaacagtttgctattgtttcagtaatgccctgggggtaagctttttcttcccccaactgagctgagttcagagtcaaatcaaatatccagccactctctctgaaaagagttttcccagggagctgcaagttgggacaaaatattaactgtgctctggggatagtgccttcaatggggctccagaagtggtcagctctctccattgtctgcaatactgccagcttttagctacaccactaagctggagagagagatgagaataaccccaagttaaaatatcgcagaccccactggtcttcccaaagattcactaagttttctcttggacagatgattttcaattcatactcctgcttaattgccanaattctaaaatgggc

SEQ ID NO: 5065 - DNA, 491 bp, Homo sapiens
  misc_feature 261, 331, 333, 351, 366, 369, 382, 387, 400, 409, 436, 439,453, 455, 456, 468, 471, 472, 490: n = A,T,C or G
cgccagtgtgatgggatatctgcagaattcgcccttccgagcggcccgcccgggcaggtccgtgcctgtaatcctgcctcagccccccaagtagctgggattacaggcacctgccaccatgcccggctaatttttgtaatttagtagagacagggtttcaccatgttgcccaggctggtttcgaactcctgacctcaggtgatccacccgcctcggcctcccaaagtgctgggattacaggcttgagcccccgcgcccaancatcaaaatgctttttatttctgcatatgttgaatactttttacaatttaaaaaaatgatctgtttttgnangcaaaattgcgaatcttngaaattaagaaaggnganaaatgtgaaaggnggcgnaacttttaaatcnaagtttttnggaagtgaaaactgggagctaatttgnatntaatttcacaaaantnntataactctttntgnntatacaaaatttttttcnt

SEQ ID NO: 5066 - DNA, 260 bp, Homo sapiens
  misc_feature 108, 114, 165, 167, 171, 204, 226, 242, 246: n = A,T,C or G
ccctttcgagcggccgcccgggcaggtactttttttttttttttttcctttttaaagttttataaaaaactatttctcgttctttaagtaaagaacactatacaaaanaaaatntatttgtgaaataccccaagagacatggtttttttttttcccccttgaaananattntccatcctaaggaaatggtgggggggtgggatntggggggggtgcaaaataaggnccctaattcccttgtngganattttttggggggg

SEQ ID NO: 5067 - DNA, 317 bp, Homo sapiens
  misc_feature 207: n = A,T,C or G
cccttgagcggccgcccgggcaggtactttttttttttttttttttttttttttagatataataaaatattaataaagacatttatatttttatatataataaaatgattagtttaccaacaatcaaaataaaaagatcccaaagccacagataaggatagcctacagtggtctttatgttcctttgtataattccttttttttcanagtccagtcttggatgtaatccaattgcgataagaagtcactcgagtatagacacctggcttattctttttaccacatccatcaccccagcttactattccaacaagatg

SEQ ID NO: 5068 - DNA, 447 bp, Homo sapiens
  misc_feature 76, 82, 88, 91, 92, 94, 96, 97, 99, 107, 118, 123, 125, 126,128, 131, 133, 136, 138, 140, 143, 144, 146, 152, 157, 158,162, 163, 168, 171, 178, 187, 198, 200, 205, 207, 209, 212,217, 219, 224, 235, 240, 247, 249, 255, 256, 263: n = A,T,C or G
  misc_feature 274, 294, 295, 296, 304, 311, 318, 319, 323, 327, 330, 331,332, 349, 360, 361, 382, 385, 386, 392, 397, 400, 414, 427,432: n = A,T,C or G
cccttagcgtggtcgcggccgaggtacaaaacaatataacaacaaaaagaatttaataattttttttttttttttnaaaaanaggatnttnntntnncncccaggtnggaccccgggnatgtnannanggntnacngnanccnnancccctngggcnnaaannatccnccnaccaaancctcccaantagctgggccnanaaatncntnccnccaangnaaacncctttttttanaaacnggatctncntttttnncccaggngggtttaaaantaaggggccaaaaaaatccnnncacttttnactcccnaaagggnngggnttanaannntaggccactaacacctnggcaattaatnnattttggtccaaattttttanttnntttgtncaaanaanaaattttaaaccanaaaatttccctantttgnacctgccccgggggg

SEQ ID NO: 5069 - DNA, 570 bp, Homo sapiens
cccttagcgtggtcgcggccgaggtactcactgacctacctcattttcctctagattccataccacttataactggtaacactatatcctcaaatgtatacataaagcaattccaccttatttcccatcaacttctagttatactgaaaaccatggaactgtatacagttgtgcatcgccaccaagccaaaactaagatcttcacgttaccttctgagaagtcagaagaggagtaacagccacatcaccaaagagaacaattttagccagcataaggaagtcccctttgctttaacctttacaagaaaaataactttgtaaagatcaattgctttttgatttttgtttctgctttcctcagcctttttccatctataaaactagcctcttctattttatagaaggaagtgttgcctgattcttgaatggcaaatgaaagtcaattaagatctttaaactaaatttgtagtaattttgtctttgacagccacaacctacaattcttgccttaatctcttttatctcctcaaagacaaactaattcttccaaattataaagaccaaacctat

SEQ ID NO: 5070 - DNA, 468 bp, Homo sapiens
  misc_feature 5, 43, 136, 256, 290, 428, 437, 444: n = A,T,C or G
atggntttctgcagaattcgcccttagcgtggtcgcggccgangtacaggtatgtggctgcacgggggtgggagggcttgtgggagaagggctgctctgctctaacctttcttggaaaagccaaatctccaagtanaatgggaactatctgggacatctagacagaatagtttaagccctaactccctttcttgatactttagtataattacttctggtcctgcacagggcctgttctctccagctccagacctgnatctctttccaggctgacagtggtggaaagtgangtggcaagtgcaagaagggcctagagatcggctacaaagggaaaggaagagatgacaagaaaggccgaggaaggatgcccaaaaagcttgattcaagggttcaaaagatggtgggccaggccacccccattcattgtncagcacctnccgtctncaacattggcttttgttttttttg

SEQ ID NO: 5071 - DNA, 270 bp, Homo sapiens
  misc_feature 205: n = A,T,C or G
ccctttgcggccgcccgggcaggtactgttcataaccccattttacaaagaaaaaactgaattttagggagtttaattgcttgaaccaaggccacagaattggtgagttgcaggtaaaatttgaacccatttctgcagatgtcaagttgtgtttttttgtctttccatcatgctacttgacacccaaaccaaatgaaactggcancccggattctttcagagagatgttgtaaaagagttcccccaacaacctcacctgttaaaccccca

SEQ ID NO: 5072 - DNA, 512 bp, Homo sapiens
  misc_feature 1, 39, 41, 77, 78, 79, 101, 102, 112, 113, 114, 115, 118,122, 165, 166, 167, 171, 172, 174, 175, 176, 177, 191, 192,193, 203, 208, 212, 223, 234, 235, 241, 247, 252, 260, 261,262, 263, 283, 284, 286, 287, 288, 289, 304, 305, 308: n = A,T,C or G
  misc_feature 316, 317, 318, 323, 324, 325, 326, 327, 328, 329, 330, 331,336, 337, 342, 343, 344, 345, 347, 349, 355, 356, 377, 381,382, 383, 384, 390, 396, 397, 398, 399, 400, 401, 402, 403,404, 405, 406, 407, 408, 409, 410, 411, 416, 417, 418: n = A,T,C or G
  misc_feature 419, 420, 421, 422, 423, 424, 425, 426, 427, 428, 429, 430,431, 432, 433, 434, 435, 436, 437, 438, 439, 440, 441, 442,443, 447, 448, 449, 450, 451, 452, 453, 454, 455, 456, 457,458, 459, 460, 468, 469, 470, 471, 475, 476, 477, 478: n = A,T,C or G
  misc_feature 479, 480, 481, 482, 483, 484, 485, 486, 487, 488, 489, 490,491, 492, 493, 494, 495, 496: n = A,T,C or G
ncgccgggcaggtcttttttttttttttttttttttttnantttttttttttttttttttttttttttttttttttnnntttttttttaaaaaaaaaaaanntttttttccnnnnaantttnggggggaaaaaaaaaaaaaaaaaaaaaaaaaaaaatttttttnnnaaanncnnnnaaaaaatttttttnnnaaaaaaaaanttttncccntaaaaaaaaanccccccccccnnaatttnaaaaanttttnaaaaaaannnnttttttaaaaaaaaaacccnncnnnnttttttttttaaaannccnaaaaaaannnaaaannnnnnnnnccccnnggggnnnnantntttttnnaaaaaaaaaaaaaaaaaaaancccnnnnaaaaancccccnnnnnnnnnnnnnnnnaaaannnnnnnnnnnnnnnnnnnnnnnnnnnnaaannnnnnnnnnnnnnaaaaaaannnntttnnnnnnnnnnnnnnnnnnnnnnaaaaaaaaaaaaaaaa

SEQ ID NO: 5073 - DNA, 280 bp, Homo sapiens
  misc_feature 4, 117, 123, 124, 132, 141, 153, 154, 155, 158, 160, 161,167, 168, 169, 195, 197, 198, 199, 201, 206, 207, 208, 209,210, 211, 218, 220, 224, 229, 230, 243, 249, 252, 256, 268: n = A,T,C or G
tcgncggccgccagtgtgaggatatctgcagaattcgccctttcgagcggccgcccgggcaggtacttttttttttttttttttttttttttttttttttttttttttaaaaaaaangggccnngggggggnttttttttnaatttttggggnnnggnanngggggnnnggggctttaaaaaccccaaaaaaaanannncnggggnnnnnnttttttnanaaanggggnntttttttttaaangggggnccngggnaaaatttttttnaaaaaaaaaaac

SEQ ID NO: 5074 - DNA, 334 bp, Homo sapiens
  misc_feature 33, 59, 61, 64, 65, 66, 69, 73, 167, 185, 243: n = A,T,C or G
ccctttcgagcggccgcccgggcaggtactttntttttttttttttttttttttttttncnggnnntgngttngggtccaactcatgtccaaattatggcctttttgtgataccttccactggcatattcccaaggaatttactccttttgatgacactgcacccanaatggaggaacacagctncaaaatgaactataaagaagggctaggcaggcatggtggctcacacctatcatcccancactttgagaggccaaggcaaaaggatcacttgacgccaggagttcacaaccagcctgggcaatatggctgtctctacaaacaatataaaa

SEQ ID NO: 5075 - DNA, 414 bp, Homo sapiens
  misc_feature 307: n = A,T,C or G
cccttagcgtggtcgcggccgaggtacacttggaagagggccaagtgggcaacttgagaggttaaactgcatggtttgagttttgatttgaggttttacgtgttggcatgcattcaggggcttgtgtcccttctcccctgattcttccctccgggtaggagggaagaatccacctgagcagtggcctgccagcacttgagaggctccgcaagcacaagtgtgtttatgggagttgtgcacatgctcagttgaggcattcttcccttaccagtcgagtgtttctagaggaaggtcatagactaatagnctaataagtctatgacctttaatcatactagtgcacatgcctgagcccactcacctgtgaacccccaaaatttgagacaggtcttcaattaatttaaaaaggtttat

SEQ ID NO: 5076 - DNA, 525 bp, Homo sapiens
cccttagcgtggtcgcggccgaggtactttttacaatcttctataaaattctgctttgtctacaacacagtcctgactctagcttaagcacaaaaggatttagtatgaaccaattcatacatttaatacttattaaactcctgacatgccaggcattgttgtaggtgctggtaataaagcagtttttaaaaagtccttattctcttgaagtttacattctagtggggtaaagggaatcaaaagatgttggtaagagaagtgagagaggaatgctatttttttatagctttgtctacgaaagcctctctaattttgtgacatttgagcaaagacctgaaggtattaacatcatttgctccaaactgaccaaactgttcttattacttataggtttcaggagatgtgttacaaggcttatctagctattcgacagcatgccaatctcttcataaatcttttctcaatgatgcttggctctggaatgccccgcgtacctgcccgggcggccgctcgaaagggcgaatt

SEQ ID NO: 5077 - DNA, 480 bp, Homo sapiens
cccttagcgtggtcgcggccgaggtacattgtatactgcagtgtcgtctacatggcattggacaggacataatgtaaaacataaaagtgcaattgttacacttacatatgatagtgaatggcaacgtgaccaatttttgtctcaagttaaaataccaaaaactattacagtgtctactggatttatgtctatatgacaaatcttgatactgcatccacaacattattggcgtgctttttgctttgcttttgtgtgcttttgtgtgtctgcctattaatacgtccgctgcttttgtctgtgtctacatacacatcattaatactattggtattactattgtggataacagcagcctctgcgtttaggtgttttattgtatatattgtatttgtttatataccattatttttaatacatacacatgcacgctttttaattacataatgtatatgtacctgcccgggcggccgctcgaaaggg

SEQ ID NO: 5078 - DNA, 632 bp, Homo sapiens
  misc_feature 42, 44, 104, 105, 119, 120, 129, 130, 135, 136, 137, 138,140, 141, 143, 145, 147, 152, 153, 155, 156, 159, 160, 162,167, 184, 196, 199, 200, 204, 215, 218, 222, 239, 245, 248,249, 252, 253, 273, 277, 283, 289, 300, 302, 311, 313: n = A,T,C or G
  misc_feature 315, 316, 321, 333, 338, 339, 340, 342, 344, 345, 346, 352,354, 356, 361, 370, 380, 386, 387, 403, 405, 409, 410, 412,413, 415, 419, 426, 428, 431, 449, 450, 452, 457, 458, 466,475, 478, 484, 495, 499, 502, 503, 504, 507, 509, 523: n = A,T,C or G
  misc_feature 524, 526, 548, 560, 567, 570, 573, 581, 583, 584, 586, 588,597, 603, 608, 609, 611, 612, 613: n = A,T,C or G
gccgcccgggcaggtacttttttttttttttttttttttttnantttttttttttttttttttttttttttttttttttttttttttttttttttttttttttnnaaaaaaaaaaaaannttttttttnnttttnnnnannanananaaaannannaannanggaanaaggaaaaaaaaaattnttttccaaaagnatnnattnaaacccacaanctnaaanagggtttttgggggaantaaagnaannccnnttataaaaaaaaaaaaaaantttntttaancccccntcccgtgggantnaaaaaaaanancnncccgntttttttttttnccccnnnanannnagaagnangnggggnataaaaaanaccccccccncccccnncaaaaaataaaaagtntncccnncnnanaggnggggggngnaanaaaaaaaaaaaaaaaggnngngagannattccccncccgcggangtnattaanaaaaaaaaaanaaanaannnggnangggggggggggggnntnttttttttttaaaaaaaacccncccccccccccngaaaaanaanganaaaaaaananngngntaaaaaaancaactntttgnngnnnaaaaaaaaaaaaaaaaaaa

SEQ ID NO: 5079 - DNA, 332 bp, Homo sapiens
  misc_feature 305: n = A,T,C or G
ccctttcgagcggccgcccgggcaggtacttagttactccttgcccatagacgtgtttgacctagaaaaatttcttatacgcaacagatattcatgaaatatatattaaaataaagcttgaagggtgaattaaataaatatttacttggaagctacagtgggtgaattaaacaaatatttacttggaagctactttatagccactgggctggatttcatatacagagttcttgcccttgggagttttacaactgcttaacactttgtctatgctagaatacaaaaaaaaaaaaaaaaaaaaaaangtgcctcggccgcgaccacgctaaggg

SEQ ID NO: 5080 - DNA, 618 bp, Homo sapiens
  misc_feature 450, 511, 567, 576, 584, 591, 593: n = A,T,C or G
cccttcggccgcccgggcaggtacatttagttaggttcgttaggtctatattatagttttactctgatgtttcttttatgattttctgcctgaatgatctgtccattgcttaaaatgtgttgttgaattcccctgcccttattgtattcatctatttctcccttcagatctattaatatttacttaatatatctgagtgctgtaatattgggtgcatatgtatacttataaatactatattatattgctgaagtgacccatttgtcattatataatggtcttctttgactcttttttactctttttgacttaaagtctattttatctaagtatagctgtgcctgctctttactggttttcattttcatggaatatctgttttcatccctatacagtcagtctatgtgtgtttttatgagcaaagtgggtttcttgtaggcaatatattgnttggttttttttgtttttaatccattcagtcactctatgtcttttacttggaagaatttancccccttgcatttaatattattattgggtatggtaagaacttactattgccatttnggtccttgntttctagngggtttngnaaggcttcctttcttcctggcttcc

SEQ ID NO: 5081 - DNA, 506 bp, Homo sapiens
  misc_feature 400: n = A,T,C or G
ccctttcgagcggccgcccgggcaggtactgggtctgccagacttataggcattctttcctgcgcttagccatatactttttgcatggccctatctaaagcctgcatttgccttcttaaagttagtttttgtagctcacggagattacctttaatctgacttatgattgggggtggctggctgaacaaaatctcattgggcaaatacccagtgtggtttgttttgtgggggtgcacctgacttggagaaagaccatgggcaagacctggtcccacctcagatgagtttcctgacaaaatttcttcagcagctgcttgagtatctggttcatgtgctccatctttactgagcactgaggctggtagactggatgcaacttccattttatttttaacagtcnagttaagtcctgaacgatttcagccacaaatgccagtccattatcttgaacccaaagttaggggcagtccaaatctgggaataatgtctcttaacaataccttcat

SEQ ID NO: 5082 - DNA, 272 bp, Homo sapiens
  misc_feature 24, 32, 36, 51, 78, 111, 130, 132, 148, 180, 183, 195, 207,233, 246, 261: n = A,T,C or G
ccctttcgagcggccgcccgggcngggacttngttnttttttttttttttnggattagaaaactatcatttattgatngatttaaggggtaatacaggtttccaaaaatgnggcagtgagaataccatcntnaaaaagagaaacttgngctaaaaaacaacctggaattcatcattggcnatnttacataacaantcaaaggccctnaccatactaatggatttccactttgnctattattgggcnaccttcccatggcancaaaaaaaaaa

SEQ ID NO: 5083 - DNA, 353 bp, Homo sapiens
  misc_feature 182, 210, 214, 222, 227, 236, 242, 245, 285, 310, 323: n = A,T,C or G
cccttggccgcccgggcaggtactttttttttttttttttttttgtatttttagtggagatggggtttcaccaggctggttttgaactcctgacctcaagtgatccacctacctgggcctcccaaagtgctaggattacaggtgtgagccactgctcccggcctcccctttccttttactgntttaagccctcatcgggtcacttgtctncccncacaggtnaccgngccagcctntgtggncanatttctttgtgtgaacctgttgaaagagaattcccagtanaaatttggcctcctgcactcccatncctagggtgtctnaagggcatggggtgaatttcaggaaaaagt

SEQ ID NO: 5084 - DNA, 364 bp, Homo sapiens
  misc_feature 329, 346, 348, 353: n = A,T,C or G
cccttagcgtggtcgcggccgaggtaccttgatggggttgggtcatacagttgtgtgcattcgtcaaaacccattgaatattatacgtaaggtttatgcaatttattatatgtaaggtttatctcaaggaaaaaagttttgaaaactgtgattttgatgcaggtgatctgagcaccacacttgaaaactactgggtttgagtaacttcaggaatagttcttccataaaagcataataattcagagattactaatgtaatcctttggcattcaaaaactaagggagccaaaatattaatggagccaggtgcagtggctccaagcactttnggaagactgcccgggcngncgctngaaagggcgaa

SEQ ID NO: 5085 - DNA, 597 bp, Homo sapiens
  misc_feature 442, 487, 495: n = A,T,C or G
ccctttcgagcggccgcccgggcaggtacatgagataatcaatgcttccttacaaaatgggcttatgttagaagacttttgcccagctgcaggctattgtaagtgttctgagcacatatgagataacctgggccaagctatgatgttcgataccgttaggtgtattaaatgcacttttgactgccatctcagtggatgacagccttctcactgacagcagagatcttcctcactgtgccagtgggcaggagaaagagcatgctgcgactggccagtgacatgcagaggatccagattgcacaacccggatccagaggccttgggaagcattagggaagctctccagctgtctcactcaaatctgtagcagcatatggacccacaaatggaggccaaaagtgggccctcaatttggacactttggcaacccttgaagaaactncttcctttcaacttactggtttagtatgttccaaaaaaagggagngggcgtcntttttggggaattcaaggaagaagggagacacccttgttactctattccattaaataaaagcttttgatggtcaacaagccccccgcccccacttaaaaaaa

SEQ ID NO: 5086 - DNA, 264 bp, Homo sapiens
ccctttcgagcggccgcccgggcaggtacgcgggtatctttttggttaatatagagttataggtgtttttaagccactaagtgtcattactgttacatgcatcagttagccctacttggattagcaagattatgctttcataaactattctttctctaaattaatatatttatatatttagaagttgacattctaaatcaaattgtgtttttttccttttgcaggtggataattactgtacctcggccgcgaccacgctaaggg

SEQ ID NO: 5087 - DNA, 427 bp, Homo sapiens
ccctttcgagcggccgcccgggcaggtacgcgggggagaaactatggaaacctacatatgtagcttgtaaatgggagggaatcaataccatctagaattgaaacggtttactttacctaaaatatttatagaatttttttatctataaacagctgcaaggaaatattttttaaattaaaaagaaagagaaaagtaaactatgcctcaatattaaaattttaaccagaaaactctcaacttcttggaaaacaaaaaccaaccaaacaaaaaactccattagacaaataagttaaaagagaggaacatttgcctcaaaaatttagaaaagaacaccaaagttataaaacagcaaataataaagataagatcaaaaataaagaatttacaaaaaaagaacaaagtacctcggccgcgaccacgctaaggg

SEQ ID NO: 5088 - DNA, 389 bp, Homo sapiens
  misc_feature 54, 55, 105, 109, 110, 122, 123, 136, 137, 140, 150, 151,152, 153, 154, 157, 158, 160, 171, 172, 173, 182, 192, 207,212, 214, 216, 218, 219, 220, 224, 225, 232, 236, 240, 247,248, 257, 258, 260, 270, 272, 274, 279, 286, 289, 290: n = A,T,C or G
  misc_feature 291, 296, 299, 310, 312, 315, 320, 321, 326, 327, 328, 329,332, 333, 336, 337, 338, 339, 340, 341, 348, 349, 350, 354,355, 357, 358: n = A,T,C or G
cccttagcgtggtcgcggccgaggtactttttttttttttttttttttttttanncttttttttttttttttttttttttttttttttttttttttttttttttntggnnaaaaaaaaaaanntttttttttttgnnggngggggggggnnnnnaannanggggggggccnnnggggggggnaaaaaaaaanaggtggggggggggnttttntntntnnncccnnggggggngaanaaanggggggnntaccccccnngngggggggggntnanatttnttaacangcnnnccgcnccngaagggggcananggnggacnnttctnnnnggnnatnnnnnngcccaannngccnnannaagccacctcctccactacctaaaaagctgt

SEQ ID NO: 5089 - DNA, 467 bp, Homo sapiens
cccttagcgtggtcgcggccgaggtacttgttatctagtctgcctcttttcccttttcttacttcattacctcttcaacacaacaaccaaaagagacccttctcataaaacaaatctgattgtgtctctcccttgcttaaaatcctttatagttctctgtcacatacaaaatcaaatacaagacccgccgtgacatggtttctcttctagattcacatctctagtttatgcaaaactatgtgcaactctctgagctctgacttctgtgtgtttgcacacactgaatattcttgctaacttgtgctgcttcctaattcttgtggcaaattccagttcattcaaaatttagctccagcattgtttttgggtggtgtttaaacagtgttttacttttctctttatgttccataacacctcctacataagattatatttggcgtacctgcccgggcggccgctcgaaaggg

SEQ ID NO: 5090 - DNA, 538 bp, Homo sapiens
  misc_feature 2, 82, 85, 184, 193, 197, 199, 204, 206, 208, 212, 218, 224,232, 238, 239, 243, 244, 247, 248, 252, 253, 255, 268, 271,272, 273, 274, 276, 277, 279, 280, 307, 311, 320, 324, 326,327, 330, 332, 333, 334, 335, 336, 337, 342, 343: n = A,T,C or G
  misc_feature 347, 354, 356, 359, 362, 363, 383, 384, 393, 397, 411, 427,433, 434, 435, 439, 440, 444, 446, 451, 452, 453, 454, 458,473, 474, 477, 478, 480, 481, 482, 483, 484, 485, 492, 496,503, 509, 511, 512, 513, 519, 527: n = A,T,C or G
cnccagtgtgatggatatctgccagaattccccttacgtggtccggcgaggtactttttttttttttttttttttttttttnaanttttttttttttttttttttttttttttttttttttttttttttttttttttttttttttaatatttttttttttttttttttttttttttttttttantttttttgngggngnggganananaaanttattntttttncccccccncccaanncaannaannagannanaaaaaaaaaaaanatnnnncnncnnccacacaaaaaaaaaaaaaaaaaaagngggnggggggggncgcncnnaanannnnnnttatnntatnaaaaaananagnttnnaaaaaaaaaaaaaaaacaannacccccccncttntaaaaaaaaaaaanagggggggggggaggnctcttnnntcannaaananaaaannnncccnccccccccccccccnnaanngnnnnnntaaaaanaaancccccgngcacancnnnaaaaanaaaaaggnggggggggggg

SEQ ID NO: 5091 - DNA, 214 bp, Homo sapiens
  misc_feature 176, 177: n = A,T,C or G
cccttagcgtggtcgcggccgaggtacataatgtaattgttacatataattgttgtataccataacttactattttttcttttttatttttatatataatttttttttggtttgtttgtttgttttttaataaactgttatcacttaaaaaaaaaaaaaaaaaaaaaaaaaaaaannaaagcggtccctgcccgggcggccgctcgaaagggca

SEQ ID NO: 5092 - DNA, 147 bp, Homo sapiens
ccctttcgagcggccgcccgggcaggtacgcgggaagaatgttttaaatttttgttattgccattatttgtttattaaaggttagataaaatttggctttaaaaaaaaaaaaaaaaaaaagtacctcggccgcgaccacgctaaggg

SEQ ID NO: 5093 - DNA, 310 bp, Homo sapiens
  misc_feature 1, 156: n = A,T,C or G
ntagatgcatgctcgagccggcccgccagtgtgatgggatatctgcagaattcgcccttagccgtggtccgcggcccgaggtaccgccgggaatctttctgtagttatctgcataattcttgtttttctttccatctggctcctgggttgacaatntgtggaaacaactctattgctactatttaaaaaaaatcagaaatctttccctttaagctatgttaaattcaaactattcctgctattcctgttttgtcaaagaattatatttttcaaaatatgtttatttgtttgatgggtcccaggaaacact

SEQ ID NO: 5094 - DNA, 358 bp, Homo sapiens
  misc_feature 7, 57, 128, 280: n = A,T,C or G
ccctttngagcggccgcccgggcaggtacgcgggccagataaaaacctcacactaanggcctaactatcagttccttttaaccagtgcatcatgtctcactttcaataaaatgttaccacacgttctngacacacaaaaaatacagaatttgaaaagaaaaagcaagcataagaaccaaactgagcttatggcagagatgttggaaatatcagaccttgaatttttaagactatgattaatatgcaaagggttttaatggaaagtgagaacaatatgcangaacagataggtaatataagcagagaaatggaaacactaagaaagaatcaaaagaaaatgctagaaatcaaaaacatc

SEQ ID NO: 5095 - DNA, 310 bp, Homo sapiens
ccctttcgagcggccgcccgggcaggtacccgaatctcagacgtccaggctctagaactgtaagaagataaatgtgtaacgtttaagccacccaatctatggtattttattatggcagctcgagtcgactaagacagattaagtgctaaaaccttctaaaagtctccagaacattacttgacacagaatagctaatgaatgtaacacagttcttttctataacctctgagatcctgagggttttcctgagctgctaaggaaaaagggagggctgggacagtaagtacctcggccgcgaccacgctaaggg

SEQ ID NO: 5096 - DNA, 339 bp, Homo sapiens
cccttagcgtggtcgcggccgaggtacattttttgaatcaatgaaatatagttgtgtttaatatgtttggtaaaataaaacaatttattcatttattcagtttttccattctgctctcaaatccccttttccacacttgaacaaaactctattgtcaacataaaagaacaagtcaaagagctataaactccccctctaaacttggccttggtgttctcactttttctgtgatagtatatgagaaaaatgaatataatgttgccctgataggaagtttaatgaattttaaaagaaagcaatgttgcttttataaaatataaaatttattatttttcttgg

SEQ ID NO: 5097 - DNA, 354 bp, Homo sapiens
  misc_feature 53, 55, 56, 65, 74, 75, 77, 80, 83, 86, 88, 99, 108, 111,112, 120, 124, 126, 137, 138, 140, 146, 168, 169, 170, 172,174, 177, 178, 181, 182, 183, 195, 196, 197, 198, 201, 212,214, 215, 216, 231, 240, 271, 274, 279, 287, 289, 292: n = A,T,C or G
cccttagcgtggtcgcggccgaggtactttttttttttttttttttttttttntnngggtttttnttttttttnntnttnttnttntntttattttttnttttttttnctnngaatgctnacananaattggacaannanaaaaanaaacattctgtcctttaagctnnngnanacnnccnnncctcccaaaacnnnngcngggactgaaangnnnattaaaacccccgcnggggggggnataatttttgacacttaaatgaaagcttggntgntttanagaaattnangcnataatctatacaagctgtcaaggaaaactggataattgcaaaaaagccataaaggtaaagga

SEQ ID NO: 5098 - DNA, 550 bp, Homo sapiens
  misc_feature 49, 51, 125, 126, 134, 139, 140, 141, 142, 157, 158, 159,160, 168, 174, 175, 185, 186, 187, 196, 204, 212, 218, 220,221, 222, 240, 241, 255, 257, 262, 264, 265, 266, 274, 277,291, 297, 298, 309, 310, 315, 334, 343, 346, 347, 348: n = A,T,C or G
  misc_feature 352, 355, 356, 358, 365, 373, 383, 391, 393, 394, 402, 403,407, 408, 418, 421, 427, 434, 435, 450, 460, 461, 462, 463,464, 467, 478, 490, 495, 496, 498, 499, 501, 502, 516, 521,523, 525, 529, 531, 537, 538: n = A,T,C or G
ccctttcgagcggccgcccgggcaggtactttttttttttttttttttnantttttttttttttttttttttttttttttttttttttttttttttttttttttttttttttttttttttttacnnaaaaaaanaattnnnntaaaaaaaaaaaaannnnaaaaaaantttttnnaaaaaaaaannnttttttttnaaaaaaanaaattttngggggngnnngggggggggaaaaaaaanntttttttttttttnangaggngnnnaaaaaaanccngccccccccccccnttttannaaaaaaaaaannccccncaggggggggggaaaaaanccaaagggnaannncccnttnntnggggggngggggggngcaaaaaaanaatttttntnnaccccctnngggnnaaaaaaaaanaangggggnggggggnnaaaaaaaaaaaaaantataaattgnnnnnttnttttttttttntttctccccccnccccnnanngnngggggggggggggnaaaanangngaantnaaaaannaaattttttttt

SEQ ID NO: 5099 - DNA, 419 bp, Homo sapiens
  misc_feature 99, 100, 101, 104, 114, 124, 127, 128, 130, 131, 132, 133,134, 135, 136, 137, 138, 139, 141, 144, 155, 159, 160, 161,162, 163, 164, 165, 166, 167, 175, 177, 178, 180, 182, 196,199, 200, 201, 202, 206, 207, 226, 227, 232, 233, 235: n = A,T,C or G
  misc_feature 237, 239, 245, 254, 256, 257, 258, 261, 270, 272, 290, 291,292, 309, 312, 314, 324, 326, 327, 328, 342, 355, 356, 360,367, 385, 386, 387, 391, 393, 394: n = A,T,C or G
cccttagcgtggtcgcggccgaggtactttttttttttttttttttttttttttttttttttttttttttttttttttttttttttttttttttttttnnnttngggggggaanaaaaaaaaanaannannnnnnnnnnanaanttttttttttncccnnnnnnnnnaaaaaaananngntntttttttttttaanaannnngggnnaaaaaaaaaaaaaaaaaannttttnncntntngggggngaaaaaaantnnnaantggtggggntnttaaaaaaaaaatagccnnntttttttttaaaaaaanggngnggtttttttnannnaattgggggggggngaaaaaaaaaaanntcgngtttaantaaaaaaaattttgtcgnnncccncnnccaaaaaaaaaaaaaaaaggggggg

SEQ ID NO: 5100 - DNA, 525 bp, Homo sapiens
  misc_feature 270, 271, 272, 273, 274, 275, 276, 277, 278, 279, 280, 281,282, 283, 284, 285, 286, 287, 288, 289, 290, 291, 292, 293,294, 295, 296, 297, 298, 299, 300, 301, 302, 303, 304, 305,306, 307, 308, 309, 310, 311, 312, 313, 314, 315, 316: n = A,T,C or G
  misc_feature 317, 318, 319, 320, 321, 322, 323, 324, 325, 326, 327, 328,329, 330, 331, 332, 333, 334, 335, 336, 337, 338, 339, 340,341, 342, 343, 344, 345, 346, 347, 348, 349, 350, 351, 352,353, 354, 355, 356, 357, 358, 359, 360, 361, 362, 363: n = A,T,C or G
  misc_feature 364, 365, 366, 367, 368, 369, 370, 371, 372, 373, 374, 375,376, 377, 378, 379, 380, 381, 382, 383, 384, 385, 386, 387,388, 389, 390, 391, 392, 393, 394, 395, 396, 397, 398, 399,400, 401, 402, 403, 404, 405, 406, 407, 408, 409, 410: n = A,T,C or G
  misc_feature 411, 412, 413, 414, 415, 416, 417, 418, 419, 420, 421, 422,423, 424, 425, 426, 427, 428, 429, 430, 431, 432, 433, 434,435, 436, 445: n = A,T,C or G
cccttcgagcggccgcccgggcaggtacgcggggaaacacttccccgcttggctctcattcttccacaagagagacctttctccggaccttgctactggttcagcagctctgcagaaaatgtcctcccttgtggctgcctcagctcctgttcttggcctgaagcccacagctttgatggcagcgcctcatcttcaacttttgtgctcccctttgcctaaaccctatggcctcctgtgcatctgtacctcggccgcgaccacgctaagggnnnnnnnnnnnnnnnnnnnnnnnnnnnnnnnnnnnnnnnnnnnnnnnnnnnnnnnnnnnnnnnnnnnnnnnnnnnnnnnnnnnnnnnnnnnnnnnnnnnnnnnnnnnnnnnnnnnnnnnnnnnnnnnnnnnnnnnnnnnnnnnnnnnnnnnnnnnnnnnnnnnnnnnagtgagctnactcacatttaattgcgttggcgctcactggcccgctttccagtccgggaaacctgtccgtgccaagctgcattaatgaa

SEQ ID NO: 5101 - DNA, 539 bp, Homo sapiens
  misc_feature 92: n = A,T,C or G
cccttgagcggccgcccgggcaggtacgcgggttgattagttaagaataaaatttttttaaaacatgcgctccaaaagaggacacatcacanaaacacaacaagcaaattaaccttctgtttttgcctctgcagaaaatgtctcaagaaccagaaataaataaggatggtgatagagaggttgaagaagaaatgaagaagcatgaaagtaataatgtgggattactagaaaacctgactaatggtgtcactgctggcaatggtgataatggattaattcctcaaaggaagagcagaacacctgaaaatcagcaatttcctgacaacgaaagtgaagagtatcacagaatttgcgaattagtttctgactacaaagaaaaacagatgccaaaatactcttctgaaaacagcaacccagaacaagacttaaagctgacatcagaggaagagtccaaaggcttgaaggcagtgaaaatggccagccagagaaaagatctcaagaaccagaaataaataaggatggtgatagagagctagaaa

SEQ ID NO: 5102 - DNA, 610 bp, Homo sapiens
  misc_feature 49, 123, 125, 127, 132, 133, 134, 135, 136, 137, 140, 141,143, 144, 145, 146, 160, 161, 168, 171, 172, 173, 174, 175,176, 179, 184, 185, 186, 206, 210, 211, 212, 213, 214, 215,217, 218, 221, 222, 223, 224, 235, 247, 257, 262, 264: n = A,T,C or G
  misc_feature 265, 274, 276, 277, 282, 283, 284, 285, 289, 291, 292, 313,315, 317, 318, 321, 329, 335, 336, 339, 340, 348, 349, 353,357, 358, 360, 372, 375, 376, 384, 387, 390, 398, 405, 409,414, 419, 421, 422, 436, 438, 450, 452, 453, 454, 455: n = A,T,C or G
  misc_feature 456, 459, 462, 463, 464, 474, 475, 476, 489, 491, 492, 499,504, 512, 514, 515, 517, 523, 525, 533, 535, 536, 537, 540,541, 542, 548, 550, 553, 554, 556, 557, 572, 573, 577, 578,579, 584, 586, 588, 589, 590, 591, 592, 594, 598, 610: n = A,T,C or G
cccttagcgtggtcgcggccgaggtactttttttttttttttttttttnaattttttttttttttttttttttttttttttttttttttttttttttttttttttttttttttttttgggggncnanaaaannnnnnttnntnnnnaaaaaaaaaaaaannaaattgnggnnnnnnaanttttnnnttaaaaaaaaaaaaaaaaantggnnnnnncnnggnnnnaaaaaaaaaanttttttttttanaaaaaaaaanacccncnncctttttanannacttnnnncccncnnaaaaaaaaaaatttttttttntngnnggngaaaaaancccccnnggnngggggggnngacncccnntnttttttttttgnagnnaacgacanaanaangggggggngaaaaanaaanatcanataangnncggggggggggagngngaaaaaaaaaantnnnnnttnggnnntttttttttnnnaaaaaaaaaaaananngaattgnggggncccccccngnnanaaaaananaaaaaaancnnnccnnnctttgntngannannaaaaaaaaacacccnncccnnncccgntngnnnnnangaanaaaaaaaaaaan

SEQ ID NO: 5103 - DNA, 435 bp, Homo sapiens
  misc_feature 55, 153, 157, 170, 174, 177, 179, 187, 189, 190, 191, 192,193, 194, 197, 202, 204, 206, 215, 230, 231, 236, 241, 258,259, 262, 263, 265, 266, 267, 268, 269, 271, 272, 273, 287,288, 289, 291, 292, 293, 295, 299, 301, 302, 303, 322: n = A,T,C or G
  misc_feature 324, 340, 343, 347, 372, 373, 374, 375, 376, 384, 385, 397,406, 407, 410, 412, 413, 414, 418, 422, 424: n = A,T,C or G
ccctttcgagcggccgcccgggcaggtactttttttttttttttttttttttttnggtttttttttttttttttttttttttttttttttttttttttttttttttttttttttttttttttttttttttttttttttttttttttttttttnatanaaaaaaaaaaaanttanaananaaaaaatntnnnnnnttnaaaanangnggggggggnttttttttttttttnnggggnggganaaaaaaaaaaaaaaacnnccnncnnnnngnnnaaaaaaaaaaatannncnnngngtgngnnnaaaaaaaaaaaaaaaaaangnttttttaaaaaaaganaangggntttttttttttaaaaaaaaaaaaannnnnaataagannggggggggggtnttttttttnnagnannngganaaananatttttttttt

SEQ ID NO: 5104 - DNA, 138 bp, Homo sapiens
  misc_feature 54: n = A,T,C or G
cccttagcgtggtcgccgccgaggtactttattttttttttttttttttttttngcggatttaccttttaaaagttaactttattgaaaaggtaacaggaaaaaaaattgcatggcaggaatggtttaaaactgctaa

SEQ ID NO: 5105 - DNA, 550 bp, Homo sapiens
  misc_feature 50, 458, 467, 508, 537: n = A,T,C or G
cccttagcgtggtcgcggccgaggtacttctttttttttttttttttttnctttaatcatttatttgggggtgagattttggttgttgccaaattttcactatggacaattatgcaaaattcctcatacgtatatatttttttgtccagggtgttaagtcttctgtggcataggtttctggaagtaaaataattgtgtaaaacaatgtgttcttaaaaaaaataatagatatagatactctgccttcaaaaatgtattgactgtataactcatggtatatataaaaaggcttcaaaatcttcactctgattcttccaaagtcattaagatttttaatatatcaagtgaatgtgttaaaagctttgttaaatacagccagacatggtggtgtgcacctgtagtcccagctacttgggaggcttaggcgagagaatcacttgaggctgggaaactgagtntgcaatgancccgatcacatcactgcattccaagtcaaaaaaagcaaacnaacaaaaacaaaacaaaaaacctactgcnctcattttttttc

SEQ ID NO: 5106 - DNA, 294 bp, Homo sapiens
  misc_feature 126, 127, 128, 142, 143, 144, 145, 146, 147, 148, 149, 162,174, 176, 177, 178, 181, 199, 206, 213, 223, 227, 228, 232,235, 255: n = A,T,C or G
ccctttcgagcggccgcccgggcaggtactttttttttttttttttttttttttttcttttttttttttttttttttttttttttttttttttttttttttttttttttttttttttttaaaattnnntttttttttttttnnnnnnnnaaaaaaaaaaaantttttttttggncnnnaantttttaaaaaaaaaattnaaaaaanttttttntaaaaccccntttnnaaanaanaaattttttttttaaccccnaaaaaaaaaaaaaaattttaaattttttaaaaaaaaaaa

SEQ ID NO: 5107 - DNA, 184 bp, Homo sapiens
  misc_feature 111, 115: n = A,T,C or G
agcatcaagaagcgtcggggagcgcaggcccagcagccatggcggtggaaggaggaatgaagtgtgtcaagtttttgctctacgttctcctactggccttttgcgcctgcncagngggattgattgccattggcgtaacagttcaggttgtcttgaagcaggccattacccacgagactactgc

SEQ ID NO: 5108 - DNA, 264 bp, Homo sapiens
  misc_feature 54, 55, 56, 116, 120, 122, 123, 125, 129, 133, 134, 135,136, 137, 138, 139, 140, 142, 144, 145, 147, 158, 165, 168,169, 170, 171, 172, 173, 175, 177, 178, 179, 180, 181, 184,185, 209, 211, 212, 214, 226, 227, 235, 238, 241, 245: n = A,T,C or G
  misc_feature 247, 248, 249, 251, 252, 260, 261: n = A,T,C or G
cccttagcgtggtcgcggccgaggtacttttttttttttttttttttttttttnnnttttttttttttttttttttttttttttttttttttttttttttcttttttttttttttnaaanannancccnaaannnnnnnngngnncnccccccccccnttttatnaannnnnnancnnnnnccnnaaaaaaaaaaattttttttttatnannanaaaaaaaaaacnntctcaaanaanaancttntnnntnncccccccnnaaa

SEQ ID NO: 5109 - DNA, 612 bp, Homo sapiens
  misc_feature 601: n = A,T,C or G
ctcaagctatcaatggagtcggatcttgtaaggcacctcgcccggcgcctcggcctcggggagccgagtgtactgaggaaagcagaggagtacctgcggctgtctaaagtgaagtgtgtcagtctgtctgcacacacctcagaaaccagcaatgctgtcatatgcctggaccttgcagcgtcctgtaggaagtgccccttggatagagcgtatctaattaagctctctggtttgaacaagaagatgtatcagagctgtcttaaatcttttgagtgtttgctggggttaaactcaaatattggattaagagacctggctgtgcagttcagctgtacagaagccgtgaacttggctgcggggatactgcaaagctatgagtctagtcttccggaagcacagcgagcagatcttgacttgtccaggccacttttcaccacggcggctctactctcagcatgcaaaattctaaagataaaggtggataaaaccaaaatgataactacatccggtgttgaaaaaaacaatattttgatcgactgtgtacacagctagaaaaggatcggacagcaaattaacagagactctgcagatttagctagtncagccctgaaa

SEQ ID NO: 5110 - DNA, 533 bp, Homo sapiens
  misc_feature 486, 518, 521: n = A,T,C or G
ccctttcgagcggccgcccgggcaggtactgctctttactactctagtaacactagataataagcacttaaatgctgagtgtttgtcagttttaaaattagagaaagagacaaattgttttctgatctacttgcttaataaattattttttgccaactaatttttaggtttacttggtaaatttaaaggtagtttaaaatgtatatttaaataacttttctctataattgaagaaaataatttatcttgagagaattttactttaaacagttgctttagagtctatcttgtaaagtattctattttcaaataaagccgggtgcagtggctcatgcctgtaatcccagcactttgggaggccgaggcaggcagattacctgaggtcgggagtttgagaccagactgaccaacaaggagaaaccccatctctactaaaaatacaaaattagctgggtatggtggcgcatgctaccagctactcgggangctgaggcaggagaatcgcttggacccaggangtngaaagttgcggt

SEQ ID NO: 5111 - DNA, 504 bp, Homo sapiens
  misc_feature 20, 44, 75, 85, 141, 328, 333, 356, 403, 454, 466, 468, 477,480, 486: n = A,T,C or G
ctgcagaattcgcccttcgngcggccgcccgggcaggtactttnttacataatgtctccagagagggtttccttntgtctagcanacaaaggtaatggtagctgatcaccttaacaaaatcaggagctgtttgaagttganacttggttgtagctctgggtaaagctctagctacttatgtccaagggtatatagccctctaggatttttaactgagagcttggtattcattggggcttctccttctggcaagttcataactctaatctgtatcttgtgaagactgccaaagagtctgttctgcttttcaaaggctttccaatgaggnttttnacctctcattctgcagagccccngggaattggcaaatatcccaacaggataactggctggttgcatggangttcccctggttttccacaaaagcctctgctgatttcttgtccccagttangggctttcccgncnaccataaangtntctggnttctcaaatcccctgccc

SEQ ID NO: 5112 - DNA, 637 bp, Homo sapiens
  misc_feature 333, 343, 352, 360, 363, 367, 372, 378, 398, 399, 414, 423,428, 436, 439, 448, 456, 457, 480, 494, 513, 525, 546, 565,568, 581, 586, 589, 600, 611, 613, 614, 615, 621, 635: n = A,T,C or G
cccttagcgtggtcgcggccgaggtaccacttcactccagcctggcgacagagtggactccgtctcaaaaaataaaataaaataaaataaaataaaataaaataaaataaaataaagcaaaaatataaaatgttaaaaaaaaacaaaaaaagggaaaaaggaagctgattgccttggtgagtcaacactgggtattttctgaccactatttgaaacaaaaaaggaaaccactgattttctatgccaaagatcttgttcctgggaaggcactctgcggagacaccaggagaacttttatcaatccttcattgatttgaagtaaaagtgctaaancattggttgngggtggcancccattancanatcncaaantccctngagtgggttacctaaccagnnggaacccaggaccgncttcttggnaactnggggtaanccntactttttngaacctannggattcagtttccttttaagggntttccaccaaaagntaaaccctggttcattttnaaatttaaaatnctttgccagtcccctttcganttggggagaaattttcccncgngcattccccaggnggggnggntttgaaaaaanttttttttaantnnnaccttncccggggggggccntt

SEQ ID NO: 5113 - DNA, 253 bp, Homo sapiens
acttttagtagagacagggtttcaccatgttaggcaggatggtctcgatctcctgaccttgtgatccacctgccttggtctcccaaagtgctgggattacaggcttgagccacagcgcccggcctagtcagcccagtatcttatagctgttgacgacattctggggatatgaatgtagcttacaaacgctagtatttctacagaaagcagaaataatttaactgtccgttttcacatttatatttaataaaat

SEQ ID NO: 5114 - DNA, 254 bp, Homo sapiens
  misc_feature 45, 244: n = A,T,C or G
cccttagcgtggtcgcggccgaggtacgcgggtgtcttctgttgnattaacttctttcctttgtggtatcttgtatcctgtttaaaaactaaatgaagggaaccacattagggcccatgccagcatcccagtgaagttcgtccagctccagttaggtggattctggagttccggagagggtttaaagtttggctgaaatagcacctcaagtggggtttaagttttatttttacctgcgggcatnatgggccgat

SEQ ID NO: 5115 - DNA, 526 bp, Homo sapiens
  misc_feature 458: n = A,T,C or G
ccctttcgagcggccgcccgggcaggtacatatcttttatatgctcatatgctcctgtagtcgttagttttaattcttaaaaatgtgataattgtaataaacttttattatatcttatgtaaaataattgtgtgtctgagagagactaaaactcatgccctacttctcatgatttctctttctcttttgtttccctttcacagacagaagaattatagcctcagtatttatgtatatttttgaaagagtgaagtggggactgagaaggtatatctacatgctatgccttttgatagcattctgtttcaaatctccttttctcatcattggctggaacacagttgaaaaaatattaaactgattttgtgacgatgaatttaggaattccagttagctaaggattagaaaaactgattttcagaggcatactctgatccagaatggggctttaatattgnattatactgaaatataaagcagaggtctactaaaatctagagtacctcggccgcgaccacgctaaggg

SEQ ID NO: 5116 - DNA, 440 bp, Homo sapiens
cccttagcgtggtcgcggccgaggtacgcgggtgactgtagtggctctcaccagtaatcccagcacttggggagactgaagcaggaagattgcttgagaccaggagtttgagaccaccctgggcaatatagcaagacccgtctctgcaaaaaaattaaaaacttagccaggcatagtggcctgtgcctgtagtcccagctactcagtaggctgtggtgggaggattgcttgagcctaggaggtcgaggctgcagtgagctgtgatcttgccactgcacgctgaaccttggtgacagagtgggatcctatctcagaataaattagaataaaataaaatcccaagagagacgttacaagcaaagaaaatcatggaccaatatttttcatgaacataaatgtaaaattcttaggaaaattttagttaattagtaatatattaa

SEQ ID NO: 5117 - DNA, 614 bp, Homo sapiens
  misc_feature 64, 70, 81, 91, 92, 102, 124, 131, 135, 145, 147, 150, 168,182, 187, 194, 203, 224, 228, 230, 248, 255, 257, 267, 268,274, 276, 281, 298, 306, 311, 325, 326, 345, 358, 360, 363,368, 396, 440, 441, 442, 448, 455, 463, 477, 491, 495: n = A,T,C or G
  misc_feature 515, 526, 535, 546, 552, 564, 566, 568, 574, 580, 584, 595,596, 604: n = A,T,C or G
actttttttttttttttttcttttttttttttcttttttttttttttttttttttttttttttntttatnactaaaggttnatttacatanngtttaaagcntaataaaaaataaattacaatncaaaagngctntttaggaaananacnctaaacaacaggcccatnttaccccttgactntttanccaaaanataggctanaaattttgccggaaaaactgnccananattttaaactacttcttnattattntnatggaccatnntccagnanatttntttgaaaaaatatccanttataatnttttnaaaggttaaaattnngaaaaaaaaatttaaaatnggattaaaggatntntanccttnaaatgtaatttacagttttaaaattgcnctttaaaacttttcttttttaaacattataaaaggcaaaatggnnnaaattntttaatngaattttnaaaactgaggggtnaattttttaaaatnatanaaattttttttaaaaaaaanaatttttttgnaaaaaaatnattaaaggggntttacnattttaaaaaancnanaaaaanttttgntttnaaaaaaattcnnaattttgntaaaaaaaaa

SEQ ID NO: 5118 - DNA, 545 bp, Homo sapiens
  misc_feature 277, 356, 518, 534: n = A,T,C or G
ccctttcgagcggccgcccgggcaggtacgatctcagcttatgcaacctccacctcccgggttcaagtgattctcctgcctcagcctcccgaggaattggaattacaggcacctgccaccacacctggctaatgtttttgtatttttagtagagacacggtttttgccatgttggccaggctggtcttgaactcctgacctcaagtgagccacctgccttgacctcccaaagtgtcgggattacaggcgtgagctcttgtcattcggcggaagcagngtttctctattaggagacatgatgggtcatttttctctgtaaagagaaaaacatgtagcctagaccaagctttcctcanccctcagctttagtgatgttgggggccaagacaatttcttttgttgggtgggacagggctgtctttgtttgctgcaaggggtggtgaaacaagcatccctggcttctgcccataggtgcccaagtagcataccatccaattgcagtaacccaaaatgtcttntagatattaccaaggngcccctggggg

SEQ ID NO: 5119 - DNA, 283 bp, Homo sapiens
cccttcgagcggccgcccgggcaggtaccttgaatatactgatgaaaatcaacatcaatatattttggctgtgcctgtgttaaacctaaatcttcaacataataagatatttgtgaaccaagacagcaactctggaaagtggcttctaactcggcgcattttcttagtggatgcagtaagtggacgagaaaatgacttaggaactcagccaagagtaattcgagttgctactcaaatatcactgagtgtccaccttgtacctcggccgcgaccacgctaaggg

SEQ ID NO: 5120 - DNA, 629 bp, Homo sapiens
  misc_feature 55, 56, 57, 111, 112, 118, 120, 128, 129, 130, 131, 132,135, 137, 138, 140, 155, 156, 158, 160, 161, 162, 163, 179,185, 187, 198, 199, 201, 202, 208, 209, 210, 212, 213, 237,238, 242, 243, 244, 245, 246, 249, 259, 260, 268, 270: n = A,T,C or G
  misc_feature 271, 275, 278, 290, 295, 296, 298, 299, 300, 302, 303, 307,311, 318, 326, 328, 335, 336, 347, 349, 359, 362, 364, 368,375, 388, 393, 401, 412, 414, 420, 429, 430, 434, 435, 440,441, 443, 446, 447, 449, 453, 454, 458, 460, 461, 462: n = A,T,C or G
  misc_feature 463, 464, 483, 484, 488, 497, 503, 509, 517, 518, 520, 530,538, 540, 547, 550, 561, 573, 579, 581, 587, 593, 598, 607,608, 609, 613, 615, 622: n = A,T,C or G
cccttagcgtggtcgcggccgaggtactttttttttttttttttttttttttttnnntttttttttttttttttttttttttttttttttttttttaaaaaaaaaaaaaanntttttntnaaaaaaannnnnccncnnanaaaaaaaaaaaaaanntntnnnnaaaaaaaaattttttncccccnanttttttttttnncnncccccnnngnnttttttaaaaaaaaaaattttttnnaaannnnnggngttttccccnntttttttntnnaccngangaaaaaaaaaanacacnntnnncnntttnttanaaaaaangggggggnanccccccnntttttttttcngnaaaaaataanaantntttntccccanaaaaaaaaaaaanatctntctttttngaaaaaaaaanantttttnccccccccnnaaannttttnngnggnnanaaannaaanannnnnttttttaaaaaaaaatttnnattngggcccccntttttnaaaaanaagaaaannanaaaaaaattntttttttngnggggggnggnttttttttcanaaaaaaaaaaancccccncnaaagtnggtttnttttncccccccannncaananaaaaaanatttttt

SEQ ID NO: 5121 - DNA, 353 bp, Homo sapiens
  misc_feature 1, 9, 23, 73, 82, 85, 108, 126, 134, 145, 178, 216, 219,223, 225, 228, 230, 312, 337, 350: n = A,T,C or G
nccctttcnagcggccgcccggncaggtactggcctgccaagccaatcactgtcactgtcaataccgggatanacaactcgnaanccaaaggtttgtcctgccacggntactgatattgcccatancatacttnatgcccaggancccaaaaacctgcccacccaactggcctactgntgtcactaccagtaaccaggcaagccacctaaaggttnaanaatnanctntntggactagctaacactaatgccattatacactgccctaggtcccaaggaaaggaatatttggcctaccactgccgtgactanaacctgaaaacatgcctacctggcntccaagtcaccancaa

SEQ ID NO: 5122 - DNA, 494 bp, Homo sapiens
  misc_feature 438: n = A,T,C or G
ccctttcgagcggccgcccgggcaggtaccctgccttctggctgtatggcttacatcctggaaattacctgataataaagcaagtaaaggtgtaaggtttcctaagggattacaacacagtggtttcctggtctctctccctgtcatcaatcagggtagtaacttgacttaagaataccactttttagaaaaattacgatagagatgggatctcactaggttgcccaggctggtgtcgaattcctggtctcaagcagtcctcccacctcagcctcccaaggtgctgggattacaggtgtgagccaccacacctggccaagaataccacttttgaaagttaatccttttgtgtgatacaggatgaacttgggatgtttgaaccctggacattccaaataaagaataggcccctgcctggctcctggggagaataacctntaagccattagaatatcttgcctgataagagtgtttttgtttaccttgtgggcctt

SEQ ID NO: 5123 - DNA, 624 bp, Homo sapiens
  misc_feature 114, 115, 131, 134, 135, 136, 145, 146, 148, 150, 151, 152,153, 164, 167, 169, 175, 176, 177, 185, 186, 187, 188, 191,192, 193, 194, 203, 204, 206, 207, 208, 209, 210, 220, 221,222, 230, 235, 250, 251, 252, 269, 277, 287, 296, 297: n = A,T,C or G
  misc_feature 309, 311, 312, 315, 316, 340, 341, 347, 354, 360, 363, 366,368, 370, 374, 375, 376, 377, 382, 383, 393, 408, 411, 412,413, 414, 419, 422, 424, 435, 436, 453, 456, 464, 466, 472,473, 475, 483, 487, 493, 494, 499, 500, 514, 516, 518: n = A,T,C or G
  misc_feature 521, 522, 523, 524, 525, 526, 527, 528, 532, 538, 544, 546,548, 549, 551, 552, 557, 566, 586, 587, 588, 593, 602, 604,607, 612: n = A,T,C or G
cccttagcgtggtcgcggccgaggtacttttttttttttttttttttttttttttttttttttttttttttttttttttttttttttttttttttttttttttttttttttttnngaaaaaaaaaaaaaanaannnggggggggnncnannnnaaaaaaaaaanatnantttttnnnaaaaaaannnnggnnnnaaaaaaaanngnnnnncaaaaaaaannnaaaaaaanccccncacctgggggggggnnnaaaaccacacccacccnttttgggnaaaaaaaaanccccccccnncattgatttaantnntcnncccccccccaagggaaaaactaannggaggntttaaanggaagnatnttnancncccnnnnctttnntaacttgganggtttttttttcccngannnnaaaanatntnccccccccccnntattttttttaaaacanggngggggggnanaaaaanntntttttttnttcncccccnnaaccnnaaaaaaaaaaaaanancnccnnnnnnnncccncccttntttttntntnntnnttatnaaaaaaaanaaaacccccaaaaaaaaaannnccccnccccccccntnatnttttngggggggggggg

SEQ ID NO: 5124 - DNA, 519 bp, Homo sapiens
  misc_feature 119: n = A,T,C or G
cccttagcgtggtcgcggccgaggtacagtgaggggtgaatggaatgggcagtggtcgccaggatggcctcccacccagctcagagacctggtgaggaccacccagaagggttgtgcanagggttagaggccacacagaggggcactcatgtttttgtgggggatgcacagctcattaaacagtcaccagtcatgggaggaggctggtcaggggctaggggacttgctcacagtcgtgatggctctgtgttatttgggggtgacagtaattatggagctggagtgctcctcgacaaagacagacagagctcctcgcagagggatggtttccatggcaatagcatcagcatctgaatgacttcctgtcacaacaagttggtgatttaatgagttcattactgaattccaaaggaaaaccagagagtggatgagctactgttcagccctcaaagtggctaagtccatagtgagggagccatttctaccgggtgcagcatcagaaccattaacagctcaggg

SEQ ID NO: 5125 - DNA, 435 bp, Homo sapiens
  misc_feature 1, 16, 130, 131, 143, 145, 146, 148, 149, 160, 165, 166,167, 179, 180, 192, 193, 197, 198, 200, 201, 202, 203, 204,205, 219, 225, 245, 246, 270, 271, 277, 279, 280, 281, 290,292, 299, 300, 301, 302, 303, 304, 305, 333, 352, 353: n = A,T,C or G
  misc_feature 365, 366, 367, 373, 375, 376, 381, 382, 383, 394, 395, 396,397, 398, 399, 402, 411, 412, 413, 414, 415, 416: n = A,T,C or G
ncccttagcgtggtcncgcccgaggtccttttttttttttttttttttttttttttttttttttttttttttttttttttttttttttttttttttttttttttttttttttttttttttttcccccccnnaaaaaaaaaaananngnnaaaaaaaaacnggggnnncccccccccccnngggggggggggnncccnncnnnnnnaaaaaaaaaaaaantttttncccccccccccccccccccnntttttaaaaaaaaaaaaaaaaaanngggggngnnnaaaaaaaantnttttttnnnnnnnaaaaaaaaaaaaaaaaaaaaaaaaaaanccccccccccccccccccnntttttttttttnnncccccnannaaaannnaaaaaaaaaannnnnnggnggggggggnnnnnnaaaaaaaaaaaaaaaaaaa

SEQ ID NO: 5126 - DNA, 361 bp, Homo sapiens
cccttagcgtggtcgcggccgaggtacaggtctctgtaaaaagtccttgctgtctcagcagccaatcaacttatagtttatttttttctgggtttttgttttgttttgttttctttctaatcgaggtgtgaaaaagttctaggttcagttgaagttctgatgaagaaacacaattgagattttttcagtgataaaatctgcatatttgtatttcaacaatgtagctaaaacttgatgtaaattcctcctttttttccttttttggcttaatgaatatcatttattcaagtatgaaatctttatactatatgttccacgtgttaagaataaatgtacctgcccgggcggcccgctcgaaggg

SEQ ID NO: 5127 - DNA, 634 bp, Homo sapiens
  misc_feature 8, 52, 54, 57, 109, 112, 115, 117, 118, 123, 126, 130, 140,141, 142, 143, 147, 151, 153, 155, 156, 157, 159, 160, 164,170, 171, 172, 173, 184, 186, 187, 189, 193, 194, 197, 198,204, 206, 208, 211, 212, 215, 224, 227, 228, 229, 231: n = A,T,C or G
  misc_feature 233, 247, 248, 251, 256, 259, 261, 271, 278, 288, 289, 295,300, 306, 311, 315, 316, 317, 322, 323, 326, 327, 328, 330,357, 380, 387, 390, 398, 399, 417, 419, 429, 430, 434, 436,438, 439, 454, 468, 471, 475, 476, 491, 492, 493, 501: n = A,T,C or G
  misc_feature 503, 509, 516, 520, 522, 526, 534, 550, 582, 583, 586, 599,601, 602, 605, 607, 616, 620: n = A,T,C or G
ccctttcnagcggccgcccgggcaggtacttttttttttttttttttttttngnttntttttttttttttttttttttttttttttttttttttttttttttttttttnaanaanannaaaanatntttnttttttgggnnnnaaanaatngntnnnanngttngggggnnnnaaaaccccctncnncnaaannatnnaaaaantntnaannatnaggcatttnctnnntngnaaaaaaaaaaaaannggnggggnaanantattaaaatntcctggntcctaaaggnntatttnaaaanaaaagnaaatncatnnntcccnncgnnngnataaaaaaacaaatttttttttttatnaacaaaaaattagatgatggggngggactnccnaaaacccnnttttactttttctttccncnaaaatggggnngggntncnnccccattttgaaatnaaaattgcccgggnaancaannaaaattttaattttnnnggaagggnangaaccngaaactnttcntnaatnaaaccaangctttttttttttcanaaaaaaaaaaaaggcccgcccttttggattgnnttnccaaaaacaaaancnnagngnttttttttngaanttaaaaaaaaaaaa

SEQ ID NO: 5128 - DNA, 272 bp, Homo sapiens
  misc_feature 8, 52, 109, 163, 200, 250, 257: n = A,T,C or G
ccctttcnagcggccgcccgggcaggtacacttcagtcacaattctggaacnctaagaaaaaacgttccagacttcaaacacaaatttatcctcaccagttaataactncttttctttgctcaaaaacccagtgagaaaaaataactccaggccaggcacagnggctcatgcctatacttctagcactttggaaggcacnaggcgggcggatcacaaggtcaggagttcaaggaaccaagggctgaccanacatggntggaaacccccacct

SEQ ID NO: 5129 - DNA, 679 bp, Homo sapiens
  misc_feature 60, 62, 108, 109, 121, 126, 142, 150, 151, 152, 165, 176,177, 184, 186, 192, 202, 205, 206, 207, 211, 223, 224, 227,237, 241, 249, 251, 252, 254, 261, 263, 267, 268, 269, 284,294, 300, 312, 315, 317, 318, 322, 331, 339, 356, 357: n = A,T,C or G
  misc_feature 362, 368, 369, 395, 403, 409, 418, 435, 444, 447, 451, 453,454, 457, 459, 461, 462, 470, 474, 475, 477, 488, 504, 513,514, 515, 516, 517, 520, 527, 545, 584, 585, 605, 607, 614,616, 639, 642, 657, 658, 661, 663: n = A,T,C or G
cccttcgagcggccgcccgggcaggtactttttttttttttttttttttttttttttttnantttttttttttttttttttttttttttttttttttaaaaaaaaaanntttttttttttnggggnaaaaaattttaaaacncaaaaaannnaaaaaaaaaaaantttttttttannaaaaaantntttttnaaaaaaaaanttnnngggnaaaaaaaaaaannttntttttccccnaatnaaaaaaanannangggggcnanaaannntttttttttttttanaaaaaaaaantttttncccccctttttnaananntttnaaaaaaaanccgggggnaaaaaaaaaaaaaattnnaaccntttacnnggagattttttttaaaaaaaagagtntttttttnacatgncaaaaaagntttttttacacaaaaantccccgggntgncttnannaanangnnaaatttcntttnntngaaaaaaaaanagggggggaaaaaaanttttttttnnnnntanaaccccnaaaaaaaaaaaaaaaaanatttttttttttttttaaaaaaaaaaaaaactatttttnnggaaaaaaaaaaaacttttnanaaaaagngntttttttttaaaaaaaaaaaacnaanttttttggggggccnnccncnaaaaaaaaaaaaaaaa

SEQ ID NO: 5130 - DNA, 566 bp, Homo sapiens
  misc_feature 246, 247, 249, 252, 253, 254, 256, 257, 258, 259, 260, 261,262, 264, 267, 268, 269, 273, 305, 376, 381, 399, 410, 412,422, 460, 481, 486, 527, 553: n = A,T,C or G
cccttagcgtggtcgcggccgaggtacagagcctcagagggaaagacagtggaagttccttttaaaggagatgtggaacataccatccgagacatcctaggagggatccgctctacgtgtacgcggggtccaaggatttatttaatggggatgtgttcaaggcaagaccgaattcagaaggatatcgaccgtcgtgatccaaaagtccagagctgaggactgcctgtttgcaaatactggactttnntnttnnnannnnnnntnttnnngggnttttttttttttttttgaggaattaacaagtnttttatttgggctcaaaccaagaatcccgggggtcttgagggacctctgggggattgggcaaatttttttntcccncgttttttttttttgggncttgttttccntnaacccccatnaaccctttttttttttttttcccggggggggggaaacnttggggctttttttttttttnccctntttttccccccaaagggggggggttggtcaacttgggcctnggggacccctggccccggggcggggncccgttttaaaaa

SEQ ID NO: 5131 - DNA, 390 bp, Homo sapiens
  misc_feature 151, 314, 321, 324, 356: n = A,T,C or G
cccttagcgtggtcgcggccgaggtaccatatttcagatattggcacattcggcttgtataaggggagacgcttttttgcagttggacggccattgaagacaagttggtcaccccaagttttctttccagttcttctgaaaaactcactanagaaaaagaaagcaagaaatacagaaaagtatagaaaaataatccatattcccaccacctaggattaagttgttaacaagatgaaaacttcatactgaaaaaccaccctttctagaggcgatttaccacttattccttgcctttcaaaaatattttacttttncaagggnaanctctccttattaaattttgaaaaaaaaaatgntttcttttaaattagagattgttaacttggggtc

SEQ ID NO: 5132 - DNA, 310 bp, Homo sapiens
  misc_feature 154, 277, 298, 306: n = A,T,C or G
cccttagcgtggtcgcggccgaggtacgcgggtatcttatgattaaaaacaaattaaattttaaaacacctgaagatatattagaagaaattgtgcaccctccacaaaacatacaaagtttaaaagtttggatctttttctcagcaggtatcanttgtaaataatgaattaggggccaaaatgcaaaacgaaaaatgaagcagctacatgtagttagtaatttctagtttgaactgtaattgaatattgtggcttcatatgtattattttatattgnacctgcccgggcggccgctcnaaagggcnaatt

SEQ ID NO: 5133 - DNA, 291 bp, Homo sapiens
  misc_feature 134, 135, 138, 139, 150, 152, 153, 162, 170, 172, 173, 174,176, 179, 180, 186, 187, 188, 204, 205, 212, 221, 223, 226,227, 228, 230, 238, 243, 244, 251, 253, 254, 256, 260, 265,266, 268, 269, 280: n = A,T,C or G
ccctttcgagcggccgcccgggcaggtactttttttttttttttttttttttttttgttttttttttttttttttttttttttttttttttttttttttttttttttttttttttttttttttttttttttttnnttnnttttttttttntnnaaaaaaaanaaaaaaantnnntnttnnaatttnnnaaaaaaaaaaaaaaanngaaaaanaaaaattantntannnanacaaaaanagagnnaaaaaangnntnaaanttttnntnnaacaaaggggntgaaaaaaaaa

SEQ ID NO: 5134 - DNA, 656 bp, Homo sapiens
  misc_feature 6, 18, 20, 22, 24, 27, 32, 33, 34, 36, 37, 39, 46, 47, 48,49, 50, 63, 70, 124, 229, 339, 361, 376, 378, 383, 384,386, 387, 388, 396, 417, 423, 429, 433, 436, 441, 451, 452,453, 458, 462, 463, 468, 491, 492, 493, 495, 514, 515, 520: n = A,T,C or G
  misc_feature 526, 527, 528, 534, 543, 544, 546, 555, 556, 558, 575, 576,585, 591, 592, 593, 605, 610, 612, 614, 618, 619, 621, 629,633, 634, 635, 638, 641, 656: n = A,T,C or G
cccttnccagcggccggncngncnggnactgnnntnntntatttannnnnttcatattggctnggcacantggttcacacctgtaatcccagcattttgggaggccgaggcgggcggaggtcangagattgagatcaccctggctaacatggtgaaaccccgtctctactaaaaaaatataaaaaattagccaggtgtgatggctggcacctgtggtctcaattactcnggaggctgaggcaggaaaatggtgtgaacccaggaggcggagcttgcaagtgagccgaaattgtgccactgcactccagcctgggtgacagagcgagactccgtctcccnttttttaaaaaaaaaaaaaaanccccccagttttttntnggttnnannncccccccntaaaagggggggaaggaaaanttttancccccntccnccncgggngggggggggnnngaacnaaannaaatnaaatccccttttaaacccccccnnngngggggggaaaaaagttttnntcccngggggnnnaaaaanaaaaaaaanngngtttttttnnanaaaaaaaaaattttttnnccggggggnttttannnaaaaaaaaaaanggggnangngggnngncccccttnttgnnnccnacnaaaaaaatttttttn

SEQ ID NO: 5135 - DNA, 553 bp, Homo sapiens
  misc_feature 63, 80, 91, 94, 95, 96, 112, 113, 125, 136, 140, 141, 142,143, 147, 148, 149, 150, 164, 175, 180, 181, 183, 188, 189,190, 199, 212, 218, 235, 236, 237, 250, 259, 260, 261, 262,282, 285, 286, 289, 300, 304, 331, 339, 340, 351, 362: n = A,T,C or G
  misc_feature 365, 367, 376, 383, 384, 388, 389, 390, 391, 395, 398, 399,400, 402, 403, 404, 407, 416, 419, 431, 438, 440, 454, 463,464, 466, 467, 468, 469, 481, 484, 485, 487, 488, 493, 502,504, 505, 506, 507, 508, 509, 510, 511, 512, 513, 514: n = A,T,C or G
  misc_feature 515, 516, 517, 518, 519, 520, 521, 522, 523, 524, 525, 526,527, 528, 529, 532, 533, 534, 535, 536, 547: n = A,T,C or G
cccttagcgtggtcgcggccgaggtactttttttttttttttttttttttttttttttttttnttttttttttttttttntaaaaaaaaanttnnnaaaaaaaaaaaaaaanncccccctttttnaaaaaaaaaancccnnnnaaannnnaaaaaacccccccnaaaaaaacccnctttnnanaaatnnntggggaggnaaaaaaaaaaaancccccnttttttaaaaaaaaaannnccccccccccccnggggggggnnnnaaaaaaaaaaaaaaaaaaanttnnttnaaaaaaaaaancccnaaaaaattttttttttttaaaaaaaancccccccnnggggggggggnttttttttttnaananccccccccnggggggnntttnnnnattnccnnncnnncanggggggggnggnttttttttaaanacccccncnggggggggggaaancccaaaaannannnntaaaaaaaaaanccnntnnttttnaaaaaaaanannnnnnnnnnnnnnnnnnnnnnnnnnaannnnncaaaagaaaantttttt

SEQ ID NO: 5136 - DNA, 535 bp, Homo sapiens
  misc_feature 459, 499: n = A,T,C or G
ccctttcgagcggccgcccgggcaggtacctctcatggctttttggttccagcagtgagggcattggtgagatcaatggtaaactgtgcaagctttctttttatcattaggaaatgtgaaacgttggacaaattttgagttttaacaaggacaaaaagttgaaagaaaaggcacagttaacaaaaaagggtggctagatttatcttgggtgatggaggaaatgagagaggaatgctcttgaaaggtggtctgtggatctgtctgaatagaaagagcacagtaagtatgcattgccggagaaaacgtccttgaagctgcttgtctcatgtgtatgatgtgctttttaaatcatgcccctcgttgcctgcctaatctgtgactccctaaaaactaactgggcccatgtagatggggctgcaaccagagctgaataacatgttaggctcacacatgcatcancactgcacactggaatcattgctcttcctggactttgtanaaatcagtctcaagtgcttcaagagtctggctcctg

SEQ ID NO: 5137 - DNA, 249 bp, Homo sapiens
  misc_feature 182, 183, 184: n = A,T,C or G
cccttagcgtggtcgcggccgaggtacctatagaattatgaatatacagtaacctcattgagattaatcataaaatcaacactagattccaatattaactgtttatactgcattttgtttgttcccgcgcaccaactttgtcatgccttaagcaggttagttctttttactgtgtcttaaannntttttcctagtgagtaacatggtattttttaataatcccgcgtacctgcccgggcggccaaaggg

SEQ ID NO: 5138 - DNA, 475 bp, Homo sapiens
  misc_feature 109, 114, 142, 145, 157, 160, 167, 177, 185, 195, 203, 206,209, 220, 231, 244, 250, 264, 284, 286, 291, 296, 297, 316,326, 333, 342, 367, 385, 391, 397, 414, 419, 428, 432, 443,451, 465: n = A,T,C or G
cgcccagtggtgaatggatatcttgcagaaattcgccctttcgagcggcccgcccgggcaggtactccagcctgggcaacaagaagactccatctcaaaaaaaaaaaanggatngttggcctttttaaacccattcccaaanaantaccccttcaangtntttaacntggggccaanggtttttncggaaaaaantccccggnttnaanaatgagttttnaatttattttnggaaaaatgattnaccccntcaggtaaaaccgntaaaggggggaaaaaaaaantntttanccaanntaaaattttccggttgggnatttattaanaaggttngggaaaaantcggggggggggggtcatggccttnaaccccacccttttcaanggcccntttccnggaaggactgtttgaangccanttggaaacnaccngggggcaaccnaaaatttnttttccacaaaaanttttaaaatt

SEQ ID NO: 5139 - DNA, 403 bp, Homo sapiens
ccctttcgagcggccgcccgggcaggtacttcatttgcctaatttttgccattctcataatgtggcaattgttcaattttgcatttcttccattttatttttttgcatctctgcttttcttttggttagctttgccagttctgcctattatattaatctcccagaatcagcttttagttttgttaaatctctgacatgtttcgttgattcctgctttcatcttaaacatttcttcgttgttaatttgtgtttgctataaaataagcaacatcttaaatgcttgatttgctttcgatgtttattctgtaataagatatttaaagatataattttttccctaaatgctttattagacttttctcataagttttgactggtacctcggccgcgaccacgctaaggg

SEQ ID NO: 5140 - DNA, 362 bp, Homo sapiens
  misc_feature 30, 36, 265, 306, 327: n = A,T,C or G
ccctttcgagcggccgcccgggcaggtacntatgtnatatttaacaacccccttttgaagtcctatatttgtttagtagactgaaaatttgaattcactgttaagaggagacatggaactgtggaaagaatattcatttgagtgtttcaggaagtttggattttttttttaccaacatattatttgtaaaaggagggaaatcagctgcctcaggaggttcttaacatataggaatgtaattatcagattcaaagctgaacagtantgcgttgccctgtaacctaagtcttgggcttgttagcaaanaaaaagccagtgtctggggtnttggttccaggaccttccacttaataacaaaatcc

SEQ ID NO: 5141 - DNA, 346 bp, Homo sapiens
  misc_feature 140, 141, 147, 148, 149, 150, 152, 156, 158, 162, 164, 172,174, 176, 184, 189, 200, 204, 207, 208, 211, 215, 217, 218,221, 230, 232, 233, 234, 235, 239, 242, 246, 249, 257, 258,262, 268, 269, 276, 277, 299, 303, 307, 310, 311, 312: n = A,T,C or G
  misc_feature 316, 319, 320, 322, 330: n = A,T,C or G
ccctttcgagcggccgcccgggcaggtacttttttttttttttttttttttttttttttttttttttttttttttttttttttttttttttttttttttttttttttttttttttttttttttttttttttttttttttnngggggnnnngnatantnaaantnccaaaaantngngggggggnaaaanaaaaaaaaatntttngannaangaanannggncccccccgntnnnntttnaanaatnggngggggggnngganaaaaanncataacnncctttaaaaaaaaaaaaaaaangggnattnatnnnaggnaannangccttttnatgaaaaaaaaaaaaa

SEQ ID NO: 5142 - DNA, 526 bp, Homo sapiens
  misc_feature 429, 498: n = A,T,C or G
ccctttcgagcggccgcccgggcaggtacataaagcatgccaactgctgctgggaatcatctgttccaaagaggccaacacttactcgtctgtttttattttgcgtaaagaatgagtagagcataaaacccctcaccatctagtgcctgttttaccccaaatcttctacatccactgttccgaagatttccacactgattctgagcaatttatgtaagcccaggtgttcaaagttccaggttgaaacatttggttaattaacatcatgctgcaaacactcaaaatcacttcagctgccactataacaaaacaaaactcccaaaaacaaaaactgtagggaaatataaacaaatggcagtattctttggaaaacagtatatgattttagtgacaataaaagcagcaagggctttcttgatttaatactgngtttctcaaaaacatttttctaaaggaaattatattgagtttgagtaaaaaacttgaaagttcctcggncgcgaccacgcttaagggccgaatttcc

SEQ ID NO: 5143 - DNA, 354 bp, Homo sapiens
  misc_feature 58, 128, 129, 132, 133, 143, 144, 145, 146, 149, 150, 151,166, 168, 169, 173, 177, 178, 180, 181, 187, 194, 197, 198,201, 202, 205, 217, 218, 220, 221, 222, 239, 242, 244, 248,254, 255, 274, 281, 305, 311, 314, 315, 318, 322, 326: n = A,T,C or G
  misc_feature 328, 332, 335, 336, 351: n = A,T,C or G
cctttcgagcggccgcccgggcaggtacttttttttttttttttttttttttttgggntttttttttttttttttttttttttttttttttttttttttttttttttttttttttttttttttttttnnaannaaaaaaaaannnnttnnnaaaaaaaaaaaaaantnnaacnacanncnncccccnccccccnccnnaannggngaattttaggannannnggggggttccccatgtnggnanagcnggtctnnaacttttgagcctaagggnatctatntgcctcggccttcaaaagagcccnggaatnaannggncatnaaanancccntgnnccttggcaaaaaaanggg

SEQ ID NO: 5144 - DNA, 356 bp, Homo sapiens
  misc_feature 133, 135, 136, 137, 138, 153, 154, 155, 164, 166, 167, 168,172, 173, 176, 193, 196, 197, 198, 199, 200, 204, 206, 207,211, 212, 213, 215, 218, 219, 224, 234, 235, 239, 240, 244,263, 266, 267, 269, 270, 271, 273, 282, 283, 290, 291: n = A,T,C or G
  misc_feature 294, 295, 307, 308, 313, 315, 325, 339, 340, 341, 344, 349: n = A,T,C or G
cccttagcgtggtcgcggccgaggtactttatttttttttttttttttttaaaattttttttttttttttttttttttttttttttttttttttttttttttttttttttttttttttttttttttttttttntnnnnaaaaaaaaaaaaaannnttttttttntnnngggnnccnaaaaaaaaaaaaaaaanccnnnnngaangnnaaannntnttnnttatngggaaaaaanncaanncttntttaataaagagaaagagnggnnannngnttttttccnnccccccnnaannaaaaagagggannaaaancnccccccccanccccgggaggggannntanaaaanttttttt

SEQ ID NO: 5145 - DNA, 335 bp, Homo sapiens
ccctttcgagcggccgcccgggcaggtacatttctcactattgtgaatcttcatgtgttccctatgattcttgatttagcttaaaagaaaacgtaagacatggtttcattagcttgaaccttatctttgtaaagccatgcatttaccttgtttattcctggttatgtttttatctcacagcctattcaaaaagattttgaataattatttcaaaactttttgcaactttaataatcttaaataaccttaaaatatttaggtaaatacggcatcatctgcatggaggatttgattcatgagatctatactgttggaaaacgcttcaaagaggcaaa

SEQ ID NO: 5146 - DNA, 284 bp, Homo sapiens
  misc_feature 1, 9, 47, 71, 92, 104, 146, 164, 172, 190, 192, 206, 210,219, 231, 238, 239, 242, 256, 260, 273: n = A,T,C or G
nccctttcnagcggccgcccgggcaggtacgcggggtttatctctantgtcacaaacagctgtgcttgttngagtgagacaaccaccatcangaaaagactcanggctggcagctgtaactaaatttaattttcacctacatttcncagtttatttatggtganaagtgttnctatgcaagcattctttnantgaaccaagaaaantagncatatccangctctgacaaanaacttannctntgggattttgttanaggnaaaattaaataangaatttattcc

SEQ ID NO: 5147 - DNA, 310 bp, Homo sapiens
cccttagcgtggtcgcggccgaggtacatctgaaaggagtgagaagtgttttgagggctctccctgtctcttcctgcacctctctcttgtgatcccagaagctacaacctcagcccagattagcaggctgaggggtcaggaggctgtcactggagctgttgagctcatgaacacgccgaagttgctgcgctccagaaatgtggaagttggaatgaagagccaccactgctgccaccaacatgaagcttgaccaagcaagccaagaaaagatggccaagagcctctgccttccttctgccttctgcaacgc

SEQ ID NO: 5148 - DNA, 396 bp, Homo sapiens
  misc_feature 29, 104, 196, 207, 221, 229, 243, 256, 271, 272, 285, 287,288, 291, 315, 327, 329, 351, 364, 369, 378, 382: n = A,T,C or G
cccttagcgtggtcgcggctcgaggtacncggggaaggccaggcatggtggctcaccgcctgtgatctcaggattttaagaggctgaggcaggcggatcacctnaggtcaggagtgaaactggccaacacggtgaaaccctgtgtctactaaaaatacaaaaattagctgggcatggtggcaggtgcctgtaatcncaactactccncgaggctgaggcangagaattngctttaaaccccgngaggcggatgttncatgtgtagccggannatggcacacattncnncanttttcaagccctgtggcttacaangtagtggaaacntnccgtcctcaaataatcaaaaanttataaacaaatnaaaanttatttatnaaancacgtttattttgg

SEQ ID NO: 5149 - DNA, 310 bp, Homo sapiens
  misc_feature 289: n = A,T,C or G
cccttagcgtggtcgcggccgaggtactatcccagccccccaggttcgcctaatagtcttggctacttccctacagctgctaatcttagcggtgtccctccacagcctggcacggtggtcagaatgcagggcctggcctacaatactggagttaaggaaattcttaacttcttccaaggttaccagtatgcaaccgaggatggacttatacacacaaatgaccaggccaggactctacccaaagaatggggtttgtatttaagggccccagcagttagaacatcctcanaaaagaagtgtttgaaagatg

SEQ ID NO: 5150 - DNA, 449 bp, Homo sapiens
  misc_feature 63, 68, 71, 76, 77, 79, 80, 84, 91, 92, 99, 100, 104, 105,110, 111, 112, 114, 115, 117, 118, 120, 121, 123, 124, 125,126, 132, 133, 134, 146, 152, 155, 156, 160, 169, 174, 176,180, 181, 184, 190, 200, 220, 221, 228, 234, 246, 255: n = A,T,C or G
  misc_feature 263, 264, 275, 279, 292, 294, 301, 307, 308, 316, 329, 330,336, 337, 338, 339, 349, 350, 356, 357, 363, 369, 370, 376,378, 380, 386, 392, 393, 395, 396, 397, 401, 404, 405, 407,414, 421, 423, 424, 426, 428, 429, 437, 438: n = A,T,C or G
acttttttttttttttttttttttttttttttttttttttttttttttttttttttttaaagnccccnaanggggnnanncccnttttttnnggggaanntttnnccccnnntnntnntnnannnngggggnnnaaaaaaaaaaantttttntgnntttnaaaaaaaanttttnangggnnggnaaaaanctcccctttncaaaaaaaaaaaaaaggggnncccaaantttttncccccccccccnttaaaaaangggggggnnccccttttttnaaanggggggggggggntnaaaaaangggggnncccggggntttttaaaaaaanntttttnnnncccccctttnnaaaaanntttttnaaaaanngggggncncncccccngggggnnannnttcnccnntnggggggnttttttntnntntnnaccatttnnaaaaaaaaggg

SEQ ID NO: 5151 - DNA, 417 bp, Homo sapiens
cccttagcggccgcccgggcaggtacgcgggtgatattttaatctcacatccagaatggctaaaatggaaaacccagaaaatgctagatgttggtcaagagttggagtaactgaaactacacagctgctggaaatgtatattggtataaccactttggaaaatgggaagttcaacaaacaggcaaaccaatctagatttagggatatatgtttaggtagtaaaagtataaagaaaggaaatagttagctttgcagggagtagtgcttgggaggtaataggtgcttctggagtgctgttgatgttctgttcctaagtagggtgctatggcttgagtttggtttgtctgaccctaccaagtctcatgttaaaatttcatccccagtgttggaggtgaggcctggtgggaagggttgtgg

SEQ ID NO: 5152 - DNA, 252 bp, Homo sapiens
ccctttcgagcggccgcccgggcaggtacgcgggattgctttgtgttcagtccttttggaacacgtagcttccagcttaagggtagagaaatatatacctaaaatcatcaatacatgaaagaaaaaggatggaaactatgtcctcagttttacttctaccaaaacatccctgtatgtgtgtgcatgtatgttggcgtgtgtgtgtgtgcatgcatattaagtaaatgtgtgtttgcatgtgtgtgttgggga

SEQ ID NO: 5153 - DNA, 272 bp, Homo sapiens
  misc_feature 51, 52, 53, 94, 95, 97, 98, 100, 125, 126, 129, 138, 139,159, 161, 162, 164, 165, 166, 168, 178, 180, 186, 187, 196,198, 211, 217, 221, 222, 223, 226, 227, 231, 235, 243, 244,247, 248, 249, 251, 254, 256, 258, 259, 260, 261, 265: n = A,T,C or G
  misc_feature 267: n = A,T,C or G
cccttagcgtggtcgcggccgaggtactttttttttttttttttttttttnnnttttttttttttttttttttttttttttttttttttttttnngnntncttttttttttttttttaaaaaaannacnttttttttnnaaaaaaaaaaaaaaaaaggngnngnnngnaaaaagggantnaccctnnccccccccncnagggggggggggntttttncccnnncanngggngggnaaaaaaannccnnncnccncntnnnncccncnaaaaa

SEQ ID NO: 5154 - DNA, 411 bp, Homo sapiens
ccctttcgagcggccgcccgggcaggtactaggtcttccttaagcagcaagaaaatgtggggggttttacagaagaaaacaggcaatctgggctatagcagaagagcactaatcaacttaagtccaccttccatggtggttcagaaaccagactaccttaacgattttacccacgaaatcccaaatatccagactggctcctatgaaagtatggcaaaaaccacaccaactggaggccttccaagggacccccaagaactcatggttgataaccctttgaatcagctctcgactctagcagggcagttgtccagtctgccacccgaaaaccaaaaccctgcatcccctgatgtagttccctgccctgatgaaaagcctttcatgattcagcagccctctacccaagcagta

SEQ ID NO: 5155 - DNA, 462 bp, Homo sapiens
cccttagcggccgcccgggcaggtacgcggggggattcccttctgtcgcgcggccttatagttccggctgtggcgcgcggacggaaagtttatgccgacggaaagtttatgccgacggactgtgtccggcgatgggcacgggcatttcttcgtttatagctgtctgtttgcattctgattgggaacactgggatcattttcatcatgccgacagtggtggtaatggatgtatccctttccatgacccgacctgtgtctattgaggggtccgaggaataccagcgtaagcacctagtagcccatggtttaacgatgctgtttgagcacatggccacaaattacaagcttgaatttacagcacttgtggtttttttcatcactttgggagttgatggtccccttcacgagagattataataccctacaggaagcactaagtaatatggatgattatgacaaaac

SEQ ID NO: 5156 - DNA, 528 bp, Homo sapiens
  misc_feature 207, 308, 333, 359, 421, 432, 462, 467, 486: n = A,T,C or G
cccttaacgtggtccgcggcccaggtacttttttttttttttttttttttttaactgaaagagttgacaattttattttcacatttccaatacaaaggaaaactgcatcttttttgcccacttctcccctccaaaactattctctttcatgggacaggggaacaagtcttccttatgctgtttaaaaaactcaagtatcacaagcancatgatctcctggtgaagcagaacaggtaatataaaacccgatacaataaggcctccctctatccttatctgtctggtcgagtcattcccggcccagtggncaccatcatgggaccgggcaaggangtctcattaattgggggcccaagcantaattggcatatggccctccatgggccggccttattccaaggaaccaggtcccactggcatnattccaagganggaggagggcccatcaatttggccatcatngggangggcccccatattgggggngctggcattaaaaccaagggccaaggaaggacccccgaaagg

SEQ ID NO: 5157 - DNA, 346 bp, Homo sapiens
ccctttcgagcggccgcccgggcaggtacttaaaaatgttgctcagcatatttaacattattattgttcatatttcctaatggggaacagcgtttttctcttacattccagtattgtttctgcctctattaataaggtttctgataatatatatcagtggagatatttctttggacttatatctttcagcttttctttagataatggctcttaaatgttggtctgcaggcaggtgataggcaatgatatgaaaatcatatgggggacttattaagaatatagatcagcagggcccatctctccatatgctgattgagtagtacctcggccgcgaccacgctaaggg

SEQ ID NO: 5158 - DNA, 436 bp, Homo sapiens
  misc_feature 37, 67, 68, 178, 189, 297, 356, 364, 384, 386, 392, 394,395, 398, 402, 405, 422: n = A,T,C or G
gcggccgaggtacttcaaacacgacttagcaagatcnggggacagcagacagatggtatgaaacttnnatttggagaagaaaaccttccaaaagaggaaacagagtttttatcaatccattctcagatgaccaatttggaagacattgatgtcaatcataaaagcaagttatcttctntgcaagatctngaaaaaactaaacagcttgaagaacaagaccacttattagaagattatcagaaaaagaaagaagactccacaatgcaaattagtttcttgcaagagaaaattaaagtntatgaaatggaacaagataaaaaagtagaaaactcaaataaagaagaaatacaggaaanggagacantcattgaagaattatttaananggacgnannaanaaangtnccttgcccgggcggccngttcgaaagggcga

SEQ ID NO: 5159 - DNA, 411 bp, Homo sapiens
cccttagcgtggtcgcggccgaggtacaatcatagctcactgtaacctccaactcctgggctcaagtgatccctctgcttcagcctcccatgtagctgggactataggcacatgccaccatgctcgactaatttaaaaaaaaaattatagagacgggggtcctactacattgtccaagccggtctcgaactcctggcctcaagtgatctctcacctcggtctcccaaagtgctgagattacagacatgagccaccatatccagccccttgccttgaatttttaaaaaattttagagacatattctacatataagttgcatttttgacattttcactgatatcatcccaaggcattaagtatttttgacaatgtgacttaatggttatatgacatttcattaatttatttaa

SEQ ID NO: 5160 - DNA, 635 bp, Homo sapiens
  misc_feature 398, 423, 446, 492, 493, 495, 501, 511, 514, 520, 533, 585,609, 615, 621, 624, 633: n = A,T,C or G
cccttagcggccgcccgggcaggtacttttttttttttttttttttttttgagacattgtctggttctgtcacctaggctggagtgcagtggcatgatcttggctcactgcaacctccacctcctgggctcaagccatcttcccacctcagcctcccaagtagctgggactataggtgcacactgccagggctggctaatttttgtatttttagtggagatggggtttcaccatgttgtccaggctggtcttgaactcctgagctcacgtgattcgcccaccttggcctccaaagtgctgggattacaggcgtgagcccctgggcccagccagggatattaaatcttgaccttcaaaaaaattataaaccactgtcttaaaggaaatgtctgccactnatgtgaactgaccccaaaaattganggtttatggctttggttgggtcnaaaagtccaaaggacaaagcctaagtctggtttcaataatgaacgnntnaggaanaaaacccggncanttaaanaaaactttttaanttttgggccttggaatttaaattaaaaaaattttttttccttggaaaaaaancaaaaggtccctttctttttttcnaaaaancttttnatngggttaaangg

SEQ ID NO: 5161 - DNA, 421 bp, Homo sapiens
cccttagcgtggtcgcggccgaggtaccaaaaccagacaaagacgcaacaaaaaaagaaaactacaggccagtatctttgaacagagatgcaaaatccttaaaccaaattcaactacatatttaaaagatcattcattgtaatcaagtgggattcatcccagggatgcaaggatggttcaacatactctgatatggtttgtgtttgtgtccctgcccaaatcttacatttaattgtaatccccagtgttggaggaggggcctggtggaacgtgattggatcataggagtggagttctcatgaatggtttagccccatctccccttgctactatatagttagtgagttctcatgagatctgattgtttaaacctccctgctctctgtctctctcctactctggccatgtgtgttcccctgtt

SEQ ID NO: 5162 - DNA, 518 bp, Homo sapiens
  misc_feature 206, 234, 325, 339, 361, 385, 398, 418, 428, 430, 433, 446,455, 458, 461, 464, 466, 484, 492, 493: n = A,T,C or G
cccttagcgtggtcgcggccgaggtacatttcctgctcctgtttccttaaccaccatcctcagggcatctccggcaccttggggtcgggtaagtgctctctactgccctcgttttagctgcctttatctcgtctatatggcactttctgcgtgaaaagacatttgccttacagggatgaaactggacttgcaagagtttgctgtanaaggtgttcaagtcaggaagatgctcanaaatgacctcctctcccaaccacttcaacgattctttctttgggtttggggttcttgcagttctatcatctaaaataacctttggactgcnggtaaaatgcaatnaggacaactaaccaagtagacnaaacaagttcccctaggcaggggngtccaatatttancttccctggaccgcattggnaaaaattttntnggncccttgtaaaacnccctacccntanccntgntngggggacctttaaaaaantaaatttnnaatttggcaaaaaaaaaaaaaaaaa

SEQ ID NO: 5163 - DNA, 556 bp, Homo sapiens
  misc_feature 396: n = A,T,C or G
ccctttgagcggccgcccgggcaggtacgcgggaagtaagattcttaggagcttttcttatcacacaagatgcctgaatcgaatgtgagaattgaaggcatttcttctgcataaacaaagaattctacctgctggacagaaacctggaaagttctttggaattcgctgaattacagtttagtatgtcctgattacagagtgacaatatttatcaagcctttgttatattggattatcttctctcttaaaatacaactgtattataattgaaatgacagcccaaaattggatggtttaccaaaaccaatgaaaggggatttcacacatcaatttttatttctgttttgaagagcacatgctatataataattgctagtagcaactgcagtaaaacangtggataagttattttctctgaaaagatccagtcctagagcaggattcttcgatcattcatggcagaagtgaaaaaaggttggtatgggttcttggccaaaataactcagttcttaaaaattcttaaaaaatgatccgtaaacccatttatccttttaaa

SEQ ID NO: 5164 - DNA, 653 bp, Homo sapiens
  misc_feature 319, 407, 423, 460, 467, 470, 471, 497, 501, 549, 555, 585,609, 613, 625, 630, 637, 649: n = A,T,C or G
ccctttcgagcggccgcccgggcaggtactcacagttaattaagtatatgctattctttgatgccatttcatttaagcatttgcttaaaatgaagaaggtagtgattgtgaaattgagcttgtttttaagaaataatttgacaatgtataagatccgaggagattgtgtctacttactaagtttcttctgtcctaaaaatcagatgacattttaaatggttaagtcaaccacaaatgtctcacgagataaaaatttttatgtcattttctgtaaaataggacaaactaatttctattgtgattaatttaaacatagctntaatatttatactaagttttatatacattagtatattgtaatcacattaacttatctctgtatatcatgaaagagattttgtccctcngcccgcgaccacgctnagggcgaattccagcacactgggcggcccgttactantgggatnccnnagctcggtaccaagcttggccgtaancaanggtcataagctgtttcctgtgtgaaaattggtaattcgctcacaattncacacnacattacgagcctggaagcataaaagtgtnaaagccctccgctgctctaatggncggncctttattttanattanccccctnccctctcccccncccc

SEQ ID NO: 5165 - DNA, 491 bp, Homo sapiens
  misc_feature 467: n = A,T,C or G
ccctttcgagcggccgcccgggcaggtacagcttcaggacagccaggttggcttccagatcataggcattttccttggcctgcgtctctacatagcgctccagggtggccaggttctcaggattgtacgcgggttatcagaaaaaaatttccagctcaaccaagataaaatgaatttttccacactgagaaacattcagggtctatttgctccgctaaaattacagatggaattcaaggcagtgcagcaggttcagcgtcttccatttctttcaagctcaaatctttcactggatgttttgaggggtaatgatgagactattggatttgaggatattcttaatgatccatcacaaagcgaagtcatgggagagccacacttgatggtggaatataaacttggtttactgtaatagtgtgctgttcatggaaaccgagggctgcatcttgtttatagtcatctttgtncctcggccgggaccaccgctaagg

SEQ ID NO: 5166 - DNA, 401 bp, Homo sapiens
ccctttcgagcggccgcccgggcaggtacgcgggcttatctgtgttttcggctaacaagcggtggacgcctcctcgaagcatccgcttcactgcagaagaaggggacttggggttcaccttgagagggaacgcccccgttcaggttcacttcctggatccttactgctctgcctcggtggcaggagcccgggaaggagattatattgtctccattcagcttgtggattgtaagtggctgacgctgagtgaggttatgaagctgctgaagagctttggcgaggaccgagatcgagatgaaagtcgtgagcctcctggactccacatcatccatgcataataagagtgccacatactccgtgggaatgcagaaaacgtacctcggccgcgaccaccgctaagg

SEQ ID NO: 5167 - DNA, 372 bp, Homo sapiens
  misc_feature 32, 58, 81, 91, 124, 163, 165, 167, 171, 179, 193, 198, 209,211, 214, 217, 221, 223, 224, 225, 238, 245, 246, 258, 273,274, 287, 289, 295, 300, 310, 318, 330, 333, 334, 338, 339,351, 353, 355, 356, 358: n = A,T,C or G
ccctttgagcggccgcccgggcaggtactttnttttttttttttttttttttaatttnttttttttttttttttttttttnggggtttttnttttttttttttttttttttttttttttttttnttttttttttttttttattttgactggggggaaaaaaancnancccntttttttntaaaaaaaaaaacnttttntttttaaaaananaanagngggngnnntaaaaaaaaaaanttttttnngggggggggggnggggcacccccttannaccccaatttttngngggggnggganaaaaaaaaanttttttgnggtttggaatcnccnncaanngggaaaaaaaantnannantttttttaaaaaaa

SEQ ID NO: 5168 - DNA, 519 bp, Homo sapiens
  misc_feature 32, 40, 46, 55, 58, 61, 64, 66, 67, 68, 72, 73, 83, 84, 85,86, 87, 92, 94, 95, 105, 110, 112, 114, 115, 117, 119, 123,124, 138, 145, 147, 149, 152, 159, 161, 165, 170, 172, 174,177, 195, 197, 199, 203, 205, 207, 208, 214, 218, 221: n = A,T,C or G
  misc_feature 230, 232, 239, 241, 248, 493: n = A,T,C or G
ccctttcgagcggccgcccgggcaggtacacngtgagagnctttcncctctgaanganctnacntnnncgtnntactacctgnnnnntgaancnngcttaactcntcatntngnngncngtgnnatatatagggtgancgtaccntngncgnggaccantntctnggctnantnccngctacactggaaggacantncnttcngnanncaagcngganaanaatgatggngnccttaancnacctacnagttttcatgtataacccggtaatcccgtttgttggcaccattcctgatcagctggatcctggaactttgattgtgatacgtgggcatgttcctagtgacgcagacagattccaggtggatctgcagaatggcagcagcatgaaacctcgagccgatgtggcctttcatttcaatcctcgtttcaaaagggccggctgcattggttgcaatactttgataaatgaaaaaggggacgggaagaganaccttgacacgcctttcaaaagaaaa

SEQ ID NO: 5169 - DNA, 421 bp, Homo sapiens
  misc_feature 100, 101, 129, 130, 138, 139, 140, 147, 149, 150, 151, 158,162, 179, 180, 202, 217, 219, 231, 232, 235, 242, 246, 247,260, 266, 275, 276, 283, 285, 292, 293, 296, 297, 298, 299,303, 304, 313, 315, 326, 335, 340, 342, 362, 375, 376: n = A,T,C or G
  misc_feature 377, 385, 386, 389, 396, 397, 412: n = A,T,C or G
ccctttcgagcggccgcccgggcaggtacttttttttttttttttttttttttttttttttctttttttttttttttttttttttttttttttttatttnnattttttttttttttttttttttttttnnaaaaaaannngtttttnannnaaaaaangggnaaaaaaaaaaaaaaaannttttttttttttttaaaaaaanttaaaaaaaaaaatncnaaaatttttttnnccntttttangggnnggtttttaaaaantttttngaaaaaaannttttttncnaaaaaannaannnnaaanntttttaaanantttttaaaaanttaaaaaantttcngnttttaaaaaaaaattaaaantttcccaaaaatnnnaaaaaaannggnatttttnncaaaggggttccccnaaaaaaaat

SEQ ID NO: 5170 - DNA, 500 bp, Homo sapiens
ccctttgagcggccgcccgggcaggtaccagatgggagggattccttgcacgtaatcttgagcatccacctgcttcagcaggttcaacaccaggtgcaaagccatccaggtgtgcccaacagcaattagcttggtattattcagtaaaactttcagttaagatttcaattgacagtttggggaagggatgtgctggctattagttaaatgactttagaggggggttcatttgtctctgtctcacccaatcctgaaactgcagtgtaaccaagaaaaagccaaagagaagcacttccctttctatcctcgtcactagtaactggaggtttttccaaaattaaaaatctgtgtctacatcatggtccatattttagaccctgtcatggaaataagtgctcaggtaaactaatatttttctttcacccccagaactagagctttcctagctgtaagccttataaaccaagatgcaggtacctcggccgcgaccacgctaaggg

SEQ ID NO: 5171 - DNA, 490 bp, Homo sapiens
  misc_feature 200, 206, 208, 212, 213, 214, 215, 216, 217, 222, 223, 225,226, 229, 237, 240, 241, 243, 246, 256, 257, 258, 259, 260,262, 263, 268, 283, 286, 287, 290, 292, 293, 295, 298, 313,315, 316, 320, 321, 322, 323, 327, 337, 340, 350, 353: n = A,T,C or G
  misc_feature 355, 362, 363, 364, 365, 373, 374, 376, 379, 380, 382, 383,385, 390, 399, 402, 406, 410, 413, 415, 418, 419, 422, 423,424, 426, 435, 442, 445, 446, 452, 457, 466, 472, 473: n = A,T,C or G
ccctttcgagcggccgcccgggcaggtacgcgggcggggcgtggtggcacgcacctgtaatcccagctactcaggaggctgaggcaggagaatcgcttgaatccgggaggcagaggttgcagtgagccaagatcgtgccactgcattccagcttgggtgacagagcaagactctgtctcaaaaaaaaaaaaaaaaagggngggggncngggnnnnnnccttnnannccnaccttttnggnngnccngggcgggggnnnnncnnggggnaaaatttaaaaattnccnnccnanntnggnaaaccccattttttntnnaaannnnaaantttccccggnttngggggggggnccntnaaacccnnnntcttgggnngnttnngnnanaaaanttttttaanccngggnaccnaangnttnnagnnncntaaaatccntttttgnccnncccccnggggnaaaaaaacnaaactnnttttcaaaaaaaaaaaa

SEQ ID NO: 5172 - DNA, 470 bp, Homo sapiens
  misc_feature 4, 31, 32, 41, 42, 54, 57, 62, 69, 96, 99, 106, 110, 111,112, 121, 123, 129, 142, 146, 147, 148, 149, 158, 159, 162,171, 175, 180, 193, 199, 204, 207, 217, 218, 222, 247, 251,267, 268, 269, 274, 275, 276, 277, 299, 301, 314, 326: n = A,T,C or G
  misc_feature 330, 355, 358, 367, 372, 394, 419: n = A,T,C or G
ttcncccaattccccttccacgccccttganntatcttctnntggggaagaagnggnctccnccaaaanacaaaaatatttttttttttttatatngcntcccgtncctnnnggccctccncnccactncgcccacaccttncatnnnnacataatcnnctntccatctcngacngaganacccatatatctnatttgncaatnaangactcctaannatanccctcttagattaactaactgcgtnaganggagtcttaaaaggannncctcnnnnaaataaattcaagggtaacaantnattaatcctaagnatctttaatatncttngatctgggtaaacaattttcataanatnaatttcgtngaatntttgagtttaaaaataatgtcnctgctctaaatttcacccatggtgntaaaaataaaaaaggcacatccataggtattttaagtccatataaaaaccc

SEQ ID NO: 5173 - DNA, 448 bp, Homo sapiens
  misc_feature 121: n = A,T,C or G
ccctttcgagcggccgcccgggcaggtacgcgggtggcctctggcctgtcacttcccccagtgtcttgtgttccgtgatgtggcccctcaggctcctgtgcacttcctggtcattcctaanaagcccattcctcggattagccaggctgaagaagaagaccagcaggtgggaagaacagggccagggtttggctgggaggagcccctggacccagctagaggtcttgctccctatgaatgaagccacctatgtccctccgctctctctatagcttctaggacacctactccttgtggccaagcagacagcaaaggctgggggcctgggagatggataccgacttggtgagcgacttttggcccttggtccctcacctatgaattctcattcctacttctcaatatgatcttcattcttcgacctctgccatgatcctgactccctaac

SEQ ID NO: 5174 - DNA, 407 bp, Homo sapiens
  misc_feature 393, 405: n = A,T,C or G
cccttagcgtggtcgcggccgaggtacaaatagggtcacctactctcaaattctgcggttcaaattgtggttggagatgagatgttctatttctgcatctctcctggaccatcttagagcagtgcaaagtttactggatcttccagtgcattattggcccttggtgtgatgacgagagagcaggaaggaggtctccagctccttttctgagttcagatgttccctagcccaagaagactaatcatgcacctggtttcctgctctgaaaaataagaagtgattttggcagcctttgaatctggatggaaggtggttttttttttttttcagtaacaaaggtagttgtgtatgtatgtacctgcccgggcggccgctcgaaagggcgaattccancacactggcggncg

SEQ ID NO: 5175 - DNA, 517 bp, Homo sapiens
  misc_feature 60, 64, 65, 66, 67, 68, 71, 72, 73, 74, 76, 78, 79, 80, 81,83, 84, 91, 93, 101, 103, 104, 114, 117, 118, 119, 120,124, 125, 126, 127, 128, 129, 132, 133, 137, 138, 147, 148,149, 150, 152, 153, 154, 157, 158, 166, 172, 175, 178: n = A,T,C or G
  misc_feature 180, 181, 182, 185, 186, 187, 188, 189, 192, 197, 205, 206,207, 221, 228, 229, 236, 237, 238, 240, 242, 243, 248, 253,258, 259, 260, 266, 267, 283, 284, 293, 294, 309, 312, 322,323, 325, 326, 329, 330, 336, 337, 338, 339, 340, 341: n = A,T,C or G
  misc_feature 343, 349, 372, 394, 396, 409, 417, 418, 431, 435, 436, 443,444, 445, 446, 460, 480, 481, 484, 505, 506, 507: n = A,T,C or G
cccttagcgtggtcgcggccgaggtacttttttttttttttttttttttttttttttttnaaannnnnagnnnntntnnnngnnaaaaaananaaaaaaantnngggggggggnaannnntttnnnnnnccnnaaannaaaaaaaannnntnnnttnntttttttnccaaanccnttntnnnttnnnnnccnggggnttttcccnnntttttttaaaaaanttttttnnaaaaaannngngnnttttnagggnaaaannnaaaaannttttttttaaaaaaannttttttttnnttttccaaaaaaaanggnccctaaaaanntnnccnnaaaaannnnnntngggggnttttcccccccaaaaaaaaacantttttaaaaaaaaaaaaaaaantncaaccttgggggnaaaagggnnaaaaaaaaaaaanaaannaaaaaannnncccccttttttttncccccccccaaaaaaaaaannaanttttttttttttaaaaaaaannnttttttaaaa

SEQ ID NO: 5176 - DNA, 605 bp, Homo sapiens
  misc_feature 530, 543: n = A,T,C or G
ccctttcgagcggccgcccgggcaggtaccaagttctagctgaagctggaggagaactgggagaagcttcgcctcctctgaaccacattcatggagctccttattgtggagatgggaaggtgtcagagagactgggagaagagtgtgatgatggagaccttgtgagcggagatggctgctccaaggtgtgtgagctggaggaaggtttcaactgtgtaggagagccaagcctttgctacatgtatgagggagatggcatatgtgaaccttttgagggaaaaaccagcattgtagactgtggcatctacactcccaaaggatacttggatcaatgggctacccgggcttactcctctcatgaagacaagaagaagtgtcctgtttccttggtaactggagaacctcattccctaatttgcacatcataccatccagatttacccaaccaccgtcccctaactggctggtttccctgtgttgccagtgaaaatgaaactcaggatgacaggagtgaacagccagaaaggtancctgaagaaagangatgaggttttggctcaaagtgggtttcaatagaccaggagaggcccagagcaatttttatt

SEQ ID NO: 5177 - DNA, 363 bp, Homo sapiens
  misc_feature 290, 298: n = A,T,C or G
cccttgagcggccgcccgggcaggtactcattttccttttgtaattaataagtcctttttgcagagttctttgaaattatgtaaatactttgtcatcaaactatcaattcattaggtaataatctgtatcacaggaaatcatggtttcctattttgtatattaggttataatctgttactatcattatttctttgagaccagtgtgggcccttcaatctggctctgacttctgggtttttaaaagctttttgggtgattctaatgtgcagccatgcttaagaaccacttntctaggtngaccaaagcacctatattcaaaggatattcacaggattgcaggcaacatgcagcagcctcaggga

SEQ ID NO: 5178 - DNA, 343 bp, Homo sapiens
  misc_feature 29, 77, 142, 145, 146, 147, 148, 149, 150, 151, 152, 159,160, 162, 164, 166, 173, 174, 182, 183, 185, 186, 187, 192,197, 198, 205, 208, 209, 210, 215, 216, 220, 224, 225, 231,232, 242, 243, 250, 251, 254, 263, 265, 266, 267, 272: n = A,T,C or G
  misc_feature 287, 299, 301, 302, 318, 321, 330: n = A,T,C or G
cccttagcgtggtcgcggccgaggtacanactttatttccactctggtggataagttcaataaaggtcatatcccanaaaaaaaaaaaaaaaaaaaaaaaaaaaaaaaaaaaaaaaaaaaaaaaaaaaaaaaaaaaaaaaanggnnnnnnnnttttttnntnananaaaaaanncccccccnnannnttttnaaaannggggggngtnnnttttnnaaanaagnncccccnntttttttttnnaaaaaannccnaaaaatttntnnnccccnacccctttttttttnggaaaaaccccnannggggggtttttttttntgnggggggaangccccccccaaaa

SEQ ID NO: 5179 - DNA, 825 bp, Homo sapiens
  misc_feature 19, 35, 525, 565, 572, 609, 619, 627, 639, 660, 675, 683,692, 720, 726, 738, 745, 746, 770, 773, 784, 810: n = A,T,C or G
gtgtgatggatatctgcanaattcgcccttagcgnggtcgcggccgaggtacctagggttacaggtctagaaagtgcagagccatccctacctagaagagaatagatgggaagagaactgaaagaaagaattcctcaagcactgaagtcaggaaaatccccgtaggcactgtattagttgttccatttatcccagcactccacttgtggatgaaggagttgtatagaaaggagatgagaaaatggcaggagtggaagcagccaagaagagatcgatgactgaagatctccttcaccttcaggactgtctcaaggggttatttcacctctactcatgaggatggccagtttttctgtcttttatctttagacccatatataatcagttcagagcacaaatcaaaataaactggcctaaataactgaattctaggaagcaaagctacatcttttttcatatgccaaagcttctgtttcctcatgttggtcctactttttaaataataaatggctctcaacatcttangaactagatgggtcccatctgggtaggaacctgctataanttttaanaatcactcttgtaattcttaccctcaccttaaaaatnttaggaaacnccagtaanttgaaaaagacnggggagaacctcgtcttgcanggttttgggcagtgnaaatttgnctttccagngaattgcttttttttttaaattggcctnaaatcnaaaaagcttttncattggnnggagaccttcttttcaaatgaacncgngttggaattcnacccctctaaatttttttgcattttncctgtttttggggaa

SEQ ID NO: 5180 - DNA, 482 bp, Homo sapiens
cccttagcgtggtcgcggccgaggtacagagtttttattgagggtcagctgtgtggacttggctaacggcctgcatgactaaccttaacctctaaccccttcagatgttgaactgatgctttgtggcccaaggtcctcactacaaataacatcattagcatacaatatctagtgtggtccgagatctgcaggtaaacgtagacattcttattagtcaggaaattccaagggtagaggatatttcctgggagatagggtgaagggccagggtaggggatatttcctgggagatcgggtgaagggccatacttttctttgagcaagaatcatcctttatagcataggcctgatatgaaacagctaattagaaacacagctgagatttgaacccaggcattcagacctcaggtgcttaaccttatgtaacagcccatttgccctccaccaccaacagtgtctcctcctatgctcatttgacagta

SEQ ID NO: 5181 - DNA, 614 bp, Homo sapiens
  misc_feature 30, 31, 158, 351, 369, 413, 421, 461, 472, 473, 475, 484,490, 521, 566, 568, 595, 597, 610: n = A,T,C or G
cccttagcgtggtcgcggccgaggtacttnnttttttttttttttttttttttaatttctcgagacagggtctctgtcacccaagctggagtgcagtgacacaatcaaggctcactgtagcctcaagcttcagggctccagggatcctcccatctcantctccttgggagctgggagtaggcatgtgccaccatgcctggctaattttttaatttttttgtaaagatggggtcttgtcatgttgcccatgtcggtctcaaactcctgggctcaagcgatactcccaccttggcttcccagtattgggattacaggtgtgagccaccatgtctggcttgcttctctttttgnattctaaaattcaaaggnctaagtattcaaatccctaaatcttcaaatactggcacaagatnaagactcnataataaactcctccgaaagtttaaacaggctcaaggganggactttgttnnanggggttttnaaaaanaaacaccagttgctttgcaaaaaaaaaaaanttttaaattttttaaagggtccatttaaagggaaaaaggtggacnanaatttggaaacccaaaagggatttttnangtttttggaaaanaaaa

SEQ ID NO: 5182 - DNA, 522 bp, Homo sapiens
  misc_feature 382, 383, 384, 385, 386, 387, 388, 389, 390, 391, 392, 393,394, 395, 396, 397, 398, 399, 400, 401, 402, 403, 404, 405,406, 407, 408, 409, 410, 411, 412, 413, 414, 415, 416, 417,418, 419, 420, 421, 422, 423, 424, 425, 426, 427, 428: n = A,T,C or G
  misc_feature 429, 430, 431, 432, 433, 434, 435, 436, 437, 438, 439, 440,441, 442, 443, 444, 445, 446, 447, 448, 449, 450, 451, 452,453, 454, 455, 456, 457, 458, 459, 460, 461, 462, 463, 464,465, 466, 467, 468, 469, 470, 471, 472, 473, 474, 475: n = A,T,C or G
  misc_feature 476, 477, 504: n = A,T,C or G
cccttagcgtggtcgcggccgaggtacacgaagctttatttttggaatttacaagttagattttatagattcttgttcagaaatagctgaacaagaataaaactatgttactgaagtcctttaaatgccattttctgaggtgaacgttctcaaatatggataaacaaaattacatatccagacaaaaatccctatttttttgcacagagtggaaggaggcctgttaaactaacccacttaataatgtatttagttttaatagggatagatttttaaattttaaggtttaaaatatttctacatatgaattccaaaatgaatttttggtaagtagtggctctaattcctggaaatgtacctgcccgggcggccgctcaagggnnnnnnnnnnnnnnnnnnnnnnnnnnnnnnnnnnnnnnnnnnnnnnnnnnnnnnnnnnnnnnnnnnnnnnnnnnnnnnnnnnnnnnnnnnnnnnnnatccgtcacaattccaacaactacganccggaagcataaagtgta

SEQ ID NO: 5183 - DNA, 384 bp, Homo sapiens
  misc_feature 211, 327: n = A,T,C or G
ccctttcgagcggccgcccgggcaggtacaaatatattgtgtccttaactccaacttctttggaaacaaacaaacaataacaacaacaacgaaacaccagaggcaaagatatagggcagatccctagcacaatgcaagtttttagaagcttttcttattctactttaaaactcaatgtaaaaatcatccctttaccaaaacaaaacaacantacagataagagctaaattacaatttagggattaggagataagaagagaagcaggttctctaaatctgctttagaattctctttcaaatctgtcatagtcttgaagcaagaataangaaaacagaataatttccctttccccactttagacaaagtaaatttataaaaaactt

SEQ ID NO: 5184 - DNA, 431 bp, Homo sapiens
cccttagcgtggtcgcggccgaggtactatcaataatcacctctgactttcagatttaaattcagtgcaattgacaaatgcatcactaaaggaaaatgcagcttaaaagatactcaaaacatttgtgtctattcccgggagcacattttaaaattattgcacagatttttttaatttttatttattttttttaaacaataacagaggtcaaccacagatgtggacctccagcaataaaagcaggaattcaagtgccagatactcagcatattaggtttcctacgtaagtcacagggtaatatgttctaaatatctctaatgtgatccaaaaccctaaaaagagctggcacaaaaccatcgtgaatgactgcctctcttgatgtaaatttttaaaaatattattacagtatcatagtccccactaacaacaa

SEQ ID NO: 5185 - DNA, 476 bp, Homo sapiens
  misc_feature 13: n = A,T,C or G
cccttagcgtggncgcggccgaggtactctgacaaatgctcttcagacctctcaccatcagacaccaggggaaggagacccttaaaccggagaattataattcaacagaaactgtcatttccccagacatcatgggagtattacatgcaaaaaccagccctgcggtgagtgggcttaaactcaaacttaattcttcaatacaggactctttactgatttgttctaagttttcagtgatgaacccaaataagattgagcttcaagagacagggttctgagaatctttggagtcattctgtccactattcctaagagaatcaatgtagataacagtcccaaaacctcaacagattgtttaaaagtgaacagatgttatctaaaatatcagaatcaaaattatgtgtaaaacatatccgggtgtattgtgtatgcacctatacatgtttatatatgtatattcttttttctctgctcaa

SEQ ID NO: 5186 - DNA, 684 bp, Homo sapiens
  misc_feature 430, 486, 583, 586, 593, 651: n = A,T,C or G
ccctttcgagcggccgcccgggcaggtaccaagcataagcattgtaacaaaagtgcaacttttcagcaaatcctccccaaaagatattttaactcaaaatatcattagcacatattttctccctacaaaaatagcatgtcagacatcattaattggatgtattaacaactatgtgcataagagccaccttgtaggctaagagtttaacgttgtttaaacacagcgtttgaggcaaacagtagcaacagcagcagcaaatgcaccaaactgacgaaaagacccagatattttcctcactcatagtcagactgttgtgtctcaccccttacataacatccaagtgagatttctcacagtgctaccttggcaacaaactaaaaatattagacaaggtcttggtttaagccttattaaaaaaagctttctttgngattattctggtatctggtttggtctccagaaaatcatagacttggagatagggangcctcacagggacttcattctattatctttacagcatttggcaatcaaaactggccagttaaatgctttcgttcactttttgaatttttacagaatnttnggatttntcagtttggacctggttttttggtgtggtggtttttggttttggtttggaaagttcantgcactttttttttacagtaagaattacaaaaa

SEQ ID NO: 5187 - DNA, 551 bp, Homo sapiens
  misc_feature 54, 60, 67, 73, 129, 165, 222, 231, 232, 235, 242, 269, 277,341, 349, 357, 399, 403, 449, 452, 463, 467, 474, 482, 495,506, 514, 515, 517, 518, 519, 530: n = A,T,C or G
cccttagcgtggtcgcggccgaggtacgcgggagcgtgtatcaggaaacacttnacgaangggcaanagtggnttcaattctaagagtggacagcggggatcttccaagtctggaaagttgacaaggangatgaccttcaggccattaagaaggagctgacccanataaaacaaaaagtgggttctctcctggaaaacctggaaaaaattgaaaaggaacanagcaaacanncanagatganagaatgatgagtcagtaagaggagcanagcagccnctccgtgaaaaaagatgaagactaatgtgaaagatggaactctgaggggggtgcagatgacttntgctgaangagggggnacctactgggatgatgatgataatgaaatatcggggggatgnaccngctgtagttgatcaaaggatggatgaaaaagaggcttgattgaatnganaaggatggacnaganacccgcnccaatggncgaaggattgacntctttaaagcnaccatagnngnnngttttagaaanttctttaattccccatttaat

SEQ ID NO: 5188 - DNA, 541 bp, Homo sapiens
  misc_feature 5, 18, 19, 28, 46, 462, 474, 483, 521: n = A,T,C or G
gcganttgggccctctanngctgctcgncggccgccatgtgatggntatctgcagattcgccctttcgacggccgcccgggcaggtacgaggaaatgagcttgacaaagtggtcactgagggcaatggcagccccagcatcgaaagtggaagagtgagtgtcactgttaaagtcagaggaaacaacctggtgttcagtgtagcccaagatgcccttgaggggccctctgacgcctgcttcaccacctttttgatgtcatcatatttggcaggtttctccagatggcaggtcaggtccacaaccaacacgtttgcagaaggacacggaaggccatgctagtgagcttcctgttcagctcggggatggccttgcccacagccttggcaacaccagtagatgcagggatgatgttctggagagccccacagacatatgccacagtttcccacagaggccatcgantcttctgggcangagtggcancatggattggggtcacaagtccttccacaatgcccaanttgtcatggatgggcttggc

SEQ ID NO: 5189 - DNA, 486 bp, Homo sapiens
cccttagcgtggtcgcggccgaggtactccctttggcaatcaagtttccccttttatggaggaaaaagttccccatgtcccatgatcctttacatgcctaattctgtcacccgcagctgtcaccaaaaagtgcaaggcagattaatacaaagagaatagtggtaaacattcctagtggcaaacctgtttttagccaaaagggactttactgacagtggcctctaaccccttacatcttaggaaggactctaaccttcctaagttgggccttgaacccaagttcagtcaagcatccttacttttattaagaggagccttttaacctactctgtcttaggagagactctaactcccctaagtgggcctctaacgcaatcccattctttacccaggtatatgtgccccacttacctaaagtcagccaatcaatgctgcagtctatttcctttgggttgggagtctcctcagtattatctcttcatggtc

SEQ ID NO: 5190 - DNA, 608 bp, Homo sapiens
  misc_feature 157, 161, 162, 163, 164, 165, 166, 167, 182, 204, 220, 221,222, 223, 227, 228, 236, 238, 244, 245, 246, 248, 249, 252,259, 270, 271, 272, 274, 275, 281, 282, 283, 285, 288, 292,293, 294, 295, 308, 309, 321, 322, 329, 330, 331, 337: n = A,T,C or G
  misc_feature 342, 343, 345, 353, 356, 357, 362, 363, 364, 365, 366, 371,384, 387, 388, 392, 393, 394, 399, 416, 418, 421, 432, 438,459, 460, 463, 470, 474, 476, 479, 486, 487, 488, 492, 502,510, 520, 521, 522, 523, 525, 526, 527, 530, 531, 536: n = A,T,C or G
  misc_feature 537, 538, 539, 540, 541, 544, 545, 546, 547, 550, 551, 552,553, 557, 558, 560, 577, 580, 582, 583, 586, 588, 589, 590,591, 592, 593, 594: n = A,T,C or G
cccttcgagcggccgcccgggcaggtactttttttttttttttttttttttttttttttcttttttctttttttttttttttttttttttttttttttttttttttttttttttttttttttttttttttttttttttttttttttttttttttttnaaannnnnnnttttttttttttttnaaaaaaaaaaaaaaaaaaattnggggggaaaaaaaaannnnaaannaaaaaaantngggggnnncnnttnccccccnaaaaaaaaaannnanntttggnnnanttntttnnnnaaaaaaaaaaaanntttttttttttnnaaaaaannngggggnaaaanncntttttttnccnnaaaannnnnccccnaaaaaaaaaaaanggnnaaannnggggnaaaaaaaaaaaaaaaangnggnaaaaacccttncccccnttttttttttttaaaaaaaannttntaaaaanattnanggngggggcnnntttntaaaaaaaangggggggnaaaaaaaaannnncnnntannttttnnnnnnagnnnnccnnnngggnntnaaaaaaaaaattttttnttnannccnannnnnnnaaaaaaaaaaaaaa

SEQ ID NO: 5191 - DNA, 391 bp, Homo sapiens
  misc_feature 327: n = A,T,C or G
cccttagcgtggtcgcggccgaggtactatcgattctttccaccctcacgatgacttgcggttctctctgtagaaaagggatggcctaagaaatacaactaaaaaaacaaacaaaaacaccaaaaaaaaaaaaaaagccatttaaagccagccactagagggagtcagtgcagttccgtaaaggtatgctcagtgcccgctgcctgcaagctgttggggaccccggggagggcaaggcagcctgtccctgcccccagggaactagaacatgacaagaattctccgcactgtgcctacctgtccctttaccttacctctctggcccanagttcttggagggttttttctttattttcttatgtacctgcccgggcggcccgcttcgaaaggg

SEQ ID NO: 5192 - DNA, 238 bp, Homo sapiens
  misc_feature 12, 217: n = A,T,C or G
cccttcggccgnccgggcaggtacattccttatgagggctttcttcctcagtgttctctttagagggctattgctactggactttctgcaatgtctttggtgtgccctcagagcctgcaacaagtgtatttggatatactctatttgtaaagtttaggcctctaagaaggccacaatgaagcaactaaaaatctgatgattaagggagtcaatcaanctgatgccatttttaagttta

SEQ ID NO: 5193 - DNA, 425 bp, Homo sapiens
  misc_feature 30, 33, 57, 58, 147, 182, 203, 213, 224, 281, 332: n = A,T,C or G
cccttagcgtggtcgcggccgaggtacatnttnacataacatactgagaatgcgttnntgtatcagagaatcatttctgagaatcatttctgtagtattcctgcccaagtgcctaacctgaatctaataatgaagaaacttcagacnagtgaaaattgaggagcattctatgatgcagctancctctgctctataaaaagtcntaaaacacanggaaaactaanaaatcttcaaggttaaaggagactaaaaccccatgacatctagatgcatggtaatanattataatatgatgataatagatccttggattaccattatggtaataaganccttggctcagggaaaaaaaattcacaaagggtgttttgggagacagttgacaaaatttgaaaatggattgtatgttacataatattatatta

SEQ ID NO: 5194 - DNA, 597 bp, Homo sapiens
  misc_feature 103, 105, 114, 241, 247, 248, 255, 275, 469, 543, 582, 593: n = A,T,C or G
atatctgcagaattcgcccttagcgtggtcgcggcccgaggtacataataataacaagccctggagttaggaatgaagaggaccagcacccagaatttctacngngttacctgnaatatccaattttcaacaaaaagttgagatatgcaaagaaatggggaagtctaacccatatatcgggggaaaaaagcagacaaccaggcttgcctgtaagagggaacagatgtcagatttaataaangatttnnttgttgnctttataaatatattcatanaaccaaaggaaatcatggttgaagaaataaaggacagtatggtgacaatcacatcaaatagagaatgtatgtagagatagattataaaaaagaaccaaatgaaaaattccactagaggggctcaacagtagatttaaactggtagaagaaagaattagtgaacttgaagattctagatcaatagagattatgcnatccaaagaagagaaaagaatgaattaaaagggaagagagcttcagagaaaccgtggaaccccattaactgctncaaccatccacttaatatcggaagggaaaagaaagaganaaaaagggaanaaaa

SEQ ID NO: 5195 - DNA, 478 bp, Homo sapiens
  misc_feature 51, 54, 57, 60, 63, 64, 65, 68, 72, 87, 88, 89, 90, 94, 102,108, 113, 121, 124, 128, 133, 134, 135, 145, 146, 147, 149,150, 152, 153, 161, 162, 163, 164, 165, 166, 174, 175, 176,177, 187, 188, 195, 235, 236, 237, 238, 246, 251: n = A,T,C or G
  misc_feature 252, 253, 257, 258, 259, 260, 261, 262, 264, 265, 266, 274,275, 278, 290, 300, 308, 318, 319, 321, 322, 328, 329, 330,331, 332, 336, 348, 350, 351, 355, 363, 368, 370, 374, 375,388, 389, 390, 404, 410, 412, 426, 428, 438, 440, 441: n = A,T,C or G
  misc_feature 446, 461, 473: n = A,T,C or G
cccttagcgtggtcgcggccgaggtactttttttttttttttttttttttnggnaanggnttnnnccntttnttttttaaaaaaaannnnaaancccccccnaaaaantttantttaaaanttngggnaaaannntttaaaattnnntnngnntaaaaaannnnnnttaaaaannnnaaaaattttnnaaaaaanggttttaaaaatttttaaaaaaaaaaaaattttttttttnnnnggggcccnccccnnnaaannnnnntnnnaaaaaaannccnttttttaaactnaaattttttnaaaaaaantttaaaaaanntnnaaattnnnnncggnaaaaaaaaaaancnntccntttttaanggggncnaaannaaaattttttttnnnttaaaaaatttttnaaaaancnttttttttttgccntnccggggaaangnnaaaanttacccccctttttnaaaaaaaaaaanttttt

SEQ ID NO: 5196 - DNA, 417 bp, Homo sapiens
  misc_feature 43, 57, 70, 163, 184, 186, 264, 275, 281, 285, 291, 297,314, 320, 322, 332, 336, 339, 358, 360, 368, 370, 377, 380,392, 393, 397, 406, 407, 413: n = A,T,C or G
ctgccaattcgcccttagcgtggtcgcggccgagggactaacnctatgactacagtnttggtgccactgncttcatgcatgctaaggcatcagcagttttcccatcttgcttttgcaccatcaggaccaaatgacaacaaatttgtgccataatgtatttttntgaaaatagttttaaactctngnccacaacaagggtctcaagaaaggaaaatccctgacccacaatggtgggctcactaatccatttgcagaaaaaatggnagctggcttgngctacnaggnatttcntttatnggaaaaattgattttangaattntnctcccaacangganaangaaaactttccctttagtntntgcaggcntnttctgtnaanaaagaaacgggnnttgntttttttannaaaggnaaaa

SEQ ID NO: 5197 - DNA, 250 bp, Homo sapiens
  misc_feature 71, 76, 143, 147, 181, 220, 227: n = A,T,C or G
gatatctgcagaattcgcccttagcgtggtcgcggcccgaggtactttttttttttttttttttttttttnctttnttttttttttttttttaatctctaggctaggagcgcaagctcatgtttattcattcatttggtagcnctanaaactggcaactgtgggctaaatctagcccatanacctaaatttatgtttttcttaaccttcacaatatttanaaatcanagcacttcacataggtctacatt

SEQ ID NO: 5198 - DNA, 331 bp, Homo sapiens
tgcagaattcgcccttgagcggccgcccgggcaggtacttaggcgttcataaaaatacagcagggcaagaggaccaagatggaggcagtgatcagggaatctcaatgagggtgagactgcgacaaagacttgaaaaaggtggagaagcaaaccttgtgggtatttagggtagcagtagtccaggcaaggggaacaactagtgcaaaggctctaggaggcaatgtgtttgaagtgttttaagaacagtaaggaggctagtatggttagaacagaatgagcaaagggggcaaagtggtagaaggtgagatcaaagaggtaatgaggccattgt

SEQ ID NO: 5199 - DNA, 429 bp, Homo sapiens
  misc_feature 311: n = A,T,C or G
cccttagcgtggtcgcggccgaggtactttcttcctcatactgactatagtcatccacctccattcgagactccaagagagaaagaggatcactgcagcacaccccattttcatgaagcccctctgtataagaccccctattttcctcatctcgttttagctggatttttaattttgtagaactactgcctgatcctgagttaaatccattattaagctttgccacatagagattgttatcgttgtcatggtctttgcttaacttgatgcttattttggaagagttcattccatcattctcttggtcattngttttgctgctgctatcatgacgcctacgaagagtcaatttgggaatcccagagttattttctaggattaactgtgcatcataccttgtgattcgcctcttctttttactttttgcag

SEQ ID NO: 5200 - DNA, 371 bp, Homo sapiens
  misc_feature 48, 123, 125, 127, 133, 134, 137, 138, 159, 164, 172, 173,174, 175, 182, 183, 188, 203, 205, 210, 229, 243, 250, 251,252, 253, 255, 257, 258, 260, 264, 268, 284, 285, 286, 287,288, 289, 297, 298, 299, 300, 301, 302, 308, 309, 310: n = A,T,C or G
  misc_feature 318, 319, 320, 321, 322, 323, 326, 327, 345, 347, 351, 352,354, 355: n = A,T,C or G
ccctttcgagcggccgccgggcaggtactttttttttttttttttttnttttctttttttttttttttttttttttttttttttttttttttttttttttttttttttttttttttttttttncncncccccnnaannttttttttttttttttttttnggggncccccccnnnnaaaaaanntttgnttttttttttttttntnaattngggggggggggggggggtntttttttttttttnaaaaaannnngngnngnttgnttgntttttttttttttatnnnnnngggggggnnnnnntttttnnnttaaaaannnnnnagnngggggggggggggggggnanaaannanngggggggggggggggg

SEQ ID NO: 5201 - DNA, 494 bp, Homo sapiens
  misc_feature 7, 182, 183, 184, 225, 286, 288, 289, 295, 300, 302, 304,307, 317, 348, 349, 350, 352, 359, 360, 368, 369, 372, 374,375, 380, 381, 384, 385, 386, 387, 391, 392, 393, 398, 404,406, 413, 415, 416, 417, 426, 434, 436, 442, 448, 454: n = A,T,C or G
  misc_feature 459, 460, 461, 464, 465, 467, 470, 473, 474, 475, 476, 480,482, 483, 492: n = A,T,C or G
cccttancgtggtcgcggccgaggtacgcgggtgcctgactttgggaggctgagatgggtggatcacgaggtcaggagttcaagaccagcctggccaagatggtgaaatcctgtctctactaaaaatacaaaaattatccaggtgtggtggcgggtgcctgtaatcccagatactcgggagnnngaggcagagaattgcttgaacctgggaggcggaggttgcantgagctgagattgcaccaccgcactctagcctgggccagtgagtgagactctgtctcatanannaaaaanaaaanananaantttcttcccngggggcgcctttaaagggggaaattcccccnnncnggggggnngaaaatannggncnncgctnnggnnnnaaannnggggnaaaaantnggacccncnnnttgaaatanaaaaaacntnatggcntgattnaatgcnaattnnnctnncnttnaannnnaatntnnctcttgggntt

SEQ ID NO: 5202 - DNA, 541 bp, Homo sapiens
  misc_feature 213, 315, 374, 389, 408, 432, 434, 463, 473, 474, 489, 494,523: n = A,T,C or G
cccttgagcggccgcccgggcaggtaccagttttaaggttttaattcatttgaatcacttatgaattgatgatatacagcaattacttttcaaaattaattttttattaattcatgatgataaatacatagtattcctcagtatctattccaagatactgaggtcataatcagaagctaagctgggtgcagtggctcatgccagttatcccancactttgggaggccgaggtgggcaaatcatgaggtcaggagattgagaccttcctggctaacatggtgaaaccccatctctactaaaaatataaaaaattanccaggtgtggtggcacgcatctatcagagtcccagctactcaagaggctgaggcagganaatcgcttgaacctnggaggtggaggttgcactnaactgagattgtgccactgccttncncctggggtgacagaatgagactcctcttnaaaataattnnttaatcataataatnaagtnaaaaaattaaaataaaaaaagttaatcanaagcttaaagtaaaagtt

SEQ ID NO: 5203 - DNA, 531 bp, Homo sapiens
  misc_feature 418: n = A,T,C or G
ccctttcgagcggccgcccgggcaggtacagctatggactgatgcatcccatcccatcatctttcatgatcaaagcagtctcttcttttttgacagctgaagaagcatcggtagggaatccagaaggagcgttcatgaaggtgttacaagcccggaagaactacacaagcactgagctgattgttgagccagaggagccctcagacagcagtggcatcaacttgtcaggctttgggagtgagcagcacagctgatttccagaggatggaagaagtcaggaaacttgggaaaccgctgctgaggtccttgcagccccacggtccccaggctggtgactggtgggggagtatggagtccagctgaccaccagagcctgcacacctgctgctatgggggaggaaaggatgacttctacctnctttccacattccaaattccacatgactacattttattggcagcaccccgctggcaagtgagccttgatgtgtgcttcctgggcttctggcaccttttgtgttctggaaaaaa

SEQ ID NO: 5204 - DNA, 484 bp, Homo sapiens
  misc_feature 171, 264, 285, 416, 420, 475: n = A,T,C or G
ccctttcgagcggccgcccgggcaggtacctaaactctaaggaatgctttttctttgaaaacagaaatatttttacttatttctgtccactatgtttgtgtgtatgtgtgtgtttgtgtgtgtatgtgtggttttgatgccagcaatgcaaacaccaatatatctattaanaagtgattgaatttagattggaaaaaataaaatagttacatgtaaagacataaactctttccttcttaaatgtgattttcaactctatgatanaaactccctctaaaaaacaancagggcaagaacaaacttacttgtaatgggtgagagaaaataagcaaatctcattggctcattcctgtttttaggaagttgcagtgggattaatgtcaattggaagggatgcagcaagttttagagaaggngttnggcactaacactgcttgtttggcaaatcatcatcactgaggtattccacccaaanactttttca

SEQ ID NO: 5205 - DNA, 330 bp, Homo sapiens
  misc_feature 95, 96, 111, 114, 118, 119, 120, 123, 131, 132, 135, 138,141, 143, 144, 146, 147, 150, 151, 152, 155, 156, 157, 158,159, 160, 182, 186, 198, 203, 218, 235, 239, 241, 242, 243,244, 245, 252, 253, 256, 265, 266, 267, 269, 272, 274: n = A,T,C or G
  misc_feature 280, 282, 283, 284, 285, 287, 288, 289, 290, 296, 297, 298,304, 305, 306, 310, 311, 316, 317, 318, 319, 320, 321: n = A,T,C or G
ccctttcgagcggccgcccgggcaggtattttttttttttttttttttctttctttttttttttttttttttttttttttttttttttttttttnnttttttttttttttnatncttnnnaanttaaaacnnaanaanggnannanntgnnnatnnnnnnaaaaaaaaaaaaaaagaaaaanaggnttttttttttcnccaanaaaaaaaaaaaaaanattttttttttaaaaangggntnnnnnaaaaaannaanaaaaaaaannncnttntntttaanannnntnnnnggggannntaaaannnaaannatttnnnnnnttttttttt

SEQ ID NO: 5206 - DNA, 486 bp, Homo sapiens
  misc_feature 52, 53, 54, 55, 56, 57, 58, 59, 60, 61, 62, 63, 64, 65, 66,67, 68, 69, 70, 71, 72, 73, 74, 75, 76, 77, 78, 79, 80,81, 82, 83, 84, 85, 86, 87, 88, 89, 90, 91, 92, 93, 94,95, 96, 97, 98, 99, 100, 101, 102, 103, 104, 105, 106, 107: n = A,T,C or G
  misc_feature 108, 109, 110, 111, 112, 113, 114, 115, 116, 117, 118, 119,120, 121, 122, 123, 124, 125, 126, 128, 129, 130, 131, 132,133, 134, 135, 136, 137, 138, 139, 140, 141, 142, 143, 144,145, 146, 147, 148, 149, 150, 151, 152, 153, 154, 155: n = A,T,C or G
  misc_feature 156, 157, 158, 159, 160, 161, 162, 163, 164, 165, 166, 167,168, 169, 170, 171, 172, 173, 174, 175, 176, 177, 178, 179,180, 190, 204, 233, 251, 279, 281, 298, 305, 306, 307, 364,367, 399, 405, 409, 418, 435, 438, 440, 452, 463, 470: n = A,T,C or G
  misc_feature 475: n = A,T,C or G
gatcgacgcgtaagacgtgttttgcgacccggcaccaccgtagtttttacannnnnnnnnnnnnnnnnnnnnnnnnnnnnnnnnnnnnnnnnnnnnnnnnnnnnnnnnnnnnnnnnnnnnnnnnnntnnnnnnnnnnnnnnnnnnnnnnnnnnnnnnnnnnnnnnnnnnnnnnnnnnnnnttggccgttnccgctggaccgagnggcaaccccaacaaccctatcctaaaagnctcctttgacaccttgtnagctaggttgcttgccccaccgcctttngncacccgttcctgaaaanaaaaaannncggccggtctcttaaaaaaggcggccgaaggttccttgggttggaccttttggggcnacnccccaacaccggttggccaaggccttggaatngtggtnaacnccccaaaantccggccccatggccgntancnttgggtaaaaanaaattggtttncttttgnggaanaaaaaaaaaat

SEQ ID NO: 5207 - DNA, 566 bp, Homo sapiens
  misc_feature 533, 550: n = A,T,C or G
cccttcgagcggccgcccgggcaggtacatttaaaaggtgatgctaatactttaaaatgtttaagatatagatttaaaaagcattgtaaattgtatactgcagtgtcgtctacatggcattggacaggacataatgtaaaacataaaagtgcaattgttacacttacatatgatagtgaatggcaacgtgaccaatttttgtctcaagttaaaataccaaaaactattacagtgtctactggatttatgtctatatgacaaatcttgatactgcatccacaacattactggcgtgctttttgctttgcttttgtgtgcttttgtgtgtctgcctattaatacgtccgctgcttttgcctgtgtctacatacacatcattaatactattggtattactattgtggataacagcagcccctgcgtttaggtgttttattggatatattggatttggttatataccattatttttaatacatacacatgcacgctttttaattacataatgtatatgtacctcggccgcgaccacnctaagggcgaattccanccactggcggccgtac

SEQ ID NO: 5208 - DNA, 576 bp, Homo sapiens
  misc_feature 8, 60, 61, 66, 153, 154, 155, 156, 172, 173, 174, 181, 188,190, 191, 193, 195, 196, 197, 200, 204, 205, 209, 214, 218,235, 246, 250, 252, 255, 272, 278, 279, 288, 295, 296, 297,298, 299, 300, 301, 306, 309, 311, 315, 316, 322, 329: n = A,T,C or G
  misc_feature 331, 332, 334, 335, 339, 340, 343, 350, 352, 353, 355, 364,365, 366, 367, 369, 370, 376, 378, 379, 383, 389, 390, 393,395, 399, 400, 401, 403, 404, 405, 406, 416, 428, 429, 430,437, 439, 443, 452, 457, 459, 465, 468, 476, 477, 478: n = A,T,C or G
  misc_feature 479, 480, 481, 483, 498, 500, 501, 502, 511, 522, 523, 524,530, 532, 536, 537, 543, 550, 552, 553, 571: n = A,T,C or G
ccctttcnagcggccgcccgggcaggtacttttttttttttttttttttttttttttttnnaaaanttttttttttttttttttttttttttttttttttttttttttttttttttttttttttttttttttttttttttttttttttttttnnnnaaaaaaaaaaaaaaannnttttttnttttttntnntntnnnttntacnntttnatccnggtnggaaaaaaaaaaaaaantaccccccccnaatntnttnattaaaaaaaaaaaaanaggtanntaaaaaaanttccatnnnnnnngggtnggntngtannaaaaanaaagaananncnntttnnttngcctttntnnanatttatccnnnnannaatatntnnatanaaaaannaangnggannncnnnntttttttttntttttttttttnnnattaaananaaanaaaaaaaanaaaanantttttnttntttttttnnnnnntntgggggggggggggngnnnaatattttnttttttttatnnngggagnangggnnagatanatatatnannattattttatttttatanaaaaa

SEQ ID NO: 5209 - DNA, 798 bp, Homo sapiens
  misc_feature 359, 453, 463, 467, 473, 484, 490, 498, 520, 525, 534, 537,546, 551, 570, 573, 575, 581, 585, 590, 596, 623, 631, 633,636, 651, 652, 659, 683, 692, 707, 718, 719, 756, 761, 763,769, 772, 773, 778: n = A,T,C or G
ccctttcgagcggccgcccgggcaggtacgcgggctttatacaaatgtatccataaaatatcagagcttgttgggcatgaacatcaaacttttgttccactaatatggctctgtttggaaaaaactgcaaatcagaaagaatgatttgcagaaagaaagaaaaactatggtgtaatttaaactctgggcagcctctgaatgaaatgctactttctttagaaatataatagctgccttagacattatgaggtatacaactagtatttaagataccatttaatatgccccgtaaatgtcttcagtgttcttcagggtagttggggatctcaaaagatttggttcagatcccaaccaattcncattctgtgttttacctcagtggttttctaaaaaaagaaactgcccccccgcaaaaaaattggttacttttgttggacaaacccaatcagtctnaaaaaatgancggngctttntaaaaaggttntaaatntcggggtncctttaaacaaaaccccctggnccaanaagggaagnggngccttgggncttantattttaccttggggatgnccngnttttgngaantcccncggccnttttttgggccaaaactggggggcccnaaaaattntnttnaaaccccttttggcnnggttttnggaaaacccggccttttttgggtnccaattttnggggtttgggggttnggggaaaaaanngatttaaaaacctttttccaaaaaaaaaaaaaaaaanggggncngggggntgnnaaaanaaaaaaaaaaaaaaaaaaaa

SEQ ID NO: 5210 - DNA, 511 bp, Homo sapiens
  misc_feature 490: n = A,T,C or G
ccctttcgagcggccgcccgggcaggtactcgctttttccgttaagtatgccaagcacctcggttgaaaggcttgactcaaaccagaagtcttgctggaattcgtctctgaacacttgaaaaacagaaaccctgagccgcaacaaacatgcctctgtgtgtcgggattgcctttgtctctgcttccatgtggcttttccttttgtagctatgcttagtgacataatcttccctcttctagccttctcctttcaagcctgtctgttaattaaccatgtcagtattggcaagcatttatcttcccccaccctaacatgcaatcttctaagaattttgcaaaattctaaacaaatatagagatggtatatagaattcatatctagaaaactttgattttaatgtgagcttatcaaatttgttctggcttttttggcactaaggcaaaaacatgttaaccagaaaataatttattctttcatgtatggtaaaanaattttgagaatgtttaagcc

SEQ ID NO: 5211 - DNA, 472 bp, Homo sapiens
  misc_feature 20: n = A,T,C or G
gccctctagagcatgctcgncggccgccagtgtgaggatatctgcagaattcgcccttagcgtggtcgcggccgaggtacaagtatccttactaagagtgctccttttgtattttacatatatacagtatgaaaatacattggaacactaggaaagtttttaaataacagttctaatttatcagaaaattgtgttttgggattgagttctttgtctcagcccagaatcccaggtcctgggcctggttttctaatgctgtcatctcagttcgatattttactttagaacctggaatctcctacttaatatatgaccatgactttgaaaggcaaaagaggaatcaagaataaataaaacaaacttaatcttcatctttaaaaaaaagaaaaaagaaaccaaaatgagaatcaacacttcataggctcactgggttttcttttcttttctgttaatttaaactcagttattttta

SEQ ID NO: 5212 - DNA, 495 bp, Homo sapiens
  misc_feature 4, 175, 184, 197, 198, 207, 208, 215, 217, 219, 220, 221,223, 224, 225, 233, 234, 239, 245, 246, 247, 248, 249, 250,251, 269, 270, 271, 286, 287, 289, 296, 297, 298, 299, 300,303, 304, 305, 306, 311, 312, 313, 314, 315, 316, 317: n = A,T,C or G
  misc_feature 318, 319, 320, 321, 323, 324, 362, 363, 365, 366, 370, 371,380, 381, 386, 387, 388, 396, 397, 403, 404, 409, 410, 411,412, 413, 414, 415, 416, 417, 418, 419, 420, 421, 422, 423,424, 425, 426, 427, 428, 429, 430, 431, 432, 433, 434: n = A,T,C or G
  misc_feature 435, 436, 437, 438, 439, 442, 455, 456, 457, 458, 459, 460,461, 462, 463, 464, 465, 466, 472, 473, 474, 475, 476, 477,478, 479, 480, 481, 482, 492: n = A,T,C or G
tcgncggccgccatgtgaggatatctgcaaaatcgcccttacgtggtcgcggccgagtacttttttttttttttttttttttttttttttttttttttttttttttttttttttttttttttttttttttttttttttttttttttttttttttttttttttttttttttttttnccccccccnaaaaaattttttnnaaaaaaaannttttttncnannncnnntttttttnnaaaantttttnnnnnnncccccccccccccccccnnnttttttttttttttnncnaaaaaannnnnttnnnnccccnnnnnnnnnnnannaaaaaaaaaaaaaattttttttttttttttttaaaaanncnnaaannttttttttnnaaaannncccccccnntttttnnaaaannnnnnnnnnnnnnnnnnnnnnnnnnnnnnnccnccccccttttttnnnnnnnnnnnntttttnnnnnnnnnnntttttttttnaaa

SEQ ID NO: 5213 - DNA, 688 bp, Homo sapiens
  misc_feature 602, 610, 615, 643, 644, 667, 684: n = A,T,C or G
cccttagcgtggtcgcggccgaggacacaatatgatacaggatatttttttctttcttctttaactggaataaatttaaactatggctttcctctaagttaatattgaatttagagctctatcctcacactagaaccggagttggcaaccttggccaacaggctaatctcactcattgcctgtttttggaaataaagttttattggaacacagccacactcattcttttacatattgtctttgactactcagagctgaatggttgtgacagagaccatatggccctcaaagccagaaatatttactatctgtcccctttccaaaatattaatactttaccaacccctatgctagaacatgaaactttcttcctctgaaaatttttcttttgtttatacaaagtataagttaaagggtcagtatctttatattttaagtgtaaagcatgtagtagcacttgcttctaaaaaccaaacaaaaattccacatctgcagaacaaaacaatatctcttttgaattccacaactgaaactatgcagcataaaagccaaatctgctttggatccttcataacttttcaaaatatttagtaatttaattnaattaganaattncctttaaaaataggaagttatccctcannctgactggggatttagggccccntttggaaaccttttttncatt

SEQ ID NO: 5214 - DNA, 428 bp, Homo sapiens
cccttagcgtggtcgcggccgaggtactgggattagaggcgtgagtgaccgcacccggctggactggtaaactttcctaggaaaagatcttcctagagttggttttcccctatccaaacctatcttttccatttcttccattagacctttgctttgatgatgatgatgatgatgatgacgaccaggatgcttttgcatttactgagtttctactttgtgctcagaagtgtgttaaggtttttgcacttaataacataaactttcatttaatattcatgacaaccctacagagtcagcatcctattgtctccatattacagatgaggaaattgagattttaagaggtgaaataacttgcccaaggtcacaaagctagtagataaattcatttttttctgacctaaacacccataatattaatcaaataa

SEQ ID NO: 5215 - DNA, 619 bp, Homo sapiens
  misc_feature 594, 602: n = A,T,C or G
ggagtcgaccccgcgtccgctttcccttcctagattgcacagcgttcatgcccaggatgagcttcctgacccccacgatcctgctgctggcgctggtcgccgccacccaggccgagcccctgcacttcaaggactgcggctctaaggtgggcgttataaaggaagtgaatgtgagcccgtgccctacccagccctgtcagctacacaaaggccagtcctacagtgtcaacgtcacctttactagcggcactcagtcccagaacagcacggccttggtccacggcatcttggcaggggtcccagtctacttccctattcctgagcctgacggttgtaaatgtggaatcaactgccccatccagaaagacaaggtctacagctacctgaataaagctgccggtgaagagcgaatatccctctctaaaactggtggtggaatggaaacttcaagatgacaaaaaggataacctcttctgctgggagatcccagtagagatcaaaggctaggctgcttggtgccctgtgtctgtgcagggtgagagtccatgggccgagggaggggaaggaagaaaaattagacctgaaattgagtcngtgccatnaggacgaacagaaactt

SEQ ID NO: 5216 - DNA, 419 bp, Homo sapiens
  misc_feature 164, 224, 236, 282, 297, 338, 345, 350, 354, 373: n = A,T,C or G
ccctttcgagcggccgcccgggcaggtacccaaagtgttctgattccttcaactggctactgagtcatgatccttgctgataaatataaccatcaataaagaagcattcttttccaaaaaaaaaaaaaaaaaaaaaaaaagtacaacattgtctttttcactantcacacgaaaaatacatgaaagtgctctgataattttaaagcatcatataaattaacggngtcattggtaanaatctcatatgcatttcttaacccttccatttccttgaagactganacgacatcccatgtnccacagcatattgcacaatgatgggcaaacaatatgccctnagtaagngtttnttgnttgactgaagcaacatggnatagcataaccgagcacagacatcagggagactaggctgggatgaa

SEQ ID NO: 5217 - DNA, 371 bp, Homo sapiens
  misc_feature 8: n = A,T,C or G
ccctttcnagcggccgcccgggcaggtacgcgggcctgtcatgttcacattcatgtccagcctccctcctgcctcagactcctgagtagctgggattacaggcgcctgccaccacgcccggataatttttgtatttttagtagagacagtgtttcactatgttggctgggctggtctcgaactcctgccctcaggtgatccgcctgcctcagcctcccaaagtgctgggattactggcgtgagccactgctgccagccggcagttgaattttaagactgtggagctggctgaggcaagtagatgaaacaagatttcttgatgttccttccaggtttattacccatgtatctttagaagatgattttttttt

SEQ ID NO: 5218 - DNA, 463 bp, Homo sapiens
  misc_feature 55, 76, 81, 93, 108, 119, 121, 124, 126, 133, 142, 146, 151,185, 189, 218, 224, 230, 264, 274, 290, 294, 301, 306, 309,311, 312, 318, 320, 326, 347, 349, 367, 378, 380, 395, 403,421, 427, 433, 441, 443, 447: n = A,T,C or G
cccttagcgtggtcgcggccgaggtacgagcggcgatttcaaccacaaaaaaaanaaaaaaaaaaaaaaaaaattnatttnaaaaaaaaaaanaaaacaaatgaaaanaatcattcaananaangnattgcgntaacaaatncatnggtgnaaatgtaacttgaaaggactaaaaggaagaatangganaagttagagggaaatctggaaaagacgtnaatgangattangggatcaaaatcattcccctttgttttaatttanatgattcttntgattcccaaaattanactncaaaaantaaanttntnngaatgngnatctanaattttcaaattcttaaaaantncatgttttttgctgctgntttgttgatcnanggaggcaggatagtnattatcanatttacaatggttatagnaataancacatnttaaaaancncgtnatttttccttttttat

SEQ ID NO: 5219 - DNA, 367 bp, Homo sapiens
  misc_feature 53, 55, 90, 98, 103, 104, 110, 112, 119, 121, 127, 128, 129,130, 138, 139, 140, 141, 147, 152, 153, 163, 164, 170, 171,181, 182, 189, 190, 191, 201, 216, 224, 225, 227, 228, 235,238, 239, 240, 242, 243, 245, 257, 261, 262, 264: n = A,T,C or G
  misc_feature 266, 278, 279, 280, 281, 289, 298, 299, 300, 303, 304, 305,308, 309, 321, 326, 329, 336, 345, 347, 362: n = A,T,C or G
cccttagcgtggtcgcggccgaggtactttttttttttttttttttttttttngntttttttttttttttttttttttttaaaaaaaaancccccccnttttnntttttntnaaaaaantntttttnnnntttttttnnnnaaaaanggggnnttaaaaaaanntttttnnaaaaaaaaannttttttnnngaaaaatttntttttttaaaaaaangggggganncnnttttttnggnnncnncncttttttttttnaaanngngnaaaaaaaaaaannnngggggggnaaaaaaaannnttnnnggnnaaaaaaaaaaanttttnggnggggggnttttataananaaaaaaaattttttntttta

SEQ ID NO: 5220 - DNA, 495 bp, Homo sapiens
  misc_feature 53, 142, 151, 160, 251, 278, 310, 311, 312, 322, 326, 334,374, 394, 410, 412, 442, 453, 468: n = A,T,C or G
cccttcgagcggccgcccgggcaggtacttttttttttttttttttttttganacgcagtcttgctctgtctcccaggctggagtgcaatggtgctatctcatctcactgcaacccccacctcctgagttccagcgattctnatgcctcancctcccgantagctgggattacaggtgcccaccaccatgtccggctaattttgtattttttgcagggatgggattttaccatgttagccaggctggtctnaaattcctgacctcagataaatctgcntgcctcagtctcccaaaagtctttggggattnnntgggcggaangccnccacgccncagcaaaaaaactggaaccctttaaaaaatggcaaaattnaaaaatttaacactccaagntcagggaacaactacnanattcataatgaatttatttgaggcctgacntgcaaaaatanactttctgatataanaaaaaggccaaaatttcctaattaaaa

SEQ ID NO: 5221 - DNA, 416 bp, Homo sapiens
  misc_feature 271: n = A,T,C or G
cccttagcgtggtcgcggccgaggtacttatttaaatatggctctagcttttaaagtagagacaatgccttttatttcttctgtctgccttagagggtctagaacaatactcaagaaagttactctacgaaagtcattgacagatcaggaaataaaagacccaatttttaaaaactgcaactgattataggagaagtccctgtaacagacagacagacacagacagacacacacacacacacacacacacacacacacacacacacccctntaactgcttttcccctttatggttttactcatttgtccttactatgtgccaggcattgttttaagcattttatatatactttcccaagatcacaacgctggtaaatgatagaagccaatactttttccttctttttttttttttt

SEQ ID NO: 5222 - DNA, 652 bp, Homo sapiens
  misc_feature 572, 595, 599, 600, 601, 602, 603, 604, 605, 606, 607, 608,611, 612, 613, 614, 615: n = A,T,C or G
tcgaccccgcgtccgcctatctcctggtaggcgatagtgtcgtcctgaagcaggactccatctactacgagcatttttacaatgaactgcagccctggaaacactacattccagtgaaaagcaacctaagtgatctgctggaaaaactcaagtgggcgagagaccacgatgcggaggcaaagaagatagcaaaagcaggacaagaatttgcaagaaacaatctaatgggtgatgatatattctgttattacttcaagctgttccagggctatgccaatttacaagtgagtgagcctcaaattcgagagggtatgaagagggtagagccacagtctgaggatgacctcttcccttgcacatgccataggaaaaaggccaaagatgaactctgatatgtaaaatatcttctgttcaaatgatggtgctctgaagacactttactataaagattatttttaaacttcacggacaatgtaaaatttacttgtgaccatttacttcctcacagtatttcttcttatacagtgttcccatgactgtcttttacatcacattttaaagtttttattaantaaaactggctttatttttaaanaaannnnnnnnnnaannnnngtgccggccgctagaactaagtcctagagaaaaaaac

SEQ ID NO: 5223 - DNA, 505 bp, Homo sapiens
  misc_feature 459: n = A,T,C or G
ccctttagcggccgcccgggcaggtacttttataattctaaaacttcacttttgtccttaaatcaatatattacggatttcattgttcaataaattaccatctttaactaaaaataagtaaatcaaagagcatatttggagaaactaagagctgttaactgtttggagggtaaaagaatacttttctcgaaatttttttgaagaaaaatctaaaagccctctatgttgagttaatacaccttctgacccccatcatcagtggcattattcttccaagggactcttatctctaagcaatggtgaagttctggattcattatggatctcatggcaccaaaccaactggcactgaagttaagttaatatactccagcgagatcacctgtgggtcaaggatggcccagagaatcttggaaaatccatttatattgagcaaagatctgaatcaccttcaatcangctgtaagatctagaaaatttgaccttgtagtagtatttcccaggg

SEQ ID NO: 5224 - DNA, 261 bp, Homo sapiens
cccctttcgagcggccgcccgggcaggtcctcaacttgctgattaatttcaaaatgagattacaaacaaaaagaaaacaaatctggttcctcaataaagggccaaaataactgaatacagtctgttatttacttctctcttttaacataaggttgggaacacttcattttacaaataggattaacatgaacataacatcgcacaagcttgcagacaaccagcataaaatatggagtacctcggccgcgaccacgctaaggg

SEQ ID NO: 5225 - DNA, 503 bp, Homo sapiens
  misc_feature 39, 56, 87, 88, 91, 92, 93, 102, 111, 112, 113, 116, 123,132, 135, 139, 140, 153, 156, 157, 160, 161, 171, 178, 182,188, 194, 205, 208, 210, 211, 216, 221, 242, 247, 250, 258,259, 261, 263, 268, 282, 285, 286, 292, 293, 294, 295: n = A,T,C or G
  misc_feature 296, 298, 301, 303, 311, 312, 313, 316, 319, 333, 340, 350,352, 371, 375, 378, 484, 496: n = A,T,C or G
ccctttcgagcggccgcccgggcaggtactttttttttnttttttttttttttttnttttttttttttttttttttttttttttttnnttnnnattaatttnttttttttnnntanttttttnaaaatgttnagntttnnagaaggaatgtgnggnnaannaaacgcaaancccactnatangccaantgcctntgccctttgcncanannggctncaaangtgaaaaggagtttggctganggccnggnggcaggtnngncnacgancccagaaggatgtntgnnggcttnnnnngntgnancgttgatnnnctncancacctgctggcaangcctcanctttgtcaangngcttctggactagtgcatntttncgntgtaattcattccttaaattctgacacatcctcttttgataacttgctctggtttctggaacaaaaaactgcaaatcttttttggaaagaaaaaaaacaatctggnctgtcttgcaanaaccaaa

SEQ ID NO: 5226 - DNA, 342 bp, Homo sapiens
cccttagcgtggtcgcggccgaggtacgcggggttatttatgctttcttgatgggagttatttaaaatatttttatttatgtttctctagtattgtaagagtctgttaaatttctatgaaattagtaacattataaaaggccaggcgtggtggctgacgcctgtaatctcaacattttgggaggctgaggtgggaggattgcttgaggccaggagttaaaagaccagcttgagcaacatagtgagaccctatctctataaaaaaattttaaaaattagctgggtgtggttgcctgtgcctgtagtcccaactactcaagaggctgaggtaggaaaatcactt

SEQ ID NO: 5227 - DNA, 563 bp, Homo sapiens
  misc_feature 440, 540: n = A,T,C or G
ccctttgagcggccgcccgggcaggtacagggagtatcaaacggtctgggttctacatgtgctcttccctgagactgggttttctaatttataaagcaaagagtttagagggatgatcttcaagcctcttgtagttctagaattctgtagttctgggagtttgtaaactattaagttttcttttagcccagaacttccattttcctgctctctcgtgtctgctctagactcagctctagctcggctaagtgtggagctctctgctggggagatccctagaagctttgaaggagacattgtgaggctggagaactgggttcaaattcagtgctaccattaaatctctgaataacatcctcagtcttccatctataaaagtcttggcatctccaatcacttcttgttctattatctcctaagccctatacatattactctgnaatactcctttgatccctatttctcacagtgctctatcctccaaaggttggaagactcactctatctacagatacctctctgggcatattttattactgngctgacctcctggccctgccttc

SEQ ID NO: 5228 - DNA, 416 bp, Homo sapiens
  misc_feature 1, 2, 4, 16, 25, 39, 44, 45, 46, 47, 51, 62, 70, 77, 84,92, 95, 98, 123, 143, 144, 192, 230, 237, 246, 269, 288,291, 305, 307, 315, 330, 342, 345, 366, 372, 373, 384, 385: n = A,T,C or G
nntnagggggcggaantttgggggncccccctttccttnaagannnntttnaaagggggggnccccccanttggggnccctttnccccgggnaanggncccccggggggggccccccccgggnccccccccaagttggttggnntgggggattattcttgggcaagaaaatttccggcccccctttttaagnccggttggggttccccgcccggggccccggaggggttnaccaagntttaaaagntgggttaaaaaattatttggggnattgggtttttttgggggnttncaaaaataagggcnanaaattttnaaacttttgggtttnaaaagcccaaanggntttttgggggggccctttggnataaannggccctttttnnaaaaaaaaatttttaaaaaaatttaaaattt

SEQ ID NO: 5229 - DNA, 527 bp, Homo sapiens
  misc_feature 28, 218, 285, 309, 328, 362, 383, 421, 430, 438, 452, 454,467, 473, 509, 511, 516, 518: n = A,T,C or G
cccttagcgtggtcgcggccgaggtacncgggggtcagcagacagaaatagccatactaatctcatagggctcaaatgcatcttcaggcagcagggaaccaagcagcgtggcacaggccttcttgactggaggaagagcttgctggcatggttgggcagtattccaggagaggccatgtccgtgttcacttcttggcacatttcagttccgttttccncttgttataaaaactgcctctttaggatgtgggatgccttaaatgtctgtaacacattttgaaaaancatttgggcaattacttaaagttngctgccattgattaccagnatgggaatttattgggcttacccaaaagaggacncaaatctggattgaatggagnaagcaatgaatatctttggctttccccattataaaacncaaaaaggnttaaattnctttaaatttggcnanattttggaccttnccggtntctccctttgggttaagggggattaagacctttttntnttcangnatttcccca

SEQ ID NO: 5230 - DNA, 174 bp, Homo sapiens
  misc_feature 100: n = A,T,C or G
cccttcggccgcccgggcaggtactttcggttttgaagcttgctcagcagttcgtcttgcttctttaatcatggactctaatccaccaaaaacactattngttgacttggaagcctctccatcagattcactatcatctgagtcatttagtgttacaaccactgatttatgctt

SEQ ID NO: 5231 - DNA, 418 bp, Homo sapiens
ggtacagtgagggagagccgagggaaccagcgcggtgcctagcggaactccagggctggaatcccgagacacaagtgcatctgctagctgttagcacttggcagacggagttctcctctagggtagttctaactttgggtaataatgtttgtcagctacctgatattaacattgctccacgttcaaacagcagtgttagcaagacctgggggagaggtaagccaaataaaatatcttgtcagaagttgtattttttttcagcattatatttcctcttctatctaccaagagggatcagggaatggaattttatggggtgcaaagagtaatgctttatattacttttgtaggcttctcttgccttttcttatatgaagacttcttttcttcttgaaaaattttatactttctaaaatgt

SEQ ID NO: 5232 - DNA, 273 bp, Homo sapiens
cccttggccgcccgggcaggtacgcggggatgtgctggtatgcaaaccggggttcagttgaaaaacaggcacccacttcttatcttgctatagataagaagaaaaaaagatgagggatacagggctataacacagggatctagacgttaggaccaaaacatctggcaagatttagctaaaagaatcatggcaacttaccagacctatgggtgaatcagaagttcagcaaaaaaaaaaaaaaaaaaagtacctcggccgcgaccacgctaaggg

SEQ ID NO: 5233 - DNA, 364 bp, Homo sapiens
  misc_feature 99, 102, 118, 163, 210, 235, 241, 248, 263, 266, 273, 276,277, 285, 286, 288, 296, 308, 315, 316, 318, 343, 353, 362: n = A,T,C or G
cccttagcgtggtcgcggccgaggtacccacaaattattgttttctaaacatttgaagttttacgattagctttaaaataatgattttataaatttggnggncacaataatttttggnattacctttcctcctttttcccacttaaccaatatagcccaaagnttttcaacattaaaaattcataagggcctgaaaatcataacctgggnccaaattttttattgggcccctaanttttanccataanggggcaactatttcnccnctttttnggnntaaaaaannancccctaanttcttttgggtnaaaaganncnttgggggaaaggtttttggaaaaanttattttttnttttttttngg

SEQ ID NO: 5234 - DNA, 439 bp, Homo sapiens
  misc_feature 315, 327, 414, 425: n = A,T,C or G
cccttagcgtggtcgcggccgaggtacgcgggggagggagcgagcaggcgaagccgcggaggacggggtgaagatggcggccttctccgagatgggtgtaatgcctgagattgcacaagctgtggaagagatggattggctcctcccaactgatatccaggctgaatctatcccattgatcttaggaggaggtgatgtacctgtcccctcgctctggtgattatttcttgcagaatcaccacacgagaccatcccggcagtcatggttttgctttagttttccaagtccgtttcagtcccttccttggtctgaanaaattctgcagnggcgagcagtttcccacttgccaaagatcccttttaaccaacactagcccttgttttttaacacacgcttccaagccctttattaancctggggcagnctttaccaaaaatg

SEQ ID NO: 5235 - DNA, 452 bp, Homo sapiens
cccttagcggccgcccgggcaggtacaatagactagaaacgaaaaatattccatcaaaacattttctcttttcatttaagggagatcggatgtggcactttgcggtgtctgtgtttctggtagagctctatggaaacagcctccttttgacagcagtctacgggctggtggtggcagggtctgttctggtcctgggagccatcatcggtgaccgggtggacaagaatgctagacttaaaggtgagtgttgttatataattaagcccttttattcatgggaccaatgcctgagctacctctgtagcaaaggaaacaacaaactaggagagaaacaaccagggaatgtctgcatgccacacttgagggaggagggcttagatggcaccacctctggatggaggggtcccatggctcccacacaaagttgggatgcctggacattgacctaatag

SEQ ID NO: 5236 - DNA, 465 bp, Homo sapiens
cccttagcgtggtcgcggccgaggtacatttaagaaatacattggttctgtccagaaaggcaggacaactcgaagggcggggaggggaggggagcggagtgcggagcttccagtttataggcagatttaaaaattttttggttgacaattggttaagtttatctaaagacctgggatcaatagaaaggaaatatctgggttgaagtaagaggttgtggagaccaaaattttatgaaacagatgaagcctccaaggtagtcagcttcagagagaataggttgtaaaaatttcttagacttagggtttatgttgatgttaatgctggagaggtataatgaggcatgtccaacccctacttcccatcatgacctgaaccagtctctcaggttaaattttaagagcaccctggctgaggaggaagtccattcagatggtttggctggcggggggcttaaaattttattt

SEQ ID NO: 5237 - DNA, 793 bp, Homo sapiens
  misc_feature 57, 61, 105, 106, 110, 121, 141, 142, 144, 145, 146, 147,149, 152, 153, 157, 163, 164, 165, 166, 167, 168, 171, 172,176, 180, 181, 182, 187, 194, 195, 196, 197, 198, 199, 200,201, 219, 223, 224, 225, 230, 231, 232, 236, 242, 244: n = A,T,C or G
  misc_feature 246, 260, 262, 266, 267, 268, 272, 273, 275, 276, 278, 287,292, 299, 310, 317, 320, 322, 325, 326, 327, 328, 329, 330,331, 332, 333, 334, 336, 340, 346, 347, 348, 352, 356, 357,358, 359, 360, 361, 363, 365, 366, 367, 368, 369, 370: n = A,T,C or G
  misc_feature 371, 372, 373, 374, 375, 379, 380, 381, 382, 383, 386, 387,388, 389, 390, 393, 394, 397, 401, 409, 416, 419, 421, 425,433, 436, 439, 440, 441, 442, 443, 444, 445, 446, 447, 448,449, 450, 451, 452, 453, 454, 455, 456, 457, 461, 462: n = A,T,C or G
  misc_feature 463, 464, 465, 466, 467, 469, 470, 471, 473, 474, 475, 476,477, 478, 479, 481, 483, 486, 487, 488, 490, 491, 492, 494,497, 498, 499, 500, 501, 502, 505, 510, 513, 514, 516, 518,519, 520, 521, 522, 523, 524, 525, 527, 528, 529, 530: n = A,T,C or G
  misc_feature 532, 533, 535, 537, 539, 540, 541, 542, 543, 544, 548, 549,550, 551, 552, 553, 554, 556, 557, 558, 559, 560, 562, 563,564, 566, 567, 569, 570, 571, 572, 575, 577, 578, 579, 581,583, 586, 589, 594, 595, 596, 598, 601, 602, 610, 611: n = A,T,C or G
  misc_feature 612, 613, 614, 616, 617, 618, 619, 620, 621, 622, 623, 624,625, 626, 627, 628, 629, 630, 631, 632, 634, 635, 636, 637,640, 641, 642, 643, 645, 647, 648, 649, 653, 655, 656, 659,664, 666, 667, 669, 670, 671, 676, 677, 679, 681, 682: n = A,T,C or G
  misc_feature 683, 684, 685, 686, 688, 689, 691, 692, 693, 694, 695, 696,697, 699, 700, 701, 702, 703, 704, 706, 709, 710, 714, 715,716, 721, 723, 724, 725, 726, 727, 728, 729, 731, 733, 735,737, 739, 740, 741, 742, 743, 744, 745, 746, 747, 748,: n = A,T,C or G
  misc_feature 749, 750, 751, 752, 753, 754, 755, 756, 757, 758, 759, 761,762, 763, 764, 765, 766, 769, 771, 772, 777: n = A,T,C or G
ccctttcgagcggccgcccgggcaggtactttatttttttttttttttttttttttnaaantttttttttttttttttttttttttttttttttttttttttttnntttnttttttttttntttctttttttttttttttnnannnnanaannaaanaaaacnnnnnnacnnaaanatgnnngtttnttttttnnnnnnnnaaaaaaaaaaaaaaaaanaagnnnactannncccnaggagngnanaaaaaaaaaaaatncntctnnncccnnanncnaaggggggnaaaanaaatccnggggggggggnataaaanaancnccnnnnnnnnnnanaagngggagnnnaaanaaannnnnnantnnnnnnnnnnnaatnnnnnaannnnnccnnaangctnaaaaaaanaaaaaanttncnaaanccctaccntcnaannnnnnnnnnnnnnnnnnnaaannnnnnnannnannnnnnnananaannnannntnaannnnnnaanaaaanaannanannnnnnnngnnnnannantnannnnnnaaannnnnnntnnnnnannnannannnnggnannnananatnganaaaannnanagnntttcttgnnnnnannnnnnnnnnnnnnnnnannnnaannnnanannnaaananntanaaaanannannnaaaannanannnnnnannannnnnnnannnnnnanaannaaannnaaatnannnnnnnananananannnnnnnnnnnnnnnnnnnnnannnnnnaancnncaacncccccccccccccccc

SEQ ID NO: 5238 - DNA, 407 bp, Homo sapiens
  misc_feature 70, 75, 90, 99, 106, 164, 195, 203, 225, 232, 276, 292, 312,315, 324, 342, 343, 394, 406: n = A,T,C or G
acacacactggggccttctcgaccccatcccctgacaagccagccttttttttttctgtttctttggttnggttnggtttttttcctttnaattaattnaattttnattttctttttccttggggatatatatatatatatttatatattaaaaaatgcaagcntgcttttttgccactgcgcttgcccctgggngcaaaaantaaccctttgggtttcctgatnattgcangggtcagtctactggacatatttttttcccttccctatacccanaaatgttctggggatnattaatttacttgggaaatnatnaccaggttnaaagtcttttattattgnngggtcatttgcatacataaataacaggactagcttaaccttaaaccagctntttcccttttcng

SEQ ID NO: 5239 - DNA, 306 bp, Homo sapiens
  misc_feature 127, 167, 198, 211, 224, 245, 284: n = A,T,C or G
cccttagcggccgcccgggcaggtactttttttttttttttttttttttttttttaggaaagcacttcgttggggttgatggtcaggaattatgggcttgggtaggtaagtgtgggctgagattaanaaagagtgaaattactgctgaataaagcaacaggcctaanaggagtgaatgggggatagtgtctgcctaanaggaaagatgganaatggctcagtanaagtagtcacggacacagganacagaaggccttgtgatatgtacctcggccgcgaccacnctaagggcgaattccagcacac

SEQ ID NO: 5240 - DNA, 486 bp, Homo sapiens
cccttagcgtggtcgcggccgaggtactttatttttaatcctttctgtaattgtaggatgtagatattatagtcccaatattaggaatgaggaaattgagactcagagaagttaggttacttactccaaagcaccctgctgataagtcgaagaactgcaattaaaacccaggtctgtttggctcccactcctgtgctctggaatgcttaagggattagaaatgtcccaaagagactaagaatccaaagcagtagtgggtatggaaggtaacagcagtgatttcctaaggacctgggttctagccccagagacatggttaaaattttatagcagttgcctgctttttgagtctgacaagcctccattttactgtcaaaaatgtgaaattcataattaggcaataatgtgctgaacctgatttatttgggtattttatttccattaaagtcatcaaaagtgatttattgattccaaaaaaaaaaaaaa

SEQ ID NO: 5241 - DNA, 262 bp, Homo sapiens
  misc_feature 76, 152, 162, 166, 233, 251: n = A,T,C or G
cccttagcgtggtcgcggccgaggtacgcgggtcattataactgaaggagaaggtgccccaaaatgcaagattttncacaagattcccagagacaggaaaatcctctggctggctaacttggaagcatgtatgagaatccaagcgatttttntcagagaaangcangaatgtgtggcagatttaagttgaaagctagaaaatatggcaagcgaaaggatgtaaaacagtgccntgcttgaaatgatttccnaaagagaaaaa

SEQ ID NO: 5242 - DNA, 490 bp, Homo sapiens
cccttagcgtggtcgcggccgaggtaccacctaaaatagtgtctgaagtaacatttcagtatataattgcaagccaaacatttcaaaagttacatttatcttgaggggatctccctggatataaaagattggacaaaagagcacagagctgaaaggaggacacattattgaatttggaacccagttcatgaaatgaacaacagaataaggcagaccacatcaccaccataacggagctatgataaaacaaacaaaaaaactcaaaatgcaaaaaaactacaggtgatatcaatttccccccaaagcactccacaaacctaatgtagactataagccaccaccacaaatggaatattcaaacaaggaggaataatgattaaacaaacatcttgaagaagaaaacaaatactaagaaataaaaggactcaggctaaaactaaaaggatgaaaaaaggacgtacctgcccgggcgggccgctcgaaaagggcg

SEQ ID NO: 5243 - DNA, 326 bp, Homo sapiens
  misc_feature 7, 21, 64, 78, 109, 150, 160, 163, 181, 185, 194, 200, 220,237, 260, 265, 277, 281, 283, 285, 288, 293, 310, 321: n = A,T,C or G
actctantaacactaggatanttgagcacttaaatgctgagtgtttgtcagtttttaaaattangagaaagagacatnattgttttctgatctacttgcttaataaatnatttttttgccaactaatttttaggtttactttggtaaatnctaaaggtcngtntaaaaatgtatatttaanatanactttttcntctatnaatttggaaagaaaaaatanattttattcctttggangagaaatttttttaccttttaanacaangtttggcttttnatanangntcntattntttggttaaaaaggttnatatcctaatnttttc

SEQ ID NO: 5244 - DNA, 375 bp, Homo sapiens
  misc_feature 52, 116, 119, 120, 121, 122, 123, 124, 126, 127, 152, 155,164, 165, 166, 167, 169, 176, 177, 189, 190, 194, 195, 196,198, 200, 204, 206, 208, 222, 224, 225, 229, 230, 232, 233,234, 235, 244, 249, 252, 253, 255, 266, 273, 278, 280: n = A,T,C or G
  misc_feature 282, 296, 297, 299, 300, 302, 303, 306, 316, 338, 341, 350,361, 364: n = A,T,C or G
cccttcgagcggccgcccgggcaggtactttttttttttttttttttttggntttttttttttttttttttttttttttttttttttttttttttttttttttttttttttttttnaannnnnnannttttttttttttttttttttttttnctnaaaaaaaannnnanttttttnntaaaaaaaaaanncccnnntntngganananaaaaaaaaaaaaantnntccnngnnnnttttttttnagaanggnnanaaaaaaatttntgtttgnccccntnanaaaaaaaaaaaaanngnntnnccncccccccccnttttttaaaaaaaaaaaaaaantgngggggggcnccccccccccnctnaataaaaaaaa

SEQ ID NO: 5245 - DNA, 492 bp, Homo sapiens
ccctttcgagcggccgcccgggcaggtacttttttttttttttttttttttgtagagacgggtttcacccagggctggtctcgaactcctgggctcacgcgatctgcctgcctcagcatcccaaagtgctaccagcattacaaacatgagccaccatggccagatgatcatttggacttctaagcattagcaaccaaaataaaaaattaattagaaaaacatacacataatttataataaaaataaggaacctaggattaaatataaaataaagatgtataagacctttgtgtagaaaattgtaaaactttattagaaaatgtcaaagaagacttaattaaatgtaaagcttatacactatgttcatggatagaatggctcaatgtcagaatgattttagtgttctcatattgatctatagactcaatacaatactgataaaaattcttaaatgatttttcaaggaaaattgatgtgataatttcaaatttc

SEQ ID NO: 5246 - DNA, 263 bp, Homo sapiens
  misc_feature 172, 222, 239, 249, 260: n = A,T,C or G
ccctttcgagcggccgcccgggcaggtactgagccacgatttgttctctcaacactctccaggctgtcagaaaagagatagaaactcaccaaggccaagaaatgcttgtgccgtggcacagaaggaatcaaagagtactttgttttttttttttttttttttttttttaaanaatttttttttttttttttttttttttttttttttttttttttttttttnaaaaaaaaaaaaaaaantttttttttnacccccccccnttt

SEQ ID NO: 5247 - DNA, 420 bp, Homo sapiens
ggtactttcagtatcattataaaaattttccttgtctgagttaaaaacatgttcagtatctggtttgttgtcgttttcacagtctactttatttgtatttaaataaagctctgaaggtgactggcaagcatattctggggacccagagtatgaatgagaaagaaaggcatttttgagactgggttatttttgttcaggaaatatctggactactacagagacagacatgccagatgcatcactttcctgacaatcaggtgaatcatttgtcaaattagaaggtttttacttaagtttgttcttcctgtaagagttattatgtagttgctcttcctcaatacaagcagttttgtaattttcacaaatttcaccaaaactctgctttaacttatttgtgatgaattttaaaggttattttta

SEQ ID NO: 5248 - DNA, 161 bp, Homo sapiens
ccctttcgagcggccgcccgggcaggtactttttttttttttttttttttttgggtcaagctgttctttatttcagggagagggcaggggaggggctcagtctttcttggcagcagctttcctcatggcggccagtacctcggccgcgaccacgctaaggg

SEQ ID NO: 5249 - DNA, 390 bp, Homo sapiens
ccctttcgagcggccgcccgggcaggtacatgtaatccactgtagtgaaggcactaaaacctgttgtattttccacatttcgatagatctctcacaggatttaacacttttggaatgctcagtaaattattattgactgcttgataatacctctttgttcctgcctttccccaagtccttcaacagaagtttcttctagcactttgcaggtcagttgagtggactatttgagtccctcacagtaatgagcttgtgtgtttttgtcattcttttttctttttttgaaaaaacaatagagtcatttaaggaagcaaaaaggtccctgggtcaagatttttattttatcttttatggtggtagggtgaggtgtgagtatttagggagatggtt

SEQ ID NO: 5250 - DNA, 389 bp, Homo sapiens
  misc_feature 334, 361: n = A,T,C or G
accactaataaattgtttgccaaatccttgtaataacatcttaattttagacaatcatgtcactgtttttaatgtttatttttttgtgtgtgttgcgtgtatcatgtatttatttgttggcaaactattgtttgttgattaaaatagcactgttccagtcagccactactttatgaccgtctgaggcacacccctttccgaatttcaaggaccaaggtgacccgacctgtgtatgagagtgccaaatggtgtttggcttttcttaacattcctttttgtttgtttgttattgttttccttcttaatgaactaaatacgaatagatgcaacttantttttgtaatactgaaatcgattcaanttgtataaacgattataatttctttcat

SEQ ID NO: 5251 - DNA, 307 bp, Homo sapiens
  misc_feature 236, 283: n = A,T,C or G
cccttagcgtggtcgcggccgaggtacacctatatatgtatgtaagtatatcaacataggtatatcaaaaacaaaacaaaacaaaacaataacaaacaaacgaaaggacccagcaaccatccaaatgtccacacagaggggaagaaaatattttttcaaaagtaatgattgctgtcattaatttggtgagtatactttcacaatgaatatattaacaatagttctttatgataaanaagtaatactagccatataacactgaggataaaaatattttacatcntgaaaggaaagcacttgtttacat

SEQ ID NO: 5252 - DNA, 273 bp, Homo sapiens
cccttagcgtggtcgcggccgaggtacctttatgtctggcaaaatagcgccccagaatgatgagcaagcacagcatggcgaacaccaccaccgccacgacgccaccgatcacggcatgatccactgccctgatcgagccttcttcacctgctcgggaatctgagaggtcctcactgtccagttcttctgcggaattgggcaactgagtaaggccgtgaactgctggttctgtcgtcgccgttgtgtctgtgatgatggtaaggatggtggtgg

SEQ ID NO: 5253 - DNA, 588 bp, Homo sapiens
  misc_feature 55, 110, 117, 134, 136, 138, 141, 144, 145, 146, 147, 148,149, 150, 151, 152, 153, 154, 162, 165, 166, 167, 172, 190,191, 194, 195, 196, 198, 204, 206, 213, 215, 226, 227, 228,229, 231, 232, 235, 245, 246, 251, 267, 268, 281, 282: n = A,T,C or G
  misc_feature 283, 284, 297, 299, 300, 303, 306, 311, 312, 313, 316, 317,320, 322, 329, 331, 333, 341, 350, 352, 353, 368, 369, 375,379, 389, 390, 393, 394, 398, 399, 430, 431, 433, 437, 438,440, 441, 446, 448, 452, 454, 456, 459, 460, 462, 464: n = A,T,C or G
  misc_feature 466, 470, 485, 489, 494, 498, 512, 515, 525, 527, 529, 538,541, 572: n = A,T,C or G
ccctttcgagcggccgcccgggcaggtactttttttttttttttttttttttttngggctttttttttttttttttttttttttttttttttaaaaaaaaaaaaaaaaanttttttnaaaaaaaaaaaaaaaanananttntcnnnnnnnnnnnaaaaaaanggnnnccccnttttttgggggggggggnnaannntnccccananttttttnanggggggggggnnnngnnaanaaaaaacccnnttatngggaaaaaaaaaaaannttttttttttttnnnngttaaaaaaaaananncanagnggggnnnatnnttnanaaaaaanancngggggggngtttttttnannaacattttttaaaannaaacanaagngggggggggnngcnnccannaaaaaaaaaataccccccccccccccccccnnanaganngnnaaaananaaanantnggnnanananaatnccccccccccccccncgtnggganatanacacaaaaacatanatnttttttttanangngggagtgtntanaaaacacaaacagggggggggggggggaaanaaaaaaaaaaaaaaag

SEQ ID NO: 5254 - DNA, 728 bp, Homo sapiens
  misc_feature 39, 42, 45, 46, 74, 177, 180, 246, 258, 310, 317, 343, 407,443, 462, 467, 498, 499, 527, 533, 537, 548, 574, 601, 606,632, 660, 668, 680, 687, 709, 724: n = A,T,C or G
gactctaaaagaaacttgtttgtataatgctattctatncgnggnntggagcccaggaaataaccaacttgatncgtgttatgacccattttaagcctcccatgatcacagtttttaaaatacaattaaggactggtccttttctaggtgacacaagaaaggtaatagctagaacanaanaaagaggggtccccaaaaatgtaaccttaaaatttgacacttgtgccactattgatagtaagcccncatgggatgaangatgtgggttctctaaattggaaaaaaagttccccagtaaaaaaaaaataanttttttntgtcaagaaatcatatttatgtgaanatgtgtcaaatactgggtcttgcgttatttccggcttactttgaaaaataaagttaaaaaaaanaatagtggtttgggttccaaaaaagggaaaaagtcncccctctcctgcatgaatngggancctgccaacctttttaaaaaatggataattnncaaaccccctccaaaaccccaaaggttngaaatnaaanaaaaaaatttnttaacaatttaggccttttgaggggnaaaagggacctaaaatccttagtggtnagccntccttaaataaaaaagggagggggtncaaaaaacgttttttccaaaaaccaagnttttttcnaaaaattttttnttgaaanaacaaaaaatggggggccaaanaaccttccccggggngggg

SEQ ID NO: 5255 - DNA, 518 bp, Homo sapiens
  misc_feature 344, 443, 456, 461, 463, 466, 479, 482: n = A,T,C or G
cccttagcgtggtcgcggccgaggtacatcttcacataacatactgagaatgcgtttctgtatcagagaatcatttctgagaatcatttctgtagtattcctgcccaagtgcctaacctgaatctaataatgaagaaacttcagacaagtgaaaattgaggagcattctatgatgcagctagcctctgctctataaaaagtcataaaacacaaggaaaactaagaaatcttcaaggttaaaggagactaaaaccccatgacatcttagatgcatggtaatagattataatatgatgataatagatccttggattaccattatggtaataagagccttggctcanggaaaaaaaaattcccaaagggtgtttgggagacagttgacaaaaattttgaaaaatggattggtttgttaaaataatattatttttagggctaagtcnccctgaatatganaattntnccnggcactttttaanaanactttttttttattcttaaaaaaccccccccttttt

SEQ ID NO: 5256 - DNA, 518 bp, Homo sapiens
  misc_feature 147, 425: n = A,T,C or G
cccttagcgtggtcgcggccgaggtactactcgattgtcaacgtcaaggagtcgcaggtcgcctggttctaggaataatgggggaagtatgtaggagttgaagattagtccgccgtagtcggtgtacgcggggaaagcagaaggtcncgcttggaggaagtggcggctttgagtccggtggcccaatcgctgttactacttctctgaagctcctctcggctgcttgccgagacaccctgccgccaagatgcctcgaattatgatcaaggggggcgtatggaggaatacccgaggatgaaattctgaaagcagcggtaatgaaatatgggaaaaatcagtggtctaggattgcctcattgctgcatagaaaatcagcaaagcagtgcaaagccagatggtatgaatggctggatccaagcattaanaagacagaatggtccagagaagaagaggaaaaactcttgcacttggccaagttgatgccaactcagtggaggaccattgctccaatcattgga

SEQ ID NO: 5257 - DNA, 419 bp, Homo sapiens
  misc_feature 8, 33, 63, 90, 92, 108, 149, 171, 184, 209, 411: n = A,T,C or G
ggtactgnacttttttttttttttttttttttngagctgtttatagcctttaacaattgagtntacagaaatgaggcatatttctccctntntgccagatttatccanaattcaaaaactttgtgaatgttcttaattcattgcaatgnggttgtttgcaagatcagtaanaatctgttttctnttatatttggaaacaattggaggcnctggttattttctaggacttggactaaaatggcatgttttgggatatgagcacacagctttgaggaattcacattgattttatagagccaatgagaaccccttaaaaagatgcctcataccttgtctatgcagttcctttgcagggttcctggcctgtggtaagtaagagagtcaccttcctggcaggcccaggaaccacangttttttt

SEQ ID NO: 5258 - DNA, 303 bp, Homo sapiens
  misc_feature 149, 150, 151, 152, 153, 154, 155, 156, 157, 158, 159, 160,161, 162, 163, 164, 165, 166, 167, 168, 169, 170, 171, 172,173, 174, 175, 176, 177, 178, 179, 180, 181, 182, 183, 184,185, 186, 187, 188, 189, 190, 191, 192, 193, 194, 195: n = A,T,C or G
  misc_feature 196, 197, 198, 199, 200, 201, 202, 203, 204, 205, 206, 207,208, 209, 210, 211, 212, 213, 214, 215, 216, 217, 218, 219,220, 221, 222, 223, 224, 225, 226, 227, 228, 229, 230, 231,232, 233, 234, 235, 236, 237, 238, 239, 240, 241, 242: n = A,T,C or G
  misc_feature 243, 244, 245, 246, 247, 248, 260, 271, 282: n = A,T,C or G
cccttagcgtggtcgcggccgaggtacaatgcctttgatgaactgttttgtaagtgctgctatatctatccattttttaataaagataatactgtttttgaaaaaaaaaaaaaaaaaagtacctgcccgggcggccgctcgaaagggcnnnnnnnnnnnnnnnnnnnnnnnnnnnnnnnnnnnnnnnnnnnnnnnnnnnnnnnnnnnnnnnnnnnnnnnnnnnnnnnnnnnnnnnnnnnnnnnnnnnncgctcacaattncacacaacatnccgagcccggnagcataaagggtaaaagcctg

SEQ ID NO: 5259 - DNA, 310 bp, Homo sapiens
ccctttcgagcggccgcccgggcaggtacagcttcaagacatgatgggactaataatttgggctggaagcagaaaccaaattagtaaaattcactgagctgtgtgagtctggctctttagaggcaaacctgttttcatagggctgtggaccccaaggaatagattcagcagatggatcattgtagcaagagttgtaacaaaatggcagtcgttggagttaagtgggagagcagttggtctagtttggagcagaagtccagatatataggaaatgtcatgggggctggaaaacccaagtgcatgtcatgga

SEQ ID NO: 5260 - DNA, 258 bp, Homo sapiens
  misc_feature 45, 66, 106, 126, 130, 137, 215, 216, 218, 233, 235, 243,246: n = A,T,C or G
cccttagcgtggtcgcggccgaggtacttttcccctaccttgaanagacatggtggtcgtagcttntcatctatatgaaaaagttttcgatgtattggaattattngggaatgcttttaaaacaanttgnaattatntctttacaaaccaaaacaagaacacaaaggtgtggtgcttggaacatagatgaaggagccctacttactgagcttaanntntggacttttttgatncntgggtgtntgngtttttaaaaag

SEQ ID NO: 5261 - DNA, 429 bp, Homo sapiens
  misc_feature 113, 138, 177, 197, 327, 340, 351, 352, 392: n = A,T,C or G
cccttagcgtggtcgcggccgaggtactttttttttttttttttttttttttcccgcttttattctgcttttgtaaaagcagtattttgagatggacattgcctcttcattgnattctcatcaattcattatttttgnggttatagcttggacaagcaattaactttaaaatggtanatccggaactttaaattggnagctttcattgcttaaaatttttggcatatgcaaataatgggctcatccctaggaaagaatctcaggggtatgcttattccccaatgggagggatgacatataaatcttttctgcctttacttatcaatncaccaagggagcngttttttttgnntataagccataatactgccaggctgggtatgacttaaaanatgtttatctgaaaaaaggcttttaaaaaaaaaaggt

SEQ ID NO: 5262 - DNA, 475 bp, Homo sapiens
ccctttcgagcggccgcccgggcaggtactctgctccgttgtgctgctagagccacaagcctattaaactttgcctgaaataaattcctatttgcgctggtgttaatttttacttatgagtgagccaagaactcaggccagagttgcggtaacaccaccagaagaggtctccgcttgtcagacttgagggatatcatcaatgagcctctgagctaatggtgtaaaccaaaaataaaattctaagccccccgccagccaaaccatctgaatggacttcctcctcagccagggtgctcttaaaatttaacctgagagactggttcaggtcatgatgggaagtaggggttggacatgcctcattatacctctccagcattaacatcaacataaaccctaagtctaagaaatttttacaacctattctctctgaagctgactaccttggaggcttcatctgtttcataaaattttggtc

SEQ ID NO: 5263 - DNA, 341 bp, Homo sapiens
ccctttcgagcggccgcccgggcaggtaccttcagtcccttgttattgttccgtatattacctgtaagcagatactgtattttattttagcctatttgacagaacacatcactcagaaaaagtgaagtttcagagcaaacagtgaagaaatcagtgtgattgtagacaaaaagtcggttcacagaacggagcagcggggagaggaagggaaaagcttcatagtttggtgtttatcacatcaagagattggtaaatttctgaggaaagacaggctaatggggcactgaaatggaacaactcctttaaacgtgcagccttttgaatttttcctcaaaaccaag

SEQ ID NO: 5264 - DNA, 403 bp, Homo sapiens
ccctttgagcggcccgcccgggcaggtacgcgggggcaaagcggaaggggcgcgcggataggttctgaatctgtggtgggacctgagattctgcatctcaacaagtcccaatgtgtccagaattggtgggttcttggtctcactgagttctagaatgaagccgtggaccctcacggctgccaggatggaaactaactacctgaagaggtgctttggaaattgcctggcccaggcactggcagaggtggcgaaggttcggcccagtgacccaatagaatacctggctcactggctttatcattacaggaaaacagcaaaagcaaaagaagagaatagggaaaagaagatccacctgcaggaggaatatgacagtagcctcaaggaaatggaaatgacagaaatg

SEQ ID NO: 5265 - DNA, 532 bp, Homo sapiens
  misc_feature 31, 67, 75, 97, 102, 107, 229, 261, 274, 363, 365, 416, 453,479, 513: n = A,T,C or G
cccttagcgtggtcgcggccgaggtactttntttttttttttttttttttttttttttgagaccgantctcactntgttgcccaggctggagtgcantggcncaatnttggctcactgcaacctgtgcctcccaggttcaagcaattctcctgcctcagcctcctgagtagctgggattacaggcatgagccaccatgctcagctaatttttgtatttttaatggaggnggggtttcactatgttcgccaggttggtctcnaactcctgacctnaagtgatccacctgcctcggactcccaaagtgccaggattacaggtgtgaaccaccgagcccgggtagaactaaaattttaaagctatntnctttattcaaatttggggaggaatattatttttgaaaccaatgtcataaanaattacatattcagtattaacaattttgaattttaanttaggctttaaagcccaaatgggatncctttacaacatattgaaagtgttttgattgaancagacaacatttaaatttt

SEQ ID NO: 5266 - DNA, 302 bp, Homo sapiens
cccttagcgtggtcgcggccgaggtacgcggggcacactggccccgctctgcatccacagctggattctccacccctgagcaagacaaggagccccagacaaaacgctcaggattccagaggatggggttgaggatcctcagcctttcagagtgaaaatccacgaggcggaggaggtttaaaacaacagaaacaggcatgtggggaaaaccataggttcaattagaagcactgtacgcgggtggtatataatttttaaactgtctaaagggccgggcacactggctcatgcctgtaatcccg

SEQ ID NO: 5267 - DNA, 497 bp, Homo sapiens
  misc_feature 33, 53, 58, 103, 104, 105, 106, 107, 122, 156, 158, 159,160, 167, 170, 176, 177, 178, 187, 188, 190, 191, 192, 196,198, 199, 200, 201, 202, 203, 204, 217, 226, 227, 237, 239,240, 241, 242, 243, 244, 248, 251, 257, 259, 263, 264: n = A,T,C or G
  misc_feature 265, 266, 275, 282, 284, 302, 309, 317, 318, 319, 320, 344,345, 348, 365, 366, 368, 372, 378, 397, 405, 408, 409, 415,417, 418, 422, 426, 430, 435, 436, 440, 441, 442, 444, 445,447, 452, 456, 462, 463, 464, 465, 470, 473: n = A,T,C or G
ccctttcgagcggccgcccgggcaggtactttntttttttttttttttttttnggggnattttttttttttttttttttttttttttttttttttttttttannnnnatttttttttttttntttttttttttttttttttttttttttttttttntnnnttccccnggnaaaaannnatttttttnnannntttngnnnnnnntggggggaaaaanttttttttnnaaaaaaaaanannnnnntttnaancccccnanaaannnnatttctttntaaaggngnttttttttttcccccccntccgggngaaaaaannnntcccctttttaaaaaaaaaaaaannttngggaatgggggggaaannanaaantatttncccttttttttttttgggnaaaaaaanccnncccaanannattngggntttnccccnncccnnntnncnaaatntttnaaaagnnnnaaaancanccctttttttttaaaaaaaaaaaa

SEQ ID NO: 5268 - DNA, 482 bp, Homo sapiens
  misc_feature 107, 112, 125, 127, 129, 130, 133, 136, 139, 140, 141, 145,152, 153, 159, 160, 161, 177, 183, 186, 187, 188, 190, 197,200, 202, 203, 206, 208, 210, 211, 212, 213, 214, 215, 220,227, 228, 230, 238, 244, 245, 248, 251, 256, 262, 263: n = A,T,C or G
  misc_feature 268, 286, 301, 309, 321, 326, 327, 337, 361, 373, 374, 376,385, 386, 387, 389, 390, 392, 402, 403, 404, 406, 407, 408,410, 422, 452, 453, 462, 468, 470: n = A,T,C or G
cccttagcgtggtcgcggccgaggtactttttttttttttttttttttttttttttttttttttttttttttttttttttttttttttttttttttttttttttttnttttnttttttttttttntntnncanccnccnnnaaanaaaaaannacacannnaaaaaaaaaaaaaaangagaancannnanaaaaagncantnnttntnannnnnnaaaanaaaaaannancaggggtnacatannctnatnccggngaacannccccncaaaaaaaaaaaaaaggnggggggggggttatnaaatttanttttggccccgngaagnntttttttcanaaaaccccccccaaaaaaaaattntttttttttttnncnggggggggnnngnnanaaaaaaaaannntnnnanttccaaaaaaangggggggggggcccctttttttttcccccnncccccccgngggggnancaaaaaaaaaaa

SEQ ID NO: 5269 - DNA, 387 bp, Homo sapiens
cccttagcgtggtcgcggccgaggtactcttcagtcaacagaacctgatgcaaagaacagaaaaggggaagatgtgggggattcagtcaggatggtgggagaaattgtaaaattataggaaataatcacaaacacttgtggaaggcctgggggtttgcataaaatgttgggctgaaggcagctgaattctcttaaaagcttagggcatagatacacagaaatgtagtttatctaaatgacttgtttacttatgtggtcctaaaactaacctttgatagtttatgggcaggatagctctctcagggtagggggagggcaaccagattgattacccactgatggtgttgactcaaagccttcgtcatttaatatgtgctgaataaatgc

SEQ ID NO: 5270 - DNA, 253 bp, Homo sapiens
  misc_feature 109, 110, 111, 132, 139, 146, 147, 152, 157, 172, 182, 185,186, 187, 190, 196, 204, 205, 206, 209, 213, 214, 215, 219,223, 224, 226, 228, 231, 236, 238, 239, 244, 245: n = A,T,C or G
cccttagcgtggtcgcggccgaggtactttttttttttttttttttttatttttttttttttttttttttttttttttttttttttttttttttttttttttttttttnnnccttttttttttttatttttnacttttngtcattnngtttnggggngtaaaaaaaaatttntaaaaaattnggnnnggnaatttnttttttgnnnggnaccnnncatnttcnntntnttntaaanannaaaanntttttttt

SEQ ID NO: 5271 - DNA, 283 bp, Homo sapiens
cccttagcgtggtcgcggccgaggtaccgcgggattggccattgttgatcaactcagttcagcccctctcctctccctggaggtctggggtggggctatgaactttccaactctctaaacacatggttggttcccctggcaaccagccctcatcctgaggcaatctaggtgatctagccatcagtgaacttcatagcatacagaaatatacatatcactttgaagattccaagggatttaggagatttgtgtcagatgcttctatctctcaggaaattacaaa

SEQ ID NO: 5272 - DNA, 433 bp, Homo sapiens
  misc_feature 142: n = A,T,C or G
ggtaccgtcacttgataagctgaaaggggtggatgttgaatatcacctaagtgtcattgcaacctaaagcctgttatcctctttccaatagaaccaaagagaagttggtatgtagcttctcggccttttggctaagattaanagaagttggtatgtagttcagatacttcattttctttaattgcactgacactaaagctttgtatttataactattctggttcttatagactataggttcttggggaaccctcttgttaagagaattttcctggactcaaatatttgattttccatagagaagaaaaattcagttttatttctgtattaaagcatttcaagtcccttggccataagtcctcatagtaactgctcaattaatgttttcataatcattgcataattattgccttcagtctgtataaaatgaaag

SEQ ID NO: 5273 - DNA, 329 bp, Homo sapiens
atatctgcagaattcgcccttagcgtggtcgccggccgaggtacggtagtaagaaacctttgagatctttctgacttttcaaaattagagaaagcaaatgggatggatagatttttttttcttttcaaggggggcaggaaggtaatggtttgagtagcctttgtttaaaaaaaagactaaatatatttaaaaggccacatttatatttttttcacaagaaccacataataaattccacttcttgacctgaatttggaaatccgaaattactaatccaggccaggtgtggtggctcatgcctgtaatcccagcactttgagaggccgagg

SEQ ID NO: 5274 - DNA, 419 bp, Homo sapiens
  misc_feature 33, 60, 106, 107, 111, 116, 117, 120, 126, 131, 132, 138,139, 141, 143, 145, 151, 152, 153, 155, 156, 157, 162, 165,166, 173, 174, 175, 176, 182, 184, 185, 186, 205, 213, 216,222, 224, 230, 235, 250, 253, 255, 261, 262, 267, 279: n = A,T,C or G
  misc_feature 281, 283, 284, 286, 287, 288, 290, 293, 294, 304, 305, 312,313, 320, 332, 333, 334, 343, 346, 351, 357, 372, 374, 375,376, 379, 384, 385, 386, 404, 405, 407, 412: n = A,T,C or G
ccctttcgagcggccgcccgggcaggtactttntttttttttttttttttttttcctttntttttttttttttttttttttttttttttttttttttttaaaaaanngacnttttnnaanggagantaaanntgtttnnangnantggtgnnnannngccanaannaaaaaannnntttttngnnncgaaaaaaaaagcgtggtntttacatnatnaaaaanancttgcncaaantaatggtttaattanaangnaaaaannttggntgaaaattatgnananngnnnanttnnaaaaaaaaanntgggggnnctttttnttttttttttannnttttttttnctncatanaatganaattttttttttttncnnnaanaaaannnattttttttttttttaanntnacccnttttttt

SEQ ID NO: 5275 - DNA, 321 bp, Homo sapiens
cccttagcgtggtcgcggccgaggtacgcgggcattaattgtaaacaatctgaacaaagagttggcaaactttttcttaataagacagataataaatattttaggcttagaggtcacagagtctgagtcacaactatttaactatactgctatcgcttgaaagcagccattgaaaatgcatatacaaatgagcattgctgtgtttcaatagtattttctttataaaaactgtgggactgcagcttgttgacccttgccatatgagaaagtgtaaactaaaaatagaatatagtattaaaaacatgatatcagtcttcaaat

SEQ ID NO: 5276 - DNA, 533 bp, Homo sapiens
  misc_feature 74, 80, 84, 85, 86, 88, 90, 95, 107, 115, 119, 121, 127,139, 147, 152, 158, 160, 162, 171, 178, 183, 195, 197, 198,200, 203, 220, 237, 240, 242, 251, 252, 262, 266, 267, 270,271, 278, 302, 306, 310, 312, 319, 335, 338, 347, 366: n = A,T,C or G
  misc_feature 368, 375, 393, 394, 405, 440, 464, 476, 477, 487, 506, 517: n = A,T,C or G
cccttagcgtggtcgcggccgaggtactttttttttttttttttttttttttttgttttttttttttttttttnttttancctnnntntnttttntttttttttttnaattttantttnanaatttnttaaatttaaanactaaaangttantttttntnanaaaaaaaanaactatntttgnacatttctaccnannanaanaaaatcaagtgtatcanccatttacatatttttnccntngcccccttnntttaaacctncccnngcnngaaaagncttaaaaggcataattccagtggncctngggnanaattaangttataaagtttaaanacnaaatggggnggggggccttaaaaattgntncaataanggttttcatttcttaaannaattgcttttntggaggggaccctactttttaacttgggaagaatnaattttttggttaaaataaaggtnaaacaatcttannccctcaaatnggcaagtccaatgtttaangtttaaacccncccttaaaaccccttt

SEQ ID NO: 5277 - DNA, 318 bp, Homo sapiens
ccctttcgagcggccgcccgggcaggtgcgcgggatctgtgtctacagatatttacatgaattgggtgaactcctctctttccaaggccccaaaagaacttgtggttcctgggcctgccaggaaggtgactctctacttaccacaggccaggaaccctgcaaaggaactgcatagacaaggtatgaggcatctttctaaggggttctcattggctctataaaatcaatgtgaattcctcaaagctgtgtgctcatatcccaaaacatgccattttagtccaagtcctagaaaataaccagtgcctccaattgtttcca

SEQ ID NO: 5278 - DNA, 299 bp, Homo sapiens
  misc_feature 118, 121, 123, 133, 148, 149, 150, 156, 165, 174, 178, 179,181, 198, 199, 202, 209, 213, 215, 217, 221, 225, 231, 234,235, 251, 253, 265, 271, 272, 279, 287, 288, 289: n = A,T,C or G
cccttcgagcggccgcccgggcaggtactttttttttttttttttttttttttttctttttttttttttttttttttttttttttttttttttttttttttttttttttttttttttnttntntttttttttnttttttttttttttnnnaaaaanaaaaaaaanttttttttnggcnntnaatttttaaaaaaaaannttnaaaaaanattntntnaaancccntttaanaannaaaaaaattttttttncnccccaaaaaatnaaaaannctttttnttttttannnaaaaaaaaaa

SEQ ID NO: 5279 - DNA, 509 bp, Homo sapiens
  misc_feature 205, 206, 441, 479: n = A,T,C or G
ccctttcgagcggccgcccgggcaggtacaggctcactgaacacgagagagctcacaaaggagagaaaccatacgggtgcagtgaatgtgggaaagccttccccaggaaatctgagcttactgaacatcaaaggattcacacgggaattaagccccatcaatgcagcgaatgtgggagagctttctccagaaaatcactactcgnngtacttctttttataggactggaaggaaaagtatataaaccgtgattattcaaagattttcactgaaaatataagttgaacaggtttgtattaatgattacaaagtatagaaaattttgctgttattttccagaagaaatattattaatactactttcacagaagatgtgaaagtggagaaactccttttaggtaaaatttatttgactcaattactggattaaatagcattaangaacatacagttgtaaaatgtagaaccatagaaaattngcattttaaaaagcattgccctttttaaaa

SEQ ID NO: 5280 - DNA, 561 bp, Homo sapiens
  misc_feature 150, 262, 333, 336, 353, 356, 357, 359, 371, 378, 382, 388,395, 396, 397, 410, 413, 432, 433, 435, 438, 452, 458, 478,484, 496, 503, 507, 513, 522, 531, 534, 542, 543: n = A,T,C or G
cccttagcgtggtcgcggccgaggtacatgtgcacattgtgcaggttagatacatatgtatacatgtgccatgctggtgcgctgcacccactaactcgtcatctagcattacccgcgtacaaaggcagggagtcctggaaggagttttanctgatgatgacaagttcagtgaaactgtcatagagtgctttgagactagagagagtgctagtgctctaaagtgcttagagactagtagagttacacataaaagaacacagtntgttccaggaactgcagttgtttctctaccctttttcactcagtccctttttcttttgatgaatggcacanaanaaaaaaaaaaaaaattnttnntncccgggggggcntttaaangggnaaattnccccccnnntgggggccctttnttnggggcccaacttctgaaannanctnggggaaaaaaaatnggcttnaaccccatgaggggggaaanttgcangtgagcctgganaccattnccanttgcantccagcctngggggacanaancaaagacnncatcttaaaaaaaaaaaa

SEQ ID NO: 5281 - DNA, 503 bp, Homo sapiens
  misc_feature 119, 129, 130, 131, 132, 134, 135, 136, 149, 150, 151, 152,153, 159, 161, 162, 163, 170, 171, 181, 185, 186, 193, 194,195, 196, 203, 204, 205, 215, 216, 217, 218, 221, 222, 223,235, 238, 247, 249, 251, 252, 253, 264, 266, 267, 269: n = A,T,C or G
  misc_feature 270, 271, 272, 273, 288, 298, 300, 310, 311, 312, 316, 326,327, 332, 345, 346, 347, 348, 349, 350, 351, 356, 359, 360,367, 368, 369, 370, 371, 372, 373, 374, 375, 378, 379, 380,381, 382, 399, 408, 411, 420, 428, 433, 434, 444, 445: n = A,T,C or G
  misc_feature 446, 448, 461, 464, 465, 466, 469, 470, 471, 473, 474, 475,476, 478, 479, 484, 486, 487: n = A,T,C or G
ccctttcgagcggccgcccgggcaggtacttttttttttttttttttttttttttttttaaattttttttttttttttttttttttttttttttttttttttttttttttttttttttnaaaaaaaaannnnannnttttttttttttnnnnnaaaaanannnggggggnnaaaaaaaaantttnnggggggnnnnaaaaaannntttttttttnnnnatnnnaaaaaaaaaaanttnttttttttngngnnnaaaaaaacccncnntnnnnnggggggggggggganaaaaaaaaanangaacccaccnnngggngggggggggnntttanaaaaaaaaaaaannnnnnnttttntannttttttnnnnnnnnnttnnnnnaaaaaaaaaaatttttnaaaaaaaanggnggggggggnaaaaaaanttttnngggggaaaannntnaaaaaaaaaaagncgnnnacnnnannnntnngggtngnnttttttttggaaaaaa

SEQ ID NO: 5282 - DNA, 393 bp, Homo sapiens
  misc_feature 53, 55, 57, 98, 102, 103, 113, 117, 123, 124, 127, 128, 136,139, 140, 143, 144, 151, 154, 160, 161, 162, 164, 167, 170,171, 174, 178, 180, 187, 189, 190, 198, 203, 204, 208, 216,218, 228, 231, 232, 239, 246, 247, 249, 250, 258: n = A,T,C or G
  misc_feature 264, 268, 276, 278, 296, 304, 306, 307, 308, 310, 313, 315,318, 320, 327, 329, 335, 337, 348, 350, 363, 381: n = A,T,C or G
ccctttcgagcggccgcccgggcaggtactttttttttttttttttttttttntntnttttttttttttttttttttttttttttttttttttttttngggnnaaaaaaaaantttntttttnnttnnaaaaaaanggnnggnntattatnaanaaaaannnanttnttnnggnggananaaaaaangnnttcataanaaaanngacnaaaaactngnttttttcttnctnntccaagnatagaanngnntaaacgcnggcaanaaanttgtgacngntttaacaacccccaaganttggtccngnnngnggngnttngngacccananataaanangaagggggagngncacattttttttntttgggcaaaaaaaaaantttttatatgaa

SEQ ID NO: 5283 - DNA, 342 bp, Homo sapiens
  misc_feature 148, 151, 152, 180, 216, 295, 301, 340: n = A,T,C or G
cccttcgagcggccgcccgggcaggtactttcattggagaaaatatcattcagctctgaaaaaagatgtttttaaagaatttttactgatatagggagacactcagggtatagtgttatatgaagaaaaaaaatcctggttagtatancanntggtaaaagaaaaaaatatgaagccagntattaaaataatgtatagctgggtgtggtggctcanacctataatcgcagcacttaaggaggcagaggtggaaggatagcttgagcccatgagttcaagacctgtctggacaacnactttnaaatggtacctaaaagtcctcggccgcgaccacgctaangg

SEQ ID NO: 5284 - DNA, 309 bp, Homo sapiens
  misc_feature 117, 119, 122, 123, 124, 130, 134, 135, 136, 138, 140, 143,145, 147, 148, 149, 150, 151, 158, 159, 160, 163, 165, 169,171, 172, 177, 180, 185, 186, 187, 192, 194, 197, 202, 206,207, 210, 213, 229, 231, 236, 240, 242, 247, 249, 259: n = A,T,C or G
  misc_feature 263, 268, 279, 280, 281, 282, 294, 295, 296, 308, 309: n = A,T,C or G
cccttagcgtggtcgcggccgaggtacttttttttttttttttttttttatttttttttttttttttttttttttttttttttttttttttttttttttttttttttttttgggaananccnnnctttanaaannnantnttntnannnnnccggggnnnggntngaancnnaaaanccntaaannnatttnanatnttttnaaannaanttnttaaaaaaaaaaattntnaaaanatantnggggngncaaaagaatntttnaaaanaaaaaaaaacnnnncccaaaattttnnnttttaaaaaaann

SEQ ID NO: 5285 - DNA, 367 bp, Homo sapiens
cccttagcgtggtcgcggccgaggtacctgtatctgatgagttagtagctgtgaaaacgtttctctagcaaggctgcctgtgagtgggatcccaggccaagcagttaactgcgttccagcgaagcaggtgccccgtgtgttgctctgcaagtccacatggagcaggattccttattttgtgaagaaaggatttttagtgccacgtgtgtatttttaacacatttccaaaagcatgatttattcaggattaagtttattcagtagaaatttccaaggtatttttttaagtgaggcaccatcctggatgctggggaagaatctttgttggaatatgaccccgcgtacctgcccgggcggccgctaaggg

SEQ ID NO: 5286 - DNA, 619 bp, Homo sapiens
  misc_feature 428, 556, 592: n = A,T,C or G
ccctttcgagcggccgcccgggcaggtacctacctggtgtccttgtggtctttctcaggatggcttccttctcaactgtgacaagtgcaggtaagatcctgttccatctaaatttaagtctgggttgctgggattagggtttcttacaagtagggaaaagctcaaagtattctttcttgtgtttgttaatgtagatgattccttagtgctccttggctcgaattctctgcactaggtgaggattgctgacaacaaggaatgagagattgatgttaaagctattgaatttgatatgaaatttaatgtcctggaaacatttggtaggtgggagggagggggtagcatatgcagagacacttcgcccatgtgtgctatgatgtgatgcatgctgttggaaggactactttaagtttattttccctctttangggaatgagcagggggaaggttattagacttcatcggcggaagcaggacaacatatcaggtggggatagcagtgcaacagaaagctgggatgaagaactttctccttccactgtgttgtatacagcancacaagcacacacctacaagcatcaccttacttgtnggaagaccaacccaaaaagcggaaaag

SEQ ID NO: 5287 - DNA, 476 bp, Homo sapiens
  misc_feature 460: n = A,T,C or G
ccctttcgagcggccgcccgggcaggtactgagagcccaggtcgttgttttttccagcttagaagccatggcgcacctccatttttgtgcgctctcctaatgaggtttttttctttcggacctgttttagtattaattattgctttatttttttgaccagttaacatatttgagggttattttatttatttttcgttttttaacggaggattttgcctttatttttaattatttgggatctgatatttttctactagtagataggactcttggtttggacatactacatggatcagtaaatacctgggcacaggacttcaaagcaaacacagattccccctcccccttaatatttaagaattaaaagatgatgagaaataaggacaaaagccaagaggaggacagttcgctacacagcaatgcatcgaggtatgagctatcaactttctttcctttttgnctttttttttggggga

SEQ ID NO: 5288 - DNA, 496 bp, Homo sapiens
ccctttcgagcggccgcccgggcaggtacattatggaggctttctcaatatctgccactttcactgcttttaccccagggcctatgcaaagacagcgtcctcttttgaacatggggaagccttgaacaactgtagcacacaatatcacagccaaggctatagccatgcccttcacactcatgtttgttttttgctgttgctgctggtgctgttgctgctacttcagctttgctgctcttcttggaaggagtagaaatgtgcttggcgataagcgattgtctcaccgctcggcgataggcgatggtcttactgctcggcgataggcgaaagtcccttcgtggttgccaagatgtgtccggaattggtgggttcttggtctcgctgacttcaagaatgaagccacggaccctcacggtgagtgttacagctcttaaggtggcgcgtctggagtttgttccttctgatgtttggatgtgttcaaaagtttgttccttct

SEQ ID NO: 5289 - DNA, 665 bp, Homo sapiens
tagggagtcgacccacgcgtccggaataggctgcgttctcttggaacgcgccgcagaacgaggttctggtgaccctagccgcgttccctccttagtcctttcgcctacccacccgcgtacccgacagacccaccccgtcctgtgccaggaaagcgctgccaccggcaccatgccccacccatacccagcactgaccccggagcagaagaaggagctggctgacatcgctcaccgaattgtagctccgggcaagggcatcctggctgcagacgagtccactggaagcattgccaagcgcctgcagtccattggcaccgagaacaccgaggagaacaggcgcttctaccgccaactgctgctgactgccgatgaccgtgtgaatccctgcattggaggggtgatccttttccacgagacactgtaccagaaggcagatgatggccgtcccttcccccaagttatcaagtccaagggtggtgttgtgggcattaaggtagataagggtgtagtgcccctggctggaaccaatggcgagaccactacttcaagggctggacgggctgtctgagcgctgtgcccagtataagaagggatggagccgactttgccaagtggcgctgtgtgctaaagattggggagcatacttccttgttccttgcatcatg

SEQ ID NO: 5290 - DNA, 471 bp, Homo sapiens
  misc_feature 53, 55, 92, 102, 103, 105, 118, 125, 127, 128, 133, 134,145, 153, 154, 164, 169, 170, 173, 175, 176, 181, 186, 190,199, 200, 201, 202, 204, 208, 214, 225, 228, 229, 230, 231,232, 233, 234, 235, 236, 238, 243, 251, 252, 253, 254: n = A,T,C or G
  misc_feature 256, 257, 258, 260, 270, 271, 272, 273, 280, 281, 282, 284,285, 293, 299, 304, 305, 314, 338, 340, 346, 347, 349, 350,374, 376, 377, 378, 379, 382, 393, 399, 407, 408, 410, 414,421, 455: n = A,T,C or G
cccttagcgtggtcgcggccgaggtactttttttttttttttttttttttttngntttttttttttttttttttttttttttttaaaaaaancccccaaaanntnttttttttttttnaaaaaancnnggggnnaaaaaaaaaantttttttnncccccccccnttttnnaanannaaaanttttncccnttttttttnnnntncccntttttncaaaaaaaatntgnnnnnnnnntntattnaaaaaccnnnntnnntnaaaaaaaaannnnccttttnnnanngggggggnaaaaanccccnnaaaaaaaanttttttttttttttaaaaaaaaanancccccnngnngggggggttttaaaaaaaattttnannnnaanttttttttttnaaaagncccccccnncncccnttttttnaaaaatttttttttttaaaaaaaaaaattttctntttttttttttttttt

SEQ ID NO: 5291 - DNA, 167 bp, Homo sapiens
  misc_feature 67, 123, 135, 167: n = A,T,C or G
cccttagcggccgcccgggcaggtacagggtcatacagatgagctttggggtcttgccacacatccnttcaaagatttgctcttgacatgtgctcaggacaggcaggtgtgcctgtggaactnaatggaacacangctggaatggaccaggctggtagatgaaccan

SEQ ID NO: 5292 - DNA, 452 bp, Homo sapiens
  misc_feature 325, 331, 334, 341, 362, 366, 370, 409: n = A,T,C or G
ccctttcgagcggccgcccgggcaggtaccccaggcaagctcaaagccaagaacagctgcattgaagtaggagaaaaaaaaagccatttaatttcacctgcctttccctgaaggtggcacaacttggcatgattggtagtaaacacccaactcttctgctgggtagaaagtgaaaaaaggaagtcccccattctgaattttggggggtcacctgatggactggtttctgtctctcctgactcagtgctgactgggaactggcatactttggatgcctgggggcttcaaagaaaaaagagttaactgctttttgcagcatcaaganactcancantgctgcngatggaggtcgggacactcanacantcangaaaagagcgtgtggttcttggcttatccctttgggcangaaatgggaaaaagtggaaaagtgcatttaacattctggcttt

SEQ ID NO: 5293 - DNA, 455 bp, Homo sapiens
  misc_feature 283, 284, 285, 286, 287, 288, 289, 290, 291, 292, 293, 294,295, 296, 297, 298, 299, 300, 301, 302, 303, 304, 305, 322,323, 324, 325, 326, 327, 328, 329, 330, 331, 332, 333, 334,335, 336, 337, 338, 339, 340, 341, 342, 343, 344, 345: n = A,T,C or G
  misc_feature 357, 376, 442: n = A,T,C or G
ccctttcgagcggccgcccgggcaggtacacgcctgcccttcggctgtgggtgtgtgtggaaggccagccctcaccactcatgccactctgattgggagccaggtcagctatcaccacggcaaccacgcagaccctgaggagcgggactgccccacagcacgcacagacatcggagacgtccagatcctgagcagctttgtcagagatcacttacctgatctgaagcccgagcctgctgtcattgagagctgcatgtacctcggccgcgaccacgctaagggnnnnnnnnnnnnnnnnnnnnnnncgttactaagtggatcnnnnnnnnnnnnnnnnnnnnnnnngtaatcatggtnataagctgttttcctgtgngaaaattgtttatccgctcacaattccaccacaacatactaagcccggaagcataaaagtgttaanagccctggggggt

SEQ ID NO: 5294 - DNA, 530 bp, Homo sapiens
  misc_feature 74, 95, 141, 142, 144, 146, 152, 154, 155, 171, 172, 173,176, 184, 197, 199, 204, 212, 214, 217, 223, 234, 241, 243,244, 245, 252, 258, 259, 268, 272, 273, 274, 275, 279, 280,281, 282, 283, 285, 288, 301, 302, 304, 311, 315, 319: n = A,T,C or G
  misc_feature 322, 323, 324, 325, 326, 327, 328, 329, 333, 335, 340, 350,351, 352, 357, 358, 359, 362, 365, 366, 367, 368, 372, 373,374, 376, 379, 386, 389, 390, 391, 393, 394, 395, 396, 397,413, 415, 416, 417, 418, 420, 421, 422, 426, 441, 442: n = A,T,C or G
  misc_feature 443, 444, 445, 446, 447, 448, 449, 450, 452, 453, 454, 455,465, 475, 484, 490, 498, 499, 502, 503, 504, 509, 514, 515,518: n = A,T,C or G
ccctttcgagcggccgcccgggcaggtacttttttttttttttttttttttttttttttttttttttttttaanttttttttttttttttttttntttttttttttttttttttttttttttttaaaaaaaaaaaaaaaannancntttttnannaaaaattttttttttnnnaanttttttanaaaaaaaaaaaananccctntttttttngnggngggaanttttttttttnaaaaaanannnttttttnaaaaannataaaaaantttnnnngggnnnnnanaantttttttttaaannangggggcntcantttnttnnnnnnnnaagngnggggnaaaaaaaaannnaaggnnnaantgnnnnaaannncnccnttttttnggnnntnnnnnaaaaaaaaaaaaaaanannnncnnntttnaaaaaaaaaaaattnnnnnnnnnntnnnnggaaaaaggntaaaaaaaanttttttttntttttngcaaaaannaannngaaanccccnnttnggggaaaaaaaa

SEQ ID NO: 5295 - DNA, 827 bp, Homo sapiens
  misc_feature 410, 447, 463, 499, 502, 504, 505, 510, 524, 539, 546, 551,557, 564, 611, 618, 633, 682, 704, 706, 711, 717, 722, 729,734, 749, 761, 763, 769, 781: n = A,T,C or G
cccttagcgtggtcgcggccgaggtacaacaaaattcgtaataaccttttatcatttttagaaaactttaaatatatagataaaaatagacaattttcataggtcctcatgaagatgagtatgttctgttccaagggcttgcatagagcgcaaatgtggttataatatagaacaactagacattaatatttttaggattcaaaagcatggaaaccataaaatgggcacattttacttgtttatgccaaaacacaaatttccaaaccaacctgtataactaaaacagggaaaaaattaagttacagacttacaataacatttcatgaattgtaatatttacaacatgttagtaagagtctctcttaacatacaagctgatagcttttttctttaatccttgctaaaatttncttttatttcaaatcaaacactaaagcattctcaaanggcttcaaatatgtantttaaaactatttaatccacttacaaggtgactctntgncnngaacnaagcaatggctggntctactacatatgtnaggtggnaggcntttttnaaaatcnttcaaaaaatggttgaatggtaaaagcttgccccaagtccattcaantttaaanggtgggaatcccttnaaggaccgggtttttggggaaccaacccctttaacttgggaaaggaatnccttgggccccaaccaccaaangngggtntggganaactntgccttnaaaanccagtttttcaaatntttcctgccttncnttaaanaaaaaaaaggcncctttgtaaccagcctaaaaaaggaccgggcctttttttttttttt

SEQ ID NO: 5296 - DNA, 459 bp, Homo sapiens
  misc_feature 66, 67, 82, 221, 356, 373, 375: n = A,T,C or G
cccttagcgtggtcgcggccgaggtacttttttttttttttttttttttttttggaggcggagttnnactcttgttgcccangctggagtgcaatggtgcaatctcagctcaccgcaacctccacctccctggttcaagtgattctcctgcttcagcctcccgagtaactgggatcacaggcatgcggcaccacgcctgtctacttttgtattttcagtanagacagggtttctccatgttggtcaggctggtctcgaactcccaacttcaggtgattcacccacctcaacttcccaaagtgctgggattacaggcatgagccccccaacacagcctctctcctattttaacactnggttggtcacacattcngntccattcatatcacagtgctaggctgagggactcaaaggtggggacaataggggaatgggagaatgccatgaaaacatgcccat

SEQ ID NO: 5297 - DNA, 407 bp, Homo sapiens
  misc_feature 160: n = A,T,C or G
cccctttcgaggcggccgcccgggcaggtccagctggttcccaggcaaagcctgtctgcaaagactggaataaacctctactcagatgtgcagacattcacatatagctacaagaattaagaataatcagggaaagaagatttcaccaaacagacaaacnaagtggccagtgactgaccctgaagagatctagaagatgaactacctagcaaaaaatttaaaatacctgttttcaagaaagctcagctaacttccagaaaatataaagaaattattcagaaatttatcagagaaatgcaccagagactaaattaataataaaagccctatatcctgcagagaaaaaatccagagaacaaaatgaaaaattaatacaaaatggcaacagcagaattgatcaagtagaa

SEQ ID NO: 5298 - DNA, 417 bp, Homo sapiens
cccttagcgtggtcgcggccgaggtacttgtgtgtatacttgttccatatactcaggcatttaccttggaaatggcctacactgagccaccgcttgtgaataatattgtctctataggtgtgcaagcatttcctggaagctattgaaaacaacaagtatggctggttttgggtatgccctggagggggtgatatttgcatgtatcgtcatgcacttcctcctggatttgtgttgaaaaaagataaaaagaaagaagagaaagaagatgaaatttcattagaagatctaattgagagagaggtaactggtatccttttcctaccataaaaactgaaagcagtatttattgtgaaattctaatacttaccacttgggggcaatagccttttatgaaaaaaaaaaaaaaaaaaaaaaaaa

SEQ ID NO: 5299 - DNA, 434 bp, Homo sapiens
cccttagcgtggtcgcggccgaggtactcccattcatacctacccatccactcccaatttcaatacaaatttatatctctataaatgactaaaatactattgtgttggtttttctttcttttttttcttgctgccacaacaaattaccacttacttaaagaacataagattaaagtgatagattttaaagcataaaataaaaaaaaaattattatcttaccattctgtgggtcagacattcacatgactttggccaaaatttagatggtggtagactgtgttcttttctggaggatctggggatttatttccttgcctttacagcctccagaattctggacttgaatgggagtgacagtgtttttcttctggtaatgagcataggtgtaggctggtgcaattaatagtcactacatgcaagaaagcagaatcaa

SEQ ID NO: 5300 - DNA, 267 bp, Homo sapiens
  misc_feature 70, 154, 215, 223, 225, 226, 252: n = A,T,C or G
ccctttcgagcggccgtccgggcaggtacaaccttttgtcctaagagacagttaacagctgggtttagtnttactgggatttactcgaagacttgtaaaagtaaataatggtgcatttaagaatatttgcctgttttgatttagtgagtttggnaggtggcggtggcctttcaatgacatatggctttgaaattacatcaatatatgcatacaantgtgtctntnnctttagttcatgcatcaaattaattnataaaggacccctgg

SEQ ID NO: 5301 - DNA, 423 bp, Homo sapiens
  misc_feature 390: n = A,T,C or G
ccctttcgagcggccgcccgggcaggtacacggtgagaaactctcgaagaggacactgtttggctgggccaagacccagagcatgctcaatctcctgaataaatcttagtaatgggtggaatatgacggtaatgtttctggctccaggtttgcagacaaattttgttcctccaccttcaattaagttgtcatcaggacccccttgcagttctccactccgactatagagctcccttctctgttctcgcagataggcgctcatactgatggcatgggaggacgattcgaacttgaaaagagaattttttggcctttgaggtttcttcttggcaaaaaaggctgcaaactctcgtccagtgctggcatagcttagttgagctgatggttcanaggccgtacctcggcccgcgaccacgctaaggg

SEQ ID NO: 5302 - DNA, 309 bp, Homo sapiens
  misc_feature 285: n = A,T,C or G
ccctttcgagcggccgcccgggcaggtactgggattacaggcgtgagccaccgtgcccgaccatgtagtgtgtatttttgttttcaataaatctttgcttttgttgcttcattctttctctcatcacgtggagtatactttcattttcagtaaatctctgcttttgttgcttcattctttccttgctctgtttgtgcggttttttttttttttttgaaggttaagaagttgtgttatgatatgtaaaatgattttctgattgctatatttagatgtgaaatacanatccacatgtcacctggttatgct

SEQ ID NO: 5303 - DNA, 405 bp, Homo sapiens
  misc_feature 70, 98, 108, 111, 113, 115, 121, 127, 128, 130, 145, 146,149, 163, 165, 166, 168, 170, 173, 178, 186, 191, 195, 197,198, 201, 208, 211, 231, 249, 259, 263, 265, 266, 273, 285,299, 312, 325, 326, 338, 345, 350, 356, 384, 393, 400: n = A,T,C or G
  misc_feature 403: n = A,T,C or G
ccctttcgagcggctttccggcaggtacaggggcagtcagtggagggcgagtggtttcggaaaaaaaaangaaaaaaaagaaaaaaaagaaaaaaaangatttttttnttntntnaatcgnaatcgnnanggggtgggataattnnaangggggggtaaaaanannangnaanccggncaatcttnaaaanattncnngtntaaaacngtngaccaggtttttaaaaaagngtggggataataaaaaangcgaataaanggcncnntgtttgnattcctacaacnaaaataatcccccnctttttttcattntaaaccctttaannggattccaaacncacctcnaaatntgggcnggaccttaaaaaaaaacaaatttcaggnacccaaatntttttcncangg

SEQ ID NO: 5304 - DNA, 513 bp, Homo sapiens
  misc_feature 5, 18, 41, 51, 62, 66, 73, 74, 107, 161, 205, 218, 225, 230,244, 245, 252, 273, 293, 294, 295, 309, 314, 316, 323, 324,358, 360, 370, 383, 384, 402, 407, 412, 418, 423, 443, 444,452, 472, 487, 494, 501: n = A,T,C or G
tctcnaatccccttacgngccgcgtgacacatctgaataanaaaagagtgncattcccccanactnaactgtnntctgttgtcatgtctttttaagatggaaaaaangcttggcatcaatactctgtggcatattagatactggacatctaacatcagtgngtgccatgccaacaaaacacttcggggagtgctattttaaaaangtttatgtgtgcnaggcagntgtanaatgatttactgcnnaatcaancccctttaggcttacgccatnttctaactatctaaaaatannnctggataacaatangtgtncnaatgtgnntattctgatccataattgttttttaaagaaaaanantgcatatcanaaagagtattaanntttgcgaatttaatgcanattancttcngacttncttancaatacttgattcataggtnnggctccantacatttttgctctttattncaagaattgcaattntgcctcnaaacagncattttttaaaa

SEQ ID NO: 5305 - DNA, 313 bp, Homo sapiens
ccctttcgagcggccgcccgggcaggtacagtcatgaaattttgtggtcttcctgacatgttcttccggcataacgttgccaccttcagttggaaacgtatccttatctaataattaagccctggagaaaaattaatttatatattttattaattacataaggacattgttattagctaagcagagtaagtaaatcgaaataaaactttaaaaatgcctttatggagagaatgactatctctgaaagcttgtttttaatgatgataaaattcatgatcagaatttgtttctgtttactttaattcaggggtca

SEQ ID NO: 5306 - DNA, 310 bp, Homo sapiens
ccctttcgagcggccgcccgggcaggtactcagacactgatattcagtgaaagagcagggggccactcacagaaggagttgtggcagccacgtgccaactaactggccttgccggcatttattcagcacagatttaatgacaaaggcattgagtcaacacgtgtgtggttaattaatctggtcaccctccgctggagagagcagtcctatgaatgatcaaaagccagtcttaggaccacatgtgtaaacaagctctttagataaactcccttacattcctttttacctactctgagctgttaactcaagg

SEQ ID NO: 5307 - DNA, 680 bp, Homo sapiens
  misc_feature 100, 144, 179, 183, 217, 224, 225, 268, 283, 357, 362, 385,414, 433, 441, 448, 461, 469, 535, 552, 559, 560, 561, 574,589, 598, 600, 613, 621, 627, 628, 630, 632, 654, 660, 664,666, 668: n = A,T,C or G
cccttagcgtggtcgcggccgaggtacgcggggcccgtgggctacggtatccggaagctacagattcagtgtgtggtgggggacggcaagtcggaggtancaagatggcccgcccgctgaggaaggctgtagtgtccggggccnaagcggacagggaattggaggagcttctggaaagngctnttgatgatttccaataaagccaaaccctccccanctttccnnttttaccaccacggcccctgatgcttcggggccccaagaagangatcgccaggagacnctgccaaagaagccctctttcgcttcccaaagagaagtttttccaggaaactattccgacagttgaaactgggntttcnccaaaccactgcgggagtttcgnagaaggcaattgaaaggagttggcttgangaagaaaccccacctggtnggaagcangttcccnaaaagctcttcanaaggcttnaggggaaaattgggcaagtggatattgacctccccaacaaagaaatttcactttctttgccctaanaggaaaacacttaagtnggatttnnncccaaaaaaatgnccctggaaccttttnaaaaaactncncaccattttccgnaaagaaanaaactnncncnaaagggccattggaaggggctngggcantggnancnaaagggggattg

SEQ ID NO: 5308 - DNA, 214 bp, Homo sapiens
  misc_feature 15, 40, 43, 44, 59, 63, 67, 68, 71, 79, 83, 88, 93, 101,107, 112, 116, 133, 135, 158, 161, 162, 164, 167, 171, 188: n = A,T,C or G
cccttagcgtggtcncggccgacgtacactgggtgagagncanncgttcctctgcctgnccantcannggnaacacccngaanctgtnttgtnctttgtangagccncaaanagtncacctctatgaaaactnantgacaaaatccctgaacaggaancanncntcnttantctatctttattaagancatgatgatcctcttcaatttgctca

SEQ ID NO: 5309 - DNA, 495 bp, Homo sapiens
  misc_feature 471: n = A,T,C or G
ccctttcgagcggccgcccgggcaggtactttttaatcagtctttgctaaacagcagctattgctattcaatggagacggtggccaccatttcccctgcatcgctctcctacgtaatcaagtccctgatggactctcttcccataaaaatccctgtgtcctaaagtcatggcgtgctctatttcatggcatttgtagaagcacagcagcactgtgcctgtcaggaaaagtgtgtgctaactgcaataagcatgatgactgccatcacggttttgttattctctgtccacctccatggtctctaaatcagacaatctttaatctgaaaaggcagtgtccttattcctccaggaaactggataagaaaccctcctcatctaatgaaagtcaagccctgtcatcttactgattctttcccagaccacaatgaaaggcctgtagggaaggcacatgaagaaatttcaaagttcangttggaagtcataaaaactagcct

SEQ ID NO: 5310 - DNA, 407 bp, Homo sapiens
  misc_feature 211, 387: n = A,T,C or G
gatatctgcagaaattcgccctttcgagcggccgcccgggcaggtaccaacgttgactgtaattctgggaattgatggtggttctgtgaatacaattggacactagcaatggggtaaactgatgggcatgtgaaatgacatctcaaataaagctggttagttaaccccacttccccgtttctctctaaagaaagggaaagaagggaatcanggagcctgtcctcactcttgttctggaaggaaatgccatgggctattacccaacataatgactaacagagccccttttattccgagaatgtcctggtttatatgataaaatttatatcgctaccctatcactatgtgctaccatgcaggtgactttgcccctctgagccttggttncctcatctataaaacaagtt

SEQ ID NO: 5311 - DNA, 328 bp, Homo sapiens
ccctttcgagcggccgcccgggcaggtacccaccagatgtgtctgtcacttccctacatccacctctattgtggttctcatgtttctgcctccctagagaccatttctctgtagagcagcgctttcgaatagaaatacaatgccagacacataagttgttttagattttctagtagtcactttagaaaagttaaaaagaaacaggtgaaattaatgttttatttcacctaaaatgttagcattatccaaaatatcacttcaacatcttatcaaaataaaattattaatgagattggttaccgttccgataaataggtgaactgagagc

SEQ ID NO: 5312 - DNA, 548 bp, Homo sapiens
  misc_feature 336, 466, 506: n = A,T,C or G
cccttagcgtggtcgcggccgaggtacagtggtgtgtgcctgtaattccagctactcaggaagctgaagtggaaggatcgcttgaaccaacgagttcaagattaagcctgagcaaggcaagatcacatttcaaaacaaataaaccaaaaagaaaaaaaaaggaaagaaaaagaaaagtaaaatgctcgccaggtctctactgattagctgttggggcactccttcaaaacttacccagggcctttataaatctaccttaatattcacttctgtttgtgttgaacctaaagacaagccagaggtgaaagctaatggccttctcaggtcttttctgancacacatactgccctgagctgtgcacttggctttctagtttctcatccacaatagcttttcaaaagctcctattcctctacaaaaactcactctacagcttttcctctcaggctttcaatatcttattgnttgccctgtttttttttttcttttttgggtttttttggtnggttttttgcccctggggggcaagccctttggagaaaggggc

SEQ ID NO: 5313 - DNA, 317 bp, Homo sapiens
cccttagcgtggtcgcggccgaggtacgcgggtgctttccttataaggaatcaaacttgacttacggagccaataaagcccttggaaaaactggcctcatattctgtatacacagtccctgtaagtaaagaatatcactttttgacaagtgcagacgccccaggtttatcttgggccctcaaaaggagaggaaatttcacccaactcatgggtatttaatggcataaatccatggctcggctgggttttacgggttttacaaagtcttatctgagattcctgctatggagcaaagttccatcagagcctacttaaaa

SEQ ID NO: 5314 - DNA, 768 bp, Homo sapiens
  misc_feature 226, 254, 281, 321, 328, 338, 376, 381, 397, 399, 422, 426,433, 444, 448, 449, 451, 453, 456, 467, 488, 489, 498, 503,504, 505, 506, 509, 519, 520, 521, 523, 529, 530, 533, 535,536, 545, 546, 552, 564, 570, 571, 572, 578, 581, 582: n = A,T,C or G
  misc_feature 585, 588, 596, 599, 600, 602, 605, 606, 610, 616, 617, 621,625, 626, 628, 630, 631, 632, 635, 636, 639, 646, 654, 655,656, 657, 658, 666, 668, 670, 671, 672, 673, 674, 681, 682,686, 689, 690, 697, 698, 703, 704, 706, 716, 719, 724: n = A,T,C or G
  misc_feature 728, 730, 731, 733, 734, 736, 750, 751, 752, 756: n = A,T,C or G
cccttagccgtggtccgcggccgaggtaccttctttagtagagactgggtttcaccatgttggccaggatggtctctatctcctgaccttgtgatctgcctgcctcagcttcccaaagtgctgagatgacaggtgtgagccatcagacccagcatttttttttaatttaaatttaaattttttttcatttttttgagaggttttttttgttttgttttgttgttgntgttgttgttgtttttgaaacaagtctngctcttgcacccaagctgggagtgcantggcatgatctctgaacctctaccttccaagttcaagcanttcttgngcctaacctnccaagtaactgggactacaaggtgcaccctccccaccnggctnatttttttggtttaananaaacagggtttaacccatgttgnccanggtgggnttaaaactccngaanntnanggnaatccaccccncttggccctcccaaaaggccnnggaataccnggggnnnnccnccacaccccnnntntttttnnttncnnttttaaaannaaaagngggggggggtcnaaattnnnaccccnggnnggnttnaaactccnganntnaannaacntttggnncaancccnntncnnnttnnggntttttanaaaaaaannnnncttttttntntnnnnncccctgnnaaanggnnttccccnnccccnnantggggggccnccnccccngggnanngnngnccaaaaaccttttnnnaaanaaaaaaaaaaac

SEQ ID NO: 5315 - DNA, 312 bp, Homo sapiens
ccctttcgagcggccgcccgggcaggtacgatgcctccatccttctctggaaactgcagttcgacgacaatgggacatacacctgccaggtgaagaacccacctgatgttgatggggtgataggggagatccggctcagcgtcgtgcacactgtacatatgctgttaccagcacaaacgagtcaaattcagccacaatcacccggccttcctgatcatgctcctcctcgcctatgccgtaagaaactttgagtgggcactggcgggaaagcaggcccacgccactgtacctcggccgcgaccacgctaaggg

SEQ ID NO: 5316 - DNA, 281 bp, Homo sapiens
cccttagcgtggtcgcggccgaggtacctacttgaataaaatacttctgggcagtgaacaaggaagcctgcagttgtggaatgtaaaatccaagtaagtattttagttagaaaataatatagctgtcaccttatcctcatctactacttcctaatgtatacttaagtctcatttctccctgcccttgtatatttatttggagggttgtctataaatagcagttggtcccctgtatcagaggagtcaattaacctgggatcaaaaatattcaaggaaaaata

SEQ ID NO: 5317 - DNA, 331 bp, Homo sapiens
  misc_feature 128, 136, 138, 148, 149, 155, 163, 164, 169, 171, 175, 249,272, 313, 321: n = A,T,C or G
cccttagcggccgcccgggcaggtacctaagagaaaaataggctcagttagaaaaggactccctggccaggcgcagtgacttacgcctgtaatcccaaagtgctgggattacaggcttgagcccccgncgcccagncnttcaaaaggnntttttnttttctgnntatgntngaancctttttacaattttaaaaaaaatgatctgtttttgaaggcaaaattgcaaaatcttggaaatttaagaaggtnaaaatgtaaaggagtcaaaactntaaatcaagtatttgggaagtgaaagactggaagctaattnggcatttnaaattcacaa

SEQ ID NO: 5318 - DNA, 511 bp, Homo sapiens
  misc_feature 494, 502: n = A,T,C or G
ggtacacatgaggaaattaagaatgagagaggttgagtatgtcacccaaggtcaaacaactacaatatggagaaacaaagccctgttttgtctaactccaaccctcctaccaactgccttcagaactataaatgaatctgttatttatttatttattttttgtttgaggcaaggtctcactctgttgcccagtctggagtgcagtggcatgatcatggctcatagcagcctcaaactcccgggctcatgtgatcctcccaccttagcctcccaagtaactgggactacaggtgcatgctactacacctggttaagttttaaaataaattttggtagaggtgggggtcttgctttgttgccaaggctggtcttgaactcctgggctaaagcgaattctcccaccttagcctcccaaccagctggggaccacagaacatgtgccaccacacccagtctgattttattttttttaacagctcaaaagaggtaaaaantgaaaaanaaaaaaaaa

SEQ ID NO: 5319 - DNA, 391 bp, Homo sapiens
  misc_feature 353: n = A,T,C or G
cccttagcgtggtcgcggccgaggtactcagcaataaaaaggaatgaataaaaagaatgaaacattgatatatgtggcaacttgaaggaataccggggaattacactgagtgaaaagccaatcctgaaaggttacatactgtatgattccatttatataatattcttgaaatgacaaaatcatagaaaaatggaggacagattagtggttgccaggggttacggatggtggtgtgcagaagacaggggggaggtgggtgtgattataaaagggcaacacgagagatcttgtggtgttgaaactgttcaatatcttataggatacataaacttacctaggtgattacactatanaattataaattatatagaatacatcataccaatatttc

SEQ ID NO: 5320 - DNA, 495 bp, Homo sapiens
  misc_feature 30, 86, 87, 90, 91, 97, 98, 104, 105, 106, 107, 108, 110,111, 120, 121, 122, 123, 138, 142, 145, 158, 159, 160, 161,166, 167, 168, 179, 192, 193, 194, 195, 196, 197, 206, 207,217, 228, 244, 245, 246, 249, 250, 253, 274, 276, 278: n = A,T,C or G
  misc_feature 279, 280, 281, 282, 283, 284, 285, 286, 287, 288, 289, 292,299, 300, 302, 307, 333, 346, 352, 355, 356, 357, 358, 359,365, 375, 381, 414, 424, 425, 426, 429, 444, 447, 449, 458,461, 462, 465, 469, 478, 479, 482: n = A,T,C or G
actttttttttttttttttttttttttttngggttttttttttttttttttttttttttttttttttttttttttttttttttttnnaanncccccnntttttnnnnntnnaaaaaaaannnnggggggggggggggncccnccnaaaaaaaaaaaannnnttttnnnggggggggggnaaaaaaaaaaaannnnnnaaaaaaaanngggggggggnaaaaaaaaagnaccccccccccccccnnngtnnaanacaaaaaaaaaaggggggggnancnnnnnnnnnnnnaanaaaaaanntnttttnttcccccccccccccccggggggggnaaaaaaaaaaaanccaggnttnnnnnaacccnaaaaaaaaanaagctnttctttttaaaaaaaaaaattttttttcccccncccccccaannnccnaaaaaaaaaaaaaanggngnggggggggnaannccnaaanaaaaaaaannaanggggggggggggg

SEQ ID NO: 5321 - DNA, 267 bp, Homo sapiens
  misc_feature 194, 198, 208, 214, 215, 222, 233, 235, 239, 242, 256, 258: n = A,T,C or G
cccttagcggccgcccgggcaggtacagtgtttataaagcctacagtagtatgtagtatgtagtaatgtcctaggccttcacatttacttaccactcactaattcacccagagcaacttctagtcctataagccccattcatggtaagtgccctatacaggtggaccattttttatcttcattttttttttttnaaanggagttttgntttgtnncccaggntggagttaagngntaantgnaacctttgcctccngnattaaaaaa

SEQ ID NO: 5322 - DNA, 392 bp, Homo sapiens
  misc_feature 204, 205, 206, 207, 208, 209, 210, 211, 212, 213, 214, 215,216, 217, 218, 219, 220, 221, 222, 223, 224, 225, 226, 227,228, 229, 230, 231, 232, 233, 234, 235, 236, 237, 238, 239,240, 241, 242, 243, 244, 245, 246, 247, 248, 249, 250: n = A,T,C or G
  misc_feature 251, 252, 253, 254, 255, 256, 257, 258, 259, 260, 261, 262,263, 264, 265, 266, 267, 268, 269, 270, 271, 272, 273, 274,275, 276, 277, 278, 279, 280, 281, 282, 283, 284, 285, 286,287, 288, 289, 290, 291, 292, 294, 295, 296, 298, 305: n = A,T,C or G
  misc_feature 308, 317, 375: n = A,T,C or G
ccctttcgagcggccgcccgggcaggtaccagtcaccactatgcacctccggaactttttcatgatcccacactaatctctgtgccccttaaacaataaattcccattccctcctgccccctgtgacaaaacgtaatctttgttctactttgtctctatgaatctcactagtctaggtacctcggccgcgaccacgctaagggnnnnnnnnnnnnnnnnnnnnnnnnnnnnnnnnnnnnnnnnnnnnnnnnnnnnnnnnnnnnnnnnnnnnnnnnnnnnnnnnnnnnnnnnnannnanggatcanaantgcactganaaaatgatggctcttgttgctgagctgtccatgaaacaagccctaaccattgaactcnaaaaggaagtcagggag

SEQ ID NO: 5323 - DNA, 228 bp, Homo sapiens
  misc_feature 46, 48, 60, 79, 84, 96, 101, 107, 112, 116, 121, 124, 125,126, 128, 136, 153, 154, 156, 160, 169, 171, 184, 186, 188,189, 190, 191, 193, 199, 200, 201, 202, 207, 209, 214, 215: n = A,T,C or G
cccttagcggccgcccgggcaggtactttttttttttttttttttngnaaaaaatttttnaaaaaaaattttttttttnaaaantttggaaaaaanttttnaaaaanttttnaaanttttnaannnanaaaaaaantttttttttttaaaaanncntttnttttttttnanaaaaaaaattttnanannnncntttttnnnnaaaantnccccnnccccctttttttt

SEQ ID NO: 5324 - DNA, 609 bp, Homo sapiens
  misc_feature 6, 9, 19, 20, 21, 25, 28, 30, 32, 34, 35, 36, 39, 41, 49,50, 51, 58, 72, 75, 76, 95, 106, 111, 112, 120, 121, 124,127, 128, 140, 151, 152, 156, 157, 160, 163, 164, 170, 173,174, 181, 182, 184, 186, 193, 194, 195, 202, 203, 205: n = A,T,C or G
  misc_feature 207, 209, 216, 218, 220, 221, 222, 226, 229, 230, 238, 239,241, 243, 245, 246, 247, 248, 249, 250, 251, 252, 253, 256,257, 260, 279, 280, 324, 332, 345, 352, 378, 405, 423, 424,428, 440, 454, 475, 476, 488, 489, 490, 493, 506, 516: n = A,T,C or G
  misc_feature 557: n = A,T,C or G
cccttngcntggccgccgnnnacgnacncngngnnnctnanactagacnnngaatctnttaatggttttctntcnncaactctaaccccttcacngcatcctgganagccnncaattttnnganctnnaataagcttgantgaacatcggnnacanntgntgnnggggcnttnnccctacnntntncttaatnnnaaatcannantntnctgtgananannnaaanttnnctttttgnncncncnnnnnnnnnttnnccngataacgtatctctggaanngtgctctctccatttataataaaactacccatgctatgactacngacatcantggacgggcaggntgcttanaccagtgcctgacatatattttcgtnaccacggtgccgggagtccattctggngggcgcaacattccctcnngggngggtcgtatttncagaaatggatacnttgattcccctgattgctctnnttcacagaactnnnacntttccaacctacncaaagaaaangggccttcccgaaaggaaaagaccacctgaaggaccaccanaatgggtccatggctgctgtgaatggacacaccaacagctttttcacccctg

SEQ ID NO: 5325 - DNA, 495 bp, Homo sapiens
cccttagcgtggtcgcggccgaggtactaaaggcagttatagcattattaagcaggtccagtggcaaagctgaagggggtagcactgaaggactcacagcttctgtgaattgtggcatgacaatgttgtagtggatgcagaaccctggttcagaaggaaaatattcatcagatacaaatcttatcctaatttgatttcctttagaaatctgttttcctggtaccttatataatctaaaccaattaagagtagcttccaggtaacccggtttgaacttcttaacatcatcaatatcatgaaactttgaggcttcaggatcattcgcattgatagcaattaatttccaatctgtttcaccttcatcaataagagccaaaattccaaggatcttcacatgaataacttctccacaagaaagaatctttgagcctatttcgcaaacatcaataggatcattatcttcaaagcagttcgtgctcttatctttttcatggg

SEQ ID NO: 5326 - DNA, 422 bp, Homo sapiens
cccttagcgtggtcgcggccgaggtacactggctgtcctccaacccctgtcaccaccttaaatacatggccaattgttccctgtctatagttccttcggtgggccatccaacaccaaaagagggcaattctaatttacacagagttcttagcctctaggggttaacttaactctataatctcctgcaaaacccttcttaaggttctgtaacctgcattttaatggaataagttttgatgatttgatgactttccttttatttttctttttgaaaattttttttaacacagttcttagtggagtaggcttactttgtgtctgacctatttttctcttgagacaaaacaacattcacactacaagaaggaaaggataaaaggtcactcactcatctaattcacactaaatcaaaatgaacacta

SEQ ID NO: 5327 - DNA, 572 bp, Homo sapiens
  misc_feature 80, 108, 115, 124, 125, 131, 154, 156, 159, 160, 161, 162,166, 167, 168, 169, 171, 176, 181, 189, 200, 204, 205, 209,221, 223, 224, 230, 233, 239, 240, 241, 247, 248, 249, 256,257, 258, 276, 277, 280, 285, 288, 289, 290, 292, 294: n = A,T,C or G
  misc_feature 299, 300, 309, 312, 318, 319, 323, 339, 348, 349, 355, 361,366, 374, 390, 395, 398, 404, 405, 419, 422, 426, 427, 429,431, 439, 440, 443, 444, 447, 449, 457, 466, 469, 470, 471,473, 474, 475, 476, 477, 478, 481, 482, 501, 504, 514: n = A,T,C or G
  misc_feature 522, 532, 539, 542, 545, 550, 552, 558, 562, 563: n = A,T,C or G
cccttagcgtggtcgcggccgaggtacatttgtagaaatccgtagaaataccatatccagcctcaaagcattaatctcanaaaaaaaaaaaaaaaaaaaacccccccnaaaaaanccccccccnngggggnccccgggggggggggaaaagggntnccnnnnaaannnntnaaaanggggntaaaaaanttttttggggncaannaaangttttttttttngnngaaaanggnaaaaannncggggnnnccctttnnngggggggttttttttttnnccnaaaangannncngnttttnnaaaaaaaanccntgaaanntttnggggggggggaaaaantggggcccnngccgtnaagggnttttngggggggnaaaaaaaaaccccccnggggnggntttttnntttcccggaaattnttncccnntnangggggttnnccnnagngnaacccccnaaaaaaaanaannnannnnnntcnncccccggggggggggtttnaangggggaattntccccccngggggggggngtttttnggnggnccccncncccccnaccnnggggggggg

SEQ ID NO: 5328 - DNA, 451 bp, Homo sapiens
  misc_feature 59, 70, 82, 85, 86, 152, 310, 343: n = A,T,C or G
ccctttcgagcggccgcccgggcaggtactctgagctttccagaaagggatatgagggncctggtggtgnctttggccttgntgnnctggaacctttgattgcaggacttgcttaggcaactgaaaccctcccttgcttacaattcactctnggatctttaaggatcacctgtacaagcagttaatcacccaccatagggcatgattaacaaagcaacctttcccttcccccgagtgattttgcgaaacccccttttcccttcagcttgcttagatgttccaaatttagaaagcttaaggcggcctacanaaaaaggaaaaaaggccacaaaagttccctctnactttcagtaaaaataaataaaacagcagcagcaaacaaataaaatgaaataaaagaaacaaatgaaataaatattgtgttgtgcagcattaaaaaaaatcaaaataa

SEQ ID NO: 5329 - DNA, 307 bp, Homo sapiens
  misc_feature 128, 135, 146, 154, 160, 197, 236, 274: n = A,T,C or G
cccttagcgtggtcgcggccgaggtacactcagacagggcatcatttctagcctttatagaatatacatgcttcccaccgtttcagagaataaggcttattttcttcaatctgcacaatctttgcatncttgttntctaaattatntttttttntttcgnttggtcttgggcatttttattccttcctttccacatntgctgtgcttggtcccccgatgtttagactttgattttncttggtttgccttgcttgacatattttcctggcctggngttaatcttcttggacgaatcaaatgagcctta

SEQ ID NO: 5330 - DNA, 652 bp, Homo sapiens
  misc_feature 583: n = A,T,C or G
gatatctgcagaattcgccctttcgagcggccgcccgggcaggtactttatctacttaaagcaaagttttgctttcttgaatgactttttctgtgagatgaatttttgataagaactagggaaaacatgtcttttaggtgtcttgccgatgactatccataggaggaatggctatcccaaaaaaagttccgcaaaaaagtagatgagtttcttttttttaagcactaaagaacaaaatgcatttttcattaatacaggcttctgatgaaccaggaatcctgttttcgtaaagttccaatgttgatgagagtaaattcttaagcatttgtcctagaggtgaaagcagctgaatgtttctgaaccatcaagaggcaaacaaacaggagtttgtttcttgaacctgcttatgcacacagctcttaactcctcatgaggcacacagctcttaactcctgatgaaccaaggatttactcataactttctccttgtcatggaggcttaatagacaacagaataaatgcatttcttgggcctcttataaacttgggaattcttagaaagctgcttctattaccaggctgnaataactgggatagttttttttttctcttaagaaggtctggtattaagcctgagacagccatttttttg

SEQ ID NO: 5331 - DNA, 470 bp, Homo sapiens
  misc_feature 289, 324, 360: n = A,T,C or G
cccttagcgtggtcgcggcccgaggtacgcgggggcgcttgcgcctctttcatcttcccatcatggcccgccgcctgtgcgcctctgctgagtcgtatgtatttccctcctgacattttttttcaagaatgttccaagtcactttaatgggcctcaccaaaaagaaaatgaagaataaaaaagaaatttgccaaactatctttaataaatgccccttcactctgcctgtgacgtattaagtgaccctctgagctagagtcttggaagtcactttctggtgacccctganccccgttgatttcccgtcccgctagggtgctcttnacccaatggcggtttgcttggttattgaagaatttnccggaaacgtgtgggttgggtgggtaaaaggggcaccaactgttgtcaagccctgcattgtggggggtcttgaaggtcttggctcttacaagctttgtaaaaatggaaaa

SEQ ID NO: 5332 - DNA, 231 bp, Homo sapiens
  misc_feature 171: n = A,T,C or G
cccttagcgtggtcgcggccgaggtacccaggggcgtgtatgattaccagagggattcagggaggggccgtgtgtgattaccagagggaatcggtgttacatcctctaggattccctccaggaaacctcctacctacctgttacaggtaaggaccttaggtgtattcttanatgggtggttctcaaaccttcatgtgtgtatgaattactggggagccagtgaaaatacag

SEQ ID NO: 5333 - DNA, 602 bp, Homo sapiens
  misc_feature 207, 224, 240, 242, 258, 264, 329, 330, 336, 349, 351, 364,386, 411, 420, 456, 472, 480, 506, 547, 568, 569, 580, 582: n = A,T,C or G
cccttagcgtggtcgcggcccgaggtacagtgacctaaagttggtaagatgtcataatggaccaagtccatgtgatttcagtatatacaactcaccagacccctccaacccatataacaccccaccccccgttcgcttcctgtatggtgatatcatatgtaacatttactcctgtttctgctgattgtttttttaatgttttggttngtttttaacatcaactntaatcattcctgactntnttttttattacccttngtaaantattaaactttcactttttttaaaaaaaagatttcttcatcttaagaaacatttaacccaaaatnnaacccnttacctattcaantnaaattccttcaantctttctttaatttctttaaancatctttactttcattcctctcccntcttttaanttctcccaattcaaaattattatcaaaaataaaaanatctttttaattaaantcaatctnaaaaagtataacccttttatattttnaatccacacacctttaatctttttaacccttccttaaccanaaaaaacaaaaaccatttttnntaaaaaacccnangttaccaactttacaaaaaa

SEQ ID NO: 5334 - DNA, 470 bp, Homo sapiens
  misc_feature 24, 176, 225, 331, 414, 447, 469: n = A,T,C or G
cccttagcgtggtcgcggcccgangtaccccgggaggaaggaaggaaggaaggaaggaaggaaggaaggaaggaagggcgggcaaagaaagagggcatttttttaaaatattattttaaaagactaactagggaccagcacagtgactgacacctgtaattccagtgcttttagangctgatgcaggagatcacttggaggtcagatattggaaccacctggcancataatgagacccgtatctcttcaaaaaaaaaaaattatttaaagaaatagctgaggatggtggcatgcccctgcagtcccagctactcaggacgctgaggcaaanggattcttttgagtctaccagttttgaggtggacagtgagcctatgatggtgcctgcaacacctccagccagggcaacaaaanaaaggccttgtcttgtaaaaattaaattaaatngatactgcagggggaaaaggtng

SEQ ID NO: 5335 - DNA, 302 bp, Homo sapiens
  misc_feature 51, 52, 54, 107, 116, 117, 124, 125, 141, 142, 143, 145,148, 149, 150, 151, 152, 156, 157, 159, 160, 161, 187, 199,217, 226, 234, 235, 236, 237, 239, 240, 241, 259, 260, 263,270, 274, 288, 291: n = A,T,C or G
cccttaacgtggtcgcggccgaggtactttttttttttttttttttttttnnanttttttttttttttttttttttttttttttttttttttttttttttttttttnaaaaaaaannttttttnnaaaaaaaaaaaaaaannntnttnnnnnaaannannnaaaaaaaaaaaaaaaaaaaaaaaaantttttttttttnaaaaaaaaaaaaaatatnttttttttnttttaaannnngnnnaaaaaaaaaaaaaaaaannttnttttttntttnaataaaaaaataanaanaaaaaaaaaag

SEQ ID NO: 5336 - DNA, 536 bp, Homo sapiens
  misc_feature 265, 271, 386, 501, 509, 511: n = A,T,C or G
cccttagcgtggtcgcggccgaggtactttataacatttaatttaaatatatcacaataattctttctgccctctccagtctattttaaaatccatccagtgaactttttttttactttagttcctgaattttcatttgttttttgaaaatagtttccattcctgaaatgtcctatctattcatccattaggactagcctcttttaaaatctatttatgatagttgcattacaccctttatttgctgactacaactgggttttgnttctgntgactgatttttcttttactatgggtgacattttcctgtttcttcatatgatagtaagttttggttatatacttgacagcatagaaaatagactataagtattttggattcttgnttgggtgaaatggtagagatggaaaaagaaagagatgtttcggattcttttattttccttggaagagtgttgagttttacttcagcaggtgggtaaattactgatgaaaaaccangagtttgngnagcctttttaacagggtgattccgg

SEQ ID NO: 5337 - DNA, 226 bp, Homo sapiens
  misc_feature 68, 111, 120, 140, 219: n = A,T,C or G
ccctttcgagcggccgcccgggcaggtactttttttttttttttttttttttttttttttccgaattnctggggggttggtggtaatgtcccctttgtcatttctgattgngttttttanatctccttttgcaaggtgtnaaatttttttgaagacttttccacacatttattataattgtgaagtctctccagtataaattctctaatgagttattanaaaaact

SEQ ID NO: 5338 - DNA, 646 bp, Homo sapiens
  misc_feature 55, 95, 96, 129, 134, 138, 147, 149, 156, 157, 158, 172,177, 178, 192, 202, 206, 208, 209, 210, 211, 215, 221, 224,229, 230, 233, 234, 237, 238, 239, 241, 245, 247, 251, 255,258, 259, 274, 284, 285, 289, 290, 297, 303, 323, 324: n = A,T,C or G
  misc_feature 330, 336, 338, 344, 349, 361, 362, 367, 391, 394, 395, 402,417, 419, 420, 430, 431, 432, 434, 435, 436, 437, 438, 440,442, 448, 449, 451, 452, 456, 463, 465, 466, 471, 482, 484,491, 493, 496, 501, 506, 521, 534, 541, 553, 559, 560: n = A,T,C or G
  misc_feature 564, 565, 569, 570, 584, 585, 586, 587, 594, 601, 610, 619,626, 631, 634: n = A,T,C or G
cccttagcgtggtcgcggccgaggtacttaatttttttttttttttttttttttnctttttttttttttttttttttttttttttttttttttgnnttttctttttttttttttttttttttttccccnaaacntttnaaaaccttnanggggggnnnggccctaatttttnttaanntttccccaatttanaaagaaaaantttngnnnngggnaccccnccnccccnnttnntgnnnantttnantccntctnggnnaattgggctgggggnggttttttanncccnnaaaaaantttttnccatttttctttttttaaannaccccntcccgngncccttnaaaanataaattttttnncctanaaaaggggttttccttaaaataanggnnagggggnggggtttaaaaaccnannttttttttcnnnannnnngngngccttnnanncccnctccttntnnccggngggaaaaaacncntttttananccnttgtnccctnggggaaatttttaanccccccctttttnaaaaccntttttttttttntaaacnnttanngggnnggggccccaaaaannnnttttggngaaaaanaaaaattcnctttttttntcccaancaaanttnttttttaaaaaa

SEQ ID NO: 5339 - DNA, 508 bp, Homo sapiens
  misc_feature 468, 475: n = A,T,C or G
cccttagcgtggtcgcggccgaggtaccgtattacttttctattgcttctttaccaaataaatacaagctttgcagtttaaaacaacagaaatttaattttttatagttctgagggtcagtaacctaaaactgatcttatgaaataaagttaaatcttggggatatgggtgtggacagggctggtttcttctggggctctgatggtaaaatttgcttccttgccttttctccttctagggagcctgcattccctgcctcctagtggcttcctcccatcactcgaacctctgtttccagcctcaggattcctaatgtgactctgacgtttcatctcccgtttatgaggacgcttctgattgctaagatacatacggtgacactatggaagttaacttgaagattaaaaccctgaaaaatagaaagaatcttctatggtatatcacagagattacaagggcctgaattanaagtggngacattttcatcccttgataatggattaaaaaa

SEQ ID NO: 5340 - DNA, 550 bp, Homo sapiens
  misc_feature 195, 241, 281, 335, 461, 463, 510, 537: n = A,T,C or G
cccttagcgtggtcgcggccgaggtaccatctgacttggcaatgtaagacacacacgttagtgtggggcacaaacgtggaatattaggagagagctggttccagcaccaaatccagagtcactcggggaaggaggtatggtggcaacactttatgcttaatgttcaattctgctccagtagaacatggcactttntttttttttttttttttttttttacacattccaagtttgaaatctntgtgatgcttttgagagggatgtgaagacactattcttanaaaattaagacaatcctctgccttggaaaataacaactcaatctgtttttctanaatgaatggataggcaaatattatttctgtctttaaaatattaaagttattttaaatcatagcatatatggcactttgctcaaggggaggaatggtgtggatataaacattttggagtaaaaaatntngccattattgacaattagttgaagcctgcctcttgttcctgacaaanacattggaatgcaaaaaattcccaggnggaatccccattt

SEQ ID NO: 5341 - DNA, 654 bp, Homo sapiens
  misc_feature 141, 466, 533, 547, 629: n = A,T,C or G
ccctttcgagcggccgcccgggcaggtacgtcccactctgatgcttctacaaagcagtgtcaaacatctgccttgtttcagtttgcagagatttcttcaaacacttcgcagttgggtggtgctgagcctgtaaaacgctgnggaaagtctgcactctttcaactggcagagatgtgcctggcatcagaagggatgaaaatggaagaatcaaagctaataaaagcaaaagaatccgatggtggaagaattaaagaattagagaagggaaaggaagaaaaagaaattaaaatggagaaaacagatgaaactaggttacagaaggaagcagaatttgaaaaatcggctaaggaaaatttaagagattctaaggaattgagaaatttttgaggcattgcaaatagatgacataatggctataaaaatggaagatcccaaagaaattagaaaaggaagagtttagaagaanatcccaaatgttagtcattttcctgatttttcttattctgcccagtagccaagaataataatttagnggatgttcccagtnagaaagggatcattatgtgcccatccctcattggaaatattgatcattggggggatccccgcagccattaaaacaagccccngaaaaagcttaaaaaaaaaaaaaaa

SEQ ID NO: 5342 - DNA, 330 bp, Homo sapiens
  misc_feature 28, 90, 98, 103, 109, 114, 124, 133, 142, 161, 221, 223,272, 282, 321: n = A,T,C or G
gtacaaaaaaaatcatttcaaataactnaggaggatgataatggctggacttttgtaattcacctcaaagactgtgggagagccaactcnaacttaanctgtnataagnctggngcatattggnggcttgtancattgtagngttttttccaaaaggaagngaaatataaaatgtttagattaagaactataaaactacagggtgcctataaaaggtggcntnactccttattgttattatactatccaatttttaaaatgcagtttaaaanataaggcacntgagtctttgttcccgcgtacctgccccgggcggctcgntcgaaaagg

SEQ ID NO: 5343 - DNA, 228 bp, Homo sapiens
  misc_feature 24, 29, 45, 129, 193, 196, 202, 206: n = A,T,C or G
cctaattgtcctattacagccttncattngggaacaactgcatcnctcttctttctacattaaacatgggctgcactttggtgaacaaaaacactcaagtattggaccagtaacttggctccagcttcnactttgtttaccccttggttcagtgcatttctgctccatcacgaggctgacatgtgcaggcagnttngcggtnagtntgtgcgtgcagaaaaggaaaca

SEQ ID NO: 5344 - DNA, 183 bp, Homo sapiens
  misc_feature 49, 57, 68, 93, 108, 116, 125, 136, 145, 150, 157, 168, 174: n = A,T,C or G
cccttagcgtggtcgcggccgaggtacgcggggggtgggtagaggtgcncgcctggnaccttgaacantggacttcccattgcctctggctanggctgatgtgctttngtatgctncacttggantccaacttacnacctacagnaaggnatggaancgtatttgaangactgntgcccaaaa

SEQ ID NO: 5345 - DNA, 274 bp, Homo sapiens
cccttagcgtggtcgcggccgaggtacttaattgcctttcttttgcaaacttttaaaagtcaaatctcctggttcacaggaaaggaaatacaaatcagtcaagggtctgaaaagatgctcaacctcacttgtgggacaagacttagaaattactactgccctgagacaccatttcttcatgcatcagattggcaaaaacttcaaccgtaagatgacactgggtcgatgagtttttgtgaaaacaggtacctgcccgggcggccgctcgaaaggg

SEQ ID NO: 5346 - DNA, 801 bp, Homo sapiens
  misc_feature 432, 500, 562, 624, 657, 668, 682, 709, 715, 718, 728, 729,731, 747, 750, 751, 753, 789: n = A,T,C or G
cccttagcgtggtcgcggcccgaggtacaaagctgacagcactttattttattgctctccattatttggtattcattatattccttcagtcagaaaattatactctctatggcactgttttttatcacaaatatgtatatgtgatattgatatataactatatatattgccatcacacacgaacaataaaataaagtgttctattaacctgatctctttgcccttttgctatgtgaggagtgaatgagtggccttctgatgctctgactcttctctgtatgtcaaactcatccctggcacaagaaattccagtcatgtgaagcaaactgccctttgtcctcaaagaaattgttgaaaaaggaaactttttaaagagattttttgcatattctctgccttgttcttatcaacttgaaatgttggcattttctnaccttgttttgttggctacaataattcaagtattcatgtcaaaattgagaagtgccctaattgaatgnggtttgaatgttatccttgcacaattctttaaattggaaagataaaatgtttacctcactgntggacatacatttcaagctttcaactctaggagaaaaagaaaatcatgttttcctgtttggnaaattttaaactattttcatatacattggattnaaactggcatntcaaattttaatgnatagaattttgcaaaaatttatgcctntattgnaanacctaactgnntntgggagggggtatgtnaanntntttatgccccaaaaaggttttaaatctttctgcctnaaaaaaaaaaaa

SEQ ID NO: 5347 - DNA, 339 bp, Homo sapiens
  misc_feature 7, 9, 10, 16, 18, 20, 22, 65, 167, 178, 218, 232, 244, 253,268, 291, 303, 321: n = A,T,C or G
cccttancnncggccngncngncgggcacattttttttttttttttaatttttagtagagactangtcttgctatgttgcccagttctagtcttgaactcttgagctcaagcagtcctccagccctggcctctgacaatgcttggggattatagggtgttaagccanccacaccccancccttgagtggacattattttcattaccaaaaaatttctnaattttttgggagngcccttaatggnaattttttnagggggggttttttngtttttttcaaaaatgggctttnttataaccctcntttttttaattacctttngggaccaatttttttaaa

SEQ ID NO: 5348 - DNA, 258 bp, Homo sapiens
  misc_feature 125, 155, 236: n = A,T,C or G
cccttagcgtggtcgccggccgaggtactgttaaaacttaactgtatttagaggtcaaatccaaattaaatggtaaggtaacatggctcttggaggatgagataactcattttttgaggggaaanttagtatattttcatagtaaggcaagatanagctaagggagtttgtgtgatcacacttaatgtaacaggacaaaggacaatttaggagtaaatctatcccaaggagctatncccagatcataaatgggcctcc

SEQ ID NO: 5349 - DNA, 637 bp, Homo sapiens
  misc_feature 357, 369, 372, 389, 392, 418, 433, 435, 438, 442, 445, 511,546, 591, 606, 613, 616, 619: n = A,T,C or G
ccctttcgagcggccgcccgggcaggtactctcctgaagtgttcattgaactctaagagagacagcttgtgtatcagtggcagggtttagggttcattttttattcccatattaatcctttaatatttagacaaatttccttctgagtttaaggataaaatgggatgggttctgcctgggcctggccctcatggggacatcaaagggcaatgttgcaaaaaaaaaaaaaaaaatcagaccatcagattgcgtggggggaaccacccccataattaaattacctccacccagtcccacccttgacacctggagattatggggattgcaattcaaggtgagatttgggtggagacatanagccaaagtttnttnttcaaattggaaattcnaangagaaatttggaaaagttcatttganctgaaaatgaaaacncnatntttncanaatcagggagtttgccagcctaatgtatgcttggggggccaaatttaagcccctaagaaccctttntttttaaccaaaaaaagaaagggctcaaatccaangaccctggagtttttcacccttttaaaaaacttgggaaggagaangaggccaatttaaanccccttngtnagncaaaaaaaaaaaaaaaaa

SEQ ID NO: 5350 - DNA, 371 bp, Homo sapiens
  misc_feature 64: n = A,T,C or G
cccttagcgtggtcgcggccgaggtacaggtttgaggaagcgatgaaggaggctcatgctgtanatcaaaagcttgcagagaagcaggaagatgaagccaccctggaaaataaatggcccttccttggggttcctttgacagtcaaggaagctttccagctacaaggaatgcccaattcttctggactcatgaaccgtcgtgatgccgttgccaaaacagatgccactgtggtggcattactgaagggagctggtgccattcctcttggcataaccaactgtagtgagttgtgtatgtggtatgaatccagtaacaagatctatggccgatcaaacaacccatatgatttacagcatattgtaggtggaaa

SEQ ID NO: 5351 - DNA, 403 bp, Homo sapiens
  misc_feature 84, 208, 239, 331, 334, 348, 370, 378, 380, 385, 392: n = A,T,C or G
ccctttcgagcggcccgcccgggcaggtactgggattatataggcatgagccactgagcctggccctgaagcgtttttcttaanttgccctcagtgagataaattagatttggcatctcctgtcctgggccagggatctctctacaagagcccctgcccctcttgttggaggcacaattttaagaataaggaggaggagggagaaganaaaatgtaaaggagggagatcttttccaagnccgaaccatttttgtcacttacattggacccaaaaaaaaaaaaatgggccaaaccttacaaccccttgatgtttgaagaagttccaagttgnaangggaacaaaaaaanttttttgatggtgcccaaaaangggcttgntnttcanaaaagcntaaaatttaaa

SEQ ID NO: 5352 - DNA, 486 bp, Homo sapiens
cccttagcgtggtcgcggccgaggtacagccagtctcactaagcataaatctcagcctctcccttctgtctctgaagtgtctgctttcagtttcagccagaggctccacttccctgcctgtaggttgtaactctttttttgagacagagtctctctcttgttgcccaggctggagtgcagtggtgcaatctcagctcactgcaaacttgacgtcccaggttcaagcgattcttctgcctcagcctcccgagtagctgggattacaggcatgtgccaccacacccagcttatttctgtatttttagtagagacagggtttcaccatgttggtcaggctggtctcaaactcctggcctcaagtgatccgcccgcctcggccttccaaaatgctgggattacaggcgtgagccactgtgcctggcccaggttgtaaccctttataagaaagaaagttctccttttttaaaatttaaagatatcaataat

SEQ ID NO: 5353 - DNA, 494 bp, Homo sapiens
  misc_feature 81, 176, 194, 208, 273, 292, 306, 324, 333, 346, 370, 375,387, 393, 412, 414, 415, 419, 445, 474, 477: n = A,T,C or G
tgtgatggatatctgcttaattcgccctttcgagcgttcgcccgggcttttacagagaagcacctattgacaaaaaggggnttttcaattacatcgagttcacacgcatcctgaaacatggagccaagacaaagatgactgaaagaactttagctaaaatcttccagttacattgncttactctcttttacttntcagacacttaccncaccctcatagaacctgttgcatgcaacttagtttcacagctttgcctcttctttttgatgtatntattccagacctttttggnacttagcacttgtntaatcagactggaaaatnggggatganggtgtaaaaatgnattggaaaaagaacgcggataaanatcancaaatgttgaangccccnaaaaaaaaagattcgattncnnggtnttgctgggattttttacatttttatntaataaaaatggttggttttggggataanccnaatttacaagggttttg

SEQ ID NO: 5354 - DNA, 501 bp, Homo sapiens
cccttagcgtggtcgcggcccgaggtacttctatatataaatttggacgaatagaagtaaatatgtttattggtgaaaaagaattccagaaactaatggcagatcctgaaatccagacttgtatcatgtattaagtgttatctggcaattagcttgtgagattaaggttctgcacatggagccttggtcatcatttgatatatacacccggaaagggccgctggaaaacccaaagcgtagggaattattagaccaattcaacaaaagctgtatcttattcaaatgattcctcgtcaaaatttatttaccaagaacttaacacctatgaactataatatattttttcacttgttaaagcactgttttgggaggcgcagcgccactgtaatagacccttacgttcattgactccacttgatgcgagagatatattgatgcaaaataggaaaacaggagggatgagaaagtagttaacatgcaccctcaagacttcaaaacact

SEQ ID NO: 5355 - DNA, 355 bp, Homo sapiens
  misc_feature 96, 117, 118, 130, 150, 166, 208, 210, 234, 279, 280, 325,345: n = A,T,C or G
ccctttcgagcggccgcccgggcaggtacatgagcaggttggtgatcccatttttaatgtcttcattacacatgtggatccatttctgcagcgtgnctttcaggtattcctgaactnnattgggaatgtncaaagggtttccggaagtgnttggcttggaacctcngacgatgggatgctggcaggtgttttaaaccagctgcagagntntcatctcttcctgcaggacaccantgccctttccggcaggatgctggcctgtgatggtctccacagtannagaaagaagcaagccacattggcagggctggatctggcaggcaantcttctggcaaaagtgttanaaaaaggggc

SEQ ID NO: 5356 - DNA, 292 bp, Homo sapiens
cccttagcgtggtcgcggccgaggtacacaaccacattactggcctggggccaagagaaaatgcactgactgatgtgcggacatggtaacaccactgtctaagatgcagataccttgacgtgtctcaggaaatggcatcctttgggagtcccacaaggcagcctacagaaaagcacttcttttgaaataaaaaaaagaggtacctcatctacgttcacaattttcctgacacatggtctggatgacagttcatccctctctgtggccaaggtataaagctaaacatcttggt

SEQ ID NO: 5357 - DNA, 167 bp, Homo sapiens
cgccagtgtgatgggatatctgcagaattcgccctttcgagcggccgcccgggcaggtactaaatggtatccttagattaaaattttgtgcttgataacagctgttttttctacattagaaataagatgccacacaaggaactacattccagatttaaagaaatgaa

SEQ ID NO: 5358 - DNA, 265 bp, Homo sapiens
  misc_feature 114, 244: n = A,T,C or G
ccctttcgagcggccgcccgggcaggtacagtggtgggcagagactggcagtgaattactctgtgcttccctaacgctctgctttatgggttacgttatcttcctttgaaatgnccccacttgtcagccctgccagctgacataggagctgagatagaggtaagattgcgtcatgagttctttgccaatgcggccaaaacattgtggacagtcaaagatctcctcccttggaacatagtacctnggccgcgaccacgctaagggg

SEQ ID NO: 5359 - DNA, 330 bp, Homo sapiens
  misc_feature 50, 51, 68, 69, 74, 84, 85, 94, 95, 97, 101, 104, 105, 120,133, 136, 139, 149, 161, 167, 173, 188, 198, 216, 220, 223,256, 257, 267, 290, 295, 328: n = A,T,C or G
gatatctgcagaaattcgccctttcgagcggccgcccgggcaggtacttnnttttttttttttttttnntttcngggtttcctnncaaaggttnncntttnccnnaccaggtttaaaagngttaaaaaaaaanttnaantttttggggnaccaaggaaagnatttantaaacnttttttccccaatcntttaaccaancctttttttttttttttncccncantttaaccaataaatttccaaaaaaaatgaaagnnttcacttttnatttaaaaaaaaaaaaaaaaaantgccnaaaaaaaatttttttaaaatttttttttttttnaa

SEQ ID NO: 5360 - DNA, 383 bp, Homo sapiens
  misc_feature 155, 157, 158, 163, 178, 306: n = A,T,C or G
cccttagcgtggtcgcggccgaggtacaaggcatgatgagtccttttgcttttaggcttttgacttctggttttagactttctctagcttctgttgttagacaacattgtgcaagcttggtttttataaagtttgcatggattaaactgaacctnanngaaanttggcccttcccccnaaaattctaagcacaaattttttagggcccacaagggagtcaaagcacctcaagggagatcttcagtttgaaactttggtgtagacacaagggatacctgatggaatcaaatattcaaattagctgtnacctacttaagaaaagagaggagaccttgggggatttcgaggaagggttcgtaaggggagattttagcttgagaaaa

SEQ ID NO: 5361 - DNA, 496 bp, Homo sapiens
ccctttcgagcggccgcccgggcaggtacaacctgaacttcttttaaccaaactaaacagtctattcttgcccaaattcaacaaaaggcgaaatccacccttgcaatgagtcaaaagcttttgtatcctacctgatatgcctggaacagcgtatacggggaacctgtcatactggtagctggactccttatggccccccctttgtttgggggccttaaatggcttccccaatgacactctggggtttctcccaccagacagttgtcagcacatattccaaatcaataacagtgcccccagtgaaacacagcacctttgttacttaaattacacattacagcaatacgattgtagtagaactcttccccttccctggggggccctctgtgtatgcggatcctatgggtggtgatacttgcccccgaactgaacagggagatgcacttgggggtggccattaattccattcactatctgggataatatttccctcccc

SEQ ID NO: 5362 - DNA, 292 bp, Homo sapiens
ccctttcgagcggccgcccgggcaggtacttggtgaagcccttcaggcagaccttctcgccgatgagggagaggaactcctcaaaggcggggccggcctcctcattgttgtactggcatctgcttggtttctggggaggcctccggaagcttatagtcatgacagaaggtgaagggggagcaggcacatcacatgacaaaagcaggaacaagacccagagcaagaagtcacttatcaccaaggggatggcccaggccattcatgagggatccacctttgtgctccaaacacc

SEQ ID NO: 5363 - DNA, 314 bp, Homo sapiens
  misc_feature 172, 295: n = A,T,C or G
ccctttcgagcggccgcccgggcaggtacctttaatgtcctgagttatgctgtggtgtggaaactatagctgttacaaagagtaaatgatctgtgagtccaggatttctgcttaaatcctctaggtgacgcacttgaaatttcatgttttttctcttaaaatataatttttncctttatgtaagcttgaaattcatttcaaacatcagccttcaatctagcaaaggtctcaagtcaaaaagagatgtctctccaattaaggttattatattctacttggaaccccgcgtacctcngccgcgaccacgctaaggg

SEQ ID NO: 5364 - DNA, 589 bp, Homo sapiens
  misc_feature 8, 72, 81, 126, 164, 242, 248, 270, 325, 345, 352, 407, 427,435, 446, 527, 540, 541, 543, 550, 563, 587: n = A,T,C or G
gatatctngcagaattcgcccttagcgtggtcgcggccgaggtactagataaattagtggttacactgtgtnaaataattncaccactaagagatccagaagcaatgtagcaatcattccaattgnatgtgtacacaagttacttgatctttatgatccttaanagatcgatgaactctttttgattttaaatcccaaatattaacagtgttatttaagccctccccttaccaaatacatanatgtanaatttaaattgacacatgtctncttttacccttcaacaaacttctaaaaattggaacaagtttacattttccacctnaaaacaaactattttattcnccccctnaaaaaaatctttttacttaaaaaaatttattatttactacttccaaccatatttnaactttattcccattttaantaatattnttttagatttnaaatttattccacccaaatatcattaaaataaaaccatccccattatttttaatatcatctccttaattaaacaaaatctnaaaattttccctnnantactacnccctcaacccttntaaaaaaccttaaccatttaaaanaa

SEQ ID NO: 5365 - DNA, 507 bp, Homo sapiens
  misc_feature 8, 28, 326, 391, 418, 482: n = A,T,C or G
ccctttcnagcggccgcccgggcaggtncagagaatgagatgatgagtcagattcagcttttttgagttggaggtgactgcatacatccagatggaaatctcaagaggcagttggaaagctaggcccatggccaaggatgaagttcacatctacaactggacattgggggctttgaaatccaaatgcaggaatagaagaggagcatgagttggcttaagataaattaaagctgggaataggcctgtgtggccaggcagcccacttttgcagaaattgtaaaactgttagaaatgcagggtcaaacttcttggaagacgtatctacngctcctgcttccacctttttttcctccttccattggtggaccacatctgttcactcagaaatccncggggactgctactcattaaattcaanggactcattaagtctttcaagtttaccattattccttttccgaagccagttgacacttgttaanccttttccacttctcttctttcctt

SEQ ID NO: 5366 - DNA, 442 bp, Homo sapiens
  misc_feature 114, 236, 351, 409: n = A,T,C or G
cccttagcgtggtcgcggccgaggtacagtatgacttccatctgaacttgaaaagtattaaaatgggtcaatattcacattcttttagatctcaggatgggaaaatgggtttgntcaaatggatatggtaaatcttacccaattaaggaaggctaattttagagttcttctaatttgcttgtgtcaactcttaacttgtaaaactgctgttaactcggtttaaatttttaaattantataatagaaagaacactaaaatacttactggtaactgcttacagccatttatctgatcctgtggattacagaatgcattccctcttctgctgtagcttatcattgctttgtttngtagctctgcatattttgcccaccttgtcttccctgtaaagtttaaaacgtttccaangaaaagcttcaggggctgatagtttcttaacaa

SEQ ID NO: 5367 - DNA, 292 bp, Homo sapiens
  misc_feature 77, 95, 115, 148, 163, 170, 190, 193, 200, 219, 223, 248,252, 255, 266, 290: n = A,T,C or G
ccctttcgagcggccgcccgggcaggtacgcgcggaggcggaggcttgggtgcgttcaagattcaacttgcacccgnaacccaccgtcatggccnaggaaggcattgcttgctgngaggtgtaattgggacgttaataccttggcttnacaaagaagggtttntgaaaanaacttgccccttcaatcccnacngaatggncccctaaggccaacggttngganattttccgtccggaaaggccttgcncaanaangcccttttaanaaccaaaggccggccccaaaaggncc

SEQ ID NO: 5368 - DNA, 385 bp, Homo sapiens
  misc_feature 148, 149, 160, 161, 162, 163, 173, 174, 175, 176, 177, 178,179, 181, 192, 193, 210, 213, 214, 215, 216, 218, 219, 234,238, 239, 240, 241, 242, 245, 247, 254, 256, 261, 262, 264,265, 267, 268, 272, 273, 274, 275, 276, 277, 278, 279: n = A,T,C or G
  misc_feature 280, 281, 282, 283, 284, 285, 288, 289, 301, 303, 304, 305,306, 307, 309, 310, 311, 312, 313, 314, 315, 316, 317, 318,319, 320, 321, 322, 326, 328, 329, 341, 354, 357, 358, 361,362, 363, 367, 369, 371, 372, 373, 374, 375, 377, 382: n = A,T,C or G
  misc_feature 384: n = A,T,C or G
ccctttcgagcggccgcccgggcaggtacttttttttttttttttttttttttttttttttttttttttttttttttttttttttttttttttttttttttttttttttttttttttttttttttttttttttttttttttttaatannaaaaaaaaaannnntttttttttnnnnnnngnaacaaaaaaannaaaaaaaaaaaaaaaanagnnnntnnttaaaaaaaaaaaanaaannnnnttntnttttttnanaaaanntnnannaaannnnnnnnnnnnnnttnnaaaaaaaaaaanannnnntnnnnnnnnnnnnnnggtnannatttttttattnaataaaaaaaaanatnnttnnnaacnancnnnnnanaattntnt

SEQ ID NO: 5369 - DNA, 234 bp, Homo sapiens
ccctttcgagcggccgcccgggcaggtacaactttatctcttatttgacttcattatttggctttcaaattaacaacatgaaaactatacagaaattagtctgtgccctataagacagagatttagataatttgttcaaaacatgagatgatattcagatattctctcaaaggcaggactccaacaccgcaggtgggaaaccaacaaaagggaaagaaaaccagaaagggaggg

SEQ ID NO: 5370 - DNA, 726 bp, Homo sapiens
  misc_feature 258, 266, 292, 296, 303, 331, 332, 403, 404, 418, 421, 422,433, 437, 470, 473, 495, 496, 503, 512, 532, 534, 535, 557,596, 605, 610, 630, 631, 641, 642, 645, 682, 693, 699, 709: n = A,T,C or G
cccttcgagcggccgcccgggcaggtacttttttttttttttttttttttttgaaaccgagtcttgctctgtcgcccaggctggagtgcagtggcgcaatctcggctcactgcaagctccgcctccccggttcaggccattctcctgcctcaacctcccaagtagctgggactacaggcgcccgccaccacacctggctaattttttgtgtttttaataaaaacaaggttttacccgtgttaaccaaaaataatctcnatctcctnacctttgtaaatcttcccaccttcancctnccaaaangcttaaattccaagctttaaaccacccnnacccaccccaaaacacctaaaaatttcttatcaccttttcattaaaaaattaaagccccacccccaaaatnnattttttttttggncannaaaaacttttncccnaaaaggatcaaaaataaaaattcaaaccttttnttnttacaaatttaccaaggttttnncccaaanttaaaaacntttccttttttttaaaaaancnncccttttaaaaaaaattttaanccccaaccccccaaaattttaaaaaaaatttttccattnccccttttnccccnaaaaatttttaaaaaaatcnnttttaaaccnncanttattttttaaaaaaaaccctttttcccaaatttttnccccaattttnaattgnttttttcaantaaaaaatttttccccc

SEQ ID NO: 5371 - DNA, 244 bp, Homo sapiens
cccttagcgtggtcgcggccgaggtaccacactgatgtgcctgcatgttgcattatgaatatttttatttgataaagaacaaatggttaagaaacccagtggtagggctctcatgttatataaagctaaaaacaaagaaataagaaacaatgaagaatgaaaaaagagacaagcaggggttgtcacattttctcagtgtagacagcgtctccttctgcccctgcccgggcggccgctcgaaggg

SEQ ID NO: 5372 - DNA, 382 bp, Homo sapiens
  misc_feature 71: n = A,T,C or G
cccttagcgtggtcgcggccgaggtactaaacccaaaccagaagaagaagtgaaacctgtgaaagaaccanacatcaaacctcaaaaggacactgggtgctacatctcctaaaatacaacttgcacttagaatttctctagcagtaaataagataaaccacagaatttcagttcttatttctcaaaatgatttctctgaagcttgtagaataactattatattcagagggttatctgccttcagcttacttgttcttaatttttaatacagcggagatgtttcttgctttgttttcagactctcctttttaatcaggacaacatttgaaagattttattgtgcctctaaagggtatatttgggggttgggtctttttgttaa

SEQ ID NO: 5373 - DNA, 394 bp, Homo sapiens
  misc_feature 394: n = A,T,C or G
cccttagcgtggtcgcggccgaggtacatttgtgcaaagacagatttgacttccaaacaagacagacattcattatagttgtcttacttcacaataagctactaaaaacagtcttctggaataagattgtattagtgctcactaaacatgcatttcatttaaacaaggcaaaacacttaatttggtctgcattacccaatatgttatatacagccgtctttttattttatcacaataggcaacaagatgggtctggttttggaatatgttaccatttgtgtttaatttccaaagacacgcatattagctcaactagtgtaaacctgtgaaaaaatagctgagccatctttttcctctcctctgttaatttatcttgaaatgttcacagctttan

SEQ ID NO: 5374 - DNA, 477 bp, Homo sapiens
  misc_feature 150, 169, 180, 199, 200, 296, 312, 316, 318, 384, 386, 399,418, 419, 453, 467: n = A,T,C or G
ccctttcgagcggccgcccgggcaggtacctctgactggcacttctggcttgctgttgtccttggagaagtctgggcctgggacagaggagggatgtaatctgaacactcctttgtcacaggtcaccagggtgtgcttgaggggaccgtngacataaacggaatttcanaaggccagggnaaagaactgcaagaagtannaaagggtggattgtcccacaaagcttccccgacaaatgggatcaacttggggaagctatccatcttgtgcttttctggaaaccagtttcaaattgntaagagaaaagccaantcangnaatgagtttcttccatttccaggactaaccatggccagagcaaagcatggatccttctgaattgcnanaagttggttgcanggccatacagtgaagttannttgcttggtaaaggacttgccaaaatgtttgaanaatggggctcaaanttttggggca

SEQ ID NO: 5375 - DNA, 544 bp, Homo sapiens
cccttagcgtggtcgcggccgaggtacagcaagctatgaactctctcaaggagattggatttattaactactatggaatgcaaagatttggaaccacagctgtccctacgtatcaggttggaagagctatactacaaaattcctggacagaagtcatggatttaatattgaaaccccgctctggagctgaaaagggctacttggttaaatgcagagaagaatgggcaaagaccaaagacccaactgctgccctcagaaaactacctgtcaaaaggtgtgtggaagggcagctgcttcgaggactttcaaaatatggaatgaagaatatagtctctgcatttggcataatacccagaaataatcgcttaatgtatattcatagctaccaaagctatgtgtggaataacatggtaagcaagaggatagaagactatggactaaaacctgttccaggggacctcgttctcaaagggagccacagccacctatattgagggaagatgatgttaataattactctatccatgatgtggtaatgcccttt

SEQ ID NO: 5376 - DNA, 263 bp, Homo sapiens
  misc_feature 27, 49, 84, 86, 95, 99, 120, 125, 129, 165, 188, 191, 196,208, 214, 244, 250, 253: n = A,T,C or G
ccctttcgagcggccgcccgggcaggnactttttttttttttttttttnctttttttttttttttttttttttttttttttaancnggaaacttntttnttaaccaaatttttttgtagngaaangccntttcccttttaaaaaatgaatggaaataaacaatanagtttttaaggaaaaatatagtnttngctgngaaaattttccnggtaanatgtaaaaattaatttacttttaacttcanatgctntcnttttttaccc

SEQ ID NO: 5377 - DNA, 272 bp, Homo sapiens
  misc_feature 51, 104, 121, 122, 133, 137, 138, 139, 140, 144, 147, 148,151, 171, 172, 174, 175, 176, 177, 179, 181, 184, 189, 190,191, 200, 210, 214, 220, 222, 223, 225, 226, 229, 230, 235,245, 253, 259, 261: n = A,T,C or G
cccttagcgtggtcgcggccgaggtactttttttttttttttttttttttngggtttttttttttttttttttttttttttttttttttttttttttttttttnttttttttttttttttnnccccccccccncccnnnntttnaannacnaaaaaaaaaaaaaaaaaaanncnnnnananttntacannnaaaaaaaangggggggggngggngggggncnncnnaannccccncccccccccngggggggngggggnanaaaaaaacccc

SEQ ID NO: 5378 - DNA, 558 bp, Homo sapiens
cccttagcgtggtcgcggccgaggtacatctcctcgatcatctcgcggagggccaggaagtagggcccgttttcatttggggctcggcgccagtatagggagcccctcggacatcctcaccccgtgtgtagccccagcccacaaggctctccaccatggtgtggaaataggaacccacgctgcttttgctggggtccaggaactccagtgagaaggtcttcccaaagccagggacacgtacattaagttgctcaaaagtaggtagataatgtatttgggttataaaataaagatgtaattttactatttggaaagatcacttccctattaagaaaactatttattgcctatagtgataaaatttacataagttattattgtctattggaatagatcagcagaatatagaaaatatgtggtcctagatatcaaagaactttcactttaaatataggcacacaaacatatttttgagctacatgaattaaaacatttcatacctcttctttattcctatctggttagttaaatgtggatgttggctaaaatccccattag

SEQ ID NO: 5379 - DNA, 752 bp, Homo sapiens
  misc_feature 138, 223, 233, 388, 405, 418, 452, 454, 456, 458, 470, 479,503, 513, 516, 535, 547, 562, 563, 565, 572, 587, 593, 603,616, 617, 632, 648, 651, 680, 687, 692, 694, 696, 699, 730,733, 736, 739: n = A,T,C or G
ccctttcgagcggccgcccgggcaggtactttttttttttttttttttttttttggggacggaatcttgctctgtcacccaggctggagtgcaatggtgcggctcagctgactgtaacctccgcctcctgggttcganattctcctgcctcagcctcccaagtagctgggactacaggcacccaccaccacacctggctaatttttttgtatttttagtaaanacggggtttnactatgttggccaggctggtctcgaactcctgacctcgtgatccacccaccttggcctcccaatcttatttgctttacaagtcctgcttaaggggttaccttccctgaccactgctgcctccctcccaagcatttgccagggactgtcattgccnaagattattttttctgntttgttttttttngtcgtttttgttttttttgagacagcgtcttaantntntncccaaaggctgnaagtgcaantggccccaaaaaaaagcttggttncaaacctttnaantcctgggcttaaagccaanccttttaacctnaagccaacttggganntnccaggcncattgccaccccccntttggnctttttaaanttattttttgggnnaacaaaaataaaaanttagggccttaggaanaancttgggttaaaaaattcacaaaagggganttaagtnttccnantnaanacaaaatgggaaacatttagtttatttaatnagnatnganaaaaagggaaaaa

SEQ ID NO: 5380 - DNA, 610 bp, Homo sapiens
  misc_feature 50, 99, 103, 104, 105, 106, 107, 108, 112, 114, 120, 121,122, 127, 128, 131, 132, 133, 134, 150, 151, 152, 153, 154,155, 156, 157, 158, 159, 160, 161, 162, 163, 183, 184, 186,188, 189, 190, 192, 193, 195, 196, 197, 209, 221, 223: n = A,T,C or G
  misc_feature 224, 225, 238, 245, 248, 255, 257, 258, 260, 261, 269, 276,277, 278, 279, 280, 289, 292, 293, 302, 308, 322, 330, 335,343, 346, 348, 349, 350, 353, 365, 366, 367, 371, 377, 384,385, 398, 408, 422, 423, 440, 452, 453, 454, 455, 456: n = A,T,C or G
  misc_feature 457, 458, 459, 461, 473, 474, 475, 476, 478, 480, 487, 494,497, 512, 521, 527, 540, 543, 544, 547, 549, 550, 554, 568,569, 584, 586, 587, 589, 591, 595, 609: n = A,T,C or G
cccttagcgtggtcgcggccgaggtacttttttttttttttttttttttnggttttttttttttttttttttttttttttttttttttttttttttttngggnnnnnnaaanantttttnnnaaaannttnnnnaaaaaaaaaaaaaaannnnnnnnnnnnnnaaaaaaaaaaaaaaaaaaanngntnnngnnannncccccccccccnaaaaaaaaaaangnnntttcccccccccnttttttnaanccccccntnnannaaaaaaanttttttnnnnncctttttgnggnnaaaaaaaangggggntttttttttttgcntttttccnggacncccccccnaanannnttncccccccccccnnngganaaaacnccccccnnggggggggggggntaaaaaaggnggggggggcccccnnaaaaaaaaaaaaggggnttttttcccccnnnnnnnngngaaaaaaaaaannnngngngcccccnccccccnggnggggggggggggggnggggggggntttttnccccggggggggnctnnaangnngggngaaattcccccccnngggggggggggattntnnananaccncccccccccccccnc

SEQ ID NO: 5381 - DNA, 102 bp, Homo sapiens
  misc_feature 23: n = A,T,C or G
cccttagcgtggtcgcggccgangtacgcgggtagcatattttcctgcaatgaaagcgtttgtgaacttacctacagaaaatgaattaacattcaatgcaga

SEQ ID NO: 5382 - DNA, 658 bp, Homo sapiens
  misc_feature 182, 209, 250, 314, 338, 464, 485, 523, 572, 582, 593, 633,640, 650: n = A,T,C or G
ccctttcgagcggcccgcccgggcaggtacgcgggggcacagcctgcggcgcagcggaggcggaccgcagtcgagtctgcagagtgttggaatcgtcgcactaaagtcccctgcagcgtgaccatgtcgagaccccggaagaggctggctgggacttctggttcaagacaagggactatcangaaaacgcaccaaaactgagaactcangtgaggcattagctaaagtggaggactccaaccctcataanacttcagccactaaaaactgtttgaagaatctaaacagccactggctgatgaagtcagaaccanaaagccgcctagagaaaggtgtanatgtgaagttcaacattgaggatctcaaagcacagcccaaacagacaacatgctgggatggtgttcgtaactaccaagctcggaactttcttaagagccatgaaactgggaaaaaaagccttcttntaccatagcaactgcaaaaanccaggcattcgaaggacttaatgaagatccgggaaaanagcttaccccagaccccacccaagttttgagaaaaacaaatccccattntgaccccatnttagcaaagangacaacccctaaatggtccaatgaaaaattttgatttttnttttganccttggaggnaaaaggaa

SEQ ID NO: 5383 - DNA, 485 bp, Homo sapiens
  misc_feature 433: n = A,T,C or G
cccttagcggccgcccgggcaggtaccagtctcgtaagtttcttactaccctaatggaaaagttcatatatggtgatggtgaatatttggccttaaaccaccaaacttgcataaataaatagaaaattattctaggttgggcatggtggttcatgcctgtaatcccagcactttgggaggctgaggtgggtggatcacatgaggccaggagttcaagaccagcctggccaacatggtgaaaccccatcggcactaaaaatacaaaaattaacaggatgtggtggcggcacctgtaatcccagatactctggaggctgaggcaggagcatcgcttgaaccgggagttgaggttgcactactgcactccagcctgggtgagagagcaacattctgtctcaaaaaaaaaaaaaattaaaaattaaaaaaatagaanatagtcttctaaaatagggtcgtctattgtctgtatttaccaaatgtttggg

SEQ ID NO: 5384 - DNA, 586 bp, Homo sapiens
cccttcgagcggccgcccgggcaggtacagaaaagggaacatctccgatgggtgttaaggtaggagtttccatgcagccctttatgtctgagaaatagtctcctctgccattggggtccctgcggaatcttctacaggaattgcagctcttcacgtcatgctaggttaccagcatgggcttcccagagcacttcactctgtttctaactccactgacttttctgacttgtttcttgagggacttggaaaaggggaaggtattattcatccattttttttctattgtttctcctctggggggaaatggtgttttgtttttgtttgagttttgtgttttagttttttggttttggttttgttttgtttttttgtcattcagattcactaaatttggggatggttttattaaagtatattaacttctttttaaccaaagctttctgaatatgaccagcctcaggtgctagcgcattaaagagcaactaaacctaattccagtgtcgatttgtgaaataataaaagctaattgaatttctctaagggtgagagagaacataatgatgaacttaaaaaagaaattcctttt

SEQ ID NO: 5385 - DNA, 280 bp, Homo sapiens
  misc_feature 159, 241: n = A,T,C or G
cccttagcgtggtcgcggccgaggtaccttgtgaccatgtcttccaagaagaatagaaagcggttgaaccaaagcgcggaaaatggttcgtccttgccctctgctgcttcctcttgtgcggaggcacgggctccttctgctggatcaaacttcgcggcnacctccgggactctgacggtgaccaacttattagaaaaggtagatgacaaaattcctaaaacattccagaattcccttattnatcttggactcaacactatgaagtctgcaaatatatgta

SEQ ID NO: 5386 - DNA, 587 bp, Homo sapiens
  misc_feature 38, 68, 93, 104, 106, 132, 157, 205, 238, 240, 257, 286,288, 293, 300, 312, 315, 316, 341, 390, 407, 423, 455, 460,463, 484, 492, 495, 496, 507, 517, 522, 525, 550, 562, 571: n = A,T,C or G
cccttcgagcggccgcccgggcaggtcttttagtaacnacccaatctaaagagccttggaggcttgtnaaaaaaacatccacaaaaattcttnatttctatatnanagtaaaattaaaatacttctttaaanaaaaaaaaaaactaaatcacctcancattaataaacaacatttttcttttaaacaataactcataatcttatnactcactttctttactaattcaaaattaacaananaagaactaaactaattnttcatacccaaaaaccccaaaatattttnancaaancttcaantcccttcaactnatnnatattctaaataaattcaagcaaanaaaaaactttcttcaaacttctttattcccatttccttcaccattctantaaaaaaaaaaatttcnattttaaccacctttnttttttaatcaaactttttaaacctttcatancaaanccnaaagaaaaatcaccaaaactntccaattnaanncccataaattnatctttaaanaaaanaantaattcttccttccctttacaaaantcaaatttaaantaattactntccttaaacccttttt

SEQ ID NO: 5387 - DNA, 410 bp, Homo sapiens
  misc_feature 243, 308, 316, 336, 366: n = A,T,C or G
cccttagcgtggtcgcggccgaggtacagaactcagaggaaaaaagaaattaaaattttagctttctggagagcagcccctctctggcaccatcaaacacttttgtttcccttcaacttggaaactctttaaacatcaagggggttgtgaagggtttggccattcttttatcttgggtccatgtgagtgacagaaatggtgccggcctgggaaaagatctccctccttacatttctttctccntctcctcctattctaaactgtgcctccacaaagggcaagggctcttggagaaagatcctggccangacagganatgccaaatctaattatctnactgagggccttttgagaaaaacccttctnggccagctcaatggctcatgcctatataatccagtacctgcccg

SEQ ID NO: 5388 - DNA, 604 bp, Homo sapiens
cccttagcgtggtcgcggccgaggtaccggaagcagcgaatggaagagatgcggcagcagcttcacaaggggccccaattcaagcaggtttttgagatctccagtggagaagggtttttagacatgattgataaagaacagaaaagcattgtcatcatggttcatatttatgaggatggcattccagggaccgaagccatgaatggttgcatgatctgccttgccgcagagtacaaaaataacttatatacctttgtgtgagaaagatatttcataattttttaatggtaaaaataaatgaatataggttgtgcaaacagcataagtgtaatttttagcctatcaaggaatgctgatatgatttgttgaaaaacttggcttaaataaattttctagtgaaatttgaaaatcatggaattatttggcaatagaagcagagtgtttcaagtctaaatggatgggagaaagccaaaactagtgaaattatgcttgctggggaataggaaaatgagaaccaggtggcaaatgaccagtcactcaccagtttcttggtacagtcagaatatagtcagaaaatggggccacgagtgacttctatttattt

SEQ ID NO: 5389 - DNA, 690 bp, Homo sapiens
  misc_feature 47, 111, 113, 168, 199, 231, 247, 257, 295, 355, 369, 371,378, 397, 399, 414, 416, 449, 476, 481, 498, 500, 503, 504,544, 586, 596, 618, 624, 631, 638, 659, 672, 673, 679, 690: n = A,T,C or G
ccctttcgagcggccgcccgggcaggtacaggtgaccaagaaaaaanagaagaaacaacacaggattccaacaaatgacgaattactgtatgatcctgaaaaagataacananatcaggcctgggttgatgcacagagaaggggttaccatggtttgggaccacaganatcacttcaacaacagcctgttccaaataantgatgcttgtcttgaattgtcctgcctgcatnaccacactttgccttnattgccaaangcatgaatcatacaaaactcaatatataacaatgtttntaatgaattttctattaacaaataggaagttcttatatataaaaccttcacataacaatnaaaaaaaagccggntncattaanaaaaataaatatctaaccntntaaagattcttcccnanaaaagccataaacaaaattttgtaaaaaaaatntattcacccaattcattttcccccttnaaatntttccacttaaaagtcncnagnncttcctaacaaatatttaaatcctttcatttttttccaanttttttaccaaacccctttccttaaacaacccccccttcccnttttaaattnccccaatactttttttttaaanccaaanttttttncaaattncttttcctttttaccttttcnttatcctccaatnncccttnaaaaaaaccan

SEQ ID NO: 5390 - DNA, 428 bp, Homo sapiens
cccttagcgtggtcgcggccgaggtacagagtttctgtttcgggtgatgaaaaccttctggaaatggataatagtggtggttacacaacattgggaatgtaactaatgccactgaactgtccacttaaaaatggttaaaatgggcaaacttttttgttatctagattttaccacaagttttaaaaacagaagaaaaaagaaggcagaggttgtggtgagctgagatcttgccattgcactccagcctgggcaacaagagcaaaactccatctcaaaaaaaaaaaaaaaaaaagtattactagacatcaaataagaaaacatcaacaaaattaagttacacaaatgtattccagaaactagtcttttaatatgtcctccagacaaactgggaaacagccgcagctccttccaatggttcatcatgactt

SEQ ID NO: 5391 - DNA, 292 bp, Homo sapiens
  misc_feature 194, 283: n = A,T,C or G
ccctttcgagcggccgcccgggcaggtactttttttttttttttttttttttctgataagacccgaaaaaggaaaattcttttaattttctataaatttagatgtctgatcctcatctttttaaaaaccaaaatgataaaacatatttcttaaactgttgggttctgaaaaagtcacccaattggaatcagctngttcacatttagaaaatgcaactgctaaaagctgtgggatactgcaatttaagccctgcagctcacaaggcaaagtgtgtaattctaanaagcatcaa

SEQ ID NO: 5392 - DNA, 608 bp, Homo sapiens
  misc_feature 568, 570: n = A,T,C or G
cccttagcgtggtcgcggccgaggtacatgtgcacaatgtgcaggtttgttacatatgtatacatgtgccatgctggtgtgctgcacccattaacttgtcatttagcattaggtatatctcctaatgttctccctcccccctccctccaccccacaacagacccggatgtgtgatgttccccttcctgagtccatgtgttctcattgttcaattcccacctatgagtgagaacatgtggtgttctgttttttgtccttgggatagtttgctgagaatgatggtttccagcttcatccatgtccctacaaaggacatgaactcatcattttttatggctgcatagtattccatggtgtatatgtgccacattttcttaatccaatctatcattgttggacatttgggttggttccaagtctttgctattgtgaatagtgccgcaataaacataccgtgtgcatgtgtctttatagcagcatagttgcatgcctatttctaactgtgggctcccagggactgtccgccacagtttacttattctcccatcccagaaatgggacccttcangnggtctctgcttctctggtacctgcccgggccgggccgc

SEQ ID NO: 5393 - DNA, 133 bp, Homo sapiens
  misc_feature 84, 94: n = A,T,C or G
cccttagcgtggtcgcggccgaggtacttttttttttttttttttttttttgcctgaagcaaaatataaggaggcaactagganactcactaanaatttccagcatttcaacaaggaaaaatgatattagcct

SEQ ID NO: 5394 - DNA, 588 bp, Homo sapiens
  misc_feature 330, 359, 407, 426, 473, 478, 480, 505, 511, 538, 556, 569: n = A,T,C or G
gatatctgcagaattcgcccttagcgtggtcgcggcccgaggtacaaaatgtccattgaagtggtttcaaattccaaatagtaattggaaaatccaccactcgtgttttggggtagtagtatcgaaaaagaataaccaagataatttgaaaaggctattaaaaaatacttctcaattttcaaactgcatacagcaggtgctcattcatttctttgtaacattgatgagaaaaagactcccagccaggggcactgtctttgtggtgtttacgtgttctcgccacacctgcataggtttctctgggtgctgcaagttcttgccacatcccanaaggtgtggcacgtgaggtgaaactggtntgtcttcactgtcccaattctgagtgtgggttgtgtgagtggccctgngatggaatggcgtcctgtncagggctgggttccctctttgtgccctgagctactgaaacaggcttnagctncncatgacccagaactggaattaattnagtaantaatttatccttttttattcatctttncttaaatgtatgtaatangctcaccatttantttcaatgtttaaatatta

SEQ ID NO: 5395 - DNA, 370 bp, Homo sapiens
ccctttcgagcggccgcccgggcaggtacatctccgatttcaagaactgatgaaattagaaaaaacacctacagaacattggatagcctggagcagaccattaaacagctcgaaaatacaatcagtgaaatgagtcccaaagccctagttgatacctcatgttcttccaacagagattctgttgcaagttcatcccacatagcccaaggggcctctccccgacccttgctagttccggatgaaggtcccactgccctagagccccctacgtcgataccttcagcttcaccgtaagggctccagcggggccccacagacgagcaggatgcctgtccccatgagtgccaaggaacagacccgggaaccctgg

SEQ ID NO: 5396 - DNA, 466 bp, Homo sapiens
  misc_feature 404, 432: n = A,T,C or G
ccctttcgagcggccgcccgggcaggtacgcgggtataaggatatcactgacgtggatgaaatgaaagttccagattgtgcagaaacttttatgactctactcttggttataactgacaggtataaaaatcttcccacagcttcccgaaagcttcagttcctggagttacagaaggacttagtagatgattttaggatacgattaacacaagtgatgaaagaagagactagagcttcccttggctttcgatactgtgcaattcttaatgctgtgaactacatctcaacagtacattctgctattttggggaatattactctataaatgataggtcaaatcggttgacagtttttttcaagtcttctgtatacttgctgattttttttttttttttgatctttgncctatcaacaagtgagagatgattgttnaaatctccaaatataattataggttttttggttc

SEQ ID NO: 5397 - DNA, 375 bp, Homo sapiens
  misc_feature 96, 124, 166, 197, 199, 224, 248, 256, 276, 281, 283, 292,293, 301, 306, 311, 335, 354, 355, 362: n = A,T,C or G
cccttagcgtggtcgcggccgaggtacatggcaattagaagttgtcatggcaaaagaaaaccacagctggcctgccacagccaacacaagaaccanaaaatggtagatgaaatgaaaggaatanatgtggggtttattccttattataaaagaaaaaaaataattnttcagcagtcttaacaatagacttcaagatncnctaattacaagtgttttgactccanccctgtccccatctcctccaagancataggtnggagacagttttgaagcaancaatncnatttctgtnnaaaaattnacctngaaanttctacaaaattttggatttaaanatcttaaactttcctatanntttttgntttttttaaaaaa

SEQ ID NO: 5398 - DNA, 235 bp, Homo sapiens
  misc_feature 36, 40, 44, 46, 57, 62, 69, 75, 77, 79, 85, 101, 105, 110,111, 113, 115, 117, 119, 122, 124, 125, 152, 155, 162, 176,197, 213, 233: n = A,T,C or G
agtgtgatgggatatctgcagaattcgcccttaacntggncgcngnccaggtacatngcganccttgcntacagnananaaaaantcctacacatctcgangccnaattnngncngntnacngnntacagaaactgtgcgggcatcacgctnctnaggactnagattatcaactgnctccctgactgggctcttctntctgaaatgacgactnttactgtgtccatacctatnac

SEQ ID NO: 5399 - DNA, 185 bp, Homo sapiens
  misc_feature 17, 31, 34, 45, 53, 67, 68, 72, 133, 157, 165, 175: n = A,T,C or G
ccctttcgagcggccgnccgggcaggtacangcncatgtgcaggnccaagcangcaagcacactttnntatntgggcaaaaggaagggtctaaacagtattgttcacaaggccaaaatagagcagtacaccanatttggataagtgggaagaaattnaaaaactnaaagcatctntttgggcctt

SEQ ID NO: 5400 - DNA, 444 bp, Homo sapiens
ccctttcgagcggcccgcccgggcaggtacgcgggggacacgggagcaagatggcgattccgggcaggcaacctctgtgagtgaaagccttcagagggaagctgctaagaagcaggccatgaaacagaccaaactggaaatccagaaggcccttgcagaaggtgctactgtgtatgaatatgacagtatttatgatgaaatgcagaaaaaaaaggaggaaaataatcccaaattgcttttggggaaagacagaaagcccaagtatattcacaacttgctaaaagcagttgagatcagaaaaaaggaacaggaaaaaagaatggaaaagaaaatacagagagaaccagaaatggaaaagggggagtttgatgataaagaagcatttgtgacatctgcatataagaaaaaactgcaagagagagctgaagaagaaagaaagagaaa

SEQ ID NO: 5401 - DNA, 391 bp, Homo sapiens
  misc_feature 379: n = A,T,C or G
cccttagcgtggtcgcggccgaggtacttgctgaagctctttatcactttgaccaattggacaattggctgaggtctggaggcttcttcctccagagattgctgatctcacaaaagtttgtggttgagatctgaggtttactctgctgaagagctccttttcttagagtttactgcttctatgatgaagagcaatcttcagcttggtccccatctccaataacaaactcatttggagtttcattttgagatttggtagctgaagatcaaggtttactatcagctggctctgacctcttcttatgctcagagatcttgactgtatttaaactgtgtgatcactttctcagctttttggggttttttttactacctaagangtttcatttaca

SEQ ID NO: 5402 - DNA, 761 bp, Homo sapiens
  misc_feature 127, 135, 148, 167, 174, 283, 285, 302, 313, 319, 332, 343,358, 363, 365, 371, 386, 392, 407, 410, 414, 420, 421, 427,428, 432, 437, 440, 454, 456, 457, 459, 461, 465, 469, 470,473, 474, 475, 477, 478, 480, 482, 484, 485, 486, 487: n = A,T,C or G
  misc_feature 488, 489, 491, 492, 493, 497, 498, 499, 500, 501, 502, 505,506, 509, 513, 515, 516, 517, 518, 519, 520, 522, 525, 527,528, 529, 532, 533, 536, 544, 546, 548, 549, 550, 557, 559,561, 562, 564, 566, 568, 569, 570, 572, 573, 574, 577: n = A,T,C or G
  misc_feature 580, 581, 582, 583, 584, 586, 594, 595, 599, 601, 602, 603,604, 605, 606, 607, 608, 609, 610, 614, 615, 616, 619, 620,621, 622, 623, 624, 625, 627, 629, 631, 632, 633, 634, 636,637, 638, 639, 640, 642, 645, 647, 648, 649, 650, 651: n = A,T,C or G
  misc_feature 652, 653, 659, 661, 663, 665, 666, 667, 668, 669, 670, 671,674, 675, 680, 681, 682, 684, 686, 687, 689, 690, 691, 692,693, 698, 700, 702, 705, 711, 713, 714, 717, 719, 727, 728,729, 736, 737, 739, 742, 743, 744, 746, 748, 749, 754: n = A,T,C or G
cccttagcgtggtcgcggccgaggtactttttttttttttttttttttttttttttttttttacaaattcttcaactttattaaaacattatgagatttttgcacaaaccattgttttttgttttanctcatcanctatggttactgnattttatgtgtggcccaanacaattnttccaacatggcccagggaagccaaaggattggatacccctgaactataccctagggtggggagtggctaaaacccctaggccagggtctttccccactgaggccatangngcttccccatggccaanacagtgaggtntttaanaatggaattactnggcttaaaaanccaaagttgactgtnatatntncaactntggctcctgttttgnaaaccnaaattttttggaagntantggnaacctnnaaaatnncaanattcntgncttttggggagttntnnangntttngaannggnnnannantncnnnnnnannntaannnnnnttnnttntaanannnnnncnttnannnatnnatnatttaaangnannnatgatanantnntngnannngnnntgnttnnnnntngttttaanntctntnnnnnnnnnntttnnnatnnnnnnntntnannnntnnnnntntanannnnnnnataatnanantnnnnnnnatnnaagtnnntngnntnnnnnaaaanangngantagatnanntgnangaccaatnnntttaatnnantgnnntntnnccctngtccccc

SEQ ID NO: 5403 - DNA, 300 bp, Homo sapiens
  misc_feature 111, 113, 135, 136, 138, 139, 140, 142, 147, 149, 150, 151,155, 156, 182, 190, 192, 194, 199, 200, 201, 202, 206, 211,213, 214, 216, 217, 225, 236, 238, 246, 248, 255, 256, 258,266, 287, 293: n = A,T,C or G
cccttagcgtggtcgcggccgaggtacttttttttttttttttttttttttttttttgtttttttttttttttttttttttttttttttttttttttttttttttttttantnttttttttttttttttaatttnnannngnggggngnnntatnnttttaactttatataaaaaaaacaantttttatntntnaaatnnnntaanaaaancnnannattaatanaaaaaaaaatntnattatttnanttacccnnanaaaacaanttatttattttatcttctcancaaaanaaaaaaa

SEQ ID NO: 5404 - DNA, 384 bp, Homo sapiens
  misc_feature 377: n = A,T,C or G
ccctttcgagcggccgcccgggcaggtacgcgggggtagattggcgtgctgcaaaccagctctaggcggctctggccccaaaaggagcataaaccagggactttgatatcatgcagcagaagaccaaattatttcttccaagctttgaagtatagtattcctcaccttggaaaatgcatgcagaaacagcatttgaatcactataacttcgctgatcattgttacaatagaataaaattgaaaaaatatcacctaaccaagtgtcttcagaataaacccaagatatcaagagttagcaagaaacatcccaagtcggagcttctcattgtaagggatcttcagcctgttaaacaagaaaaccgaaaaaaacccctttncagaaaa

SEQ ID NO: 5405 - DNA, 415 bp, Homo sapiens
  misc_feature 260: n = A,T,C or G
cccttagcgtggtcgcggcccgaggtactacaggccaaatgctggcacagcttacacatccatgcctgccagaaaaggcaaacagggaaaacatggaaaagccctgtgcacagttaatccgaaggctgcacaaagaccaagctctgcagttctcagggatgaaaaaaaggtttagaagggtgacggttggcatggaagtgtgcataagttgttgcagcaacactttcaggcatcattctgcatttagcaggaataaattnaactgccaaagaaaacccacaaggaaaggacaaataagactgaaggtggggctcccaacagcttctgttatcaaagcacagaaaggtggggtaggggagaccagcacagaaagtttctatttgatgacagtggaagttattcactgtagtttttt

SEQ ID NO: 5406 - DNA, 398 bp, Homo sapiens
ccctttcgagcggccgcccgggcaggtacataagccactttcatacctgcctactattatggactgcagagtaatgtggcctatatcaattttttcaggattgttcttttgtttgttgtttttttcatcccttcctcccccatatttttctcttcacaggacatgagacttcacaacctgctaaaaatgaactttccagacctaccaatctaggaataaaccgtcctagccaggaaaggtcagatgacctttcctgagactggagactcattctgttgtaaaaatgctttctccaaagatgttaaaaaagaaaaggggaaaatgttgaaagaaaaatatcttgggtcccttcaagatgggaactgctcagggcaaatctgccttctattctattcaag

SEQ ID NO: 5407 - DNA, 732 bp, Homo sapiens
  misc_feature 9, 20, 27, 34, 35, 44, 45, 46, 50, 60, 61, 63, 70, 74, 83,92, 96, 97, 102, 109, 111, 114, 116, 117, 119, 142, 153,155, 176, 183, 241, 242, 270, 276, 284, 285, 286, 288, 290,291, 295, 335, 397, 416, 442, 447, 473, 474, 498, 502: n = A,T,C or G
  misc_feature 506, 508, 510, 511, 525, 528, 530, 534, 545, 552, 561, 580,593, 597, 601, 623, 649, 659, 666, 668, 669, 678, 721, 722: n = A,T,C or G
ccctttccngcggccgcccnggcgggnacacgtnnacaaaaaannntctncgtgcctagnntncttgctntccngtggcctanaaacaagcntaannggctngagaatnangcncnnantgtgcaacggaaagaatctttgncttatactagngntcttataaatatgacccatanaatcatnaaaacaaaatgaaacagcctggggataacagcaacgatggagggttcccaggagcacnncgggatgggagatggaaaaggacatcantcattncctgtggnnngncnnctgnttgacatgggccatctcattcaacttccttaacacttganaattaggtattggcatccctgctttagatgaagaaaaccaaggctcagcgtgattaaattgngcaactggaatgcttgcanaaccaagatttttcatactggtgtgnacctnggaccgcgaccacccttaagggcganntccatcacactggcgggtcgtttnctantggngncnngctcgggtccaagntangnggtnatcatgggtcnctagctngtttcccgngggaaaaacaaccaattgntgaataatgagcnctangaanttcaaaattaccacatgtttcnaaagaaatgggggtgcccaggttttnaaattcccgnttttgancnnccccctttncaaaagaaactattttttaaaaaaataaaaaaaagggatttgnnggggaaaagg

SEQ ID NO: 5408 - DNA, 455 bp, Homo sapiens
  misc_feature 23, 138, 296, 397, 416: n = A,T,C or G
cccttagcgtggtcgcggccgangtacagcattctggaataaagcaaaagagtgttcattcacacacacagtagcttcaaaactgttcgatctgtttgttcccatgtagttttctaaagatggaaaaaaaggactttnggtcatcaagactactgtggcccatattagattactggaacatctaagcatcaagttgtgtgaccatgcgaacaaaaagactttcggggagtgtctatttttaaaaaggtttatgttgtgtccgaggccagttgtaaaaagatttactgcaagaaatnaagccccacttttaaggcttaaggacccagggtttctaacttatcttaaaaaattattggactggataaccaaaaaaagtggtttcttaaaatggtgggcntatttcttgatccattaanttggtttttttttaaaaaggaaaaaaaaaaaatgttttt

SEQ ID NO: 5409 - DNA, 392 bp, Homo sapiens
ccctttcgagcggccgcccgggcaggtacttagacctagtgcagcctctaggaaaagtcttgccttttcattagagaaaacaggaccaaggtttcagttttcaaacagctgttgttgaatgtgtagaacccagttccatctgttttggttcattgttacagaacttagtccagtcatttgggctaaagccaaccaaaagcttagttgcctttctcaacaaacactggtacgcggggtccattttgtcggtagaggcagaaggagaaggtcgggttgtagaagctggggtggccggcagctcgctcatcggtgttcgtgggctttgtcggtccgtgcctcgtctctccctggaaagggagggaggcttcgacgtcgagagggagcccgctgcc

SEQ ID NO: 5410 - DNA, 831 bp, Homo sapiens
  misc_feature 470, 475, 519, 548, 607, 615, 630, 634, 655, 667, 674, 684,692, 697, 711, 715, 720, 724, 726, 732, 736, 748, 753, 756,759, 765, 768, 776, 777, 781, 783, 785, 789, 791, 797, 812: n = A,T,C or G
ccctttcgagcggccgcccgggcaggtactccacgagattagaagtgcatattcaactgcagaaaccggaaccagcatggggagtctaaatgttaccagataaggtttttagggcattttggttatagtgctaagcatttttgggaaaccgtaaagagggttaggataggtggtgggaatagaggctgacagcagttttcagatgtccgtgtgttcatgcacgcagtatggcccaggtaagttcaaaaccttattcttaggctatttcgatcaaccctgccaggcaattttaaattcttggtgatgtagggcagggacactgtggatggctgaggaaactctgggctctgctggctaaccagcttcgctccgctctgcagaggctgtctcatcttttgtgatctgcaaattcttgctttggtcttcatgtgaactctcagggaatttgagcagttcagtctgttaccaantgttngtgagcctacctggtcatttaacttgttgcttttgtaaccgtangctttttgggttgtcctcagttagaattntgggactttcctgaaccttctgtttttggttcttcccttgaaagtaaactggaattctnggtttttncacaggaatttgccnatangcggatcaagcaattggtctntcaagtatgctntcttgtncccggcaagnggctaaangcttnttttttttgcaggnaaanagganattnanatttancccngagatctaaagntgaancangcntcctangtnacccttanntttnancnaaancnccctantttctaaggtcttancttcccctaaaaaaaaaaa

SEQ ID NO: 5411 - DNA, 520 bp, Homo sapiens
ccctttcgagcggcgcccgggcaggtacgcgggattttaccgcgcaccaataaagagactggggagaaaccagaaaggagagcacgttccgtaaaaacaacaactactagtcggccgaactccaagcgtgaccagctttctgttgggaacactcaaagggcttttttccagacttcaagctcccattccaacagtaagagcttcttccacatcacagcccttggatcaagtgacaggttctgtgtggaacctgggtcgactcaaccatgtagccatagcagtgccagatttggaaaaggctgcagcattttataagaatattctgggggcccaggtggataatattaatgcagctgtgatggatttgaaaaaaaaagaagatccgcagtctaagtgaagaggtcaaaataggagcacatggaaaaccagtgatttttctccatcctaaagactgtggtgggagtccttgtgggaactggagcaagcttgatttatatttgcaagcaactaaattattgac

SEQ ID NO: 5412 - DNA, 434 bp, Homo sapiens
cccttagcgtggtcgcggccgaggtacatttcagcgctgaaaagattttgtctaaaaatgaaaaggcagctttcttaaagaccagagttatagagtcactcttgtatttttcatcttgttttagtggaccaaagctcagcttgttttagtggaccaaagctcagtaactcactcagattagaatctataattctgttgagtgttcaggaccacagaagtcctcctgggactttctatggaagtatgtgcagattttcctcatggagctgggcgtgatggtgaccgggcttggcaatgtctttccgctctgtctcctggaattgggtgtctgggatgacggacttcgtggagatggattctcagccttccgtttggctgccatggccaacaaccagtttttattctctggggaactattctctttgcctaccatt

SEQ ID NO: 5413 - DNA, 244 bp, Homo sapiens
ccctttgagcggccgcccgggcaggtacttcccacttttcataacgagttggagcctagagttgatcgactccagcgactttttcgtcttctttgcggccaccatcttcctgccttaggagcgggacggcccccaaccaacagcagccgctaagatggccggggaacgagaaaggaaagacttcccacaatgcaaagctcttcacggcagaccccgcgtacctcggccgcgaccacgctaaggg

SEQ ID NO: 5414 - DNA, 502 bp, Homo sapiens
  misc_feature 7, 144, 153, 166, 174, 190, 195, 236, 279, 281, 352, 354,357, 393, 421, 433, 435, 479, 481: n = A,T,C or G
cccttancgtggtcgcggccgaggtacctccctgttgacctactttcatccccagttggggtgtggtgcttttaagatatgtccataaattctttgctactgctccattggggtagaggtatgtgtaattcctctctccttgantgcaggctnaacttaggggctngcttctancaactaggataagaantgacngtgtgtcctttccaagactatgtcttaaaaggcactgcagntttctcctggccctgccccatgatctctggaatcaagctgctnanggagaagccaagtgtcatggtgtgaggacactcatgctgccctacgcagagacccacatgggaagaaactnangcntcctgccaacggccacaaagagagaaactttggaanggggtttctccacttcactgactgcagnccctgttcaatntngactgtaccttcctttaaaccatggggccaaaaccattttgttnanggtccccccaattttttaccc

SEQ ID NO: 5415 - DNA, 578 bp, Homo sapiens
  misc_feature 143, 204, 221, 224, 237, 250, 255, 276, 291, 300, 307, 332,337, 347, 360, 371, 380, 384, 410, 414, 426, 427, 458, 479,492, 505, 512, 537, 547, 565, 567: n = A,T,C or G
ccctttcgagcggcccgcccgggcaggtacttaggaggctgaggcaggaggatctcttgagctctggagtttgagaccagcctgggcaacatattgagaccttgtctcaaaaaaaagaaaagaaaagaaagaaatattaatantattttaattgggcattgaaaatgggacaatatcaatatacattttaaaaaaaaggaatancttcatcaaaagccaanggnaaaaaaaaccatnatttaatattaanggctnacatacaactctaatttttangaaggaaaattgcanaattaccantaaattncttaaaaaccagtaaaacaaaaaanctttnaaataaactntattcaaaatatnatcatcctttnaaaaccaangaanttttaaaaaaaattattttaacattntttnaaacctttcccnnaataatatacctctcaatctaaacctctttngaaaaaatccctaaaaacaanttaccatttttanaaaaaaaaaaccntaccttnttttcccactttttacacacttttncctttttttnaattaaaaaaaaatcctntntttttttaaaa

SEQ ID NO: 5416 - DNA, 714 bp, Homo sapiens
  misc_feature 34, 40, 94, 153, 178, 226, 253, 280, 284, 325, 339, 355,372, 377, 380, 405, 428, 461, 464, 465, 482, 496, 510, 511,547, 565, 566, 573, 575, 612, 623, 630, 638, 660, 686, 687,700, 706: n = A,T,C or G
ccctttcgagcggccgcccgggcaggtacttaantttttnttttttttttttttttgagagggagtctcactctatcaccaggctggagtgcantggtgcaatctcaacccactacaatctctacctcccaattcaaacaattctcctacctnacctcccaaataattggaattacangcacatccaccacacccaactaatttttatatttttaataaaaacaanatttcaccattttaaccaaaaaagatntcaatctcctaacctataatctacctncctnaacctcccaaaattcttaaaaccacaaaccttaacccactncaccccaccctttntattcttcaaaaaaantttcaaaatcatttttnaccanacnttaattaaattttaaaaccaacttntttttataaaaaattttttcaanccctaaaaacttcccaaaattcacaaacccctnaanncttaccaaaaaaacctntcccttaacttaanccaaaaaacctttnnaaatctatttcccttaaaaaatttttccccttcccnaaaccaaaaaaccccaannaaccttnantcctcattccttaaaaaaaattaaaattctttccccnaaaccttcctnaaacccnttaaaaanaaaaaaaaaaaccccttttctnaatcccctcttaaattccccaaaacnntttaaaaaccttnaaaaanaaaaaaaa

SEQ ID NO: 5417 - DNA, 373 bp, Homo sapiens
  misc_feature 58, 227, 353, 356, 360, 367: n = A,T,C or G
cccttagcgtggtcgcggccgaggtacacataccaatgtaaggacaccagaaacacanagcaaggacagctccatagcatcacaacaattcttcaataacagattctaattggaaaaaaaagttataaaatgctgcaaaaattttgaaataatgatagtgaagttcagtaaggtataagacaacaaagataagcaatacaaagaaattagaaaggtaattcatgatntgaatgagaaattcaccaaaatgatgggatataatgaaaaagaaccaaacataaatcctggaactgaagaattcaatatgtaaagtaaaaatatatttgagggcttctacaatagactatatcaanaanaagnaaagaantttcat

SEQ ID NO: 5418 - DNA, 305 bp, Homo sapiens
ccctttcgagcggccgcccgggcaggtactaaagaaacacaagaactaatgtcagaggcttatcccatcccagaacagaaattaaagttgattcagccccacgttcaagcaagcaacaattgctgggaagaggccatttctcaggtcgacaaactgctacgaagaaatacagataaaaaaggcaagcctgaaatagcatgtgaaaacccacattgtacttcagccttgattcctccgcaacagacacctgaaacttgaccctacattggttcttggccatcgtgatcttccttggacagaatcac

SEQ ID NO: 5419 - DNA, 335 bp, Homo sapiens
  misc_feature 54, 88, 136, 147, 166, 180, 188, 205, 220, 245, 246, 252,265, 266, 270, 286, 292, 293, 304, 308, 309, 318, 324: n = A,T,C or G
cccttagcgtggtcgcggccgaggtacgcgggaagcgtggtaacaacgcagagngagaaaataaaaggttagaagatggagggacaantaaccccagtatttttttagtccagtagaagagattgaaatgtaaaanagttttaccangattaatgggttttagggnggtgaaaaaagttnaaaatgcnggaaattttttgccacncttgggaaattttcnaccaccccctttggggaacttggtnntttagnggaattaaaaaanntttnaaaggtttttaaaaanattaannatccccaggangccnnttttaaccncttaanagggttttttt

SEQ ID NO: 5420 - DNA, 263 bp, Homo sapiens
  misc_feature 196: n = A,T,C or G
ccctttcgagcggccgcccgggcaggtacttgggtgtcttccagctagttttccattccaaccgtcgctccagcaaccctttgacctgggattcgagcctccacgaatggacgccacttgccgagaccagctcgctcggggagactctaacccaatggagctaggaataccggcttaggctgaaaacttctatcgncttagaaatgggaataaacctcacactcactgtccctgttggaagcaagctgaaactccaaaaaaaa

SEQ ID NO: 5421 - DNA, 733 bp, Homo sapiens
  misc_feature 27, 29, 30, 33, 37, 38, 53, 56, 58, 59, 63, 65, 71, 90, 91,96, 100, 101, 108, 109, 111, 113, 125, 134, 135, 137, 139,140, 146, 148, 161, 166, 178, 182, 184, 186, 187, 189, 194,197, 198, 204, 206, 217, 218, 221, 222, 237, 244, 247: n = A,T,C or G
  misc_feature 248, 261, 265, 271, 273, 277, 286, 302, 303, 304, 305, 306,307, 309, 312, 321, 324, 327, 328, 333, 351, 357, 367, 372,374, 383, 387, 389, 391, 399, 417, 419, 420, 422, 424, 442,443, 448, 449, 450, 458, 462, 476, 492, 505, 507, 509: n = A,T,C or G
  misc_feature 524, 531, 541, 543, 557, 558, 561, 569, 570, 573, 576, 590,591, 617, 618, 623, 633, 642, 650, 652, 664, 666, 674, 683,688, 692, 695, 696, 697, 712, 714, 717, 720, 722, 723: n = A,T,C or G
ggtactttttttttttttttttttttnannggnaaannttttttttttttttnttnannggtncnaaaaangggggggggaaaaattttnnaaaanaaanngggcaanntncnaaaaaaaaaaanttcccccgnnancnntggctngnaaaaagggcccgntttanttttggcccccnttanantnngnggaanaanntaaaantnttttttcccannccnntttttttttaaaacntccaaanaannaaaattttttttnacangggcantncttntttttttgnaaaccttgtttttggnnnnnncnccnccaaaagcnccngannaaacntttttggggggtcaaaanccccanggtttttttnaaaanangggaccccntttntnantgccaaangggggttttttttggggntnnangnggccaatcccaaaaattnnaaaannnaggggccntttnttttataaaagggngggccaaagggccccnttgggggtggggngngnaacaaaaaaaacccncgggttncccaaaaatntntttttttggggccnntanaaaaaatnnctntcncccccccgggtttnncgggggttttttttaaaaaaaaaaannccccntggaaaaaanaaaaaggcnttttgggntntttttggggganantaaaaccngggggcggnggggnaaanacnnngtgggggcctttttngngcnttntnntttttaaaaa

SEQ ID NO: 5422 - DNA, 380 bp, Homo sapiens
ccctttcgagcggccgcccgggcaggtacgcggggttggctgtagttagtaaggagccggatgattgcctcagcaggtgtgaagcgtgtgctttagtttcgtgggaggcctggcatctccgagagggaggggaaaggtaaccactcctttgtggaggtcgccagggtcattgtcgtggatttgcacagtcggctgggccggtgcaatggcggaaagaaaaggaacagccaaagtggactttttgaagaagattgagaaagaaatccaacagaaatgggatactgagagagtgtttgaggtcaatgcatctaattagagaaacagaccagcaagggcaagtattttgtaaccttcccatatccatatatgaatggacgcct

SEQ ID NO: 5423 - DNA, 246 bp, Homo sapiens
  misc_feature 129, 135, 136, 142, 147, 152, 155, 157, 165, 166, 172, 174,177, 193, 194, 195, 199, 225, 226, 228: n = A,T,C or G
cccttagcgtggtcgcggccgaggtacttttttttttttttttttttttctttttttttttttttttttttttttttttttttttttttttttttttttttttttttttttttttttgggcccaggggnaaaccnntttttntttantccanttnangatccccnntttttnanggntttttgggccaatccnnntggnaacccccaccaaaaaattttccccgnntnccttcccgggggggcgtt

SEQ ID NO: 5424 - DNA, 334 bp, Homo sapiens
  misc_feature 28, 53, 66, 106, 116, 135, 138, 161, 182, 197, 223, 248,252, 268: n = A,T,C or G
ccctttcgagcggccgcccgggcaggtncccaacgtatttaggttagaaactntggtattccagcntccagaactacaagtgatgaagacttttgttagtcaatanctctaattantttttcttgacccctcccnttntccacctcccaatcctggaaggnttacccatcaggcagaattcntaatctgcctcaaantttacaggtccaagctttgcgaaatnccaaagtggctcaaggcaactgcgncccnttaagaaacctaaatnccaacaccgaatggtgtactgggttaaaagttttttactgcttgaatagttaagaagccaatgtaa

SEQ ID NO: 5425 - DNA, 322 bp, Homo sapiens
cccttgagcggccgcccgggcaggtactacttcttggttaaaaggccactggtagagtcatctgagtgtagagaatgtcccttcactgctggaaaaatccactggctcccaagaaaagaaaatggtctgaagcctctgttgtggctctcacaactcatctttccctaagtcatcaagctccacatcactgaggtcaatgtcatcctccacgggaagctgggagacgacagaaagccactgttagatctgcagaaggggacaccctggaaggtcaacatctcattttacggaagagcgactctctggagctactcctgctaca

SEQ ID NO: 5426 - DNA, 185 bp, Homo sapiens
  misc_feature 120, 140, 163: n = A,T,C or G
cccttagcgtggtcgcggccgaggtacgcgggggaattcaagcagtgggacaaatgggggtttggcatgcagctcgtcatcttaagagttactatcttcttgccctggtgtttcgcccgntccagtgccccctgctgcanaccataaaggatgggacttttgnttgagggcttatttccatcaaa

SEQ ID NO: 5427 - DNA, 389 bp, Homo sapiens
cccttagcgtggtcgcggccgaggtacgcggggaagcttcatgagacctctccttgtctgcatggacgagtggccaactctggagcccaggctgttgcttcccagtctggtggtgaatcctccatagtctggtgagtgtaaatacatatatatatcttttcccttctcccttcccattgcaatttgcttattatatcatttgcttatatctgcactgccatttgggataaagcttgtttacccttaaaggtattgtgtgtgtgtctcctccccgcgcgtatttcccacacagaacacctaagaacctattttttatgatttttacgagaaatgaattccaagttgtgcctcagaattcagaaatatatctttcaacctcctactcattc

SEQ ID NO: 5428 - DNA, 459 bp, Homo sapiens
  misc_feature 152, 157, 160, 166, 176, 194, 196, 254, 440, 445: n = A,T,C or G
ggtacatatagggccactcaggttttctattcttattgagaaagctttggtggtttgtttatctttcaagaaatttgccaagaggctaaacaatctgtccaagatcacacagctataagggctgagccaggctttggcccctagcagcttgncaccngancagacncacttaaccnctgcactatactaccatntntctaaggaagaggagtcggggatgaggaatgcagatgatgattttaaactactggtancaaacatttgttgaggtttactgtatgccaaaacctatcctgcggcagattttattttccataaatggccaccgcattatctttcaccttccatgctcttctggaaccttgctgcttctccacacacaggtagaaactgtgtttcttcctcttgaaatcaggtgagcctttatgactgctgtgacnaacanaaaacaggggaacc

SEQ ID NO: 5429 - DNA, 413 bp, Homo sapiens
  misc_feature 137, 203, 225, 228, 252, 253, 266, 277, 281, 311, 330, 336,343, 350, 355, 359, 369, 373, 382, 401, 406: n = A,T,C or G
cccttagcgtggtcgcggccgaggtaccatgcattaagagcttcctgattgagattcagtgcatcagcccgtgtctattccatctacgtccacaccgtctgtgacccactctttgaagctgttgggaaaatattcancgatgtcccgcatcaacttgcagaaagaaatataaatgacatttcaaggatagaagtatacctgantttttttccttttaattttccnggngccaaatttcaaggttcccaagtnntaaatacagcaancaattttatgnaatngaattatcttgggttggaaaaataaaaaangatcactttctaagttttnataagnattaacngcttttnttganctantttaatttantttnggcaggctngaattttaaaaacccattnaaaanttttttt

SEQ ID NO: 5430 - DNA, 571 bp, Homo sapiens
  misc_feature 46, 89, 102, 131, 133, 141, 144, 153, 154, 158, 166, 173,174, 208, 213, 222, 224, 237, 245, 246, 251, 253, 264, 290,297, 298, 300, 302, 308, 309, 312, 313, 317, 330, 332, 334,337, 341, 357, 358, 361, 364, 366, 369, 374, 395, 399: n = A,T,C or G
  misc_feature 405, 414, 417, 421, 423, 431, 444, 446, 454, 474, 477, 484,489, 492, 505, 508, 514, 545, 547, 563, 565: n = A,T,C or G
cccttagcgtggtcgcggccgaggtacgcggggtttggtgatgaangcagaaatgaatggctcaaaacttgggagaagagcaaaacctntaaggggccctcncaggaaaccaaatgaatggggccttttanangaattccnttngacttgctnnaatnaaatgtangccgggnnactttctttttaaaaaggggccccaaagaccaanattgnctaaacctngntcaaaccccattncccaacannttggncnttggcgattgnttggttagaaaaaacctaaccattgnccattgnngngnggtttnnaanngcanatgggaaaatccnangntanccanaatggggggaccaacnnttnggnanaanaaatnaaaaaccacccttggcctttncttngtaagnccgtaaagnttngtangncaaaaccnccttaacccttgngngaatttcnaatttccaatttgttggganaanccttaanaaaanaanccaacccaaaatnaantccaanatgggaaagtaaaaaaaaaaaaacccccctntntaaattgtgaattaangnttaaaa

SEQ ID NO: 5431 - DNA, 488 bp, Homo sapiens
  misc_feature 107, 141, 157, 174, 217, 230, 233, 236, 258, 268, 284, 300,304, 308, 324, 333, 350, 376, 424, 430, 451, 465, 467, 469,475, 477: n = A,T,C or G
cccttagcgtggtcgcggccgaggtacgcgggaagaggaggtggaagtgtgagtgccatggggttgctgacactggagcaagttctactgtccctcttggggcttgnctgcctaaaggaaagtgtccccatggaatgaaangaggttttgtttccantttgtaagggcattggnactcaggccttctggggcttccactccccgccccttttgaggnaaacccccaccanccntgnaagcagcctgcaccccaccttncttgaacatnaaagcttttgattggntattgctaaaactttntttnctanaaaggctttaccaatncatacaccntaccacaaagtgcattnattcttttttaatttttaccaacctnaaaaaaagggaaagggcttttattggttaaattttacatttggatcantactgnaagtgtggagtcttattaccnataatgccttttcntntnttttcntnttggcccctaa

SEQ ID NO: 5432 - DNA, 685 bp, Homo sapiens
  misc_feature 16, 26, 36, 59, 68, 93, 113, 145, 147, 160, 169, 194, 222,236, 259, 263, 265, 348, 396, 424, 426, 459, 488, 506, 510,516, 599, 603, 612, 629, 661: n = A,T,C or G
cgccagtgtgaatggntatcttgcanaaattccccnttaccgtggtcccggccaaggtncccgggganggggcccgcagcttcacttacacancaaatcaaccaccatgaaancttttcacgggcctgggttttttgctcctggntnctggggtgtcagnaacccaaanctttcttttcgtttccttggcgaangctttttgaatgggggctcggggacatngttgggaagaagcnctacttcttgaccatttaagaanaaancncaatttaccattcgggcttcagaacaaaaatactttcccatggcttccgggggggaaaccttattgatgcctgcccaaaaaanggggaccttggggggtggtcttgggccttgcaagaaaagccgatcaanccgatgcccagaagaagaattatcccanangatttctttggcccaatggttgccgggaggacntccctggcttgatcaaggcctgccaaatnaaattggggggccagganttgngcaaanaaccccaaatcacttcccgacctgcttgggcctgccctgaagaaaatactgagctttcctctttcaacttcttgcttctcaangaanatcttggcntgtggaaggcccttcanggggcagggggataccaaaaaaccggggggangaaggggtacccttggcccccggg

SEQ ID NO: 5433 - DNA, 320 bp, Homo sapiens
  misc_feature 249: n = A,T,C or G
ccctttcgagcggccgcccgggcaggtaccagcatgactgtcagctgctgtcaatccttggcttttggaagcaatgtcacggcgctttaacttgcttttcagtttgctcagcatgtctttgaagcatcacctttactcatctcttccaaggctcactgttaaccacattggcactattttcagcaggaaatcagctaatacttaaaagctagtggggccagccctccttcttgttggtgatataagccngtttttcaaagagcagtcctcagagagacagcatcaacatgctctggggtgcatgtgacactgcagattcc

SEQ ID NO: 5434 - DNA, 409 bp, Homo sapiens
cccttagcgtggtcgcggccgaggtactaacatcaatcccagaaagccagcagccatagccagggtggctatgataccacccgattgcattttcaaggcggccaacctgttttgcattttctatgtatgcagccatgtattcatatgcagcagcctgagcatttactcgggtttcagtgccctccacaggcaaagcaaaactgtccataatgatcatggtttcaccatccacctttcctagcatcagacccatcacttccaagttgcctcccgatctggcatgcatcaccatcttcagcagagccaatgctgagattttgcagtacgcggggcccggcggcctttgcgggaacaagatggcagcccccatacctcaagggttctcttgtttatcgaggtttttgggctg

SEQ ID NO: 5435 - DNA, 184 bp, Homo sapiens
  misc_feature 28, 48, 72, 83, 117, 166: n = A,T,C or G
cccttagcgtggtcgcggccgaggtacncgggggccttggtatttggngcacagtcctgggaggatcctggngctgggacagncctggttttgtagattcctagtgcctacaggacncaactcacggagagaaaaggacattttgggacagcaggtgggtgggcantcttgaaaattggtagcc

SEQ ID NO: 5436 - DNA, 235 bp, Homo sapiens
  misc_feature 99, 108, 109, 115, 120, 138, 142, 145, 162, 167, 173, 194,205, 215, 226, 229: n = A,T,C or G
ccctttcgagcggccgcccgggcaggtactttttttttttttttttttttttttggtttttttttttttttttttttttttttttttttttttttggcngaaaggggnnactttnttggntgggaaagggaaaaactntggncancccaaaaagggaaattncaganttcccnaaaaaaagggggaggggcagnttgggcccganaaccaaaatnccaggggcccnggncaaaaa

SEQ ID NO: 5437 - DNA, 401 bp, Homo sapiens
ggtactttatatgtatatatatataaaagaatctcgtctcagaaatggctgcatttaacagagccatacacattgatgctaaacataagagctttcaccctgaaagaaagcattttcagaaatgtcacttacattctattatattaaatattcccaactgagtttcaaactcaacaggtaatgataacagaattatacatctcattgcactcaaagctgactacaaccaaaatttacagtatgattgaaacaagccaatgtttaaaaaagttttaattaacgataacaattccatgaaagaagaggataaagaatgggatgacaagaagtatttggtcttaataaggcaatacaaaatagatccattatcaaagaccatttaatttgtaaagatcaacaat

SEQ ID NO: 5438 - DNA, 471 bp, Homo sapiens
cccttagcgtggtcgcggccgaggtactatctcaaaaaagaaaaatagaaaataagaatcaaaaaacaggctgggaaaagtggctgacatctgttggccatgctggtttaaacttctgacctcaagtgacctatgtgccttggcctccaaccgtgctggaattacaggcgtgagaaaccacacctggcccaatcctcttaacataaacacttgaatgtcaattaagggttgaactcaatgttaagtcaacacaaactcaagtcaatgctggactgactctagtgtcaattaatgcttgatggtttgctatactcactgcattgggaacagttatctcaaaaatgaattttctgatgttctgcaaggagtgacctcggactcaagaccttgccacacttctgacatttgtaaagatttctgtccagtagggattctctgatgtctaatgaggtgtgaacatgaagtaaaggc

SEQ ID NO: 5439 - DNA, 486 bp, Homo sapiens
  misc_feature 385: n = A,T,C or G
cccttagcgtggtcgcggccgaggtacctttctctccatatgctcttacgggcttggctaacagagagccaatataaaactcatcagagagctaccattttaagtggaaatggtagcaacggattatttttaaatggacacctctttaaatttatgcctgaggttgtaattttttgaatttttgtaatcagaccttgatgatgaccgtgagcagtaagatataaataactcccacatgcttagcgttccaataatggaacactacacatacatggctagggttcaaagaaacttgctctgttacagggattacctagaaagactcttctgcagttcaatttgtaaaatttagcagcaatagaatagactcataccatcacactanaggaaggccagtcttagaactaagtccatgaccatcagaggagaaatgtttacagaccataaaagagaaagtcagagaaaaaaaggctttctggggaatgt

SEQ ID NO: 5440 - DNA, 357 bp, Homo sapiens
  misc_feature 17, 18, 20, 22, 27, 30, 32, 35, 37, 41, 49, 63, 74, 75, 77,80, 81, 86, 87, 89, 93, 100, 106, 118, 125, 129, 136, 139,140, 144, 185, 220, 224, 233, 237, 245, 253, 266, 283, 301,325: n = A,T,C or G
ccctttccagcggccgnncngncgggnacngnaancnccanctctagcnctggcaaacctagncacttgcggcnntnctnntgcanncnctgntgctgancctganggtattgatccnttaatanaccngctgtcnaannaacnagatggagccattgccaacgctgctacagtattaacaaacntggccctgctggagcccctgcgcctgagcatacanaatnacgacatcntgcntgccatcntcagcccnctgcgttctgcanacacacgtcgtgcagancaaagctgctctcgctgncaccgcaactgcatgtgactgttnaagcccggactgagttaatgaaattctggtgg

SEQ ID NO: 5441 - DNA, 304 bp, Homo sapiens
  misc_feature 93, 96, 97, 98, 110, 117, 118, 119, 126, 127, 128, 133, 134,135, 142, 144, 154, 155, 156, 158, 159, 160, 182, 183, 188,190, 195, 196, 197, 204, 208, 209, 210, 211, 216, 218, 226,239, 244, 245, 246, 247, 248, 249, 258, 265, 269: n = A,T,C or G
  misc_feature 271, 275, 281, 288: n = A,T,C or G
ccctttcgagcggccgcccgggcaggtactttttttttttttttttttttttttttttttttttttttttttttttttttttttttttttttnggnnnaaaaaaaaaaanttttttnnnaaaaaannnttttnnnggggggngnaaaaaaaaannnannnggggtttttttttgggggtttnnaaaananccccnnnggggggntttnnnnttttntntttttttncccccaaaaaaanccccnnnnnnggggggggnaaaaaancccncncccnaaaaanggggggnaaaaaaaaaatttttt

SEQ ID NO: 5442 - DNA, 434 bp, Homo sapiens
  misc_feature 113, 286, 305, 352, 377, 381, 382, 412, 413: n = A,T,C or G
cccttagcgtggtcgcggccgaggtacgcgggaggatatcaaagaaaccagactgtgatgactggggagagcgggctgaatgcaatggagtgtgcattacattggaaaaaaangtgaatcaagtcactacctggaactgcacaaacttgccactgacaaaaaatgacccccattttgtgtgacttcattgaagacacattacctgaattgagcaggtgaaaagccatcaaaaaattgggtgaccacgtgacccaactttgccaagaatgggaagcccccgaatctngctttggcgggaatatctntttgaccaagcacacccttgggaagacagtgataaatgaaagctaanccttcgggcttaattttcccattanccgnnggggtgactttccttggtcaccaaggcagnncaatgcatgttggggtttcct

SEQ ID NO: 5443 - DNA, 314 bp, Homo sapiens
  misc_feature 310: n = A,T,C or G
cccttagcgtggtcgcggccgaggtacagtccgtcacatcccggtaaacaaaggtcctgctgagcggctccgaggagggcagtttgcactggcaagagtcgagtgtggtctcacaggtaaactgtgtgagctgcgaatagtggtgggcggcaaaggccacggccagcacacagaccgtcaggcccagggcactcagcagaaagtataacagctgcaagaaagcagaagaaaacctttctggttacaaagaacattggatgatgatttgcaaagcgaattcatcaaaactgttctttttcttccctcccanaaat

SEQ ID NO: 5444 - DNA, 225 bp, Homo sapiens
  misc_feature 25, 55, 66, 103, 105, 148, 150, 202: n = A,T,C or G
cccttagcgtggtcgcggccgaggnacttttttttttttttttttttttttcctnatctaattttngaaatgatttattaaatggacactttaggaatttgananaagcagcttttcccactcaaatcactttgtgttcctctgacananaacaaattctttcacaaggacctcaaacctctgggttggaaaaaacctcagnggtcatccgctcattcacccatg

SEQ ID NO: 5445 - DNA, 405 bp, Homo sapiens
  misc_feature 350, 362, 363, 367, 369, 390: n = A,T,C or G
ccctttcgagcggccgcccgggcaggtacattccacattttaataaattaaccacaagaaaataatcccacatatacaaggtcaggggtggggaagagtattaatggtatcttaattatacccagtctggtttttttttttaaatggggtaaaaatcaaatgcaaccccatcttgttttaggaattttgagaactaataaatgcaccttaatggtcaagtgttcctttcaaacatgtgagttctttaacaaaaatgaaataaaccaggtgtctgtgatttctaattaatcaccgctgaccattcacaggttttgttgtttggggtggggagggggcttttgttccctttngacataatatanntcantncactaacaattatgtatattnaaacttggattattt

SEQ ID NO: 5446 - DNA, 549 bp, Homo sapiens
  misc_feature 134, 331, 448, 466, 548: n = A,T,C or G
cccttagcgtggtcgcggccgaggtacagccccatgcaagtcgcatctctactaagtttcccttggacccatgagtaggatagatagccagaataaaaccagtatcgtgtgatgtcattgaaagaaaacaaagnttcaaggaaggtagtcacttggggaaggggctccctaatgcctaaaaaataaaagtctcgaatttttagcctagtcttaatgattatgccccattcaacctttccaggcttagctactcccatttccctacaagatactacacttgaaactagactacttgctctttactagggtatcctccatgtgcaaaggcctntatctttttgctcatgctagcaaccaaaagacagcaggggtctcctggtaaattttaagtggtgaatgtgattgagccttggcacaaatttcaagcaataagtaacagatactttanaaaataaggggatcttangtaacaatatgagtcagcgccataatctcctcaagttattctaagcgatcctaaaggggcattttactcaaaggagggattng

SEQ ID NO: 5447 - DNA, 296 bp, Homo sapiens
cccttagcgtggtcgcggccgaggtacgcgggacaacaacttgttacagaaagagccaggatcccagactgtgctgaagcttcatgagacctctcctcgtctgtgcaccgaaagaggagccggacacagagtgtccagccgactctggagcccaggctgttgcttcccggtctggtggtgagtcctccattgtctgattgtgaagcctgtagcttggaagatacaggacataggtgaaagtgtttgtacctgcccgggcggccgctcgaagggcgaattccagcacactgggcggc

SEQ ID NO: 5448 - DNA, 293 bp, Homo sapiens
ccctttcgagcggccgcccgggcaggtacttgagaatggttcctcagttttggtctgtttggaggaaggctgggacatcactgcacaagtgacatccctggttcagttactcagtgatcccttttataggacacttgaaggcttccagatgttggttgaaaaagagtggctctcttttggtcacaaattcagtcagaggagcagcttgaccctcaactgtcaggggagtggttttgctccagtcttcttacagttcttagactgtgtacctcggcccgcgaccacgctaaggg

SEQ ID NO: 5449 - DNA, 447 bp, Homo sapiens
cccttagcgtggtcgcggccgaggtacaattatgatttctgaattaatattagagtggggagaacaatgattaatttttacttcttcagtaagattacaatgaaaatgtagagagcactagcattatagtaactatacgataggccactttaaataaaaggcatcttttacaaaatttttagtcaataaattgattaccacatacttacgacctatttgctattaagtgtaatttataattctagtattttcaaaaaaggaacatattaaaatcctatcaatatttcaaataatgacagaattaatcatttttaataagaatccttactcaggtccttcaaaaacaatataaactatgacttaaggtagattcctttaaatctgactaatgaataaatgttaaatctcaaatttcatagtcccagtgctggaaaacctatattttta

SEQ ID NO: 5450 - DNA, 484 bp, Homo sapiens
  misc_feature 131, 173, 294, 306, 344, 367, 393, 410, 422, 451, 480: n = A,T,C or G
cccttagcgtggtcgcggccgaggtaccatttgcctcccgggctcaagcgattctcctgcctcagcctcccaagtagctgggattacaggcacctgccaccatgcccggctaatttttgtaattttagtanagacagggtttcaccatgttgcccaggctggtttcgaactcntgacctcaggtgatccacccgcctcggcctcccaaagtgctgggattacaggcttgagcccccgcgcccaaccatcaaaatgctttttatttctgcatatgttgaatactttttacaattnaaaaaaatgatntttttttgaaggcaaaattgcaaatctttgaaaataanaaaggcaaaaatggtaaagggantcaaaacttttaaattaagttttttnggaagtgaaaaactggnaagcttatttgnatttaaaatttcccaaaacttttattacntttttcttggaattacaaatttttttttntttt

SEQ ID NO: 5451 - DNA, 514 bp, Homo sapiens
  misc_feature 336, 471: n = A,T,C or G
cccttagcgtggtcgcggccgaggtacgtccacccaaagttttaagtaattctcctctcacgtcgttcaagacaatgcattatgcatgtgcagcctacatatagaagatgctttttattactgttaacaatattaactaaaatttgcagaatatttattttaaaagcacttttattattactactactactgttaatagtattactaccactactaccacctcccttttgtaaaagaactaaagatcagaggagggaaacaacctgcttaaaattatatgaacactaagaaatgacggtaggactcaaactcaattcctatgactccaaaatctgngacttttttcttaaagttaaacccttttcatttttcaagtatgaaacccttcattcattcactcatatcttcatctactcaagaaatatttattaaacacctactacatgccagatgctaatctcaggccctcangaaacaattaagagtacctgcccgggcggccgctcgaaagggc

SEQ ID NO: 5452 - DNA, 279 bp, Homo sapiens
cccttcggccgcccgggcaggtacgcggggcagttgtccgcggttcctcctcctgtcgctgcccgtgtgattactgagactcagatggaccacacatccccgacctacatgcttgctaacttaacccacttgcattctgaacaacttctgcagggcttgaatcttcttcgccaacatcacgaactctgtgacatcattcttcgagtaggtgatgttaaaattcatgctcacaaagtggtacctcggccgcgaccacgctaagggcgaattccagcacac

SEQ ID NO: 5453 - DNA, 490 bp, Homo sapiens
  misc_feature 197, 464: n = A,T,C or G
ccctttcgagcggcccgcccgggcaggtacgtgaacacatagtcgtcattcttgctgcccctgcctgtgctcccttccatgaccgctagtgggagccaagggagataaggcccagcccttaggagttagggctgagaggggagcccacgctctcatacccagcaagctgcagagtgatcagacagcccattccctangatcgcaagtcctacagctggaaacagcggctcttcatcatcaacttcatctccttcttctcggccgctggctgtctactttcggcacaacatgtattgtgaggctggaggtgaagccaggataggatccacaggccggtcattaagtgggcttgcggggcagcaatgatgtttttgataatgggcaatggtcttggggactggctgccattgtgttctctgtggcaaaccaatggtgggtgtgatttatcaagaggcctctgagcnggtagctggaaattcaccatgtcctg

SEQ ID NO: 5454 - DNA, 682 bp, Homo sapiens
  misc_feature 421, 474, 583, 626, 646, 649, 665, 668, 671, 672: n = A,T,C or G
cccttagcgtggtcgcggcccgaggtacactaaaaagtatcctttttcagatatatttagtgctgttttttttcacatttttgtgcttttaattggtaatttcactgtttaaacactatattgtgacatctgaaatcattttgacctcagaatttgaaagaatggataaaagaatttggaaacatgtttttctttgttgttgttttttttgtttttttaggtaacattttaaaaattgtttattcctaccaagacccagttaataaaaaattttaccttatgggtaaaggatacacaggagctttccatatctgcaacttttccgtaaatctaaaattatttaaaaagaaattatctaaaagaatttagtctgtaatgaattttccacattatagaccactctcccaagtgtttgggaganggccaatgaaaagatgggacattttggcgtcatcaataattgcttggcctaanacctgtgcattctttggaaaatctggtatgggcatataactcctaactgaaaatcagtggttatggggaaccattctttaataattaaaaacatgtccttggtggttanggtttaaagccaccaaaaaaaatgtttggtgaacccctggaanccaaattattcccaagggtnttnttcaccccaaggggtnttntannttttaaaaaa

SEQ ID NO: 5455 - DNA, 425 bp, Homo sapiens
  misc_feature 3, 6, 17, 18, 19, 20, 21, 22, 25, 26, 27, 28, 29, 30, 31,32, 34, 35, 43, 44, 63, 83, 84, 85, 86, 87, 88, 89, 90,91, 92, 93, 94, 95, 96, 97, 98, 99, 100, 101, 102, 103,104, 105, 106, 150: n = A,T,C or G
ttnttntaattattttnnnnnnctnnnnnnnnannaaggtatnnggcgaatgggccctctatngcatgctcgagcggcgcatnnnnnnnnnnnnnnnnnnnnnnnncccttagcgtggtcgcggccgaggtacaaaaatatttaacaganctatgaaagatgcaggaaaggagtctttcttcgtagcaaagtagtcgtgctttgcatggtttcttttgtatactcttcagggtttgtattatctgccccatgaataacacagcacctgtaggattatgtcggatgaaaaacagaaaaggtctgtctactataaaccagggaggcgatgatcttgcaatgcccgcgtacactaggtaataaaactgattcatacagtctaatgatatcaccgctgttagggtttataaaaccgcatttaaaaaaga

SEQ ID NO: 5456 - DNA, 299 bp, Homo sapiens
cccttagcgtggtcgcggccgaggtacatgatacttgtagctagactacctctatttgaatctcaactcttatttcttatgtgaccttgggcaaattacttaacctctgtgtgcccagtttcctctcctgtaaaatgaatatattggaacctgtcttataggtttatggttaaacgtgcaggcacttagtaagcattacataagtcttagctattgatgcttttttttattagtaaaaatgtaaatgccaattttctatttttcttctccccatcctgatacccatatcagtgtgatct

SEQ ID NO: 5457 - DNA, 615 bp, Homo sapiens
  misc_feature 554: n = A,T,C or G
cccttagcgtggtcgcggccgaggtacctgagtccctaaaaggtaaagactcatccaagctgttctgagattccctccaggcagggaaatgactatctggatctgagattatgtcatcttcatcaagttcttctttaaccagagaggcttcgggtttcagacacacagaagcataattctggccatacaaaaacctcaatgtttcttctgtcttccactcaatcaaagtctccttcaaaactttaagtaagtttctctttccaacttcaggacacacctgcactgaactagacactgacctagacacttgggtttgatttggcaaattttctcttaaaaatgctctgcacttttcttacttatgcctactagaagttattttctgacctactgtattcactttcagaattttctgacgcttttaatctttcaggcaaagtgctatttgaagaactctgagtatttactttctgtaaaggaagttcacatgtagcatctttctcctgactatctaatttgcaatcgcctaactgctcagtgacatctactactgnctgttctttgtctttgggtttggagttaagctttggtgaccagctttctttttcattatgc

SEQ ID NO: 5458 - DNA, 407 bp, Homo sapiens
cccttagcgtggtcgcggccgaggtactatcccagccccccaggttcgcctaatagtcttggctacttccctacagctgctaatcttagcggtgtccctccacagcctggcacggtggtcagaatgcagggcctggcctacaatactggagttaaggaaattcttaacttcttccaaggttaccagtatgcaaccgaggatggacttatacacacaaatgaccaggccaggactctacccaaagaatgggtttgtatttaagggccccagcagttagaacatcctcagaaaagaagtgtttgaaagatgtatggtggatcttgaaacctccagacaccaagaaaacttctagcaaattcagggggaagtttgtctacactcaggctgcagtattttcagcaaacttg

SEQ ID NO: 5459 - DNA, 681 bp, Homo sapiens
  misc_feature 348, 351, 426, 477, 479, 539, 564, 594, 601, 617, 624, 631,643, 660, 664: n = A,T,C or G
cgccagttgtgatgggatatctgcagaattcgccctttagcggcccgcccgggcaggtacgcgggattgtaggtgctatttagggtaggcttaaagtgctgggtggtgatttgagttcaaacaataaaaaattgattttttcaatattgtataaacaatagtgttctaattaccttaaaaaaaaataatgaccagttaagaattgcttttgatcttgtcaaaaaactgaatagaccccagtttcgggaaggtgtgtgagcagtgccatgactctgccccttacctaatcccacatctctctaatgataagacattgctcgcctcttgaccagagccccagcaccaganagncggaagatgcagaattgtcaaatgacctgctgggggaggttgtaggaagtttaacagatttgagtgtggctgcanaaaaaaaaaagtgtgtgtatgtgtgcacatgtgtgaaaagtgtgaaccaanantgtgtgtgtgtcccatctaagtctgtgtgatgaaaggggggaataaggctcctctgttantgctggaaagctcctgtaattgccncatggatcccactgtgccctcttgttctgngcaagtntgtcctgtctggggcnctaaccntggtccntgcattttaatnttctgggtggggctttncctntcccttggaaactgact

SEQ ID NO: 5460 - DNA, 384 bp, Homo sapiens
  misc_feature 188, 189, 190, 191, 194, 197, 202, 203, 204, 206, 208, 209,212, 216, 219, 221, 224, 229, 230, 238, 240, 242, 246, 251,253, 261, 263, 278, 301, 305, 317, 384: n = A,T,C or G
cccttagcggccgcccgggcaggtaccccagctactcgagaggatcgcctgagcccagtgaagctgcagcgagctgtgaggatgccaccgcactccggcctgggctaaaaagctagatcgtgtctctgataaaagaataaaagctgtttattgcagtcctaaaaaaaaaaaaaaaaaaaaaaaaaaannnnccnggnccgcnnncncnntgngggnaantnccnccccnnggggggcncntnttangggancnacttgggngnccaaggggggagaanagcggtgaacctggaatgtgggnggtngcagtgaggtcnagatcctgcccacttgcactccagcctggggcaaccaagcgaggactctgcctttaaaaaaaaaaan

SEQ ID NO: 5461 - DNA, 614 bp, Homo sapiens
  misc_feature 19, 31, 32, 35, 37, 38, 286, 314, 315, 316, 318, 322, 326,331, 333, 334, 335, 336, 337, 338, 347, 348, 361, 368, 373,381, 382, 388, 389, 405, 410, 422, 423, 426, 431, 439, 441,449, 455, 459, 460, 465, 468, 494, 498, 505, 508, 513: n = A,T,C or G
  misc_feature 514, 522, 529, 533, 535, 536, 540, 542, 565, 566, 573, 574,576, 578, 590, 598, 599, 601: n = A,T,C or G
cccttagcgtggtcgcggncgaggtacaatnnttnanngtgctgtgtcctaaaggggatcctgaggggcgttgcctcgggtagttaaagtcttatgtgtgcataagttgcttattctttgtctacttcctatttgagatgttagtagagaactgtcctgggtgaatctttcagtattgcagggcttggcaacttgctgcccgacaaaatacatcagaatttctctttaagaacaatatgggatggattaaaaaatatatatatgggatgaaattgggggtactttntttttttttttttttttttttgcccccnnngncccnaaanttttnannnnnnaaaaaaaannttttttttaaaantttttcnccggnaaaacccnntttttnngggggggccccccccnccccnttttaaaaaaannaantcctnaaaaaaantncccccaancctttngaannttttnccncggggggaaaaaaaaaatttgggggngttnccccccnggnatttnnaaaggggnccccccnaaanannaccncnggggcccccaaaaatttttgggnnaaaaacnnangngggccccccccnttttttannanggggggaaaaaaa

SEQ ID NO: 5462 - DNA, 657 bp, Homo sapiens
  misc_feature 14, 16, 19, 24, 28, 30, 33, 35, 40, 43, 44, 70, 89, 111,127, 131, 144, 153, 161, 162, 172, 198, 199, 202, 204, 205,211, 225, 229, 232, 236, 240, 242, 249, 252, 259, 268, 271,279, 285, 290, 292, 306, 313, 325, 327, 337, 340, 344: n = A,T,C or G
  misc_feature 350, 365, 370, 371, 373, 376, 377, 378, 382, 397, 412, 416,430, 434, 450, 471, 480, 486, 492, 504, 509, 540, 541, 546,547, 550, 557, 558, 585, 594, 595, 598, 599, 600, 611, 613,628, 639, 642, 648: n = A,T,C or G
cccttagcggccgncnggncaggnacananctnanaattntgnngctaatgacactggcttcacagtggncccacctggaaaggagaangccctgatgaaagcaggcgcanctgtggggcccatctncgtngctatggatgcangccattcgnccttccanntctacaaatnaggcatttattttgaaccaaactgcnncancnnaaaccnggatcatggtgttntggnggntggntacngntttgaangancaaattngaataacancangtattggntcgtgnaaaananctggggtccataanggggctncgaatggctatntnaaaatacccnacnacangaacanccactgtggaatagncacannanccnnntacnccaatgtgtgagctnatggatggtgaggangaangacttaatgacagncctntctggggaaattttantttgaaactgaccaaaacgcntattgttgntacatnaaccanttgaatcattgnggatncaaggtgaaattttaattcttgtggacattnntacannggngaaatgnnccccctacctttaattatttggtatanccggctttnntgnnnttcaagaaccncnatgttaatttttaanaaatttttggnaantttttntttttttaa

SEQ ID NO: 5463 - DNA, 305 bp, Homo sapiens
  misc_feature 8, 10, 14, 32, 37, 40, 41, 73, 75, 95, 115, 160, 202, 203,210, 213, 224, 227, 229, 230, 242, 247, 252, 267, 270, 271,287: n = A,T,C or G
cccttagngnggtnggggccgaggtactaaanaaaanctnntttcaggcatattacttgaggtcaggagttcnanaccagcttggccaccatggngaaaccccatctctactaanaatttaaaaattagctaggcatggtggcatgcacctgcagtcccngctactctggaggctgaggcaaggaaaaatcacttgaagccnngaagcanagnggagcagtganccnannattgggccactncactnttggnctggggccaaccaanaanngggggaccttcctttnaccccttaaaaaaacaac

SEQ ID NO: 5464 - DNA, 300 bp, Homo sapiens
ccctttcgagcggccgcccgggcaggtacacttcaccacaaatacagagaagcttcaaaaactgaagctcgaatatgagactcaaattaagaagatgctatgctcaaaagatagcctgggactaaaagaggaactgacagatgaagacagagaaaaggttgcggtgcaggaggggattaactcaggaacagccatgtcaagaggattgtatcaaccagcaacaatctttatgggcccgccaaatgtcagccatcttaagcatgagagatttcagtacctcggccgcgaccacgctaaggg

SEQ ID NO: 5465 - DNA, 411 bp, Homo sapiens
  misc_feature 334: n = A,T,C or G
ccctttcgagcggccgcccgggcaggtacaaatttttaaattatattttttgtagtaatatgttataaagcattgatttgttatatttttaaatttatcatactttaaacaaaacagatttaaacaacttcaatggattttggaaatagccattataaacaatcttataactgaaggttttatttttactaataatttaagttgtgttattcttatacatatttaggttttgaaatttttataaaggtctaaggctgggcgcagtggctcatgcctgtaatcccagcactttgggaggccaaggcaggtggatcacctgaggttgggagtttcnagacaagcctgaccaacatggagaaacccacatctctactaaaaatacaagaattagccaggccgtggtggtgcatg

SEQ ID NO: 5466 - DNA, 345 bp, Homo sapiens
  misc_feature 115, 144, 153, 155, 156, 157, 161, 163, 164, 167, 168, 170,171, 172, 173, 179, 186, 187, 189, 190, 192, 194, 195, 196,197, 200, 201, 202, 206, 207, 209, 211, 221, 256, 257, 265,272, 273, 274, 276, 283, 287, 288, 290, 291, 293, 295: n = A,T,C or G
  misc_feature 309, 314, 315, 327, 331, 332, 333: n = A,T,C or G
ccctttcgagcggccgcccgggcaggtacttttttttttttttttttttttttattttttttttttttttttttttttttttttttttttttttttttttttttttttttttttnttttttttttttttttttttccccccctnaaaaaaaanannnaaancnnttnnannnnaaaaanttttttnnanncncnnnnaannncccnntnanaaaaaaaaanaaaaaaaaaaatttttttttttttaaaaaaaaaanncccccccnttttttnnntnaaaaatntttnncnntnanttttttttatgggnaaaannttttaaaaaaantttnnnaaatttttttaa

SEQ ID NO: 5467 - DNA, 310 bp, Homo sapiens
cccttgagcggccgcccgggcaggtacaaaaaaaatgctgaaaggcagcgttttttagactctaaacattctgattttgaaggtgggtgttggaacgactgatgatgttttttatatcatcaattcagccaatggatgcgaacttaaaatctggattcacagaaccgtggtcacatttccccatcaaaatccccaaggcgggtcccaagttctctcctctacgctcattgcagaaatactttgaaataggttctgccagtctacaatagcagtgaagactgacaaatcagatattcccaatgactgacag

SEQ ID NO: 5468 - DNA, 475 bp, Homo sapiens
  misc_feature 1, 16, 64, 109, 115, 133, 139, 166, 180, 186, 187, 207, 209,214, 219, 227, 230, 233, 256, 274, 275, 283, 286, 291, 294,298, 300, 331, 344, 349, 354, 374, 378, 385, 388, 409, 416,421, 422, 429, 430, 433, 436, 437, 439, 446, 447: n = A,T,C or G
  misc_feature 449, 453, 456, 458, 462, 464: n = A,T,C or G
ncccttagcgtggtcncggccgaggtacctgggaagcagctcccacaacggctgaggcactcanaggcagagctttctgcttctgtctcatgccgttcctgtgttgatntggatnagtcatgcaattattttnaatcanaaggcttcctaaataaatcaattgccntcaaccggggtaanttttcnnaaaaaatgaaaaattttttnanattgnaaagncaaaatantantgncgcctttggaaccaattccctcnttaaaaatattgttaaannccttttcnacngtttngantacnantgttaatatcttactaaaacccaagctgtanttaatttaatttnatccnttttngttttcaaatatctttttanaaanaattccntantttcaaaatatcaaccattcncattttnttttnncccaagnntcnctnngnacccaanntntaanaangnaatngnaaaaaaaaaat

SEQ ID NO: 5469 - DNA, 293 bp, Homo sapiens
  misc_feature 30, 39, 45, 107, 114, 170, 202: n = A,T,C or G
cccttagcgtggtcgcggccgaggtaccgntacaccccnctgctnggttggctcctcactcccaacatctacctcagcgagctctttggaaagtttctcttcatcanctgcganctcctcaccgctttcctcttataccgcctgctgctgctgaaggggctggggcgccnccaggcttgtggctactgtgtcttttggcttnttaaccccctgcctatggcagtatccagccgcggtaatgcggactctattgtcgcctccctggtcctgatggtcctctacttgataaagaa

SEQ ID NO: 5470 - DNA, 389 bp, Homo sapiens
  misc_feature 140, 173, 179, 234, 239, 301, 303, 365: n = A,T,C or G
tgtgatgggatatctgcagaattcgccctttcgagcggcccgcccgggcaggtacaccgtgcacctgggcagtgatacgctgggcgacaggagagctcagaggatcaaggcctcgaagtcattccgcaccccggtactcncacagacccatgttaatgacctcatgctcgtgnaagctnaatagccaggccaggcttgtcatccatggtgaaagaaagtcaggctgccctcccnttgcnaacccctggaaccaccttgcacttgtctccgcttgggcactaaccacgagccagatgtggancntttccctctgacctcatgtgccgtggattgtcaaagcttaatctcccccaagacttgcaccnaaggttacaaggacttactggaaa

SEQ ID NO: 5471 - DNA, 324 bp, Homo sapiens
  misc_feature 25, 96, 120, 266, 269, 302: n = A,T,C or G
cccttagcgtggtcgcggccgaggnactttttttttttttttttttttttttttttgggggggttgttttaaaaagtgctaacaaagcccactatnaacaacaaaggaatgatgcattgngcttctggatatatattttggccttcagacacattggtaacaagataaatccctgagccctactcacaggaatcaaactgacagctacaggaatgttagtaaacttgtctatgataggcaattcctagggatttacatcttggttntanaccttaactgagaaattcttgcattttccaagnttggcttttacatttatgggtt

SEQ ID NO: 5472 - DNA, 187 bp, Homo sapiens
cccttcggccgcccgggcaggtactgtgcagtagtaaccataattctaaatgaggattatggatttttctggaagattcttttttcctgtggaacatgatgagaaatgtttaggagaggggacatagccatttttgtatgaagaccaattcaagaaaaaaatatatgtatgtgtgtgggtgtatatg

SEQ ID NO: 5473 - DNA, 784 bp, Homo sapiens
  misc_feature 387, 461, 552, 558, 623, 634, 639, 641, 686, 690, 700, 726,727, 745, 746, 769: n = A,T,C or G
ccctttagcggccgcccgggcatgtacttgaacgagcaaagccagaatatatcagcaaaacatacaagattgattcttgggagaatgctgaggactttcttgagaagctcgctttccggactgggaagttactaaagggtggagagcccgacttgcagactgtgggtaagatggtcctcaatgactggcagaggggcccggattcctttctttgtcaagccacccaatgcagagccacttgtggccccccagcttctaccctctcatctttggaaagttgtcccagaagcagcccagaacaatccagggggaggaagtcacaaaaactgcaggtgaaggggtcagaatccatcattaaggaaagaaacagaagaaaacagtcactgngatgctaacacagagatgcagcagattctcacaccagttccgcagaactttggtaaaatcaaccgtggtgcccnaattttcttggggatgacctgggttcctgtggaggtgtcaaaatctttgaggaagagcttgagaaccttttcttgatgaaaaaggaagganggaacnagggacccaccaaaaaaaatgatgccggaaaaatttttccttggaacccggaggaggaaaatgtnggaaaaccacncccananccgttttaaaagccctggatgaaaaaaatggccaatattaaaaantttntagaccaaanccaaacccaaaaagttttaccagtcnnaatttccaggggcctgannggaaaaaatttgcaaaacctganaaccaaaaaaaaaaa

SEQ ID NO: 5474 - DNA, 369 bp, Homo sapiens
  misc_feature 14, 118, 167, 175, 181, 191, 249, 319: n = A,T,C or G
ccctttcgagcggncgcccgggcaggtaccaggtcttctatgtgggtgtcaggatatgctccctcacggcttccgaaggcccccagcaaaagatctaacattcttgctcaaagttgcnagagaaagtatcacatggagtagctgggttggggcggcggcctcttctnttcagctnccttancttggctccntaagtggatcacttaccaaatgctttagatgattgcctctcaataattgaaaggtggnggtagttgtattgctgcacttgtcggtgttaaagagaaattactctcacaagagcagaggcctgaagatnctttcttctgaaggggatgatgagcctggactctctgggactcctagatt

SEQ ID NO: 5475 - DNA, 332 bp, Homo sapiens
  misc_feature 150, 170, 192, 214, 229, 236, 248, 274, 276, 320: n = A,T,C or G
cccttagcgtggtcgcggccgaggtacactgaatactacaaaatattgcttaaataaattatttgaaaagctaaataaatgaagttatgtataatgcttatgaattggaatactcagtaagtattgggatgtcgaagttacctctctttntttttttttttttttttttntttttgagatggagtctcgctntgtcacccaggctgaagtgcantggcgcgatctcggntcactgnaagctccgcctnctgggttcacgccattctcctgcctnancctcccaagtagctgggactacaggcacccgccaccacgccagntaatttttttgt

(The sequence listing continues in the following parts.)
